United States Patent Application Publication US 2005/0244851 A1 - sequence listing, part 95

SEQ ID NO: 3702324 - DNA, 25 bp, Homo sapien
gaaaatggtctagggaggatttctg

SEQ ID NO: 3702325 - DNA, 25 bp, Homo sapien
ggtctagggaggatttctgagaatc

SEQ ID NO: 3702326 - DNA, 25 bp, Homo sapien
gagagggaaaatggtctagggagga

SEQ ID NO: 3702327 - DNA, 25 bp, Homo sapien
aatggtctagggaggatttctgaga

SEQ ID NO: 3702328 - DNA, 25 bp, Homo sapien
tacggatcttgagggtgtcaccatc

SEQ ID NO: 3702329 - DNA, 25 bp, Homo sapien
cgaactaatacagtggtctacggat

SEQ ID NO: 3702330 - DNA, 25 bp, Homo sapien
tgtcaccatcatgaaatagcctggg

SEQ ID NO: 3702331 - DNA, 25 bp, Homo sapien
gagtggatgttcagaccttcaagcc

SEQ ID NO: 3702332 - DNA, 25 bp, Homo sapien
agaaggaagagcacccatacgtccg

SEQ ID NO: 3702333 - DNA, 25 bp, Homo sapien
cagttcaatgatacacccagagtcc

SEQ ID NO: 3702334 - DNA, 25 bp, Homo sapien
tgcagggccatacccagaaggaaga

SEQ ID NO: 3702335 - DNA, 25 bp, Homo sapien
cattggttgtgagacatttgcaggc

SEQ ID NO: 3702336 - DNA, 25 bp, Homo sapien
cactctccctcactgccagtggccc

SEQ ID NO: 3702337 - DNA, 25 bp, Homo sapien
cctcactctccctcactgccagtgg

SEQ ID NO: 3702338 - DNA, 25 bp, Homo sapien
tcactctccctcactgccagtggcc

SEQ ID NO: 3702339 - DNA, 25 bp, Homo sapien
ctcactctccctcactgccagtggc

SEQ ID NO: 3702340 - DNA, 25 bp, Homo sapien
ccagcacctcgagctccccgaagcc

SEQ ID NO: 3702341 - DNA, 25 bp, Homo sapien
ctcgagctccccgaagccagtgggc

SEQ ID NO: 3702342 - DNA, 25 bp, Homo sapien
gcacctcgagctccccgaagccagt

SEQ ID NO: 3702343 - DNA, 25 bp, Homo sapien
tcgagctccccgaagccagtgggca

SEQ ID NO: 3702344 - DNA, 25 bp, Homo sapien
tgggtcctcagaacccactgggccc

SEQ ID NO: 3702345 - DNA, 25 bp, Homo sapien
cccgctgcaccccaggttctgcctg

SEQ ID NO: 3702346 - DNA, 25 bp, Homo sapien
ctgggtcctcagaacccactgggcc

SEQ ID NO: 3702347 - DNA, 25 bp, Homo sapien
ggcccccgctgcaccccaggttctg

SEQ ID NO: 3702348 - DNA, 25 bp, Homo sapien
ctcacaggttcaattgtcagaacac

SEQ ID NO: 3702349 - DNA, 25 bp, Homo sapien
acaggttcaattgtcagaacacccc

SEQ ID NO: 3702350 - DNA, 25 bp, Homo sapien
gaaggcagccaatgggaccggacac

SEQ ID NO: 3702351 - DNA, 25 bp, Homo sapien
caatgggaccggacacccagctggg

SEQ ID NO: 3702352 - DNA, 25 bp, Homo sapien
aagggacttggttccagccacacaa

SEQ ID NO: 3702353 - DNA, 25 bp, Homo sapien
tctttacaaccacccattcggaatg

SEQ ID NO: 3702354 - DNA, 25 bp, Homo sapien
taggtacctcgcagacccaggttgc

SEQ ID NO: 3702355 - DNA, 25 bp, Homo sapien
cccggctggagggacatgaaaagtc

SEQ ID NO: 3702356 - DNA, 25 bp, Homo sapien
attgacactgtctctagctctggcc

SEQ ID NO: 3702357 - DNA, 25 bp, Homo sapien
agaaaacgtgctgatgatttctctg

SEQ ID NO: 3702358 - DNA, 25 bp, Homo sapien
ccatcaatttagcttgggctggccc

SEQ ID NO: 3702359 - DNA, 25 bp, Homo sapien
tctccattgtcagttctcattaggt

SEQ ID NO: 3702360 - DNA, 25 bp, Homo sapien
tgaggcacaatgtacgctacttggg

SEQ ID NO: 3702361 - DNA, 25 bp, Homo sapien
gctaaaccgtgagtacgcaaaggca

SEQ ID NO: 3702362 - DNA, 25 bp, Homo sapien
tgagaagcacttacctgcaggacag

SEQ ID NO: 3702363 - DNA, 25 bp, Homo sapien
gagagacccgaccttgaattttggc

SEQ ID NO: 3702364 - DNA, 25 bp, Homo sapien
cttgcagaaagagaagatggtcagg

SEQ ID NO: 3702365 - DNA, 25 bp, Homo sapien
agaaagagaagatggtcagggtatt

SEQ ID NO: 3702366 - DNA, 25 bp, Homo sapien
aaagagaagatggtcagggtattga

SEQ ID NO: 3702367 - DNA, 25 bp, Homo sapien
gcagaaagagaagatggtcagggta

SEQ ID NO: 3702368 - DNA, 25 bp, Homo sapien
actgtccgcaagagccaagctcagc

SEQ ID NO: 3702369 - DNA, 25 bp, Homo sapien
tgtccgcaagagccaagctcagcac

SEQ ID NO: 3702370 - DNA, 25 bp, Homo sapien
ctgtccgcaagagccaagctcagca

SEQ ID NO: 3702371 - DNA, 25 bp, Homo sapien
gtccgcaagagccaagctcagcacc

SEQ ID NO: 3702372 - DNA, 25 bp, Homo sapien
cccagagcctgtggactggggaggg

SEQ ID NO: 3702373 - DNA, 25 bp, Homo sapien
cagagcctgtggactggggaggggg

SEQ ID NO: 3702374 - DNA, 25 bp, Homo sapien
cctgtggactggggagggggctggt

SEQ ID NO: 3702375 - DNA, 25 bp, Homo sapien
tgtggactggggagggggctggtac

SEQ ID NO: 3702376 - DNA, 25 bp, Homo sapien
ctgcccagggcccaggggtcaggcc

SEQ ID NO: 3702377 - DNA, 25 bp, Homo sapien
ccagggcccaggggtcaggccccag

SEQ ID NO: 3702378 - DNA, 25 bp, Homo sapien
ccaggggtcaggccccaggcaggac

SEQ ID NO: 3702379 - DNA, 25 bp, Homo sapien
gggcccaggggtcaggccccaggca

SEQ ID NO: 3702380 - DNA, 25 bp, Homo sapien
ctgtaagtagtaaaaatgcccttgg

SEQ ID NO: 3702381 - DNA, 25 bp, Homo sapien
agtagtaaaaatgcccttggcctgg

SEQ ID NO: 3702382 - DNA, 25 bp, Homo sapien
aagtagtaaaaatgcccttggcctg

SEQ ID NO: 3702383 - DNA, 25 bp, Homo sapien
tgtaagtagtaaaaatgcccttggc

SEQ ID NO: 3702384 - DNA, 25 bp, Homo sapien
tcgttcttcagaatcaatctggaat

SEQ ID NO: 3702385 - DNA, 25 bp, Homo sapien
aggtttcagcaacccctgtcttcca

SEQ ID NO: 3702386 - DNA, 25 bp, Homo sapien
tgtcttccagaaatcagctgtcgtt

SEQ ID NO: 3702387 - DNA, 25 bp, Homo sapien
catctctttcatcaggtttcagcaa

SEQ ID NO: 3702388 - DNA, 25 bp, Homo sapien
gacactagctagttatgactgcccc

SEQ ID NO: 3702389 - DNA, 25 bp, Homo sapien
tgaagctgtgatggaagaccctggt

SEQ ID NO: 3702390 - DNA, 25 bp, Homo sapien
tgactttgactgcaccatggttggg

SEQ ID NO: 3702391 - DNA, 25 bp, Homo sapien
tccaggagcccagatacatacgggt

SEQ ID NO: 3702392 - DNA, 25 bp, Homo sapien
tatgaggcgttggagctcaagtaac

SEQ ID NO: 3702393 - DNA, 25 bp, Homo sapien
tgaggcgttggagctcaagtaactg

SEQ ID NO: 3702394 - DNA, 25 bp, Homo sapien
aggcgttggagctcaagtaactggg

SEQ ID NO: 3702395 - DNA, 25 bp, Homo sapien
ctatgaggcgttggagctcaagtaa

SEQ ID NO: 3702396 - DNA, 25 bp, Homo sapien
ctctgaagagggccttaatattggt

SEQ ID NO: 3702397 - DNA, 25 bp, Homo sapien
tctgaagagggccttaatattggtg

SEQ ID NO: 3702398 - DNA, 25 bp, Homo sapien
gtacagcttggagtgtgtgttcctg

SEQ ID NO: 3702399 - DNA, 25 bp, Homo sapien
tctcctccgatcctttccacctccc

SEQ ID NO: 3702400 - DNA, 25 bp, Homo sapien
gggcaccagtgacctctcctccgat

SEQ ID NO: 3702401 - DNA, 25 bp, Homo sapien
gtgacctctcctccgatcctttcca

SEQ ID NO: 3702402 - DNA, 25 bp, Homo sapien
accagtgacctctcctccgatcctt

SEQ ID NO: 3702403 - DNA, 25 bp, Homo sapien
gggtgcagtagtggtgataacgccc

SEQ ID NO: 3702404 - DNA, 25 bp, Homo sapien
gcagtagtggtgataacgcccccat

SEQ ID NO: 3702405 - DNA, 25 bp, Homo sapien
gtgcagtagtggtgataacgccccc

SEQ ID NO: 3702406 - DNA, 25 bp, Homo sapien
ggtgcagtagtggtgataacgcccc

SEQ ID NO: 3702407 - DNA, 25 bp, Homo sapien
gcatatgacaggagagacccatgag

SEQ ID NO: 3702408 - DNA, 25 bp, Homo sapien
ttgaggctgtgctggctatagacct

SEQ ID NO: 3702409 - DNA, 25 bp, Homo sapien
ttccaaagaggacatgccatggttt

SEQ ID NO: 3702410 - DNA, 25 bp, Homo sapien
tgactatggcaagggaagttctgtg

SEQ ID NO: 3702411 - DNA, 25 bp, Homo sapien
ctatcgccactcaaaatgatgagac

SEQ ID NO: 3702412 - DNA, 25 bp, Homo sapien
gccactcaaaatgatgagaccgatg

SEQ ID NO: 3702413 - DNA, 25 bp, Homo sapien
tcaaaatgatgagaccgatggcagc

SEQ ID NO: 3702414 - DNA, 25 bp, Homo sapien
gatgagaccgatggcagcattttgg

SEQ ID NO: 3702415 - DNA, 25 bp, Homo sapien
tgctctcagtatagaaagggctttg

SEQ ID NO: 3702416 - DNA, 25 bp, Homo sapien
tttagaaacagatggccaaggtgac

SEQ ID NO: 3702417 - DNA, 25 bp, Homo sapien
caaacaattctctgtgggcacaata

SEQ ID NO: 3702418 - DNA, 25 bp, Homo sapien
gctttgatctaaggcctctggcaca

SEQ ID NO: 3702419 - DNA, 25 bp, Homo sapien
agagcaccagagagacggctgagtt

SEQ ID NO: 3702420 - DNA, 25 bp, Homo sapien
gccacacgaagagcaccagagagac

SEQ ID NO: 3702421 - DNA, 25 bp, Homo sapien
cagcatgtccccagtggctcatagt

SEQ ID NO: 3702422 - DNA, 25 bp, Homo sapien
tcatagtcgtagtgaccccaaccca

SEQ ID NO: 3702423 - DNA, 25 bp, Homo sapien
gagatggccactcttccccagtttc

SEQ ID NO: 3702424 - DNA, 25 bp, Homo sapien
tgaagaggggcatggcgaagttgaa

SEQ ID NO: 3702425 - DNA, 25 bp, Homo sapien
cagtttctgctccatgagactgtag

SEQ ID NO: 3702426 - DNA, 25 bp, Homo sapien
taggaagtgatcgtgatgaagaggg

SEQ ID NO: 3702427 - DNA, 25 bp, Homo sapien
taacatcctatgctgtgcacaagct

SEQ ID NO: 3702428 - DNA, 25 bp, Homo sapien
tctgggtgaatctgagcagtcctga

SEQ ID NO: 3702429 - DNA, 25 bp, Homo sapien
cactgaaaacgcagaaaacccctgg

SEQ ID NO: 3702430 - DNA, 25 bp, Homo sapien
cacggatgtgtccagtagggagccc

SEQ ID NO: 3702431 - DNA, 25 bp, Homo sapien
aacacgcggacgtgcaattctgacg

SEQ ID NO: 3702432 - DNA, 25 bp, Homo sapien
taatttcagcgggagctgccaagtt

SEQ ID NO: 3702433 - DNA, 25 bp, Homo sapien
tagaaccaactcgtcatccacagct

SEQ ID NO: 3702434 - DNA, 25 bp, Homo sapien
gtctgggctcccaatgtgaaataca

SEQ ID NO: 3702435 - DNA, 25 bp, Homo sapien
gagatggaagtcacgtctgcgatga

SEQ ID NO: 3702436 - DNA, 25 bp, Homo sapien
gactgcgtatagatacaggatggca

SEQ ID NO: 3702437 - DNA, 25 bp, Homo sapien
gagcagcagcgtccttgctggcaga

SEQ ID NO: 3702438 - DNA, 25 bp, Homo sapien
cagccgagcagcagcgtccttgctg

SEQ ID NO: 3702439 - DNA, 25 bp, Homo sapien
gagaacaaagatggagaggggtcta

SEQ ID NO: 3702440 - DNA, 25 bp, Homo sapien
ttttaggtactagaagtatctgtac

SEQ ID NO: 3702441 - DNA, 25 bp, Homo sapien
agagaacaaagatggagaggggtct

SEQ ID NO: 3702442 - DNA, 25 bp, Homo sapien
aacaaagatggagaggggtctagtt

SEQ ID NO: 3702443 - DNA, 25 bp, Homo sapien
ttgatggcattgatcgtgggcacca

SEQ ID NO: 3702444 - DNA, 25 bp, Homo sapien
ccattttggcaatgagggcgggcac

SEQ ID NO: 3702445 - DNA, 25 bp, Homo sapien
gcccagggcatagttgatggcattg

SEQ ID NO: 3702446 - DNA, 25 bp, Homo sapien
ccctcttctgcggtgagaggcactg

SEQ ID NO: 3702447 - DNA, 25 bp, Homo sapien
tgagaccttatctcacacaagtgag

SEQ ID NO: 3702448 - DNA, 25 bp, Homo sapien
aatacatacacgtggctaagaagca

SEQ ID NO: 3702449 - DNA, 25 bp, Homo sapien
gggctgtgaccgacactcaggtcca

SEQ ID NO: 3702450 - DNA, 25 bp, Homo sapien
gaatgaacaacgtgcagaaccggag

SEQ ID NO: 3702451 - DNA, 25 bp, Homo sapien
tgaggtcccataagcaaaccctggg

SEQ ID NO: 3702452 - DNA, 25 bp, Homo sapien
tcaactcaaggatagacacggtggc

SEQ ID NO: 3702453 - DNA, 25 bp, Homo sapien
aagactgagtccctgcaaggcatgg

SEQ ID NO: 3702454 - DNA, 25 bp, Homo sapien
tacatggtgtttgaatgctggcagc

SEQ ID NO: 3702455 - DNA, 25 bp, Homo sapien
cacaggcactgaggttgacacaaga

SEQ ID NO: 3702456 - DNA, 25 bp, Homo sapien
cctaaaagtgcttgggaacatgggc

SEQ ID NO: 3702457 - DNA, 25 bp, Homo sapien
cacaagagcatgtgtcctgggcaaa

SEQ ID NO: 3702458 - DNA, 25 bp, Homo sapien
caggcgggactctggtcattcctca

SEQ ID NO: 3702459 - DNA, 25 bp, Homo sapien
acagatatacattcagggatgggga

SEQ ID NO: 3702460 - DNA, 25 bp, Homo sapien
cctgcattagtgtcacaaacccaga

SEQ ID NO: 3702461 - DNA, 25 bp, Homo sapien
tcagggccccgggtctcaccagata

SEQ ID NO: 3702462 - DNA, 25 bp, Homo sapien
ccgggtctcaccagatatacagata

SEQ ID NO: 3702463 - DNA, 25 bp, Homo sapien
tggggaatgacgctcagcaaactca

SEQ ID NO: 3702464 - DNA, 25 bp, Homo sapien
ggtcacaagtgaatggagaaaaaag

SEQ ID NO: 3702465 - DNA, 25 bp, Homo sapien
tccgctctgtgggacggagcttgct

SEQ ID NO: 3702466 - DNA, 25 bp, Homo sapien
taaaattcattgtgtctgcaggggg

SEQ ID NO: 3702467 - DNA, 25 bp, Homo sapien
tgctagtgatgactaacatgggcgg

SEQ ID NO: 3702468 - DNA, 25 bp, Homo sapien
cagggctgcacggaacttggagaga

SEQ ID NO: 3702469 - DNA, 25 bp, Homo sapien
ctgcacggaacttggagagagcact

SEQ ID NO: 3702470 - DNA, 25 bp, Homo sapien
gagcactgtggtgctagtgatgact

SEQ ID NO: 3702471 - DNA, 25 bp, Homo sapien
ttccccgggcctccagtgaagatgc

SEQ ID NO: 3702472 - DNA, 25 bp, Homo sapien
caggagaagttaggctggttccccg

SEQ ID NO: 3702473 - DNA, 25 bp, Homo sapien
ctgagccctcgagctctgcagatga

SEQ ID NO: 3702474 - DNA, 25 bp, Homo sapien
ggctctagcacagtctctgctattt

SEQ ID NO: 3702475 - DNA, 25 bp, Homo sapien
tctggtgcttgatgcttgctggttc

SEQ ID NO: 3702476 - DNA, 25 bp, Homo sapien
agtgattgctggaggtgacattttc

SEQ ID NO: 3702477 - DNA, 25 bp, Homo sapien
tgtgtctgcatatcaatgtggtctt

SEQ ID NO: 3702478 - DNA, 25 bp, Homo sapien
gcttgctggttctggacgtccacct

SEQ ID NO: 3702479 - DNA, 25 bp, Homo sapien
tcgcatcgagcacgtgtctgacaca

SEQ ID NO: 3702480 - DNA, 25 bp, Homo sapien
gacacaatcctatgggatcagggct

SEQ ID NO: 3702481 - DNA, 25 bp, Homo sapien
aaaggatcttggtactgcgtcgtcg

SEQ ID NO: 3702482 - DNA, 25 bp, Homo sapien
ttgactcccaaggttacccagcgag

SEQ ID NO: 3702483 - DNA, 25 bp, Homo sapien
tcaaggagtcctttaatcacttcct

SEQ ID NO: 3702484 - DNA, 25 bp, Homo sapien
ttcctgtttaacttgagaagagttg

SEQ ID NO: 3702485 - DNA, 25 bp, Homo sapien
tcctgtttaacttgagaagagttgg

SEQ ID NO: 3702486 - DNA, 25 bp, Homo sapien
cttcctgtttaacttgagaagagtt

SEQ ID NO: 3702487 - DNA, 25 bp, Homo sapien
tgcaatttgtctcttgtggccaagc

SEQ ID NO: 3702488 - DNA, 25 bp, Homo sapien
tagataagtgacaaggtgactgagc

SEQ ID NO: 3702489 - DNA, 25 bp, Homo sapien
cccatgccaacaaggtgacccagta

SEQ ID NO: 3702490 - DNA, 25 bp, Homo sapien
gcctggtgctcttgcatagaatttt

SEQ ID NO: 3702491 - DNA, 25 bp, Homo sapien
ccttagaagctggttaaatagtctc

SEQ ID NO: 3702492 - DNA, 25 bp, Homo sapien
aaatagtctctatagggctgtcgtc

SEQ ID NO: 3702493 - DNA, 25 bp, Homo sapien
cagggttcaattagagaagcaaacc

SEQ ID NO: 3702494 - DNA, 25 bp, Homo sapien
cagtgctttgttagtaggattcggc

SEQ ID NO: 3702495 - DNA, 25 bp, Homo sapien
gaaccatttgtgatggaatcaccag

SEQ ID NO: 3702496 - DNA, 25 bp, Homo sapien
tactcagactgtggtatctggactt

SEQ ID NO: 3702497 - DNA, 25 bp, Homo sapien
gaactactcagactgtggtatctgg

SEQ ID NO: 3702498 - DNA, 25 bp, Homo sapien
tcaccagataagcagattaaagaac

SEQ ID NO: 3702499 - DNA, 25 bp, Homo sapien
tggtgagtccccatacataagcctc

SEQ ID NO: 3702500 - DNA, 25 bp, Homo sapien
ttcagtcacagggtggctcatggtc

SEQ ID NO: 3702501 - DNA, 25 bp, Homo sapien
tccaacgtgtgtaaggagctgggct

SEQ ID NO: 3702502 - DNA, 25 bp, Homo sapien
ccttctaaggacaccaatgggatca

SEQ ID NO: 3702503 - DNA, 25 bp, Homo sapien
tcaaaaacagcacatgggccttgca

SEQ ID NO: 3702504 - DNA, 25 bp, Homo sapien
cacaaaggaccatgctcagctgtca

SEQ ID NO: 3702505 - DNA, 25 bp, Homo sapien
aaagcaggccggtttcatgataacg

SEQ ID NO: 3702506 - DNA, 25 bp, Homo sapien
ggccaagtccgtcatgtcattccag

SEQ ID NO: 3702507 - DNA, 25 bp, Homo sapien
ataaggaggtttattaaagtgtgct

SEQ ID NO: 3702508 - DNA, 25 bp, Homo sapien
tataaggaggtttattaaagtgtgc

SEQ ID NO: 3702509 - DNA, 25 bp, Homo sapien
ctctgaaaaggagccctcatatcaa

SEQ ID NO: 3702510 - DNA, 25 bp, Homo sapien
aaggcgcctctgaaaaggagccctc

SEQ ID NO: 3702511 - DNA, 25 bp, Homo sapien
ggtgctttggaaaggcgcctctgaa

SEQ ID NO: 3702512 - DNA, 25 bp, Homo sapien
gtttctcttcccagttggtgctttg

SEQ ID NO: 3702513 - DNA, 25 bp, Homo sapien
ttacagtggagcttgatctctatcc

SEQ ID NO: 3702514 - DNA, 25 bp, Homo sapien
taatacctgctagtagatgactgcc

SEQ ID NO: 3702515 - DNA, 25 bp, Homo sapien
tcctcttgagaaaagccttcctacc

SEQ ID NO: 3702516 - DNA, 25 bp, Homo sapien
acttaaatatgagggcaatgctagg

SEQ ID NO: 3702517 - DNA, 25 bp, Homo sapien
ggaagtgccccaccttggtagttga

SEQ ID NO: 3702518 - DNA, 25 bp, Homo sapien
cctggccaggacaagtgtttatagc

SEQ ID NO: 3702519 - DNA, 25 bp, Homo sapien
tatagctgggagttccccaaatcca

SEQ ID NO: 3702520 - DNA, 25 bp, Homo sapien
tctttgggccacttagtccagcaag

SEQ ID NO: 3702521 - DNA, 25 bp, Homo sapien
gaaataaggtggctttagagagcca

SEQ ID NO: 3702522 - DNA, 25 bp, Homo sapien
aaaaattttcgtaggctaagcgcag

SEQ ID NO: 3702523 - DNA, 25 bp, Homo sapien
ttcgtaggctaagcgcagtgattca

SEQ ID NO: 3702524 - DNA, 25 bp, Homo sapien
taaactcagcttattgggctcaagt

SEQ ID NO: 3702525 - DNA, 25 bp, Homo sapien
agtggtataaatgccgtttatctga

SEQ ID NO: 3702526 - DNA, 25 bp, Homo sapien
gattgctgatttgatatcgctgatc

SEQ ID NO: 3702527 - DNA, 25 bp, Homo sapien
gctgatcttggtcctagtggtataa

SEQ ID NO: 3702528 - DNA, 25 bp, Homo sapien
aatgccgtttatctgatatggctgg

SEQ ID NO: 3702529 - DNA, 25 bp, Homo sapien
ccctggactacatttgctgcttgag

SEQ ID NO: 3702530 - DNA, 25 bp, Homo sapien
ctcctcctggatgtgaaaagtgagg

SEQ ID NO: 3702531 - DNA, 25 bp, Homo sapien
tgcttgagtgcggtcaaacctgaca

SEQ ID NO: 3702532 - DNA, 25 bp, Homo sapien
tctagccgtcccctggactacattt

SEQ ID NO: 3702533 - DNA, 25 bp, Homo sapien
cagtgacgccagtcttgcggctgac

SEQ ID NO: 3702534 - DNA, 25 bp, Homo sapien
gcagtgacgccagtcttgcggctga

SEQ ID NO: 3702535 - DNA, 25 bp, Homo sapien
cgtgcgcaggcgcgagcctcacggg

SEQ ID NO: 3702536 - DNA, 25 bp, Homo sapien
gtgcgcaggcgcgagcctcacgggg

SEQ ID NO: 3702537 - DNA, 25 bp, Homo sapien
cgccgcgggcccgtgcgcaggcgcg

SEQ ID NO: 3702538 - DNA, 25 bp, Homo sapien
agggagcgccggactccaaagccgc

SEQ ID NO: 3702539 - DNA, 25 bp, Homo sapien
aaccagcatcgcgtccgcggcctga

SEQ ID NO: 3702540 - DNA, 25 bp, Homo sapien
gccgcagcaaccagcatcgcgtccg

SEQ ID NO: 3702541 - DNA, 25 bp, Homo sapien
gtccgcggcctgagggagcgccgga

SEQ ID NO: 3702542 - DNA, 25 bp, Homo sapien
cccgaggacggaaggtgagacgaag

SEQ ID NO: 3702543 - DNA, 25 bp, Homo sapien
gaggacggaaggtgagacgaagggc

SEQ ID NO: 3702544 - DNA, 25 bp, Homo sapien
cgaggacggaaggtgagacgaaggg

SEQ ID NO: 3702545 - DNA, 25 bp, Homo sapien
ccgaggacggaaggtgagacgaagg

SEQ ID NO: 3702546 - DNA, 25 bp, Homo sapien
gtgcggaggtcgcgctgcctcctcg

SEQ ID NO: 3702547 - DNA, 25 bp, Homo sapien
cgtgcggaggtcgcgctgcctcctc

SEQ ID NO: 3702548 - DNA, 25 bp, Homo sapien
tgcggaggtcgcgctgcctcctcgg

SEQ ID NO: 3702549 - DNA, 25 bp, Homo sapien
gagatgcccatcgttcctcagctaa

SEQ ID NO: 3702550 - DNA, 25 bp, Homo sapien
tatgaagtaagttaggagctgacca

SEQ ID NO: 3702551 - DNA, 25 bp, Homo sapien
caagatacagggtaggagaccatgc

SEQ ID NO: 3702552 - DNA, 25 bp, Homo sapien
aataccaggcaccaaaagagagatc

SEQ ID NO: 3702553 - DNA, 25 bp, Homo sapien
ttcactagggccttcgtcatcaaag

SEQ ID NO: 3702554 - DNA, 25 bp, Homo sapien
tgtccctagcgtattcactagggcc

SEQ ID NO: 3702555 - DNA, 25 bp, Homo sapien
tcttgcttctttgtccctagcgtat

SEQ ID NO: 3702556 - DNA, 25 bp, Homo sapien
ggccttcgtcatcaaaggttttgca

SEQ ID NO: 3702557 - DNA, 25 bp, Homo sapien
gcttctcctgggtattaactgacaa

SEQ ID NO: 3702558 - DNA, 25 bp, Homo sapien
taaataagcaccaaacgttacctgc

SEQ ID NO: 3702559 - DNA, 25 bp, Homo sapien
taagttaccacatctcaagcatcag

SEQ ID NO: 3702560 - DNA, 25 bp, Homo sapien
agggctcttctatgactatgtctgg

SEQ ID NO: 3702561 - DNA, 25 bp, Homo sapien
ccacttttagagctaccctggcaaa

SEQ ID NO: 3702562 - DNA, 25 bp, Homo sapien
tcacatgatgaaaagctgaagcgct

SEQ ID NO: 3702563 - DNA, 25 bp, Homo sapien
gtgacaaacgggcagaactaggatc

SEQ ID NO: 3702564 - DNA, 25 bp, Homo sapien
ggtttagcctaacaaagccaagagc

SEQ ID NO: 3702565 - DNA, 25 bp, Homo sapien
cgagaagactgctccccacccccgt

SEQ ID NO: 3702566 - DNA, 25 bp, Homo sapien
gaagactgctccccacccccgtcat

SEQ ID NO: 3702567 - DNA, 25 bp, Homo sapien
gagaagactgctccccacccccgtc

SEQ ID NO: 3702568 - DNA, 25 bp, Homo sapien
agaagactgctccccacccccgtca

SEQ ID NO: 3702569 - DNA, 25 bp, Homo sapien
atgcaaccagagggtggaaaggctt

SEQ ID NO: 3702570 - DNA, 25 bp, Homo sapien
tatgcaaccagagggtggaaaggct

SEQ ID NO: 3702571 - DNA, 25 bp, Homo sapien
cagtcccattaggagactgaaaatg

SEQ ID NO: 3702572 - DNA, 25 bp, Homo sapien
ccagtcccattaggagactgaaaat

SEQ ID NO: 3702573 - DNA, 25 bp, Homo sapien
cttccagtcccattaggagactgaa

SEQ ID NO: 3702574 - DNA, 25 bp, Homo sapien
tccagtcccattaggagactgaaaa

SEQ ID NO: 3702575 - DNA, 25 bp, Homo sapien
gatttaagtacgcaggagatgggtt

SEQ ID NO: 3702576 - DNA, 25 bp, Homo sapien
gaagtctggactttactatgggcaa

SEQ ID NO: 3702577 - DNA, 25 bp, Homo sapien
tggaaaaatacagcctacagagtgg

SEQ ID NO: 3702578 - DNA, 25 bp, Homo sapien
tatgtgccatactaagaagtctgga

SEQ ID NO: 3702579 - DNA, 25 bp, Homo sapien
aggtgcatttgttcttaaaagttga

SEQ ID NO: 3702580 - DNA, 25 bp, Homo sapien
ggtgcatttgttcttaaaagttgaa

SEQ ID NO: 3702581 - DNA, 25 bp, Homo sapien
ttttgttccatactttggcaacttg

SEQ ID NO: 3702582 - DNA, 25 bp, Homo sapien
tggcaacttggaacccaaaaatgtc

SEQ ID NO: 3702583 - DNA, 25 bp, Homo sapien
catactttggcaacttggaacccaa

SEQ ID NO: 3702584 - DNA, 25 bp, Homo sapien
tgttccatactttggcaacttggaa

SEQ ID NO: 3702585 - DNA, 25 bp, Homo sapien
ggctcttcgacaccttgtgcacaaa

SEQ ID NO: 3702586 - DNA, 25 bp, Homo sapien
cctaataaattaacaggtgtcccat

SEQ ID NO: 3702587 - DNA, 25 bp, Homo sapien
caaacattccttgagtaggaacacg

SEQ ID NO: 3702588 - DNA, 25 bp, Homo sapien
aatgagatgatggacaatcagagcc

SEQ ID NO: 3702589 - DNA, 25 bp, Homo sapien
gaggcactctaatggatagctgttg

SEQ ID NO: 3702590 - DNA, 25 bp, Homo sapien
taaggctttgtaagatccacagctc

SEQ ID NO: 3702591 - DNA, 25 bp, Homo sapien
ggcctttgcatgctaccagctgatc

SEQ ID NO: 3702592 - DNA, 25 bp, Homo sapien
tctggtggcacaggagttcgctcta

SEQ ID NO: 3702593 - DNA, 25 bp, Homo sapien
tttccaccagcagcataaggcctat

SEQ ID NO: 3702594 - DNA, 25 bp, Homo sapien
cctgggccatttggtaaagccaact

SEQ ID NO: 3702595 - DNA, 25 bp, Homo sapien
tgtcatagtcccagaaaatggagat

SEQ ID NO: 3702596 - DNA, 25 bp, Homo sapien
aatcaaacatatcctgtggtggccc

SEQ ID NO: 3702597 - DNA, 25 bp, Homo sapien
tcagatggagagagttcaaacgaag

SEQ ID NO: 3702598 - DNA, 25 bp, Homo sapien
gctcccaactggatggacatttcca

SEQ ID NO: 3702599 - DNA, 25 bp, Homo sapien
tctgtagtctgtatctggtgaaacc

SEQ ID NO: 3702600 - DNA, 25 bp, Homo sapien
caaacgaagaaccagctctgtagtc

SEQ ID NO: 3702601 - DNA, 25 bp, Homo sapien
caaaatcaatcatatcacaagtctc

SEQ ID NO: 3702602 - DNA, 25 bp, Homo sapien
catatcacaagtctctctatagtag

SEQ ID NO: 3702603 - DNA, 25 bp, Homo sapien
tatcacaagtctctctatagtaggg

SEQ ID NO: 3702604 - DNA, 25 bp, Homo sapien
caagtctctctatagtagggtaaac

SEQ ID NO: 3702605 - DNA, 25 bp, Homo sapien
tgctttatttcatattagagtcaga

SEQ ID NO: 3702606 - DNA, 25 bp, Homo sapien
tatttcatattagagtcagatattt

SEQ ID NO: 3702607 - DNA, 25 bp, Homo sapien
tccatttctcaaagtagtaaagtta

SEQ ID NO: 3702608 - DNA, 25 bp, Homo sapien
catttctcaaagtagtaaagttaat

SEQ ID NO: 3702609 - DNA, 25 bp, Homo sapien
aaccagttgtgacaatacatgcaaa

SEQ ID NO: 3702610 - DNA, 25 bp, Homo sapien
caaaatcaggtgaaagcttccaaga

SEQ ID NO: 3702611 - DNA, 25 bp, Homo sapien
caggatgtgcttaatacctccagca

SEQ ID NO: 3702612 - DNA, 25 bp, Homo sapien
tgtgacaatacatgcaaagagtgca

SEQ ID NO: 3702613 - DNA, 25 bp, Homo sapien
ggtgtgtcaaaagcatacaagtaag

SEQ ID NO: 3702614 - DNA, 25 bp, Homo sapien
aggtagaaacccaaatctagccagc

SEQ ID NO: 3702615 - DNA, 25 bp, Homo sapien
taacccaagcgaagtaaaatgtcac

SEQ ID NO: 3702616 - DNA, 25 bp, Homo sapien
tatacccacgcaaacactgctaaga

SEQ ID NO: 3702617 - DNA, 25 bp, Homo sapien
cgaagttcagtcagatgtatgcatg

SEQ ID NO: 3702618 - DNA, 25 bp, Homo sapien
ctagccaatctgccaagcaccattt

SEQ ID NO: 3702619 - DNA, 25 bp, Homo sapien
tgtgcaaaagcttaattaagtccca

SEQ ID NO: 3702620 - DNA, 25 bp, Homo sapien
ttactcataaatcttttgcctaagc

SEQ ID NO: 3702621 - DNA, 25 bp, Homo sapien
taaagtatctgaaggccatagggct

SEQ ID NO: 3702622 - DNA, 25 bp, Homo sapien
gaaaataacattctacagtggcctc

SEQ ID NO: 3702623 - DNA, 25 bp, Homo sapien
taggtacaagtacactggtttctgc

SEQ ID NO: 3702624 - DNA, 25 bp, Homo sapien
cagtggcctcagtagaaaagataaa

SEQ ID NO: 3702625 - DNA, 25 bp, Homo sapien
tattaaacaaggtgaaaatatcact

SEQ ID NO: 3702626 - DNA, 25 bp, Homo sapien
attaaacaaggtgaaaatatcactt

SEQ ID NO: 3702627 - DNA, 25 bp, Homo sapien
atattaaacaaggtgaaaatatcac

SEQ ID NO: 3702628 - DNA, 25 bp, Homo sapien
aatattaaacaaggtgaaaatatca

SEQ ID NO: 3702629 - DNA, 25 bp, Homo sapien
tgacgtggtaccttctccctctgca

SEQ ID NO: 3702630 - DNA, 25 bp, Homo sapien
ctcgaaggatctgagaattacagtg

SEQ ID NO: 3702631 - DNA, 25 bp, Homo sapien
gaaggatctgagaattacagtgaaa

SEQ ID NO: 3702632 - DNA, 25 bp, Homo sapien
ggatctgagaattacagtgaaactg

SEQ ID NO: 3702633 - DNA, 25 bp, Homo sapien
cgaaggatctgagaattacagtgaa

SEQ ID NO: 3702634 - DNA, 25 bp, Homo sapien
accagatacatgttaaggtcttaga

SEQ ID NO: 3702635 - DNA, 25 bp, Homo sapien
agcaaaaccagatacatgttaaggt

SEQ ID NO: 3702636 - DNA, 25 bp, Homo sapien
tgtgtctgtatgattaagattaaga

SEQ ID NO: 3702637 - DNA, 25 bp, Homo sapien
tagaatatttatactgtgtctgtat

SEQ ID NO: 3702638 - DNA, 25 bp, Homo sapien
taagcaaagtgagtaacaggtgctg

SEQ ID NO: 3702639 - DNA, 25 bp, Homo sapien
gtaacaggtgctgtacaagcctcct

SEQ ID NO: 3702640 - DNA, 25 bp, Homo sapien
taaggcattgtaaagcacgagcagg

SEQ ID NO: 3702641 - DNA, 25 bp, Homo sapien
ttcctaaggcattgtaaagcacgag

SEQ ID NO: 3702642 - DNA, 25 bp, Homo sapien
gcattagcatctgaatatattctgg

SEQ ID NO: 3702643 - DNA, 25 bp, Homo sapien
catttaacatgttccatttctgggt

SEQ ID NO: 3702644 - DNA, 25 bp, Homo sapien
tccatttctgggtcagtggaggcat

SEQ ID NO: 3702645 - DNA, 25 bp, Homo sapien
ttctggtttgtttgaatgatgtcct

SEQ ID NO: 3702646 - DNA, 25 bp, Homo sapien
gaaagccagactgcagtgctgtggc

SEQ ID NO: 3702647 - DNA, 25 bp, Homo sapien
aggttcacagtatggaagaaagcca

SEQ ID NO: 3702648 - DNA, 25 bp, Homo sapien
tgaagataggcactcaggtaaaggg

SEQ ID NO: 3702649 - DNA, 25 bp, Homo sapien
aaagggaagagatccttatcttcac

SEQ ID NO: 3702650 - DNA, 25 bp, Homo sapien
tggcttgggcaagttttcctcattg

SEQ ID NO: 3702651 - DNA, 25 bp, Homo sapien
atggcttgggcaagttttcctcatt

SEQ ID NO: 3702652 - DNA, 25 bp, Homo sapien
gcattgtttagcatggcttgggcaa

SEQ ID NO: 3702653 - DNA, 25 bp, Homo sapien
ctggttgagcattgtttagcatggc

SEQ ID NO: 3702654 - DNA, 25 bp, Homo sapien
gccaggccactcagtaaatcaagag

SEQ ID NO: 3702655 - DNA, 25 bp, Homo sapien
atccactgatgcattagtgttagga

SEQ ID NO: 3702656 - DNA, 25 bp, Homo sapien
ccactgatgcattagtgttaggatg

SEQ ID NO: 3702657 - DNA, 25 bp, Homo sapien
tccactgatgcattagtgttaggat

SEQ ID NO: 3702658 - DNA, 25 bp, Homo sapien
catccactgatgcattagtgttagg

SEQ ID NO: 3702659 - DNA, 25 bp, Homo sapien
gtgaggtcacctaacagggcaaaat

SEQ ID NO: 3702660 - DNA, 25 bp, Homo sapien
ctatgtggcattgttgcagactgaa

SEQ ID NO: 3702661 - DNA, 25 bp, Homo sapien
gggcaaaataactctgtcgaacttc

SEQ ID NO: 3702662 - DNA, 25 bp, Homo sapien
gggttgattcccagtattggcatga

SEQ ID NO: 3702663 - DNA, 25 bp, Homo sapien
ctagtgcaacaccataggaatataa

SEQ ID NO: 3702664 - DNA, 25 bp, Homo sapien
tgcatctctatatccatttgaatgg

SEQ ID NO: 3702665 - DNA, 25 bp, Homo sapien
tatccatttgaatggagatttctcc

SEQ ID NO: 3702666 - DNA, 25 bp, Homo sapien
aacaccataggaatataaggctgca

SEQ ID NO: 3702667 - DNA, 25 bp, Homo sapien
gacgaccaatcgttattgctgtatt

SEQ ID NO: 3702668 - DNA, 25 bp, Homo sapien
agacgaccaatcgttattgctgtat

SEQ ID NO: 3702669 - DNA, 25 bp, Homo sapien
acgaccaatcgttattgctgtattc

SEQ ID NO: 3702670 - DNA, 25 bp, Homo sapien
gagattgtagtgtattccctaccgg

SEQ ID NO: 3702671 - DNA, 25 bp, Homo sapien
tacaccgaatgtgtctctgagatca

SEQ ID NO: 3702672 - DNA, 25 bp, Homo sapien
tcaacctaatacagtgacagcaaca

SEQ ID NO: 3702673 - DNA, 25 bp, Homo sapien
aaaatcttggattacactactggga

SEQ ID NO: 3702674 - DNA, 25 bp, Homo sapien
catgcagaaagcacatcacactgac

SEQ ID NO: 3702675 - DNA, 25 bp, Homo sapien
cagaaagcacatcacactgacagca

SEQ ID NO: 3702676 - DNA, 25 bp, Homo sapien
tgcagaaagcacatcacactgacag

SEQ ID NO: 3702677 - DNA, 25 bp, Homo sapien
accatgcagaaagcacatcacactg

SEQ ID NO: 3702678 - DNA, 25 bp, Homo sapien
cattaggaccatctcaactttctat

SEQ ID NO: 3702679 - DNA, 25 bp, Homo sapien
aggaccatctcaactttctataagc

SEQ ID NO: 3702680 - DNA, 25 bp, Homo sapien
ttaggaccatctcaactttctataa

SEQ ID NO: 3702681 - DNA, 25 bp, Homo sapien
gaccatctcaactttctataagctg

SEQ ID NO: 3702682 - DNA, 25 bp, Homo sapien
agtatcaatatcagtttgagatttc

SEQ ID NO: 3702683 - DNA, 25 bp, Homo sapien
aagtatcaatatcagtttgagattt

SEQ ID NO: 3702684 - DNA, 25 bp, Homo sapien
tatcaatatcagtttgagatttcta

SEQ ID NO: 3702685 - DNA, 25 bp, Homo sapien
tcaatatcagtttgagatttctatt

SEQ ID NO: 3702686 - DNA, 25 bp, Homo sapien
gataaagtgtctattcaggtctctt

SEQ ID NO: 3702687 - DNA, 25 bp, Homo sapien
gaatgagacttctagttgctccgca

SEQ ID NO: 3702688 - DNA, 25 bp, Homo sapien
ctcttctaataggtgtgcagtggtg

SEQ ID NO: 3702689 - DNA, 25 bp, Homo sapien
caacagcccttagttactgtcagta

SEQ ID NO: 3702690 - DNA, 25 bp, Homo sapien
catgcaaaccattgtgaaccagtgt

SEQ ID NO: 3702691 - DNA, 25 bp, Homo sapien
caaaaccagcctgccatgtgggaac

SEQ ID NO: 3702692 - DNA, 25 bp, Homo sapien
tgtgtggtaccatcagtcttggcag

SEQ ID NO: 3702693 - DNA, 25 bp, Homo sapien
gtgactgccctgttctccccagaaa

SEQ ID NO: 3702694 - DNA, 25 bp, Homo sapien
cacgaaatgcccatatcaaagagct

SEQ ID NO: 3702695 - DNA, 25 bp, Homo sapien
aaccatctcctgaatgactcttgag

SEQ ID NO: 3702696 - DNA, 25 bp, Homo sapien
gagaaaacataccaccatctctggg

SEQ ID NO: 3702697 - DNA, 25 bp, Homo sapien
gactcttgagaaaatcatgaaagta

SEQ ID NO: 3702698 - DNA, 25 bp, Homo sapien
aagcataagatcatcatcctcaagg

SEQ ID NO: 3702699 - DNA, 25 bp, Homo sapien
tcaaggtcacatgattcaagattat

SEQ ID NO: 3702700 - DNA, 25 bp, Homo sapien
tccacatcaagcataagatcatcat

SEQ ID NO: 3702701 - DNA, 25 bp, Homo sapien
cagatccacatcaagcataagatca

SEQ ID NO: 3702702 - DNA, 25 bp, Homo sapien
tctcagatttctaagggcagccctc

SEQ ID NO: 3702703 - DNA, 25 bp, Homo sapien
ggagtatccccatttcaacctttgc

SEQ ID NO: 3702704 - DNA, 25 bp, Homo sapien
ccaggcaaatgttgattgacaggaa

SEQ ID NO: 3702705 - DNA, 25 bp, Homo sapien
aatcctacaagtgctatgtcactgg

SEQ ID NO: 3702706 - DNA, 25 bp, Homo sapien
gaatacgctctctaaccaaatctaa

SEQ ID NO: 3702707 - DNA, 25 bp, Homo sapien
gctaagcagttctttagaatacgct

SEQ ID NO: 3702708 - DNA, 25 bp, Homo sapien
caaaaaatcttgtgaccatttcgta

SEQ ID NO: 3702709 - DNA, 25 bp, Homo sapien
catttctgctgtcgtgagaacaacc

SEQ ID NO: 3702710 - DNA, 25 bp, Homo sapien
gactactctaatcctcagggttctg

SEQ ID NO: 3702711 - DNA, 25 bp, Homo sapien
caatgtcctctatcatgtgcagagc

SEQ ID NO: 3702712 - DNA, 25 bp, Homo sapien
gacagtggtggatattgtcctcaac

SEQ ID NO: 3702713 - DNA, 25 bp, Homo sapien
tgtttgccagagcatactaagcgac

SEQ ID NO: 3702714 - DNA, 25 bp, Homo sapien
aaaacctgtagtggaaagcacatta

SEQ ID NO: 3702715 - DNA, 25 bp, Homo sapien
caacaaccagaagctataaaggact

SEQ ID NO: 3702716 - DNA, 25 bp, Homo sapien
tcaaacctgcataatatcatcaaca

SEQ ID NO: 3702717 - DNA, 25 bp, Homo sapien
tctatcagtccctgtaacattctca

SEQ ID NO: 3702718 - DNA, 25 bp, Homo sapien
caaggtgggcttaaactctagagaa

SEQ ID NO: 3702719 - DNA, 25 bp, Homo sapien
gcacaagccgccatggagagtcttt

SEQ ID NO: 3702720 - DNA, 25 bp, Homo sapien
gagacaaattcggtttccagagaca

SEQ ID NO: 3702721 - DNA, 25 bp, Homo sapien
tcaaggcatccatcaatcacgtgtt

SEQ ID NO: 3702722 - DNA, 25 bp, Homo sapien
cacatatctgagcactcactaagag

SEQ ID NO: 3702723 - DNA, 25 bp, Homo sapien
tctgagcactcactaagagagttac

SEQ ID NO: 3702724 - DNA, 25 bp, Homo sapien
acatatctgagcactcactaagaga

SEQ ID NO: 3702725 - DNA, 25 bp, Homo sapien
ggagacattgtgttaccggctgcct

SEQ ID NO: 3702726 - DNA, 25 bp, Homo sapien
tgtctggtcggtcaaagcggttcat

SEQ ID NO: 3702727 - DNA, 25 bp, Homo sapien
gaggctgccgaacatttctgtctgg

SEQ ID NO: 3702728 - DNA, 25 bp, Homo sapien
catttctgtctggtcggtcaaagcg

SEQ ID NO: 3702729 - DNA, 25 bp, Homo sapien
tgaggctgccgaacatttctgtctg

SEQ ID NO: 3702730 - DNA, 25 bp, Homo sapien
gctgaggtggtaatgctcctgtcca

SEQ ID NO: 3702731 - DNA, 25 bp, Homo sapien
cactttttccatggtgatgatagtg

SEQ ID NO: 3702732 - DNA, 25 bp, Homo sapien
caagtcactttttccatggtgatga

SEQ ID NO: 3702733 - DNA, 25 bp, Homo sapien
ggtggtaatgctcctgtccactcca

SEQ ID NO: 3702734 - DNA, 25 bp, Homo sapien
aaagcattacaacaagcatggcagc

SEQ ID NO: 3702735 - DNA, 25 bp, Homo sapien
catggcagctatgaaatccagcagt

SEQ ID NO: 3702736 - DNA, 25 bp, Homo sapien
cattaaagcactaagaacactggca

SEQ ID NO: 3702737 - DNA, 25 bp, Homo sapien
gaactctagaaatcagccaaatgct

SEQ ID NO: 3702738 - DNA, 25 bp, Homo sapien
gaagaagaaagtcgaaggcctaaca

SEQ ID NO: 3702739 - DNA, 25 bp, Homo sapien
tattggcaaaagaaccgacatatca

SEQ ID NO: 3702740 - DNA, 25 bp, Homo sapien
caaaggcctaaatgcaaaatgcgaa

SEQ ID NO: 3702741 - DNA, 25 bp, Homo sapien
caattgatcttcgacaaaggagcaa

SEQ ID NO: 3702742 - DNA, 25 bp, Homo sapien
catttcaaatacctccaccatgaga

SEQ ID NO: 3702743 - DNA, 25 bp, Homo sapien
aatcctatctgacagtaactagctg

SEQ ID NO: 3702744 - DNA, 25 bp, Homo sapien
gcaggctacgccatgagaatcaggt

SEQ ID NO: 3702745 - DNA, 25 bp, Homo sapien
taaaattctgtagctgtcacatgac

SEQ ID NO: 3702746 - DNA, 25 bp, Homo sapien
ggtacatcaacaaacatcttctgag

SEQ ID NO: 3702747 - DNA, 25 bp, Homo sapien
gcaatcctgaaccatgtgccgaagg

SEQ ID NO: 3702748 - DNA, 25 bp, Homo sapien
tgccgaagggtcatctcatccagta

SEQ ID NO: 3702749 - DNA, 25 bp, Homo sapien
gatgcaggagacgtttcagtttgag

SEQ ID NO: 3702750 - DNA, 25 bp, Homo sapien
tagcctttcgtgtgcatatactgca

SEQ ID NO: 3702751 - DNA, 25 bp, Homo sapien
gttttgttttgatggccaccaggaa

SEQ ID NO: 3702752 - DNA, 25 bp, Homo sapien
cctttcgtgtgcatatactgcatgt

SEQ ID NO: 3702753 - DNA, 25 bp, Homo sapien
ctagcctttcgtgtgcatatactgc

SEQ ID NO: 3702754 - DNA, 25 bp, Homo sapien
gagcagctgcaatggacatggatac

SEQ ID NO: 3702755 - DNA, 25 bp, Homo sapien
gcactgacaaatccctactaacaag

SEQ ID NO: 3702756 - DNA, 25 bp, Homo sapien
cagatatgctacaacacaatgacaa

SEQ ID NO: 3702757 - DNA, 25 bp, Homo sapien
caaaaacgtttagcagcactgacaa

SEQ ID NO: 3702758 - DNA, 25 bp, Homo sapien
caatgacagttgaatatcatgcaat

SEQ ID NO: 3702759 - DNA, 25 bp, Homo sapien
tgaatatcatgcaatgaaccacttc

SEQ ID NO: 3702760 - DNA, 25 bp, Homo sapien
tgacagttgaatatcatgcaatgaa

SEQ ID NO: 3702761 - DNA, 25 bp, Homo sapien
cagttgaatatcatgcaatgaacca

SEQ ID NO: 3702762 - DNA, 25 bp, Homo sapien
agaagtacttatgggtgggacatac

SEQ ID NO: 3702763 - DNA, 25 bp, Homo sapien
gtgggcaactggattaccaagcatg

SEQ ID NO: 3702764 - DNA, 25 bp, Homo sapien
gatgttcaaagaggactggactaaa

SEQ ID NO: 3702765 - DNA, 25 bp, Homo sapien
tgggacatacaatagaagtgtgtcc

SEQ ID NO: 3702766 - DNA, 25 bp, Homo sapien
agttctaatagttggatcttttcat

SEQ ID NO: 3702767 - DNA, 25 bp, Homo sapien
aagttctaatagttggatcttttca

SEQ ID NO: 3702768 - DNA, 25 bp, Homo sapien
ctgaagttctaatagttggatcttt

SEQ ID NO: 3702769 - DNA, 25 bp, Homo sapien
gctgaagttctaatagttggatctt

SEQ ID NO: 3702770 - DNA, 25 bp, Homo sapien
gatattattcaggacaactggtgca

SEQ ID NO: 3702771 - DNA, 25 bp, Homo sapien
attattcaggacaactggtgcagtc

SEQ ID NO: 3702772 - DNA, 25 bp, Homo sapien
tattattcaggacaactggtgcagt

SEQ ID NO: 3702773 - DNA, 25 bp, Homo sapien
agatattattcaggacaactggtgc

SEQ ID NO: 3702774 - DNA, 25 bp, Homo sapien
ggtgtttgggtatatttatcagcat

SEQ ID NO: 3702775 - DNA, 25 bp, Homo sapien
tatttatcagcataagtgcattttt

SEQ ID NO: 3702776 - DNA, 25 bp, Homo sapien
atttatcagcataagtgcatttttc

SEQ ID NO: 3702777 - DNA, 25 bp, Homo sapien
cagggtgtttgggtatatttatcag

SEQ ID NO: 3702778 - DNA, 25 bp, Homo sapien
aagtacttataaacagaggaatcct

SEQ ID NO: 3702779 - DNA, 25 bp, Homo sapien
tctgcaaacagatgagcttccaccg

SEQ ID NO: 3702780 - DNA, 25 bp, Homo sapien
gaaccttatagacttacacagcact

SEQ ID NO: 3702781 - DNA, 25 bp, Homo sapien
gggcatggtcttctattaaacaact

SEQ ID NO: 3702782 - DNA, 25 bp, Homo sapien
gaggaggaagactaacatccagttt

SEQ ID NO: 3702783 - DNA, 25 bp, Homo sapien
ggcaaaatggaacttatcatgctta

SEQ ID NO: 3702784 - DNA, 25 bp, Homo sapien
gaatcaccagtcttcttagtagtac

SEQ ID NO: 3702785 - DNA, 25 bp, Homo sapien
ggagccagaggtggtataaagactt

SEQ ID NO: 3702786 - DNA, 25 bp, Homo sapien
accactcaactgctataatatccat

SEQ ID NO: 3702787 - DNA, 25 bp, Homo sapien
ataaaccactcaactgctataatat

SEQ ID NO: 3702788 - DNA, 25 bp, Homo sapien
taaaccactcaactgctataatatc

SEQ ID NO: 3702789 - DNA, 25 bp, Homo sapien
aaccaataaaccactcaactgctat

SEQ ID NO: 3702790 - DNA, 25 bp, Homo sapien
tatacaaagggaaccatattgggtc

SEQ ID NO: 3702791 - DNA, 25 bp, Homo sapien
aaatcctccctatgcgttttgcaga

SEQ ID NO: 3702792 - DNA, 25 bp, Homo sapien
tgtaatgtgacatgtaggccactgg

SEQ ID NO: 3702793 - DNA, 25 bp, Homo sapien
tagcactgaccttggaatcagggaa

SEQ ID NO: 3702794 - DNA, 25 bp, Homo sapien
agagaaggagggagcagaataccca

SEQ ID NO: 3702795 - DNA, 25 bp, Homo sapien
agaaggagggagcagaatacccacc

SEQ ID NO: 3702796 - DNA, 25 bp, Homo sapien
gagaaggagggagcagaatacccac

SEQ ID NO: 3702797 - DNA, 25 bp, Homo sapien
ggagagaaggagggagcagaatacc

SEQ ID NO: 3702798 - DNA, 25 bp, Homo sapien
cagtccgtgggatcccctggaagga

SEQ ID NO: 3702799 - DNA, 25 bp, Homo sapien
gtggaacagtccgtgggatcccctg

SEQ ID NO: 3702800 - DNA, 25 bp, Homo sapien
ctgcggtgcggtggaacagtccgtg

SEQ ID NO: 3702801 - DNA, 25 bp, Homo sapien
tgcggtggaacagtccgtgggatcc

SEQ ID NO: 3702802 - DNA, 25 bp, Homo sapien
tatggtttgttcacttaccctgagc

SEQ ID NO: 3702803 - DNA, 25 bp, Homo sapien
tggaataatatctctggctctgagt

SEQ ID NO: 3702804 - DNA, 25 bp, Homo sapien
catcaagtggccttagaaagtgtat

SEQ ID NO: 3702805 - DNA, 25 bp, Homo sapien
taactagaaacgacattaatgccca

SEQ ID NO: 3702806 - DNA, 25 bp, Homo sapien
gaggctctgcacatcagtatagaaa

SEQ ID NO: 3702807 - DNA, 25 bp, Homo sapien
gcatttactacagaggcacaatcac

SEQ ID NO: 3702808 - DNA, 25 bp, Homo sapien
gactttcgctttagagatcacatga

SEQ ID NO: 3702809 - DNA, 25 bp, Homo sapien
tcaaaatggtgcctctagacctcag

SEQ ID NO: 3702810 - DNA, 25 bp, Homo sapien
cacgctttgtcagagaagtaatgga

SEQ ID NO: 3702811 - DNA, 25 bp, Homo sapien
tttgtcagagaagtaatggactaac

SEQ ID NO: 3702812 - DNA, 25 bp, Homo sapien
tcagagaagtaatggactaacttct

SEQ ID NO: 3702813 - DNA, 25 bp, Homo sapien
gaagtaatggactaacttctcaact

SEQ ID NO: 3702814 - DNA, 25 bp, Homo sapien
tacagcattagcatacggaaaagca

SEQ ID NO: 3702815 - DNA, 25 bp, Homo sapien
tcttagatgatctagcctacccagg

SEQ ID NO: 3702816 - DNA, 25 bp, Homo sapien
gatactaaactcaagccacagtgtg

SEQ ID NO: 3702817 - DNA, 25 bp, Homo sapien
caaagtagtacccaccaatgagcaa

SEQ ID NO: 3702818 - DNA, 25 bp, Homo sapien
ccagaaatgcccaggaaagggccat

SEQ ID NO: 3702819 - DNA, 25 bp, Homo sapien
tccagaaatgcccaggaaagggcca

SEQ ID NO: 3702820 - DNA, 25 bp, Homo sapien
ctccagaaatgcccaggaaagggcc

SEQ ID NO: 3702821 - DNA, 25 bp, Homo sapien
actgcgggcctcgatacgttgtggc

SEQ ID NO: 3702822 - DNA, 25 bp, Homo sapien
cgggcctcgatacgttgtggcttta

SEQ ID NO: 3702823 - DNA, 25 bp, Homo sapien
gcctcgatacgttgtggctttatta

SEQ ID NO: 3702824 - DNA, 25 bp, Homo sapien
tcactgcgggcctcgatacgttgtg

SEQ ID NO: 3702825 - DNA, 25 bp, Homo sapien
gaggccaaacaatccccagaatgca

SEQ ID NO: 3702826 - DNA, 25 bp, Homo sapien
cgagaatatcgattagaggccaaac

SEQ ID NO: 3702827 - DNA, 25 bp, Homo sapien
gattcagaaactggaggcggtacca

SEQ ID NO: 3702828 - DNA, 25 bp, Homo sapien
gctgagacatataacccactggcgg

SEQ ID NO: 3702829 - DNA, 25 bp, Homo sapien
gctgcaagctgcacataaagctatt

SEQ ID NO: 3702830 - DNA, 25 bp, Homo sapien
gaaacaaattggcaggtgatggcta

SEQ ID NO: 3702831 - DNA, 25 bp, Homo sapien
aagatttgcaggctttcaatggaac

SEQ ID NO: 3702832 - DNA, 25 bp, Homo sapien
tccaccacagtagcaagctgcaagc

SEQ ID NO: 3702833 - DNA, 25 bp, Homo sapien
tcaaatggcatgtacttcaaccagg

SEQ ID NO: 3702834 - DNA, 25 bp, Homo sapien
catgatttgggcctttggcaggcct

SEQ ID NO: 3702835 - DNA, 25 bp, Homo sapien
tggccagaactctgcttacagacta

SEQ ID NO: 3702836 - DNA, 25 bp, Homo sapien
cctctgaaatgggtaagcaaacttt

SEQ ID NO: 3702837 - DNA, 25 bp, Homo sapien
gacatagttgtagattggtgcccac

SEQ ID NO: 3702838 - DNA, 25 bp, Homo sapien
cacatggtagcatggaggttccaca

SEQ ID NO: 3702839 - DNA, 25 bp, Homo sapien
caaggtgtatctcaagcgctccaaa

SEQ ID NO: 3702840 - DNA, 25 bp, Homo sapien
tatcatggatccacaagcctaaggg

SEQ ID NO: 3702841 - DNA, 25 bp, Homo sapien
attgaatggggccttccacggcggc

SEQ ID NO: 3702842 - DNA, 25 bp, Homo sapien
ggcgtatttaacatcacccttgtca

SEQ ID NO: 3702843 - DNA, 25 bp, Homo sapien
cttgtcaatctgtgacagccgtttc

SEQ ID NO: 3702844 - DNA, 25 bp, Homo sapien
attgcagcaggcgtatttaacatca

SEQ ID NO: 3702845 - DNA, 25 bp, Homo sapien
aaggctctgggccacgctaaagacc

SEQ ID NO: 3702846 - DNA, 25 bp, Homo sapien
ggaaggctctgggccacgctaaaga

SEQ ID NO: 3702847 - DNA, 25 bp, Homo sapien
tctgggccacgctaaagacctcttc

SEQ ID NO: 3702848 - DNA, 25 bp, Homo sapien
ggctctgggccacgctaaagacctc

SEQ ID NO: 3702849 - DNA, 25 bp, Homo sapien
cagaccgtagacaaatgcctggaag

SEQ ID NO: 3702850 - DNA, 25 bp, Homo sapien
gataaagagttttacagggagtcag

SEQ ID NO: 3702851 - DNA, 25 bp, Homo sapien
tcctgagggatccataggagtcttt

SEQ ID NO: 3702852 - DNA, 25 bp, Homo sapien
ggccccttgggcagatgctcatgta

SEQ ID NO: 3702853 - DNA, 25 bp, Homo sapien
atggtggttgacaagaacaagcgcc

SEQ ID NO: 3702854 - DNA, 25 bp, Homo sapien
tgacaagaacaagcgccttacgaaa

SEQ ID NO: 3702855 - DNA, 25 bp, Homo sapien
tggttgacaagaacaagcgccttac

SEQ ID NO: 3702856 - DNA, 25 bp, Homo sapien
ggttgacaagaacaagcgccttacg

SEQ ID NO: 3702857 - DNA, 25 bp, Homo sapien
gttgacaagaacaagcgccttacga

SEQ ID NO: 3702858 - DNA, 25 bp, Homo sapien
tggtggttgacaagaacaagcgcct

SEQ ID NO: 3702859 - DNA, 25 bp, Homo sapien
ggcgcttgttcttgtcaaccaccat

SEQ ID NO: 3702860 - DNA, 25 bp, Homo sapien
tttcgtaaggcgcttgttcttgtca

SEQ ID NO: 3702861 - DNA, 25 bp, Homo sapien
gtaaggcgcttgttcttgtcaacca

SEQ ID NO: 3702862 - DNA, 25 bp, Homo sapien
tcgtaaggcgcttgttcttgtcaac

SEQ ID NO: 3702863 - DNA, 25 bp, Homo sapien
cgtaaggcgcttgttcttgtcaacc

SEQ ID NO: 3702864 - DNA, 25 bp, Homo sapien
aggcgcttgttcttgtcaaccacca

SEQ ID NO: 3702865 - DNA, 25 bp, Homo sapien
ttgcatctgatggtcgtgtgtttga

SEQ ID NO: 3702866 - DNA, 25 bp, Homo sapien
tgcatctgatggtcgtgtgtttgaa

SEQ ID NO: 3702867 - DNA, 25 bp, Homo sapien
ttcaaacacacgaccatcagatgca

SEQ ID NO: 3702868 - DNA, 25 bp, Homo sapien
tcaaacacacgaccatcagatgcaa

SEQ ID NO: 3702869 - DNA, 25 bp, Homo sapien
ggtacgatgtgaacgcacctgctat

SEQ ID NO: 3702870 - DNA, 25 bp, Homo sapien
ttgcatctgatggtcgtgtgtttga

SEQ ID NO: 3702871 - DNA, 25 bp, Homo sapien
tgcatctgatggtcgtgtgtttgaa

SEQ ID NO: 3702872 - DNA, 25 bp, Homo sapien
tggtacgatgtgaacgcacctgcta

SEQ ID NO: 3702873 - DNA, 25 bp, Homo sapien
ttggtacgatgtgaacgcacctgct

SEQ ID NO: 3702874 - DNA, 25 bp, Homo sapien
aagattggtacgatgtgaacgcacc

SEQ ID NO: 3702875 - DNA, 25 bp, Homo sapien
agcaggtgcgttcacatcgtaccaa

SEQ ID NO: 3702876 - DNA, 25 bp, Homo sapien
ggtgcgttcacatcgtaccaatctt

SEQ ID NO: 3702877 - DNA, 25 bp, Homo sapien
ttcaaacacacgaccatcagatgca

SEQ ID NO: 3702878 - DNA, 25 bp, Homo sapien
tcaaacacacgaccatcagatgcaa

SEQ ID NO: 3702879 - DNA, 25 bp, Homo sapien
atagcaggtgcgttcacatcgtacc

SEQ ID NO: 3702880 - DNA, 25 bp, Homo sapien
tagcaggtgcgttcacatcgtacca

SEQ ID NO: 3702881 - DNA, 25 bp, Homo sapien
gttgcatttagaaaattcaagctga

SEQ ID NO: 3702882 - DNA, 25 bp, Homo sapien
aagctgattactgaagatgttcagg

SEQ ID NO: 3702883 - DNA, 25 bp, Homo sapien
gcatttagaaaattcaagctgatta

SEQ ID NO: 3702884 - DNA, 25 bp, Homo sapien
caagctgattactgaagatgttcag

SEQ ID NO: 3702885 - DNA, 25 bp, Homo sapien
aatgatgaagttgcatttagaaaat

SEQ ID NO: 3702886 - DNA, 25 bp, Homo sapien
catttagaaaattcaagctgattac

SEQ ID NO: 3702887 - DNA, 25 bp, Homo sapien
gaattttctaaatgcaacttcatca

SEQ ID NO: 3702888 - DNA, 25 bp, Homo sapien
gaacatcttcagtaatcagcttgaa

SEQ ID NO: 3702889 - DNA, 25 bp, Homo sapien
tgaacatcttcagtaatcagcttga

SEQ ID NO: 3702890 - DNA, 25 bp, Homo sapien
cctgaacatcttcagtaatcagctt

SEQ ID NO: 3702891 - DNA, 25 bp, Homo sapien
ctgaacatcttcagtaatcagcttg

SEQ ID NO: 3702892 - DNA, 25 bp, Homo sapien
tcagcttgaattttctaaatgcaac

SEQ ID NO: 3702893 - DNA, 25 bp, Homo sapien
catggcgtggatcttaccagtgaca

SEQ ID NO: 3702894 - DNA, 25 bp, Homo sapien
cgtggatcttaccagtgacaaaatg

SEQ ID NO: 3702895 - DNA, 25 bp, Homo sapien
cctgactaacttccatggcgtggat

SEQ ID NO: 3702896 - DNA, 25 bp, Homo sapien
ccatggcgtggatcttaccagtgac

SEQ ID NO: 3702897 - DNA, 25 bp, Homo sapien
gtggatcttaccagtgacaaaatgt

SEQ ID NO: 3702898 - DNA, 25 bp, Homo sapien
gcctgactaacttccatggcgtgga

SEQ ID NO: 3702899 - DNA, 25 bp, Homo sapien
gtcactggtaagatccacgccatgg

SEQ ID NO: 3702900 - DNA, 25 bp, Homo sapien
tgtcactggtaagatccacgccatg

SEQ ID NO: 3702901 - DNA, 25 bp, Homo sapien
atccacgccatggaagttagtcagg

SEQ ID NO: 3702902 - DNA, 25 bp, Homo sapien
cattttgtcactggtaagatccacg

SEQ ID NO: 3702903 - DNA, 25 bp, Homo sapien
acattttgtcactggtaagatccac

SEQ ID NO: 3702904 - DNA, 25 bp, Homo sapien
tccacgccatggaagttagtcaggc

SEQ ID NO: 3702905 - DNA, 25 bp, Homo sapien
tacttgcttcgtctgttctgtgttg

SEQ ID NO: 3702906 - DNA, 25 bp, Homo sapien
cttcgtctgttctgtgttggtttta

SEQ ID NO: 3702907 - DNA, 25 bp, Homo sapien
ttacttgcttcgtctgttctgtgtt

SEQ ID NO: 3702908 - DNA, 25 bp, Homo sapien
gttacttgcttcgtctgttctgtgt

SEQ ID NO: 3702909 - DNA, 25 bp, Homo sapien
acttgcttcgtctgttctgtgttgg

SEQ ID NO: 3702910 - DNA, 25 bp, Homo sapien
ttgcttcgtctgttctgtgttggtt

SEQ ID NO: 3702911 - DNA, 25 bp, Homo sapien
aaccaacacagaacagacgaagcaa

SEQ ID NO: 3702912 - DNA, 25 bp, Homo sapien
ccaacacagaacagacgaagcaagt

SEQ ID NO: 3702913 - DNA, 25 bp, Homo sapien
taaaaccaacacagaacagacgaag

SEQ ID NO: 3702914 - DNA, 25 bp, Homo sapien
caacacagaacagacgaagcaagta

SEQ ID NO: 3702915 - DNA, 25 bp, Homo sapien
aacacagaacagacgaagcaagtaa

SEQ ID NO: 3702916 - DNA, 25 bp, Homo sapien
acacagaacagacgaagcaagtaac

SEQ ID NO: 3702917 - DNA, 25 bp, Homo sapien
ctgagaaatccggaagacctcttat

SEQ ID NO: 3702918 - DNA, 25 bp, Homo sapien
ataagaggtcttccggatttctcag

SEQ ID NO: 3702919 - DNA, 25 bp, Homo sapien
ctgagaaatccggaagacctcttat

SEQ ID NO: 3702920 - DNA, 25 bp, Homo sapien
gagaaatccggaagacctcttatgc

SEQ ID NO: 3702921 - DNA, 25 bp, Homo sapien
tgagaaatccggaagacctcttatg

SEQ ID NO: 3702922 - DNA, 25 bp, Homo sapien
ccggaagacctcttatgctcagtac

SEQ ID NO: 3702923 - DNA, 25 bp, Homo sapien
agaaatccggaagacctcttatgct

SEQ ID NO: 3702924 - DNA, 25 bp, Homo sapien
gaaatccggaagacctcttatgctc

SEQ ID NO: 3702925 - DNA, 25 bp, Homo sapien
agcataagaggtcttccggatttct

SEQ ID NO: 3702926 - DNA, 25 bp, Homo sapien
tactgagcataagaggtcttccgga

SEQ ID NO: 3702927 - DNA, 25 bp, Homo sapien
ataagaggtcttccggatttctcag

SEQ ID NO: 3702928 - DNA, 25 bp, Homo sapien
cataagaggtcttccggatttctca

SEQ ID NO: 3702929 - DNA, 25 bp, Homo sapien
gagcataagaggtcttccggatttc

SEQ ID NO: 3702930 - DNA, 25 bp, Homo sapien
gcataagaggtcttccggatttctc

SEQ ID NO: 3702931 - DNA, 25 bp, Homo sapien
ggaaatcatgacccgagaggtgcag

SEQ ID NO: 3702932 - DNA, 25 bp, Homo sapien
tgatggaaatcatgacccgagaggt

SEQ ID NO: 3702933 - DNA, 25 bp, Homo sapien
atggaaatcatgacccgagaggtgc

SEQ ID NO: 3702934 - DNA, 25 bp, Homo sapien
gatgatggaaatcatgacccgagag

SEQ ID NO: 3702935 - DNA, 25 bp, Homo sapien
tggaaatcatgacccgagaggtgca

SEQ ID NO: 3702936 - DNA, 25 bp, Homo sapien
aagatgatggaaatcatgacccgag

SEQ ID NO: 3702937 - DNA, 25 bp, Homo sapien
tgcacctctcgggtcatgatttcca

SEQ ID NO: 3702938 - DNA, 25 bp, Homo sapien
gcacctctcgggtcatgatttccat

SEQ ID NO: 3702939 - DNA, 25 bp, Homo sapien
acctctcgggtcatgatttccatca

SEQ ID NO: 3702940 - DNA, 25 bp, Homo sapien
ctctcgggtcatgatttccatcatc

SEQ ID NO: 3702941 - DNA, 25 bp, Homo sapien
ctgcacctctcgggtcatgatttcc

SEQ ID NO: 3702942 - DNA, 25 bp, Homo sapien
tctcgggtcatgatttccatcatct

SEQ ID NO: 3702943 - DNA, 25 bp, Homo sapien
gtgttaaagttgaacgagctgatgg

SEQ ID NO: 3702944 - DNA, 25 bp, Homo sapien
cgagacaggtgttaaagttgaacga

SEQ ID NO: 3702945 - DNA, 25 bp, Homo sapien
tgaaggctgtagttctggaaaagcc

SEQ ID NO: 3702946 - DNA, 25 bp, Homo sapien
ggacgagacaggtgttaaagttgaa

SEQ ID NO: 3702947 - DNA, 25 bp, Homo sapien
cttcatggtgaaggctgtagttctg

SEQ ID NO: 3702948 - DNA, 25 bp, Homo sapien
gacgagacaggtgttaaagttgaac

SEQ ID NO: 3702949 - DNA, 25 bp, Homo sapien
ttaacacctgtctcgtccccagtgg

SEQ ID NO: 3702950 - DNA, 25 bp, Homo sapien
tcgttcaactttaacacctgtctcg

SEQ ID NO: 3702951 - DNA, 25 bp, Homo sapien
ttcaactttaacacctgtctcgtcc

SEQ ID NO: 3702952 - DNA, 25 bp, Homo sapien
cagaactacagccttcaccatgaag

SEQ ID NO: 3702953 - DNA, 25 bp, Homo sapien
cgttcaactttaacacctgtctcgt

SEQ ID NO: 3702954 - DNA, 25 bp, Homo sapien
ggcttttccagaactacagccttca

SEQ ID NO: 3702955 - DNA, 25 bp, Homo sapien
acttcaaatagtgtcaaataaaaag

SEQ ID NO: 3702956 - DNA, 25 bp, Homo sapien
tcagacttcaaatagtgtcaaataa

SEQ ID NO: 3702957 - DNA, 25 bp, Homo sapien
cagacttcaaatagtgtcaaataaa

SEQ ID NO: 3702958 - DNA, 25 bp, Homo sapien
ttcagacttcaaatagtgtcaaata

SEQ ID NO: 3702959 - DNA, 25 bp, Homo sapien
aattcagacttcaaatagtgtcaaa

SEQ ID NO: 3702960 - DNA, 25 bp, Homo sapien
attcagacttcaaatagtgtcaaat

SEQ ID NO: 3702961 - DNA, 25 bp, Homo sapien
tttatttgacactatttgaagtctg

SEQ ID NO: 3702962 - DNA, 25 bp, Homo sapien
tatttgacactatttgaagtctgaa

SEQ ID NO: 3702963 - DNA, 25 bp, Homo sapien
ctttttatttgacactatttgaagt

SEQ ID NO: 3702964 - DNA, 25 bp, Homo sapien
tttgacactatttgaagtctgaatt

SEQ ID NO: 3702965 - DNA, 25 bp, Homo sapien
atttgacactatttgaagtctgaat

SEQ ID NO: 3702966 - DNA, 25 bp, Homo sapien
ttatttgacactatttgaagtctga

SEQ ID NO: 3702967 - DNA, 25 bp, Homo sapien
cctgctccattatcacagcctctga

SEQ ID NO: 3702968 - DNA, 25 bp, Homo sapien
ccggacctgatgaggaccacctttt

SEQ ID NO: 3702969 - DNA, 25 bp, Homo sapien
gaggaccacctttttggacactgtc

SEQ ID NO: 3702970 - DNA, 25 bp, Homo sapien
aagccagacccggacctgatgagga

SEQ ID NO: 3702971 - DNA, 25 bp, Homo sapien
ccttcaaggggcagatctcctttct

SEQ ID NO: 3702972 - DNA, 25 bp, Homo sapien
cttcccattccctgccgttgtctga

SEQ ID NO: 3702973 - DNA, 25 bp, Homo sapien
ctgaacctgccagatcccccacctt

SEQ ID NO: 3702974 - DNA, 25 bp, Homo sapien
attccctgccgttgtctgaacctgc

SEQ ID NO: 3702975 - DNA, 25 bp, Homo sapien
cacaggtcaaggctaagacatactg

SEQ ID NO: 3702976 - DNA, 25 bp, Homo sapien
gccctcaggtagcagccaagccagg

SEQ ID NO: 3702977 - DNA, 25 bp, Homo sapien
tatctgtatagccagaagccaccac

SEQ ID NO: 3702978 - DNA, 25 bp, Homo sapien
agagcttcacgagggccctcaggta

SEQ ID NO: 3702979 - DNA, 25 bp, Homo sapien
cagtgagaaaggtgccgattaaggt

SEQ ID NO: 3702980 - DNA, 25 bp, Homo sapien
gaaaggtgccgattaaggtatgaat

SEQ ID NO: 3702981 - DNA, 25 bp, Homo sapien
gtgccgattaaggtatgaataacag

SEQ ID NO: 3702982 - DNA, 25 bp, Homo sapien
ttacaatacagtgagaaaggtgccg

SEQ ID NO: 3702983 - DNA, 25 bp, Homo sapien
tgatctccaagtgccagcattttct

SEQ ID NO: 3702984 - DNA, 25 bp, Homo sapien
aggactgcagcccagacccacccca

SEQ ID NO: 3702985 - DNA, 25 bp, Homo sapien
agccaactgcaggactgcagcccag

SEQ ID NO: 3702986 - DNA, 25 bp, Homo sapien
ggactgcagcccagacccaccccat

SEQ ID NO: 3702987 - DNA, 25 bp, Homo sapien
tgcaggactgcagcccagacccacc

SEQ ID NO: 3702988 - DNA, 25 bp, Homo sapien
tcctaactctcattacatgagtttc

SEQ ID NO: 3702989 - DNA, 25 bp, Homo sapien
gaaagtcctcgattccactgtcgca

SEQ ID NO: 3702990 - DNA, 25 bp, Homo sapien
cactgtcgcaagctcttttcctaac

SEQ ID NO: 3702991 - DNA, 25 bp, Homo sapien
cacttcactcatatgttcccagaag

SEQ ID NO: 3702992 - DNA, 25 bp, Homo sapien
cgatgtggcaatgactcgggtgcca

SEQ ID NO: 3702993 - DNA, 25 bp, Homo sapien
ccacacatatcagtaagggcgatgt

SEQ ID NO: 3702994 - DNA, 25 bp, Homo sapien
aatgactcgggtgccacctttgtcc

SEQ ID NO: 3702995 - DNA, 25 bp, Homo sapien
taagggcgatgtggcaatgactcgg

SEQ ID NO: 3702996 - DNA, 25 bp, Homo sapien
agacgttgatctcagaagggaaggg

SEQ ID NO: 3702997 - DNA, 25 bp, Homo sapien
attaaagacgttgatctcagaaggg

SEQ ID NO: 3702998 - DNA, 25 bp, Homo sapien
aagacgttgatctcagaagggaagg

SEQ ID NO: 3702999 - DNA, 25 bp, Homo sapien
taaagacgttgatctcagaagggaa

SEQ ID NO: 3703000 - DNA, 25 bp, Homo sapien
atagcctgtcatagggtgcgtgtga

SEQ ID NO: 3703001 - DNA, 25 bp, Homo sapien
agcctgtcatagggtgcgtgtgaat

SEQ ID NO: 3703002 - DNA, 25 bp, Homo sapien
tagcctgtcatagggtgcgtgtgaa

SEQ ID NO: 3703003 - DNA, 25 bp, Homo sapien
cacactcgccggtggtccagggtgt

SEQ ID NO: 3703004 - DNA, 25 bp, Homo sapien
tgtcactaattcctgtccagactgc

SEQ ID NO: 3703005 - DNA, 25 bp, Homo sapien
cagcaatgctgagtgagtaatcccc

SEQ ID NO: 3703006 - DNA, 25 bp, Homo sapien
tgctgagtgagtaatccccacactc

SEQ ID NO: 3703007 - DNA, 25 bp, Homo sapien
gaagtgcagagccaacaatgtaaag

SEQ ID NO: 3703008 - DNA, 25 bp, Homo sapien
tgggcttcccgcatttcccagtgaa

SEQ ID NO: 3703009 - DNA, 25 bp, Homo sapien
ggattcagagcatttaacaggtaac

SEQ ID NO: 3703010 - DNA, 25 bp, Homo sapien
tagctacagccgtttttgcctcaag

SEQ ID NO: 3703011 - DNA, 25 bp, Homo sapien
tcccagaagaggcacagtccttctg

SEQ ID NO: 3703012 - DNA, 25 bp, Homo sapien
attctgagtgtattgcatttttccc

SEQ ID NO: 3703013 - DNA, 25 bp, Homo sapien
tcattctgagtgtattgcatttttc

SEQ ID NO: 3703014 - DNA, 25 bp, Homo sapien
tttcccagaagaggcacagtccttc

SEQ ID NO: 3703015 - DNA, 25 bp, Homo sapien
tgccccgttgtgctccttatggaag

SEQ ID NO: 3703016 - DNA, 25 bp, Homo sapien
ggacaatttagagcagaccttggca

SEQ ID NO: 3703017 - DNA, 25 bp, Homo sapien
cttatgataacaatctgccccgttg

SEQ ID NO: 3703018 - DNA, 25 bp, Homo sapien
tgccaggatgatgcattagctgtgg

SEQ ID NO: 3703019 - DNA, 25 bp, Homo sapien
gaagacgtcacgcagaaccttgaat

SEQ ID NO: 3703020 - DNA, 25 bp, Homo sapien
taggacatggacacaactccaccaa

SEQ ID NO: 3703021 - DNA, 25 bp, Homo sapien
ggatgaagtcgcaggcctgcagctt

SEQ ID NO: 3703022 - DNA, 25 bp, Homo sapien
cagggctggactctcaaggtttcag

SEQ ID NO: 3703023 - DNA, 25 bp, Homo sapien
ttaaggctgtaggtcttaaacttca

SEQ ID NO: 3703024 - DNA, 25 bp, Homo sapien
taaggctgtaggtcttaaacttcat

SEQ ID NO: 3703025 - DNA, 25 bp, Homo sapien
cgaggcaagcaattgaggagaagca

SEQ ID NO: 3703026 - DNA, 25 bp, Homo sapien
agcaccccctttggtgtaaggtcat

SEQ ID NO: 3703027 - DNA, 25 bp, Homo sapien
cctttggtgtaaggtcattcagcac

SEQ ID NO: 3703028 - DNA, 25 bp, Homo sapien
ttatatcgaggcaagcaattgagga

SEQ ID NO: 3703029 - DNA, 25 bp, Homo sapien
ttctggttctgcatacttttcaaat

SEQ ID NO: 3703030 - DNA, 25 bp, Homo sapien
aaaggttctggttctgcatactttt

SEQ ID NO: 3703031 - DNA, 25 bp, Homo sapien
caaaaggttctggttctgcatactt

SEQ ID NO: 3703032 - DNA, 25 bp, Homo sapien
ggttctggttctgcatacttttcaa

SEQ ID NO: 3703033 - DNA, 25 bp, Homo sapien
cctggatctcgagtagaaaggcttc

SEQ ID NO: 3703034 - DNA, 25 bp, Homo sapien
tagaaaggcttctggcactgaagaa

SEQ ID NO: 3703035 - DNA, 25 bp, Homo sapien
gcactgaagaagtcaaacaggatcc

SEQ ID NO: 3703036 - DNA, 25 bp, Homo sapien
agagagcctggatctcgagtagaaa

SEQ ID NO: 3703037 - DNA, 25 bp, Homo sapien
gggaaaagcctgaatgacacctgct

SEQ ID NO: 3703038 - DNA, 25 bp, Homo sapien
tctgagcattgaggggaaaagcctg

SEQ ID NO: 3703039 - DNA, 25 bp, Homo sapien
cattgaggggaaaagcctgaatgac

SEQ ID NO: 3703040 - DNA, 25 bp, Homo sapien
gaaaagcctgaatgacacctgcttt

SEQ ID NO: 3703041 - DNA, 25 bp, Homo sapien
tttatcccacaatctcctcatatcc

SEQ ID NO: 3703042 - DNA, 25 bp, Homo sapien
tatcccacaatctcctcatatccat

SEQ ID NO: 3703043 - DNA, 25 bp, Homo sapien
ttctttatcccacaatctcctcata

SEQ ID NO: 3703044 - DNA, 25 bp, Homo sapien
tctttatcccacaatctcctcatat

SEQ ID NO: 3703045 - DNA, 25 bp, Homo sapien
caagcattctccaggcaccgatgca

SEQ ID NO: 3703046 - DNA, 25 bp, Homo sapien
tcaagtcgtcaccaccaagcattct

SEQ ID NO: 3703047 - DNA, 25 bp, Homo sapien
tcttggagatattgatcaagtcgtc

SEQ ID NO: 3703048 - DNA, 25 bp, Homo sapien
cgatgcagcagattttgaccttaga

SEQ ID NO: 3703049 - DNA, 25 bp, Homo sapien
cttcctcagcttgtgttgcacccat

SEQ ID NO: 3703050 - DNA, 25 bp, Homo sapien
tcttcctcagcttgtgttgcaccca

SEQ ID NO: 3703051 - DNA, 25 bp, Homo sapien
tattttgatccaagcaacaagggca

SEQ ID NO: 3703052 - DNA, 25 bp, Homo sapien
gatatgttggctacagctctctcta

SEQ ID NO: 3703053 - DNA, 25 bp, Homo sapien
tattgttcgaaagctgcaactccgg

SEQ ID NO: 3703054 - DNA, 25 bp, Homo sapien
aaccagagctgaagaataagatacc

SEQ ID NO: 3703055 - DNA, 25 bp, Homo sapien
cccagtatgacattaggagaacccg

SEQ ID NO: 3703056 - DNA, 25 bp, Homo sapien
acattaggagaacccgggacatagg

SEQ ID NO: 3703057 - DNA, 25 bp, Homo sapien
tgtcattagcccagtatgacattag

SEQ ID NO: 3703058 - DNA, 25 bp, Homo sapien
tatgacattaggagaacccgggaca

SEQ ID NO: 3703059 - DNA, 25 bp, Homo sapien
tctcttatgccacaggctttgtttt

SEQ ID NO: 3703060 - DNA, 25 bp, Homo sapien
taagggaaatgtccacagcttctct

SEQ ID NO: 3703061 - DNA, 25 bp, Homo sapien
cagctttggatctcagcgtgatcat

SEQ ID NO: 3703062 - DNA, 25 bp, Homo sapien
cagcgtgatcataagggaaatgtcc

SEQ ID NO: 3703063 - DNA, 25 bp, Homo sapien
gcaggactatgagtcagaacttgaa

SEQ ID NO: 3703064 - DNA, 25 bp, Homo sapien
ggttgaacttattgtggttacagca

SEQ ID NO: 3703065 - DNA, 25 bp, Homo sapien
gatgccaccaatccagctggttgaa

SEQ ID NO: 3703066 - DNA, 25 bp, Homo sapien
cagaacttgaattgactggttacca

SEQ ID NO: 3703067 - DNA, 25 bp, Homo sapien
gaaggtggttgacttcctgcctttc

SEQ ID NO: 3703068 - DNA, 25 bp, Homo sapien
gtgtcccagttgcttccacattgct

SEQ ID NO: 3703069 - DNA, 25 bp, Homo sapien
ccatatcatgctctcaggcatcagg

SEQ ID NO: 3703070 - DNA, 25 bp, Homo sapien
aaagtctccatacgttcctggaagg

SEQ ID NO: 3703071 - DNA, 25 bp, Homo sapien
gactcagaagtgttacactggccag

SEQ ID NO: 3703072 - DNA, 25 bp, Homo sapien
ctgactcagaagtgttacactggcc

SEQ ID NO: 3703073 - DNA, 25 bp, Homo sapien
ctcagaagtgttacactggccaggt

SEQ ID NO: 3703074 - DNA, 25 bp, Homo sapien
cagaagtgttacactggccaggtca

SEQ ID NO: 3703075 - DNA, 25 bp, Homo sapien
cagatctattcctaggacgctgcag

SEQ ID NO: 3703076 - DNA, 25 bp, Homo sapien
gaaactaaggaagcatggcacccaa

SEQ ID NO: 3703077 - DNA, 25 bp, Homo sapien
ctatgaactacacccagaacactgg

SEQ ID NO: 3703078 - DNA, 25 bp, Homo sapien
cagtggtaaccagcacagcagatct

SEQ ID NO: 3703079 - DNA, 25 bp, Homo sapien
caaaccatgcaatggtgcattccat

SEQ ID NO: 3703080 - DNA, 25 bp, Homo sapien
ttaccaacaaaccatgcaatggtgc

SEQ ID NO: 3703081 - DNA, 25 bp, Homo sapien
atggccgatgggtgcatccacacag

SEQ ID NO: 3703082 - DNA, 25 bp, Homo sapien
cacacagacatacgtgaccacagtc

SEQ ID NO: 3703083 - DNA, 25 bp, Homo sapien
tggaaggaggagaatatatcattat

SEQ ID NO: 3703084 - DNA, 25 bp, Homo sapien
tgcggaaatctagcccatctcctat

SEQ ID NO: 3703085 - DNA, 25 bp, Homo sapien
gatgcggaaatctagcccatctcct

SEQ ID NO: 3703086 - DNA, 25 bp, Homo sapien
ggaaatctagcccatctcctatttc

SEQ ID NO: 3703087 - DNA, 25 bp, Homo sapien
ttagatgcggaaatctagcccatct

SEQ ID NO: 3703088 - DNA, 25 bp, Homo sapien
caaccatgagttttaactccacagt

SEQ ID NO: 3703089 - DNA, 25 bp, Homo sapien
atgagttttaactccacagtgacag

SEQ ID NO: 3703090 - DNA, 25 bp, Homo sapien
ccagaagacaggtttgatgcgggaa

SEQ ID NO: 3703091 - DNA, 25 bp, Homo sapien
tctctccagaagacaggtttgatgc

SEQ ID NO: 3703092 - DNA, 25 bp, Homo sapien
gacaggtttgatgcgggaaaatact

SEQ ID NO: 3703093 - DNA, 25 bp, Homo sapien
gaaaacttagataaccttgcttctc

SEQ ID NO: 3703094 - DNA, 25 bp, Homo sapien
ttggatgagtccattttgggtagcc

SEQ ID NO: 3703095 - DNA, 25 bp, Homo sapien
ttttgttggataccagtaggcaagt

SEQ ID NO: 3703096 - DNA, 25 bp, Homo sapien
ccagtaggcaagttagcttgaaaaa

SEQ ID NO: 3703097 - DNA, 25 bp, Homo sapien
tagcctgcagtgtagcaggatattt

SEQ ID NO: 3703098 - DNA, 25 bp, Homo sapien
catggacttgcaaggcttataaatc

SEQ ID NO: 3703099 - DNA, 25 bp, Homo sapien
ggacttgcaaggcttataaatctct

SEQ ID NO: 3703100 - DNA, 25 bp, Homo sapien
cttgcaaggcttataaatctctatt

SEQ ID NO: 3703101 - DNA, 25 bp, Homo sapien
tattatcccaaataactcagaaact

SEQ ID NO: 3703102 - DNA, 25 bp, Homo sapien
tgagtgcggttggatccccgctgtc

SEQ ID NO: 3703103 - DNA, 25 bp, Homo sapien
ttcaggcctctgcaagggattgtgc

SEQ ID NO: 3703104 - DNA, 25 bp, Homo sapien
cccgctgtccgggtgagagatgctc

SEQ ID NO: 3703105 - DNA, 25 bp, Homo sapien
ttaacaaagcgagccctgagtgcgg

SEQ ID NO: 3703106 - DNA, 25 bp, Homo sapien
gcagtagattaaggctccaagatac

SEQ ID NO: 3703107 - DNA, 25 bp, Homo sapien
ggctccaagatacacggatttcaaa

SEQ ID NO: 3703108 - DNA, 25 bp, Homo sapien
cacggatttcaaaattgaagcaata

SEQ ID NO: 3703109 - DNA, 25 bp, Homo sapien
ctgtagaccagcagtagattaaggc

SEQ ID NO: 3703110 - DNA, 25 bp, Homo sapien
gaacattggagcttgttggagcctc

SEQ ID NO: 3703111 - DNA, 25 bp, Homo sapien
gagaaagagcagatcccctagcctg

SEQ ID NO: 3703112 - DNA, 25 bp, Homo sapien
acaagcctcatcgtagcagcatggg

SEQ ID NO: 3703113 - DNA, 25 bp, Homo sapien
ctctcccgtagaagcctggcaagga

SEQ ID NO: 3703114 - DNA, 25 bp, Homo sapien
tcctcctcaactataagatctatgg

SEQ ID NO: 3703115 - DNA, 25 bp, Homo sapien
aaaatgacccattaggtttagcatg

SEQ ID NO: 3703116 - DNA, 25 bp, Homo sapien
tgaaatagtaaaaggcagcttaacc

SEQ ID NO: 3703117 - DNA, 25 bp, Homo sapien
cccattaggtttagcatgatttgaa

SEQ ID NO: 3703118 - DNA, 25 bp, Homo sapien
cttccacttcctcattccctctgct

SEQ ID NO: 3703119 - DNA, 25 bp, Homo sapien
attccctctgctccatcttccttca

SEQ ID NO: 3703120 - DNA, 25 bp, Homo sapien
cctcattccctctgctccatcttcc

SEQ ID NO: 3703121 - DNA, 25 bp, Homo sapien
cttcctcattccctctgctccatct

SEQ ID NO: 3703122 - DNA, 25 bp, Homo sapien
ctgcagatgaagtctaactgtgctc

SEQ ID NO: 3703123 - DNA, 25 bp, Homo sapien
tacttgaacagtgtgataaccttgc

SEQ ID NO: 3703124 - DNA, 25 bp, Homo sapien
ctaactgtgctcttgtggtcatgat

SEQ ID NO: 3703125 - DNA, 25 bp, Homo sapien
tgtggtcatgatgccatgatcaaaa

SEQ ID NO: 3703126 - DNA, 25 bp, Homo sapien
caagttgaactgtgtaatgaaatac

SEQ ID NO: 3703127 - DNA, 25 bp, Homo sapien
tccagtagggttgccaagttgaact

SEQ ID NO: 3703128 - DNA, 25 bp, Homo sapien
tgtgtaatgaaatacgttgagcttg

SEQ ID NO: 3703129 - DNA, 25 bp, Homo sapien
caaagctgaacggtcttccagtagg

SEQ ID NO: 3703130 - DNA, 25 bp, Homo sapien
cgtttccctgtaaccgcttgtctgc

SEQ ID NO: 3703131 - DNA, 25 bp, Homo sapien
gaggaacacatcagctgtgactcag

SEQ ID NO: 3703132 - DNA, 25 bp, Homo sapien
agtgggatcaaccactaagttcccg

SEQ ID NO: 3703133 - DNA, 25 bp, Homo sapien
gttcagatgcagaattactattgtg

SEQ ID NO: 3703134 - DNA, 25 bp, Homo sapien
gtctcgtagagcacgtcgacataga

SEQ ID NO: 3703135 - DNA, 25 bp, Homo sapien
agtgtagctgtatgtctcgtagagc

SEQ ID NO: 3703136 - DNA, 25 bp, Homo sapien
tagagcacgtcgacatagagtgagt

SEQ ID NO: 3703137 - DNA, 25 bp, Homo sapien
tgtatgtctcgtagagcacgtcgac

SEQ ID NO: 3703138 - DNA, 25 bp, Homo sapien
cagtaagtgcattccatttcactca

SEQ ID NO: 3703139 - DNA, 25 bp, Homo sapien
agtaagtgcattccatttcactcac

SEQ ID NO: 3703140 - DNA, 25 bp, Homo sapien
tcagtaagtgcattccatttcactc

SEQ ID NO: 3703141 - DNA, 25 bp, Homo sapien
caaagctcacgattgacacaggtgg

SEQ ID NO: 3703142 - DNA, 25 bp, Homo sapien
cagagatttggcacttgcaactcca

SEQ ID NO: 3703143 - DNA, 25 bp, Homo sapien
tgaaatcaggtctatagccagagat

SEQ ID NO: 3703144 - DNA, 25 bp, Homo sapien
gatttgacttcagcccattgaaatc

SEQ ID NO: 3703145 - DNA, 25 bp, Homo sapien
caccgttgtaccactttccagaagc

SEQ ID NO: 3703146 - DNA, 25 bp, Homo sapien
gaagcagtgctttacattactggga

SEQ ID NO: 3703147 - DNA, 25 bp, Homo sapien
gagagagcgccatctctgaattgtc

SEQ ID NO: 3703148 - DNA, 25 bp, Homo sapien
ccagaagctacagcttaagggcatc

SEQ ID NO: 3703149 - DNA, 25 bp, Homo sapien
atatagtctcgtggtgcgccgtttc

SEQ ID NO: 3703150 - DNA, 25 bp, Homo sapien
tgagccaggtgtgggatatagtctc

SEQ ID NO: 3703151 - DNA, 25 bp, Homo sapien
tagtctcgtggtgcgccgtttctta

SEQ ID NO: 3703152 - DNA, 25 bp, Homo sapien
tctgagccaggtgtgggatatagtc

SEQ ID NO: 3703153 - DNA, 25 bp, Homo sapien
ttaccaactttaagggccttcatca

SEQ ID NO: 3703154 - DNA, 25 bp, Homo sapien
agggccttcatcaggacaagggccc

SEQ ID NO: 3703155 - DNA, 25 bp, Homo sapien
taccaactttaagggccttcatcag

SEQ ID NO: 3703156 - DNA, 25 bp, Homo sapien
tttaagggccttcatcaggacaagg

SEQ ID NO: 3703157 - DNA, 25 bp, Homo sapien
cccacactcctgtgatctggctttg

SEQ ID NO: 3703158 - DNA, 25 bp, Homo sapien
ctgcagtgaagtagcaggaagtcca

SEQ ID NO: 3703159 - DNA, 25 bp, Homo sapien
ttcatcataagctttctgcctgtat

SEQ ID NO: 3703160 - DNA, 25 bp, Homo sapien
catggcttaaagaatccatggtcct

SEQ ID NO: 3703161 - DNA, 25 bp, Homo sapien
tattctgggcttcaactccccagtt

SEQ ID NO: 3703162 - DNA, 25 bp, Homo sapien
catcataagctttctgcctgtatat

SEQ ID NO: 3703163 - DNA, 25 bp, Homo sapien
tatattgcccctttccatattggct

SEQ ID NO: 3703164 - DNA, 25 bp, Homo sapien
ccatattggctatattcacacttca

SEQ ID NO: 3703165 - DNA, 25 bp, Homo sapien
attccaaactctctatattgcccct

SEQ ID NO: 3703166 - DNA, 25 bp, Homo sapien
gcccctttccatattggctatattc

SEQ ID NO: 3703167 - DNA, 25 bp, Homo sapien
tctctgtagacaattctgtatttgc

SEQ ID NO: 3703168 - DNA, 25 bp, Homo sapien
ttccttgtagcaagaggaccaacat

SEQ ID NO: 3703169 - DNA, 25 bp, Homo sapien
ggtgggtattttctatggaacagct

SEQ ID NO: 3703170 - DNA, 25 bp, Homo sapien
taaggctgtgtgtatggaacatctc

SEQ ID NO: 3703171 - DNA, 25 bp, Homo sapien
cttgggatgtcattgtcctgagctt

SEQ ID NO: 3703172 - DNA, 25 bp, Homo sapien
tgggatgtcattgtcctgagctttg

SEQ ID NO: 3703173 - DNA, 25 bp, Homo sapien
cattgtcctgagctttggggatcat

SEQ ID NO: 3703174 - DNA, 25 bp, Homo sapien
ggatgtcattgtcctgagctttggg

SEQ ID NO: 3703175 - DNA, 25 bp, Homo sapien
ctctactgcccatctggatgatgcc

SEQ ID NO: 3703176 - DNA, 25 bp, Homo sapien
cccatcatagatctggctgctttaa

SEQ ID NO: 3703177 - DNA, 25 bp, Homo sapien
gcctttcccagccatagaccttgag

SEQ ID NO: 3703178 - DNA, 25 bp, Homo sapien
aatagtctcatgagtcattctcacg

SEQ ID NO: 3703179 - DNA, 25 bp, Homo sapien
gaccttgagtagcattaaaacatgg

SEQ ID NO: 3703180 - DNA, 25 bp, Homo sapien
ggaacctgaggagtaacagccaggt

SEQ ID NO: 3703181 - DNA, 25 bp, Homo sapien
tgaaggaacctgaggagtaacagcc

SEQ ID NO: 3703182 - DNA, 25 bp, Homo sapien
ctgaaggaacctgaggagtaacagc

SEQ ID NO: 3703183 - DNA, 25 bp, Homo sapien
aaggaacctgaggagtaacagccag

SEQ ID NO: 3703184 - DNA, 25 bp, Homo sapien
tcaaatagggaggtaaaattcagca

SEQ ID NO: 3703185 - DNA, 25 bp, Homo sapien
aatagggaggtaaaattcagcatgc

SEQ ID NO: 3703186 - DNA, 25 bp, Homo sapien
agcaggtagccggcgaggcccaatc

SEQ ID NO: 3703187 - DNA, 25 bp, Homo sapien
tcattaggaaacagcaggtagccgg

SEQ ID NO: 3703188 - DNA, 25 bp, Homo sapien
tggctgatgcacacatggctgcctg

SEQ ID NO: 3703189 - DNA, 25 bp, Homo sapien
cccacaattccactgtagggtgctg

SEQ ID NO: 3703190 - DNA, 25 bp, Homo sapien
tccaggccgttaactgaggtctaag

SEQ ID NO: 3703191 - DNA, 25 bp, Homo sapien
cctgccgcagacacatacattctat

SEQ ID NO: 3703192 - DNA, 25 bp, Homo sapien
ctgcatgtcctctccacgtgtcatt

SEQ ID NO: 3703193 - DNA, 25 bp, Homo sapien
tgtcctctccacgtgtcatttcctt

SEQ ID NO: 3703194 - DNA, 25 bp, Homo sapien
cctctccacgtgtcatttccttgaa

SEQ ID NO: 3703195 - DNA, 25 bp, Homo sapien
gcatgtcctctccacgtgtcatttc

SEQ ID NO: 3703196 - DNA, 25 bp, Homo sapien
ccaggtttccaagcatttagcaagc

SEQ ID NO: 3703197 - DNA, 25 bp, Homo sapien
gaagctgggccaattctaagcacat

SEQ ID NO: 3703198 - DNA, 25 bp, Homo sapien
gccaggagagagcttgcttagccca

SEQ ID NO: 3703199 - DNA, 25 bp, Homo sapien
tccagacatcagtcagaggtgctgt

SEQ ID NO: 3703200 - DNA, 25 bp, Homo sapien
gcaggatcttggagcaataatattt

SEQ ID NO: 3703201 - DNA, 25 bp, Homo sapien
ttcgaagtgtggtgcaagaagccat

SEQ ID NO: 3703202 - DNA, 25 bp, Homo sapien
cagtgtgggtcttgtgggcaggatc

SEQ ID NO: 3703203 - DNA, 25 bp, Homo sapien
tatttcctttttcgaagtgtggtgc

SEQ ID NO: 3703204 - DNA, 25 bp, Homo sapien
cactggcagcttgctcaaaagggcc

SEQ ID NO: 3703205 - DNA, 25 bp, Homo sapien
tgttcatgttctatccccagggcaa

SEQ ID NO: 3703206 - DNA, 25 bp, Homo sapien
tgtagatcttaccatcctccgaagg

SEQ ID NO: 3703207 - DNA, 25 bp, Homo sapien
gctttaacgtgagaagaagggcctc

SEQ ID NO: 3703208 - DNA, 25 bp, Homo sapien
tctacgtatgcatccatcctgggca

SEQ ID NO: 3703209 - DNA, 25 bp, Homo sapien
gaaactaaggtagcgttacagcttg

SEQ ID NO: 3703210 - DNA, 25 bp, Homo sapien
gggcaacctgcccaactacttggag

SEQ ID NO: 3703211 - DNA, 25 bp, Homo sapien
gagaaagcatggtttggaatcacac

SEQ ID NO: 3703212 - DNA, 25 bp, Homo sapien
tgactgcttccccaagaatctgaag

SEQ ID NO: 3703213 - DNA, 25 bp, Homo sapien
gccatctgggaaggtttcaccgaga

SEQ ID NO: 3703214 - DNA, 25 bp, Homo sapien
ttccgtgcatttgagctcaggcgct

SEQ ID NO: 3703215 - DNA, 25 bp, Homo sapien
ggtgggtcttccttgcttccgtgca

SEQ ID NO: 3703216 - DNA, 25 bp, Homo sapien
tctggggcggtcacacacaggatga

SEQ ID NO: 3703217 - DNA, 25 bp, Homo sapien
cactcccatgggaccccttagaggt

SEQ ID NO: 3703218 - DNA, 25 bp, Homo sapien
aaggaggagaggcacactcccatgg

SEQ ID NO: 3703219 - DNA, 25 bp, Homo sapien
gacagagatccaaggcacttctatt

SEQ ID NO: 3703220 - DNA, 25 bp, Homo sapien
tcagtgtcctctaatccgtcctgca

SEQ ID NO: 3703221 - DNA, 25 bp, Homo sapien
gaattacctggcaggttagtgccac

SEQ ID NO: 3703222 - DNA, 25 bp, Homo sapien
agctgaattacctggcaggttagtg

SEQ ID NO: 3703223 - DNA, 25 bp, Homo sapien
gtgtcctctaatccgtcctgcagct

SEQ ID NO: 3703224 - DNA, 25 bp, Homo sapien
ccctcccactgtccatagccatttt

SEQ ID NO: 3703225 - DNA, 25 bp, Homo sapien
ctagatgtccatgtgtttgttgcta

SEQ ID NO: 3703226 - DNA, 25 bp, Homo sapien
cgtgatgtctagatgtccatgtgtt

SEQ ID NO: 3703227 - DNA, 25 bp, Homo sapien
gtgtttgttgctaagcttataacat

SEQ ID NO: 3703228 - DNA, 25 bp, Homo sapien
cattttcccactgccgcacatttgg

SEQ ID NO: 3703229 - DNA, 25 bp, Homo sapien
attttcccactgccgcacatttggt

SEQ ID NO: 3703230 - DNA, 25 bp, Homo sapien
gcccaagggcctgcatggttctgtg

SEQ ID NO: 3703231 - DNA, 25 bp, Homo sapien
taatgaagactgatgggtaatggga

SEQ ID NO: 3703232 - DNA, 25 bp, Homo sapien
ctgtgggaccttcccagctctaatt

SEQ ID NO: 3703233 - DNA, 25 bp, Homo sapien
ccagctctaatttctcattataatg

SEQ ID NO: 3703234 - DNA, 25 bp, Homo sapien
tcattataatgaagactgatgggta

SEQ ID NO: 3703235 - DNA, 25 bp, Homo sapien
catcaacactgcttattgtccaatt

SEQ ID NO: 3703236 - DNA, 25 bp, Homo sapien
tccaaagtgattttaccaacatttg

SEQ ID NO: 3703237 - DNA, 25 bp, Homo sapien
gaacttaggaagatgagagtctctg

SEQ ID NO: 3703238 - DNA, 25 bp, Homo sapien
aacatttgctcccactgaacttagg

SEQ ID NO: 3703239 - DNA, 25 bp, Homo sapien
ctgtgagtcacaaatttctgttgct

SEQ ID NO: 3703240 - DNA, 25 bp, Homo sapien
tgttgctttaagccatctggtttgt

SEQ ID NO: 3703241 - DNA, 25 bp, Homo sapien
tgtgagtcacaaatttctgttgctt

SEQ ID NO: 3703242 - DNA, 25 bp, Homo sapien
ctttaagccatctggtttgtggtac

SEQ ID NO: 3703243 - DNA, 25 bp, Homo sapien
gatgctcattccgaggtaggaagcc

SEQ ID NO: 3703244 - DNA, 25 bp, Homo sapien
ttccgaggtaggaagccctcactgc

SEQ ID NO: 3703245 - DNA, 25 bp, Homo sapien
tcattccgaggtaggaagccctcac

SEQ ID NO: 3703246 - DNA, 25 bp, Homo sapien
agcagatgctcattccgaggtagga

SEQ ID NO: 3703247 - DNA, 25 bp, Homo sapien
tagaggctgaaaatcaatgaccttc

SEQ ID NO: 3703248 - DNA, 25 bp, Homo sapien
tcctcattagaggtggaaagctcag

SEQ ID NO: 3703249 - DNA, 25 bp, Homo sapien
cagatatgaatctctcacctccagg

SEQ ID NO: 3703250 - DNA, 25 bp, Homo sapien
gcaatcccgtccgttccttcatgaa

SEQ ID NO: 3703251 - DNA, 25 bp, Homo sapien
ccttacaaggcactttgtgtcagca

SEQ ID NO: 3703252 - DNA, 25 bp, Homo sapien
gaaattcaattaattctacagccag

SEQ ID NO: 3703253 - DNA, 25 bp, Homo sapien
gaatgtgaggcaagttgtgaaattc

SEQ ID NO: 3703254 - DNA, 25 bp, Homo sapien
aattaattctacagccagcccacgt

SEQ ID NO: 3703255 - DNA, 25 bp, Homo sapien
tagtacttgtgctgccgaagagaac

SEQ ID NO: 3703256 - DNA, 25 bp, Homo sapien
tttagtacttgtgctgccgaagaga

SEQ ID NO: 3703257 - DNA, 25 bp, Homo sapien
ttttgtgttatccttgcacaagggc

SEQ ID NO: 3703258 - DNA, 25 bp, Homo sapien
cacaagggccatactaaccttctct

SEQ ID NO: 3703259 - DNA, 25 bp, Homo sapien
tgtttcctccttgggcaatggagac

SEQ ID NO: 3703260 - DNA, 25 bp, Homo sapien
gagaccagatgtgtttgtctcaccc

SEQ ID NO: 3703261 - DNA, 25 bp, Homo sapien
gtttcctccttgggcaatggagacc

SEQ ID NO: 3703262 - DNA, 25 bp, Homo sapien
accagatgtgtttgtctcaccctca

SEQ ID NO: 3703263 - DNA, 25 bp, Homo sapien
tgcccctgcattcttgtctctatcc

SEQ ID NO: 3703264 - DNA, 25 bp, Homo sapien
cccctgcattcttgtctctatccat

SEQ ID NO: 3703265 - DNA, 25 bp, Homo sapien
gcccctgcattcttgtctctatcca

SEQ ID NO: 3703266 - DNA, 25 bp, Homo sapien
gcttttgagagccaggaagggtcat

SEQ ID NO: 3703267 - DNA, 25 bp, Homo sapien
tgcttttgagagccaggaagggtca

SEQ ID NO: 3703268 - DNA, 25 bp, Homo sapien
cttgcttttgagagccaggaagggt

SEQ ID NO: 3703269 - DNA, 25 bp, Homo sapien
ttgcttttgagagccaggaagggtc

SEQ ID NO: 3703270 - DNA, 25 bp, Homo sapien
taatgtgggtttcataggcgaaggt

SEQ ID NO: 3703271 - DNA, 25 bp, Homo sapien
tgcactcttaatgtgggtttcatag

SEQ ID NO: 3703272 - DNA, 25 bp, Homo sapien
cactcttaatgtgggtttcataggc

SEQ ID NO: 3703273 - DNA, 25 bp, Homo sapien
ctcttaatgtgggtttcataggcga

SEQ ID NO: 3703274 - DNA, 25 bp, Homo sapien
tccggggagcaattgattccttcca

SEQ ID NO: 3703275 - DNA, 25 bp, Homo sapien
ccctagcagaggacgtggttgcaga

SEQ ID NO: 3703276 - DNA, 25 bp, Homo sapien
tggttgcagagctcaggaagctcca

SEQ ID NO: 3703277 - DNA, 25 bp, Homo sapien
agcttccccctagcagaggacgtgg

SEQ ID NO: 3703278 - DNA, 25 bp, Homo sapien
tagcagcagtcatagaatgatcatc

SEQ ID NO: 3703279 - DNA, 25 bp, Homo sapien
tatgtatcgagtgccataaaggctc

SEQ ID NO: 3703280 - DNA, 25 bp, Homo sapien
catagaatgatcatcttggagtata

SEQ ID NO: 3703281 - DNA, 25 bp, Homo sapien
caggtgcctataaggataccagcca

SEQ ID NO: 3703282 - DNA, 25 bp, Homo sapien
catggaggcttgaaaaggagtgtca

SEQ ID NO: 3703283 - DNA, 25 bp, Homo sapien
cagtttcaggaagagtgcccatgga

SEQ ID NO: 3703284 - DNA, 25 bp, Homo sapien
actgtgagttgtcccagacaaggca

SEQ ID NO: 3703285 - DNA, 25 bp, Homo sapien
tgctatctggacaatcaatgaactg

SEQ ID NO: 3703286 - DNA, 25 bp, Homo sapien
tgctggaaatccagtaaaacccact

SEQ ID NO: 3703287 - DNA, 25 bp, Homo sapien
cagccgccaggttgataggaaagaa

SEQ ID NO: 3703288 - DNA, 25 bp, Homo sapien
tgtacatcatgagaacctgtgcaga

SEQ ID NO: 3703289 - DNA, 25 bp, Homo sapien
attgagggagttagtaaacacgtag

SEQ ID NO: 3703290 - DNA, 25 bp, Homo sapien
acacgtagttgaaatgattgataac

SEQ ID NO: 3703291 - DNA, 25 bp, Homo sapien
ttattcatcagctgagagaatgagg

SEQ ID NO: 3703292 - DNA, 25 bp, Homo sapien
ccagtgaatggttggagttctcaga

SEQ ID NO: 3703293 - DNA, 25 bp, Homo sapien
agaatttggtcacgggctgtctgtc

SEQ ID NO: 3703294 - DNA, 25 bp, Homo sapien
tgttctcttccactcaaccagtgaa

SEQ ID NO: 3703295 - DNA, 25 bp, Homo sapien
gagttctcagaatttggtcacgggc

SEQ ID NO: 3703296 - DNA, 25 bp, Homo sapien
tggatccccacctgacctgcagagg

SEQ ID NO: 3703297 - DNA, 25 bp, Homo sapien
tggagctgtaacatggtctccagca

SEQ ID NO: 3703298 - DNA, 25 bp, Homo sapien
tgctggggtccataccatgtgcacc

SEQ ID NO: 3703299 - DNA, 25 bp, Homo sapien
cttcagagtccctttggattggagc

SEQ ID NO: 3703300 - DNA, 25 bp, Homo sapien
gcttcttctatagccttgtagagtt

SEQ ID NO: 3703301 - DNA, 25 bp, Homo sapien
tgcttcttctatagccttgtagagt

SEQ ID NO: 3703302 - DNA, 25 bp, Homo sapien
attgcttcttctatagccttgtaga

SEQ ID NO: 3703303 - DNA, 25 bp, Homo sapien
tgattgcttcttctatagccttgta

SEQ ID NO: 3703304 - DNA, 25 bp, Homo sapien
cagcttgttcaggcttctccaagct

SEQ ID NO: 3703305 - DNA, 25 bp, Homo sapien
aatgaaagtctttgacagtgagggt

SEQ ID NO: 3703306 - DNA, 25 bp, Homo sapien
tagttcttccaatggtcccaggtca

SEQ ID NO: 3703307 - DNA, 25 bp, Homo sapien
aggtcatcagtttcccttccgtgga

SEQ ID NO: 3703308 - DNA, 25 bp, Homo sapien
taaatgctccattattaccggatcc

SEQ ID NO: 3703309 - DNA, 25 bp, Homo sapien
cctgggctagtgctcaattgactga

SEQ ID NO: 3703310 - DNA, 25 bp, Homo sapien
aattttggctggtctgtcttccccg

SEQ ID NO: 3703311 - DNA, 25 bp, Homo sapien
tgtttccctggcattaaatagagag

SEQ ID NO: 3703312 - DNA, 25 bp, Homo sapien
tgagtgctaaatctatgaccccagg

SEQ ID NO: 3703313 - DNA, 25 bp, Homo sapien
cggattcacgggtaaacacagtctg

SEQ ID NO: 3703314 - DNA, 25 bp, Homo sapien
taatatgggatgagaaacgcagagc

SEQ ID NO: 3703315 - DNA, 25 bp, Homo sapien
caagacaatgcctgggagaggttcc

SEQ ID NO: 3703316 - DNA, 25 bp, Homo sapien
atgcgtaagtccagaccaagcaagg

SEQ ID NO: 3703317 - DNA, 25 bp, Homo sapien
tccctctttgcaggcgacatgtgcc

SEQ ID NO: 3703318 - DNA, 25 bp, Homo sapien
tccctactcttccaaatgcgtaagt

SEQ ID NO: 3703319 - DNA, 25 bp, Homo sapien
gctgggctcctcacaagtacccacc

SEQ ID NO: 3703320 - DNA, 25 bp, Homo sapien
tgttacctgcaaggcgatccatcgc

SEQ ID NO: 3703321 - DNA, 25 bp, Homo sapien
tatacagctgaggatcgggtggctc

SEQ ID NO: 3703322 - DNA, 25 bp, Homo sapien
cccactgggaagatggtcgtgcaca

SEQ ID NO: 3703323 - DNA, 25 bp, Homo sapien
gttggagatccgcagcatacagcct

SEQ ID NO: 3703324 - DNA, 25 bp, Homo sapien
gatatattaaaggttaatggtgcat

SEQ ID NO: 3703325 - DNA, 25 bp, Homo sapien
tgtgacagcctcataattgattaag

SEQ ID NO: 3703326 - DNA, 25 bp, Homo sapien
aatatttgcgggtgttgagagctga

SEQ ID NO: 3703327 - DNA, 25 bp, Homo sapien
taagagccccagcactgatatatta

SEQ ID NO: 3703328 - DNA, 25 bp, Homo sapien
ggaaccctgtgattagcccatgtgt

SEQ ID NO: 3703329 - DNA, 25 bp, Homo sapien
gggaaccctgtgattagcccatgtg

SEQ ID NO: 3703330 - DNA, 25 bp, Homo sapien
gaaccctgtgattagcccatgtgtc

SEQ ID NO: 3703331 - DNA, 25 bp, Homo sapien
accctgtgattagcccatgtgtcat

SEQ ID NO: 3703332 - DNA, 25 bp, Homo sapien
gtcaggcctggtttgggccacatgc

SEQ ID NO: 3703333 - DNA, 25 bp, Homo sapien
gacaagtcaggcctggtttgggcca

SEQ ID NO: 3703334 - DNA, 25 bp, Homo sapien
gaagacaagtcaggcctggtttggg

SEQ ID NO: 3703335 - DNA, 25 bp, Homo sapien
caggcctggtttgggccacatgctt

SEQ ID NO: 3703336 - DNA, 25 bp, Homo sapien
ggtaatggttatgaaatagccgttg

SEQ ID NO: 3703337 - DNA, 25 bp, Homo sapien
ttgggtaatggttatgaaatagccg

SEQ ID NO: 3703338 - DNA, 25 bp, Homo sapien
aatggttatgaaatagccgttggac

SEQ ID NO: 3703339 - DNA, 25 bp, Homo sapien
tggttatgaaatagccgttggacat

SEQ ID NO: 3703340 - DNA, 25 bp, Homo sapien
atcaacagagaagacggtgccctgc

SEQ ID NO: 3703341 - DNA, 25 bp, Homo sapien
caacagagaagacggtgccctgcat

SEQ ID NO: 3703342 - DNA, 25 bp, Homo sapien
tcaacagagaagacggtgccctgca

SEQ ID NO: 3703343 - DNA, 25 bp, Homo sapien
atatatccatgttctttgctgccat

SEQ ID NO: 3703344 - DNA, 25 bp, Homo sapien
tttgctgccatgaaaatctccttgc

SEQ ID NO: 3703345 - DNA, 25 bp, Homo sapien
cttgctggaggtgatccctgtggca

SEQ ID NO: 3703346 - DNA, 25 bp, Homo sapien
gaggtgatccctgtggcattgcaca

SEQ ID NO: 3703347 - DNA, 25 bp, Homo sapien
ttactggtggagttggacactggtg

SEQ ID NO: 3703348 - DNA, 25 bp, Homo sapien
actggtggagttggacactggtggg

SEQ ID NO: 3703349 - DNA, 25 bp, Homo sapien
tactggtggagttggacactggtgg

SEQ ID NO: 3703350 - DNA, 25 bp, Homo sapien
ctggtggagttggacactggtggga

SEQ ID NO: 3703351 - DNA, 25 bp, Homo sapien
aagatgagctgcgtgaataggctgg

SEQ ID NO: 3703352 - DNA, 25 bp, Homo sapien
tttgggaagatgagctgcgtgaata

SEQ ID NO: 3703353 - DNA, 25 bp, Homo sapien
agctgcgtgaataggctggagaagg

SEQ ID NO: 3703354 - DNA, 25 bp, Homo sapien
tgagctgcgtgaataggctggagaa

SEQ ID NO: 3703355 - DNA, 25 bp, Homo sapien
acaaatgaaaggcttcctagccatg

SEQ ID NO: 3703356 - DNA, 25 bp, Homo sapien
caaatgaaaggcttcctagccatgt

SEQ ID NO: 3703357 - DNA, 25 bp, Homo sapien
catgtgattcatgggcataccatgc

SEQ ID NO: 3703358 - DNA, 25 bp, Homo sapien
tccctgtaatctggagggtttccta

SEQ ID NO: 3703359 - DNA, 25 bp, Homo sapien
tggtgaatcatagcacccaagtagt

SEQ ID NO: 3703360 - DNA, 25 bp, Homo sapien
catatgtggaggtcactgcacagtc

SEQ ID NO: 3703361 - DNA, 25 bp, Homo sapien
agccagggaacctcaaattgctgca

SEQ ID NO: 3703362 - DNA, 25 bp, Homo sapien
tcttggtgctttgggtaaagtttga

SEQ ID NO: 3703363 - DNA, 25 bp, Homo sapien
tgttatcatctgagaatcttggtgc

SEQ ID NO: 3703364 - DNA, 25 bp, Homo sapien
cctgctgatgctctggcaacaacat

SEQ ID NO: 3703365 - DNA, 25 bp, Homo sapien
tgtagtcactatagctgtggcacca

SEQ ID NO: 3703366 - DNA, 25 bp, Homo sapien
aaatatcaaaggtggaataggagcc

SEQ ID NO: 3703367 - DNA, 25 bp, Homo sapien
tctaatgtgcctgtgtagtcactat

SEQ ID NO: 3703368 - DNA, 25 bp, Homo sapien
taaaggctcaatgtgtctaatgtgc

SEQ ID NO: 3703369 - DNA, 25 bp, Homo sapien
tctggtctatctggactgcagtgcc

SEQ ID NO: 3703370 - DNA, 25 bp, Homo sapien
taggcctgggtttgtaaatctgtgg

SEQ ID NO: 3703371 - DNA, 25 bp, Homo sapien
gctgatggctgtggttctggtctat

SEQ ID NO: 3703372 - DNA, 25 bp, Homo sapien
tgtggtggccattgcatctgggcat

SEQ ID NO: 3703373 - DNA, 25 bp, Homo sapien
gctccactgtggtccacacgagtgg

SEQ ID NO: 3703374 - DNA, 25 bp, Homo sapien
gtccacacgagtgggtggtcctgtg

SEQ ID NO: 3703375 - DNA, 25 bp, Homo sapien
ccactgtggtccacacgagtgggtg

SEQ ID NO: 3703376 - DNA, 25 bp, Homo sapien
tggtccacacgagtgggtggtcctg

SEQ ID NO: 3703377 - DNA, 25 bp, Homo sapien
tctgtgcagtgtcagctttggcagg

SEQ ID NO: 3703378 - DNA, 25 bp, Homo sapien
ctgcacacggatggcggtactctgt

SEQ ID NO: 3703379 - DNA, 25 bp, Homo sapien
agctctgtggttcctgcttacacag

SEQ ID NO: 3703380 - DNA, 25 bp, Homo sapien
gtcctctccacactgcggctgctct

SEQ ID NO: 3703381 - DNA, 25 bp, Homo sapien
actggcagttgaggcataatccttc

SEQ ID NO: 3703382 - DNA, 25 bp, Homo sapien
gagcttcgagcatcagggcggatct

SEQ ID NO: 3703383 - DNA, 25 bp, Homo sapien
tgctgtggctgcgactgctgccacc

SEQ ID NO: 3703384 - DNA, 25 bp, Homo sapien
catcagggcggatctctggtggcac

SEQ ID NO: 3703385 - DNA, 25 bp, Homo sapien
caagtgctgtggcatcatccagaga

SEQ ID NO: 3703386 - DNA, 25 bp, Homo sapien
tcatccagagatggggacaacactg

SEQ ID NO: 3703387 - DNA, 25 bp, Homo sapien
aggatttatttgaggccccaagtgc

SEQ ID NO: 3703388 - DNA, 25 bp, Homo sapien
ccactggtggaaatatgaatacagg

SEQ ID NO: 3703389 - DNA, 25 bp, Homo sapien
ttgtggcctactccctgcaggactc

SEQ ID NO: 3703390 - DNA, 25 bp, Homo sapien
taagggtcattgtggcctactccct

SEQ ID NO: 3703391 - DNA, 25 bp, Homo sapien
gacgggaactcagaataagggtcat

SEQ ID NO: 3703392 - DNA, 25 bp, Homo sapien
agagccctgtaagtactctgacggg

SEQ ID NO: 3703393 - DNA, 25 bp, Homo sapien
cagaaaggaggcatgcctgcactct

SEQ ID NO: 3703394 - DNA, 25 bp, Homo sapien
cgagagtgttgagctccagaaagga

SEQ ID NO: 3703395 - DNA, 25 bp, Homo sapien
tcaaagcccatcgagagtgttgagc

SEQ ID NO: 3703396 - DNA, 25 bp, Homo sapien
tctggagctaatatgtggcacttgc

SEQ ID NO: 3703397 - DNA, 25 bp, Homo sapien
cagtggatttcgcatggctggatca

SEQ ID NO: 3703398 - DNA, 25 bp, Homo sapien
cactcaaggagtgcacatggaagtg

SEQ ID NO: 3703399 - DNA, 25 bp, Homo sapien
ctaaggatccagcagaagatgcacc

SEQ ID NO: 3703400 - DNA, 25 bp, Homo sapien
agtccctgcaggatgccactcaagg

SEQ ID NO: 3703401 - DNA, 25 bp, Homo sapien
cataagttggagacatttactcctt

SEQ ID NO: 3703402 - DNA, 25 bp, Homo sapien
ttcttagtccggaatgcacttcttg

SEQ ID NO: 3703403 - DNA, 25 bp, Homo sapien
tttatatcttgcaatgggcttctta

SEQ ID NO: 3703404 - DNA, 25 bp, Homo sapien
cttcttgtggcattacataagttgg

SEQ ID NO: 3703405 - DNA, 25 bp, Homo sapien
agccttgtgtctgctgataattcac

SEQ ID NO: 3703406 - DNA, 25 bp, Homo sapien
tgtgtctgctgataattcactgagt

SEQ ID NO: 3703407 - DNA, 25 bp, Homo sapien
gctctttgtgcagggattgccacgc

SEQ ID NO: 3703408 - DNA, 25 bp, Homo sapien
ctttgtgcagggattgccacgccat

SEQ ID NO: 3703409 - DNA, 25 bp, Homo sapien
atagtaaattgcactccctgcacag

SEQ ID NO: 3703410 - DNA, 25 bp, Homo sapien
tctgaaggatccacaaatgatctgt

SEQ ID NO: 3703411 - DNA, 25 bp, Homo sapien
aggatccacaaatgatctgtaatga

SEQ ID NO: 3703412 - DNA, 25 bp, Homo sapien
tttcatctgaaggatccacaaatga

SEQ ID NO: 3703413 - DNA, 25 bp, Homo sapien
tggccccagccagcgtgactggcat

SEQ ID NO: 3703414 - DNA, 25 bp, Homo sapien
gtggccccagccagcgtgactggca

SEQ ID NO: 3703415 - DNA, 25 bp, Homo sapien
gcactcaggccacgcctggcagtgg

SEQ ID NO: 3703416 - DNA, 25 bp, Homo sapien
gcctggcactcaggccacgcctggc

SEQ ID NO: 3703417 - DNA, 25 bp, Homo sapien
caaatgcgattcatgtggctgcctc

SEQ ID NO: 3703418 - DNA, 25 bp, Homo sapien
gatagtgtctttgcttgcagtttta

SEQ ID NO: 3703419 - DNA, 25 bp, Homo sapien
tagaacaacataatggatagtgtct

SEQ ID NO: 3703420 - DNA, 25 bp, Homo sapien
tgagtttctagataagggacataga

SEQ ID NO: 3703421 - DNA, 25 bp, Homo sapien
cccgcaatccccggggctggccttg

SEQ ID NO: 3703422 - DNA, 25 bp, Homo sapien
ccttggccctgggagcagggacagc

SEQ ID NO: 3703423 - DNA, 25 bp, Homo sapien
ggccttggccctgggagcagggaca

SEQ ID NO: 3703424 - DNA, 25 bp, Homo sapien
cgcaatccccggggctggccttggc

SEQ ID NO: 3703425 - DNA, 25 bp, Homo sapien
gacactctccatggacgtgcacttg

SEQ ID NO: 3703426 - DNA, 25 bp, Homo sapien
gagtcacgacactctccatggacgt

SEQ ID NO: 3703427 - DNA, 25 bp, Homo sapien
ctgcagagtcacgacactctccatg

SEQ ID NO: 3703428 - DNA, 25 bp, Homo sapien
tggtggtcttctttacgaagcattt

SEQ ID NO: 3703429 - DNA, 25 bp, Homo sapien
cagagtgtcctatgggcttttgttc

SEQ ID NO: 3703430 - DNA, 25 bp, Homo sapien
tgcagagtgtcctatgggcttttgt

SEQ ID NO: 3703431 - DNA, 25 bp, Homo sapien
agagtgtcctatgggcttttgttct

SEQ ID NO: 3703432 - DNA, 25 bp, Homo sapien
ctgcagagtgtcctatgggcttttg

SEQ ID NO: 3703433 - DNA, 25 bp, Homo sapien
agcaggtgcaaaccgtttgacacca

SEQ ID NO: 3703434 - DNA, 25 bp, Homo sapien
gcaggtgcaaaccgtttgacaccat

SEQ ID NO: 3703435 - DNA, 25 bp, Homo sapien
cagcaggtgcaaaccgtttgacacc

SEQ ID NO: 3703436 - DNA, 25 bp, Homo sapien
ctggggaggttgggctagcagaagc

SEQ ID NO: 3703437 - DNA, 25 bp, Homo sapien
tggggaggttgggctagcagaagct

SEQ ID NO: 3703438 - DNA, 25 bp, Homo sapien
ggggaggttgggctagcagaagctt

SEQ ID NO: 3703439 - DNA, 25 bp, Homo sapien
gggaggttgggctagcagaagcttg

SEQ ID NO: 3703440 - DNA, 25 bp, Homo sapien
ggcagcttataagtttccagaagag

SEQ ID NO: 3703441 - DNA, 25 bp, Homo sapien
tggcagcttataagtttccagaaga

SEQ ID NO: 3703442 - DNA, 25 bp, Homo sapien
gcttataagtttccagaagagagtg

SEQ ID NO: 3703443 - DNA, 25 bp, Homo sapien
cagcttataagtttccagaagagag

SEQ ID NO: 3703444 - DNA, 25 bp, Homo sapien
tctttgaagttggaaatatcctcat

SEQ ID NO: 3703445 - DNA, 25 bp, Homo sapien
ctttgaagttggaaatatcctcata

SEQ ID NO: 3703446 - DNA, 25 bp, Homo sapien
ctctttgaagttggaaatatcctca

SEQ ID NO: 3703447 - DNA, 25 bp, Homo sapien
ttgaagttggaaatatcctcataaa

SEQ ID NO: 3703448 - DNA, 25 bp, Homo sapien
gggaatgggtggctgctgaccttca

SEQ ID NO: 3703449 - DNA, 25 bp, Homo sapien
gaatgggtggctgctgaccttcagc

SEQ ID NO: 3703450 - DNA, 25 bp, Homo sapien
atgggtggctgctgaccttcagcat

SEQ ID NO: 3703451 - DNA, 25 bp, Homo sapien
ctgggaatgggtggctgctgacctt

SEQ ID NO: 3703452 - DNA, 25 bp, Homo sapien
tgataggtgacagccaggtttgcag

SEQ ID NO: 3703453 - DNA, 25 bp, Homo sapien
cttgataggtgacagccaggtttgc

SEQ ID NO: 3703454 - DNA, 25 bp, Homo sapien
ggctgcctttccatgtcacgttcac

SEQ ID NO: 3703455 - DNA, 25 bp, Homo sapien
ataggtgacagccaggtttgcagag

SEQ ID NO: 3703456 - DNA, 25 bp, Homo sapien
ggcttcactgtgcttatgataccag

SEQ ID NO: 3703457 - DNA, 25 bp, Homo sapien
atagctcccgggctgacagatgcgg

SEQ ID NO: 3703458 - DNA, 25 bp, Homo sapien
cgggagacttgttgggcatagctaa

SEQ ID NO: 3703459 - DNA, 25 bp, Homo sapien
gtgggctctacaggggatctgctca

SEQ ID NO: 3703460 - DNA, 25 bp, Homo sapien
cacagatacagggtaggtggtggtc

SEQ ID NO: 3703461 - DNA, 25 bp, Homo sapien
tggtggtcagacctctccagatgat

SEQ ID NO: 3703462 - DNA, 25 bp, Homo sapien
ccactggtggagatgcacagataca

SEQ ID NO: 3703463 - DNA, 25 bp, Homo sapien
tcttgggtcccactggtggagatgc

SEQ ID NO: 3703464 - DNA, 25 bp, Homo sapien
cgagtgtgttttccatagggaagaa

SEQ ID NO: 3703465 - DNA, 25 bp, Homo sapien
tctgctggccaggaaacatccggag

SEQ ID NO: 3703466 - DNA, 25 bp, Homo sapien
cctcatatgggaacacgagtgtgtt

SEQ ID NO: 3703467 - DNA, 25 bp, Homo sapien
ggaaacatccggagatgctgcagaa

SEQ ID NO: 3703468 - DNA, 25 bp, Homo sapien
ccccggcagagacctgtgtccaggc

SEQ ID NO: 3703469 - DNA, 25 bp, Homo sapien
ctgcttccccggcagagacctgtgt

SEQ ID NO: 3703470 - DNA, 25 bp, Homo sapien
cggcagagacctgtgtccaggccat

SEQ ID NO: 3703471 - DNA, 25 bp, Homo sapien
tgcttccccggcagagacctgtgtc

SEQ ID NO: 3703472 - DNA, 25 bp, Homo sapien
aggagcaggtatgaggaggacttca

SEQ ID NO: 3703473 - DNA, 25 bp, Homo sapien
gagcaggtatgaggaggacttcagc

SEQ ID NO: 3703474 - DNA, 25 bp, Homo sapien
ggagcaggtatgaggaggacttcag

SEQ ID NO: 3703475 - DNA, 25 bp, Homo sapien
gagaaagtaagggagatgagcaggc

SEQ ID NO: 3703476 - DNA, 25 bp, Homo sapien
catgttgagtggttccaggtcttta

SEQ ID NO: 3703477 - DNA, 25 bp, Homo sapien
ctcgttccatgttgagtggttccag

SEQ ID NO: 3703478 - DNA, 25 bp, Homo sapien
cccttgggcttaatctggagagagt

SEQ ID NO: 3703479 - DNA, 25 bp, Homo sapien
taatctggagagagtctagaggaag

SEQ ID NO: 3703480 - DNA, 25 bp, Homo sapien
tgggagctgtagtggttgtgatgga

SEQ ID NO: 3703481 - DNA, 25 bp, Homo sapien
agctgctgcttctgagagtgctgaa

SEQ ID NO: 3703482 - DNA, 25 bp, Homo sapien
tgctgcttctgagagtgctgaatgg

SEQ ID NO: 3703483 - DNA, 25 bp, Homo sapien
ttaggagtcagtgcctgaggctggg

SEQ ID NO: 3703484 - DNA, 25 bp, Homo sapien
cactggcatgggaggagcatcctgg

SEQ ID NO: 3703485 - DNA, 25 bp, Homo sapien
gcactggcatgggaggagcatcctg

SEQ ID NO: 3703486 - DNA, 25 bp, Homo sapien
tggcatgggaggagcatcctggatt

SEQ ID NO: 3703487 - DNA, 25 bp, Homo sapien
actggcatgggaggagcatcctgga

SEQ ID NO: 3703488 - DNA, 25 bp, Homo sapien
tgcacagattctgcccactgtcctc

SEQ ID NO: 3703489 - DNA, 25 bp, Homo sapien
cctgcacagattctgcccactgtcc

SEQ ID NO: 3703490 - DNA, 25 bp, Homo sapien
ctgcacctgcacagattctgcccac

SEQ ID NO: 3703491 - DNA, 25 bp, Homo sapien
cttggccaaagctgcccctgcacct

SEQ ID NO: 3703492 - DNA, 25 bp, Homo sapien
cagggcaggagtccaacaaggttaa

SEQ ID NO: 3703493 - DNA, 25 bp, Homo sapien
gggcacctgctccatatttaaactg

SEQ ID NO: 3703494 - DNA, 25 bp, Homo sapien
tgcaatgtccatctccgtggaaggg

SEQ ID NO: 3703495 - DNA, 25 bp, Homo sapien
tatttgatgggacagctgcctgaca

SEQ ID NO: 3703496 - DNA, 25 bp, Homo sapien
cagacccggcaggtcaggctgccat

SEQ ID NO: 3703497 - DNA, 25 bp, Homo sapien
ctcacagcagacccggcaggtcagg

SEQ ID NO: 3703498 - DNA, 25 bp, Homo sapien
acccggcaggtcaggctgccatgct

SEQ ID NO: 3703499 - DNA, 25 bp, Homo sapien
cagcagacccggcaggtcaggctgc

SEQ ID NO: 3703500 - DNA, 25 bp, Homo sapien
ttgcggatgctaaccaggtctggct

SEQ ID NO: 3703501 - DNA, 25 bp, Homo sapien
aataagcaagttattttgcggatgc

SEQ ID NO: 3703502 - DNA, 25 bp, Homo sapien
ggatgatctcatcccggactgccca

SEQ ID NO: 3703503 - DNA, 25 bp, Homo sapien
cattccaaccctggtcatggctcat

SEQ ID NO: 3703504 - DNA, 25 bp, Homo sapien
taaatgggtcgtttgcaccagacgg

SEQ ID NO: 3703505 - DNA, 25 bp, Homo sapien
gggctggctaccttattatcttgct

SEQ ID NO: 3703506 - DNA, 25 bp, Homo sapien
tattatcttgcttcttatcatcact

SEQ ID NO: 3703507 - DNA, 25 bp, Homo sapien
tatcatcacttctgaggtgtttaaa

SEQ ID NO: 3703508 - DNA, 25 bp, Homo sapien
ttagagcgtctcacaagaaaattta

SEQ ID NO: 3703509 - DNA, 25 bp, Homo sapien
ccaattgaagttgtaggcatgctgc

SEQ ID NO: 3703510 - DNA, 25 bp, Homo sapien
gagcgtctcacaagaaaatttagcc

SEQ ID NO: 3703511 - DNA, 25 bp, Homo sapien
cttattttaggccaattgaagttgt

SEQ ID NO: 3703512 - DNA, 25 bp, Homo sapien
agcaacacccccttgggccttgagg

SEQ ID NO: 3703513 - DNA, 25 bp, Homo sapien
tagttggagcgaattatcatcaaaa

SEQ ID NO: 3703514 - DNA, 25 bp, Homo sapien
tgtgttgtgcatgttagcaacaccc

SEQ ID NO: 3703515 - DNA, 25 bp, Homo sapien
tcaaaactctgggattggatgggtt

SEQ ID NO: 3703516 - DNA, 25 bp, Homo sapien
gggctctcaaaagctttcgcctgag

SEQ ID NO: 3703517 - DNA, 25 bp, Homo sapien
gccttttgaagacacgcccaggtcc

SEQ ID NO: 3703518 - DNA, 25 bp, Homo sapien
gtgccagtgtgctgatatttcccca

SEQ ID NO: 3703519 - DNA, 25 bp, Homo sapien
tgcatttggcgatgtgccctcacag

SEQ ID NO: 3703520 - DNA, 25 bp, Homo sapien
ggtctcacaaggtggcactgaagcc

SEQ ID NO: 3703521 - DNA, 25 bp, Homo sapien
aaggtctcacaaggtggcactgaag

SEQ ID NO: 3703522 - DNA, 25 bp, Homo sapien
gaaggtctcacaaggtggcactgaa

SEQ ID NO: 3703523 - DNA, 25 bp, Homo sapien
gagaaggtctcacaaggtggcactg

SEQ ID NO: 3703524 - DNA, 25 bp, Homo sapien
tgggtcacaagtgtgtgtttcagtc

SEQ ID NO: 3703525 - DNA, 25 bp, Homo sapien
ggtggagagccttcctgcttatcag

SEQ ID NO: 3703526 - DNA, 25 bp, Homo sapien
tggagagccttcctgcttatcagct

SEQ ID NO: 3703527 - DNA, 25 bp, Homo sapien
gtttcagtcgatcctcatctgctct

SEQ ID NO: 3703528 - DNA, 25 bp, Homo sapien
cctggagcttgatccctggacttcc

SEQ ID NO: 3703529 - DNA, 25 bp, Homo sapien
gacttccagggtatggtttcactgg

SEQ ID NO: 3703530 - DNA, 25 bp, Homo sapien
tcagaggccaatgttggccatgtgt

SEQ ID NO: 3703531 - DNA, 25 bp, Homo sapien
gggcctggagcttgatccctggact

SEQ ID NO: 3703532 - DNA, 25 bp, Homo sapien
gcttccagttgatgcccacagagcc

SEQ ID NO: 3703533 - DNA, 25 bp, Homo sapien
tccaggtactgtggcccacactgtg

SEQ ID NO: 3703534 - DNA, 25 bp, Homo sapien
gcttccctgactctcatggagcctc

SEQ ID NO: 3703535 - DNA, 25 bp, Homo sapien
tacaataccccctgctatttccagg

SEQ ID NO: 3703536 - DNA, 25 bp, Homo sapien
taacttccaagattagaggagacaa

SEQ ID NO: 3703537 - DNA, 25 bp, Homo sapien
gattagaggagacaaggcgtgttca

SEQ ID NO: 3703538 - DNA, 25 bp, Homo sapien
ttaacttccaagattagaggagaca

SEQ ID NO: 3703539 - DNA, 25 bp, Homo sapien
ccaagattagaggagacaaggcgtg

SEQ ID NO: 3703540 - DNA, 25 bp, Homo sapien
ggagggttctcgagggccaggacca

SEQ ID NO: 3703541 - DNA, 25 bp, Homo sapien
gagggttctcgagggccaggaccat

SEQ ID NO: 3703542 - DNA, 25 bp, Homo sapien
tggagggttctcgagggccaggacc

SEQ ID NO: 3703543 - DNA, 25 bp, Homo sapien
ctgttctgcacacaagtgttccatc

SEQ ID NO: 3703544 - DNA, 25 bp, Homo sapien
ttctgcacacaagtgttccatccag

SEQ ID NO: 3703545 - DNA, 25 bp, Homo sapien
acacaagtgttccatccagcctctt

SEQ ID NO: 3703546 - DNA, 25 bp, Homo sapien
acaagtgttccatccagcctcttgc

SEQ ID NO: 3703547 - DNA, 25 bp, Homo sapien
gcacagatctgatgggctcaggaaa

SEQ ID NO: 3703548 - DNA, 25 bp, Homo sapien
gatgcccagaacttcgagctgtggt

SEQ ID NO: 3703549 - DNA, 25 bp, Homo sapien
gaaatgaaggtacatggatgcccag

SEQ ID NO: 3703550 - DNA, 25 bp, Homo sapien
tgtctctatacaatgtgtcacttct

SEQ ID NO: 3703551 - DNA, 25 bp, Homo sapien
caggtctctggcagatgtcagtttc

SEQ ID NO: 3703552 - DNA, 25 bp, Homo sapien
tgagaccacatggatcctcatcctc

SEQ ID NO: 3703553 - DNA, 25 bp, Homo sapien
gactcagaacgcttgtggaccagcc

SEQ ID NO: 3703554 - DNA, 25 bp, Homo sapien
gaacgcttgtggaccagccgcacct

SEQ ID NO: 3703555 - DNA, 25 bp, Homo sapien
acagcgagactcagaacgcttgtgg

SEQ ID NO: 3703556 - DNA, 25 bp, Homo sapien
tgagctcctttatgcttcccagcgg

SEQ ID NO: 3703557 - DNA, 25 bp, Homo sapien
cattgtccagttcaccatgagctcc

SEQ ID NO: 3703558 - DNA, 25 bp, Homo sapien
caggttcccgttctggcatttccca

SEQ ID NO: 3703559 - DNA, 25 bp, Homo sapien
ctggcgtatgtttctctagcacctg

SEQ ID NO: 3703560 - DNA, 25 bp, Homo sapien
agagaaaggagcttcggcaccctgc

SEQ ID NO: 3703561 - DNA, 25 bp, Homo sapien
agaaaggagcttcggcaccctgcag

SEQ ID NO: 3703562 - DNA, 25 bp, Homo sapien
ggagagaaaggagcttcggcaccct

SEQ ID NO: 3703563 - DNA, 25 bp, Homo sapien
tggagagaaaggagcttcggcaccc

SEQ ID NO: 3703564 - DNA, 25 bp, Homo sapien
ttccagggctttgctaagcacatcc

SEQ ID NO: 3703565 - DNA, 25 bp, Homo sapien
gataagctgtatgatcacagccctc

SEQ ID NO: 3703566 - DNA, 25 bp, Homo sapien
agttgtcgctgtctcctggcctctg

SEQ ID NO: 3703567 - DNA, 25 bp, Homo sapien
gctttgctaagcacatccctggagt

SEQ ID NO: 3703568 - DNA, 25 bp, Homo sapien
gttgtagttgttccccatcgcttcg

SEQ ID NO: 3703569 - DNA, 25 bp, Homo sapien
tgttccccatcgcttcgtgcaatgt

SEQ ID NO: 3703570 - DNA, 25 bp, Homo sapien
gaatataagttgtagttgttcccca

SEQ ID NO: 3703571 - DNA, 25 bp, Homo sapien
ccatcgcttcgtgcaatgtccgctt

SEQ ID NO: 3703572 - DNA, 25 bp, Homo sapien
ggccaaggtgacctgattcctgaag

SEQ ID NO: 3703573 - DNA, 25 bp, Homo sapien
aatgctggcagatttatcattcttc

SEQ ID NO: 3703574 - DNA, 25 bp, Homo sapien
gctgaactggagtttggtgtgcact

SEQ ID NO: 3703575 - DNA, 25 bp, Homo sapien
gggtattcaggtggaaagctgcctg

SEQ ID NO: 3703576 - DNA, 25 bp, Homo sapien
tgcctgcgccgtccttctgaggctg

SEQ ID NO: 3703577 - DNA, 25 bp, Homo sapien
cttgcccttgggtgcctgcgccgtc

SEQ ID NO: 3703578 - DNA, 25 bp, Homo sapien
ttgggtgcctgcgccgtccttctga

SEQ ID NO: 3703579 - DNA, 25 bp, Homo sapien
gcccttgggtgcctgcgccgtcctt

SEQ ID NO: 3703580 - DNA, 25 bp, Homo sapien
gctgcaccaccatcctgagcagagc

SEQ ID NO: 3703581 - DNA, 25 bp, Homo sapien
agagctggtggctgcaccaccatcc

SEQ ID NO: 3703582 - DNA, 25 bp, Homo sapien
tggctgcaccaccatcctgagcaga

SEQ ID NO: 3703583 - DNA, 25 bp, Homo sapien
ctggtggctgcaccaccatcctgag

SEQ ID NO: 3703584 - DNA, 25 bp, Homo sapien
gaaacttgagaattgggtgagagaa

SEQ ID NO: 3703585 - DNA, 25 bp, Homo sapien
ttctgcactgactgtaggacgtgct

SEQ ID NO: 3703586 - DNA, 25 bp, Homo sapien
taatggatacaaagccacggaagcg

SEQ ID NO: 3703587 - DNA, 25 bp, Homo sapien
tatagactttacatttggctctggg

SEQ ID NO: 3703588 - DNA, 25 bp, Homo sapien
gtgtggtcatagctgccagcccctt

SEQ ID NO: 3703589 - DNA, 25 bp, Homo sapien
tgtggtcatagctgccagccccttc

SEQ ID NO: 3703590 - DNA, 25 bp, Homo sapien
tcagagagccatgcttatgagggaa

SEQ ID NO: 3703591 - DNA, 25 bp, Homo sapien
cagactggaacaagtatgcacatgt

SEQ ID NO: 3703592 - DNA, 25 bp, Homo sapien
ccatgcttatgagggaagtgcggca

SEQ ID NO: 3703593 - DNA, 25 bp, Homo sapien
catgtgcacccttacacatgtgtgt

SEQ ID NO: 3703594 - DNA, 25 bp, Homo sapien
cctaggcacttcatcggccatgcat

SEQ ID NO: 3703595 - DNA, 25 bp, Homo sapien
tcatcggccatgcatgaaggtccag

SEQ ID NO: 3703596 - DNA, 25 bp, Homo sapien
ccatgcatgaaggtccagtgcactg

SEQ ID NO: 3703597 - DNA, 25 bp, Homo sapien
tgtccgctgtcgcacaccctaggca

SEQ ID NO: 3703598 - DNA, 25 bp, Homo sapien
tggcttcctgctctcaatgctgtac

SEQ ID NO: 3703599 - DNA, 25 bp, Homo sapien
ttcactggcttcctgctctcaatgc

SEQ ID NO: 3703600 - DNA, 25 bp, Homo sapien
ctggcttcctgctctcaatgctgta

SEQ ID NO: 3703601 - DNA, 25 bp, Homo sapien
cactggcttcctgctctcaatgctg

SEQ ID NO: 3703602 - DNA, 25 bp, Homo sapien
acatgggggcacgaggcctgtcaca

SEQ ID NO: 3703603 - DNA, 25 bp, Homo sapien
gggcacgaggcctgtcacagccttg

SEQ ID NO: 3703604 - DNA, 25 bp, Homo sapien
taatctccacagcaagtggaggcac

SEQ ID NO: 3703605 - DNA, 25 bp, Homo sapien
tccacagcaagtggaggcacatggg

SEQ ID NO: 3703606 - DNA, 25 bp, Homo sapien
cattggtgtgcccttaggtgcctgg

SEQ ID NO: 3703607 - DNA, 25 bp, Homo sapien
ggcattggtgtgcccttaggtgcct

SEQ ID NO: 3703608 - DNA, 25 bp, Homo sapien
ttggtgtgcccttaggtgcctgggc

SEQ ID NO: 3703609 - DNA, 25 bp, Homo sapien
ggtgtgcccttaggtgcctgggcct

SEQ ID NO: 3703610 - DNA, 25 bp, Homo sapien
ggagaaggcccgtcctcattaggag

SEQ ID NO: 3703611 - DNA, 25 bp, Homo sapien
tatcgttagaaaacatatcagtgga

SEQ ID NO: 3703612 - DNA, 25 bp, Homo sapien
tatcagtggaaattgctctttcatc

SEQ ID NO: 3703613 - DNA, 25 bp, Homo sapien
cagcatcacttttgtgttgtggaga

SEQ ID NO: 3703614 - DNA, 25 bp, Homo sapien
gctgtgctcggatctgtgtcacagt

SEQ ID NO: 3703615 - DNA, 25 bp, Homo sapien
tgtgctcggatctgtgtcacagtca

SEQ ID NO: 3703616 - DNA, 25 bp, Homo sapien
cagctgtgctcggatctgtgtcaca

SEQ ID NO: 3703617 - DNA, 25 bp, Homo sapien
gtgctcggatctgtgtcacagtcaa

SEQ ID NO: 3703618 - DNA, 25 bp, Homo sapien
cttcaggcaggttcccgctgtggtt

SEQ ID NO: 3703619 - DNA, 25 bp, Homo sapien
tgtggttcaacttgattccataaac

SEQ ID NO: 3703620 - DNA, 25 bp, Homo sapien
ctgctgaagtcacgccgggcttcag

SEQ ID NO: 3703621 - DNA, 25 bp, Homo sapien
tcccgctgtggttcaacttgattcc

SEQ ID NO: 3703622 - DNA, 25 bp, Homo sapien
ttcctcggagcccaagagcaactct

SEQ ID NO: 3703623 - DNA, 25 bp, Homo sapien
gccttccggcggcctgtgatggatg

SEQ ID NO: 3703624 - DNA, 25 bp, Homo sapien
tggatggctccaccgtccagtccat

SEQ ID NO: 3703625 - DNA, 25 bp, Homo sapien
tcctcggagcccaagagcaactctg

SEQ ID NO: 3703626 - DNA, 25 bp, Homo sapien
cccactggcattgatcatactatta

SEQ ID NO: 3703627 - DNA, 25 bp, Homo sapien
catactattagtccagttgtctgca

SEQ ID NO: 3703628 - DNA, 25 bp, Homo sapien
actggcattgatcatactattagtc

SEQ ID NO: 3703629 - DNA, 25 bp, Homo sapien
atactattagtccagttgtctgcac

SEQ ID NO: 3703630 - DNA, 25 bp, Homo sapien
agaggggacagtgttggtctgggca

SEQ ID NO: 3703631 - DNA, 25 bp, Homo sapien
caggtatttcccatggttgcagccc

SEQ ID NO: 3703632 - DNA, 25 bp, Homo sapien
ccagcgttcctggcaggaaggacat

SEQ ID NO: 3703633 - DNA, 25 bp, Homo sapien
cgttcctggcaggaaggacatctac

SEQ ID NO: 3703634 - DNA, 25 bp, Homo sapien
cagcgttcctggcaggaaggacatc

SEQ ID NO: 3703635 - DNA, 25 bp, Homo sapien
gcgttcctggcaggaaggacatcta

SEQ ID NO: 3703636 - DNA, 25 bp, Homo sapien
gaaatactcccaattccaagctgtc

SEQ ID NO: 3703637 - DNA, 25 bp, Homo sapien
aatactcccaattccaagctgtccg

SEQ ID NO: 3703638 - DNA, 25 bp, Homo sapien
atactcccaattccaagctgtccgt

SEQ ID NO: 3703639 - DNA, 25 bp, Homo sapien
gggaaatactcccaattccaagctg

SEQ ID NO: 3703640 - DNA, 25 bp, Homo sapien
caaccccctgacactggctttcaga

SEQ ID NO: 3703641 - DNA, 25 bp, Homo sapien
gcctctccaactcaacaaccccctg

SEQ ID NO: 3703642 - DNA, 25 bp, Homo sapien
ctcaacaaccccctgacactggctt

SEQ ID NO: 3703643 - DNA, 25 bp, Homo sapien
tctccaactcaacaaccccctgaca

SEQ ID NO: 3703644 - DNA, 25 bp, Homo sapien
cagccacaggctcagacgcaagtgc

SEQ ID NO: 3703645 - DNA, 25 bp, Homo sapien
cccactcccgttgtttcaagtggct

SEQ ID NO: 3703646 - DNA, 25 bp, Homo sapien
tgctcccactcccgttgtttcaagt

SEQ ID NO: 3703647 - DNA, 25 bp, Homo sapien
ggctcagacgcaagtgccaggccag

SEQ ID NO: 3703648 - DNA, 25 bp, Homo sapien
ggtaaatctcccaggatgggacatc

SEQ ID NO: 3703649 - DNA, 25 bp, Homo sapien
ctctagcaatgggacatcttctggg

SEQ ID NO: 3703650 - DNA, 25 bp, Homo sapien
tttgcctctagcaatgggacatctt

SEQ ID NO: 3703651 - DNA, 25 bp, Homo sapien
ggactcctgagttgaactggctggt

SEQ ID NO: 3703652 - DNA, 25 bp, Homo sapien
gaagacccagtggagccacatgggc

SEQ ID NO: 3703653 - DNA, 25 bp, Homo sapien
ttgaagaagagggatcctcagaaga

SEQ ID NO: 3703654 - DNA, 25 bp, Homo sapien
ccacatgggctgccgctgggctgtt

SEQ ID NO: 3703655 - DNA, 25 bp, Homo sapien
aagagggatcctcagaagacccagt

SEQ ID NO: 3703656 - DNA, 25 bp, Homo sapien
ggaagtcacgctgaacgggtggtgg

SEQ ID NO: 3703657 - DNA, 25 bp, Homo sapien
cagaaggaagtcacgctgaacgggt

SEQ ID NO: 3703658 - DNA, 25 bp, Homo sapien
agtcacgctgaacgggtggtggcgg

SEQ ID NO: 3703659 - DNA, 25 bp, Homo sapien
tcagaaggaagtcacgctgaacggg

SEQ ID NO: 3703660 - DNA, 25 bp, Homo sapien
gaggttcgtacagatgttcccatag

SEQ ID NO: 3703661 - DNA, 25 bp, Homo sapien
gagtcattgtgattgattggctgtg

SEQ ID NO: 3703662 - DNA, 25 bp, Homo sapien
cactggtttgggctaggagagtcat

SEQ ID NO: 3703663 - DNA, 25 bp, Homo sapien
tcccatagagggtaggacactgtcc

SEQ ID NO: 3703664 - DNA, 25 bp, Homo sapien
gccagcctgatctcctggatttgta

SEQ ID NO: 3703665 - DNA, 25 bp, Homo sapien
ggtgggtgcagctaaccaagttcac

SEQ ID NO: 3703666 - DNA, 25 bp, Homo sapien
atttgtaaagtgatggttgcagtgg

SEQ ID NO: 3703667 - DNA, 25 bp, Homo sapien
tctgcacctctgagaacaagcactc

SEQ ID NO: 3703668 - DNA, 25 bp, Homo sapien
tcccttatggtctgcaaagacttgt

SEQ ID NO: 3703669 - DNA, 25 bp, Homo sapien
taagcaagcggtgctgacttgctgg

SEQ ID NO: 3703670 - DNA, 25 bp, Homo sapien
tccatctgtgtaacatctaccacat

SEQ ID NO: 3703671 - DNA, 25 bp, Homo sapien
tcaaataatcgcatatcccttatgg

SEQ ID NO: 3703672 - DNA, 25 bp, Homo sapien
caggcctgagcagatgcttattgtg

SEQ ID NO: 3703673 - DNA, 25 bp, Homo sapien
cagatgcttattgtgcgattcagca

SEQ ID NO: 3703674 - DNA, 25 bp, Homo sapien
cctgagcagatgcttattgtgcgat

SEQ ID NO: 3703675 - DNA, 25 bp, Homo sapien
gagcagatgcttattgtgcgattca

SEQ ID NO: 3703676 - DNA, 25 bp, Homo sapien
ttctcttctgtcttccttgcttccc

SEQ ID NO: 3703677 - DNA, 25 bp, Homo sapien
tctcttctgtcttccttgcttccca

SEQ ID NO: 3703678 - DNA, 25 bp, Homo sapien
cttctcttctgtcttccttgcttcc

SEQ ID NO: 3703679 - DNA, 25 bp, Homo sapien
ctcttctgtcttccttgcttcccat

SEQ ID NO: 3703680 - DNA, 25 bp, Homo sapien
aataacgtgccttgcgttgcttctc

SEQ ID NO: 3703681 - DNA, 25 bp, Homo sapien
cataaagagaataacgtgccttgcg

SEQ ID NO: 3703682 - DNA, 25 bp, Homo sapien
ggccacgtggttgagctttgctaat

SEQ ID NO: 3703683 - DNA, 25 bp, Homo sapien
gctaatggatcataaagagaataac

SEQ ID NO: 3703684 - DNA, 25 bp, Homo sapien
agcagagaccagcccaatgtgaggg

SEQ ID NO: 3703685 - DNA, 25 bp, Homo sapien
gaccagcccaatgtgaggggttcca

SEQ ID NO: 3703686 - DNA, 25 bp, Homo sapien
cagagaccagcccaatgtgaggggt

SEQ ID NO: 3703687 - DNA, 25 bp, Homo sapien
gagaccagcccaatgtgaggggttc

SEQ ID NO: 3703688 - DNA, 25 bp, Homo sapien
gccttcataagcattggtggccgag

SEQ ID NO: 3703689 - DNA, 25 bp, Homo sapien
ccttcataagcattggtggccgagt

SEQ ID NO: 3703690 - DNA, 25 bp, Homo sapien
cccaaggcagacctggtgaatccca

SEQ ID NO: 3703691 - DNA, 25 bp, Homo sapien
tcctggcttgttcagcagcccagaa

SEQ ID NO: 3703692 - DNA, 25 bp, Homo sapien
ccattgctgtccattcttccttggc

SEQ ID NO: 3703693 - DNA, 25 bp, Homo sapien
tgtgcccagcagtggtcccattgct

SEQ ID NO: 3703694 - DNA, 25 bp, Homo sapien
tcactgcgtcctgtctgaagtcatt

SEQ ID NO: 3703695 - DNA, 25 bp, Homo sapien
actgcgtcctgtctgaagtcattct

SEQ ID NO: 3703696 - DNA, 25 bp, Homo sapien
cactgcgtcctgtctgaagtcattc

SEQ ID NO: 3703697 - DNA, 25 bp, Homo sapien
caaagccttcatctctagaaggctc

SEQ ID NO: 3703698 - DNA, 25 bp, Homo sapien
tcctgttctttataccccatccaga

SEQ ID NO: 3703699 - DNA, 25 bp, Homo sapien
tataccccatccagagatttgaaga

SEQ ID NO: 3703700 - DNA, 25 bp, Homo sapien
tctttataccccatccagagatttg

SEQ ID NO: 3703701 - DNA, 25 bp, Homo sapien
tgccccaattagcaggccattcaca

SEQ ID NO: 3703702 - DNA, 25 bp, Homo sapien
tcatttcaacagtgccccaattagc

SEQ ID NO: 3703703 - DNA, 25 bp, Homo sapien
gaaattgactcacatcgggcctctc

SEQ ID NO: 3703704 - DNA, 25 bp, Homo sapien
gccattcacagtggattggaaattg

SEQ ID NO: 3703705 - DNA, 25 bp, Homo sapien
tttcattggcggagcagtaaaagtc

SEQ ID NO: 3703706 - DNA, 25 bp, Homo sapien
tgtttccaatctgcaggagcaggga

SEQ ID NO: 3703707 - DNA, 25 bp, Homo sapien
tgtaggcttccatgtgaatcctggc

SEQ ID NO: 3703708 - DNA, 25 bp, Homo sapien
tataaataagcgagcatgatcccac

SEQ ID NO: 3703709 - DNA, 25 bp, Homo sapien
tacacaaagccatgagcctcagctc

SEQ ID NO: 3703710 - DNA, 25 bp, Homo sapien
tgaagatacacaaagccatgagcct

SEQ ID NO: 3703711 - DNA, 25 bp, Homo sapien
ctgaagatacacaaagccatgagcc

SEQ ID NO: 3703712 - DNA, 25 bp, Homo sapien
agatacacaaagccatgagcctcag

SEQ ID NO: 3703713 - DNA, 25 bp, Homo sapien
aatatctctgcttcaggccctgacc

SEQ ID NO: 3703714 - DNA, 25 bp, Homo sapien
tgaatatctctgcttcaggccctga

SEQ ID NO: 3703715 - DNA, 25 bp, Homo sapien
atcttctgaatatctctgcttcagg

SEQ ID NO: 3703716 - DNA, 25 bp, Homo sapien
cttctgaatatctctgcttcaggcc

SEQ ID NO: 3703717 - DNA, 25 bp, Homo sapien
gatttccctagtatggatgtttctg

SEQ ID NO: 3703718 - DNA, 25 bp, Homo sapien
caaatgatttccctagtatggatgt

SEQ ID NO: 3703719 - DNA, 25 bp, Homo sapien
agtatggatgtttctgtgctttcac

SEQ ID NO: 3703720 - DNA, 25 bp, Homo sapien
tccctagtatggatgtttctgtgct

SEQ ID NO: 3703721 - DNA, 25 bp, Homo sapien
tacatcccgcattgtcctgttgctg

SEQ ID NO: 3703722 - DNA, 25 bp, Homo sapien
tgtcgatagtgggtggaccagggcc

SEQ ID NO: 3703723 - DNA, 25 bp, Homo sapien
gggtcccactccatgcggggtgcta

SEQ ID NO: 3703724 - DNA, 25 bp, Homo sapien
ccaaggagcagtcaatgacactgag

SEQ ID NO: 3703725 - DNA, 25 bp, Homo sapien
tcagtgggtgtcacatcctgtcccc

SEQ ID NO: 3703726 - DNA, 25 bp, Homo sapien
tgccatagacatcccgttctcctgc

SEQ ID NO: 3703727 - DNA, 25 bp, Homo sapien
tagacatcccgttctcctgcaaagg

SEQ ID NO: 3703728 - DNA, 25 bp, Homo sapien
ggcctggctgaagtactctctttgg

SEQ ID NO: 3703729 - DNA, 25 bp, Homo sapien
tgtgtgaagactggagctagtgtca

SEQ ID NO: 3703730 - DNA, 25 bp, Homo sapien
gctagtgtcattgatgatgtatgca

SEQ ID NO: 3703731 - DNA, 25 bp, Homo sapien
gctgatattgcactttgctgtgtga

SEQ ID NO: 3703732 - DNA, 25 bp, Homo sapien
tgctgatattgcactttgctgtgtg

SEQ ID NO: 3703733 - DNA, 25 bp, Homo sapien
gggctcccatgctgctatctctgga

SEQ ID NO: 3703734 - DNA, 25 bp, Homo sapien
tgcttggcggcagcattgatgccat

SEQ ID NO: 3703735 - DNA, 25 bp, Homo sapien
accagtgagccactgcttggcggca

SEQ ID NO: 3703736 - DNA, 25 bp, Homo sapien
tgaggtgaccaccagtgagccactg

SEQ ID NO: 3703737 - DNA, 25 bp, Homo sapien
gaagtggaggggtcctgatggccag

SEQ ID NO: 3703738 - DNA, 25 bp, Homo sapien
ttaacttgccagaagtggaggggtc

SEQ ID NO: 3703739 - DNA, 25 bp, Homo sapien
aacttgccagaagtggaggggtcct

SEQ ID NO: 3703740 - DNA, 25 bp, Homo sapien
cagaagtggaggggtcctgatggcc

SEQ ID NO: 3703741 - DNA, 25 bp, Homo sapien
ccacacctgcatcgggttccttgat

SEQ ID NO: 3703742 - DNA, 25 bp, Homo sapien
tctgggccttggtggtactgcctac

SEQ ID NO: 3703743 - DNA, 25 bp, Homo sapien
ggttccttgatatgaaccaccacca

SEQ ID NO: 3703744 - DNA, 25 bp, Homo sapien
tcctcttcttttgggtttgcacctg

SEQ ID NO: 3703745 - DNA, 25 bp, Homo sapien
ctggttgtcagggtggtcataacca

SEQ ID NO: 3703746 - DNA, 25 bp, Homo sapien
tcccccatctctgtggaggttgtgg

SEQ ID NO: 3703747 - DNA, 25 bp, Homo sapien
agctcttgttgatcccccatctctg

SEQ ID NO: 3703748 - DNA, 25 bp, Homo sapien
gggtggtcataaccacattctgggc

SEQ ID NO: 3703749 - DNA, 25 bp, Homo sapien
tgatgaatacactgcaatgctgaaa

SEQ ID NO: 3703750 - DNA, 25 bp, Homo sapien
atgctgaaactgtcctgaatggctc

SEQ ID NO: 3703751 - DNA, 25 bp, Homo sapien
tggctgatgaatacactgcaatgct

SEQ ID NO: 3703752 - DNA, 25 bp, Homo sapien
caatgctgaaactgtcctgaatggc

SEQ ID NO: 3703753 - DNA, 25 bp, Homo sapien
tcaatctggctgatgcctggtcctg

SEQ ID NO: 3703754 - DNA, 25 bp, Homo sapien
ttctgaagtgtgacaactttggagg

SEQ ID NO: 3703755 - DNA, 25 bp, Homo sapien
cctggtgaaggcctgtttcaatctg

SEQ ID NO: 3703756 - DNA, 25 bp, Homo sapien
tgacacttgtcagcagtgattggca

SEQ ID NO: 3703757 - DNA, 25 bp, Homo sapien
tgtcatagatgtgagggtcggtgtc

SEQ ID NO: 3703758 - DNA, 25 bp, Homo sapien
tttgtcatagatgtgagggtcggtg

SEQ ID NO: 3703759 - DNA, 25 bp, Homo sapien
tgagggaaggtatggctttgtcata

SEQ ID NO: 3703760 - DNA, 25 bp, Homo sapien
aggtgagggaaggtatggctttgtc

SEQ ID NO: 3703761 - DNA, 25 bp, Homo sapien
cataggtggtgtaggagggtgttgc

SEQ ID NO: 3703762 - DNA, 25 bp, Homo sapien
tcagtaatgaggaaagctgttggct

SEQ ID NO: 3703763 - DNA, 25 bp, Homo sapien
agggtgttgcctggtatcagtaatg

SEQ ID NO: 3703764 - DNA, 25 bp, Homo sapien
tcatgcacataggtggtgtaggagg

SEQ ID NO: 3703765 - DNA, 25 bp, Homo sapien
tgatccactcgagtttctcactgac

SEQ ID NO: 3703766 - DNA, 25 bp, Homo sapien
ctgatccactcgagtttctcactga

SEQ ID NO: 3703767 - DNA, 25 bp, Homo sapien
aggtctctgtgttgggcgtctgtct

SEQ ID NO: 3703768 - DNA, 25 bp, Homo sapien
tcctctaggagcctcttgtcagcaa

SEQ ID NO: 3703769 - DNA, 25 bp, Homo sapien
ttggctgatccaggccttgatggca

SEQ ID NO: 3703770 - DNA, 25 bp, Homo sapien
gatggcagatagctatgttcagaga

SEQ ID NO: 3703771 - DNA, 25 bp, Homo sapien
tccagggcttgggactcaggccatt

SEQ ID NO: 3703772 - DNA, 25 bp, Homo sapien
gggcttgggactcaggccatttcat

SEQ ID NO: 3703773 - DNA, 25 bp, Homo sapien
cccagtccagggcttgggactcagg

SEQ ID NO: 3703774 - DNA, 25 bp, Homo sapien
tggccgtgctggagcctgcccagtc

SEQ ID NO: 3703775 - DNA, 25 bp, Homo sapien
ctgaggagcttgttgagtttggcat

SEQ ID NO: 3703776 - DNA, 25 bp, Homo sapien
tgtggagtctgacactactggtgct

SEQ ID NO: 3703777 - DNA, 25 bp, Homo sapien
gggaagcagggcctcataggctgtg

SEQ ID NO: 3703778 - DNA, 25 bp, Homo sapien
tctgacactactggtgctggtgtgg

SEQ ID NO: 3703779 - DNA, 25 bp, Homo sapien
ggcctcataggctgtggagtctgac

SEQ ID NO: 3703780 - DNA, 25 bp, Homo sapien
catgagtgtcatgtgcagggcgatc

SEQ ID NO: 3703781 - DNA, 25 bp, Homo sapien
catgtgcagggcgatcctcagcatg

SEQ ID NO: 3703782 - DNA, 25 bp, Homo sapien
catgccatccaggaagtccctgcta

SEQ ID NO: 3703783 - DNA, 25 bp, Homo sapien
agggcgatcctcagcatgccatcca

SEQ ID NO: 3703784 - DNA, 25 bp, Homo sapien
ttaggcaagcatgtcaccacagggc

SEQ ID NO: 3703785 - DNA, 25 bp, Homo sapien
tacagctgcgccctcatctccggta

SEQ ID NO: 3703786 - DNA, 25 bp, Homo sapien
ccggtacatatctcagagcagtgtc

SEQ ID NO: 3703787 - DNA, 25 bp, Homo sapien
ttcctagacctacagccatgccaac

SEQ ID NO: 3703788 - DNA, 25 bp, Homo sapien
gccaacaccagcacctacagctgcg

SEQ ID NO: 3703789 - DNA, 25 bp, Homo sapien
cagtgggctttctgctgggatgggt

SEQ ID NO: 3703790 - DNA, 25 bp, Homo sapien
tgggtcttgagggccctgatttctg

SEQ ID NO: 3703791 - DNA, 25 bp, Homo sapien
ggatgggtcttgagggccctgattt

SEQ ID NO: 3703792 - DNA, 25 bp, Homo sapien
gtgggctttctgctgggatgggtct

SEQ ID NO: 3703793 - DNA, 25 bp, Homo sapien
tatgaactgcagtagcactgggcaa

SEQ ID NO: 3703794 - DNA, 25 bp, Homo sapien
tgaccaagccaagctcaggtatgaa

SEQ ID NO: 3703795 - DNA, 25 bp, Homo sapien
cacatacctgttgagtgtccgtaga

SEQ ID NO: 3703796 - DNA, 25 bp, Homo sapien
tgccaggtgggcgaagtttacccat

SEQ ID NO: 3703797 - DNA, 25 bp, Homo sapien
ggcccaggcacgaggggaggcccca

SEQ ID NO: 3703798 - DNA, 25 bp, Homo sapien
catttcattacttgattactgctgc

SEQ ID NO: 3703799 - DNA, 25 bp, Homo sapien
cagggattggtgattggtttgaaca

SEQ ID NO: 3703800 - DNA, 25 bp, Homo sapien
ctgctgtcaccgagggagctaggga

SEQ ID NO: 3703801 - DNA, 25 bp, Homo sapien
tctggtccatggacatcagcgggcc

SEQ ID NO: 3703802 - DNA, 25 bp, Homo sapien
catggaggcatattggggtattcac

SEQ ID NO: 3703803 - DNA, 25 bp, Homo sapien
acagcatgttcacttgccttggagg

SEQ ID NO: 3703804 - DNA, 25 bp, Homo sapien
catattggggtattcacccagtaac

SEQ ID NO: 3703805 - DNA, 25 bp, Homo sapien
acttcataaggaagatccaggctct

SEQ ID NO: 3703806 - DNA, 25 bp, Homo sapien
tgccaaactgtgatgtggcctggtt

SEQ ID NO: 3703807 - DNA, 25 bp, Homo sapien
caacttcataaggaagatccaggct

SEQ ID NO: 3703808 - DNA, 25 bp, Homo sapien
tgatgtggcctggtttgcttcaagg

SEQ ID NO: 3703809 - DNA, 25 bp, Homo sapien
tgtggggacggatcctgatggcagc

SEQ ID NO: 3703810 - DNA, 25 bp, Homo sapien
ctgtggggacggatcctgatggcag

SEQ ID NO: 3703811 - DNA, 25 bp, Homo sapien
acaaagtatgaaggtgatcttggcc

SEQ ID NO: 3703812 - DNA, 25 bp, Homo sapien
caggattattttctagcttctcctc

SEQ ID NO: 3703813 - DNA, 25 bp, Homo sapien
gtgatcttggcctctacttgctgct

SEQ ID NO: 3703814 - DNA, 25 bp, Homo sapien
ggctatgtggcctcacacaaagtat

SEQ ID NO: 3703815 - DNA, 25 bp, Homo sapien
cccttggctgcacacggagctgctc

SEQ ID NO: 3703816 - DNA, 25 bp, Homo sapien
acaattgctaccaagcccacatact

SEQ ID NO: 3703817 - DNA, 25 bp, Homo sapien
tgggccacccccttggctgcacacg

SEQ ID NO: 3703818 - DNA, 25 bp, Homo sapien
aattgctaccaagcccacatactgc

SEQ ID NO: 3703819 - DNA, 25 bp, Homo sapien
tccagcttccaatggggttgtgggc

SEQ ID NO: 3703820 - DNA, 25 bp, Homo sapien
agccctccagcttccaatggggttg

SEQ ID NO: 3703821 - DNA, 25 bp, Homo sapien
cactgtgttgactccagccctccag

SEQ ID NO: 3703822 - DNA, 25 bp, Homo sapien
cctccagcttccaatggggttgtgg

SEQ ID NO: 3703823 - DNA, 25 bp, Homo sapien
cagtgtctcaggcagtaggcccgtg

SEQ ID NO: 3703824 - DNA, 25 bp, Homo sapien
gtgttgcaggcgtgccctgagccct

SEQ ID NO: 3703825 - DNA, 25 bp, Homo sapien
tcctgtccaacaggatggccagtgt

SEQ ID NO: 3703826 - DNA, 25 bp, Homo sapien
taggcccgtgtctgatacatctctg

SEQ ID NO: 3703827 - DNA, 25 bp, Homo sapien
ctgcagacccggccacatcctcagc

SEQ ID NO: 3703828 - DNA, 25 bp, Homo sapien
agacccggccacatcctcagcctcc

SEQ ID NO: 3703829 - DNA, 25 bp, Homo sapien
gactgaggctgtgggagggctctgc

SEQ ID NO: 3703830 - DNA, 25 bp, Homo sapien
tgggagggctctgcagacccggcca

SEQ ID NO: 3703831 - DNA, 25 bp, Homo sapien
ggagatggcagtggatttaacaggc

SEQ ID NO: 3703832 - DNA, 25 bp, Homo sapien
aggagatggcagtggatttaacagg

SEQ ID NO: 3703833 - DNA, 25 bp, Homo sapien
caggagatggcagtggatttaacag

SEQ ID NO: 3703834 - DNA, 25 bp, Homo sapien
gagatggcagtggatttaacaggcc

SEQ ID NO: 3703835 - DNA, 25 bp, Homo sapien
gaggaggccgggttgtggacataca

SEQ ID NO: 3703836 - DNA, 25 bp, Homo sapien
cgggttgtggacatacacttgtatt

SEQ ID NO: 3703837 - DNA, 25 bp, Homo sapien
cagcgttaattgtcaccgtggagga

SEQ ID NO: 3703838 - DNA, 25 bp, Homo sapien
gatggtgggaaacagcgttaattgt

SEQ ID NO: 3703839 - DNA, 25 bp, Homo sapien
ctctttgtaggccctggctgccatg

SEQ ID NO: 3703840 - DNA, 25 bp, Homo sapien
tctggacctggggtagaggcatcac

SEQ ID NO: 3703841 - DNA, 25 bp, Homo sapien
gtggcctttgtgagctacagccctc

SEQ ID NO: 3703842 - DNA, 25 bp, Homo sapien
ggcctttgtgagctacagccctctc

SEQ ID NO: 3703843 - DNA, 25 bp, Homo sapien
ctctggacctggggtagaggcatca

SEQ ID NO: 3703844 - DNA, 25 bp, Homo sapien
agggatgcccgtatgcagccagtca

SEQ ID NO: 3703845 - DNA, 25 bp, Homo sapien
gcagttcccgcctggtgccagcaga

SEQ ID NO: 3703846 - DNA, 25 bp, Homo sapien
tcactggtcagagggacccggtgct

SEQ ID NO: 3703847 - DNA, 25 bp, Homo sapien
cttggctgggcagttcccgcctggt

SEQ ID NO: 3703848 - DNA, 25 bp, Homo sapien
caggtgctggcggtataagcttgtg

SEQ ID NO: 3703849 - DNA, 25 bp, Homo sapien
gctggcggtataagcttgtgcacca

SEQ ID NO: 3703850 - DNA, 25 bp, Homo sapien
tctggtggcttaggagcccctcttc

SEQ ID NO: 3703851 - DNA, 25 bp, Homo sapien
ttttctggtggcttaggagcccctc

SEQ ID NO: 3703852 - DNA, 25 bp, Homo sapien
catgcctctgtatgcctgaggtgtg

SEQ ID NO: 3703853 - DNA, 25 bp, Homo sapien
ggccccatgcctctgtatgcctgag

SEQ ID NO: 3703854 - DNA, 25 bp, Homo sapien
ttctggaggccccatgcctctgtat

SEQ ID NO: 3703855 - DNA, 25 bp, Homo sapien
actggctggagtgggaaagttctgg

SEQ ID NO: 3703856 - DNA, 25 bp, Homo sapien
ggtccctcatggtcacttcacttgg

SEQ ID NO: 3703857 - DNA, 25 bp, Homo sapien
gagaactggaaacaactggtgagca

SEQ ID NO: 3703858 - DNA, 25 bp, Homo sapien
tctgcttatgactcgttggccacaa

SEQ ID NO: 3703859 - DNA, 25 bp, Homo sapien
cagccagtcacaagggatccaggaa

SEQ ID NO: 3703860 - DNA, 25 bp, Homo sapien
cgggcccgggtggatgagccgcgcg

SEQ ID NO: 3703861 - DNA, 25 bp, Homo sapien
tccatcatccacatcggtaagcgcg

SEQ ID NO: 3703862 - DNA, 25 bp, Homo sapien
catggaagcgctgacgctgtggctt

SEQ ID NO: 3703863 - DNA, 25 bp, Homo sapien
gtgcgtgtcggtgcgggccgactcc

SEQ ID NO: 3703864 - DNA, 25 bp, Homo sapien
ctgggcttggaaaccgcgcctcgcg

SEQ ID NO: 3703865 - DNA, 25 bp, Homo sapien
ctcgcgctgtcacctgcggaatcgg

SEQ ID NO: 3703866 - DNA, 25 bp, Homo sapien
gcagcattgcactgcggctgctcct

SEQ ID NO: 3703867 - DNA, 25 bp, Homo sapien
ccacgtagaggtgcggttatccttg

SEQ ID NO: 3703868 - DNA, 25 bp, Homo sapien
tcttcctgcttcggatcttggatgg

SEQ ID NO: 3703869 - DNA, 25 bp, Homo sapien
cttcctgcttcggatcttggatggc

SEQ ID NO: 3703870 - DNA, 25 bp, Homo sapien
gcctaagtgctgtggaacttgacca

SEQ ID NO: 3703871 - DNA, 25 bp, Homo sapien
cctgggtcttctacgacctcggtca

SEQ ID NO: 3703872 - DNA, 25 bp, Homo sapien
agccccgtgttgttttgatggcgca

SEQ ID NO: 3703873 - DNA, 25 bp, Homo sapien
tcattcctgctacagccccgtgttg

SEQ ID NO: 3703874 - DNA, 25 bp, Homo sapien
cagcaccactttggccagatagcaa

SEQ ID NO: 3703875 - DNA, 25 bp, Homo sapien
tgtatgcaagagtcctttctgggct

SEQ ID NO: 3703876 - DNA, 25 bp, Homo sapien
taagaagaacgtccattcctgtctg

SEQ ID NO: 3703877 - DNA, 25 bp, Homo sapien
taatagatcttgacatctagcagaa

SEQ ID NO: 3703878 - DNA, 25 bp, Homo sapien
gccggcactgcggggccccagtcat

SEQ ID NO: 3703879 - DNA, 25 bp, Homo sapien
cgcggcgtcggcgccgccttccagg

SEQ ID NO: 3703880 - DNA, 25 bp, Homo sapien
ggcgccggcactgcggggccccagt

SEQ ID NO: 3703881 - DNA, 25 bp, Homo sapien
cagaggcgccggcactgcggggccc

SEQ ID NO: 3703882 - DNA, 25 bp, Homo sapien
tttggtaagtaggtgggcgagtgac

SEQ ID NO: 3703883 - DNA, 25 bp, Homo sapien
tggtaagtaggtgggcgagtgacgc

SEQ ID NO: 3703884 - DNA, 25 bp, Homo sapien
ctttggtaagtaggtgggcgagtga

SEQ ID NO: 3703885 - DNA, 25 bp, Homo sapien
ctgctttggtaagtaggtgggcgag

SEQ ID NO: 3703886 - DNA, 25 bp, Homo sapien
cacttgctgggtcacggaggaaacc

SEQ ID NO: 3703887 - DNA, 25 bp, Homo sapien
ttctggctcgagacaagctcgggcc

SEQ ID NO: 3703888 - DNA, 25 bp, Homo sapien
gagattgcccctagtggactccaag

SEQ ID NO: 3703889 - DNA, 25 bp, Homo sapien
ctttacccagcggtggcctcggagg

SEQ ID NO: 3703890 - DNA, 25 bp, Homo sapien
aggtagacgcgccagtttctgctgc

SEQ ID NO: 3703891 - DNA, 25 bp, Homo sapien
catggcactcctagctactggcaaa

SEQ ID NO: 3703892 - DNA, 25 bp, Homo sapien
caagcacagtgctccgaaggcggag

SEQ ID NO: 3703893 - DNA, 25 bp, Homo sapien
taaaaagttatgacaccaagcacag

SEQ ID NO: 3703894 - DNA, 25 bp, Homo sapien
taattgtcgagcactgatagagatg

SEQ ID NO: 3703895 - DNA, 25 bp, Homo sapien
gcattttagggtacttgaggctgac

SEQ ID NO: 3703896 - DNA, 25 bp, Homo sapien
tttggagcaaaagccaacggcagga

SEQ ID NO: 3703897 - DNA, 25 bp, Homo sapien
ggagataatcacttcaccaactgca

SEQ ID NO: 3703898 - DNA, 25 bp, Homo sapien
taaggaagtaactgattccaggcaa

SEQ ID NO: 3703899 - DNA, 25 bp, Homo sapien
tacgccagtgtaacgtgggaaccat

SEQ ID NO: 3703900 - DNA, 25 bp, Homo sapien
ccattgagattgtatttgccctgag

SEQ ID NO: 3703901 - DNA, 25 bp, Homo sapien
cttttaagaacatagtacgccagtg

SEQ ID NO: 3703902 - DNA, 25 bp, Homo sapien
tacacttaatgctagggaggctctt

SEQ ID NO: 3703903 - DNA, 25 bp, Homo sapien
tgacaggatcaattgcataagcgca

SEQ ID NO: 3703904 - DNA, 25 bp, Homo sapien
tagatggaatccaaagatacacggg

SEQ ID NO: 3703905 - DNA, 25 bp, Homo sapien
taaattgctggtttagagaagaccc

SEQ ID NO: 3703906 - DNA, 25 bp, Homo sapien
gagagcctttttaatatagcatagg

SEQ ID NO: 3703907 - DNA, 25 bp, Homo sapien
gcttgagcccgtgatcatgctgctg

SEQ ID NO: 3703908 - DNA, 25 bp, Homo sapien
tctgcatgataagagggaaagctgg

SEQ ID NO: 3703909 - DNA, 25 bp, Homo sapien
gatcatgtgtgtccaagagttcgag

SEQ ID NO: 3703910 - DNA, 25 bp, Homo sapien
agtacctgtctgaagcggttttaca

SEQ ID NO: 3703911 - DNA, 25 bp, Homo sapien
aacttaagatacaccagcctagacc

SEQ ID NO: 3703912 - DNA, 25 bp, Homo sapien
gcctagacctatccagagtgaagat

SEQ ID NO: 3703913 - DNA, 25 bp, Homo sapien
tcttcaagggcactaacatacgtgg

SEQ ID NO: 3703914 - DNA, 25 bp, Homo sapien
tccttcaatatgacactggataggg

SEQ ID NO: 3703915 - DNA, 25 bp, Homo sapien
taggcccttctagcactatcttttg

SEQ ID NO: 3703916 - DNA, 25 bp, Homo sapien
tcattcccctgtggtttaaagctag

SEQ ID NO: 3703917 - DNA, 25 bp, Homo sapien
cgggttgtcaacttactagcaaaat

SEQ ID NO: 3703918 - DNA, 25 bp, Homo sapien
atgctaatcttggtatcgttccagt

SEQ ID NO: 3703919 - DNA, 25 bp, Homo sapien
gctaatcttggtatcgttccagttt

SEQ ID NO: 3703920 - DNA, 25 bp, Homo sapien
tcttggtatcgttccagtttttgta

SEQ ID NO: 3703921 - DNA, 25 bp, Homo sapien
ggtatcgttccagtttttgtatatg

SEQ ID NO: 3703922 - DNA, 25 bp, Homo sapien
ctgtgggaagcggagtgacggagcg

SEQ ID NO: 3703923 - DNA, 25 bp, Homo sapien
tgagtaagcggctgcgcgattggct

SEQ ID NO: 3703924 - DNA, 25 bp, Homo sapien
ggaagcggagtgacggagcgagcgg

SEQ ID NO: 3703925 - DNA, 25 bp, Homo sapien
ctgcgcggcggtttgagtaagcggc

SEQ ID NO: 3703926 - DNA, 25 bp, Homo sapien
ccgggccaatggcgggcgccggagc

SEQ ID NO: 3703927 - DNA, 25 bp, Homo sapien
gccgggccaatggcgggcgccggag

SEQ ID NO: 3703928 - DNA, 25 bp, Homo sapien
gattgatacagctgcctgcactgcg

SEQ ID NO: 3703929 - DNA, 25 bp, Homo sapien
tcgagggcggctcttgaccacgcgc

SEQ ID NO: 3703930 - DNA, 25 bp, Homo sapien
cagacggacttagaggaaggactgc

SEQ ID NO: 3703931 - DNA, 25 bp, Homo sapien
ggagctagaagtggctgccgagacc

SEQ ID NO: 3703932 - DNA, 25 bp, Homo sapien
ccagttttcataggcgtattttaca

SEQ ID NO: 3703933 - DNA, 25 bp, Homo sapien
cacgcagcttcaacgatgaaaaacg

SEQ ID NO: 3703934 - DNA, 25 bp, Homo sapien
gagcacatatgctcgcatcacgcag

SEQ ID NO: 3703935 - DNA, 25 bp, Homo sapien
tcagatacacaagtaaagagactgt

SEQ ID NO: 3703936 - DNA, 25 bp, Homo sapien
cagggcatttgcttgcctcagtgga

SEQ ID NO: 3703937 - DNA, 25 bp, Homo sapien
tgtgagccacacaagggtacagagc

SEQ ID NO: 3703938 - DNA, 25 bp, Homo sapien
aactttaatgtgcagcccaatcagc

SEQ ID NO: 3703939 - DNA, 25 bp, Homo sapien
tacaggcttccaggtgatgctacac

SEQ ID NO: 3703940 - DNA, 25 bp, Homo sapien
cattttattccacatccgatggcaa

SEQ ID NO: 3703941 - DNA, 25 bp, Homo sapien
taagggtactacaaacttggctctg

SEQ ID NO: 3703942 - DNA, 25 bp, Homo sapien
aagtacaggtatgggcccactcaag

SEQ ID NO: 3703943 - DNA, 25 bp, Homo sapien
ctagaacaagggcatggcaatggca

SEQ ID NO: 3703944 - DNA, 25 bp, Homo sapien
tatagtgggaggttttcatgcatgt

SEQ ID NO: 3703945 - DNA, 25 bp, Homo sapien
catgcatgttttgccattataggtc

SEQ ID NO: 3703946 - DNA, 25 bp, Homo sapien
aaaagattactcttatagtgggagg

SEQ ID NO: 3703947 - DNA, 25 bp, Homo sapien
tattaaagatatagaagagttgaac

SEQ ID NO: 3703948 - DNA, 25 bp, Homo sapien
tgagctttgatatcagtgctgccaa

SEQ ID NO: 3703949 - DNA, 25 bp, Homo sapien
ccttttggatatggggtccaagctg

SEQ ID NO: 3703950 - DNA, 25 bp, Homo sapien
tgagagtaaattggggcgtgctccc

SEQ ID NO: 3703951 - DNA, 25 bp, Homo sapien
tttggatatggggtccaagctgcgc

SEQ ID NO: 3703952 - DNA, 25 bp, Homo sapien
tatggggtccaagctgcgcagacat

SEQ ID NO: 3703953 - DNA, 25 bp, Homo sapien
gcgcaggcctcacctcgaaggtact

SEQ ID NO: 3703954 - DNA, 25 bp, Homo sapien
ccacaggtctgtggctgtcgggttt

SEQ ID NO: 3703955 - DNA, 25 bp, Homo sapien
ctgtgccagtttctgccggatggag

SEQ ID NO: 3703956 - DNA, 25 bp, Homo sapien
ttcgtactcgagtgctttcaagggt

SEQ ID NO: 3703957 - DNA, 25 bp, Homo sapien
tccagcctcaaggcgagggccttgc

SEQ ID NO: 3703958 - DNA, 25 bp, Homo sapien
ttccagcctcaaggcgagggccttg

SEQ ID NO: 3703959 - DNA, 25 bp, Homo sapien
cagaaatctcatcattggggatgtc

SEQ ID NO: 3703960 - DNA, 25 bp, Homo sapien
tgatgatgccagcatttctgaattt

SEQ ID NO: 3703961 - DNA, 25 bp, Homo sapien
tcacccagaaatctcatcattgggg

SEQ ID NO: 3703962 - DNA, 25 bp, Homo sapien
tcatcattggggatgtcttgatgat

SEQ ID NO: 3703963 - DNA, 25 bp, Homo sapien
agtcagaagcctttcagcacatggc

SEQ ID NO: 3703964 - DNA, 25 bp, Homo sapien
tggtgccgagggcagacaggcataa

SEQ ID NO: 3703965 - DNA, 25 bp, Homo sapien
gggcagacaggcataagagctgaag

SEQ ID NO: 3703966 - DNA, 25 bp, Homo sapien
tgccgagggcagacaggcataagag

SEQ ID NO: 3703967 - DNA, 25 bp, Homo sapien
ccgagggcagacaggcataagagct

SEQ ID NO: 3703968 - DNA, 25 bp, Homo sapien
gcccggcctgccaagtttgcatgta

SEQ ID NO: 3703969 - DNA, 25 bp, Homo sapien
tatcatctcagcgagtccagtctgg

SEQ ID NO: 3703970 - DNA, 25 bp, Homo sapien
ggctccaacgtcatacccatctgag

SEQ ID NO: 3703971 - DNA, 25 bp, Homo sapien
tgatttctcgctgatggcacccaca

SEQ ID NO: 3703972 - DNA, 25 bp, Homo sapien
acacctccgcactgactgccgcctg

SEQ ID NO: 3703973 - DNA, 25 bp, Homo sapien
agtagtacgtgtcgccctggcccac

SEQ ID NO: 3703974 - DNA, 25 bp, Homo sapien
tgctcttcacacctcgctggcatgg

SEQ ID NO: 3703975 - DNA, 25 bp, Homo sapien
gtgtgcacagtagtacgtgtcgccc

SEQ ID NO: 3703976 - DNA, 25 bp, Homo sapien
tgccaccaaagcagggcactcatga

SEQ ID NO: 3703977 - DNA, 25 bp, Homo sapien
gggcactcatgaggaggcatggctg

SEQ ID NO: 3703978 - DNA, 25 bp, Homo sapien
gggtgccaccaaagcagggcactca

SEQ ID NO: 3703979 - DNA, 25 bp, Homo sapien
cagggcactcatgaggaggcatggc

SEQ ID NO: 3703980 - DNA, 25 bp, Homo sapien
gctgtgattccaggggctgggcctc

SEQ ID NO: 3703981 - DNA, 25 bp, Homo sapien
aggggctgctgtgattccaggggct

SEQ ID NO: 3703982 - DNA, 25 bp, Homo sapien
gaaggggctgctgtgattccagggg

SEQ ID NO: 3703983 - DNA, 25 bp, Homo sapien
ctggaaggaccacaggaggaagggg

SEQ ID NO: 3703984 - DNA, 25 bp, Homo sapien
tctatcctcatgttaaatgggagag

SEQ ID NO: 3703985 - DNA, 25 bp, Homo sapien
actgaggcaccccagagattagcgc

SEQ ID NO: 3703986 - DNA, 25 bp, Homo sapien
ttagcgccagtggagcgcactgctg

SEQ ID NO: 3703987 - DNA, 25 bp, Homo sapien
gatggtgtagatgcttgggaggact

SEQ ID NO: 3703988 - DNA, 25 bp, Homo sapien
gggcctgtgccatccaagaatctca

SEQ ID NO: 3703989 - DNA, 25 bp, Homo sapien
tctcaacgcagggaaaagtgtggaa

SEQ ID NO: 3703990 - DNA, 25 bp, Homo sapien
gcctcttgagacctgggattgttga

SEQ ID NO: 3703991 - DNA, 25 bp, Homo sapien
gtttgccgatggtcccagggacctc

SEQ ID NO: 3703992 - DNA, 25 bp, Homo sapien
gccgtgcactgcagccgttgcgggt

SEQ ID NO: 3703993 - DNA, 25 bp, Homo sapien
acctggcagctcgtctgcccggagc

SEQ ID NO: 3703994 - DNA, 25 bp, Homo sapien
tcttgctccaaacctttgcatccca

SEQ ID NO: 3703995 - DNA, 25 bp, Homo sapien
agccgttgcgggtgacactgagatc

SEQ ID NO: 3703996 - DNA, 25 bp, Homo sapien
acttcagggctttggctcacagagg

SEQ ID NO: 3703997 - DNA, 25 bp, Homo sapien
cttcagggctttggctcacagaggc

SEQ ID NO: 3703998 - DNA, 25 bp, Homo sapien
ttcagggctttggctcacagaggcc

SEQ ID NO: 3703999 - DNA, 25 bp, Homo sapien
tgccctgtcttagaggaggcagcag

SEQ ID NO: 3704000 - DNA, 25 bp, Homo sapien
ggatgtcagaagtggaggggacccc

SEQ ID NO: 3704001 - DNA, 25 bp, Homo sapien
ctgccccttgccctgtcttagagga

SEQ ID NO: 3704002 - DNA, 25 bp, Homo sapien
cttgccctgtcttagaggaggcagc

SEQ ID NO: 3704003 - DNA, 25 bp, Homo sapien
tgctctgtgtctggtgaagcgcaaa

SEQ ID NO: 3704004 - DNA, 25 bp, Homo sapien
cacagagaagtcaagggcacaggga

SEQ ID NO: 3704005 - DNA, 25 bp, Homo sapien
tgctttctcctgtgtccggcgcaga

SEQ ID NO: 3704006 - DNA, 25 bp, Homo sapien
atggtccttgctcgagcccacagag

SEQ ID NO: 3704007 - DNA, 25 bp, Homo sapien
gctgggcgggactcttggccccgaa

SEQ ID NO: 3704008 - DNA, 25 bp, Homo sapien
ctgggcgggactcttggccccgaag

SEQ ID NO: 3704009 - DNA, 25 bp, Homo sapien
ggctgggcgggactcttggccccga

SEQ ID NO: 3704010 - DNA, 25 bp, Homo sapien
agtggtgttgatggaatatggccct

SEQ ID NO: 3704011 - DNA, 25 bp, Homo sapien
ctgcagaaggtatagatgaccgtca

SEQ ID NO: 3704012 - DNA, 25 bp, Homo sapien
tgagtcccaccagcaagatcactgt

SEQ ID NO: 3704013 - DNA, 25 bp, Homo sapien
aggttgcccagcatccccgtgagtc

SEQ ID NO: 3704014 - DNA, 25 bp, Homo sapien
actgtgcccagggtatagtgggcat

SEQ ID NO: 3704015 - DNA, 25 bp, Homo sapien
ctggccagagctagagtcaacattc

SEQ ID NO: 3704016 - DNA, 25 bp, Homo sapien
cctgagatcatcgaaggcatggccc

SEQ ID NO: 3704017 - DNA, 25 bp, Homo sapien
gaaggtctgggcctgagatcatcga

SEQ ID NO: 3704018 - DNA, 25 bp, Homo sapien
tccttgcctagcctcaacagtgccc

SEQ ID NO: 3704019 - DNA, 25 bp, Homo sapien
atcatcacagtgactccacgaagca

SEQ ID NO: 3704020 - DNA, 25 bp, Homo sapien
cacagtgactccacgaagcacagct

SEQ ID NO: 3704021 - DNA, 25 bp, Homo sapien
atcacagtgactccacgaagcacag

SEQ ID NO: 3704022 - DNA, 25 bp, Homo sapien
catcacagtgactccacgaagcaca

SEQ ID NO: 3704023 - DNA, 25 bp, Homo sapien
gttggcaggtgtccggaggcttctg

SEQ ID NO: 3704024 - DNA, 25 bp, Homo sapien
ttggcaggtgtccggaggcttctgc

SEQ ID NO: 3704025 - DNA, 25 bp, Homo sapien
tggcaggtgtccggaggcttctgct

SEQ ID NO: 3704026 - DNA, 25 bp, Homo sapien
ggcaggtgtccggaggcttctgctc

SEQ ID NO: 3704027 - DNA, 25 bp, Homo sapien
tagaggctactggtgaagaagacag

SEQ ID NO: 3704028 - DNA, 25 bp, Homo sapien
gacatgaggaagtcgctgaccgcga

SEQ ID NO: 3704029 - DNA, 25 bp, Homo sapien
tgcttatagaggctactggtgaaga

SEQ ID NO: 3704030 - DNA, 25 bp, Homo sapien
tgaccgcgaggttgataatgaacat

SEQ ID NO: 3704031 - DNA, 25 bp, Homo sapien
gtgggcacagcccctgctctgagtc

SEQ ID NO: 3704032 - DNA, 25 bp, Homo sapien
tgtgggcacagcccctgctctgagt

SEQ ID NO: 3704033 - DNA, 25 bp, Homo sapien
ctgtgggcacagcccctgctctgag

SEQ ID NO: 3704034 - DNA, 25 bp, Homo sapien
agggcatagagccaaacgcccagca

SEQ ID NO: 3704035 - DNA, 25 bp, Homo sapien
acaaatgccgcacgcctcttggacg

SEQ ID NO: 3704036 - DNA, 25 bp, Homo sapien
gccagcgggcgtgtgattaccaggt

SEQ ID NO: 3704037 - DNA, 25 bp, Homo sapien
gcgatggccgtcagggtgatcatgg

SEQ ID NO: 3704038 - DNA, 25 bp, Homo sapien
cctgaagatgaagatgtagcagtag

SEQ ID NO: 3704039 - DNA, 25 bp, Homo sapien
cagagaagcatggtgtaggcacgca

SEQ ID NO: 3704040 - DNA, 25 bp, Homo sapien
gcgtgaagctcatgtagtcccagga

SEQ ID NO: 3704041 - DNA, 25 bp, Homo sapien
gagcaggatgtcagcaacccctcgg

SEQ ID NO: 3704042 - DNA, 25 bp, Homo sapien
aaggacgcatcgtccaggtctgacc

SEQ ID NO: 3704043 - DNA, 25 bp, Homo sapien
ctaggaaggacgcatcgtccaggtc

SEQ ID NO: 3704044 - DNA, 25 bp, Homo sapien
gaaggacgcatcgtccaggtctgac

SEQ ID NO: 3704045 - DNA, 25 bp, Homo sapien
gccacagggactcgccattgccctt

SEQ ID NO: 3704046 - DNA, 25 bp, Homo sapien
tgccacagggactcgccattgccct

SEQ ID NO: 3704047 - DNA, 25 bp, Homo sapien
ctgccacagggactcgccattgccc

SEQ ID NO: 3704048 - DNA, 25 bp, Homo sapien
agggccacagcggaatagggagccc

SEQ ID NO: 3704049 - DNA, 25 bp, Homo sapien
gggccacagcggaatagggagccca

SEQ ID NO: 3704050 - DNA, 25 bp, Homo sapien
gatcttggccatcttgcactcgctc

SEQ ID NO: 3704051 - DNA, 25 bp, Homo sapien
ccatcttgcactcgctctgcagccg

SEQ ID NO: 3704052 - DNA, 25 bp, Homo sapien
ctggcaccgagctcatgtagggtgt

SEQ ID NO: 3704053 - DNA, 25 bp, Homo sapien
ttgtggattgcagaggccttggcga

SEQ ID NO: 3704054 - DNA, 25 bp, Homo sapien
gtagggtgtcaggacgtgtgcgtac

SEQ ID NO: 3704055 - DNA, 25 bp, Homo sapien
ggtgggtgatggcgtaaatgatggg

SEQ ID NO: 3704056 - DNA, 25 bp, Homo sapien
ctcagtgtcattggccgctcccagc

SEQ ID NO: 3704057 - DNA, 25 bp, Homo sapien
actcagtgtcattggccgctcccag

SEQ ID NO: 3704058 - DNA, 25 bp, Homo sapien
tcagtgtcattggccgctcccagct

SEQ ID NO: 3704059 - DNA, 25 bp, Homo sapien
ccactcagtgtcattggccgctccc

SEQ ID NO: 3704060 - DNA, 25 bp, Homo sapien
gcctaatgtgcggtgaccgagagcc

SEQ ID NO: 3704061 - DNA, 25 bp, Homo sapien
gggccgcacatctgattagggccag

SEQ ID NO: 3704062 - DNA, 25 bp, Homo sapien
acaggctggtacaggcctaatgtgc

SEQ ID NO: 3704063 - DNA, 25 bp, Homo sapien
gccgcacatctgattagggccaggg

SEQ ID NO: 3704064 - DNA, 25 bp, Homo sapien
ggcgcctccgtatggagatccagct

SEQ ID NO: 3704065 - DNA, 25 bp, Homo sapien
tgccggcgtgatacacccagcagca

SEQ ID NO: 3704066 - DNA, 25 bp, Homo sapien
ctggtcagcgtggagcggtgggtgg

SEQ ID NO: 3704067 - DNA, 25 bp, Homo sapien
gactgtgccggcgtgatacacccag

SEQ ID NO: 3704068 - DNA, 25 bp, Homo sapien
tcaaccgagaaccccagggatgtgg

SEQ ID NO: 3704069 - DNA, 25 bp, Homo sapien
cggtggcgcacggagctttcctggg

SEQ ID NO: 3704070 - DNA, 25 bp, Homo sapien
ggaggagatcgctggccggtcagtt

SEQ ID NO: 3704071 - DNA, 25 bp, Homo sapien
catagagggctctgtaggtagaatt

SEQ ID NO: 3704072 - DNA, 25 bp, Homo sapien
gtagagggaccgcccatttgcttgc

SEQ ID NO: 3704073 - DNA, 25 bp, Homo sapien
cgtagagggaccgcccatttgcttg

SEQ ID NO: 3704074 - DNA, 25 bp, Homo sapien
agagggaccgcccatttgcttgctg

SEQ ID NO: 3704075 - DNA, 25 bp, Homo sapien
tagagggaccgcccatttgcttgct

SEQ ID NO: 3704076 - DNA, 25 bp, Homo sapien
ctggggggtgccttggcttccaagt

SEQ ID NO: 3704077 - DNA, 25 bp, Homo sapien
ggtgccttggcttccaagtcctcca

SEQ ID NO: 3704078 - DNA, 25 bp, Homo sapien
ctggagtctctgcttcgtgtccctg

SEQ ID NO: 3704079 - DNA, 25 bp, Homo sapien
tggagtctctgcttcgtgtccctgg

SEQ ID NO: 3704080 - DNA, 25 bp, Homo sapien
tcgagctatgctctgacggctgcag

SEQ ID NO: 3704081 - DNA, 25 bp, Homo sapien
catgtgcagaccatatgcaggccct

SEQ ID NO: 3704082 - DNA, 25 bp, Homo sapien
cccctttgtggattggcaggtaccg

SEQ ID NO: 3704083 - DNA, 25 bp, Homo sapien
tggccacacacatgctcgagctatg

SEQ ID NO: 3704084 - DNA, 25 bp, Homo sapien
gaggtacataccacccacactcagt

SEQ ID NO: 3704085 - DNA, 25 bp, Homo sapien
ttaatagccacaagtattccgggtg

SEQ ID NO: 3704086 - DNA, 25 bp, Homo sapien
tcgcagtcacacagagaggtacata

SEQ ID NO: 3704087 - DNA, 25 bp, Homo sapien
caggtatgtccaacctcgcagtcac

SEQ ID NO: 3704088 - DNA, 25 bp, Homo sapien
aggacatattgagctccctcccctg

SEQ ID NO: 3704089 - DNA, 25 bp, Homo sapien
tgttccaggacatattgagctccct

SEQ ID NO: 3704090 - DNA, 25 bp, Homo sapien
gttccaggacatattgagctccctc

SEQ ID NO: 3704091 - DNA, 25 bp, Homo sapien
tcctgttccaggacatattgagctc

SEQ ID NO: 3704092 - DNA, 25 bp, Homo sapien
cctggctggggatcagccccttggt

SEQ ID NO: 3704093 - DNA, 25 bp, Homo sapien
ggggtcctggctggggatcagcccc

SEQ ID NO: 3704094 - DNA, 25 bp, Homo sapien
tcctggctggggatcagccccttgg

SEQ ID NO: 3704095 - DNA, 25 bp, Homo sapien
ggtcctggctggggatcagcccctt

SEQ ID NO: 3704096 - DNA, 25 bp, Homo sapien
gtgggggggctggatgtgtctcaga

SEQ ID NO: 3704097 - DNA, 25 bp, Homo sapien
aagaaagggagagccagtgggcgtc

SEQ ID NO: 3704098 - DNA, 25 bp, Homo sapien
gggctggatgtgtctcagaagaaag

SEQ ID NO: 3704099 - DNA, 25 bp, Homo sapien
gaagaaagggagagccagtgggcgt

SEQ ID NO: 3704100 - DNA, 25 bp, Homo sapien
gcaggctcacagcataatcctgggt

SEQ ID NO: 3704101 - DNA, 25 bp, Homo sapien
gctgtgaatcccgtgcagcacgggt

SEQ ID NO: 3704102 - DNA, 25 bp, Homo sapien
ctggaaagtggatgcggaggacgtt

SEQ ID NO: 3704103 - DNA, 25 bp, Homo sapien
cctcgggtgcggctgctgagctgga

SEQ ID NO: 3704104 - DNA, 25 bp, Homo sapien
aatgcccgcgtgcacaagaatgtgg

SEQ ID NO: 3704105 - DNA, 25 bp, Homo sapien
aatagctggtgtgttctctggagcc

SEQ ID NO: 3704106 - DNA, 25 bp, Homo sapien
tcagataggtaactacgcgagagcg

SEQ ID NO: 3704107 - DNA, 25 bp, Homo sapien
gagtaactgttccagcgtgcaaagg

SEQ ID NO: 3704108 - DNA, 25 bp, Homo sapien
tggagctgcacgctgtctctctggc

SEQ ID NO: 3704109 - DNA, 25 bp, Homo sapien
ccagttattcctggctctcctgtct

SEQ ID NO: 3704110 - DNA, 25 bp, Homo sapien
gtgctctggaaaacttgacggcagc

SEQ ID NO: 3704111 - DNA, 25 bp, Homo sapien
ttgacggcagcatggaaagctccag

SEQ ID NO: 3704112 - DNA, 25 bp, Homo sapien
cccttggcatagggtctgaaagcag

SEQ ID NO: 3704113 - DNA, 25 bp, Homo sapien
tgagaggctcctaagaatagctggg

SEQ ID NO: 3704114 - DNA, 25 bp, Homo sapien
cccagccgggctgcgtggagctctt

SEQ ID NO: 3704115 - DNA, 25 bp, Homo sapien
ggctcctaagaatagctgggagcga

SEQ ID NO: 3704116 - DNA, 25 bp, Homo sapien
tcttgagaggctcctaagaatagct

SEQ ID NO: 3704117 - DNA, 25 bp, Homo sapien
agggttgagtgagagggcactcagg

SEQ ID NO: 3704118 - DNA, 25 bp, Homo sapien
ctgcagacaaagggtagagagggtt

SEQ ID NO: 3704119 - DNA, 25 bp, Homo sapien
gagggttgagtgagagggcactcag

SEQ ID NO: 3704120 - DNA, 25 bp, Homo sapien
gggttgagtgagagggcactcaggc

SEQ ID NO: 3704121 - DNA, 25 bp, Homo sapien
cgggcccagtcagggtcacactgta

SEQ ID NO: 3704122 - DNA, 25 bp, Homo sapien
ccgggcccagtcagggtcacactgt

SEQ ID NO: 3704123 - DNA, 25 bp, Homo sapien
caggccccagcacttgtggggaaca

SEQ ID NO: 3704124 - DNA, 25 bp, Homo sapien
ccccagcacttgtggggaacaagac

SEQ ID NO: 3704125 - DNA, 25 bp, Homo sapien
gccccagcacttgtggggaacaaga

SEQ ID NO: 3704126 - DNA, 25 bp, Homo sapien
ggccccagcacttgtggggaacaag

SEQ ID NO: 3704127 - DNA, 25 bp, Homo sapien
tcatctgcatcaggccatgctgctc

SEQ ID NO: 3704128 - DNA, 25 bp, Homo sapien
ggctgttcccccatcagtccctgct

SEQ ID NO: 3704129 - DNA, 25 bp, Homo sapien
tcagacaacccctgatgttctgtgt

SEQ ID NO: 3704130 - DNA, 25 bp, Homo sapien
gtagagttactcagacaacccctga

SEQ ID NO: 3704131 - DNA, 25 bp, Homo sapien
ctgggtctaccagtgccttgctggg

SEQ ID NO: 3704132 - DNA, 25 bp, Homo sapien
tgagccttggggccttcagccctgg

SEQ ID NO: 3704133 - DNA, 25 bp, Homo sapien
agccctgggtctaccagtgccttgc

SEQ ID NO: 3704134 - DNA, 25 bp, Homo sapien
gggccttcagccctgggtctaccag

SEQ ID NO: 3704135 - DNA, 25 bp, Homo sapien
tcagcactgctaagagctgcccaag

SEQ ID NO: 3704136 - DNA, 25 bp, Homo sapien
cttcagtgcggctataaacagcacg

SEQ ID NO: 3704137 - DNA, 25 bp, Homo sapien
ctataaacagcacggcctgtcagca

SEQ ID NO: 3704138 - DNA, 25 bp, Homo sapien
cagcggccccgaaattccaggaatt

SEQ ID NO: 3704139 - DNA, 25 bp, Homo sapien
cccacaatatctgtaggcccggagc

SEQ ID NO: 3704140 - DNA, 25 bp, Homo sapien
gggcctccaagggtccaattcattc

SEQ ID NO: 3704141 - DNA, 25 bp, Homo sapien
tgcagctgcccttgcacggtgtcct

SEQ ID NO: 3704142 - DNA, 25 bp, Homo sapien
cagagttagatgcagttctgagcag

SEQ ID NO: 3704143 - DNA, 25 bp, Homo sapien
agaggtggagcctggtcccaaaggg

SEQ ID NO: 3704144 - DNA, 25 bp, Homo sapien
cccagcaaggcccattcttgtgtcc

SEQ ID NO: 3704145 - DNA, 25 bp, Homo sapien
ttgggtcttgggtgtggccaataaa

SEQ ID NO: 3704146 - DNA, 25 bp, Homo sapien
tgtccaggtccacagttccatttgg

SEQ ID NO: 3704147 - DNA, 25 bp, Homo sapien
ctgtccaggtccacagttccatttg

SEQ ID NO: 3704148 - DNA, 25 bp, Homo sapien
tctgtcctagtgaactgcccatggg

SEQ ID NO: 3704149 - DNA, 25 bp, Homo sapien
gaccccacgcagaaaggctgtggcc

SEQ ID NO: 3704150 - DNA, 25 bp, Homo sapien
gctgggtcattgcagaccccacgca

SEQ ID NO: 3704151 - DNA, 25 bp, Homo sapien
tctttccagggcgaattttgcaatg

SEQ ID NO: 3704152 - DNA, 25 bp, Homo sapien
tcaatccatctcatttgccgggcat

SEQ ID NO: 3704153 - DNA, 25 bp, Homo sapien
aatccatctcatttgccgggcattt

SEQ ID NO: 3704154 - DNA, 25 bp, Homo sapien
caatccatctcatttgccgggcatt

SEQ ID NO: 3704155 - DNA, 25 bp, Homo sapien
gtcacccgggagtattcaacagaag

SEQ ID NO: 3704156 - DNA, 25 bp, Homo sapien
gggagtattcaacagaagccgtcat

SEQ ID NO: 3704157 - DNA, 25 bp, Homo sapien
agagtcacccgggagtattcaacag

SEQ ID NO: 3704158 - DNA, 25 bp, Homo sapien
cagtccttggggaagagtcacccgg

SEQ ID NO: 3704159 - DNA, 25 bp, Homo sapien
ctgattggatagtggaggtgggggg

SEQ ID NO: 3704160 - DNA, 25 bp, Homo sapien
tgggtcatggtgtctgtgttgacgc

SEQ ID NO: 3704161 - DNA, 25 bp, Homo sapien
ggctcaagttgtagctggcagactt

SEQ ID NO: 3704162 - DNA, 25 bp, Homo sapien
tgtgttgacgccgtcaatggccacc

SEQ ID NO: 3704163 - DNA, 25 bp, Homo sapien
accacgaggtcaccctggctgagct

SEQ ID NO: 3704164 - DNA, 25 bp, Homo sapien
cttctggtgagggatcaccggcaga

SEQ ID NO: 3704165 - DNA, 25 bp, Homo sapien
ggtgagggatcaccggcagaggggt

SEQ ID NO: 3704166 - DNA, 25 bp, Homo sapien
tggagatgggaatgggacgctttga

SEQ ID NO: 3704167 - DNA, 25 bp, Homo sapien
ggtctggactggaggtgctgtcgtg

SEQ ID NO: 3704168 - DNA, 25 bp, Homo sapien
aggctgccgttcgtgtccagagcgg

SEQ ID NO: 3704169 - DNA, 25 bp, Homo sapien
ctgggagtccgacacccgaggcctt

SEQ ID NO: 3704170 - DNA, 25 bp, Homo sapien
agggtcagaggcctcggcgagtgag

SEQ ID NO: 3704171 - DNA, 25 bp, Homo sapien
tctctgccgagtacaggccaatggg

SEQ ID NO: 3704172 - DNA, 25 bp, Homo sapien
gccgagcaccgaggacccaggtggc

SEQ ID NO: 3704173 - DNA, 25 bp, Homo sapien
tgccgagcaccgaggacccaggtgg

SEQ ID NO: 3704174 - DNA, 25 bp, Homo sapien
ctgccgagcaccgaggacccaggtg

SEQ ID NO: 3704175 - DNA, 25 bp, Homo sapien
ccgagcaccgaggacccaggtggcc

SEQ ID NO: 3704176 - DNA, 25 bp, Homo sapien
gccagtgcctcgctctgaccacctg

SEQ ID NO: 3704177 - DNA, 25 bp, Homo sapien
gattggggccagtgcctcgctctga

SEQ ID NO: 3704178 - DNA, 25 bp, Homo sapien
gtgcctcgctctgaccacctgacca

SEQ ID NO: 3704179 - DNA, 25 bp, Homo sapien
tggggccagtgcctcgctctgacca

SEQ ID NO: 3704180 - DNA, 25 bp, Homo sapien
tcccttggaggaaacgtcagactct

SEQ ID NO: 3704181 - DNA, 25 bp, Homo sapien
catcccttggaggaaacgtcagact

SEQ ID NO: 3704182 - DNA, 25 bp, Homo sapien
ccttggaggaaacgtcagactctgc

SEQ ID NO: 3704183 - DNA, 25 bp, Homo sapien
ggaggaaacgtcagactctgctgct

SEQ ID NO: 3704184 - DNA, 25 bp, Homo sapien
gccaaagatgtaagacctgcccagg

SEQ ID NO: 3704185 - DNA, 25 bp, Homo sapien
ccaaagatgtaagacctgcccaggg

SEQ ID NO: 3704186 - DNA, 25 bp, Homo sapien
cagcagacacatctgagaggagcca

SEQ ID NO: 3704187 - DNA, 25 bp, Homo sapien
agcagacacatctgagaggagccag

SEQ ID NO: 3704188 - DNA, 25 bp, Homo sapien
gagtgagcctcccagagcatggtct

SEQ ID NO: 3704189 - DNA, 25 bp, Homo sapien
agtgagcctcccagagcatggtctc

SEQ ID NO: 3704190 - DNA, 25 bp, Homo sapien
gagagtgagcctcccagagcatggt

SEQ ID NO: 3704191 - DNA, 25 bp, Homo sapien
aattccctgcagtggcagaccctgt

SEQ ID NO: 3704192 - DNA, 25 bp, Homo sapien
ggcgcagggagaagtgtgagctcaa

SEQ ID NO: 3704193 - DNA, 25 bp, Homo sapien
gaagtgtgagctcaacagccgaggc

SEQ ID NO: 3704194 - DNA, 25 bp, Homo sapien
agggagaagtgtgagctcaacagcc

SEQ ID NO: 3704195 - DNA, 25 bp, Homo sapien
gagaagtgtgagctcaacagccgag

SEQ ID NO: 3704196 - DNA, 25 bp, Homo sapien
tctggctgctcctcttggggtatag

SEQ ID NO: 3704197 - DNA, 25 bp, Homo sapien
gtcaccaggggccactcctaaaggc

SEQ ID NO: 3704198 - DNA, 25 bp, Homo sapien
ggagtggggtgcacagtcaccaggg

SEQ ID NO: 3704199 - DNA, 25 bp, Homo sapien
tcccagaagagacgcaggcagctct

SEQ ID NO: 3704200 - DNA, 25 bp, Homo sapien
tcctgagcaggcattgcagtggtaa

SEQ ID NO: 3704201 - DNA, 25 bp, Homo sapien
gtgtgcgcggggtttcctatgcccc

SEQ ID NO: 3704202 - DNA, 25 bp, Homo sapien
cctgtcagcagctccggactaagag

SEQ ID NO: 3704203 - DNA, 25 bp, Homo sapien
tccggactaagagtctgttttgtgg

SEQ ID NO: 3704204 - DNA, 25 bp, Homo sapien
ctaggggtggagacaggaccagctg

SEQ ID NO: 3704205 - DNA, 25 bp, Homo sapien
ggggtggagacaggaccagctgtgg

SEQ ID NO: 3704206 - DNA, 25 bp, Homo sapien
aggggtggagacaggaccagctgtg

SEQ ID NO: 3704207 - DNA, 25 bp, Homo sapien
taggggtggagacaggaccagctgt

SEQ ID NO: 3704208 - DNA, 25 bp, Homo sapien
tacaaacctggctatagaccccaga

SEQ ID NO: 3704209 - DNA, 25 bp, Homo sapien
gaagggttttcttgtctatcttcag

SEQ ID NO: 3704210 - DNA, 25 bp, Homo sapien
ctgctttgccagaagaagggttttc

SEQ ID NO: 3704211 - DNA, 25 bp, Homo sapien
gcactcgtaccgcatacatgaatcc

SEQ ID NO: 3704212 - DNA, 25 bp, Homo sapien
ggtcattgtggaggcagaaccagcc

SEQ ID NO: 3704213 - DNA, 25 bp, Homo sapien
aaaccgcaatgggtgaggagagcaa

SEQ ID NO: 3704214 - DNA, 25 bp, Homo sapien
agggagaactcagagccgggaatca

SEQ ID NO: 3704215 - DNA, 25 bp, Homo sapien
gggccatcatcagcctggtcattgt

SEQ ID NO: 3704216 - DNA, 25 bp, Homo sapien
tgagtccagaatgccccaaaggtga

SEQ ID NO: 3704217 - DNA, 25 bp, Homo sapien
cactcctggccatagaagggtttcc

SEQ ID NO: 3704218 - DNA, 25 bp, Homo sapien
ggcacccgcagggattctgagcaag

SEQ ID NO: 3704219 - DNA, 25 bp, Homo sapien
gacagaaaggtcttcaggctcacac

SEQ ID NO: 3704220 - DNA, 25 bp, Homo sapien
cctgggaatacatgctgatgggcgt

SEQ ID NO: 3704221 - DNA, 25 bp, Homo sapien
tgttgtactgcgcatggatgatggt

SEQ ID NO: 3704222 - DNA, 25 bp, Homo sapien
cttgggcctgcccagcgatggcatc

SEQ ID NO: 3704223 - DNA, 25 bp, Homo sapien
cagggccgagtccttcagggcactg

SEQ ID NO: 3704224 - DNA, 25 bp, Homo sapien
ccaggaggtccaacgtgagggaaga

SEQ ID NO: 3704225 - DNA, 25 bp, Homo sapien
ggtcccgatggtgcccaatggccca

SEQ ID NO: 3704226 - DNA, 25 bp, Homo sapien
tggcccatacccctcgggctctgga

SEQ ID NO: 3704227 - DNA, 25 bp, Homo sapien
gaagaaagctggtcccgatggtgcc

SEQ ID NO: 3704228 - DNA, 25 bp, Homo sapien
aatggtccccttgttaagaggactg

SEQ ID NO: 3704229 - DNA, 25 bp, Homo sapien
aggacagcttcgctgtgagaggcct

SEQ ID NO: 3704230 - DNA, 25 bp, Homo sapien
ccctccttaaaggacagcttcgctg

SEQ ID NO: 3704231 - DNA, 25 bp, Homo sapien
tggtccccttgttaagaggactgta

SEQ ID NO: 3704232 - DNA, 25 bp, Homo sapien
taacctgcatgcatatcatggccac

SEQ ID NO: 3704233 - DNA, 25 bp, Homo sapien
cctcttattacatcggtttttctgg

SEQ ID NO: 3704234 - DNA, 25 bp, Homo sapien
gcatatcatggccacaagggctggg

SEQ ID NO: 3704235 - DNA, 25 bp, Homo sapien
gggagcctgccctttataacctgca

SEQ ID NO: 3704236 - DNA, 25 bp, Homo sapien
ggaaacgtccttcgtgaagtctcga

SEQ ID NO: 3704237 - DNA, 25 bp, Homo sapien
attccaaaactgatgggtgccctag

SEQ ID NO: 3704238 - DNA, 25 bp, Homo sapien
cacggtcattgaggaaggaaccacg

SEQ ID NO: 3704239 - DNA, 25 bp, Homo sapien
cagaaatgggagcacgttatggcca

SEQ ID NO: 3704240 - DNA, 25 bp, Homo sapien
ccagcggtgacgccctgccaagcag

SEQ ID NO: 3704241 - DNA, 25 bp, Homo sapien
gccagcggtgacgccctgccaagca

SEQ ID NO: 3704242 - DNA, 25 bp, Homo sapien
gaggaaaacccagccgtgagtgcgc

SEQ ID NO: 3704243 - DNA, 25 bp, Homo sapien
tgctgtgcctttcatgacaccaagg

SEQ ID NO: 3704244 - DNA, 25 bp, Homo sapien
ttgttgctgctgtgaccaagactgg

SEQ ID NO: 3704245 - DNA, 25 bp, Homo sapien
ccaaggctcagggagaatatatgca

SEQ ID NO: 3704246 - DNA, 25 bp, Homo sapien
caagtacttgcctgtaaaggctgca

SEQ ID NO: 3704247 - DNA, 25 bp, Homo sapien
tgctcagattggtcgcagtgaagca

SEQ ID NO: 3704248 - DNA, 25 bp, Homo sapien
gttctcggtgctcagattggtcgca

SEQ ID NO: 3704249 - DNA, 25 bp, Homo sapien
actccaggcctaggccggagacatt

SEQ ID NO: 3704250 - DNA, 25 bp, Homo sapien
ctaactccaggcctaggccggagac

SEQ ID NO: 3704251 - DNA, 25 bp, Homo sapien
taatcacagcctggtagacgggaga

SEQ ID NO: 3704252 - DNA, 25 bp, Homo sapien
tggaggaacggcgtgcccactcgtc

SEQ ID NO: 3704253 - DNA, 25 bp, Homo sapien
ggcaaggtccttaatagggaggctc

SEQ ID NO: 3704254 - DNA, 25 bp, Homo sapien
ttctgtccccgtcatctgggccagg

SEQ ID NO: 3704255 - DNA, 25 bp, Homo sapien
ccctcctctgcagccaccctgagag

SEQ ID NO: 3704256 - DNA, 25 bp, Homo sapien
aggactccctggcttctgcagtgct

SEQ ID NO: 3704257 - DNA, 25 bp, Homo sapien
cttcaagggcaggtagcaggactcc

SEQ ID NO: 3704258 - DNA, 25 bp, Homo sapien
agtgctgggcccaggtccctggtgg

SEQ ID NO: 3704259 - DNA, 25 bp, Homo sapien
gaagttgcacaccaagcctgctgcc

SEQ ID NO: 3704260 - DNA, 25 bp, Homo sapien
ggactcacgggagacacagcaagga

SEQ ID NO: 3704261 - DNA, 25 bp, Homo sapien
tgggcaatcatctcgcccggaagtt

SEQ ID NO: 3704262 - DNA, 25 bp, Homo sapien
cagaggccccagaggacattgggaa

SEQ ID NO: 3704263 - DNA, 25 bp, Homo sapien
tcgcagagcttcttcatcagggtct

SEQ ID NO: 3704264 - DNA, 25 bp, Homo sapien
gcagagcttcttcatcagggtcttg

SEQ ID NO: 3704265 - DNA, 25 bp, Homo sapien
cttgaccttcgcagagcttcttcat

SEQ ID NO: 3704266 - DNA, 25 bp, Homo sapien
agagcttcttcatcagggtcttgca

SEQ ID NO: 3704267 - DNA, 25 bp, Homo sapien
tgcaggccaggctttccaaatccat

SEQ ID NO: 3704268 - DNA, 25 bp, Homo sapien
tgagaggtcccttccatgagtgatg

SEQ ID NO: 3704269 - DNA, 25 bp, Homo sapien
gcctcaagctagtgtcagctggagc

SEQ ID NO: 3704270 - DNA, 25 bp, Homo sapien
caaatccatgaacttgagaggtccc

SEQ ID NO: 3704271 - DNA, 25 bp, Homo sapien
aatgtgggtctggacaggtgagtcc

SEQ ID NO: 3704272 - DNA, 25 bp, Homo sapien
ccagccttcggaatcatagggggac

SEQ ID NO: 3704273 - DNA, 25 bp, Homo sapien
gggtcaggcgttcacgtccagcaca

SEQ ID NO: 3704274 - DNA, 25 bp, Homo sapien
acagagactcgggtccaggtgccca

SEQ ID NO: 3704275 - DNA, 25 bp, Homo sapien
acctggggcaacatccctggtgctc

SEQ ID NO: 3704276 - DNA, 25 bp, Homo sapien
cacctggggcaacatccctggtgct

SEQ ID NO: 3704277 - DNA, 25 bp, Homo sapien
catgtggtggggctccttgagtcct

SEQ ID NO: 3704278 - DNA, 25 bp, Homo sapien
aacagtcctgaccatcccgtagaca

SEQ ID NO: 3704279 - DNA, 25 bp, Homo sapien
tggcatgagcaaagtccatgtggtg

SEQ ID NO: 3704280 - DNA, 25 bp, Homo sapien
gctgacagcactacaaacagtcctg

SEQ ID NO: 3704281 - DNA, 25 bp, Homo sapien
agcagcagtcagaaacgtgggaatg

SEQ ID NO: 3704282 - DNA, 25 bp, Homo sapien
gatacagggccaggacttctggcca

SEQ ID NO: 3704283 - DNA, 25 bp, Homo sapien
cagtcagaaacgtgggaatgaatgg

SEQ ID NO: 3704284 - DNA, 25 bp, Homo sapien
tcacagatacagggccaggacttct

SEQ ID NO: 3704285 - DNA, 25 bp, Homo sapien
gcacatgcgtgcatacccacacata

SEQ ID NO: 3704286 - DNA, 25 bp, Homo sapien
tgctgccctggcctcgaaaagcctc

SEQ ID NO: 3704287 - DNA, 25 bp, Homo sapien
gggcacatgcgtgcatacccacaca

SEQ ID NO: 3704288 - DNA, 25 bp, Homo sapien
gcctgggcacatgcgtgcataccca

SEQ ID NO: 3704289 - DNA, 25 bp, Homo sapien
ggccatggtgccagttgcgcaattt

SEQ ID NO: 3704290 - DNA, 25 bp, Homo sapien
taaggatttgggctgaaaggccatg

SEQ ID NO: 3704291 - DNA, 25 bp, Homo sapien
tttaacattaaggatttgggctgaa

SEQ ID NO: 3704292 - DNA, 25 bp, Homo sapien
gcaatttggcaaaacgtgggctgtt

SEQ ID NO: 3704293 - DNA, 25 bp, Homo sapien
tggggctcacatgccagatctgtgt

SEQ ID NO: 3704294 - DNA, 25 bp, Homo sapien
gtgttatgccagcaaacccctcctg

SEQ ID NO: 3704295 - DNA, 25 bp, Homo sapien
atacattgtcaagcatcaccgtggg

SEQ ID NO: 3704296 - DNA, 25 bp, Homo sapien
gacagaaatgctgcggttggccatc

SEQ ID NO: 3704297 - DNA, 25 bp, Homo sapien
gctccagagggcagcgagggagccg

SEQ ID NO: 3704298 - DNA, 25 bp, Homo sapien
ttccccagaccctgatctacgggtg

SEQ ID NO: 3704299 - DNA, 25 bp, Homo sapien
gaccctgatctacgggtgactcatt

SEQ ID NO: 3704300 - DNA, 25 bp, Homo sapien
tcaaagagccctattccgggctgcc

SEQ ID NO: 3704301 - DNA, 25 bp, Homo sapien
tttcagaacaagcatgcttatatgt

SEQ ID NO: 3704302 - DNA, 25 bp, Homo sapien
gagagaactatggagccagcacaca

SEQ ID NO: 3704303 - DNA, 25 bp, Homo sapien
cctcattaccctggggcttctactt

SEQ ID NO: 3704304 - DNA, 25 bp, Homo sapien
agccagcacacacggtacagaaagg

SEQ ID NO: 3704305 - DNA, 25 bp, Homo sapien
agcaggaccagagctgcgctgtgtc

SEQ ID NO: 3704306 - DNA, 25 bp, Homo sapien
gcaggaccagagctgcgctgtgtcc

SEQ ID NO: 3704307 - DNA, 25 bp, Homo sapien
tcttctgatggtgcctgtcctctct

SEQ ID NO: 3704308 - DNA, 25 bp, Homo sapien
aggaccagagctgcgctgtgtcctg

SEQ ID NO: 3704309 - DNA, 25 bp, Homo sapien
ctcccgccgtgggttgcagctgggc

SEQ ID NO: 3704310 - DNA, 25 bp, Homo sapien
aaatgcccacagacaccggatgctg

SEQ ID NO: 3704311 - DNA, 25 bp, Homo sapien
tgcccacagacaccggatgctgaat

SEQ ID NO: 3704312 - DNA, 25 bp, Homo sapien
cacaaatgcccacagacaccggatg

SEQ ID NO: 3704313 - DNA, 25 bp, Homo sapien
acctccacaaatgcccacagacacc

SEQ ID NO: 3704314 - DNA, 25 bp, Homo sapien
catgatcaaccttgcattgggaaca

SEQ ID NO: 3704315 - DNA, 25 bp, Homo sapien
tctttgatccaccacttggagggat

SEQ ID NO: 3704316 - DNA, 25 bp, Homo sapien
tcggccctttccgattcctttagca

SEQ ID NO: 3704317 - DNA, 25 bp, Homo sapien
tgtctctggaccatacatgatcaac

SEQ ID NO: 3704318 - DNA, 25 bp, Homo sapien
gcatcaaggtggagcatgttgactg

SEQ ID NO: 3704319 - DNA, 25 bp, Homo sapien
tttcagcttatctcttccctcagtc

SEQ ID NO: 3704320 - DNA, 25 bp, Homo sapien
tcaaggtggagcatgttgactgtgt

SEQ ID NO: 3704321 - DNA, 25 bp, Homo sapien
tccatggtggcccttggtggtggga

SEQ ID NO: 3704322 - DNA, 25 bp, Homo sapien
tctctagcacactgtctaaagacac

SEQ ID NO: 3704323 - DNA, 25 bp, Homo sapien
gctgagtagcatcctctctagcaca

SEQ ID NO: 3704324 - DNA, 25 bp, Homo sapien
tatacctgggtatgcacgtaaggga

SEQ ID NO: 3704325 - DNA, 25 bp, Homo sapien
caggacgatgatcaccaccaggtat

SEQ ID NO: 3704326 - DNA, 25 bp, Homo sapien
attccagggcatgaagttggagctg

SEQ ID NO: 3704327 - DNA, 25 bp, Homo sapien
gagctccaaatgaaccctggattcc

SEQ ID NO: 3704328 - DNA, 25 bp, Homo sapien
gattccagggcatgaagttggagct

SEQ ID NO: 3704329 - DNA, 25 bp, Homo sapien
tccaaatgaaccctggattccaggg

SEQ ID NO: 3704330 - DNA, 25 bp, Homo sapien
actgccagtgtggaccagacgggtt

SEQ ID NO: 3704331 - DNA, 25 bp, Homo sapien
aacctgacagaggaccaggtgtgcc

SEQ ID NO: 3704332 - DNA, 25 bp, Homo sapien
tgggaaagagaaaggcgaccacact

SEQ ID NO: 3704333 - DNA, 25 bp, Homo sapien
ttggcattctgtaagcacctcttcc

SEQ ID NO: 3704334 - DNA, 25 bp, Homo sapien
caacaggtcaagggagcctagagac

SEQ ID NO: 3704335 - DNA, 25 bp, Homo sapien
ctgatgaggcgggaccaaaaagaca

SEQ ID NO: 3704336 - DNA, 25 bp, Homo sapien
ggtcaagggagcctagagaccctgt

SEQ ID NO: 3704337 - DNA, 25 bp, Homo sapien
caggtcaagggagcctagagaccct

SEQ ID NO: 3704338 - DNA, 25 bp, Homo sapien
ttgggctgtcggcaggacttgaagc

SEQ ID NO: 3704339 - DNA, 25 bp, Homo sapien
gtgcacaccggcgcatgctcaatag

SEQ ID NO: 3704340 - DNA, 25 bp, Homo sapien
gggtggcgaagccgcactgggagag

SEQ ID NO: 3704341 - DNA, 25 bp, Homo sapien
gcctggctggtgcacaccggcgcat

SEQ ID NO: 3704342 - DNA, 25 bp, Homo sapien
gaggagcggaggtagctttgctcag

SEQ ID NO: 3704343 - DNA, 25 bp, Homo sapien
tcagagtgcaaacccgtgacccctt

SEQ ID NO: 3704344 - DNA, 25 bp, Homo sapien
ggtagctttgctcagagtgcaaacc

SEQ ID NO: 3704345 - DNA, 25 bp, Homo sapien
ccccagcccatgtgtgaggagcgga

SEQ ID NO: 3704346 - DNA, 25 bp, Homo sapien
tgagtggatccagagaggtctgagg

SEQ ID NO: 3704347 - DNA, 25 bp, Homo sapien
ctgagtggatccagagaggtctgag

SEQ ID NO: 3704348 - DNA, 25 bp, Homo sapien
agtggatccagagaggtctgagggg

SEQ ID NO: 3704349 - DNA, 25 bp, Homo sapien
gagtggatccagagaggtctgaggg

SEQ ID NO: 3704350 - DNA, 25 bp, Homo sapien
tggggcctgccgatccctgctgggc

SEQ ID NO: 3704351 - DNA, 25 bp, Homo sapien
ggggcctgccgatccctgctgggca

SEQ ID NO: 3704352 - DNA, 25 bp, Homo sapien
ggcatgagaacccaccaccaagctt

SEQ ID NO: 3704353 - DNA, 25 bp, Homo sapien
cctggcatgagaacccaccaccaag

SEQ ID NO: 3704354 - DNA, 25 bp, Homo sapien
gccttccttctgtctgttcctcaag

SEQ ID NO: 3704355 - DNA, 25 bp, Homo sapien
ttccttctgtctgttcctcaaggac

SEQ ID NO: 3704356 - DNA, 25 bp, Homo sapien
ctgccttccttctgtctgttcctca

SEQ ID NO: 3704357 - DNA, 25 bp, Homo sapien
ggctttctgccttccttctgtctgt

SEQ ID NO: 3704358 - DNA, 25 bp, Homo sapien
cggcggggccctcactgtagctggt

SEQ ID NO: 3704359 - DNA, 25 bp, Homo sapien
tggcagtggtgacaacccggggctt

SEQ ID NO: 3704360 - DNA, 25 bp, Homo sapien
gctggtagacagaaggccggatgct

SEQ ID NO: 3704361 - DNA, 25 bp, Homo sapien
tggtagacagaaggccggatgctgg

SEQ ID NO: 3704362 - DNA, 25 bp, Homo sapien
caggctccataggattctgacccac

SEQ ID NO: 3704363 - DNA, 25 bp, Homo sapien
tcgggcgccagcgataagatccggc

SEQ ID NO: 3704364 - DNA, 25 bp, Homo sapien
cagcgataagatccggcctgcgaac

SEQ ID NO: 3704365 - DNA, 25 bp, Homo sapien
ataagatccggcctgcgaacgccgc

SEQ ID NO: 3704366 - DNA, 25 bp, Homo sapien
ctctctgacgcccggatccgaagag

SEQ ID NO: 3704367 - DNA, 25 bp, Homo sapien
cagctggtgaactgcttagccgaaa

SEQ ID NO: 3704368 - DNA, 25 bp, Homo sapien
tcaacagcagatgcccgcttagaaa

SEQ ID NO: 3704369 - DNA, 25 bp, Homo sapien
ttagccgaaacgagctcaggctgcc

SEQ ID NO: 3704370 - DNA, 25 bp, Homo sapien
gaaatttctattgcgtggtgctgcc

SEQ ID NO: 3704371 - DNA, 25 bp, Homo sapien
gaagcccagcccagttagactggta

SEQ ID NO: 3704372 - DNA, 25 bp, Homo sapien
aagcccagcccagttagactggtag

SEQ ID NO: 3704373 - DNA, 25 bp, Homo sapien
tagggaagcccagcccagttagact

SEQ ID NO: 3704374 - DNA, 25 bp, Homo sapien
cccagcccagttagactggtagcgc

SEQ ID NO: 3704375 - DNA, 25 bp, Homo sapien
ggaagctgagagtgtgtctgagtga

SEQ ID NO: 3704376 - DNA, 25 bp, Homo sapien
gggacccctgtactcccacatcgct

SEQ ID NO: 3704377 - DNA, 25 bp, Homo sapien
cccacatcgctttggtggaagctga

SEQ ID NO: 3704378 - DNA, 25 bp, Homo sapien
gaagctgagagtgtgtctgagtgac

SEQ ID NO: 3704379 - DNA, 25 bp, Homo sapien
aagggacatggctataaatatttgc

SEQ ID NO: 3704380 - DNA, 25 bp, Homo sapien
gccttgactgcccaaggcctgcata

SEQ ID NO: 3704381 - DNA, 25 bp, Homo sapien
ctggaaaagggacatggctataaat

SEQ ID NO: 3704382 - DNA, 25 bp, Homo sapien
aaggcctgcataagacgcagagtgg

SEQ ID NO: 3704383 - DNA, 25 bp, Homo sapien
tgtagggagtgggactgtaattggc

SEQ ID NO: 3704384 - DNA, 25 bp, Homo sapien
ccgagggtgcagggttatagttggg

SEQ ID NO: 3704385 - DNA, 25 bp, Homo sapien
gacgggctgtaggtagatgcaggca

SEQ ID NO: 3704386 - DNA, 25 bp, Homo sapien
gagtgggactgtaattggcccctgg

SEQ ID NO: 3704387 - DNA, 25 bp, Homo sapien
gctgggaatcgctcagccctctgga

SEQ ID NO: 3704388 - DNA, 25 bp, Homo sapien
aagtggtggcacctgaggacccgct

SEQ ID NO: 3704389 - DNA, 25 bp, Homo sapien
tggacggtccccctggcaagtggtg

SEQ ID NO: 3704390 - DNA, 25 bp, Homo sapien
tgctggctgggaatcgctcagccct

SEQ ID NO: 3704391 - DNA, 25 bp, Homo sapien
gcccttccagtgccccagtgcaggg

SEQ ID NO: 3704392 - DNA, 25 bp, Homo sapien
cttccagtgccccagtgcaggggca

SEQ ID NO: 3704393 - DNA, 25 bp, Homo sapien
gtgcaggggcacagctggaccatac

SEQ ID NO: 3704394 - DNA, 25 bp, Homo sapien
ttccagtgccccagtgcaggggcac

SEQ ID NO: 3704395 - DNA, 25 bp, Homo sapien
cagggctcagactgtgggcaagcac

SEQ ID NO: 3704396 - DNA, 25 bp, Homo sapien
ccaaccagggctcagactgtgggca

SEQ ID NO: 3704397 - DNA, 25 bp, Homo sapien
gctcagactgtgggcaagcacccca

SEQ ID NO: 3704398 - DNA, 25 bp, Homo sapien
gactgtgggcaagcaccccacacac

SEQ ID NO: 3704399 - DNA, 25 bp, Homo sapien
ccagggaagtcttgcagtaggcaca

SEQ ID NO: 3704400 - DNA, 25 bp, Homo sapien
gaattgctcataacatcgctcacag

SEQ ID NO: 3704401 - DNA, 25 bp, Homo sapien
acaggtgaactcttcagggtgccaa

SEQ ID NO: 3704402 - DNA, 25 bp, Homo sapien
aagaacggcccatggctaccagaaa

SEQ ID NO: 3704403 - DNA, 25 bp, Homo sapien
aaaggcttcttgcaggccgcacaga

SEQ ID NO: 3704404 - DNA, 25 bp, Homo sapien
caggtggtgtgccatgtctgtctca

SEQ ID NO: 3704405 - DNA, 25 bp, Homo sapien
tgtctgtctcaaggcatgcattact

SEQ ID NO: 3704406 - DNA, 25 bp, Homo sapien
tttctcgcagtagggctccccgtct

SEQ ID NO: 3704407 - DNA, 25 bp, Homo sapien
atgcctgcttttcccgcctctgatt

SEQ ID NO: 3704408 - DNA, 25 bp, Homo sapien
ttctggttctactgtcttagccttc

SEQ ID NO: 3704409 - DNA, 25 bp, Homo sapien
tctggttctactgtcttagccttca

SEQ ID NO: 3704410 - DNA, 25 bp, Homo sapien
cttttcccgcctctgattttctggt

SEQ ID NO: 3704411 - DNA, 25 bp, Homo sapien
tggcccagggcttcgataaacttgt

SEQ ID NO: 3704412 - DNA, 25 bp, Homo sapien
ggcacttggtgctgaacagattgat

SEQ ID NO: 3704413 - DNA, 25 bp, Homo sapien
tgcgcaaatgaagcaggtgtcgtgc

SEQ ID NO: 3704414 - DNA, 25 bp, Homo sapien
cggggaaatcgcagccatggcactt

SEQ ID NO: 3704415 - DNA, 25 bp, Homo sapien
tgtgatgtatcgaggcatcatggtg

SEQ ID NO: 3704416 - DNA, 25 bp, Homo sapien
aggatgtcagaaagctagcgtggca

SEQ ID NO: 3704417 - DNA, 25 bp, Homo sapien
gcaaggtatgtagaggttggtcatc

SEQ ID NO: 3704418 - DNA, 25 bp, Homo sapien
gaatgaaactttgttcgactgtgat

SEQ ID NO: 3704419 - DNA, 25 bp, Homo sapien
gagatgtgactaccctgtaacccag

SEQ ID NO: 3704420 - DNA, 25 bp, Homo sapien
aatgccacgctagagaattttatcc

SEQ ID NO: 3704421 - DNA, 25 bp, Homo sapien
catagggaatctggccatgttgaac

SEQ ID NO: 3704422 - DNA, 25 bp, Homo sapien
gagtgagctcagtgttccataggga

SEQ ID NO: 3704423 - DNA, 25 bp, Homo sapien
ctagagaaaaggcaacagcctattt

SEQ ID NO: 3704424 - DNA, 25 bp, Homo sapien
atgagcagatttcaatcactttttt

SEQ ID NO: 3704425 - DNA, 25 bp, Homo sapien
cggaagcagagtacatgagttggac

SEQ ID NO: 3704426 - DNA, 25 bp, Homo sapien
ccttgccccatgcattctagagaaa

SEQ ID NO: 3704427 - DNA, 25 bp, Homo sapien
agtagaacggctgcccctccagatt

SEQ ID NO: 3704428 - DNA, 25 bp, Homo sapien
tggagtagaacggctgcccctccag

SEQ ID NO: 3704429 - DNA, 25 bp, Homo sapien
tcttggagtagaacggctgcccctc

SEQ ID NO: 3704430 - DNA, 25 bp, Homo sapien
ttcttggagtagaacggctgcccct

SEQ ID NO: 3704431 - DNA, 25 bp, Homo sapien
cagatccaaaggtaggaagggccct

SEQ ID NO: 3704432 - DNA, 25 bp, Homo sapien
taaaaataccctgcagcgagtgctg

SEQ ID NO: 3704433 - DNA, 25 bp, Homo sapien
tgtaaacttgagctagacacggcct

SEQ ID NO: 3704434 - DNA, 25 bp, Homo sapien
tgagaaacatccacgcaagtgcctg

SEQ ID NO: 3704435 - DNA, 25 bp, Homo sapien
cttctgatgtgacatgaaaaatttt

SEQ ID NO: 3704436 - DNA, 25 bp, Homo sapien
atatagaagtaagctacttctgatg

SEQ ID NO: 3704437 - DNA, 25 bp, Homo sapien
acttctgatgtgacatgaaaaattt

SEQ ID NO: 3704438 - DNA, 25 bp, Homo sapien
agaagtaagctacttctgatgtgac

SEQ ID NO: 3704439 - DNA, 25 bp, Homo sapien
gatttattccacaagctcagtagat

SEQ ID NO: 3704440 - DNA, 25 bp, Homo sapien
tcttagataacccttcatatgtgtg

SEQ ID NO: 3704441 - DNA, 25 bp, Homo sapien
taggatcagacagtgaagttcatag

SEQ ID NO: 3704442 - DNA, 25 bp, Homo sapien
gttaatagaggcttaactaggatca

SEQ ID NO: 3704443 - DNA, 25 bp, Homo sapien
tggagaactaagtcagtggcagccc

SEQ ID NO: 3704444 - DNA, 25 bp, Homo sapien
tcagagcaatatgggagaagacact

SEQ ID NO: 3704445 - DNA, 25 bp, Homo sapien
tcaatgaccgggtggtgcctacaat

SEQ ID NO: 3704446 - DNA, 25 bp, Homo sapien
catggatggcggattatttgaaggc

SEQ ID NO: 3704447 - DNA, 25 bp, Homo sapien
tctggactacattccggagtctcag

SEQ ID NO: 3704448 - DNA, 25 bp, Homo sapien
actacattccggagtctcagagtca

SEQ ID NO: 3704449 - DNA, 25 bp, Homo sapien
atcctctcacttaggcattccctgg

SEQ ID NO: 3704450 - DNA, 25 bp, Homo sapien
cattccctgggtgttgtgccaggat

SEQ ID NO: 3704451 - DNA, 25 bp, Homo sapien
tgtcccggaaactgaacaatagtgc

SEQ ID NO: 3704452 - DNA, 25 bp, Homo sapien
ggagaagtcaaactaaacattcaga

SEQ ID NO: 3704453 - DNA, 25 bp, Homo sapien
gaatgactttacatctgtcccggaa

SEQ ID NO: 3704454 - DNA, 25 bp, Homo sapien
aacacataagttatctttggagaag

SEQ ID NO: 3704455 - DNA, 25 bp, Homo sapien
gcaatgccatacaggccagcatttg

SEQ ID NO: 3704456 - DNA, 25 bp, Homo sapien
ttgttatgcctgattcctgaatagc

SEQ ID NO: 3704457 - DNA, 25 bp, Homo sapien
gccacactgtggatgataccacaaa

SEQ ID NO: 3704458 - DNA, 25 bp, Homo sapien
ttttaatgcatctagaaggtgaagc

SEQ ID NO: 3704459 - DNA, 25 bp, Homo sapien
tctgcgaatccattgttttgaaggt

SEQ ID NO: 3704460 - DNA, 25 bp, Homo sapien
tgcaaactccttgatgcatctgctg

SEQ ID NO: 3704461 - DNA, 25 bp, Homo sapien
ttggtgggtagttgcaaactccttg

SEQ ID NO: 3704462 - DNA, 25 bp, Homo sapien
cagttattgaatccttgcttctgcg

SEQ ID NO: 3704463 - DNA, 25 bp, Homo sapien
cattccctctttcaactaatgttgc

SEQ ID NO: 3704464 - DNA, 25 bp, Homo sapien
gctgctagctctcctcctaattggt

SEQ ID NO: 3704465 - DNA, 25 bp, Homo sapien
aatgttgcccagttgtttagatttc

SEQ ID NO: 3704466 - DNA, 25 bp, Homo sapien
tcctaattggtcattccctctttca

SEQ ID NO: 3704467 - DNA, 25 bp, Homo sapien
tcaaaagcaacatctcgggatccac

SEQ ID NO: 3704468 - DNA, 25 bp, Homo sapien
cagggagacatctggacacgtgtgt

SEQ ID NO: 3704469 - DNA, 25 bp, Homo sapien
aacattccgtaatgtgttggtattc

SEQ ID NO: 3704470 - DNA, 25 bp, Homo sapien
tgttctggcccccaaactcaaaagc

SEQ ID NO: 3704471 - DNA, 25 bp, Homo sapien
tctccctggctactggcatgtttat

SEQ ID NO: 3704472 - DNA, 25 bp, Homo sapien
tagtggggcatgctgttctccctgg

SEQ ID NO: 3704473 - DNA, 25 bp, Homo sapien
atcctcagcgccctggctaccagca

SEQ ID NO: 3704474 - DNA, 25 bp, Homo sapien
gtttatgcatgccagcccgtttctc

SEQ ID NO: 3704475 - DNA, 25 bp, Homo sapien
ctgtgacctgcgagcccgcgaattc

SEQ ID NO: 3704476 - DNA, 25 bp, Homo sapien
gaaggcaccaagtcaccaaggtggg

SEQ ID NO: 3704477 - DNA, 25 bp, Homo sapien
gccaggtcgtggtagttgcgacaaa

SEQ ID NO: 3704478 - DNA, 25 bp, Homo sapien
tccctcatcgattcgggagcgccag

SEQ ID NO: 3704479 - DNA, 25 bp, Homo sapien
ccgtaggtagcacgcgatggaacgc

SEQ ID NO: 3704480 - DNA, 25 bp, Homo sapien
gtagcttcccgcagacgccgtaggt

SEQ ID NO: 3704481 - DNA, 25 bp, Homo sapien
gacactcacactgcggtgaacgcca

SEQ ID NO: 3704482 - DNA, 25 bp, Homo sapien
cagtcagctggcgtgaaataaggtc

SEQ ID NO: 3704483 - DNA, 25 bp, Homo sapien
gacggacgcgccgagcctaagcctt

SEQ ID NO: 3704484 - DNA, 25 bp, Homo sapien
gccaagcccggcaggcggattccaa

SEQ ID NO: 3704485 - DNA, 25 bp, Homo sapien
tcgatcgggccgtgcgatcttcgcc

SEQ ID NO: 3704486 - DNA, 25 bp, Homo sapien
ggcaggcggattccaatctctgcag

SEQ ID NO: 3704487 - DNA, 25 bp, Homo sapien
gcctttcccatttaaggattccaga

SEQ ID NO: 3704488 - DNA, 25 bp, Homo sapien
gagcgcctttcccatttaaggattc

SEQ ID NO: 3704489 - DNA, 25 bp, Homo sapien
cggagcgactttcgcccactccgca

SEQ ID NO: 3704490 - DNA, 25 bp, Homo sapien
gtgagcgcctttcccatttaaggat

SEQ ID NO: 3704491 - DNA, 25 bp, Homo sapien
cagtagtaaaaccagtatcagacat

SEQ ID NO: 3704492 - DNA, 25 bp, Homo sapien
attcggattgggttagtgtggcatc

SEQ ID NO: 3704493 - DNA, 25 bp, Homo sapien
gataaagaaacgaagattcggattg

SEQ ID NO: 3704494 - DNA, 25 bp, Homo sapien
ggcatccgtgattgaataggtactc

SEQ ID NO: 3704495 - DNA, 25 bp, Homo sapien
ccaatatgacgtgtaattttaaact

SEQ ID NO: 3704496 - DNA, 25 bp, Homo sapien
cctggccaaggatttatactagatt

SEQ ID NO: 3704497 - DNA, 25 bp, Homo sapien
aaggaaagtcaaaggcagtactgtc

SEQ ID NO: 3704498 - DNA, 25 bp, Homo sapien
gtcaaaggcagtactgtccaatatg

SEQ ID NO: 3704499 - DNA, 25 bp, Homo sapien
tctagttttaggcagacaagggagt

SEQ ID NO: 3704500 - DNA, 25 bp, Homo sapien
agttttaggcagacaagggagttca

SEQ ID NO: 3704501 - DNA, 25 bp, Homo sapien
gatctagttttaggcagacaaggga

SEQ ID NO: 3704502 - DNA, 25 bp, Homo sapien
gggaggatctagttttaggcagaca

SEQ ID NO: 3704503 - DNA, 25 bp, Homo sapien
gactctcctcagtgatgtgaccaga

SEQ ID NO: 3704504 - DNA, 25 bp, Homo sapien
caattaaagttactatgccatccat

SEQ ID NO: 3704505 - DNA, 25 bp, Homo sapien
caaaggcctgtgaacacaattaaag

SEQ ID NO: 3704506 - DNA, 25 bp, Homo sapien
gaaaaaacagggaagagtgcataat

SEQ ID NO: 3704507 - DNA, 25 bp, Homo sapien
ggagtgctctcctcatgactcaaag

SEQ ID NO: 3704508 - DNA, 25 bp, Homo sapien
tctatagcagggtgagatgggcatc

SEQ ID NO: 3704509 - DNA, 25 bp, Homo sapien
gtacttctcacacggctattgctgg

SEQ ID NO: 3704510 - DNA, 25 bp, Homo sapien
taccacgtgtagagccaacttactg

SEQ ID NO: 3704511 - DNA, 25 bp, Homo sapien
cactatgttgtccactccgatctca

SEQ ID NO: 3704512 - DNA, 25 bp, Homo sapien
accaactgcggttcttaatagagaa

SEQ ID NO: 3704513 - DNA, 25 bp, Homo sapien
tgtagagtaggcacagttggattta

SEQ ID NO: 3704514 - DNA, 25 bp, Homo sapien
taaaaagtacaagtgtagagtaggc

SEQ ID NO: 3704515 - DNA, 25 bp, Homo sapien
gaaccgcttgaacactggttcaaag

SEQ ID NO: 3704516 - DNA, 25 bp, Homo sapien
attgattcaggtaaaattatccatg

SEQ ID NO: 3704517 - DNA, 25 bp, Homo sapien
tctggacactgctttacactactgc

SEQ ID NO: 3704518 - DNA, 25 bp, Homo sapien
catgtgcttgtgcacctctaggagt

SEQ ID NO: 3704519 - DNA, 25 bp, Homo sapien
tttatatttctaatgactaacgaca

SEQ ID NO: 3704520 - DNA, 25 bp, Homo sapien
tatatttctaatgactaacgacatt

SEQ ID NO: 3704521 - DNA, 25 bp, Homo sapien
gtgcccagcctttgatttatatttc

SEQ ID NO: 3704522 - DNA, 25 bp, Homo sapien
cagcctttgatttatatttctaatg

SEQ ID NO: 3704523 - DNA, 25 bp, Homo sapien
actgctcccttacagtgaagtggtt

SEQ ID NO: 3704524 - DNA, 25 bp, Homo sapien
ctttaagatattacaaggcctgaag

SEQ ID NO: 3704525 - DNA, 25 bp, Homo sapien
aaaagacatactgggcaaaatctca

SEQ ID NO: 3704526 - DNA, 25 bp, Homo sapien
cctagagattccatgtttaagcctt

SEQ ID NO: 3704527 - DNA, 25 bp, Homo sapien
ggtggatggcttgagtgggcccagg

SEQ ID NO: 3704528 - DNA, 25 bp, Homo sapien
aaaaatacaaactatcagttgggca

SEQ ID NO: 3704529 - DNA, 25 bp, Homo sapien
atacaaactatcagttgggcatggt

SEQ ID NO: 3704530 - DNA, 25 bp, Homo sapien
ggtggcgcacgccaccaactactca

SEQ ID NO: 3704531 - DNA, 25 bp, Homo sapien
gctagagtgcagatccctagatagg

SEQ ID NO: 3704532 - DNA, 25 bp, Homo sapien
gagtgcagatccctagatagggcca

SEQ ID NO: 3704533 - DNA, 25 bp, Homo sapien
gatccctagatagggccacagccat

SEQ ID NO: 3704534 - DNA, 25 bp, Homo sapien
tgcagatccctagatagggccacag

SEQ ID NO: 3704535 - DNA, 25 bp, Homo sapien
aatgaagacctaatcagcattcagc

SEQ ID NO: 3704536 - DNA, 25 bp, Homo sapien
tccagaccataggaaactctacagg

SEQ ID NO: 3704537 - DNA, 25 bp, Homo sapien
tatcatacatttgcaaaccccaatg

SEQ ID NO: 3704538 - DNA, 25 bp, Homo sapien
ctgaactgtaccatgggaacataat

SEQ ID NO: 3704539 - DNA, 25 bp, Homo sapien
cataatgggtgtgcgttctaatggc

SEQ ID NO: 3704540 - DNA, 25 bp, Homo sapien
gtgtgcgttctaatggcaacatgcc

SEQ ID NO: 3704541 - DNA, 25 bp, Homo sapien
atacaagggcgcataatgggtgtgc

SEQ ID NO: 3704542 - DNA, 25 bp, Homo sapien
agaggaacagaatacaagggcgcat

SEQ ID NO: 3704543 - DNA, 25 bp, Homo sapien
tcataagcaatttgagggcaaggat

SEQ ID NO: 3704544 - DNA, 25 bp, Homo sapien
cattagaatgggatttcttggctgg

SEQ ID NO: 3704545 - DNA, 25 bp, Homo sapien
aaaggtcaaaagattatgtctgtgc

SEQ ID NO: 3704546 - DNA, 25 bp, Homo sapien
aagattatgtctgtgcttcagaaac

SEQ ID NO: 3704547 - DNA, 25 bp, Homo sapien
gattctagattgctaagggttcacc

SEQ ID NO: 3704548 - DNA, 25 bp, Homo sapien
ggttcaccagatctgctaaaatcag

SEQ ID NO: 3704549 - DNA, 25 bp, Homo sapien
taaatgtcccatggaacaagcttcc

SEQ ID NO: 3704550 - DNA, 25 bp, Homo sapien
tttgtgaaccgctacctggaatgca

SEQ ID NO: 3704551 - DNA, 25 bp, Homo sapien
ggacctctccttactattttttgca

SEQ ID NO: 3704552 - DNA, 25 bp, Homo sapien
taactgttcaaggactatacgagat

SEQ ID NO: 3704553 - DNA, 25 bp, Homo sapien
tccctcctgttctggctccgtgaag

SEQ ID NO: 3704554 - DNA, 25 bp, Homo sapien
tacgaaatttcaattctgccaaggt

SEQ ID NO: 3704555 - DNA, 25 bp, Homo sapien
cagcagatagggtgacttaggaaca

SEQ ID NO: 3704556 - DNA, 25 bp, Homo sapien
tccagtggcacatcaagagaataag

SEQ ID NO: 3704557 - DNA, 25 bp, Homo sapien
tatgtaccggcagtcactttttggc

SEQ ID NO: 3704558 - DNA, 25 bp, Homo sapien
taaatttatacctcagcccagatcc

SEQ ID NO: 3704559 - DNA, 25 bp, Homo sapien
gaattcggtggaatcaacaacactg

SEQ ID NO: 3704560 - DNA, 25 bp, Homo sapien
agattaactttgagcttgtaccaga

SEQ ID NO: 3704561 - DNA, 25 bp, Homo sapien
tacggccatgccctaagccaaaatt

SEQ ID NO: 3704562 - DNA, 25 bp, Homo sapien
ccaagtagccagcaagtacggccat

SEQ ID NO: 3704563 - DNA, 25 bp, Homo sapien
agtattaaactgatgcatattttca

SEQ ID NO: 3704564 - DNA, 25 bp, Homo sapien
cagtattaaactgatgcatattttc

SEQ ID NO: 3704565 - DNA, 25 bp, Homo sapien
gtggctagataaaactgtacttctg

SEQ ID NO: 3704566 - DNA, 25 bp, Homo sapien
ttcatatcaccaacgatatggtttg

SEQ ID NO: 3704567 - DNA, 25 bp, Homo sapien
attcatatcaccaacgatatggttt

SEQ ID NO: 3704568 - DNA, 25 bp, Homo sapien
tgctaactggactacacaccaaggg

SEQ ID NO: 3704569 - DNA, 25 bp, Homo sapien
cttgctaactggactacacaccaag

SEQ ID NO: 3704570 - DNA, 25 bp, Homo sapien
aactggactacacaccaagggtggg

SEQ ID NO: 3704571 - DNA, 25 bp, Homo sapien
taactggactacacaccaagggtgg

SEQ ID NO: 3704572 - DNA, 25 bp, Homo sapien
tagtaacgcaagactttttgtcatc

SEQ ID NO: 3704573 - DNA, 25 bp, Homo sapien
tctgacaactgctgagacctctact

SEQ ID NO: 3704574 - DNA, 25 bp, Homo sapien
gcctagctcggactaacttctaaaa

SEQ ID NO: 3704575 - DNA, 25 bp, Homo sapien
gcttgtccagtacaggcatctgtca

SEQ ID NO: 3704576 - DNA, 25 bp, Homo sapien
cttttaggtgctcagatacagccat

SEQ ID NO: 3704577 - DNA, 25 bp, Homo sapien
ctttgccagctggctataaatatgt

SEQ ID NO: 3704578 - DNA, 25 bp, Homo sapien
taagtatagcaatctcttcatattg

SEQ ID NO: 3704579 - DNA, 25 bp, Homo sapien
aaagacaggggtacagtttcactct

SEQ ID NO: 3704580 - DNA, 25 bp, Homo sapien
tcttcttttcaataagtatagcaat

SEQ ID NO: 3704581 - DNA, 25 bp, Homo sapien
cttagaggaatacacacttgtacaa

SEQ ID NO: 3704582 - DNA, 25 bp, Homo sapien
cagggcctggattagcataagaata

SEQ ID NO: 3704583 - DNA, 25 bp, Homo sapien
tcccttaacaagcaactcatccatt

SEQ ID NO: 3704584 - DNA, 25 bp, Homo sapien
catccattccttcccgttctctaca

SEQ ID NO: 3704585 - DNA, 25 bp, Homo sapien
tggctccaaggccattgttcgcatg

SEQ ID NO: 3704586 - DNA, 25 bp, Homo sapien
ccgggtctgacaagctttctgagaa

SEQ ID NO: 3704587 - DNA, 25 bp, Homo sapien
ttcactttctagtagagaagtttgg

SEQ ID NO: 3704588 - DNA, 25 bp, Homo sapien
tccaggcgccgggtctgacaagctt

SEQ ID NO: 3704589 - DNA, 25 bp, Homo sapien
gcgccgggtctgacaagctttctga

SEQ ID NO: 3704590 - DNA, 25 bp, Homo sapien
caagcacttgacaatgacttcaact

SEQ ID NO: 3704591 - DNA, 25 bp, Homo sapien
gtaatgtttcctgtgtactgtcacc

SEQ ID NO: 3704592 - DNA, 25 bp, Homo sapien
tcttgtaaaagatcgcaagcacttg

SEQ ID NO: 3704593 - DNA, 25 bp, Homo sapien
taataattggtcttgctacttcacc

SEQ ID NO: 3704594 - DNA, 25 bp, Homo sapien
cttgaacacgagaaatgatgaacaa

SEQ ID NO: 3704595 - DNA, 25 bp, Homo sapien
aatgatgaacaaataggctcccaat

SEQ ID NO: 3704596 - DNA, 25 bp, Homo sapien
ttgaacacgagaaatgatgaacaaa

SEQ ID NO: 3704597 - DNA, 25 bp, Homo sapien
gatgaacaaataggctcccaataat

SEQ ID NO: 3704598 - DNA, 25 bp, Homo sapien
ggtctccctatactgctcaggttgg

SEQ ID NO: 3704599 - DNA, 25 bp, Homo sapien
aggtctccctatactgctcaggttg

SEQ ID NO: 3704600 - DNA, 25 bp, Homo sapien
caaggtctccctatactgctcaggt

SEQ ID NO: 3704601 - DNA, 25 bp, Homo sapien
ctccctatactgctcaggttggtct

SEQ ID NO: 3704602 - DNA, 25 bp, Homo sapien
caccttcgtgaccgtggtctctccc

SEQ ID NO: 3704603 - DNA, 25 bp, Homo sapien
accaccttcgtgaccgtggtctctc

SEQ ID NO: 3704604 - DNA, 25 bp, Homo sapien
ccaccttcgtgaccgtggtctctcc

SEQ ID NO: 3704605 - DNA, 25 bp, Homo sapien
gaatttgtaagtaaatcatttctga

SEQ ID NO: 3704606 - DNA, 25 bp, Homo sapien
cattcaaatatggaatttgtaagta

SEQ ID NO: 3704607 - DNA, 25 bp, Homo sapien
tggaatttgtaagtaaatcatttct

SEQ ID NO: 3704608 - DNA, 25 bp, Homo sapien
ctgcattcaaatatggaatttgtaa

SEQ ID NO: 3704609 - DNA, 25 bp, Homo sapien
ctgactttttctggtcggagtctga

SEQ ID NO: 3704610 - DNA, 25 bp, Homo sapien
tctggtcggagtctgatttcatccc

SEQ ID NO: 3704611 - DNA, 25 bp, Homo sapien
ctggtgctaaggttactccattttc

SEQ ID NO: 3704612 - DNA, 25 bp, Homo sapien
aaaaaaggcaaggtatcctctggtg

SEQ ID NO: 3704613 - DNA, 25 bp, Homo sapien
catatttcatacaccctgaagctaa

SEQ ID NO: 3704614 - DNA, 25 bp, Homo sapien
tacaccctgaagctaatgtggtttc

SEQ ID NO: 3704615 - DNA, 25 bp, Homo sapien
tttcatacaccctgaagctaatgtg

SEQ ID NO: 3704616 - DNA, 25 bp, Homo sapien
ctgaagctaatgtggtttctccctg

SEQ ID NO: 3704617 - DNA, 25 bp, Homo sapien
agaaaactgtaatcaggctgggcac

SEQ ID NO: 3704618 - DNA, 25 bp, Homo sapien
cacagtctgagtgtacccagggata

SEQ ID NO: 3704619 - DNA, 25 bp, Homo sapien
tggtgaattcagcttaggacaggcc

SEQ ID NO: 3704620 - DNA, 25 bp, Homo sapien
gaacactggttattactgctgggct

SEQ ID NO: 3704621 - DNA, 25 bp, Homo sapien
tgagaaaacgagagcagagcacctt

SEQ ID NO: 3704622 - DNA, 25 bp, Homo sapien
ccacgatcagcccataattgtttaa

SEQ ID NO: 3704623 - DNA, 25 bp, Homo sapien
tattttcaatgatccagcaacttgg

SEQ ID NO: 3704624 - DNA, 25 bp, Homo sapien
taaacacttatttgatatcccgaca

SEQ ID NO: 3704625 - DNA, 25 bp, Homo sapien
tatcccgacatagcctacactgatg

SEQ ID NO: 3704626 - DNA, 25 bp, Homo sapien
cacacatggcagtgcgtgaagacac

SEQ ID NO: 3704627 - DNA, 25 bp, Homo sapien
acacatggcagtgcgtgaagacact

SEQ ID NO: 3704628 - DNA, 25 bp, Homo sapien
ccacacatggcagtgcgtgaagaca

SEQ ID NO: 3704629 - DNA, 25 bp, Homo sapien
tgtgggttgcaaatactggttacat

SEQ ID NO: 3704630 - DNA, 25 bp, Homo sapien
aatactggttacataaattggtccg

SEQ ID NO: 3704631 - DNA, 25 bp, Homo sapien
aaattggtccgacaacattctattg

SEQ ID NO: 3704632 - DNA, 25 bp, Homo sapien
tattgtccggcgtagctgggctttt

SEQ ID NO: 3704633 - DNA, 25 bp, Homo sapien
cgaatgctgccatcaaaaaacggac

SEQ ID NO: 3704634 - DNA, 25 bp, Homo sapien
gatcatagcaattatgcagacagcc

SEQ ID NO: 3704635 - DNA, 25 bp, Homo sapien
agcaaaaccagccatcgaatgctgc

SEQ ID NO: 3704636 - DNA, 25 bp, Homo sapien
gcagacagccatagaaatgagcaaa

SEQ ID NO: 3704637 - DNA, 25 bp, Homo sapien
cctcagtaatctgaagtgtttcctt

SEQ ID NO: 3704638 - DNA, 25 bp, Homo sapien
gtttatatccattagggactgtctc

SEQ ID NO: 3704639 - DNA, 25 bp, Homo sapien
cattaatgtatctaggttggtatga

SEQ ID NO: 3704640 - DNA, 25 bp, Homo sapien
tggctacatgcaaacaattctggag

SEQ ID NO: 3704641 - DNA, 25 bp, Homo sapien
ggtcagtggttttgattgcttcatt

SEQ ID NO: 3704642 - DNA, 25 bp, Homo sapien
ttctgtatgtttttcgtccctcctc

SEQ ID NO: 3704643 - DNA, 25 bp, Homo sapien
cttctgggaactccaattatatcta

SEQ ID NO: 3704644 - DNA, 25 bp, Homo sapien
ttctaaggtctatatcagttctggg

SEQ ID NO: 3704645 - DNA, 25 bp, Homo sapien
tctgatcaataatgaatcttcacag

SEQ ID NO: 3704646 - DNA, 25 bp, Homo sapien
gactgaactagcacatgaagttcta

SEQ ID NO: 3704647 - DNA, 25 bp, Homo sapien
cttgttaaagttcaactaaatatga

SEQ ID NO: 3704648 - DNA, 25 bp, Homo sapien
tctatgtagtatttagtttagaact

SEQ ID NO: 3704649 - DNA, 25 bp, Homo sapien
taaattgcagacgtatctaaattgg

SEQ ID NO: 3704650 - DNA, 25 bp, Homo sapien
ggtacagaatgatgcctcgtccaca

SEQ ID NO: 3704651 - DNA, 25 bp, Homo sapien
tctaaattggaggaaaacgatcaca

SEQ ID NO: 3704652 - DNA, 25 bp, Homo sapien
gaaggtataggttttgaggatcatg

SEQ ID NO: 3704653 - DNA, 25 bp, Homo sapien
tgaactcctaacctcaaatgatcca

SEQ ID NO: 3704654 - DNA, 25 bp, Homo sapien
cgggtttaagcaatcctccctgcct

SEQ ID NO: 3704655 - DNA, 25 bp, Homo sapien
gtcttgaactcctaacctcaaatga

SEQ ID NO: 3704656 - DNA, 25 bp, Homo sapien
cttgaactcctaacctcaaatgatc

SEQ ID NO: 3704657 - DNA, 25 bp, Homo sapien
cgattgtaacgacgtctgcttgaga

SEQ ID NO: 3704658 - DNA, 25 bp, Homo sapien
tcctgttccaaatcacgattgtaac

SEQ ID NO: 3704659 - DNA, 25 bp, Homo sapien
tgtaacgacgtctgcttgagatgct

SEQ ID NO: 3704660 - DNA, 25 bp, Homo sapien
aaatcacgattgtaacgacgtctgc

SEQ ID NO: 3704661 - DNA, 25 bp, Homo sapien
gttttcatggcgcattagcacagtt

SEQ ID NO: 3704662 - DNA, 25 bp, Homo sapien
tacttctccatatcggcctttacca

SEQ ID NO: 3704663 - DNA, 25 bp, Homo sapien
aacttgccggaccatctgaatctgt

SEQ ID NO: 3704664 - DNA, 25 bp, Homo sapien
gtagatttctgtttctcgaaaccag

SEQ ID NO: 3704665 - DNA, 25 bp, Homo sapien
tgaaattgactgaatcagtgtgtac

SEQ ID NO: 3704666 - DNA, 25 bp, Homo sapien
atgaaattgactgaatcagtgtgta

SEQ ID NO: 3704667 - DNA, 25 bp, Homo sapien
gaaattgactgaatcagtgtgtacc

SEQ ID NO: 3704668 - DNA, 25 bp, Homo sapien
agtccaggaacctgtacctttaatg

SEQ ID NO: 3704669 - DNA, 25 bp, Homo sapien
ccaggaacctgtacctttaatgtct

SEQ ID NO: 3704670 - DNA, 25 bp, Homo sapien
aggaacctgtacctttaatgtctgc

SEQ ID NO: 3704671 - DNA, 25 bp, Homo sapien
ctgagtccaggaacctgtaccttta

SEQ ID NO: 3704672 - DNA, 25 bp, Homo sapien
tcgatgagcaattgcgggctttcct

SEQ ID NO: 3704673 - DNA, 25 bp, Homo sapien
tgcaggtggcacagaccacaggcag

SEQ ID NO: 3704674 - DNA, 25 bp, Homo sapien
catggtaatcagtaatcaaatagag

SEQ ID NO: 3704675 - DNA, 25 bp, Homo sapien
tttcaggaagtcatagagagatcca

SEQ ID NO: 3704676 - DNA, 25 bp, Homo sapien
tgttcaggctttcgtccagcacttc

SEQ ID NO: 3704677 - DNA, 25 bp, Homo sapien
gtattcaagggcacatcaacttcat

SEQ ID NO: 3704678 - DNA, 25 bp, Homo sapien
cctgtgatacaacgacgagccatct

SEQ ID NO: 3704679 - DNA, 25 bp, Homo sapien
cccaaatgattaggccgaagctgta

SEQ ID NO: 3704680 - DNA, 25 bp, Homo sapien
tggccgcaaacgtttgacacacaca

SEQ ID NO: 3704681 - DNA, 25 bp, Homo sapien
cacaacctcacgcatatcttcgtat

SEQ ID NO: 3704682 - DNA, 25 bp, Homo sapien
tatgacggatcactcggtaccatgt

SEQ ID NO: 3704683 - DNA, 25 bp, Homo sapien
ccgattagacacaattggccgcaaa

SEQ ID NO: 3704684 - DNA, 25 bp, Homo sapien
tgagcagagaatatatttggtggca

SEQ ID NO: 3704685 - DNA, 25 bp, Homo sapien
tggcatttacgaatcacttcttcag

SEQ ID NO: 3704686 - DNA, 25 bp, Homo sapien
gaatatatttggtggcatttacgaa

SEQ ID NO: 3704687 - DNA, 25 bp, Homo sapien
tatttggtggcatttacgaatcact

SEQ ID NO: 3704688 - DNA, 25 bp, Homo sapien
ttagcttcaaaactgctcgtagaca

SEQ ID NO: 3704689 - DNA, 25 bp, Homo sapien
tcttgggattcaaccatcttggcaa

SEQ ID NO: 3704690 - DNA, 25 bp, Homo sapien
catcttgggattcaaccatcttggc

SEQ ID NO: 3704691 - DNA, 25 bp, Homo sapien
ttgggattcaaccatcttggcaagc

SEQ ID NO: 3704692 - DNA, 25 bp, Homo sapien
tcttctaattcaaatggcagcagag

SEQ ID NO: 3704693 - DNA, 25 bp, Homo sapien
gaatcccggcgtgcatgtgcatgga

SEQ ID NO: 3704694 - DNA, 25 bp, Homo sapien
tcatctataggctgttttacaaagg

SEQ ID NO: 3704695 - DNA, 25 bp, Homo sapien
caaaggtagaatacaaacgaactga

SEQ ID NO: 3704696 - DNA, 25 bp, Homo sapien
gaacagttatacagtgtagctacag

SEQ ID NO: 3704697 - DNA, 25 bp, Homo sapien
cttcacaagttagggaatagaaatc

SEQ ID NO: 3704698 - DNA, 25 bp, Homo sapien
gctacagatactgactagatactaa

SEQ ID NO: 3704699 - DNA, 25 bp, Homo sapien
ggatatgaggtacacatgagctggt

SEQ ID NO: 3704700 - DNA, 25 bp, Homo sapien
tgggtgttctaagtgcaatcatatc

SEQ ID NO: 3704701 - DNA, 25 bp, Homo sapien
caaattttggtaatgggtggacata

SEQ ID NO: 3704702 - DNA, 25 bp, Homo sapien
caatcatatcatacggcaacgcaga

SEQ ID NO: 3704703 - DNA, 25 bp, Homo sapien
gtggacatatgctgatttcctccca

SEQ ID NO: 3704704 - DNA, 25 bp, Homo sapien
tccacacaccatttgaacatttcca

SEQ ID NO: 3704705 - DNA, 25 bp, Homo sapien
catttccaataaactttgcctgtct

SEQ ID NO: 3704706 - DNA, 25 bp, Homo sapien
ttctaagattaactcttgatatcac

SEQ ID NO: 3704707 - DNA, 25 bp, Homo sapien
tctaagattaactcttgatatcact

SEQ ID NO: 3704708 - DNA, 25 bp, Homo sapien
aagacggcagcatttgctttttaaa

SEQ ID NO: 3704709 - DNA, 25 bp, Homo sapien
aaagacggcagcatttgctttttaa

SEQ ID NO: 3704710 - DNA, 25 bp, Homo sapien
caaagacggcagcatttgcttttta

SEQ ID NO: 3704711 - DNA, 25 bp, Homo sapien
agacggcagcatttgctttttaaag

SEQ ID NO: 3704712 - DNA, 25 bp, Homo sapien
tccaccttctgattttaagcaattc

SEQ ID NO: 3704713 - DNA, 25 bp, Homo sapien
caccttctgattttaagcaattctc

SEQ ID NO: 3704714 - DNA, 25 bp, Homo sapien
aacctccaccttctgattttaagca

SEQ ID NO: 3704715 - DNA, 25 bp, Homo sapien
cctccaccttctgattttaagcaat

SEQ ID NO: 3704716 - DNA, 25 bp, Homo sapien
tatgggaccatcattacacgtggct

SEQ ID NO: 3704717 - DNA, 25 bp, Homo sapien
tatcaaatttgatcctgggccaacc

SEQ ID NO: 3704718 - DNA, 25 bp, Homo sapien
tgggccaacccaaagatgcatgatt

SEQ ID NO: 3704719 - DNA, 25 bp, Homo sapien
taaggcaagagacgagctgtggcac

SEQ ID NO: 3704720 - DNA, 25 bp, Homo sapien
cactcaaatgtatatagtgataatg

SEQ ID NO: 3704721 - DNA, 25 bp, Homo sapien
acactcaaatgtatatagtgataat

SEQ ID NO: 3704722 - DNA, 25 bp, Homo sapien
tcagttccctaggaaaaggcagcag

SEQ ID NO: 3704723 - DNA, 25 bp, Homo sapien
gagcgcctgcgattattctgagaaa

SEQ ID NO: 3704724 - DNA, 25 bp, Homo sapien
gacactgaacagagactcccgtgag

SEQ ID NO: 3704725 - DNA, 25 bp, Homo sapien
taaggccaggtaaatgcatcccatc

SEQ ID NO: 3704726 - DNA, 25 bp, Homo sapien
gcaccctgttatgtctttagctcaa

SEQ ID NO: 3704727 - DNA, 25 bp, Homo sapien
gaagaggctacatagctcgtgacat

SEQ ID NO: 3704728 - DNA, 25 bp, Homo sapien
gatgaatgcagtagggaaagccaga

SEQ ID NO: 3704729 - DNA, 25 bp, Homo sapien
gacaattactcagctctcttggagc

SEQ ID NO: 3704730 - DNA, 25 bp, Homo sapien
aaaccatgtagccttgggcagccgg

SEQ ID NO: 3704731 - DNA, 25 bp, Homo sapien
tcagggatactgtctctcaaggaag

SEQ ID NO: 3704732 - DNA, 25 bp, Homo sapien
cagataccttcccagtgttagcatt

SEQ ID NO: 3704733 - DNA, 25 bp, Homo sapien
gattcctagcaagtggtggtcgtct

SEQ ID NO: 3704734 - DNA, 25 bp, Homo sapien
agtaggacttacctttcctgtgcca

SEQ ID NO: 3704735 - DNA, 25 bp, Homo sapien
gacatgacctcgttggtgccaaggc

SEQ ID NO: 3704736 - DNA, 25 bp, Homo sapien
tccgggacccaagtcagtaattgct

SEQ ID NO: 3704737 - DNA, 25 bp, Homo sapien
tgtcagtgttcctgtcctaaggctg

SEQ ID NO: 3704738 - DNA, 25 bp, Homo sapien
tcatggaagccaacgtcagcctgga

SEQ ID NO: 3704739 - DNA, 25 bp, Homo sapien
cctttggtggacatacgggtcacag

SEQ ID NO: 3704740 - DNA, 25 bp, Homo sapien
gagcctgagcaacgacgtcaagaat

SEQ ID NO: 3704741 - DNA, 25 bp, Homo sapien
tcttcgccactcagcgcagcttgga

SEQ ID NO: 3704742 - DNA, 25 bp, Homo sapien
cgctcctgggaccaccacagtacat

SEQ ID NO: 3704743 - DNA, 25 bp, Homo sapien
gagtgtccccccgctcctgggacca

SEQ ID NO: 3704744 - DNA, 25 bp, Homo sapien
tgtccccccgctcctgggaccacca

SEQ ID NO: 3704745 - DNA, 25 bp, Homo sapien
ccccgctcctgggaccaccacagta

SEQ ID NO: 3704746 - DNA, 25 bp, Homo sapien
ttctcacccattctaagagtgcccg

SEQ ID NO: 3704747 - DNA, 25 bp, Homo sapien
cattgccactttcaactctgacgag

SEQ ID NO: 3704748 - DNA, 25 bp, Homo sapien
ccaagaggtgctgagctgtactgtg

SEQ ID NO: 3704749 - DNA, 25 bp, Homo sapien
gtactgtgccacagagatcattgcc

SEQ ID NO: 3704750 - DNA, 25 bp, Homo sapien
tcctctctggaagcacgtagaaacc

SEQ ID NO: 3704751 - DNA, 25 bp, Homo sapien
catattgcaggtaactggtggtgct

SEQ ID NO: 3704752 - DNA, 25 bp, Homo sapien
tggaagcacgtagaaaccatctttg

SEQ ID NO: 3704753 - DNA, 25 bp, Homo sapien
ttgtggagattgagatcttgccatg

SEQ ID NO: 3704754 - DNA, 25 bp, Homo sapien
cacatccactctgggttggccactg

SEQ ID NO: 3704755 - DNA, 25 bp, Homo sapien
aaagcaaaggtcaggaatgttccca

SEQ ID NO: 3704756 - DNA, 25 bp, Homo sapien
caaaggagtccacgtaccctcctat

SEQ ID NO: 3704757 - DNA, 25 bp, Homo sapien
caggactccccaagggagggcacaa

SEQ ID NO: 3704758 - DNA, 25 bp, Homo sapien
agcttcttcgcatttcgatgatggg

SEQ ID NO: 3704759 - DNA, 25 bp, Homo sapien
tgccgcagaggcacagcttcttcgc

SEQ ID NO: 3704760 - DNA, 25 bp, Homo sapien
gtgtgccgcagaggcacagcttctt

SEQ ID NO: 3704761 - DNA, 25 bp, Homo sapien
cgcagaggcacagcttcttcgcatt

SEQ ID NO: 3704762 - DNA, 25 bp, Homo sapien
tgggccacgatgcaccttttgcact

SEQ ID NO: 3704763 - DNA, 25 bp, Homo sapien
gccacgatgcaccttttgcacttgt

SEQ ID NO: 3704764 - DNA, 25 bp, Homo sapien
gatgcaccttttgcacttgttcctc

SEQ ID NO: 3704765 - DNA, 25 bp, Homo sapien
cttctctgggccacgatgcaccttt

SEQ ID NO: 3704766 - DNA, 25 bp, Homo sapien
tgccagcaggctggttggccccagt

SEQ ID NO: 3704767 - DNA, 25 bp, Homo sapien
agcaggctggttggccccagtcacc

SEQ ID NO: 3704768 - DNA, 25 bp, Homo sapien
cttctcctgacccttacacaaagag

SEQ ID NO: 3704769 - DNA, 25 bp, Homo sapien
gacccttacacaaagagcactgaga

SEQ ID NO: 3704770 - DNA, 25 bp, Homo sapien
ctgtttccagagccccagggctagg

SEQ ID NO: 3704771 - DNA, 25 bp, Homo sapien
tccagagccccagggctaggctggg

SEQ ID NO: 3704772 - DNA, 25 bp, Homo sapien
gcccaggatgcaggccccaataaga

SEQ ID NO: 3704773 - DNA, 25 bp, Homo sapien
ccaggatgcaggccccaataagacc

SEQ ID NO: 3704774 - DNA, 25 bp, Homo sapien
tgctagcaggggtggtgacaccaac

SEQ ID NO: 3704775 - DNA, 25 bp, Homo sapien
acaccatcacaaggaggctcggctg

SEQ ID NO: 3704776 - DNA, 25 bp, Homo sapien
ggtggaagcgtgctccagaccctgt

SEQ ID NO: 3704777 - DNA, 25 bp, Homo sapien
aaggaaacgcgcggcttcctgggct

SEQ ID NO: 3704778 - DNA, 25 bp, Homo sapien
gaatgcccaggtgtcccaagcctgg

SEQ ID NO: 3704779 - DNA, 25 bp, Homo sapien
cccaggaatgcccaggtgtcccaag

SEQ ID NO: 3704780 - DNA, 25 bp, Homo sapien
aggaatgcccaggtgtcccaagcct

SEQ ID NO: 3704781 - DNA, 25 bp, Homo sapien
ggcccaggaatgcccaggtgtccca

SEQ ID NO: 3704782 - DNA, 25 bp, Homo sapien
acttctgtgcggtgtatgagagcca

SEQ ID NO: 3704783 - DNA, 25 bp, Homo sapien
gagccaccatcgcagagcggacctg

SEQ ID NO: 3704784 - DNA, 25 bp, Homo sapien
cctgcctgggataggtctcatttgg

SEQ ID NO: 3704785 - DNA, 25 bp, Homo sapien
tgggataggtctcatttggcttctg

SEQ ID NO: 3704786 - DNA, 25 bp, Homo sapien
ggcttccagtactagcctctctgat

SEQ ID NO: 3704787 - DNA, 25 bp, Homo sapien
tccagtactagcctctctgatctgc

SEQ ID NO: 3704788 - DNA, 25 bp, Homo sapien
ccagtactagcctctctgatctgca

SEQ ID NO: 3704789 - DNA, 25 bp, Homo sapien
cttccagtactagcctctctgatct

SEQ ID NO: 3704790 - DNA, 25 bp, Homo sapien
gggccaccccatgtctaccacattc

SEQ ID NO: 3704791 - DNA, 25 bp, Homo sapien
gtggccccacctcgaagtccacgct

SEQ ID NO: 3704792 - DNA, 25 bp, Homo sapien
gttcccataaggatgcatttggtgg

SEQ ID NO: 3704793 - DNA, 25 bp, Homo sapien
cccagggagcaggttcccataagga

SEQ ID NO: 3704794 - DNA, 25 bp, Homo sapien
gtgctgaggaggcatgaattgcccc

SEQ ID NO: 3704795 - DNA, 25 bp, Homo sapien
ctttgagccgcccagtgctgaaggt

SEQ ID NO: 3704796 - DNA, 25 bp, Homo sapien
tgtgtgaccccagaatagtcccttc

SEQ ID NO: 3704797 - DNA, 25 bp, Homo sapien
tggggaaatgaaggacttcctcatg

SEQ ID NO: 3704798 - DNA, 25 bp, Homo sapien
gcatcctggatgccgctggaccctg

SEQ ID NO: 3704799 - DNA, 25 bp, Homo sapien
accctgggctgccatgaaaccggtt

SEQ ID NO: 3704800 - DNA, 25 bp, Homo sapien
ctgggctgccatgaaaccggttgga

SEQ ID NO: 3704801 - DNA, 25 bp, Homo sapien
gctgccatgaaaccggttggaggat

SEQ ID NO: 3704802 - DNA, 25 bp, Homo sapien
ccgatgaaatattgatgcggaggcc

SEQ ID NO: 3704803 - DNA, 25 bp, Homo sapien
gacgccgatgaaatattgatgcgga

SEQ ID NO: 3704804 - DNA, 25 bp, Homo sapien
gatgaaatattgatgcggaggccag

SEQ ID NO: 3704805 - DNA, 25 bp, Homo sapien
ctattgacgccgatgaaatattgat

SEQ ID NO: 3704806 - DNA, 25 bp, Homo sapien
ccgcagcggctgtccccgatgcctc

SEQ ID NO: 3704807 - DNA, 25 bp, Homo sapien
agtgctgccgcagcggctgtccccg

SEQ ID NO: 3704808 - DNA, 25 bp, Homo sapien
cgagtgctgccgcagcggctgtccc

SEQ ID NO: 3704809 - DNA, 25 bp, Homo sapien
tgccgcagcggctgtccccgatgcc

SEQ ID NO: 3704810 - DNA, 25 bp, Homo sapien
ggagctggatctccctgcgagctgc

SEQ ID NO: 3704811 - DNA, 25 bp, Homo sapien
aggacggagctggatctccctgcga

SEQ ID NO: 3704812 - DNA, 25 bp, Homo sapien
acggagctggatctccctgcgagct

SEQ ID NO: 3704813 - DNA, 25 bp, Homo sapien
agctggatctccctgcgagctgcgg

SEQ ID NO: 3704814 - DNA, 25 bp, Homo sapien
gcttccgtcaccccctgcttggtct

SEQ ID NO: 3704815 - DNA, 25 bp, Homo sapien
cttccgtcaccccctgcttggtctt

SEQ ID NO: 3704816 - DNA, 25 bp, Homo sapien
ccctccttggcgatggagaagccct

SEQ ID NO: 3704817 - DNA, 25 bp, Homo sapien
ctccttggcgatggagaagcccttc

SEQ ID NO: 3704818 - DNA, 25 bp, Homo sapien
caggacagaatgtgggggacaagag

SEQ ID NO: 3704819 - DNA, 25 bp, Homo sapien
ctgaggtagggacactggctagacc

SEQ ID NO: 3704820 - DNA, 25 bp, Homo sapien
gctggacaaactgtggggtcggtgg

SEQ ID NO: 3704821 - DNA, 25 bp, Homo sapien
ccagacctccctcgaggtgttgggg

SEQ ID NO: 3704822 - DNA, 25 bp, Homo sapien
gtcacgctctgtacaacattctcct

SEQ ID NO: 3704823 - DNA, 25 bp, Homo sapien
gaggtcacgctctgtacaacattct

SEQ ID NO: 3704824 - DNA, 25 bp, Homo sapien
ggtcacgctctgtacaacattctcc

SEQ ID NO: 3704825 - DNA, 25 bp, Homo sapien
ctgaggtcacgctctgtacaacatt

SEQ ID NO: 3704826 - DNA, 25 bp, Homo sapien
cagcactaggatgcaggagccccag

SEQ ID NO: 3704827 - DNA, 25 bp, Homo sapien
gactctaggtttgagccccagcact

SEQ ID NO: 3704828 - DNA, 25 bp, Homo sapien
ccaccctagtttagcctcatggtct

SEQ ID NO: 3704829 - DNA, 25 bp, Homo sapien
gagacgcccaccctagtttagcctc

SEQ ID NO: 3704830 - DNA, 25 bp, Homo sapien
ggacactggctggcctccaccccag

SEQ ID NO: 3704831 - DNA, 25 bp, Homo sapien
cactggctggcctccaccccagccc

SEQ ID NO: 3704832 - DNA, 25 bp, Homo sapien
gacactggctggcctccaccccagc

SEQ ID NO: 3704833 - DNA, 25 bp, Homo sapien
acactggctggcctccaccccagcc

SEQ ID NO: 3704834 - DNA, 25 bp, Homo sapien
accaccccggaggtgaccgcgatgt

SEQ ID NO: 3704835 - DNA, 25 bp, Homo sapien
gtggccacagtgttgacgctgctca

SEQ ID NO: 3704836 - DNA, 25 bp, Homo sapien
gaggtgaccgcgatgttctccgcct

SEQ ID NO: 3704837 - DNA, 25 bp, Homo sapien
tcgctcacggcgttggcctgctcct

SEQ ID NO: 3704838 - DNA, 25 bp, Homo sapien
agccagccgcagccccccgtgttgt

SEQ ID NO: 3704839 - DNA, 25 bp, Homo sapien
ggagtggagtgatgccgcctccgcc

SEQ ID NO: 3704840 - DNA, 25 bp, Homo sapien
tgaagccagccgcagccccccgtgt

SEQ ID NO: 3704841 - DNA, 25 bp, Homo sapien
gagtggagtgatgccgcctccgccc

SEQ ID NO: 3704842 - DNA, 25 bp, Homo sapien
ttccaggggcaccaagtaccctgga

SEQ ID NO: 3704843 - DNA, 25 bp, Homo sapien
agcttcacccctcaagctggtcccc

SEQ ID NO: 3704844 - DNA, 25 bp, Homo sapien
gggcaccaagtaccctggagcccag

SEQ ID NO: 3704845 - DNA, 25 bp, Homo sapien
ggctctgatgatgccgaggccttcc

SEQ ID NO: 3704846 - DNA, 25 bp, Homo sapien
gaggcccctcgtggccttgttgtac

SEQ ID NO: 3704847 - DNA, 25 bp, Homo sapien
cctcctgttggggggcagatggcct

SEQ ID NO: 3704848 - DNA, 25 bp, Homo sapien
gttggggggcagatggcctcaagtc

SEQ ID NO: 3704849 - DNA, 25 bp, Homo sapien
cctgttggggggcagatggcctcaa

SEQ ID NO: 3704850 - DNA, 25 bp, Homo sapien
tgttggggggcagatggcctcaagt

SEQ ID NO: 3704851 - DNA, 25 bp, Homo sapien
ctcctctgccacttcctctttctct

SEQ ID NO: 3704852 - DNA, 25 bp, Homo sapien
tcctctgccacttcctctttctctt

SEQ ID NO: 3704853 - DNA, 25 bp, Homo sapien
acttcctctttctctttggatgcct

SEQ ID NO: 3704854 - DNA, 25 bp, Homo sapien
tcctctttctctttggatgcctcac

SEQ ID NO: 3704855 - DNA, 25 bp, Homo sapien
tgggagagagaatgacctgcacacc

SEQ ID NO: 3704856 - DNA, 25 bp, Homo sapien
ccttaatgggccaccctgagtgggc

SEQ ID NO: 3704857 - DNA, 25 bp, Homo sapien
gagtgggctgagaaaagttgtcttc

SEQ ID NO: 3704858 - DNA, 25 bp, Homo sapien
gacctcccactcaggttcagggtta

SEQ ID NO: 3704859 - DNA, 25 bp, Homo sapien
ggagcgctcttcaggtcatccacgc

SEQ ID NO: 3704860 - DNA, 25 bp, Homo sapien
tcttcaggtcatccacgctggcctg

SEQ ID NO: 3704861 - DNA, 25 bp, Homo sapien
aggtcatccacgctggcctgtagcc

SEQ ID NO: 3704862 - DNA, 25 bp, Homo sapien
tcactcaaggcgggcactccttgtg

SEQ ID NO: 3704863 - DNA, 25 bp, Homo sapien
ggtcagaaggaccagagggtgggtg

SEQ ID NO: 3704864 - DNA, 25 bp, Homo sapien
gcagtgaggttggtgcagcagcaca

SEQ ID NO: 3704865 - DNA, 25 bp, Homo sapien
gccaagggtggccagggagacgagg

SEQ ID NO: 3704866 - DNA, 25 bp, Homo sapien
agcagcacaggtggacaggccaagg

SEQ ID NO: 3704867 - DNA, 25 bp, Homo sapien
tcgagtgttccagtttatcacaggc

SEQ ID NO: 3704868 - DNA, 25 bp, Homo sapien
cggtagtgcccaatagccaggcagg

SEQ ID NO: 3704869 - DNA, 25 bp, Homo sapien
tatcacaggctggtggtgccactgg

SEQ ID NO: 3704870 - DNA, 25 bp, Homo sapien
gcaatgagctgtgagctggacagga

SEQ ID NO: 3704871 - DNA, 25 bp, Homo sapien
caaaacagcttgcaagatacattcc

SEQ ID NO: 3704872 - DNA, 25 bp, Homo sapien
caggcaaggcgctagagagtatgac

SEQ ID NO: 3704873 - DNA, 25 bp, Homo sapien
gcgctagagagtatgacttgtggct

SEQ ID NO: 3704874 - DNA, 25 bp, Homo sapien
gatcatccttgggtgcagcaaaaca

SEQ ID NO: 3704875 - DNA, 25 bp, Homo sapien
gcaggagaagggcgcacaccacctc

SEQ ID NO: 3704876 - DNA, 25 bp, Homo sapien
caggagaagggcgcacaccacctcc

SEQ ID NO: 3704877 - DNA, 25 bp, Homo sapien
ggcaggagaagggcgcacaccacct

SEQ ID NO: 3704878 - DNA, 25 bp, Homo sapien
gcacatcctggcctaagacgggccg

SEQ ID NO: 3704879 - DNA, 25 bp, Homo sapien
tatctgtggagtcgtcaagagcagc

SEQ ID NO: 3704880 - DNA, 25 bp, Homo sapien
cagctggagcgacgttggatcctgc

SEQ ID NO: 3704881 - DNA, 25 bp, Homo sapien
caagcgccagctccggtttttaagg

SEQ ID NO: 3704882 - DNA, 25 bp, Homo sapien
tcaggtcctgcaagcccttgcttgc

SEQ ID NO: 3704883 - DNA, 25 bp, Homo sapien
gtcccctccacctgttgcttcaggt

SEQ ID NO: 3704884 - DNA, 25 bp, Homo sapien
cttcctgggcggtcccctccacctg

SEQ ID NO: 3704885 - DNA, 25 bp, Homo sapien
gcttcaggtcctgcaagcccttgct

SEQ ID NO: 3704886 - DNA, 25 bp, Homo sapien
gccggactatctcctctggaccaga

SEQ ID NO: 3704887 - DNA, 25 bp, Homo sapien
ggtggctcccgcctacagagctgta

SEQ ID NO: 3704888 - DNA, 25 bp, Homo sapien
tttcggcctgctgggaatggagtca

SEQ ID NO: 3704889 - DNA, 25 bp, Homo sapien
tggtgatggcgcagaagacccttgc

SEQ ID NO: 3704890 - DNA, 25 bp, Homo sapien
gtccaccacttgctgagctgccgct

SEQ ID NO: 3704891 - DNA, 25 bp, Homo sapien
tccaccacttgctgagctgccgctc

SEQ ID NO: 3704892 - DNA, 25 bp, Homo sapien
ggtccaccacttgctgagctgccgc

SEQ ID NO: 3704893 - DNA, 25 bp, Homo sapien
tggtccaccacttgctgagctgccg

SEQ ID NO: 3704894 - DNA, 25 bp, Homo sapien
gtgtgctggggttgcccgcctccct

SEQ ID NO: 3704895 - DNA, 25 bp, Homo sapien
ggcattgtggacagagggctctgca

SEQ ID NO: 3704896 - DNA, 25 bp, Homo sapien
tgtaggcttagcctggcctgggtct

SEQ ID NO: 3704897 - DNA, 25 bp, Homo sapien
aaccacagtgcctgtaggcttagcc

SEQ ID NO: 3704898 - DNA, 25 bp, Homo sapien
ctggttagcagtcttgtcgatggtt

SEQ ID NO: 3704899 - DNA, 25 bp, Homo sapien
tgtcgatggtttcctgggtggtctt

SEQ ID NO: 3704900 - DNA, 25 bp, Homo sapien
cagtcttgtcgatggtttcctgggt

SEQ ID NO: 3704901 - DNA, 25 bp, Homo sapien
gttagcagtcttgtcgatggtttcc

SEQ ID NO: 3704902 - DNA, 25 bp, Homo sapien
gggccaggctgtgctagatggcgcc

SEQ ID NO: 3704903 - DNA, 25 bp, Homo sapien
tttcaggaggccgacccaagtctcc

SEQ ID NO: 3704904 - DNA, 25 bp, Homo sapien
ggtggctgcccggagatcagggcca

SEQ ID NO: 3704905 - DNA, 25 bp, Homo sapien
gctgtgctagatggcgcctggaagg

SEQ ID NO: 3704906 - DNA, 25 bp, Homo sapien
tccgaatttgggaggctaggactcc

SEQ ID NO: 3704907 - DNA, 25 bp, Homo sapien
cgcgtggcgggatggaaaacattcc

SEQ ID NO: 3704908 - DNA, 25 bp, Homo sapien
ctaggactccggctacggtggctct

SEQ ID NO: 3704909 - DNA, 25 bp, Homo sapien
gagaccgttggattggatttccgaa

SEQ ID NO: 3704910 - DNA, 25 bp, Homo sapien
aggggctggctctaaagtcgggcgg

SEQ ID NO: 3704911 - DNA, 25 bp, Homo sapien
caggggctggctctaaagtcgggcg

SEQ ID NO: 3704912 - DNA, 25 bp, Homo sapien
ggctggctctaaagtcgggcgggag

SEQ ID NO: 3704913 - DNA, 25 bp, Homo sapien
tggctctaaagtcgggcgggagagg

SEQ ID NO: 3704914 - DNA, 25 bp, Homo sapien
cagcctccagtcgcagctggcggag

SEQ ID NO: 3704915 - DNA, 25 bp, Homo sapien
ctccggccgcctgaagtcctgaggg

SEQ ID NO: 3704916 - DNA, 25 bp, Homo sapien
gagctgagccttccgaggatctgag

SEQ ID NO: 3704917 - DNA, 25 bp, Homo sapien
gctggcggagagaagttcccgaggc

SEQ ID NO: 3704918 - DNA, 25 bp, Homo sapien
gtccatccggaacccactagacaaa

SEQ ID NO: 3704919 - DNA, 25 bp, Homo sapien
agggaggggtctcccgcacgcgagc

SEQ ID NO: 3704920 - DNA, 25 bp, Homo sapien
ctgggaacaccagtccatccggaac

SEQ ID NO: 3704921 - DNA, 25 bp, Homo sapien
gggccacacgcgtggacacgtgccg

SEQ ID NO: 3704922 - DNA, 25 bp, Homo sapien
ggtaaagacatggagcgggtggacg

SEQ ID NO: 3704923 - DNA, 25 bp, Homo sapien
ctttcaacagaaacgcagaggccac

SEQ ID NO: 3704924 - DNA, 25 bp, Homo sapien
gaggccactggcgcgcaggaggagg

SEQ ID NO: 3704925 - DNA, 25 bp, Homo sapien
catggagcgggtggacgggaaccgc

SEQ ID NO: 3704926 - DNA, 25 bp, Homo sapien
cccgcgagggagatctcagactgga

SEQ ID NO: 3704927 - DNA, 25 bp, Homo sapien
taaccgatagtggaaccagggcagc

SEQ ID NO: 3704928 - DNA, 25 bp, Homo sapien
taagggtggtagacacgtgccccgc

SEQ ID NO: 3704929 - DNA, 25 bp, Homo sapien
cctaggcagacctgtactgcagcat

SEQ ID NO: 3704930 - DNA, 25 bp, Homo sapien
aatgccgcaggtgtgaagataccga

SEQ ID NO: 3704931 - DNA, 25 bp, Homo sapien
taaggcgatcactcacaaggagaac

SEQ ID NO: 3704932 - DNA, 25 bp, Homo sapien
actgctccgggtgtctcttcaagga

SEQ ID NO: 3704933 - DNA, 25 bp, Homo sapien
tgagacctgacgtttggaagagcaa

SEQ ID NO: 3704934 - DNA, 25 bp, Homo sapien
gcacacatgaaggctcattgtgact

SEQ ID NO: 3704935 - DNA, 25 bp, Homo sapien
agcacacatgaaggctcattgtgac

SEQ ID NO: 3704936 - DNA, 25 bp, Homo sapien
gggactggttacagccccatgaacc

SEQ ID NO: 3704937 - DNA, 25 bp, Homo sapien
caatcatttagccagtgctgcctga

SEQ ID NO: 3704938 - DNA, 25 bp, Homo sapien
ctccatgcaatcatttagccagtgc

SEQ ID NO: 3704939 - DNA, 25 bp, Homo sapien
acaaaaggatggtcctccatgcaat

SEQ ID NO: 3704940 - DNA, 25 bp, Homo sapien
ctgcattgcagagatggttccatgg

SEQ ID NO: 3704941 - DNA, 25 bp, Homo sapien
tgcattgcagagatggttccatggt

SEQ ID NO: 3704942 - DNA, 25 bp, Homo sapien
cattgcagagatggttccatggtaa

SEQ ID NO: 3704943 - DNA, 25 bp, Homo sapien
ttgcagagatggttccatggtaaac

SEQ ID NO: 3704944 - DNA, 25 bp, Homo sapien
tccagggctcctagtgtcgggggag

SEQ ID NO: 3704945 - DNA, 25 bp, Homo sapien
ggaacaggcaattgcacagcgccac

SEQ ID NO: 3704946 - DNA, 25 bp, Homo sapien
cacaggaacaggcaattgcacagcg

SEQ ID NO: 3704947 - DNA, 25 bp, Homo sapien
aggcaattgcacagcgccaccggag

SEQ ID NO: 3704948 - DNA, 25 bp, Homo sapien
aaggaacgccatccagagaaaatgg

SEQ ID NO: 3704949 - DNA, 25 bp, Homo sapien
gaatgcaactctacgtgttttcaca

SEQ ID NO: 3704950 - DNA, 25 bp, Homo sapien
tacaaagaagctcatcctacggact

SEQ ID NO: 3704951 - DNA, 25 bp, Homo sapien
gaactccagcggtagacgtttggga

SEQ ID NO: 3704952 - DNA, 25 bp, Homo sapien
agagcagcagactgttcccctccct

SEQ ID NO: 3704953 - DNA, 25 bp, Homo sapien
ctcatggactggcttagactgtggc

SEQ ID NO: 3704954 - DNA, 25 bp, Homo sapien
ggagtgtggattggggggccactgg

SEQ ID NO: 3704955 - DNA, 25 bp, Homo sapien
gtgatttggctcctctgactactcc

SEQ ID NO: 3704956 - DNA, 25 bp, Homo sapien
actctcagaccaggagtgtggattg

SEQ ID NO: 3704957 - DNA, 25 bp, Homo sapien
tgttgattggggtgatttggctcct

SEQ ID NO: 3704958 - DNA, 25 bp, Homo sapien
ccatggctttctaaagaggggtcaa

SEQ ID NO: 3704959 - DNA, 25 bp, Homo sapien
agggatcccagagaattggtctagg

SEQ ID NO: 3704960 - DNA, 25 bp, Homo sapien
gggtcaagacttgctggatgccaga

SEQ ID NO: 3704961 - DNA, 25 bp, Homo sapien
attggtctagggaggcagtgcttta

SEQ ID NO: 3704962 - DNA, 25 bp, Homo sapien
ttgagcaatgctatacttcttgtag

SEQ ID NO: 3704963 - DNA, 25 bp, Homo sapien
tgagcaatgctatacttcttgtagt

SEQ ID NO: 3704964 - DNA, 25 bp, Homo sapien
tgaggatgaattccttgtcaattcc

SEQ ID NO: 3704965 - DNA, 25 bp, Homo sapien
tgaattccttgtcaattccgggaag

SEQ ID NO: 3704966 - DNA, 25 bp, Homo sapien
attccttgtcaattccgggaagtga

SEQ ID NO: 3704967 - DNA, 25 bp, Homo sapien
ggatgaattccttgtcaattccggg

SEQ ID NO: 3704968 - DNA, 25 bp, Homo sapien
ttggtccttagtctccacagtggct

SEQ ID NO: 3704969 - DNA, 25 bp, Homo sapien
cttctgtaaaatttctttctgtgtt

SEQ ID NO: 3704970 - DNA, 25 bp, Homo sapien
ttttggtccttagtctccacagtgg

SEQ ID NO: 3704971 - DNA, 25 bp, Homo sapien
ttcttttggtccttagtctccacag

SEQ ID NO: 3704972 - DNA, 25 bp, Homo sapien
cttttcagctttgggcccactgttt

SEQ ID NO: 3704973 - DNA, 25 bp, Homo sapien
cctagctggagatcctgcagatgct

SEQ ID NO: 3704974 - DNA, 25 bp, Homo sapien
cccctagctggagatcctgcagatg

SEQ ID NO: 3704975 - DNA, 25 bp, Homo sapien
tttcttttcagctttgggcccactg

SEQ ID NO: 3704976 - DNA, 25 bp, Homo sapien
aattgcaaaagctttgggatttctc

SEQ ID NO: 3704977 - DNA, 25 bp, Homo sapien
gactgaattgcaaaagctttgggat

SEQ ID NO: 3704978 - DNA, 25 bp, Homo sapien
ctgaattgcaaaagctttgggattt

SEQ ID NO: 3704979 - DNA, 25 bp, Homo sapien
ttgggatttctcttccagacatctt

SEQ ID NO: 3704980 - DNA, 25 bp, Homo sapien
tgtgaaaggatcaagccatccccac

SEQ ID NO: 3704981 - DNA, 25 bp, Homo sapien
ctgtgaaaggatcaagccatcccca

SEQ ID NO: 3704982 - DNA, 25 bp, Homo sapien
gtggagtctgatcaaccactggaat

SEQ ID NO: 3704983 - DNA, 25 bp, Homo sapien
ttggtggcggctctagtggagtctg

SEQ ID NO: 3704984 - DNA, 25 bp, Homo sapien
cggctctagtggagtctgatcaacc

SEQ ID NO: 3704985 - DNA, 25 bp, Homo sapien
tctagtggagtctgatcaaccactg

SEQ ID NO: 3704986 - DNA, 25 bp, Homo sapien
gaggcattatatcaaagtgctcttt

SEQ ID NO: 3704987 - DNA, 25 bp, Homo sapien
ctgggtgaagttcccaatgaggcat

SEQ ID NO: 3704988 - DNA, 25 bp, Homo sapien
ctgctgggtgaagttcccaatgagg

SEQ ID NO: 3704989 - DNA, 25 bp, Homo sapien
gcattatatcaaagtgctctttcca

SEQ ID NO: 3704990 - DNA, 25 bp, Homo sapien
cagggcctctgatctcggtcaactt

SEQ ID NO: 3704991 - DNA, 25 bp, Homo sapien
cacagggcctctgatctcggtcaac

SEQ ID NO: 3704992 - DNA, 25 bp, Homo sapien
acagggcctctgatctcggtcaact

SEQ ID NO: 3704993 - DNA, 25 bp, Homo sapien
tcatcatgttaatgtcacacccaca

SEQ ID NO: 3704994 - DNA, 25 bp, Homo sapien
gatcaatcatcatgttaatgtcaca

SEQ ID NO: 3704995 - DNA, 25 bp, Homo sapien
catgttaatgtcacacccacattca

SEQ ID NO: 3704996 - DNA, 25 bp, Homo sapien
gccagatcaatcatcatgttaatgt

SEQ ID NO: 3704997 - DNA, 25 bp, Homo sapien
atatcaagagtttatgtaagctaag

SEQ ID NO: 3704998 - DNA, 25 bp, Homo sapien
gagaggcctaaacttcataactgta

SEQ ID NO: 3704999 - DNA, 25 bp, Homo sapien
gaggcctaaacttcataactgtaat

SEQ ID NO: 3705000 - DNA, 25 bp, Homo sapien
tgagaggcctaaacttcataactgt

SEQ ID NO: 3705001 - DNA, 25 bp, Homo sapien
agaggcctaaacttcataactgtaa

SEQ ID NO: 3705002 - DNA, 25 bp, Homo sapien
gacattcattccgtaagacaccaga

SEQ ID NO: 3705003 - DNA, 25 bp, Homo sapien
agtgacattcattccgtaagacacc

SEQ ID NO: 3705004 - DNA, 25 bp, Homo sapien
attcattccgtaagacaccagacag

SEQ ID NO: 3705005 - DNA, 25 bp, Homo sapien
cattcattccgtaagacaccagaca

SEQ ID NO: 3705006 - DNA, 25 bp, Homo sapien
gtcacattttgttcagatatcctct

SEQ ID NO: 3705007 - DNA, 25 bp, Homo sapien
cctgccagtcacattttgttcagat

SEQ ID NO: 3705008 - DNA, 25 bp, Homo sapien
attttgttcagatatcctctgggtt

SEQ ID NO: 3705009 - DNA, 25 bp, Homo sapien
tgacacctgccagtcacattttgtt

SEQ ID NO: 3705010 - DNA, 25 bp, Homo sapien
aaaaaacgatgcacagtccaagggc

SEQ ID NO: 3705011 - DNA, 25 bp, Homo sapien
taatgggaaaagtcagcttcgccgg

SEQ ID NO: 3705012 - DNA, 25 bp, Homo sapien
tatagaaaacccattggaggctctc

SEQ ID NO: 3705013 - DNA, 25 bp, Homo sapien
ggaacagtgctcctctagctataag

SEQ ID NO: 3705014 - DNA, 25 bp, Homo sapien
gaagtgtaagtcaaacttatcaaag

SEQ ID NO: 3705015 - DNA, 25 bp, Homo sapien
ggaagtgtaagtcaaacttatcaaa

SEQ ID NO: 3705016 - DNA, 25 bp, Homo sapien
ccatcaaggaatattgtcgaacacg

SEQ ID NO: 3705017 - DNA, 25 bp, Homo sapien
tattattgtcattataagataatgc

SEQ ID NO: 3705018 - DNA, 25 bp, Homo sapien
cattataagataatgctggctggct

SEQ ID NO: 3705019 - DNA, 25 bp, Homo sapien
cacgagctgtattgttgactgaaac

SEQ ID NO: 3705020 - DNA, 25 bp, Homo sapien
aaataggagcagtttctcgtcctaa

SEQ ID NO: 3705021 - DNA, 25 bp, Homo sapien
caaggtcccaccaaataggagcagt

SEQ ID NO: 3705022 - DNA, 25 bp, Homo sapien
cccaaggtcccaccaaataggagca

SEQ ID NO: 3705023 - DNA, 25 bp, Homo sapien
ttctcgtcctaaactcaaattaagc

SEQ ID NO: 3705024 - DNA, 25 bp, Homo sapien
tttccgtgatatgatgatgtatctc

SEQ ID NO: 3705025 - DNA, 25 bp, Homo sapien
ctttccgtgatatgatgatgtatct

SEQ ID NO: 3705026 - DNA, 25 bp, Homo sapien
agtatggtcaaagatctatctgcat

SEQ ID NO: 3705027 - DNA, 25 bp, Homo sapien
tataactgttcatcaagtatggtca

SEQ ID NO: 3705028 - DNA, 25 bp, Homo sapien
gagtataactgttcatcaagtatgg

SEQ ID NO: 3705029 - DNA, 25 bp, Homo sapien
cgcaaatgagtataactgttcatca

SEQ ID NO: 3705030 - DNA, 25 bp, Homo sapien
ttttcttcgtaatgtgcacggtgga

SEQ ID NO: 3705031 - DNA, 25 bp, Homo sapien
tcttcgtaatgtgcacggtggaaaa

SEQ ID NO: 3705032 - DNA, 25 bp, Homo sapien
tcttttcttcgtaatgtgcacggtg

SEQ ID NO: 3705033 - DNA, 25 bp, Homo sapien
catttcttttcttcgtaatgtgcac

SEQ ID NO: 3705034 - DNA, 25 bp, Homo sapien
cagtgacggacacaatcataaactt

SEQ ID NO: 3705035 - DNA, 25 bp, Homo sapien
agcccgatgtctgaattggctgaca

SEQ ID NO: 3705036 - DNA, 25 bp, Homo sapien
ccatcatcttttaagttgttggtgc

SEQ ID NO: 3705037 - DNA, 25 bp, Homo sapien
cactgaaataaaggtcctcctggct

SEQ ID NO: 3705038 - DNA, 25 bp, Homo sapien
gttcccacgcatgttttggatcgac

SEQ ID NO: 3705039 - DNA, 25 bp, Homo sapien
tcccacgcatgttttggatcgactg

SEQ ID NO: 3705040 - DNA, 25 bp, Homo sapien
ttcccacgcatgttttggatcgact

SEQ ID NO: 3705041 - DNA, 25 bp, Homo sapien
cccacgcatgttttggatcgactgc

SEQ ID NO: 3705042 - DNA, 25 bp, Homo sapien
ggcccacttaggattctgggtctca

SEQ ID NO: 3705043 - DNA, 25 bp, Homo sapien
gcccacttaggattctgggtctcac

SEQ ID NO: 3705044 - DNA, 25 bp, Homo sapien
tggcccacttaggattctgggtctc

SEQ ID NO: 3705045 - DNA, 25 bp, Homo sapien
ctggcccacttaggattctgggtct

SEQ ID NO: 3705046 - DNA, 25 bp, Homo sapien
agctccagagatcgcacacgggaaa

SEQ ID NO: 3705047 - DNA, 25 bp, Homo sapien
ctccagagatcgcacacgggaaagg

SEQ ID NO: 3705048 - DNA, 25 bp, Homo sapien
cagctccagagatcgcacacgggaa

SEQ ID NO: 3705049 - DNA, 25 bp, Homo sapien
ccagctccagagatcgcacacggga

SEQ ID NO: 3705050 - DNA, 25 bp, Homo sapien
ctcgttgactctattgagggtttcg

SEQ ID NO: 3705051 - DNA, 25 bp, Homo sapien
cctcgttgactctattgagggtttc

SEQ ID NO: 3705052 - DNA, 25 bp, Homo sapien
tgactctattgagggtttcgtctgc

SEQ ID NO: 3705053 - DNA, 25 bp, Homo sapien
cgttgactctattgagggtttcgtc

SEQ ID NO: 3705054 - DNA, 25 bp, Homo sapien
tcagtgcagggtagtggggccagaa

SEQ ID NO: 3705055 - DNA, 25 bp, Homo sapien
cagtgcagggtagtggggccagaaa

SEQ ID NO: 3705056 - DNA, 25 bp, Homo sapien
tgagactaacacacccacctcggca

SEQ ID NO: 3705057 - DNA, 25 bp, Homo sapien
ggcctgagactaacacacccacctc

SEQ ID NO: 3705058 - DNA, 25 bp, Homo sapien
cacccacctcggcaaaaggacataa

SEQ ID NO: 3705059 - DNA, 25 bp, Homo sapien
taacacacccacctcggcaaaagga

SEQ ID NO: 3705060 - DNA, 25 bp, Homo sapien
gctgccggctctgctctttcaaagc

SEQ ID NO: 3705061 - DNA, 25 bp, Homo sapien
aaagccacaatgagtgtagcccgtc

SEQ ID NO: 3705062 - DNA, 25 bp, Homo sapien
catgctctagtcctgtatatccaaa

SEQ ID NO: 3705063 - DNA, 25 bp, Homo sapien
aggcacctcggtctggcatttggaa

SEQ ID NO: 3705064 - DNA, 25 bp, Homo sapien
taggcgtttatgaacagaagccaag

SEQ ID NO: 3705065 - DNA, 25 bp, Homo sapien
gggaagggtaatgcgggcttcggca

SEQ ID NO: 3705066 - DNA, 25 bp, Homo sapien
gcttcggcagggatgtgtatggcca

SEQ ID NO: 3705067 - DNA, 25 bp, Homo sapien
gacaccaagataagatggtggatcc

SEQ ID NO: 3705068 - DNA, 25 bp, Homo sapien
tggggcgttcagggtggtgccttgc

SEQ ID NO: 3705069 - DNA, 25 bp, Homo sapien
cagggtggggcgttcagggtggtgc

SEQ ID NO: 3705070 - DNA, 25 bp, Homo sapien
ctatgggacagggtggggcgttcag

SEQ ID NO: 3705071 - DNA, 25 bp, Homo sapien
atgggacagggtggggcgttcaggg

SEQ ID NO: 3705072 - DNA, 25 bp, Homo sapien
ggctctgcagagcagtttgtggcct

SEQ ID NO: 3705073 - DNA, 25 bp, Homo sapien
ccctggctctgcagagcagtttgtg

SEQ ID NO: 3705074 - DNA, 25 bp, Homo sapien
ctggctctgcagagcagtttgtggc

SEQ ID NO: 3705075 - DNA, 25 bp, Homo sapien
tcctggagaccctggctctgcagag

SEQ ID NO: 3705076 - DNA, 25 bp, Homo sapien
ccagtgtggcctagtaagaggttta

SEQ ID NO: 3705077 - DNA, 25 bp, Homo sapien
tcatgaacacaagtggagtgagggt

SEQ ID NO: 3705078 - DNA, 25 bp, Homo sapien
ccccagtgtggcctagtaagaggtt

SEQ ID NO: 3705079 - DNA, 25 bp, Homo sapien
gacctgggcagtcctttgggtcatg

SEQ ID NO: 3705080 - DNA, 25 bp, Homo sapien
atgctgaggactggcccaacatgct

SEQ ID NO: 3705081 - DNA, 25 bp, Homo sapien
ggatgctgaggactggcccaacatg

SEQ ID NO: 3705082 - DNA, 25 bp, Homo sapien
agacagtggtgaactaggatgctga

SEQ ID NO: 3705083 - DNA, 25 bp, Homo sapien
gcagcagacagtggtgaactaggat

SEQ ID NO: 3705084 - DNA, 25 bp, Homo sapien
gtggccttctcggtgcggtgggcca

SEQ ID NO: 3705085 - DNA, 25 bp, Homo sapien
cggtggccttctcggtgcggtgggc

SEQ ID NO: 3705086 - DNA, 25 bp, Homo sapien
ctcggtggccttctcggtgcggtgg

SEQ ID NO: 3705087 - DNA, 25 bp, Homo sapien
ggccttctcggtgcggtgggccagg

SEQ ID NO: 3705088 - DNA, 25 bp, Homo sapien
acttagatccgcctcccacagaccc

SEQ ID NO: 3705089 - DNA, 25 bp, Homo sapien
cccagtctgccccagatccccccag

SEQ ID NO: 3705090 - DNA, 25 bp, Homo sapien
tgcctacttagatccgcctcccaca

SEQ ID NO: 3705091 - DNA, 25 bp, Homo sapien
ctacttagatccgcctcccacagac

SEQ ID NO: 3705092 - DNA, 25 bp, Homo sapien
tccttcggagacgccagggccttgg

SEQ ID NO: 3705093 - DNA, 25 bp, Homo sapien
cttccttcggagacgccagggcctt

SEQ ID NO: 3705094 - DNA, 25 bp, Homo sapien
gcttccttcggagacgccagggcct

SEQ ID NO: 3705095 - DNA, 25 bp, Homo sapien
ttccttcggagacgccagggccttg

SEQ ID NO: 3705096 - DNA, 25 bp, Homo sapien
gtctccttggcgtgtcccaccacct

SEQ ID NO: 3705097 - DNA, 25 bp, Homo sapien
ttctctccagtctccttggcgtgtc

SEQ ID NO: 3705098 - DNA, 25 bp, Homo sapien
ctccagtctccttggcgtgtcccac

SEQ ID NO: 3705099 - DNA, 25 bp, Homo sapien
ttcaccacttcttccacggcatgaa

SEQ ID NO: 3705100 - DNA, 25 bp, Homo sapien
tagcacccacataaaagagaccaca

SEQ ID NO: 3705101 - DNA, 25 bp, Homo sapien
gcctttgggaggttgaaattagcac

SEQ ID NO: 3705102 - DNA, 25 bp, Homo sapien
tgtcatggttctaaagattctcccc

SEQ ID NO: 3705103 - DNA, 25 bp, Homo sapien
ggcccatccacgaaccagaaagact

SEQ ID NO: 3705104 - DNA, 25 bp, Homo sapien
atggcatttgtgactgtgttggtca

SEQ ID NO: 3705105 - DNA, 25 bp, Homo sapien
gatggcatttgtgactgtgttggtc

SEQ ID NO: 3705106 - DNA, 25 bp, Homo sapien
tgatggcatttgtgactgtgttggt

SEQ ID NO: 3705107 - DNA, 25 bp, Homo sapien
gtgatggcatttgtgactgtgttgg

SEQ ID NO: 3705108 - DNA, 25 bp, Homo sapien
cacatgtcatggctttttattgaga

SEQ ID NO: 3705109 - DNA, 25 bp, Homo sapien
attgagactggggaagggccgtggt

SEQ ID NO: 3705110 - DNA, 25 bp, Homo sapien
agactggggaagggccgtggtagca

SEQ ID NO: 3705111 - DNA, 25 bp, Homo sapien
ggaagggccgtggtagcaggtgcac

SEQ ID NO: 3705112 - DNA, 25 bp, Homo sapien
ttgaaagtcatcaggaaccaaacca

SEQ ID NO: 3705113 - DNA, 25 bp, Homo sapien
gaaccaaaccaggatacaaggtcca

SEQ ID NO: 3705114 - DNA, 25 bp, Homo sapien
tttgaaagtcatcaggaaccaaacc

SEQ ID NO: 3705115 - DNA, 25 bp, Homo sapien
gatccacttgctcgtcctggagctg

SEQ ID NO: 3705116 - DNA, 25 bp, Homo sapien
ggatccacttgctcgtcctggagct

SEQ ID NO: 3705117 - DNA, 25 bp, Homo sapien
ccgggatccacttgctcgtcctgga

SEQ ID NO: 3705118 - DNA, 25 bp, Homo sapien
cgggatccacttgctcgtcctggag

SEQ ID NO: 3705119 - DNA, 25 bp, Homo sapien
tcatattgctttgtggtgttcctgg

SEQ ID NO: 3705120 - DNA, 25 bp, Homo sapien
catattgctttgtggtgttcctgga

SEQ ID NO: 3705121 - DNA, 25 bp, Homo sapien
atattgctttgtggtgttcctggag

SEQ ID NO: 3705122 - DNA, 25 bp, Homo sapien
tggcaggtggcacagcccccttata

SEQ ID NO: 3705123 - DNA, 25 bp, Homo sapien
tggcacagcccccttatacagcatg

SEQ ID NO: 3705124 - DNA, 25 bp, Homo sapien
caggtggcacagcccccttatacag

SEQ ID NO: 3705125 - DNA, 25 bp, Homo sapien
tccactgtcagaccggtgatggcca

SEQ ID NO: 3705126 - DNA, 25 bp, Homo sapien
catcgtatgttggtaagagagtcaa

SEQ ID NO: 3705127 - DNA, 25 bp, Homo sapien
aatctgaccaatggaaagatcggca

SEQ ID NO: 3705128 - DNA, 25 bp, Homo sapien
ggcctgagtccaaccataagtaagt

SEQ ID NO: 3705129 - DNA, 25 bp, Homo sapien
gccaccatgccggtcaattaacttt

SEQ ID NO: 3705130 - DNA, 25 bp, Homo sapien
tgttcggtgctttacacgttcagag

SEQ ID NO: 3705131 - DNA, 25 bp, Homo sapien
gttcggtgctttacacgttcagaga

SEQ ID NO: 3705132 - DNA, 25 bp, Homo sapien
cccgagtaacgaactatagaaatga

SEQ ID NO: 3705133 - DNA, 25 bp, Homo sapien
ttcagagaaacttcccgagtaacga

SEQ ID NO: 3705134 - DNA, 25 bp, Homo sapien
gaacagtagtgtccccatgaagtgc

SEQ ID NO: 3705135 - DNA, 25 bp, Homo sapien
caagtcagcccgttaaggagaaaga

SEQ ID NO: 3705136 - DNA, 25 bp, Homo sapien
gattggacctgagaacagctgccta

SEQ ID NO: 3705137 - DNA, 25 bp, Homo sapien
ttcatacctgcaaaatggtggaggc

SEQ ID NO: 3705138 - DNA, 25 bp, Homo sapien
actgtctagcttagccagccgtgga

SEQ ID NO: 3705139 - DNA, 25 bp, Homo sapien
gttgaccaaagacccagttgatccc

SEQ ID NO: 3705140 - DNA, 25 bp, Homo sapien
taataaacgtcatgggtggtgtgtc

SEQ ID NO: 3705141 - DNA, 25 bp, Homo sapien
tgagctgagtgcacagattactttg

SEQ ID NO: 3705142 - DNA, 25 bp, Homo sapien
aatttctagcctgagagactggtag

SEQ ID NO: 3705143 - DNA, 25 bp, Homo sapien
tattcccaacaggtaggatttacag

SEQ ID NO: 3705144 - DNA, 25 bp, Homo sapien
taatgatgaatctagcagggcacag

SEQ ID NO: 3705145 - DNA, 25 bp, Homo sapien
gagagaagaggcaaagataaccaca

SEQ ID NO: 3705146 - DNA, 25 bp, Homo sapien
gaggacgaccccaacttcttcaaga

SEQ ID NO: 3705147 - DNA, 25 bp, Homo sapien
gagggcttcttcgatcgcggcgcca

SEQ ID NO: 3705148 - DNA, 25 bp, Homo sapien
tgtaccgctacctgggcgaagcgct

SEQ ID NO: 3705149 - DNA, 25 bp, Homo sapien
cgaagcgctgttgctgtcccgggcc

SEQ ID NO: 3705150 - DNA, 25 bp, Homo sapien
tgcggcctccgggcaaatccggccg

SEQ ID NO: 3705151 - DNA, 25 bp, Homo sapien
gcggcctccgggcaaatccggccgc

SEQ ID NO: 3705152 - DNA, 25 bp, Homo sapien
gtgcggcctccgggcaaatccggcc

SEQ ID NO: 3705153 - DNA, 25 bp, Homo sapien
ggattcaggtcagagtacatttttc

SEQ ID NO: 3705154 - DNA, 25 bp, Homo sapien
cttaatcttttgaccatcaaggaaa

SEQ ID NO: 3705155 - DNA, 25 bp, Homo sapien
aggattcaggtcagagtacattttt

SEQ ID NO: 3705156 - DNA, 25 bp, Homo sapien
ctggtaaggaacttacatctagaac

SEQ ID NO: 3705157 - DNA, 25 bp, Homo sapien
ctgctggtaagaattaaaatggtgt

SEQ ID NO: 3705158 - DNA, 25 bp, Homo sapien
ggaactgcaaataaatacttcatac

SEQ ID NO: 3705159 - DNA, 25 bp, Homo sapien
aatcttcatgaagtccaattagaca

SEQ ID NO: 3705160 - DNA, 25 bp, Homo sapien
ggcggatcacaaggtcaggagttca

SEQ ID NO: 3705161 - DNA, 25 bp, Homo sapien
aatcccaacactgggaggcggaggc

SEQ ID NO: 3705162 - DNA, 25 bp, Homo sapien
agagcagcctggccaacatggtgaa

SEQ ID NO: 3705163 - DNA, 25 bp, Homo sapien
acctcatctctactgaaagtacaaa

SEQ ID NO: 3705164 - DNA, 25 bp, Homo sapien
taataccgggatatgcacaggagga

SEQ ID NO: 3705165 - DNA, 25 bp, Homo sapien
gctactcgagggtcaaggcatccta

SEQ ID NO: 3705166 - DNA, 25 bp, Homo sapien
tgcaacacctctagaatggtcaagg

SEQ ID NO: 3705167 - DNA, 25 bp, Homo sapien
tatggctacatgtgacctctggaac

SEQ ID NO: 3705168 - DNA, 25 bp, Homo sapien
ttttcgatggccctccaagaatgca

SEQ ID NO: 3705169 - DNA, 25 bp, Homo sapien
ggcactttgaatatccaccccatgt

SEQ ID NO: 3705170 - DNA, 25 bp, Homo sapien
aagaatgcaatcacaaggattccac

SEQ ID NO: 3705171 - DNA, 25 bp, Homo sapien
gaaactgtggaggacagtaactatg

SEQ ID NO: 3705172 - DNA, 25 bp, Homo sapien
ggaccgcttgagtctagagaggttg

SEQ ID NO: 3705173 - DNA, 25 bp, Homo sapien
tgagtctagagaggttgaaactgca

SEQ ID NO: 3705174 - DNA, 25 bp, Homo sapien
tacaaaacttactgggatgtggtgg

SEQ ID NO: 3705175 - DNA, 25 bp, Homo sapien
agtggcattcaactacttcagtaca

SEQ ID NO: 3705176 - DNA, 25 bp, Homo sapien
tctaaccaagttcaccaatgtcacc

SEQ ID NO: 3705177 - DNA, 25 bp, Homo sapien
taaaacccttcaattgatatgctgg

SEQ ID NO: 3705178 - DNA, 25 bp, Homo sapien
ctctggcaactcattctgtgggtca

SEQ ID NO: 3705179 - DNA, 25 bp, Homo sapien
tatctctaggtgttcctacccattc

SEQ ID NO: 3705180 - DNA, 25 bp, Homo sapien
ggcacagctgtatactggaccctat

SEQ ID NO: 3705181 - DNA, 25 bp, Homo sapien
tatgacttatgctgggctcagtagc

SEQ ID NO: 3705182 - DNA, 25 bp, Homo sapien
cactatctaacctgtacatgtgaaa

SEQ ID NO: 3705183 - DNA, 25 bp, Homo sapien
aaatatccacgcttagtcctcagca

SEQ ID NO: 3705184 - DNA, 25 bp, Homo sapien
tacagaaggtggcaatcagctgctt

SEQ ID NO: 3705185 - DNA, 25 bp, Homo sapien
tgtatctccctatgagcaaagcttc

SEQ ID NO: 3705186 - DNA, 25 bp, Homo sapien
tccactgaagctgttctacagaagg

SEQ ID NO: 3705187 - DNA, 25 bp, Homo sapien
ctccagtctggccatcaggacgaga

SEQ ID NO: 3705188 - DNA, 25 bp, Homo sapien
actccagtctggccatcaggacgag

SEQ ID NO: 3705189 - DNA, 25 bp, Homo sapien
gcaataacaagcccatcaatttctg

SEQ ID NO: 3705190 - DNA, 25 bp, Homo sapien
ccagccacgccaaatgcaataacaa

SEQ ID NO: 3705191 - DNA, 25 bp, Homo sapien
aaccagccacgccaaatgcaataac

SEQ ID NO: 3705192 - DNA, 25 bp, Homo sapien
aaaaccagccacgccaaatgcaata

SEQ ID NO: 3705193 - DNA, 25 bp, Homo sapien
gaatcatgaatctctcttgtggcac

SEQ ID NO: 3705194 - DNA, 25 bp, Homo sapien
agcaatcctgccttctaagggtggt

SEQ ID NO: 3705195 - DNA, 25 bp, Homo sapien
aatcctgccttctaagggtggttgc

SEQ ID NO: 3705196 - DNA, 25 bp, Homo sapien
gccttctaagggtggttgccctata

SEQ ID NO: 3705197 - DNA, 25 bp, Homo sapien
tcctgccttctaagggtggttgccc

SEQ ID NO: 3705198 - DNA, 25 bp, Homo sapien
gagttatctctagctcttcccctgc

SEQ ID NO: 3705199 - DNA, 25 bp, Homo sapien
gtgagagttatctctagctcttccc

SEQ ID NO: 3705200 - DNA, 25 bp, Homo sapien
gaaaacatggactgccagagtgtgg

SEQ ID NO: 3705201 - DNA, 25 bp, Homo sapien
cctgtccccagtccttggtggctga

SEQ ID NO: 3705202 - DNA, 25 bp, Homo sapien
tgaaatgaattagagcagtttcact

SEQ ID NO: 3705203 - DNA, 25 bp, Homo sapien
gaaatgaattagagcagtttcactc

SEQ ID NO: 3705204 - DNA, 25 bp, Homo sapien
aatgaattagagcagtttcactcac

SEQ ID NO: 3705205 - DNA, 25 bp, Homo sapien
aaatgaattagagcagtttcactca

SEQ ID NO: 3705206 - DNA, 25 bp, Homo sapien
ttgctctccagtcgcacaccttgct

SEQ ID NO: 3705207 - DNA, 25 bp, Homo sapien
ccagtcgcacaccttgctttctgaa

SEQ ID NO: 3705208 - DNA, 25 bp, Homo sapien
ggtcagagtttggtttgctagattc

SEQ ID NO: 3705209 - DNA, 25 bp, Homo sapien
acggtcagagtttggtttgctagat

SEQ ID NO: 3705210 - DNA, 25 bp, Homo sapien
tgtgtcttgtaactttttattacac

SEQ ID NO: 3705211 - DNA, 25 bp, Homo sapien
ttattacacaccagacattttatat

SEQ ID NO: 3705212 - DNA, 25 bp, Homo sapien
cttgacctttggtcacattttcttg

SEQ ID NO: 3705213 - DNA, 25 bp, Homo sapien
gactatttcttctcttgacctttgg

SEQ ID NO: 3705214 - DNA, 25 bp, Homo sapien
gaaacagtctctccactatgcctaa

SEQ ID NO: 3705215 - DNA, 25 bp, Homo sapien
tggaaactgcctataggaacccctg

SEQ ID NO: 3705216 - DNA, 25 bp, Homo sapien
caaaacctgccttgaagcttagggt

SEQ ID NO: 3705217 - DNA, 25 bp, Homo sapien
tggattcccctactctgtgctacaa

SEQ ID NO: 3705218 - DNA, 25 bp, Homo sapien
cctgggtggaatacaattatggctt

SEQ ID NO: 3705219 - DNA, 25 bp, Homo sapien
ggatctcccgtcatgctttatcacc

SEQ ID NO: 3705220 - DNA, 25 bp, Homo sapien
gagacaggatctcccgtcatgcttt

SEQ ID NO: 3705221 - DNA, 25 bp, Homo sapien
ccctgggtggaatacaattatggct

SEQ ID NO: 3705222 - DNA, 25 bp, Homo sapien
ggacatagtagtggaacacctatag

SEQ ID NO: 3705223 - DNA, 25 bp, Homo sapien
gctggacatagtagtggaacaccta

SEQ ID NO: 3705224 - DNA, 25 bp, Homo sapien
ttagctggacatagtagtggaacac

SEQ ID NO: 3705225 - DNA, 25 bp, Homo sapien
atagtagtggaacacctatagtccc

SEQ ID NO: 3705226 - DNA, 25 bp, Homo sapien
gcctaacagcgtgaaacgccgtcta

SEQ ID NO: 3705227 - DNA, 25 bp, Homo sapien
ctgcctaacagcgtgaaacgccgtc

SEQ ID NO: 3705228 - DNA, 25 bp, Homo sapien
ccatcctgcctaacagcgtgaaacg

SEQ ID NO: 3705229 - DNA, 25 bp, Homo sapien
tcctgcctaacagcgtgaaacgccg

SEQ ID NO: 3705230 - DNA, 25 bp, Homo sapien
atactgtgattttcagtggagcaat

SEQ ID NO: 3705231 - DNA, 25 bp, Homo sapien
ctgtgattttcagtggagcaattgg

SEQ ID NO: 3705232 - DNA, 25 bp, Homo sapien
gattttcagtggagcaattggagca

SEQ ID NO: 3705233 - DNA, 25 bp, Homo sapien
tgtgattttcagtggagcaattgga

SEQ ID NO: 3705234 - DNA, 25 bp, Homo sapien
tgtaccacttcaggccctatattaa

SEQ ID NO: 3705235 - DNA, 25 bp, Homo sapien
tcatgatattctgttggcacacact

SEQ ID NO: 3705236 - DNA, 25 bp, Homo sapien
tgatattctgttggcacacactctc

SEQ ID NO: 3705237 - DNA, 25 bp, Homo sapien
tctctttgtaccacttcaggcccta

SEQ ID NO: 3705238 - DNA, 25 bp, Homo sapien
tagttgggaacacagtattcctgag

SEQ ID NO: 3705239 - DNA, 25 bp, Homo sapien
agatagagcttcagactggcccact

SEQ ID NO: 3705240 - DNA, 25 bp, Homo sapien
gaatatgcttggttttgtccacttt

SEQ ID NO: 3705241 - DNA, 25 bp, Homo sapien
gtattcctgagctacacaactcaat

SEQ ID NO: 3705242 - DNA, 25 bp, Homo sapien
ggagatagcaccatgactaaacaat

SEQ ID NO: 3705243 - DNA, 25 bp, Homo sapien
catggagatagcaccatgactaaac

SEQ ID NO: 3705244 - DNA, 25 bp, Homo sapien
aggcactttagagccagaatttggt

SEQ ID NO: 3705245 - DNA, 25 bp, Homo sapien
tggagatagcaccatgactaaacaa

SEQ ID NO: 3705246 - DNA, 25 bp, Homo sapien
cctcggtaaaatgaccatggtccag

SEQ ID NO: 3705247 - DNA, 25 bp, Homo sapien
gatttcagctctgcaacataagctc

SEQ ID NO: 3705248 - DNA, 25 bp, Homo sapien
tgctgacattaattgcctcggtaaa

SEQ ID NO: 3705249 - DNA, 25 bp, Homo sapien
cagccctcttttacagtctgggaaa

SEQ ID NO: 3705250 - DNA, 25 bp, Homo sapien
taaatgttgattgtagtactgtctc

SEQ ID NO: 3705251 - DNA, 25 bp, Homo sapien
ttcaggctgaatagatgaataactc

SEQ ID NO: 3705252 - DNA, 25 bp, Homo sapien
gactgctaaatgttgattgtagtac

SEQ ID NO: 3705253 - DNA, 25 bp, Homo sapien
tgaatagatgaataactcccaagat

SEQ ID NO: 3705254 - DNA, 25 bp, Homo sapien
cagaggctcagaagttccacagaag

SEQ ID NO: 3705255 - DNA, 25 bp, Homo sapien
gaggtctctgactccctaaaaggtg

SEQ ID NO: 3705256 - DNA, 25 bp, Homo sapien
taagaaaacgaaacatgagacccaa

SEQ ID NO: 3705257 - DNA, 25 bp, Homo sapien
gaacttcagaggtccgtggaatgct

SEQ ID NO: 3705258 - DNA, 25 bp, Homo sapien
tattcaatcctccactgatggccac

SEQ ID NO: 3705259 - DNA, 25 bp, Homo sapien
attcaatcctccactgatggccacc

SEQ ID NO: 3705260 - DNA, 25 bp, Homo sapien
aatcagaagagttgtattcaaattc

SEQ ID NO: 3705261 - DNA, 25 bp, Homo sapien
tttccagcaaatctggaatcagaag

SEQ ID NO: 3705262 - DNA, 25 bp, Homo sapien
ctgggcttcgtttttcatgaacaag

SEQ ID NO: 3705263 - DNA, 25 bp, Homo sapien
tgaacttgtacataacttctctggg

SEQ ID NO: 3705264 - DNA, 25 bp, Homo sapien
tcattatgctttgtattctctactt

SEQ ID NO: 3705265 - DNA, 25 bp, Homo sapien
ttaataagctggctaataggtactt

SEQ ID NO: 3705266 - DNA, 25 bp, Homo sapien
agtaaatgcagatgctcacacacac

SEQ ID NO: 3705267 - DNA, 25 bp, Homo sapien
aataggtacttaagttcattatgct

SEQ ID NO: 3705268 - DNA, 25 bp, Homo sapien
aaagtctatactgttcaccctctga

SEQ ID NO: 3705269 - DNA, 25 bp, Homo sapien
aagtctatactgttcaccctctgag

SEQ ID NO: 3705270 - DNA, 25 bp, Homo sapien
tatcacacgtgataccatactttaa

SEQ ID NO: 3705271 - DNA, 25 bp, Homo sapien
ggaaaatgagtaccttagttggcat

SEQ ID NO: 3705272 - DNA, 25 bp, Homo sapien
atacatatatagtgataaccaaatg

SEQ ID NO: 3705273 - DNA, 25 bp, Homo sapien
aatggtacactaagatggtcttgta

SEQ ID NO: 3705274 - DNA, 25 bp, Homo sapien
ataatgttgatcttgggcctgttcc

SEQ ID NO: 3705275 - DNA, 25 bp, Homo sapien
aatgttgatcttgggcctgttccac

SEQ ID NO: 3705276 - DNA, 25 bp, Homo sapien
taatgttgatcttgggcctgttcca

SEQ ID NO: 3705277 - DNA, 25 bp, Homo sapien
agttgagggtaccaggctgctccag

SEQ ID NO: 3705278 - DNA, 25 bp, Homo sapien
caatcatgatcacttgtatttcaaa

SEQ ID NO: 3705279 - DNA, 25 bp, Homo sapien
ttcaaatgctgtctcgtctcttaag

SEQ ID NO: 3705280 - DNA, 25 bp, Homo sapien
gctcataaacattaatcatttaccg

SEQ ID NO: 3705281 - DNA, 25 bp, Homo sapien
tccatcttgggctcataaacattaa

SEQ ID NO: 3705282 - DNA, 25 bp, Homo sapien
tctgatatcttcacaaaggagggtg

SEQ ID NO: 3705283 - DNA, 25 bp, Homo sapien
gcgttgtatgcaattctaggttttc

SEQ ID NO: 3705284 - DNA, 25 bp, Homo sapien
atgaccaaggcgttgtatgcaattc

SEQ ID NO: 3705285 - DNA, 25 bp, Homo sapien
cacaaaggagggtgcacttttttga

SEQ ID NO: 3705286 - DNA, 25 bp, Homo sapien
ctgaaatctgggctttaatcagaac

SEQ ID NO: 3705287 - DNA, 25 bp, Homo sapien
atctgggctttaatcagaaccactc

SEQ ID NO: 3705288 - DNA, 25 bp, Homo sapien
aaatctgggctttaatcagaaccac

SEQ ID NO: 3705289 - DNA, 25 bp, Homo sapien
gctctgaaatctgggctttaatcag

SEQ ID NO: 3705290 - DNA, 25 bp, Homo sapien
tttcttcatagtaaatggcaagcag

SEQ ID NO: 3705291 - DNA, 25 bp, Homo sapien
cttcatagtaaatggcaagcagcta

SEQ ID NO: 3705292 - DNA, 25 bp, Homo sapien
taaatggcaagcagctaaaacattg

SEQ ID NO: 3705293 - DNA, 25 bp, Homo sapien
catagtaaatggcaagcagctaaaa

SEQ ID NO: 3705294 - DNA, 25 bp, Homo sapien
gctttgattctacacggatacaaac

SEQ ID NO: 3705295 - DNA, 25 bp, Homo sapien
caaacatcatgtcttccatcaatgg

SEQ ID NO: 3705296 - DNA, 25 bp, Homo sapien
ttctacacggatacaaacatcatgt

SEQ ID NO: 3705297 - DNA, 25 bp, Homo sapien
catcaatggcagtcattaacgctgg

SEQ ID NO: 3705298 - DNA, 25 bp, Homo sapien
tccagtaaaggaccgagaggcatgc

SEQ ID NO: 3705299 - DNA, 25 bp, Homo sapien
gaggcatgcctgtttccaggtacaa

SEQ ID NO: 3705300 - DNA, 25 bp, Homo sapien
tcacggaaccagattagctcatcag

SEQ ID NO: 3705301 - DNA, 25 bp, Homo sapien
taagaagaaattaggtgcctcccgc

SEQ ID NO: 3705302 - DNA, 25 bp, Homo sapien
acaggtgcctccagggagatggaac

SEQ ID NO: 3705303 - DNA, 25 bp, Homo sapien
tgaatacacatgagaaccaaggttg

SEQ ID NO: 3705304 - DNA, 25 bp, Homo sapien
tggctcctaccctaacagttactgg

SEQ ID NO: 3705305 - DNA, 25 bp, Homo sapien
aacggagagaggcttctaattaaga

SEQ ID NO: 3705306 - DNA, 25 bp, Homo sapien
gttacaagctattgaggcactccag

SEQ ID NO: 3705307 - DNA, 25 bp, Homo sapien
caagatcgctgctagcttgacagga

SEQ ID NO: 3705308 - DNA, 25 bp, Homo sapien
gaatgacagagcaccatcaaccatg

SEQ ID NO: 3705309 - DNA, 25 bp, Homo sapien
gataacacaccgttcagaccgacag

SEQ ID NO: 3705310 - DNA, 25 bp, Homo sapien
atacacaaggttctgcgctgactgc

SEQ ID NO: 3705311 - DNA, 25 bp, Homo sapien
tacacaaggttctgcgctgactgcc

SEQ ID NO: 3705312 - DNA, 25 bp, Homo sapien
cagagacgggcattggctccatgct

SEQ ID NO: 3705313 - DNA, 25 bp, Homo sapien
agagacgggcattggctccatgctt

SEQ ID NO: 3705314 - DNA, 25 bp, Homo sapien
gagacgggcattggctccatgcttt

SEQ ID NO: 3705315 - DNA, 25 bp, Homo sapien
tcagagacgggcattggctccatgc

SEQ ID NO: 3705316 - DNA, 25 bp, Homo sapien
tatctagtgcaattctctttgtaaa

SEQ ID NO: 3705317 - DNA, 25 bp, Homo sapien
ggcactcaaatcctagacacgaact

SEQ ID NO: 3705318 - DNA, 25 bp, Homo sapien
gagaacagattgctacatgtttgct

SEQ ID NO: 3705319 - DNA, 25 bp, Homo sapien
cattcagtaaggcactcaaatccta

SEQ ID NO: 3705320 - DNA, 25 bp, Homo sapien
ctttttatagaaagacacgcttgtc

SEQ ID NO: 3705321 - DNA, 25 bp, Homo sapien
ttgttgaaagctatggatccttctc

SEQ ID NO: 3705322 - DNA, 25 bp, Homo sapien
tttgttgaaagctatggatccttct

SEQ ID NO: 3705323 - DNA, 25 bp, Homo sapien
taaatagtaagccttaaccactgaa

SEQ ID NO: 3705324 - DNA, 25 bp, Homo sapien
gaactccaatgcattctcatgggaa

SEQ ID NO: 3705325 - DNA, 25 bp, Homo sapien
agtgcacctgcattagaaaagtttg

SEQ ID NO: 3705326 - DNA, 25 bp, Homo sapien
tatctcaagaacagatggcatgccc

SEQ ID NO: 3705327 - DNA, 25 bp, Homo sapien
tgtctttgcatagtcagtttttgcc

SEQ ID NO: 3705328 - DNA, 25 bp, Homo sapien
cagacgaatggataatatattcaca

SEQ ID NO: 3705329 - DNA, 25 bp, Homo sapien
cataaaaatatggataagcctgaaa

SEQ ID NO: 3705330 - DNA, 25 bp, Homo sapien
atttacatgaagtccaaacacagat

SEQ ID NO: 3705331 - DNA, 25 bp, Homo sapien
agaactcaaatgacttcaacagacg

SEQ ID NO: 3705332 - DNA, 25 bp, Homo sapien
gagtgttccactaattcttgtctcc

SEQ ID NO: 3705333 - DNA, 25 bp, Homo sapien
tatagtacatcttcccaaacagcag

SEQ ID NO: 3705334 - DNA, 25 bp, Homo sapien
cagcaggagcacagtagagtgttcc

SEQ ID NO: 3705335 - DNA, 25 bp, Homo sapien
actcgtataggccatccctcaggga

SEQ ID NO: 3705336 - DNA, 25 bp, Homo sapien
ggctttttgagaatcggctggcatc

SEQ ID NO: 3705337 - DNA, 25 bp, Homo sapien
ggtgctgactgacaaacttcccggg

SEQ ID NO: 3705338 - DNA, 25 bp, Homo sapien
cattgctgcagtaccgtctggcaaa

SEQ ID NO: 3705339 - DNA, 25 bp, Homo sapien
gcatcagggtgctgactgacaaact

SEQ ID NO: 3705340 - DNA, 25 bp, Homo sapien
gactctactaggtgatcagaaatcc

SEQ ID NO: 3705341 - DNA, 25 bp, Homo sapien
ccttacgcctctagactctactagg

SEQ ID NO: 3705342 - DNA, 25 bp, Homo sapien
cctctagactctactaggtgatcag

SEQ ID NO: 3705343 - DNA, 25 bp, Homo sapien
taggtgatcagaaatccctgcaagc

SEQ ID NO: 3705344 - DNA, 25 bp, Homo sapien
cggctaattttgtctgccttccttc

SEQ ID NO: 3705345 - DNA, 25 bp, Homo sapien
tctttctttcaacggagttttgctc

SEQ ID NO: 3705346 - DNA, 25 bp, Homo sapien
gcccggctaattttgtctgccttcc

SEQ ID NO: 3705347 - DNA, 25 bp, Homo sapien
gctaattttgtctgccttccttcct

SEQ ID NO: 3705348 - DNA, 25 bp, Homo sapien
ctttgctgcctcttagctatggccg

SEQ ID NO: 3705349 - DNA, 25 bp, Homo sapien
tgtgtctcccttctacatgatatct

SEQ ID NO: 3705350 - DNA, 25 bp, Homo sapien
tcagcagatgcctcaaggggaaagt

SEQ ID NO: 3705351 - DNA, 25 bp, Homo sapien
ctatggccgtctgcccaaatgctcg

SEQ ID NO: 3705352 - DNA, 25 bp, Homo sapien
acgtatgtattaggcctgttcacca

SEQ ID NO: 3705353 - DNA, 25 bp, Homo sapien
tgagatcgcacactaccgtactcca

SEQ ID NO: 3705354 - DNA, 25 bp, Homo sapien
tgaaagtctctattccacccatcaa

SEQ ID NO: 3705355 - DNA, 25 bp, Homo sapien
tgtagttaacccatatgctaagtac

SEQ ID NO: 3705356 - DNA, 25 bp, Homo sapien
atctgctgacagcaaattttctcag

SEQ ID NO: 3705357 - DNA, 25 bp, Homo sapien
ccctttagtattttttgtgtatgca

SEQ ID NO: 3705358 - DNA, 25 bp, Homo sapien
tagatcagttttcttctacctgaag

SEQ ID NO: 3705359 - DNA, 25 bp, Homo sapien
aaactccagaactcaaacaatctgc

SEQ ID NO: 3705360 - DNA, 25 bp, Homo sapien
ggggcgaccccacattgtgaccaga

SEQ ID NO: 3705361 - DNA, 25 bp, Homo sapien
gggcgaccccacattgtgaccagag

SEQ ID NO: 3705362 - DNA, 25 bp, Homo sapien
ggcgaccccacattgtgaccagagc

SEQ ID NO: 3705363 - DNA, 25 bp, Homo sapien
ctcctggtcatgctcccactggtca

SEQ ID NO: 3705364 - DNA, 25 bp, Homo sapien
tcctggtcatgctcccactggtcac

SEQ ID NO: 3705365 - DNA, 25 bp, Homo sapien
tggactgcaggtttgtattaccgaa

SEQ ID NO: 3705366 - DNA, 25 bp, Homo sapien
catggactgcaggtttgtattaccg

SEQ ID NO: 3705367 - DNA, 25 bp, Homo sapien
tgcaggtttgtattaccgaaaatta

SEQ ID NO: 3705368 - DNA, 25 bp, Homo sapien
gactgcaggtttgtattaccgaaaa

SEQ ID NO: 3705369 - DNA, 25 bp, Homo sapien
gccctgggcctgcatcaacgtgaag

SEQ ID NO: 3705370 - DNA, 25 bp, Homo sapien
ccctgggcctgcatcaacgtgaagg

SEQ ID NO: 3705371 - DNA, 25 bp, Homo sapien
ggccctgggcctgcatcaacgtgaa

SEQ ID NO: 3705372 - DNA, 25 bp, Homo sapien
ttctgtgaaatgtctccacagtggc

SEQ ID NO: 3705373 - DNA, 25 bp, Homo sapien
tctgtgaaatgtctccacagtggcc

SEQ ID NO: 3705374 - DNA, 25 bp, Homo sapien
ctgtgaaatgtctccacagtggcca

SEQ ID NO: 3705375 - DNA, 25 bp, Homo sapien
catgagttctcggttttgtcccaac

SEQ ID NO: 3705376 - DNA, 25 bp, Homo sapien
cccactgccccagttgtgtgagaag

SEQ ID NO: 3705377 - DNA, 25 bp, Homo sapien
tgcaagtctcaagcccagggttctc

SEQ ID NO: 3705378 - DNA, 25 bp, Homo sapien
catttcctaactcctgtccaatatc

SEQ ID NO: 3705379 - DNA, 25 bp, Homo sapien
agccagaccggtgcacactgcaaac

SEQ ID NO: 3705380 - DNA, 25 bp, Homo sapien
tgaaacacaccctgtcggcacttac

SEQ ID NO: 3705381 - DNA, 25 bp, Homo sapien
tcagccagaccggtgcacactgcaa

SEQ ID NO: 3705382 - DNA, 25 bp, Homo sapien
tgcaaacattcactgaaacacaccc

SEQ ID NO: 3705383 - DNA, 25 bp, Homo sapien
aaaaaacttcattctcatttccaca

SEQ ID NO: 3705384 - DNA, 25 bp, Homo sapien
aaaacttcattctcatttccacact

SEQ ID NO: 3705385 - DNA, 25 bp, Homo sapien
aaaaacttcattctcatttccacac

SEQ ID NO: 3705386 - DNA, 25 bp, Homo sapien
gcaagaacctgagtttcccttccaa

SEQ ID NO: 3705387 - DNA, 25 bp, Homo sapien
tgtccttctgactcacagcaaaagc

SEQ ID NO: 3705388 - DNA, 25 bp, Homo sapien
agggctttggccattaggcaagaac

SEQ ID NO: 3705389 - DNA, 25 bp, Homo sapien
gatggcgtgtgcctctttaggcaac

SEQ ID NO: 3705390 - DNA, 25 bp, Homo sapien
tgaaagtaaacaggttcctggaaca

SEQ ID NO: 3705391 - DNA, 25 bp, Homo sapien
agccatcccctcaggctgggcactg

SEQ ID NO: 3705392 - DNA, 25 bp, Homo sapien
ccatcccctcaggctgggcactgac

SEQ ID NO: 3705393 - DNA, 25 bp, Homo sapien
ccatttgaagccatcccctcaggct

SEQ ID NO: 3705394 - DNA, 25 bp, Homo sapien
ctccatttgaagccatcccctcagg

SEQ ID NO: 3705395 - DNA, 25 bp, Homo sapien
ccgttcatgaggtagtataaatgga

SEQ ID NO: 3705396 - DNA, 25 bp, Homo sapien
cccgttcatgaggtagtataaatgg

SEQ ID NO: 3705397 - DNA, 25 bp, Homo sapien
ggaggtgccagggttcgcggtcacg

SEQ ID NO: 3705398 - DNA, 25 bp, Homo sapien
tgaagggcagagccgtgaacacaga

SEQ ID NO: 3705399 - DNA, 25 bp, Homo sapien
ccgggagcgggtgtggtgaagggca

SEQ ID NO: 3705400 - DNA, 25 bp, Homo sapien
acgcccggtcccagcgctgggtatg

SEQ ID NO: 3705401 - DNA, 25 bp, Homo sapien
cacctgggcagccataacaggcacc

SEQ ID NO: 3705402 - DNA, 25 bp, Homo sapien
acctgggcagccataacaggcacca

SEQ ID NO: 3705403 - DNA, 25 bp, Homo sapien
ggcagctgggcagccggtggtggtg

SEQ ID NO: 3705404 - DNA, 25 bp, Homo sapien
agaggaaggccctgggaccagcctc

SEQ ID NO: 3705405 - DNA, 25 bp, Homo sapien
ttgggacacaatggggggcagctgg

SEQ ID NO: 3705406 - DNA, 25 bp, Homo sapien
gtggtggtggaagaggaaggccctg

SEQ ID NO: 3705407 - DNA, 25 bp, Homo sapien
ctgccctctccgtgagccccttgtg

SEQ ID NO: 3705408 - DNA, 25 bp, Homo sapien
ggttacaggagtcatctggcggggc

SEQ ID NO: 3705409 - DNA, 25 bp, Homo sapien
tacaggagtcatctggcggggcctt

SEQ ID NO: 3705410 - DNA, 25 bp, Homo sapien
tggggttacaggagtcatctggcgg

SEQ ID NO: 3705411 - DNA, 25 bp, Homo sapien
ccagagtcggaagttctcatagaca

SEQ ID NO: 3705412 - DNA, 25 bp, Homo sapien
tgctgccagagtcggaagttctcat

SEQ ID NO: 3705413 - DNA, 25 bp, Homo sapien
gccaggggcttgtagtgctgccaga

SEQ ID NO: 3705414 - DNA, 25 bp, Homo sapien
agtgctgccagagtcggaagttctc

SEQ ID NO: 3705415 - DNA, 25 bp, Homo sapien
aattattgaaagtaaggattggctg

SEQ ID NO: 3705416 - DNA, 25 bp, Homo sapien
actcacgggacagtgacgggcagtt

SEQ ID NO: 3705417 - DNA, 25 bp, Homo sapien
cttctgtaaacattgttgtgaaaat

SEQ ID NO: 3705418 - DNA, 25 bp, Homo sapien
taaggattggctggactcacgggac

SEQ ID NO: 3705419 - DNA, 25 bp, Homo sapien
caaggaggaatgcaaccagttccag

SEQ ID NO: 3705420 - DNA, 25 bp, Homo sapien
gcagctccaccccaagaatcagggt

SEQ ID NO: 3705421 - DNA, 25 bp, Homo sapien
tgcaccgggactccgctccaaggag

SEQ ID NO: 3705422 - DNA, 25 bp, Homo sapien
caaccagttccagggtgcgggaaca

SEQ ID NO: 3705423 - DNA, 25 bp, Homo sapien
ggcttccgccgggccagggatcgga

SEQ ID NO: 3705424 - DNA, 25 bp, Homo sapien
gtgggcttccgccgggccagggatc

SEQ ID NO: 3705425 - DNA, 25 bp, Homo sapien
cttccgccgggccagggatcggaga

SEQ ID NO: 3705426 - DNA, 25 bp, Homo sapien
ttccgccgggccagggatcggagaa

SEQ ID NO: 3705427 - DNA, 25 bp, Homo sapien
aaagttgctcgtgtgctgccattcc

SEQ ID NO: 3705428 - DNA, 25 bp, Homo sapien
gtcaaagttgctcgtgtgctgccat

SEQ ID NO: 3705429 - DNA, 25 bp, Homo sapien
caaagttgctcgtgtgctgccattc

SEQ ID NO: 3705430 - DNA, 25 bp, Homo sapien
tcaaagttgctcgtgtgctgccatt

SEQ ID NO: 3705431 - DNA, 25 bp, Homo sapien
ctggctgcttgaccacctcaggggc

SEQ ID NO: 3705432 - DNA, 25 bp, Homo sapien
tggccggcgggccttggtcactggc

SEQ ID NO: 3705433 - DNA, 25 bp, Homo sapien
ggtggccggcgggccttggtcactg

SEQ ID NO: 3705434 - DNA, 25 bp, Homo sapien
cggcgggccttggtcactggcctct

SEQ ID NO: 3705435 - DNA, 25 bp, Homo sapien
ggtggtggccggcgggccttggtca

SEQ ID NO: 3705436 - DNA, 25 bp, Homo sapien
tcctccatgatgtccacatactcct

SEQ ID NO: 3705437 - DNA, 25 bp, Homo sapien
ctccatgatgtccacatactcctgc

SEQ ID NO: 3705438 - DNA, 25 bp, Homo sapien
cctccatgatgtccacatactcctg

SEQ ID NO: 3705439 - DNA, 25 bp, Homo sapien
gaacacagcttgtcagtgtagctca

SEQ ID NO: 3705440 - DNA, 25 bp, Homo sapien
ctgggaacacagcttgtcagtgtag

SEQ ID NO: 3705441 - DNA, 25 bp, Homo sapien
acacagcttgtcagtgtagctcagg

SEQ ID NO: 3705442 - DNA, 25 bp, Homo sapien
tgacgaagtctttctgggaacacag

SEQ ID NO: 3705443 - DNA, 25 bp, Homo sapien
caagaaatccatctgtggatctggg

SEQ ID NO: 3705444 - DNA, 25 bp, Homo sapien
ccaagaaatccatctgtggatctgg

SEQ ID NO: 3705445 - DNA, 25 bp, Homo sapien
ctgggcaagggtgagtccttcctcc

SEQ ID NO: 3705446 - DNA, 25 bp, Homo sapien
tctgcctcgtccctgagagtcccgg

SEQ ID NO: 3705447 - DNA, 25 bp, Homo sapien
aagaacttgagtccaaccgggctgt

SEQ ID NO: 3705448 - DNA, 25 bp, Homo sapien
cttagaagaacttgagtccaaccgg

SEQ ID NO: 3705449 - DNA, 25 bp, Homo sapien
gggctgccctcgcatgctgtttctc

SEQ ID NO: 3705450 - DNA, 25 bp, Homo sapien
atcccaaaagcacaacagagtcttt

SEQ ID NO: 3705451 - DNA, 25 bp, Homo sapien
tccaaggcatccttggtacccacgc

SEQ ID NO: 3705452 - DNA, 25 bp, Homo sapien
ccttggtacccacgccagggcaggt

SEQ ID NO: 3705453 - DNA, 25 bp, Homo sapien
aaggcatccttggtacccacgccag

SEQ ID NO: 3705454 - DNA, 25 bp, Homo sapien
ttgacccctgagccagcccatgtga

SEQ ID NO: 3705455 - DNA, 25 bp, Homo sapien
ccctgagccagcccatgtgactccc

SEQ ID NO: 3705456 - DNA, 25 bp, Homo sapien
tgagccagcccatgtgactccctga

SEQ ID NO: 3705457 - DNA, 25 bp, Homo sapien
gacccctgagccagcccatgtgact

SEQ ID NO: 3705458 - DNA, 25 bp, Homo sapien
gcagaagcttgtgctgggaacccaa

SEQ ID NO: 3705459 - DNA, 25 bp, Homo sapien
gcctcttctctcagcagatgggaac

SEQ ID NO: 3705460 - DNA, 25 bp, Homo sapien
gaaggtgctaggttgaggcctcttc

SEQ ID NO: 3705461 - DNA, 25 bp, Homo sapien
ttctctcagcagatgggaactgatg

SEQ ID NO: 3705462 - DNA, 25 bp, Homo sapien
tggctacaacgctgcttcttctcct

SEQ ID NO: 3705463 - DNA, 25 bp, Homo sapien
cccaagtcagggattgctccccaga

SEQ ID NO: 3705464 - DNA, 25 bp, Homo sapien
ctactggctacaacgctgcttcttc

SEQ ID NO: 3705465 - DNA, 25 bp, Homo sapien
tctccttcctggagaccaaggggtc

SEQ ID NO: 3705466 - DNA, 25 bp, Homo sapien
aaagctaaggcccagcaagatcagc

SEQ ID NO: 3705467 - DNA, 25 bp, Homo sapien
caaagctaaggcccagcaagatcag

SEQ ID NO: 3705468 - DNA, 25 bp, Homo sapien
gctaaggcccagcaagatcagcact

SEQ ID NO: 3705469 - DNA, 25 bp, Homo sapien
aagctaaggcccagcaagatcagca

SEQ ID NO: 3705470 - DNA, 25 bp, Homo sapien
tctgtcagtccctggagcatctgaa

SEQ ID NO: 3705471 - DNA, 25 bp, Homo sapien
ggtggtgggagggatcagggcttcc

SEQ ID NO: 3705472 - DNA, 25 bp, Homo sapien
tcctcagcatctgtcagtccctgga

SEQ ID NO: 3705473 - DNA, 25 bp, Homo sapien
caggcagggccttgtgagtgggtgg

SEQ ID NO: 3705474 - DNA, 25 bp, Homo sapien
ggtcacctcaacgtctcccctcagc

SEQ ID NO: 3705475 - DNA, 25 bp, Homo sapien
tagctagttggacaagactctctcc

SEQ ID NO: 3705476 - DNA, 25 bp, Homo sapien
tcagcagagattgggaagacaggac

SEQ ID NO: 3705477 - DNA, 25 bp, Homo sapien
tgcgcctgatggactggacatgctt

SEQ ID NO: 3705478 - DNA, 25 bp, Homo sapien
gacatgcttgttcccattggtgatg

SEQ ID NO: 3705479 - DNA, 25 bp, Homo sapien
cccccagggccgtgaccacagctct

SEQ ID NO: 3705480 - DNA, 25 bp, Homo sapien
gcagtgctgggaccagtgccctggc

SEQ ID NO: 3705481 - DNA, 25 bp, Homo sapien
cacagctctgcacgcaggcagtgct

SEQ ID NO: 3705482 - DNA, 25 bp, Homo sapien
acaggggtcctgagccaataagcgc

SEQ ID NO: 3705483 - DNA, 25 bp, Homo sapien
ccagagaggacccaaacatggctcc

SEQ ID NO: 3705484 - DNA, 25 bp, Homo sapien
tcacttggccgaggggccaggccac

SEQ ID NO: 3705485 - DNA, 25 bp, Homo sapien
ccaaacatggctccctttgtcactt

SEQ ID NO: 3705486 - DNA, 25 bp, Homo sapien
ctttgtcacttggccgaggggccag

SEQ ID NO: 3705487 - DNA, 25 bp, Homo sapien
gagtcacgggagctgcccacatcac

SEQ ID NO: 3705488 - DNA, 25 bp, Homo sapien
gaggagtcacgggagctgcccacat

SEQ ID NO: 3705489 - DNA, 25 bp, Homo sapien
aggagtcacgggagctgcccacatc

SEQ ID NO: 3705490 - DNA, 25 bp, Homo sapien
ggagtcacgggagctgcccacatca

SEQ ID NO: 3705491 - DNA, 25 bp, Homo sapien
tgcttcctaggaatggctcagccaa

SEQ ID NO: 3705492 - DNA, 25 bp, Homo sapien
ggtggaggaagcacaagttctgctt

SEQ ID NO: 3705493 - DNA, 25 bp, Homo sapien
cacacacgccagagtatggaccatg

SEQ ID NO: 3705494 - DNA, 25 bp, Homo sapien
ttcaaacacggctcacttaacattc

SEQ ID NO: 3705495 - DNA, 25 bp, Homo sapien
tagactgctcctcatatctcgttgg

SEQ ID NO: 3705496 - DNA, 25 bp, Homo sapien
tcaataacaactactgcgccacctt

SEQ ID NO: 3705497 - DNA, 25 bp, Homo sapien
tctcgttggctagaactgagttgcg

SEQ ID NO: 3705498 - DNA, 25 bp, Homo sapien
aataggatctccaatccagtgaccc

SEQ ID NO: 3705499 - DNA, 25 bp, Homo sapien
cccgtgcttcataaaccatgatcat

SEQ ID NO: 3705500 - DNA, 25 bp, Homo sapien
tccttcccgtgcttcataaaccatg

SEQ ID NO: 3705501 - DNA, 25 bp, Homo sapien
ccagtccttcccgtgcttcataaac

SEQ ID NO: 3705502 - DNA, 25 bp, Homo sapien
ttcccgtgcttcataaaccatgatc

SEQ ID NO: 3705503 - DNA, 25 bp, Homo sapien
ttttctcaaagatgtggcccatatg

SEQ ID NO: 3705504 - DNA, 25 bp, Homo sapien
cagactgagacacatgatgaagacc

SEQ ID NO: 3705505 - DNA, 25 bp, Homo sapien
gaagagcatgaatctaagtgatgcc

SEQ ID NO: 3705506 - DNA, 25 bp, Homo sapien
tgcttagcttacacacttcaacttg

SEQ ID NO: 3705507 - DNA, 25 bp, Homo sapien
ctttatagtgtcacttgatacacaa

SEQ ID NO: 3705508 - DNA, 25 bp, Homo sapien
gaacaaacagtcaaactatatccgg

SEQ ID NO: 3705509 - DNA, 25 bp, Homo sapien
caaagtgggtgcaggtatgtcacgt

SEQ ID NO: 3705510 - DNA, 25 bp, Homo sapien
gaactcacaatcttgatgacagcta

SEQ ID NO: 3705511 - DNA, 25 bp, Homo sapien
gccccaactctaacaccggagatta

SEQ ID NO: 3705512 - DNA, 25 bp, Homo sapien
gcttgcctaaactccatctgaacaa

SEQ ID NO: 3705513 - DNA, 25 bp, Homo sapien
actcttttgctgatagtaagtaccc

SEQ ID NO: 3705514 - DNA, 25 bp, Homo sapien
gaaccaaccaacataaggaattgca

SEQ ID NO: 3705515 - DNA, 25 bp, Homo sapien
gctctgctgaaccaaccaacataag

SEQ ID NO: 3705516 - DNA, 25 bp, Homo sapien
tgcagcctgtacttatgagtggcag

SEQ ID NO: 3705517 - DNA, 25 bp, Homo sapien
tggcagaacgccagagaaggttaat

SEQ ID NO: 3705518 - DNA, 25 bp, Homo sapien
tagatgccaggatcaaatctattaa

SEQ ID NO: 3705519 - DNA, 25 bp, Homo sapien
cccaagtgtgagagtcaaagggcct

SEQ ID NO: 3705520 - DNA, 25 bp, Homo sapien
cagttagaaagagttcgctgtcctg

SEQ ID NO: 3705521 - DNA, 25 bp, Homo sapien
ttttatcctaaattgccacccgcta

SEQ ID NO: 3705522 - DNA, 25 bp, Homo sapien
gctaccgtcgtcgtcttccacataa

SEQ ID NO: 3705523 - DNA, 25 bp, Homo sapien
gctgtcctgagttcacttgatcact

SEQ ID NO: 3705524 - DNA, 25 bp, Homo sapien
agttgtcttccctattgccgctgca

SEQ ID NO: 3705525 - DNA, 25 bp, Homo sapien
aagcgagcgccaccacttgtaaggt

SEQ ID NO: 3705526 - DNA, 25 bp, Homo sapien
tatgccatcggccagctgatagtac

SEQ ID NO: 3705527 - DNA, 25 bp, Homo sapien
ggatagctattctactcctccggca

SEQ ID NO: 3705528 - DNA, 25 bp, Homo sapien
gcatgcatgttgctttctgtgatag

SEQ ID NO: 3705529 - DNA, 25 bp, Homo sapien
tctgtgatagtatccatcatggtac

SEQ ID NO: 3705530 - DNA, 25 bp, Homo sapien
tgagggcacagtcgtttctcctaac

SEQ ID NO: 3705531 - DNA, 25 bp, Homo sapien
tatccatcatggtacatgagggcac

SEQ ID NO: 3705532 - DNA, 25 bp, Homo sapien
ttaaagcccggtagaggaacatgtg

SEQ ID NO: 3705533 - DNA, 25 bp, Homo sapien
gtgtgtgttaaagcccggtagagga

SEQ ID NO: 3705534 - DNA, 25 bp, Homo sapien
gtgtgagacaacactgccccctaga

SEQ ID NO: 3705535 - DNA, 25 bp, Homo sapien
aggtccttgtgtgccgcggactgac

SEQ ID NO: 3705536 - DNA, 25 bp, Homo sapien
aacaggaaattggtgagtgtctgaa

SEQ ID NO: 3705537 - DNA, 25 bp, Homo sapien
acaggaaattggtgagtgtctgaag

SEQ ID NO: 3705538 - DNA, 25 bp, Homo sapien
gaacaggaaattggtgagtgtctga

SEQ ID NO: 3705539 - DNA, 25 bp, Homo sapien
ccatcctgttatgtgtttgtaccat

SEQ ID NO: 3705540 - DNA, 25 bp, Homo sapien
aaccatcctgttatgtgtttgtacc

SEQ ID NO: 3705541 - DNA, 25 bp, Homo sapien
accatcctgttatgtgtttgtacca

SEQ ID NO: 3705542 - DNA, 25 bp, Homo sapien
cgaaccatcctgttatgtgtttgta

SEQ ID NO: 3705543 - DNA, 25 bp, Homo sapien
tgccaacgccctctaaaaatcggtc

SEQ ID NO: 3705544 - DNA, 25 bp, Homo sapien
gcttaaaacagatgatagcagagca

SEQ ID NO: 3705545 - DNA, 25 bp, Homo sapien
tgaatagtagcagagtagaagctga

SEQ ID NO: 3705546 - DNA, 25 bp, Homo sapien
gagcaaagagtttcctgccaacgcc

SEQ ID NO: 3705547 - DNA, 25 bp, Homo sapien
tattacaatgaacccctaagtgtca

SEQ ID NO: 3705548 - DNA, 25 bp, Homo sapien
tccaccacaatcttagtcattgaag

SEQ ID NO: 3705549 - DNA, 25 bp, Homo sapien
gagcaaatcactagcagatgattgc

SEQ ID NO: 3705550 - DNA, 25 bp, Homo sapien
gcaaggtgttactattacaatgaac

SEQ ID NO: 3705551 - DNA, 25 bp, Homo sapien
ttttccacattccttcatcctttcc

SEQ ID NO: 3705552 - DNA, 25 bp, Homo sapien
ccttcatcctttccaccttcctaca

SEQ ID NO: 3705553 - DNA, 25 bp, Homo sapien
ttccacattccttcatcctttccac

SEQ ID NO: 3705554 - DNA, 25 bp, Homo sapien
acattccttcatcctttccaccttc

SEQ ID NO: 3705555 - DNA, 25 bp, Homo sapien
gaggactcgggtcccggctcgactc

SEQ ID NO: 3705556 - DNA, 25 bp, Homo sapien
ctcgggtcccggctcgactcagtcc

SEQ ID NO: 3705557 - DNA, 25 bp, Homo sapien
gactcgggtcccggctcgactcagt

SEQ ID NO: 3705558 - DNA, 25 bp, Homo sapien
aggactcgggtcccggctcgactca

SEQ ID NO: 3705559 - DNA, 25 bp, Homo sapien
ccaataaagcgcacggatggaggcc

SEQ ID NO: 3705560 - DNA, 25 bp, Homo sapien
gcctgaaactcggtcccacgaatgg

SEQ ID NO: 3705561 - DNA, 25 bp, Homo sapien
tcggtcccacgaatggcaggcagcg

SEQ ID NO: 3705562 - DNA, 25 bp, Homo sapien
tgatctctatggtttccgcggctcg

SEQ ID NO: 3705563 - DNA, 25 bp, Homo sapien
ccggccagtttgacagccgggcgcc

SEQ ID NO: 3705564 - DNA, 25 bp, Homo sapien
ctgcgccggccagtttgacagccgg

SEQ ID NO: 3705565 - DNA, 25 bp, Homo sapien
cgccggccagtttgacagccgggcg

SEQ ID NO: 3705566 - DNA, 25 bp, Homo sapien
tgcgccggccagtttgacagccggg

SEQ ID NO: 3705567 - DNA, 25 bp, Homo sapien
actacgactcccgacgggctctgcg

SEQ ID NO: 3705568 - DNA, 25 bp, Homo sapien
ggactacgactcccgacgggctctg

SEQ ID NO: 3705569 - DNA, 25 bp, Homo sapien
ctacgactcccgacgggctctgcga

SEQ ID NO: 3705570 - DNA, 25 bp, Homo sapien
gactacgactcccgacgggctctgc

SEQ ID NO: 3705571 - DNA, 25 bp, Homo sapien
gctgggccgtagtcggctcgattta

SEQ ID NO: 3705572 - DNA, 25 bp, Homo sapien
tagtcggctcgatttaaggctggta

SEQ ID NO: 3705573 - DNA, 25 bp, Homo sapien
tgcttagggagaacagccgctggca

SEQ ID NO: 3705574 - DNA, 25 bp, Homo sapien
cgaggcgacgtgagcgagggtgctt

SEQ ID NO: 3705575 - DNA, 25 bp, Homo sapien
gagctgaagaatgtgatcaatcggc

SEQ ID NO: 3705576 - DNA, 25 bp, Homo sapien
cacagtaggtattccgctgaagcca

SEQ ID NO: 3705577 - DNA, 25 bp, Homo sapien
gctcgagagcgaaagacacagatgg

SEQ ID NO: 3705578 - DNA, 25 bp, Homo sapien
gaagcctttgcactgctagagctga

SEQ ID NO: 3705579 - DNA, 25 bp, Homo sapien
gacttttagtgtaatcctatctgta

SEQ ID NO: 3705580 - DNA, 25 bp, Homo sapien
tacaaatgctgtcataagatcaaat

SEQ ID NO: 3705581 - DNA, 25 bp, Homo sapien
tcagggcctagcagtttattttagc

SEQ ID NO: 3705582 - DNA, 25 bp, Homo sapien
gcaggtcagaaatgacttttagtgt

SEQ ID NO: 3705583 - DNA, 25 bp, Homo sapien
cattgctctagaacatggctcgcct

SEQ ID NO: 3705584 - DNA, 25 bp, Homo sapien
attgctctagaacatggctcgcctt

SEQ ID NO: 3705585 - DNA, 25 bp, Homo sapien
cgggaaatgtaggtcttcagtggat

SEQ ID NO: 3705586 - DNA, 25 bp, Homo sapien
tccgggaaatgtaggtcttcagtgg

SEQ ID NO: 3705587 - DNA, 25 bp, Homo sapien
ccttccgggaaatgtaggtcttcag

SEQ ID NO: 3705588 - DNA, 25 bp, Homo sapien
ggaaatgtaggtcttcagtggattc

SEQ ID NO: 3705589 - DNA, 25 bp, Homo sapien
aaatccttggctgtatggcccctca

SEQ ID NO: 3705590 - DNA, 25 bp, Homo sapien
tgttaacagtcccaagcaaaagggc

SEQ ID NO: 3705591 - DNA, 25 bp, Homo sapien
actgtggcccagttacagtaaaata

SEQ ID NO: 3705592 - DNA, 25 bp, Homo sapien
gagtgtgacagaaggtattctacca

SEQ ID NO: 3705593 - DNA, 25 bp, Homo sapien
tactgttggataagctcattctgaa

SEQ ID NO: 3705594 - DNA, 25 bp, Homo sapien
ggatgaaagagttacaccatagtac

SEQ ID NO: 3705595 - DNA, 25 bp, Homo sapien
ttttttaaccatccagatacatgtc

SEQ ID NO: 3705596 - DNA, 25 bp, Homo sapien
cagctactatggtgtggtatgtaaa

SEQ ID NO: 3705597 - DNA, 25 bp, Homo sapien
gaaaacctcagcagttgaaaccgtg

SEQ ID NO: 3705598 - DNA, 25 bp, Homo sapien
gatcagaatgatcagccagcatgca

SEQ ID NO: 3705599 - DNA, 25 bp, Homo sapien
tgggaacctcaaagtgtgtctcggc

SEQ ID NO: 3705600 - DNA, 25 bp, Homo sapien
gcagttcagcaaagaagtagctcct

SEQ ID NO: 3705601 - DNA, 25 bp, Homo sapien
ggggcgaccccacattgtgaccaga

SEQ ID NO: 3705602 - DNA, 25 bp, Homo sapien
gggcgaccccacattgtgaccagag

SEQ ID NO: 3705603 - DNA, 25 bp, Homo sapien
ggcgaccccacattgtgaccagagc

SEQ ID NO: 3705604 - DNA, 25 bp, Homo sapien
gcggtgacccaacggccttcgctct

SEQ ID NO: 3705605 - DNA, 25 bp, Homo sapien
gcggttgatggcagggagacgcgca

SEQ ID NO: 3705606 - DNA, 25 bp, Homo sapien
cttgaggcgggcgaggttccagcgc

SEQ ID NO: 3705607 - DNA, 25 bp, Homo sapien
ccagcgccagttgcggcggttgatg

SEQ ID NO: 3705608 - DNA, 25 bp, Homo sapien
ttggatcccctgttcagaggacaca

SEQ ID NO: 3705609 - DNA, 25 bp, Homo sapien
taatttgtgaagactggccatggga

SEQ ID NO: 3705610 - DNA, 25 bp, Homo sapien
ccacccagtagaggaatggcggctc

SEQ ID NO: 3705611 - DNA, 25 bp, Homo sapien
tctgcaatcgcttctgtacatgttt

SEQ ID NO: 3705612 - DNA, 25 bp, Homo sapien
tcttccactgtgcaactctctacct

SEQ ID NO: 3705613 - DNA, 25 bp, Homo sapien
gaactgccttcttacatgcagccct

SEQ ID NO: 3705614 - DNA, 25 bp, Homo sapien
gccttttgtcctctgagacagaact

SEQ ID NO: 3705615 - DNA, 25 bp, Homo sapien
tttgtcctctgagacagaactgcct

SEQ ID NO: 3705616 - DNA, 25 bp, Homo sapien
ttctgtgaaatgtctccacagtggc

SEQ ID NO: 3705617 - DNA, 25 bp, Homo sapien
tctgtgaaatgtctccacagtggcc

SEQ ID NO: 3705618 - DNA, 25 bp, Homo sapien
ctgtgaaatgtctccacagtggcca

SEQ ID NO: 3705619 - DNA, 25 bp, Homo sapien
catgagttctcggttttgtcccaac

SEQ ID NO: 3705620 - DNA, 25 bp, Homo sapien
cccactgccccagttgtgtgagaag

SEQ ID NO: 3705621 - DNA, 25 bp, Homo sapien
catttcctaactcctgtccaatatc

SEQ ID NO: 3705622 - DNA, 25 bp, Homo sapien
tgcaagtctcaagcccagggttctc

SEQ ID NO: 3705623 - DNA, 25 bp, Homo sapien
cttcagccagaccggtgcacactgc

SEQ ID NO: 3705624 - DNA, 25 bp, Homo sapien
agccagaccggtgcacactgcaaac

SEQ ID NO: 3705625 - DNA, 25 bp, Homo sapien
cagccagaccggtgcacactgcaaa

SEQ ID NO: 3705626 - DNA, 25 bp, Homo sapien
tcagccagaccggtgcacactgcaa

SEQ ID NO: 3705627 - DNA, 25 bp, Homo sapien
aaaaaacttcattctcatttccaca

SEQ ID NO: 3705628 - DNA, 25 bp, Homo sapien
aaaacttcattctcatttccacact

SEQ ID NO: 3705629 - DNA, 25 bp, Homo sapien
aaaaacttcattctcatttccacac

SEQ ID NO: 3705630 - DNA, 25 bp, Homo sapien
cagcggcctcacttcgtgaacaaag

SEQ ID NO: 3705631 - DNA, 25 bp, Homo sapien
tccaggaaagagtggctatgtgacc

SEQ ID NO: 3705632 - DNA, 25 bp, Homo sapien
tcttgacgaatttcaacagcggcct

SEQ ID NO: 3705633 - DNA, 25 bp, Homo sapien
tctcagccgatccagactattaggt

SEQ ID NO: 3705634 - DNA, 25 bp, Homo sapien
tgaaagtaaacaggttcctggaaca

SEQ ID NO: 3705635 - DNA, 25 bp, Homo sapien
caagtgctaaataggggtcagattc

SEQ ID NO: 3705636 - DNA, 25 bp, Homo sapien
cgatggtcccggctgccactcagga

SEQ ID NO: 3705637 - DNA, 25 bp, Homo sapien
atggtcccggctgccactcaggaag

SEQ ID NO: 3705638 - DNA, 25 bp, Homo sapien
caccctttccgcagtactcgatggt

SEQ ID NO: 3705639 - DNA, 25 bp, Homo sapien
ggaggtgccagggttcgcggtcacg

SEQ ID NO: 3705640 - DNA, 25 bp, Homo sapien
tgaagggcagagccgtgaacacaga

SEQ ID NO: 3705641 - DNA, 25 bp, Homo sapien
ccgggagcgggtgtggtgaagggca

SEQ ID NO: 3705642 - DNA, 25 bp, Homo sapien
acgcccggtcccagcgctgggtatg

SEQ ID NO: 3705643 - DNA, 25 bp, Homo sapien
ctgcagtcacaaggagcggcccgtg

SEQ ID NO: 3705644 - DNA, 25 bp, Homo sapien
tgcagtcacaaggagcggcccgtgt

SEQ ID NO: 3705645 - DNA, 25 bp, Homo sapien
gcagtcacaaggagcggcccgtgtg

SEQ ID NO: 3705646 - DNA, 25 bp, Homo sapien
tctggacaaagacgttggaagcccc

SEQ ID NO: 3705647 - DNA, 25 bp, Homo sapien
atctggacaaagacgttggaagccc

SEQ ID NO: 3705648 - DNA, 25 bp, Homo sapien
cacctgggcagccataacaggcacc

SEQ ID NO: 3705649 - DNA, 25 bp, Homo sapien
acctgggcagccataacaggcacca

SEQ ID NO: 3705650 - DNA, 25 bp, Homo sapien
ttcccttgggacacaatggggggca

SEQ ID NO: 3705651 - DNA, 25 bp, Homo sapien
tggggttacaggagtcatctggcgg

SEQ ID NO: 3705652 - DNA, 25 bp, Homo sapien
ggttacaggagtcatctggcggggc

SEQ ID NO: 3705653 - DNA, 25 bp, Homo sapien
ttacaggagtcatctggcggggcct

SEQ ID NO: 3705654 - DNA, 25 bp, Homo sapien
tacaggagtcatctggcggggcctt

SEQ ID NO: 3705655 - DNA, 25 bp, Homo sapien
ccagagtcggaagttctcatagaca

SEQ ID NO: 3705656 - DNA, 25 bp, Homo sapien
tgctgccagagtcggaagttctcat

SEQ ID NO: 3705657 - DNA, 25 bp, Homo sapien
gccaggggcttgtagtgctgccaga

SEQ ID NO: 3705658 - DNA, 25 bp, Homo sapien
agtgctgccagagtcggaagttctc

SEQ ID NO: 3705659 - DNA, 25 bp, Homo sapien
caaggaggaatgcaaccagttccag

SEQ ID NO: 3705660 - DNA, 25 bp, Homo sapien
gcagctccaccccaagaatcagggt

SEQ ID NO: 3705661 - DNA, 25 bp, Homo sapien
caaccagttccagggtgcgggaaca

SEQ ID NO: 3705662 - DNA, 25 bp, Homo sapien
tgcaccgggactccgctccaaggag

SEQ ID NO: 3705663 - DNA, 25 bp, Homo sapien
ggcttccgccgggccagggatcgga

SEQ ID NO: 3705664 - DNA, 25 bp, Homo sapien
ttccgccgggccagggatcggagaa

SEQ ID NO: 3705665 - DNA, 25 bp, Homo sapien
gtgggcttccgccgggccagggatc

SEQ ID NO: 3705666 - DNA, 25 bp, Homo sapien
cttccgccgggccagggatcggaga

SEQ ID NO: 3705667 - DNA, 25 bp, Homo sapien
aaagttgctcgtgtgctgccattcc

SEQ ID NO: 3705668 - DNA, 25 bp, Homo sapien
gtcaaagttgctcgtgtgctgccat

SEQ ID NO: 3705669 - DNA, 25 bp, Homo sapien
caaagttgctcgtgtgctgccattc

SEQ ID NO: 3705670 - DNA, 25 bp, Homo sapien
tcaaagttgctcgtgtgctgccatt

SEQ ID NO: 3705671 - DNA, 25 bp, Homo sapien
ctggctgcttgaccacctcaggggc

SEQ ID NO: 3705672 - DNA, 25 bp, Homo sapien
ggtggccggcgggccttggtcactg

SEQ ID NO: 3705673 - DNA, 25 bp, Homo sapien
cggcgggccttggtcactggcctct

SEQ ID NO: 3705674 - DNA, 25 bp, Homo sapien
ggtggtggccggcgggccttggtca

SEQ ID NO: 3705675 - DNA, 25 bp, Homo sapien
tggccggcgggccttggtcactggc

SEQ ID NO: 3705676 - DNA, 25 bp, Homo sapien
ctccatgatgtccacatactcctgc

SEQ ID NO: 3705677 - DNA, 25 bp, Homo sapien
cctccatgatgtccacatactcctg

SEQ ID NO: 3705678 - DNA, 25 bp, Homo sapien
tcctccatgatgtccacatactcct

SEQ ID NO: 3705679 - DNA, 25 bp, Homo sapien
ctgggaacacagcttgtcagtgtag

SEQ ID NO: 3705680 - DNA, 25 bp, Homo sapien
tgacgaagtctttctgggaacacag

SEQ ID NO: 3705681 - DNA, 25 bp, Homo sapien
gaacacagcttgtcagtgtagctca

SEQ ID NO: 3705682 - DNA, 25 bp, Homo sapien
acacagcttgtcagtgtagctcagg

SEQ ID NO: 3705683 - DNA, 25 bp, Homo sapien
caagaaatccatctgtggatctggg

SEQ ID NO: 3705684 - DNA, 25 bp, Homo sapien
ctgggcaagggtgagtccttcctcc

SEQ ID NO: 3705685 - DNA, 25 bp, Homo sapien
ccaagaaatccatctgtggatctgg

SEQ ID NO: 3705686 - DNA, 25 bp, Homo sapien
agaccagggcacttaggcggcaggt

SEQ ID NO: 3705687 - DNA, 25 bp, Homo sapien
caagaagccgagcatccccagcggg

SEQ ID NO: 3705688 - DNA, 25 bp, Homo sapien
gggattagacaatcaggtgggcctt

SEQ ID NO: 3705689 - DNA, 25 bp, Homo sapien
gcagctgggctttatgtcaaagaga

SEQ ID NO: 3705690 - DNA, 25 bp, Homo sapien
tctgcctcgtccctgagagtcccgg

SEQ ID NO: 3705691 - DNA, 25 bp, Homo sapien
aagaacttgagtccaaccgggctgt

SEQ ID NO: 3705692 - DNA, 25 bp, Homo sapien
cttagaagaacttgagtccaaccgg

SEQ ID NO: 3705693 - DNA, 25 bp, Homo sapien
gggctgccctcgcatgctgtttctc

SEQ ID NO: 3705694 - DNA, 25 bp, Homo sapien
ggttggccgggcagccctcagccca

SEQ ID NO: 3705695 - DNA, 25 bp, Homo sapien
gccagggcaggtgggtctgtggtcc

SEQ ID NO: 3705696 - DNA, 25 bp, Homo sapien
cctcagcccaggggaatcctgacat

SEQ ID NO: 3705697 - DNA, 25 bp, Homo sapien
cctgacatcccaaaagcacaacaga

SEQ ID NO: 3705698 - DNA, 25 bp, Homo sapien
ctccagggagatccaaggcatcctt

SEQ ID NO: 3705699 - DNA, 25 bp, Homo sapien
agggagatccaaggcatccttggta

SEQ ID NO: 3705700 - DNA, 25 bp, Homo sapien
ggagatccaaggcatccttggtacc

SEQ ID NO: 3705701 - DNA, 25 bp, Homo sapien
gatccaaggcatccttggtacccac

SEQ ID NO: 3705702 - DNA, 25 bp, Homo sapien
tccaaagagaggtcgcttcttggcc

SEQ ID NO: 3705703 - DNA, 25 bp, Homo sapien
cagaagcttgtgctgggaacccaag

SEQ ID NO: 3705704 - DNA, 25 bp, Homo sapien
ggtgctaggttgaggcctcttctct

SEQ ID NO: 3705705 - DNA, 25 bp, Homo sapien
tcagcagatggggactgatgagttc

SEQ ID NO: 3705706 - DNA, 25 bp, Homo sapien
gatgccagagccccatccttgggga

SEQ ID NO: 3705707 - DNA, 25 bp, Homo sapien
atgccagagccccatccttggggat

SEQ ID NO: 3705708 - DNA, 25 bp, Homo sapien
tccagggatgctgataacgatgagg

SEQ ID NO: 3705709 - DNA, 25 bp, Homo sapien
tgctgataacgatgagggggcccca

SEQ ID NO: 3705710 - DNA, 25 bp, Homo sapien
ggatgctgataacgatgagggggcc

SEQ ID NO: 3705711 - DNA, 25 bp, Homo sapien
agggatgctgataacgatgaggggg

SEQ ID NO: 3705712 - DNA, 25 bp, Homo sapien
cccccagggccgtgaccacagctct

SEQ ID NO: 3705713 - DNA, 25 bp, Homo sapien
cacagctctgcacgcaggcagtgct

SEQ ID NO: 3705714 - DNA, 25 bp, Homo sapien
gcagtgctgggaccagtgccctggc

SEQ ID NO: 3705715 - DNA, 25 bp, Homo sapien
acaggggtcctgagccaataagcgc

SEQ ID NO: 3705716 - DNA, 25 bp, Homo sapien
ggagtcacgggagctgcccacatca

SEQ ID NO: 3705717 - DNA, 25 bp, Homo sapien
gagtcacgggagctgcccacatcac

SEQ ID NO: 3705718 - DNA, 25 bp, Homo sapien
gaggagtcacgggagctgcccacat

SEQ ID NO: 3705719 - DNA, 25 bp, Homo sapien
aggagtcacgggagctgcccacatc

SEQ ID NO: 3705720 - DNA, 25 bp, Homo sapien
tagggcttcagcacaggaactgggc

SEQ ID NO: 3705721 - DNA, 25 bp, Homo sapien
gaatcaaagtgagctacaaaagggc

SEQ ID NO: 3705722 - DNA, 25 bp, Homo sapien
tgctcggacaaagggccatagactt

SEQ ID NO: 3705723 - DNA, 25 bp, Homo sapien
ctcgaatatggagagacgctgggac

SEQ ID NO: 3705724 - DNA, 25 bp, Homo sapien
catgcatgtggatttgaagacttaa

SEQ ID NO: 3705725 - DNA, 25 bp, Homo sapien
caaggaggcaaacaacttggacact

SEQ ID NO: 3705726 - DNA, 25 bp, Homo sapien
caatggaagactaagcagcctacgg

SEQ ID NO: 3705727 - DNA, 25 bp, Homo sapien
cagcctacggaaagaaggaaatcat

SEQ ID NO: 3705728 - DNA, 25 bp, Homo sapien
agcactgacgatcatgaccacctgt

SEQ ID NO: 3705729 - DNA, 25 bp, Homo sapien
ctggaataatagggccccacagcac

SEQ ID NO: 3705730 - DNA, 25 bp, Homo sapien
ggccccacagcactgacgatcatga

SEQ ID NO: 3705731 - DNA, 25 bp, Homo sapien
cccacagcactgacgatcatgacca

SEQ ID NO: 3705732 - DNA, 25 bp, Homo sapien
catttccacagggtaagtctggctc

SEQ ID NO: 3705733 - DNA, 25 bp, Homo sapien
ccacagggtaagtctggctccagca

SEQ ID NO: 3705734 - DNA, 25 bp, Homo sapien
tttccacagggtaagtctggctcca

SEQ ID NO: 3705735 - DNA, 25 bp, Homo sapien
tgcatttccacagggtaagtctggc

SEQ ID NO: 3705736 - DNA, 25 bp, Homo sapien
gctccccctgacaagggcaaatgta

SEQ ID NO: 3705737 - DNA, 25 bp, Homo sapien
atgagggcttaggtaaacaggccaa

SEQ ID NO: 3705738 - DNA, 25 bp, Homo sapien
ccctccatgggagttgggagttaca

SEQ ID NO: 3705739 - DNA, 25 bp, Homo sapien
agcttgcagggagcccctgtcagcc

SEQ ID NO: 3705740 - DNA, 25 bp, Homo sapien
ccaggtgtccctgtgctcagagcct

SEQ ID NO: 3705741 - DNA, 25 bp, Homo sapien
gggaatgaggctctttggccctatt

SEQ ID NO: 3705742 - DNA, 25 bp, Homo sapien
ctgtaacattagtcttagccctttt

SEQ ID NO: 3705743 - DNA, 25 bp, Homo sapien
tctgtaacattagtcttagcccttt

SEQ ID NO: 3705744 - DNA, 25 bp, Homo sapien
gcataaattggagaatacttgtgaa

SEQ ID NO: 3705745 - DNA, 25 bp, Homo sapien
ctctgcataaattggagaatacttg

SEQ ID NO: 3705746 - DNA, 25 bp, Homo sapien
ttctctgcataaattggagaatact

SEQ ID NO: 3705747 - DNA, 25 bp, Homo sapien
ctgcataaattggagaatacttgtg

SEQ ID NO: 3705748 - DNA, 25 bp, Homo sapien
tacataatgcagaataagtagcagt

SEQ ID NO: 3705749 - DNA, 25 bp, Homo sapien
gcacatcgttcattttacaaacact

SEQ ID NO: 3705750 - DNA, 25 bp, Homo sapien
tttcatggggttgcacatcgttcat

SEQ ID NO: 3705751 - DNA, 25 bp, Homo sapien
cagaataagtagcagtttgccctaa

SEQ ID NO: 3705752 - DNA, 25 bp, Homo sapien
cagctctgggtggagtatagctact

SEQ ID NO: 3705753 - DNA, 25 bp, Homo sapien
gctctgggtggagtatagctacttg

SEQ ID NO: 3705754 - DNA, 25 bp, Homo sapien
tgggtggagtatagctacttgatgc

SEQ ID NO: 3705755 - DNA, 25 bp, Homo sapien
gagtatagctacttgatgcaagagc

SEQ ID NO: 3705756 - DNA, 25 bp, Homo sapien
tgttcagttgcagcagttgtggtgc

SEQ ID NO: 3705757 - DNA, 25 bp, Homo sapien
ggggtgggcctggagaatatgaatg

SEQ ID NO: 3705758 - DNA, 25 bp, Homo sapien
tgtgcactgaatttgggaaattaag

SEQ ID NO: 3705759 - DNA, 25 bp, Homo sapien
tgtgttcagttgcagcagttgtggt

SEQ ID NO: 3705760 - DNA, 25 bp, Homo sapien
ctctccagtcctctaggtcctccac

SEQ ID NO: 3705761 - DNA, 25 bp, Homo sapien
cactataggatagcctaggtgcaga

SEQ ID NO: 3705762 - DNA, 25 bp, Homo sapien
tctaggtcctccactataggatagc

SEQ ID NO: 3705763 - DNA, 25 bp, Homo sapien
gactccatataagggggcatcagag

SEQ ID NO: 3705764 - DNA, 25 bp, Homo sapien
ctctggcgtccggtggttcggccac

SEQ ID NO: 3705765 - DNA, 25 bp, Homo sapien
tatgctctgcgaggggagttggaga

SEQ ID NO: 3705766 - DNA, 25 bp, Homo sapien
ctgcgaggggagttggagagttggc

SEQ ID NO: 3705767 - DNA, 25 bp, Homo sapien
aacggcggtagataggtgctcccct

SEQ ID NO: 3705768 - DNA, 25 bp, Homo sapien
cgacccttctcttcgtagcccccag

SEQ ID NO: 3705769 - DNA, 25 bp, Homo sapien
aaggggactgagctgctccacatgc

SEQ ID NO: 3705770 - DNA, 25 bp, Homo sapien
cgcccagcggctggcgcagccaatc

SEQ ID NO: 3705771 - DNA, 25 bp, Homo sapien
ctggcgcagccaatcgcagagcggg

SEQ ID NO: 3705772 - DNA, 25 bp, Homo sapien
caaggtgaagccctgaggatccccc

SEQ ID NO: 3705773 - DNA, 25 bp, Homo sapien
cctccactttgatgcggataagcct

SEQ ID NO: 3705774 - DNA, 25 bp, Homo sapien
gaatgtgagcctgcaggccatcaag

SEQ ID NO: 3705775 - DNA, 25 bp, Homo sapien
ccactttgatgcggataagcctcag

SEQ ID NO: 3705776 - DNA, 25 bp, Homo sapien
taagatgagacatgatggtgtgatg

SEQ ID NO: 3705777 - DNA, 25 bp, Homo sapien
catgatggtgtgatgagtattccag

SEQ ID NO: 3705778 - DNA, 25 bp, Homo sapien
tgaaggtaacgaaagggataagatg

SEQ ID NO: 3705779 - DNA, 25 bp, Homo sapien
tttggtaaatttgggctggcatgtg

SEQ ID NO: 3705780 - DNA, 25 bp, Homo sapien
ccatttgatgaggagtcactacagg

SEQ ID NO: 3705781 - DNA, 25 bp, Homo sapien
tttgccgaaaatactggcacattcc

SEQ ID NO: 3705782 - DNA, 25 bp, Homo sapien
tcatgttttgccgaaaatactggca

SEQ ID NO: 3705783 - DNA, 25 bp, Homo sapien
attcctccatttgatgaggagtcac

SEQ ID NO: 3705784 - DNA, 25 bp, Homo sapien
cattaagaatagaatacttggctgg

SEQ ID NO: 3705785 - DNA, 25 bp, Homo sapien
ttaaaatgtgaaggtttactagata

SEQ ID NO: 3705786 - DNA, 25 bp, Homo sapien
gtgcttcctccttattcccttcctc

SEQ ID NO: 3705787 - DNA, 25 bp, Homo sapien
tccaacactgatatgtactctgaca

SEQ ID NO: 3705788 - DNA, 25 bp, Homo sapien
gatggaaccaactcagaaatcaacc

SEQ ID NO: 3705789 - DNA, 25 bp, Homo sapien
tattccacttatgctagttcaccca

SEQ ID NO: 3705790 - DNA, 25 bp, Homo sapien
gataaagataaccaacccatgatgg

SEQ ID NO: 3705791 - DNA, 25 bp, Homo sapien
tgacgggttccctagtgatgaatgg

SEQ ID NO: 3705792 - DNA, 25 bp, Homo sapien
cagtctagcatcagaaggagtggct

SEQ ID NO: 3705793 - DNA, 25 bp, Homo sapien
tacagagataggaacagtgcagcag

SEQ ID NO: 3705794 - DNA, 25 bp, Homo sapien
ggtcaggaccgagtttcctctcaca

SEQ ID NO: 3705795 - DNA, 25 bp, Homo sapien
tcagcactcacatagggtcaggacc

SEQ ID NO: 3705796 - DNA, 25 bp, Homo sapien
ccttggatgtggacattagagatca

SEQ ID NO: 3705797 - DNA, 25 bp, Homo sapien
tccctaatggaatgctctgtcctgc

SEQ ID NO: 3705798 - DNA, 25 bp, Homo sapien
ccaagtacacgttatagcagaagtg

SEQ ID NO: 3705799 - DNA, 25 bp, Homo sapien
tcgagctttatactttatggtgtag

SEQ ID NO: 3705800 - DNA, 25 bp, Homo sapien
tttggatgcatgacttttcactaga

SEQ ID NO: 3705801 - DNA, 25 bp, Homo sapien
catttaggtgctttggatgcatgac

SEQ ID NO: 3705802 - DNA, 25 bp, Homo sapien
gaatgccttttacacgtagtcccta

SEQ ID NO: 3705803 - DNA, 25 bp, Homo sapien
caaaaggttggacacgcctgcaata

SEQ ID NO: 3705804 - DNA, 25 bp, Homo sapien
tgcctcagaatctcttacaagactt

SEQ ID NO: 3705805 - DNA, 25 bp, Homo sapien
tcttacaagacttcagtcaaggtgt

SEQ ID NO: 3705806 - DNA, 25 bp, Homo sapien
gaaggatttgcttctgcactcactg

SEQ ID NO: 3705807 - DNA, 25 bp, Homo sapien
cttcagtcaaggtgtttgccagggc

SEQ ID NO: 3705808 - DNA, 25 bp, Homo sapien
gctagaaacacgctgagctcatgga

SEQ ID NO: 3705809 - DNA, 25 bp, Homo sapien
tcctaaagcccagctgaggtatcat

SEQ ID NO: 3705810 - DNA, 25 bp, Homo sapien
gcaaccccgaagcaggcagtctgtt

SEQ ID NO: 3705811 - DNA, 25 bp, Homo sapien
caatgtgagttttaggcaaccccga

SEQ ID NO: 3705812 - DNA, 25 bp, Homo sapien
taagtaagttggtgcacctggcatc

SEQ ID NO: 3705813 - DNA, 25 bp, Homo sapien
aactcttcagccagcggaatgcagg

SEQ ID NO: 3705814 - DNA, 25 bp, Homo sapien
gcagtacgctaccatgaaaccagtt

SEQ ID NO: 3705815 - DNA, 25 bp, Homo sapien
gacaagtttgggacactcagagtta

SEQ ID NO: 3705816 - DNA, 25 bp, Homo sapien
caagattttatcacgtgttggcgga

SEQ ID NO: 3705817 - DNA, 25 bp, Homo sapien
cctctgtggaggaagctattgtgca

SEQ ID NO: 3705818 - DNA, 25 bp, Homo sapien
ttgaactcgaaccactaagctccag

SEQ ID NO: 3705819 - DNA, 25 bp, Homo sapien
aactctacgcagtacatagtatggg

SEQ ID NO: 3705820 - DNA, 25 bp, Homo sapien
cgcacaccggaatcaacaagtaaaa

SEQ ID NO: 3705821 - DNA, 25 bp, Homo sapien
ttttgctggccaatttggaaaacta

SEQ ID NO: 3705822 - DNA, 25 bp, Homo sapien
caacaagtaaaaattgaatgtcatt

SEQ ID NO: 3705823 - DNA, 25 bp, Homo sapien
aagaggaaaacgcacaccggaatca

SEQ ID NO: 3705824 - DNA, 25 bp, Homo sapien
aatgcagtaacatcagggttcccta

SEQ ID NO: 3705825 - DNA, 25 bp, Homo sapien
gaagaatcttacctgatcagtccag

SEQ ID NO: 3705826 - DNA, 25 bp, Homo sapien
cccagatccaaaatagtagtagcag

SEQ ID NO: 3705827 - DNA, 25 bp, Homo sapien
gaagttgggagcactgtactgaaca

SEQ ID NO: 3705828 - DNA, 25 bp, Homo sapien
gaagcaaaataacaccagggcagta

SEQ ID NO: 3705829 - DNA, 25 bp, Homo sapien
agtatagttctaatacttaagaagc

SEQ ID NO: 3705830 - DNA, 25 bp, Homo sapien
aaggaaaccctcatatgttgttgat

SEQ ID NO: 3705831 - DNA, 25 bp, Homo sapien
tagaaaacaacaatgtgtcagcttc

SEQ ID NO: 3705832 - DNA, 25 bp, Homo sapien
cttggaaaatggtgtaaatggttga

SEQ ID NO: 3705833 - DNA, 25 bp, Homo sapien
taaatggttgactggagatgaaggt

SEQ ID NO: 3705834 - DNA, 25 bp, Homo sapien
gtaacaagaagtactacagatgact

SEQ ID NO: 3705835 - DNA, 25 bp, Homo sapien
gtagtaacaagaagtactacagatg

SEQ ID NO: 3705836 - DNA, 25 bp, Homo sapien
agccaatgtgtgtggagatcacatg

SEQ ID NO: 3705837 - DNA, 25 bp, Homo sapien
caagccaatgtgtgtggagatcaca

SEQ ID NO: 3705838 - DNA, 25 bp, Homo sapien
aagggaaggcaagccaatgtgtgtg

SEQ ID NO: 3705839 - DNA, 25 bp, Homo sapien
aagccaatgtgtgtggagatcacat

SEQ ID NO: 3705840 - DNA, 25 bp, Homo sapien
cctgcaaactagaagatggccttaa

SEQ ID NO: 3705841 - DNA, 25 bp, Homo sapien
gtttgtcctgtatacacccaagagg

SEQ ID NO: 3705842 - DNA, 25 bp, Homo sapien
tgtctgtctaccacaagtcctgcaa

SEQ ID NO: 3705843 - DNA, 25 bp, Homo sapien
cccaagaggtccaggatattattct

SEQ ID NO: 3705844 - DNA, 25 bp, Homo sapien
caagagataaggcaggtactgctaa

SEQ ID NO: 3705845 - DNA, 25 bp, Homo sapien
aatgaaaataggacagataggcagt

SEQ ID NO: 3705846 - DNA, 25 bp, Homo sapien
tcttacattaagcaaactactagca

SEQ ID NO: 3705847 - DNA, 25 bp, Homo sapien
gctaaatgataacttagatgcaggg

SEQ ID NO: 3705848 - DNA, 25 bp, Homo sapien
ttcagttttgttgtatgtagaccca

SEQ ID NO: 3705849 - DNA, 25 bp, Homo sapien
caatagcccatgtatgaatcactct

SEQ ID NO: 3705850 - DNA, 25 bp, Homo sapien
tcatgttgcctcaatagcccatgta

SEQ ID NO: 3705851 - DNA, 25 bp, Homo sapien
cactcaaattgaagcaaccattatg

SEQ ID NO: 3705852 - DNA, 25 bp, Homo sapien
ctttggtataatcttgacctggact

SEQ ID NO: 3705853 - DNA, 25 bp, Homo sapien
ggactaccagagctaacgccgacat

SEQ ID NO: 3705854 - DNA, 25 bp, Homo sapien
cctggactaccagagctaacgccga

SEQ ID NO: 3705855 - DNA, 25 bp, Homo sapien
attctgcaggaatttaagtcctgaa

SEQ ID NO: 3705856 - DNA, 25 bp, Homo sapien
ccgaggagtcctgtagacttgtggc

SEQ ID NO: 3705857 - DNA, 25 bp, Homo sapien
tcccggcggaaagctccgaggagtc

SEQ ID NO: 3705858 - DNA, 25 bp, Homo sapien
gaaaaccccgagaagcttgagacag

SEQ ID NO: 3705859 - DNA, 25 bp, Homo sapien
gatgcgcttcgctgttctctaggag

SEQ ID NO: 3705860 - DNA, 25 bp, Homo sapien
gaaggcggcgctgctatccatgcag

SEQ ID NO: 3705861 - DNA, 25 bp, Homo sapien
tcctcgtagcgagtcttggtgccga

SEQ ID NO: 3705862 - DNA, 25 bp, Homo sapien
tagttctcacggctgaaaagggccg

SEQ ID NO: 3705863 - DNA, 25 bp, Homo sapien
tccatgcagcggtgcttggaactgg

SEQ ID NO: 3705864 - DNA, 25 bp, Homo sapien
cttctcacagtgatcaaaaaatctc

SEQ ID NO: 3705865 - DNA, 25 bp, Homo sapien
ttactggcacttgcaaagtagctgc

SEQ ID NO: 3705866 - DNA, 25 bp, Homo sapien
gaaggcttccacgtgataaagagct

SEQ ID NO: 3705867 - DNA, 25 bp, Homo sapien
cattaactgttggaggtccaaactc

SEQ ID NO: 3705868 - DNA, 25 bp, Homo sapien
tcaaataaaagacaacagacatatt

SEQ ID NO: 3705869 - DNA, 25 bp, Homo sapien
taagttcaaataaaagacaacagac

SEQ ID NO: 3705870 - DNA, 25 bp, Homo sapien
gttcaaataaaagacaacagacata

SEQ ID NO: 3705871 - DNA, 25 bp, Homo sapien
aagttcaaataaaagacaacagaca

SEQ ID NO: 3705872 - DNA, 25 bp, Homo sapien
agatttaacacctttaattgccagg

SEQ ID NO: 3705873 - DNA, 25 bp, Homo sapien
ttgcatcatctatgtcaaaaacatc

SEQ ID NO: 3705874 - DNA, 25 bp, Homo sapien
aaacatcacaccaaggagatttaac

SEQ ID NO: 3705875 - DNA, 25 bp, Homo sapien
ctttgcatcatctatgtcaaaaaca

SEQ ID NO: 3705876 - DNA, 25 bp, Homo sapien
caagtcacagtcatttaaattagaa

SEQ ID NO: 3705877 - DNA, 25 bp, Homo sapien
ggtacatgttttacggaatcctgag

SEQ ID NO: 3705878 - DNA, 25 bp, Homo sapien
aattcccaatccatttgagaagagg

SEQ ID NO: 3705879 - DNA, 25 bp, Homo sapien
agaagttaccgcttgcccctttgct

SEQ ID NO: 3705880 - DNA, 25 bp, Homo sapien
taatgttgaacaagagctagatacc

SEQ ID NO: 3705881 - DNA, 25 bp, Homo sapien
caagattccctgatttaataatgat

SEQ ID NO: 3705882 - DNA, 25 bp, Homo sapien
taccattctgcacaaaatatagtat

SEQ ID NO: 3705883 - DNA, 25 bp, Homo sapien
cagcatttaagagttggtccctaag

SEQ ID NO: 3705884 - DNA, 25 bp, Homo sapien
tgtttaattaccattctgcacaaaa

SEQ ID NO: 3705885 - DNA, 25 bp, Homo sapien
tgttaatagtatacccatatcctct

SEQ ID NO: 3705886 - DNA, 25 bp, Homo sapien
caaggtgcagctggatcgactgtta

SEQ ID NO: 3705887 - DNA, 25 bp, Homo sapien
ctgaaacaaggtgcagctggatcga

SEQ ID NO: 3705888 - DNA, 25 bp, Homo sapien
gcagctggatcgactgttaatagta

SEQ ID NO: 3705889 - DNA, 25 bp, Homo sapien
tcaactgctttgtccaagtgctgaa

SEQ ID NO: 3705890 - DNA, 25 bp, Homo sapien
gctttgtccaagtgctgaaagatat

SEQ ID NO: 3705891 - DNA, 25 bp, Homo sapien
ttcaactgctttgtccaagtgctga

SEQ ID NO: 3705892 - DNA, 25 bp, Homo sapien
ctttgtccaagtgctgaaagatatc

SEQ ID NO: 3705893 - DNA, 25 bp, Homo sapien
cacacctagctgattgtttcttaaa

SEQ ID NO: 3705894 - DNA, 25 bp, Homo sapien
cgcaaaggcgaagaccacatttctc

SEQ ID NO: 3705895 - DNA, 25 bp, Homo sapien
taaggcatcaattcttttccaacgc

SEQ ID NO: 3705896 - DNA, 25 bp, Homo sapien
ctgattgtttcttaaataaggcatc

SEQ ID NO: 3705897 - DNA, 25 bp, Homo sapien
gtagcatccaacctcaagcactaga

SEQ ID NO: 3705898 - DNA, 25 bp, Homo sapien
gattttctgggaggatagaagcagc

SEQ ID NO: 3705899 - DNA, 25 bp, Homo sapien
cacagcaagcagatagcaaatccaa

SEQ ID NO: 3705900 - DNA, 25 bp, Homo sapien
gaagcagcagttctagaccttcctg

SEQ ID NO: 3705901 - DNA, 25 bp, Homo sapien
gcagtggaagaagagtctctgcatg

SEQ ID NO: 3705902 - DNA, 25 bp, Homo sapien
catgaccaaactggaggatgactgg

SEQ ID NO: 3705903 - DNA, 25 bp, Homo sapien
tctctgcatgaccaaactggaggat

SEQ ID NO: 3705904 - DNA, 25 bp, Homo sapien
tggaagaagagtctctgcatgacca

SEQ ID NO: 3705905 - DNA, 25 bp, Homo sapien
ggttccttgtctttgaagtagccca

SEQ ID NO: 3705906 - DNA, 25 bp, Homo sapien
gttccttgtctttgaagtagcccat

SEQ ID NO: 3705907 - DNA, 25 bp, Homo sapien
taaggtacaatgagaccacttcgga

SEQ ID NO: 3705908 - DNA, 25 bp, Homo sapien
tatcaggttcgaggcataaggtaca

SEQ ID NO: 3705909 - DNA, 25 bp, Homo sapien
tcagatgtactgttagcccttgcta

SEQ ID NO: 3705910 - DNA, 25 bp, Homo sapien
ggagtcttagcattttcacagtggt

SEQ ID NO: 3705911 - DNA, 25 bp, Homo sapien
gaattgcctacctattacaagcatg

SEQ ID NO: 3705912 - DNA, 25 bp, Homo sapien
tctgtaaacatttgcagggccagct

SEQ ID NO: 3705913 - DNA, 25 bp, Homo sapien
tactttccgacttgcttcagtgaag

SEQ ID NO: 3705914 - DNA, 25 bp, Homo sapien
aagaaaatgctagagctgtcctacc

SEQ ID NO: 3705915 - DNA, 25 bp, Homo sapien
tttcacggcatttgacagaactcag

SEQ ID NO: 3705916 - DNA, 25 bp, Homo sapien
tataaaaatcgaagccaagtgacag

SEQ ID NO: 3705917 - DNA, 25 bp, Homo sapien
gatggtcttttgagacttcctagaa

SEQ ID NO: 3705918 - DNA, 25 bp, Homo sapien
ctgacttgttgctaattgtccaaac

SEQ ID NO: 3705919 - DNA, 25 bp, Homo sapien
tattgattgtattttgacatgggga

SEQ ID NO: 3705920 - DNA, 25 bp, Homo sapien
tgattgtattttgacatggggaaga

SEQ ID NO: 3705921 - DNA, 25 bp, Homo sapien
ttgattgtattttgacatggggaag

SEQ ID NO: 3705922 - DNA, 25 bp, Homo sapien
gattgtattttgacatggggaagag

SEQ ID NO: 3705923 - DNA, 25 bp, Homo sapien
actttccaactgtcacccattggga

SEQ ID NO: 3705924 - DNA, 25 bp, Homo sapien
tccttctttgcataatccgtatcct

SEQ ID NO: 3705925 - DNA, 25 bp, Homo sapien
tttgcctctagttactttccaactg

SEQ ID NO: 3705926 - DNA, 25 bp, Homo sapien
cataatccgtatcctttgcctctag

SEQ ID NO: 3705927 - DNA, 25 bp, Homo sapien
gacgtcgtctggactagcgtccaat

SEQ ID NO: 3705928 - DNA, 25 bp, Homo sapien
gccagtgaggcattggcacccttta

SEQ ID NO: 3705929 - DNA, 25 bp, Homo sapien
agtcatgtccccgactgccagtgag

SEQ ID NO: 3705930 - DNA, 25 bp, Homo sapien
ttcggctaatactgcgacgtcgtct

SEQ ID NO: 3705931 - DNA, 25 bp, Homo sapien
gaagcaatccaaactgtttgtcagg

SEQ ID NO: 3705932 - DNA, 25 bp, Homo sapien
ggaaaatcacattcacgctgggctg

SEQ ID NO: 3705933 - DNA, 25 bp, Homo sapien
tagagtctggtgaacagagcctgag

SEQ ID NO: 3705934 - DNA, 25 bp, Homo sapien
tgtactggagaagacaaccttgtct

SEQ ID NO: 3705935 - DNA, 25 bp, Homo sapien
ggaaatctgtattagcctttatttg

SEQ ID NO: 3705936 - DNA, 25 bp, Homo sapien
tgactcagagtctcagaggcaagac

SEQ ID NO: 3705937 - DNA, 25 bp, Homo sapien
aaaagaggtgattcttaagggcatc

SEQ ID NO: 3705938 - DNA, 25 bp, Homo sapien
gggcatctaggttcgcagactactg

SEQ ID NO: 3705939 - DNA, 25 bp, Homo sapien
ccaatgcacccagtgttgcggacat

SEQ ID NO: 3705940 - DNA, 25 bp, Homo sapien
cactctaccttgatccacactgttt

SEQ ID NO: 3705941 - DNA, 25 bp, Homo sapien
tgcggacatggccactgttcaccaa

SEQ ID NO: 3705942 - DNA, 25 bp, Homo sapien
gggaccctgcacgagatccactcta

SEQ ID NO: 3705943 - DNA, 25 bp, Homo sapien
gctgctatgatgaggttcatacctg

SEQ ID NO: 3705944 - DNA, 25 bp, Homo sapien
gatggctgctatgatgaggttcata

SEQ ID NO: 3705945 - DNA, 25 bp, Homo sapien
gctatgatgaggttcatacctggtg

SEQ ID NO: 3705946 - DNA, 25 bp, Homo sapien
gtgatggctgctatgatgaggttca

SEQ ID NO: 3705947 - DNA, 25 bp, Homo sapien
taatgacagtgcctggattggaact

SEQ ID NO: 3705948 - DNA, 25 bp, Homo sapien
ggtcatgttcgtgtatattaatcca

SEQ ID NO: 3705949 - DNA, 25 bp, Homo sapien
tgtatattaatccaacagaaattct

SEQ ID NO: 3705950 - DNA, 25 bp, Homo sapien
ggaactgagagttacaatggtcatg

SEQ ID NO: 3705951 - DNA, 25 bp, Homo sapien
cttccgtctgtcaaggcagaagatt

SEQ ID NO: 3705952 - DNA, 25 bp, Homo sapien
tcctcttccgtctgtcaaggcagaa

SEQ ID NO: 3705953 - DNA, 25 bp, Homo sapien
cctcttccgtctgtcaaggcagaag

SEQ ID NO: 3705954 - DNA, 25 bp, Homo sapien
tcttccgtctgtcaaggcagaagat

SEQ ID NO: 3705955 - DNA, 25 bp, Homo sapien
aggcacagttcatgcaatgaatagg

SEQ ID NO: 3705956 - DNA, 25 bp, Homo sapien
tcaggcacagttcatgcaatgaata

SEQ ID NO: 3705957 - DNA, 25 bp, Homo sapien
agttcatgcaatgaataggctgcac

SEQ ID NO: 3705958 - DNA, 25 bp, Homo sapien
ttcatgcaatgaataggctgcacgt

SEQ ID NO: 3705959 - DNA, 25 bp, Homo sapien
gggacgcacataggcatcaaagacg

SEQ ID NO: 3705960 - DNA, 25 bp, Homo sapien
tgtggcctccactatgttttgaatg

SEQ ID NO: 3705961 - DNA, 25 bp, Homo sapien
tggcctccactatgttttgaatgac

SEQ ID NO: 3705962 - DNA, 25 bp, Homo sapien
tgctgtggcctccactatgttttga

SEQ ID NO: 3705963 - DNA, 25 bp, Homo sapien
ttgcagcataaaaaactggtgcatc

SEQ ID NO: 3705964 - DNA, 25 bp, Homo sapien
tttgcagaagtggtgataccaacaa

SEQ ID NO: 3705965 - DNA, 25 bp, Homo sapien
gagtaaaccttctagaataaacaga

SEQ ID NO: 3705966 - DNA, 25 bp, Homo sapien
cccatatttagtgtgtgagtaaacc

SEQ ID NO: 3705967 - DNA, 25 bp, Homo sapien
ccagacagacacttgatctgagtat

SEQ ID NO: 3705968 - DNA, 25 bp, Homo sapien
cagacagacacttgatctgagtatt

SEQ ID NO: 3705969 - DNA, 25 bp, Homo sapien
agacagacacttgatctgagtattc

SEQ ID NO: 3705970 - DNA, 25 bp, Homo sapien
gaagcccagcaacttgtttcagtcc

SEQ ID NO: 3705971 - DNA, 25 bp, Homo sapien
tatcgtcaggttacaggtatgggcc

SEQ ID NO: 3705972 - DNA, 25 bp, Homo sapien
tgttcactatgcatcgtgctgaggg

SEQ ID NO: 3705973 - DNA, 25 bp, Homo sapien
caacgacaagcaagtggcaatggcc

SEQ ID NO: 3705974 - DNA, 25 bp, Homo sapien
gaaggaggtataaaaaggctccgca

SEQ ID NO: 3705975 - DNA, 25 bp, Homo sapien
aaggctccgcagacacgtcgcactt

SEQ ID NO: 3705976 - DNA, 25 bp, Homo sapien
ggtcccgggagcagagaccgaagga

SEQ ID NO: 3705977 - DNA, 25 bp, Homo sapien
agcggctgccggactcccgggaagg

SEQ ID NO: 3705978 - DNA, 25 bp, Homo sapien
tcttttgcttcttgatccccgacat

SEQ ID NO: 3705979 - DNA, 25 bp, Homo sapien
gtcttttgcttcttgatccccgaca

SEQ ID NO: 3705980 - DNA, 25 bp, Homo sapien
cgtcttttgcttcttgatccccgac

SEQ ID NO: 3705981 - DNA, 25 bp, Homo sapien
agaacgggagtcagctcgatctgct

SEQ ID NO: 3705982 - DNA, 25 bp, Homo sapien
aatcccgccagtgtagaaatgcaat

SEQ ID NO: 3705983 - DNA, 25 bp, Homo sapien
ctagagggctaaatcccgccagtgt

SEQ ID NO: 3705984 - DNA, 25 bp, Homo sapien
ttcccatagacaaaaccccagcgac

SEQ ID NO: 3705985 - DNA, 25 bp, Homo sapien
tgaaagtccgtcattaaagcccact

SEQ ID NO: 3705986 - DNA, 25 bp, Homo sapien
caatcaggatgacatgtaggcagac

SEQ ID NO: 3705987 - DNA, 25 bp, Homo sapien
tggcaaactcaagtggtctctactg

SEQ ID NO: 3705988 - DNA, 25 bp, Homo sapien
gtttcacagcacacagttaacttgg

SEQ ID NO: 3705989 - DNA, 25 bp, Homo sapien
tggtgcagtccaaataagaaaccct

SEQ ID NO: 3705990 - DNA, 25 bp, Homo sapien
tctatcaaatgtgacaaggaaatta

SEQ ID NO: 3705991 - DNA, 25 bp, Homo sapien
tatcaaatgtgacaaggaaattatt

SEQ ID NO: 3705992 - DNA, 25 bp, Homo sapien
ctatcaaatgtgacaaggaaattat

SEQ ID NO: 3705993 - DNA, 25 bp, Homo sapien
tcaaatgtgacaaggaaattatttt

SEQ ID NO: 3705994 - DNA, 25 bp, Homo sapien
tccaatgtgggtccctaatactcat

SEQ ID NO: 3705995 - DNA, 25 bp, Homo sapien
ttggagggttcttccaatgtgggtc

SEQ ID NO: 3705996 - DNA, 25 bp, Homo sapien
tcttccaatgtgggtccctaatact

SEQ ID NO: 3705997 - DNA, 25 bp, Homo sapien
tggagggttcttccaatgtgggtcc

SEQ ID NO: 3705998 - DNA, 25 bp, Homo sapien
ggtacttacatatttctcccagaaa

SEQ ID NO: 3705999 - DNA, 25 bp, Homo sapien
gaaacatttaagtgggcaggatttc

SEQ ID NO: 3706000 - DNA, 25 bp, Homo sapien
catgatcagataaacgaagtcaggc

SEQ ID NO: 3706001 - DNA, 25 bp, Homo sapien
actgcaggcctggaaccgctgggct

SEQ ID NO: 3706002 - DNA, 25 bp, Homo sapien
ggcctctagtatgtatcattctact

SEQ ID NO: 3706003 - DNA, 25 bp, Homo sapien
tctgcatatgagtgaaaacacgcaa

SEQ ID NO: 3706004 - DNA, 25 bp, Homo sapien
tttgaatagatacccgtagtggaac

SEQ ID NO: 3706005 - DNA, 25 bp, Homo sapien
actgatggactgtatcatagttctg

SEQ ID NO: 3706006 - DNA, 25 bp, Homo sapien
tatgagttacaaattatcccctagg

SEQ ID NO: 3706007 - DNA, 25 bp, Homo sapien
tgctctgctgtagaacgatagaact

SEQ ID NO: 3706008 - DNA, 25 bp, Homo sapien
tatgtgttgagaacaattccagtcc

SEQ ID NO: 3706009 - DNA, 25 bp, Homo sapien
catacttacagggtgcatgtggtag

SEQ ID NO: 3706010 - DNA, 25 bp, Homo sapien
aactgcgtttgtgcctgcaagactg

SEQ ID NO: 3706011 - DNA, 25 bp, Homo sapien
gagtgggatgttaccctttgctcct

SEQ ID NO: 3706012 - DNA, 25 bp, Homo sapien
tatatagtgccaggaaatcctctcg

SEQ ID NO: 3706013 - DNA, 25 bp, Homo sapien
gagaacaactcccattgatggaagg

SEQ ID NO: 3706014 - DNA, 25 bp, Homo sapien
taggaaccctgcacgtgaatgcaaa

SEQ ID NO: 3706015 - DNA, 25 bp, Homo sapien
gcaggatcatcatttctaggaaccc

SEQ ID NO: 3706016 - DNA, 25 bp, Homo sapien
gagctattagtgagtctgatcccct

SEQ ID NO: 3706017 - DNA, 25 bp, Homo sapien
tattcccttgcacacacagaaggtc

SEQ ID NO: 3706018 - DNA, 25 bp, Homo sapien
aatggcatggcctaatcatattgtc

SEQ ID NO: 3706019 - DNA, 25 bp, Homo sapien
gaataatggcatggcctaatcatat

SEQ ID NO: 3706020 - DNA, 25 bp, Homo sapien
aaagaataatggcatggcctaatca

SEQ ID NO: 3706021 - DNA, 25 bp, Homo sapien
catggcctaatcatattgtctaaca

SEQ ID NO: 3706022 - DNA, 25 bp, Homo sapien
tagtcccaggggtagagatgagtcc

SEQ ID NO: 3706023 - DNA, 25 bp, Homo sapien
agtccctgtgtagcctggtgacctg

SEQ ID NO: 3706024 - DNA, 25 bp, Homo sapien
gcctggtgacctggatttttccttc

SEQ ID NO: 3706025 - DNA, 25 bp, Homo sapien
tgtgtagcctggtgacctggatttt

SEQ ID NO: 3706026 - DNA, 25 bp, Homo sapien
tgcttagagacaactagtggaactg

SEQ ID NO: 3706027 - DNA, 25 bp, Homo sapien
gaaatttccatagttctgccggcct

SEQ ID NO: 3706028 - DNA, 25 bp, Homo sapien
tctgaataagaaggactgtttgggt

SEQ ID NO: 3706029 - DNA, 25 bp, Homo sapien
taccatcctgagatttgacgaattt

SEQ ID NO: 3706030 - DNA, 25 bp, Homo sapien
cttttttggactctcattcatactc

SEQ ID NO: 3706031 - DNA, 25 bp, Homo sapien
tcatactctttaccccttgttctat

SEQ ID NO: 3706032 - DNA, 25 bp, Homo sapien
taagctatattgtacaccttacacc

SEQ ID NO: 3706033 - DNA, 25 bp, Homo sapien
gaacaatggtatttcaatgtgattt

SEQ ID NO: 3706034 - DNA, 25 bp, Homo sapien
agaatattacaccaatctatactcc

SEQ ID NO: 3706035 - DNA, 25 bp, Homo sapien
tgtgcatactgattccaccagtggc

SEQ ID NO: 3706036 - DNA, 25 bp, Homo sapien
aaaaataatcttggctgagtcacag

SEQ ID NO: 3706037 - DNA, 25 bp, Homo sapien
gatgggaacaccagagaggctgctt

SEQ ID NO: 3706038 - DNA, 25 bp, Homo sapien
tcaaaggtagcgagccagatgctga

SEQ ID NO: 3706039 - DNA, 25 bp, Homo sapien
tacaatgcaggatcgagtgaaccca

SEQ ID NO: 3706040 - DNA, 25 bp, Homo sapien
ggccaggacgcacactagggtgact

SEQ ID NO: 3706041 - DNA, 25 bp, Homo sapien
tcgttgccccttgctctgagacagt

SEQ ID NO: 3706042 - DNA, 25 bp, Homo sapien
taggagttgccaatcggccaggacg

SEQ ID NO: 3706043 - DNA, 25 bp, Homo sapien
aatggcaacctctcagagaaagctg

SEQ ID NO: 3706044 - DNA, 25 bp, Homo sapien
ttaaggttcaaagggatcacagatg

SEQ ID NO: 3706045 - DNA, 25 bp, Homo sapien
caccgctcccagacaatggtttgat

SEQ ID NO: 3706046 - DNA, 25 bp, Homo sapien
cacccactggacatttaaggttcaa

SEQ ID NO: 3706047 - DNA, 25 bp, Homo sapien
cagagtgagttaacattaatctcgt

SEQ ID NO: 3706048 - DNA, 25 bp, Homo sapien
taggtaagaaaacagcttacagagt

SEQ ID NO: 3706049 - DNA, 25 bp, Homo sapien
ggcacatccatatgattaataggta

SEQ ID NO: 3706050 - DNA, 25 bp, Homo sapien
atcattatccaaggatgttcatagc

SEQ ID NO: 3706051 - DNA, 25 bp, Homo sapien
atgtagagcaactgccacattacct

SEQ ID NO: 3706052 - DNA, 25 bp, Homo sapien
ttgtaatgtagagcaactgccacat

SEQ ID NO: 3706053 - DNA, 25 bp, Homo sapien
ttctctcatggaattgaaattatgc

SEQ ID NO: 3706054 - DNA, 25 bp, Homo sapien
tgttgcgaacataaaatgactcact

SEQ ID NO: 3706055 - DNA, 25 bp, Homo sapien
tgtccattctaatatagtttttttc

SEQ ID NO: 3706056 - DNA, 25 bp, Homo sapien
gtccattctaatatagtttttttca

SEQ ID NO: 3706057 - DNA, 25 bp, Homo sapien
tccattctaatatagtttttttcat

SEQ ID NO: 3706058 - DNA, 25 bp, Homo sapien
ctttgtccattctaatatagttttt

SEQ ID NO: 3706059 - DNA, 25 bp, Homo sapien
gcctgatagactacattggtggatt

SEQ ID NO: 3706060 - DNA, 25 bp, Homo sapien
ctgctcacatggtgggcctgataga

SEQ ID NO: 3706061 - DNA, 25 bp, Homo sapien
cacatggtgggcctgatagactaca

SEQ ID NO: 3706062 - DNA, 25 bp, Homo sapien
gactacattggtggatttctgctgg

SEQ ID NO: 3706063 - DNA, 25 bp, Homo sapien
tagccacacggtacatcctcggaac

SEQ ID NO: 3706064 - DNA, 25 bp, Homo sapien
ctgttagccacacggtacatcctcg

SEQ ID NO: 3706065 - DNA, 25 bp, Homo sapien
ccttgttccaaccacttgccctctc

SEQ ID NO: 3706066 - DNA, 25 bp, Homo sapien
cccttgttccaaccacttgccctct

SEQ ID NO: 3706067 - DNA, 25 bp, Homo sapien
ttaaggccatgacggacattgtccc

SEQ ID NO: 3706068 - DNA, 25 bp, Homo sapien
tcagcaaacagcttagccacctcag

SEQ ID NO: 3706069 - DNA, 25 bp, Homo sapien
gccacctcagcaatccggcggatat

SEQ ID NO: 3706070 - DNA, 25 bp, Homo sapien
tccagggagtaacaagggatggcat

SEQ ID NO: 3706071 - DNA, 25 bp, Homo sapien
gagaaataaagctggtaatgcagac

SEQ ID NO: 3706072 - DNA, 25 bp, Homo sapien
tggagaaataaagctggtaatgcag

SEQ ID NO: 3706073 - DNA, 25 bp, Homo sapien
tttgcgaatggagaaataaagctgg

SEQ ID NO: 3706074 - DNA, 25 bp, Homo sapien
aatggagaaataaagctggtaatgc

SEQ ID NO: 3706075 - DNA, 25 bp, Homo sapien
gtattttgcgggcattctcacgatc

SEQ ID NO: 3706076 - DNA, 25 bp, Homo sapien
ccagctctggcccttttatagaggc

SEQ ID NO: 3706077 - DNA, 25 bp, Homo sapien
gctctggcccttttatagaggcctt

SEQ ID NO: 3706078 - DNA, 25 bp, Homo sapien
gctttcacaaatatttagaggtgca

SEQ ID NO: 3706079 - DNA, 25 bp, Homo sapien
aattggttttaagcacacgctcagg

SEQ ID NO: 3706080 - DNA, 25 bp, Homo sapien
cagaagttccactacctggtggaca

SEQ ID NO: 3706081 - DNA, 25 bp, Homo sapien
ctgtggacaaattggttttaagcac

SEQ ID NO: 3706082 - DNA, 25 bp, Homo sapien
ccactacctggtggacacagtcact

SEQ ID NO: 3706083 - DNA, 25 bp, Homo sapien
aagggagagtttcagcctcagctcg

SEQ ID NO: 3706084 - DNA, 25 bp, Homo sapien
tagtaattgataatgaagggagagt

SEQ ID NO: 3706085 - DNA, 25 bp, Homo sapien
ttttccggcacaaagagttcgtgga

SEQ ID NO: 3706086 - DNA, 25 bp, Homo sapien
tctttgattatagtatagggtacaa

SEQ ID NO: 3706087 - DNA, 25 bp, Homo sapien
gcataacctgtaagtactccttctc

SEQ ID NO: 3706088 - DNA, 25 bp, Homo sapien
catctagcagggtgtcaaagtgcat

SEQ ID NO: 3706089 - DNA, 25 bp, Homo sapien
tctcccgcatgaaacctttgagggg

SEQ ID NO: 3706090 - DNA, 25 bp, Homo sapien
gagtggcccagccttcgctcaaaac

SEQ ID NO: 3706091 - DNA, 25 bp, Homo sapien
gctaccttctgaatatcagcaccag

SEQ ID NO: 3706092 - DNA, 25 bp, Homo sapien
ctagcaggtggcaatggtacttctg

SEQ ID NO: 3706093 - DNA, 25 bp, Homo sapien
gaaacagacctgtctttctcttggc

SEQ ID NO: 3706094 - DNA, 25 bp, Homo sapien
gtacttctgcgtgctaccttctgaa

SEQ ID NO: 3706095 - DNA, 25 bp, Homo sapien
tctttatgagaggaacacttgtcca

SEQ ID NO: 3706096 - DNA, 25 bp, Homo sapien
cttgtccaaggtcaacagcaccttg

SEQ ID NO: 3706097 - DNA, 25 bp, Homo sapien
accttgttgtctgtaatgaggcccc

SEQ ID NO: 3706098 - DNA, 25 bp, Homo sapien
aatgtagttcacttgtcttttggcc

SEQ ID NO: 3706099 - DNA, 25 bp, Homo sapien
aaaaagaaagtttcggctgcgtgca

SEQ ID NO: 3706100 - DNA, 25 bp, Homo sapien
tgcgtgcagcggctcatggctctaa

SEQ ID NO: 3706101 - DNA, 25 bp, Homo sapien
tccaaacgccatcaggtgaggcact

SEQ ID NO: 3706102 - DNA, 25 bp, Homo sapien
ggagcctctgttgctgcgtttcaaa

SEQ ID NO: 3706103 - DNA, 25 bp, Homo sapien
tcctgttgtttggactccagtctaa

SEQ ID NO: 3706104 - DNA, 25 bp, Homo sapien
tactatagctggttggatcatgaac

SEQ ID NO: 3706105 - DNA, 25 bp, Homo sapien
tgaggaccaacagtcattggaagag

SEQ ID NO: 3706106 - DNA, 25 bp, Homo sapien
tgaactaatagcgattccaactggt

SEQ ID NO: 3706107 - DNA, 25 bp, Homo sapien
ttctttaaccacagtaagtccaaga

SEQ ID NO: 3706108 - DNA, 25 bp, Homo sapien
caagagatagcttattgttcaatgg

SEQ ID NO: 3706109 - DNA, 25 bp, Homo sapien
cttcatttggctctggtgggcactg

SEQ ID NO: 3706110 - DNA, 25 bp, Homo sapien
gccttatagatctgcttcatggttg

SEQ ID NO: 3706111 - DNA, 25 bp, Homo sapien
gtagtttccctatcatctttatcaa

SEQ ID NO: 3706112 - DNA, 25 bp, Homo sapien
tatataaacgtatccaactattact

SEQ ID NO: 3706113 - DNA, 25 bp, Homo sapien
cgtatccaactattactaagatgta

SEQ ID NO: 3706114 - DNA, 25 bp, Homo sapien
tatcaacctttctaatatataaacg

SEQ ID NO: 3706115 - DNA, 25 bp, Homo sapien
tcaccggaaatagacagcaactgcc

SEQ ID NO: 3706116 - DNA, 25 bp, Homo sapien
aacgttctcgggcaattagagcagc

SEQ ID NO: 3706117 - DNA, 25 bp, Homo sapien
caagggatgtttcactgttgcagcc

SEQ ID NO: 3706118 - DNA, 25 bp, Homo sapien
tgctgaaagaacctagcgctgcctg

SEQ ID NO: 3706119 - DNA, 25 bp, Homo sapien
aggtggcctccataagtgatctaac

SEQ ID NO: 3706120 - DNA, 25 bp, Homo sapien
gtgatctaactttggaaacgcctct

SEQ ID NO: 3706121 - DNA, 25 bp, Homo sapien
tgaatcaaatgtgcacaatgcccct

SEQ ID NO: 3706122 - DNA, 25 bp, Homo sapien
ccaagtagttgtgttagctgcacca

SEQ ID NO: 3706123 - DNA, 25 bp, Homo sapien
tcgtaagatagctaccctccgtcca

SEQ ID NO: 3706124 - DNA, 25 bp, Homo sapien
cagccgtgtcttatcctctgcagag

SEQ ID NO: 3706125 - DNA, 25 bp, Homo sapien
tgtgttcatagaattcagcgtctcg

SEQ ID NO: 3706126 - DNA, 25 bp, Homo sapien
gggaacagcgttcctcttttctgtg

SEQ ID NO: 3706127 - DNA, 25 bp, Homo sapien
taggcatgatagaccctacctgatc

SEQ ID NO: 3706128 - DNA, 25 bp, Homo sapien
gagtctcctgggtctgacagtgctc

SEQ ID NO: 3706129 - DNA, 25 bp, Homo sapien
ggagggcatgccttgtctaatccca

SEQ ID NO: 3706130 - DNA, 25 bp, Homo sapien
tcctgtgaacatgctgaaagggaca

SEQ ID NO: 3706131 - DNA, 25 bp, Homo sapien
ccaggattcccgcagaagtaattac

SEQ ID NO: 3706132 - DNA, 25 bp, Homo sapien
cacatggaaatagaataaggcccag

SEQ ID NO: 3706133 - DNA, 25 bp, Homo sapien
caaaggcagaccatttcctagtgac

SEQ ID NO: 3706134 - DNA, 25 bp, Homo sapien
caagaatgacgttggagataagctc

SEQ ID NO: 3706135 - DNA, 25 bp, Homo sapien
gcaaaagtcagagagcgcatgatcg

SEQ ID NO: 3706136 - DNA, 25 bp, Homo sapien
gactggacgagggagtgtgttggct

SEQ ID NO: 3706137 - DNA, 25 bp, Homo sapien
catgatcgaatgaccagctctggaa

SEQ ID NO: 3706138 - DNA, 25 bp, Homo sapien
gaggtaataaggtccggaggcagag

SEQ ID NO: 3706139 - DNA, 25 bp, Homo sapien
acctgaaggtctccaccaaccagcc

SEQ ID NO: 3706140 - DNA, 25 bp, Homo sapien
agctccagaggtgtcagacggtatt

SEQ ID NO: 3706141 - DNA, 25 bp, Homo sapien
tgtcagacggtattggtccagccca

SEQ ID NO: 3706142 - DNA, 25 bp, Homo sapien
gacggtattggtccagcccatcatt

SEQ ID NO: 3706143 - DNA, 25 bp, Homo sapien
ccattgtggacaggattgcgcaact

SEQ ID NO: 3706144 - DNA, 25 bp, Homo sapien
tctctaggagcctgcggcgagtgtc

SEQ ID NO: 3706145 - DNA, 25 bp, Homo sapien
caacaatggttgacttgggatccag

SEQ ID NO: 3706146 - DNA, 25 bp, Homo sapien
tagaggcacatcgtcatccttggtc

SEQ ID NO: 3706147 - DNA, 25 bp, Homo sapien
tactaagtggaaacataattaagct

SEQ ID NO: 3706148 - DNA, 25 bp, Homo sapien
gcctggccttctagcacttttcaaa

SEQ ID NO: 3706149 - DNA, 25 bp, Homo sapien
aagtctgagtctgaattcctgagtc

SEQ ID NO: 3706150 - DNA, 25 bp, Homo sapien
gagtctgaattcctgagtctcaaag

SEQ ID NO: 3706151 - DNA, 25 bp, Homo sapien
tgaggttctaagactccgtgcactc

SEQ ID NO: 3706152 - DNA, 25 bp, Homo sapien
ggtcatggtttatggagacaccttt

SEQ ID NO: 3706153 - DNA, 25 bp, Homo sapien
tccataagggacatgctggtcattg

SEQ ID NO: 3706154 - DNA, 25 bp, Homo sapien
gctagccggacaagaacactcaaat

SEQ ID NO: 3706155 - DNA, 25 bp, Homo sapien
tgtaggcagccactcggaatggaat

SEQ ID NO: 3706156 - DNA, 25 bp, Homo sapien
tggatcatagaagtccatggctttt

SEQ ID NO: 3706157 - DNA, 25 bp, Homo sapien
cccatgagtgggttcatacagatcc

SEQ ID NO: 3706158 - DNA, 25 bp, Homo sapien
aattggcacccgcaatcatccggga

SEQ ID NO: 3706159 - DNA, 25 bp, Homo sapien
gactcagtccacttgggagcatgtg

SEQ ID NO: 3706160 - DNA, 25 bp, Homo sapien
taagaccacgtcttgactctcaagg

SEQ ID NO: 3706161 - DNA, 25 bp, Homo sapien
cagaagactgtagtacaattttagg

SEQ ID NO: 3706162 - DNA, 25 bp, Homo sapien
tatggaccatctactatatgcagaa

SEQ ID NO: 3706163 - DNA, 25 bp, Homo sapien
tcccgggcgagcttcctcattcgag

SEQ ID NO: 3706164 - DNA, 25 bp, Homo sapien
ggacctgtaataatctgtcaggacc

SEQ ID NO: 3706165 - DNA, 25 bp, Homo sapien
ctccagggacctgtaataatctgtc

SEQ ID NO: 3706166 - DNA, 25 bp, Homo sapien
cctcattcgagttcctgagatgaag

SEQ ID NO: 3706167 - DNA, 25 bp, Homo sapien
ttcagtatccgagaaggcagctttg

SEQ ID NO: 3706168 - DNA, 25 bp, Homo sapien
cacaatgaccacagcaaagagcggg

SEQ ID NO: 3706169 - DNA, 25 bp, Homo sapien
ggagttacattattcacagaggcca

SEQ ID NO: 3706170 - DNA, 25 bp, Homo sapien
tacattttgttacggtgctcacagc

SEQ ID NO: 3706171 - DNA, 25 bp, Homo sapien
ccgattacatgagtataggcactat

SEQ ID NO: 3706172 - DNA, 25 bp, Homo sapien
catggtactagagcagaagagcagt

SEQ ID NO: 3706173 - DNA, 25 bp, Homo sapien
cacaaaatatatcggttaaggcact

SEQ ID NO: 3706174 - DNA, 25 bp, Homo sapien
taaggcactataatcctgtctcatg

SEQ ID NO: 3706175 - DNA, 25 bp, Homo sapien
gaacaattgactgacctggtgccta

SEQ ID NO: 3706176 - DNA, 25 bp, Homo sapien
gagggactcacggaaaaaagctgca

SEQ ID NO: 3706177 - DNA, 25 bp, Homo sapien
tacgtagacatatcccgccactttg

SEQ ID NO: 3706178 - DNA, 25 bp, Homo sapien
tactaattggcactaggagccacca

SEQ ID NO: 3706179 - DNA, 25 bp, Homo sapien
taaattcacaatatccagtaggagt

SEQ ID NO: 3706180 - DNA, 25 bp, Homo sapien
ggctccccattaactgtgtgtctgt

SEQ ID NO: 3706181 - DNA, 25 bp, Homo sapien
gtgtgtctgtgagcccagtttctca

SEQ ID NO: 3706182 - DNA, 25 bp, Homo sapien
gactcatctaggcatgttaagacca

SEQ ID NO: 3706183 - DNA, 25 bp, Homo sapien
gaaaacggcacaacacaatcttgag

SEQ ID NO: 3706184 - DNA, 25 bp, Homo sapien
ccctaagtcaggtacaaatgtacac

SEQ ID NO: 3706185 - DNA, 25 bp, Homo sapien
taaccacgcagcatgaggaaaacgg

SEQ ID NO: 3706186 - DNA, 25 bp, Homo sapien
ccagaattctgttataggcacctaa

SEQ ID NO: 3706187 - DNA, 25 bp, Homo sapien
caactactgaatccaggagtaccaa

SEQ ID NO: 3706188 - DNA, 25 bp, Homo sapien
tggttgttaggcagccatgtgctca

SEQ ID NO: 3706189 - DNA, 25 bp, Homo sapien
tctgcagttattagttggatcctcc

SEQ ID NO: 3706190 - DNA, 25 bp, Homo sapien
tactagttcagtgatcagcattgaa

SEQ ID NO: 3706191 - DNA, 25 bp, Homo sapien
ggctcaaacagtctttccacctgag

SEQ ID NO: 3706192 - DNA, 25 bp, Homo sapien
gccagctatggtttttgatgtacag

SEQ ID NO: 3706193 - DNA, 25 bp, Homo sapien
tcgtgtgagtaatcaaaatgggttg

SEQ ID NO: 3706194 - DNA, 25 bp, Homo sapien
tacagtagcatggaaagtagccaca

SEQ ID NO: 3706195 - DNA, 25 bp, Homo sapien
cctatcaactacttggtaccaaaga

SEQ ID NO: 3706196 - DNA, 25 bp, Homo sapien
ctgctgcctcttgtgttcatttcct

SEQ ID NO: 3706197 - DNA, 25 bp, Homo sapien
aacatttattgagtccctatcaact

SEQ ID NO: 3706198 - DNA, 25 bp, Homo sapien
ttagatctgtcttgtgagttgtgac

SEQ ID NO: 3706199 - DNA, 25 bp, Homo sapien
ccaggtctgattgtcgcacaggcgc

SEQ ID NO: 3706200 - DNA, 25 bp, Homo sapien
gaggtcgtcccggaagacttcagaa

SEQ ID NO: 3706201 - DNA, 25 bp, Homo sapien
gacttcagaaccaggcgaacctaga

SEQ ID NO: 3706202 - DNA, 25 bp, Homo sapien
gaacctagacgaaggcggctggaat

SEQ ID NO: 3706203 - DNA, 25 bp, Homo sapien
caagggcgtcccgggcctcgccttg

SEQ ID NO: 3706204 - DNA, 25 bp, Homo sapien
tgtgataagcgccttcccaaaggta

SEQ ID NO: 3706205 - DNA, 25 bp, Homo sapien
gaaagtctcagtctagcaggtagct

SEQ ID NO: 3706206 - DNA, 25 bp, Homo sapien
tgttaaacgcagagccttagcgagt

SEQ ID NO: 3706207 - DNA, 25 bp, Homo sapien
agaaggctgcccgatttgtcagggt

SEQ ID NO: 3706208 - DNA, 25 bp, Homo sapien
gaaggaagtgatgcttctcgtatct

SEQ ID NO: 3706209 - DNA, 25 bp, Homo sapien
gcccaccggcagtttgtgtattcag

SEQ ID NO: 3706210 - DNA, 25 bp, Homo sapien
aggagtgtctaatgtcatctggccc

SEQ ID NO: 3706211 - DNA, 25 bp, Homo sapien
ccttgggacctcttgtgtcacgtcg

SEQ ID NO: 3706212 - DNA, 25 bp, Homo sapien
aaagatgatgcctcaagtagaaagg

SEQ ID NO: 3706213 - DNA, 25 bp, Homo sapien
cagggagaactctcattacatcata

SEQ ID NO: 3706214 - DNA, 25 bp, Homo sapien
gaactctcattacatcatagtctca

SEQ ID NO: 3706215 - DNA, 25 bp, Homo sapien
caaagatgatgcctcaagtagaaag

SEQ ID NO: 3706216 - DNA, 25 bp, Homo sapien
tatttcccaagtatatgaacttaga

SEQ ID NO: 3706217 - DNA, 25 bp, Homo sapien
taacattcgttaacaatcaggctgc

SEQ ID NO: 3706218 - DNA, 25 bp, Homo sapien
atttaggttatgcatgtaaagcaca

SEQ ID NO: 3706219 - DNA, 25 bp, Homo sapien
atagaagcttattgccccaccccag

SEQ ID NO: 3706220 - DNA, 25 bp, Homo sapien
tagcacttttcgagcttgtagactc

SEQ ID NO: 3706221 - DNA, 25 bp, Homo sapien
ccagacatggaaggtttcttacgga

SEQ ID NO: 3706222 - DNA, 25 bp, Homo sapien
tgtacttgatgtcttaggcccagac

SEQ ID NO: 3706223 - DNA, 25 bp, Homo sapien
tagactctttatggtcagcctcgtg

SEQ ID NO: 3706224 - DNA, 25 bp, Homo sapien
ctctaggtgaaagaaggcctagtag

SEQ ID NO: 3706225 - DNA, 25 bp, Homo sapien
taacatcagcttgccagtgaactgc

SEQ ID NO: 3706226 - DNA, 25 bp, Homo sapien
gtttcctgtgcttctataaaacaag

SEQ ID NO: 3706227 - DNA, 25 bp, Homo sapien
tccttaaacacgtaaaatcagccag

SEQ ID NO: 3706228 - DNA, 25 bp, Homo sapien
tggattatgctgaataggtaaggag

SEQ ID NO: 3706229 - DNA, 25 bp, Homo sapien
cctgaatttactttctagagagtgg

SEQ ID NO: 3706230 - DNA, 25 bp, Homo sapien
tactctccccttagctaattctcag

SEQ ID NO: 3706231 - DNA, 25 bp, Homo sapien
tgttacagtaatctctcaccaactg

SEQ ID NO: 3706232 - DNA, 25 bp, Homo sapien
cagtggtcattgtcactctactcca

SEQ ID NO: 3706233 - DNA, 25 bp, Homo sapien
ggctgcagtggtcattgtcactcta

SEQ ID NO: 3706234 - DNA, 25 bp, Homo sapien
tgcagtggtcattgtcactctactc

SEQ ID NO: 3706235 - DNA, 25 bp, Homo sapien
ctggtgtgggggtgctgaagcagga

SEQ ID NO: 3706236 - DNA, 25 bp, Homo sapien
ggagatggcaaggagagccgctgca

SEQ ID NO: 3706237 - DNA, 25 bp, Homo sapien
aggagatggcaaggagagccgctgc

SEQ ID NO: 3706238 - DNA, 25 bp, Homo sapien
tttctagtgttgaagacttgcacac

SEQ ID NO: 3706239 - DNA, 25 bp, Homo sapien
cttgcacactttcatgtcactgaac

SEQ ID NO: 3706240 - DNA, 25 bp, Homo sapien
gcctccgcaaggatgatgtacttct

SEQ ID NO: 3706241 - DNA, 25 bp, Homo sapien
caggatcttcttggcctccgcaagg

SEQ ID NO: 3706242 - DNA, 25 bp, Homo sapien
aagtggcatagggatcatcaatggt

SEQ ID NO: 3706243 - DNA, 25 bp, Homo sapien
catagggatcatcaatggtttggtc

SEQ ID NO: 3706244 - DNA, 25 bp, Homo sapien
ggcatagggatcatcaatggtttgg

SEQ ID NO: 3706245 - DNA, 25 bp, Homo sapien
gacaaaagtggcatagggatcatca

SEQ ID NO: 3706246 - DNA, 25 bp, Homo sapien
cttggtggcgtcataaggggcgtag

SEQ ID NO: 3706247 - DNA, 25 bp, Homo sapien
gtcataaggggcgtagcggcagtcc

SEQ ID NO: 3706248 - DNA, 25 bp, Homo sapien
cataaggggcgtagcggcagtcctt

SEQ ID NO: 3706249 - DNA, 25 bp, Homo sapien
gtggcgtcataaggggcgtagcggc

SEQ ID NO: 3706250 - DNA, 25 bp, Homo sapien
tttgctcttaatggatgcagactca

SEQ ID NO: 3706251 - DNA, 25 bp, Homo sapien
tgctcttaatggatgcagactcaga

SEQ ID NO: 3706252 - DNA, 25 bp, Homo sapien
ctcttaatggatgcagactcagagg

SEQ ID NO: 3706253 - DNA, 25 bp, Homo sapien
tcattttgctcttaatggatgcaga

SEQ ID NO: 3706254 - DNA, 25 bp, Homo sapien
atgacgtctttggagctggcataga

SEQ ID NO: 3706255 - DNA, 25 bp, Homo sapien
gatgacgtctttggagctggcatag

SEQ ID NO: 3706256 - DNA, 25 bp, Homo sapien
ccctagctgcttcttgatgacgtct

SEQ ID NO: 3706257 - DNA, 25 bp, Homo sapien
tagctgcttcttgatgacgtctttg

SEQ ID NO: 3706258 - DNA, 25 bp, Homo sapien
gccctccaagaagacgacagtgctg

SEQ ID NO: 3706259 - DNA, 25 bp, Homo sapien
agtagattctccaggaagggcgctg

SEQ ID NO: 3706260 - DNA, 25 bp, Homo sapien
ctagtagattctccaggaagggcgc

SEQ ID NO: 3706261 - DNA, 25 bp, Homo sapien
aagtttgccctccaagaagacgaca

SEQ ID NO: 3706262 - DNA, 25 bp, Homo sapien
aggcacagagtcactgttgtggtta

SEQ ID NO: 3706263 - DNA, 25 bp, Homo sapien
ggcacagagtcactgttgtggttag

SEQ ID NO: 3706264 - DNA, 25 bp, Homo sapien
gtttccattagcggccataaccaag

SEQ ID NO: 3706265 - DNA, 25 bp, Homo sapien
cattagcggccataaccaagggaga

SEQ ID NO: 3706266 - DNA, 25 bp, Homo sapien
tagcggccataaccaagggagagga

SEQ ID NO: 3706267 - DNA, 25 bp, Homo sapien
tccattagcggccataaccaaggga

SEQ ID NO: 3706268 - DNA, 25 bp, Homo sapien
tggctatatttggaacctctacttg

SEQ ID NO: 3706269 - DNA, 25 bp, Homo sapien
tcataaattgtagcctagtgtgcag

SEQ ID NO: 3706270 - DNA, 25 bp, Homo sapien
acaaatccctgttatgtgacacatg

SEQ ID NO: 3706271 - DNA, 25 bp, Homo sapien
gactttgcaaatatccaatggtgag

SEQ ID NO: 3706272 - DNA, 25 bp, Homo sapien
agggaggacttaattaaggtgtgct

SEQ ID NO: 3706273 - DNA, 25 bp, Homo sapien
gacttaattaaggtgtgctttattc

SEQ ID NO: 3706274 - DNA, 25 bp, Homo sapien
gtagacttgttcattgtaaaatagg

SEQ ID NO: 3706275 - DNA, 25 bp, Homo sapien
tgttgaaacaagtaagagggaggac

SEQ ID NO: 3706276 - DNA, 25 bp, Homo sapien
ttggctgctgccactcataggacca

SEQ ID NO: 3706277 - DNA, 25 bp, Homo sapien
tgtcttggctagctcccagggtgca

SEQ ID NO: 3706278 - DNA, 25 bp, Homo sapien
tctttgtcttggctagctcccaggg

SEQ ID NO: 3706279 - DNA, 25 bp, Homo sapien
tggctctgagccataagtcatttct

SEQ ID NO: 3706280 - DNA, 25 bp, Homo sapien
gccaatcctttgtataaggcctcag

SEQ ID NO: 3706281 - DNA, 25 bp, Homo sapien
ggagaaagttgccaatcctttgtat

SEQ ID NO: 3706282 - DNA, 25 bp, Homo sapien
agttgccaatcctttgtataaggcc

SEQ ID NO: 3706283 - DNA, 25 bp, Homo sapien
ggctgggagaaagttgccaatcctt

SEQ ID NO: 3706284 - DNA, 25 bp, Homo sapien
gtcatcgctggtcgtcagagaaatg

SEQ ID NO: 3706285 - DNA, 25 bp, Homo sapien
gctcgtcatcgctggtcgtcagaga

SEQ ID NO: 3706286 - DNA, 25 bp, Homo sapien
aatgctcgtcatcgctggtcgtcag

SEQ ID NO: 3706287 - DNA, 25 bp, Homo sapien
aaaaatgctcgtcatcgctggtcgt

SEQ ID NO: 3706288 - DNA, 25 bp, Homo sapien
taacaaagggacaattatataaagc

SEQ ID NO: 3706289 - DNA, 25 bp, Homo sapien
tgtaacaaagggacaattatataaa

SEQ ID NO: 3706290 - DNA, 25 bp, Homo sapien
cttgtaacaaagggacaattatata

SEQ ID NO: 3706291 - DNA, 25 bp, Homo sapien
acaaagggacaattatataaagctt

SEQ ID NO: 3706292 - DNA, 25 bp, Homo sapien
gaaccagaataccatagggagaagt

SEQ ID NO: 3706293 - DNA, 25 bp, Homo sapien
cagaataccatagggagaagtagaa

SEQ ID NO: 3706294 - DNA, 25 bp, Homo sapien
accagaataccatagggagaagtag

SEQ ID NO: 3706295 - DNA, 25 bp, Homo sapien
agaaccagaataccatagggagaag

SEQ ID NO: 3706296 - DNA, 25 bp, Homo sapien
gaatatgagaccagcctccaagtac

SEQ ID NO: 3706297 - DNA, 25 bp, Homo sapien
gagcagagataatctgcatcaccag

SEQ ID NO: 3706298 - DNA, 25 bp, Homo sapien
atcaccagcactaaagtgctagaat

SEQ ID NO: 3706299 - DNA, 25 bp, Homo sapien
agaatatgagaccagcctccaagta

SEQ ID NO: 3706300 - DNA, 25 bp, Homo sapien
ctactttccgaaggaggtcacgtgt

SEQ ID NO: 3706301 - DNA, 25 bp, Homo sapien
cacgggccacagtcggaactacttt

SEQ ID NO: 3706302 - DNA, 25 bp, Homo sapien
tagctccggaggcaagtcgtcttct

SEQ ID NO: 3706303 - DNA, 25 bp, Homo sapien
cagcctcccgaaggagcgctgtcgg

SEQ ID NO: 3706304 - DNA, 25 bp, Homo sapien
aagtacggaacggtaggaagctgca

SEQ ID NO: 3706305 - DNA, 25 bp, Homo sapien
gtacggaacggtaggaagctgcagc

SEQ ID NO: 3706306 - DNA, 25 bp, Homo sapien
tacggaacggtaggaagctgcagcc

SEQ ID NO: 3706307 - DNA, 25 bp, Homo sapien
acggaacggtaggaagctgcagccc

SEQ ID NO: 3706308 - DNA, 25 bp, Homo sapien
tgtcggatcacaatcgttcgcagag

SEQ ID NO: 3706309 - DNA, 25 bp, Homo sapien
gccgagcgtgctgaacgtgaacaca

SEQ ID NO: 3706310 - DNA, 25 bp, Homo sapien
gcaacctgctattgtgtcgccagcg

SEQ ID NO: 3706311 - DNA, 25 bp, Homo sapien
tggtgtcagtcttagcacaaagagc

SEQ ID NO: 3706312 - DNA, 25 bp, Homo sapien
tgcacaggtgaaaaggaccaggtga

SEQ ID NO: 3706313 - DNA, 25 bp, Homo sapien
tacccctagatttccgcggcgtgga

SEQ ID NO: 3706314 - DNA, 25 bp, Homo sapien
ggactgcattcgctctttccttttg

SEQ ID NO: 3706315 - DNA, 25 bp, Homo sapien
ggaccaggtgaccacgctgctcagt

SEQ ID NO: 3706316 - DNA, 25 bp, Homo sapien
ggtggaggactgatgatgaaagctg

SEQ ID NO: 3706317 - DNA, 25 bp, Homo sapien
agcagtgtcactgactcgagtctga

SEQ ID NO: 3706318 - DNA, 25 bp, Homo sapien
gaaagctgagatgggtgcgttgagc

SEQ ID NO: 3706319 - DNA, 25 bp, Homo sapien
cccagaaacccagccggaggcaggg

SEQ ID NO: 3706320 - DNA, 25 bp, Homo sapien
gcgcataaagagtcccgccacatca

SEQ ID NO: 3706321 - DNA, 25 bp, Homo sapien
gagcgcgtatcctgccgcagcgcat

SEQ ID NO: 3706322 - DNA, 25 bp, Homo sapien
tcacagcggctcaactctcaaactt

SEQ ID NO: 3706323 - DNA, 25 bp, Homo sapien
agaactgagcgcagtcgcgtcccag

SEQ ID NO: 3706324 - DNA, 25 bp, Homo sapien
gaggctgcacggttagaaaagacga

SEQ ID NO: 3706325 - DNA, 25 bp, Homo sapien
cacggttagaaaagacgaagaggag

SEQ ID NO: 3706326 - DNA, 25 bp, Homo sapien
agaggctgcacggttagaaaagacg

SEQ ID NO: 3706327 - DNA, 25 bp, Homo sapien
gctgcacggttagaaaagacgaaga

SEQ ID NO: 3706328 - DNA, 25 bp, Homo sapien
tggtgacaggcgactcagaccccct

SEQ ID NO: 3706329 - DNA, 25 bp, Homo sapien
atggtgacaggcgactcagaccccc

SEQ ID NO: 3706330 - DNA, 25 bp, Homo sapien
ctggaaatggtgacaggcgactcag

SEQ ID NO: 3706331 - DNA, 25 bp, Homo sapien
gaaatggtgacaggcgactcagacc

SEQ ID NO: 3706332 - DNA, 25 bp, Homo sapien
gccgccgccgtgttggaggcagtag

SEQ ID NO: 3706333 - DNA, 25 bp, Homo sapien
ccgggtccctggatgtgccagccgc

SEQ ID NO: 3706334 - DNA, 25 bp, Homo sapien
gggtccctggatgtgccagccgccg

SEQ ID NO: 3706335 - DNA, 25 bp, Homo sapien
ggaggcagtagaaggggagagacca

SEQ ID NO: 3706336 - DNA, 25 bp, Homo sapien
gcggcggcggcgcacgggaggttta

SEQ ID NO: 3706337 - DNA, 25 bp, Homo sapien
cacggggggtgcggcggcggcgcac

SEQ ID NO: 3706338 - DNA, 25 bp, Homo sapien
ctccgccggcggcctccggagcccg

SEQ ID NO: 3706339 - DNA, 25 bp, Homo sapien
ctgcctccgccggcggcctccggag

SEQ ID NO: 3706340 - DNA, 25 bp, Homo sapien
aatggggagaagacgaataatcctc

SEQ ID NO: 3706341 - DNA, 25 bp, Homo sapien
tggggagaagacgaataatcctccg

SEQ ID NO: 3706342 - DNA, 25 bp, Homo sapien
cggaatggggagaagacgaataatc

SEQ ID NO: 3706343 - DNA, 25 bp, Homo sapien
ggcggcagcggaatggggagaagac

SEQ ID NO: 3706344 - DNA, 25 bp, Homo sapien
ctgcttctcctcagcagccagaggc

SEQ ID NO: 3706345 - DNA, 25 bp, Homo sapien
ctctggaccgcagccgggtaatggc

SEQ ID NO: 3706346 - DNA, 25 bp, Homo sapien
ctggacttggcggtagctgatgccc

SEQ ID NO: 3706347 - DNA, 25 bp, Homo sapien
gctctggaccgcagccgggtaatgg

SEQ ID NO: 3706348 - DNA, 25 bp, Homo sapien
ggctctggacttggcggtagctgat

SEQ ID NO: 3706349 - DNA, 25 bp, Homo sapien
agatggcagaagctgctggtggcgg

SEQ ID NO: 3706350 - DNA, 25 bp, Homo sapien
ggagagagatggcagaagctgctgg

SEQ ID NO: 3706351 - DNA, 25 bp, Homo sapien
ctgggagcctgtggctgaagaaaaa

SEQ ID NO: 3706352 - DNA, 25 bp, Homo sapien
gcctgtggctgaagaaaaaggagga

SEQ ID NO: 3706353 - DNA, 25 bp, Homo sapien
agtctaagtcgaatccatcctcttg

SEQ ID NO: 3706354 - DNA, 25 bp, Homo sapien
aggtcaagtctaagtcgaatccatc

SEQ ID NO: 3706355 - DNA, 25 bp, Homo sapien
taagtcgaatccatcctcttgatat

SEQ ID NO: 3706356 - DNA, 25 bp, Homo sapien
tcctcttgatatctccttttgtttc

SEQ ID NO: 3706357 - DNA, 25 bp, Homo sapien
gaaaggtaaagaggagcagccgcag

SEQ ID NO: 3706358 - DNA, 25 bp, Homo sapien
agaaaggtaaagaggagcagccgca

SEQ ID NO: 3706359 - DNA, 25 bp, Homo sapien
taaatgttatagtcacccaaactac

SEQ ID NO: 3706360 - DNA, 25 bp, Homo sapien
tcacccaaactacggacattttcgc

SEQ ID NO: 3706361 - DNA, 25 bp, Homo sapien
caaactacggacattttcgcatccg

SEQ ID NO: 3706362 - DNA, 25 bp, Homo sapien
gttatagtcacccaaactacggaca

SEQ ID NO: 3706363 - DNA, 25 bp, Homo sapien
tcatttaggagaccggattaccgag

SEQ ID NO: 3706364 - DNA, 25 bp, Homo sapien
taaaaacggtgagcagcaattctgg

SEQ ID NO: 3706365 - DNA, 25 bp, Homo sapien
tatatgacctagcaacctgaccagg

SEQ ID NO: 3706366 - DNA, 25 bp, Homo sapien
taacggacaatagccctcaggaaga

SEQ ID NO: 3706367 - DNA, 25 bp, Homo sapien
gtagtgtgttatgtactttaagtgc

SEQ ID NO: 3706368 - DNA, 25 bp, Homo sapien
gttatgtactttaagtgctgaaaga

SEQ ID NO: 3706369 - DNA, 25 bp, Homo sapien
aagtaaaagtagtgtgttatgtact

SEQ ID NO: 3706370 - DNA, 25 bp, Homo sapien
tgtgttatgtactttaagtgctgaa

SEQ ID NO: 3706371 - DNA, 25 bp, Homo sapien
gaaaatgccagtcatgtcacagctc

SEQ ID NO: 3706372 - DNA, 25 bp, Homo sapien
caagcaaaccaagtacgttggaata

SEQ ID NO: 3706373 - DNA, 25 bp, Homo sapien
caaatttcatgtgtagagaccaaca

SEQ ID NO: 3706374 - DNA, 25 bp, Homo sapien
gagaccaacatacgctgaaatcaaa

SEQ ID NO: 3706375 - DNA, 25 bp, Homo sapien
taatcaaaaactacataagacagag

SEQ ID NO: 3706376 - DNA, 25 bp, Homo sapien
taggttacctgttcttctttgcaaa

SEQ ID NO: 3706377 - DNA, 25 bp, Homo sapien
tattagctaattcagtatctttcat

SEQ ID NO: 3706378 - DNA, 25 bp, Homo sapien
gattctttcaaggtatacaataaat

SEQ ID NO: 3706379 - DNA, 25 bp, Homo sapien
cgcccagccttgagcagagatttaa

SEQ ID NO: 3706380 - DNA, 25 bp, Homo sapien
taatgttcattggtggtcctcaaag

SEQ ID NO: 3706381 - DNA, 25 bp, Homo sapien
cactatctcgtctataaaatcagga

SEQ ID NO: 3706382 - DNA, 25 bp, Homo sapien
ggactttaggtctagccaactccaa

SEQ ID NO: 3706383 - DNA, 25 bp, Homo sapien
gcagcagtcagaacacccagatgtt

SEQ ID NO: 3706384 - DNA, 25 bp, Homo sapien
gaccttcttaaatatcacacctggg

SEQ ID NO: 3706385 - DNA, 25 bp, Homo sapien
tataaagaatactggcctagcagca

SEQ ID NO: 3706386 - DNA, 25 bp, Homo sapien
gatgttaggactaactccatcactg

SEQ ID NO: 3706387 - DNA, 25 bp, Homo sapien
tatgcaatctaaagcctataacctc

SEQ ID NO: 3706388 - DNA, 25 bp, Homo sapien
tgtttcaaggaccaaatgggataca

SEQ ID NO: 3706389 - DNA, 25 bp, Homo sapien
cattacaaggcaactcaatatggtg

SEQ ID NO: 3706390 - DNA, 25 bp, Homo sapien
taatgataataccacttgctgtaac

SEQ ID NO: 3706391 - DNA, 25 bp, Homo sapien
tatcttgcctaagttggatggtcac

SEQ ID NO: 3706392 - DNA, 25 bp, Homo sapien
catacatggtactagctatcttgcc

SEQ ID NO: 3706393 - DNA, 25 bp, Homo sapien
catttatttaggaatcaggctacct

SEQ ID NO: 3706394 - DNA, 25 bp, Homo sapien
ttttgactggtaaactgcatatgcc

SEQ ID NO: 3706395 - DNA, 25 bp, Homo sapien
atgttacccaagacatcggcatcca

SEQ ID NO: 3706396 - DNA, 25 bp, Homo sapien
gatgttacccaagacatcggcatcc

SEQ ID NO: 3706397 - DNA, 25 bp, Homo sapien
cttccttactgataaagtttgagat

SEQ ID NO: 3706398 - DNA, 25 bp, Homo sapien
gagatgttacccaagacatcggcat

SEQ ID NO: 3706399 - DNA, 25 bp, Homo sapien
tgcaactatttaacaaggatggcct

SEQ ID NO: 3706400 - DNA, 25 bp, Homo sapien
ttcagcaaatggttcctggaccaca

SEQ ID NO: 3706401 - DNA, 25 bp, Homo sapien
tttccactgtcttgataaatagccc

SEQ ID NO: 3706402 - DNA, 25 bp, Homo sapien
cagtaacctaaatgctctgctgctg

SEQ ID NO: 3706403 - DNA, 25 bp, Homo sapien
gggcatgagcacatgatagagaaaa

SEQ ID NO: 3706404 - DNA, 25 bp, Homo sapien
agggcatgagcacatgatagagaaa

SEQ ID NO: 3706405 - DNA, 25 bp, Homo sapien
gttcctgtatacgccttcaagtctt

SEQ ID NO: 3706406 - DNA, 25 bp, Homo sapien
ctacatcatcaatattgttcctgta

SEQ ID NO: 3706407 - DNA, 25 bp, Homo sapien
taatagtttacatcacaaagtatct

SEQ ID NO: 3706408 - DNA, 25 bp, Homo sapien
tgaagtccattaggtacggtaagcc

SEQ ID NO: 3706409 - DNA, 25 bp, Homo sapien
acggtaagccaaaaaatgattatag

SEQ ID NO: 3706410 - DNA, 25 bp, Homo sapien
ttcttatcaaatgaactgtatcccc

SEQ ID NO: 3706411 - DNA, 25 bp, Homo sapien
taatatttacatgggccttgagaaa

SEQ ID NO: 3706412 - DNA, 25 bp, Homo sapien
tacatatgcacagtggtaccttaaa

SEQ ID NO: 3706413 - DNA, 25 bp, Homo sapien
taagactatttgcacatcagacatg

SEQ ID NO: 3706414 - DNA, 25 bp, Homo sapien
tgattagccttggtacacccagcga

SEQ ID NO: 3706415 - DNA, 25 bp, Homo sapien
aaagccattaaggttcttactgaca

SEQ ID NO: 3706416 - DNA, 25 bp, Homo sapien
ggttcttactgacaatttacagttg

SEQ ID NO: 3706417 - DNA, 25 bp, Homo sapien
tacctgggggttcaagccaagtgat

SEQ ID NO: 3706418 - DNA, 25 bp, Homo sapien
gacaatttacagttgatttattaat

SEQ ID NO: 3706419 - DNA, 25 bp, Homo sapien
gttcccatcagcttgcaatgttaag

SEQ ID NO: 3706420 - DNA, 25 bp, Homo sapien
taaatctaccgtggttcaaagcaag

SEQ ID NO: 3706421 - DNA, 25 bp, Homo sapien
aaacagtccttctggcatccctatg

SEQ ID NO: 3706422 - DNA, 25 bp, Homo sapien
tattataaaaggagtctacatctgc

SEQ ID NO: 3706423 - DNA, 25 bp, Homo sapien
tgtgaagctagatagactaaacctc

SEQ ID NO: 3706424 - DNA, 25 bp, Homo sapien
gaagagaccaacgtaaaaactagca

SEQ ID NO: 3706425 - DNA, 25 bp, Homo sapien
tatgagtactaatctggctgggttg

SEQ ID NO: 3706426 - DNA, 25 bp, Homo sapien
tccttcagaggcataaaggtaagag

SEQ ID NO: 3706427 - DNA, 25 bp, Homo sapien
gggtgctcttgaatctattacacag

SEQ ID NO: 3706428 - DNA, 25 bp, Homo sapien
tctgcagtgagaaagacagttcacc

SEQ ID NO: 3706429 - DNA, 25 bp, Homo sapien
cttataatataggactcatgccacc

SEQ ID NO: 3706430 - DNA, 25 bp, Homo sapien
ccagaagtcgaggtgaaccatgatc

SEQ ID NO: 3706431 - DNA, 25 bp, Homo sapien
aattagccaggcatgtggcgcgtgc

SEQ ID NO: 3706432 - DNA, 25 bp, Homo sapien
aaaattagccaggcatgtggcgcgt

SEQ ID NO: 3706433 - DNA, 25 bp, Homo sapien
attagccaggcatgtggcgcgtgcc

SEQ ID NO: 3706434 - DNA, 25 bp, Homo sapien
agccaggcatgtggcgcgtgcctgt

SEQ ID NO: 3706435 - DNA, 25 bp, Homo sapien
tacacttcccgacacttgcaaaagg

SEQ ID NO: 3706436 - DNA, 25 bp, Homo sapien
tgcaaaaggctagcacgagaagcac

SEQ ID NO: 3706437 - DNA, 25 bp, Homo sapien
cccataagcagggtgagaaaatctg

SEQ ID NO: 3706438 - DNA, 25 bp, Homo sapien
tgcaggttacacttcccgacacttg

SEQ ID NO: 3706439 - DNA, 25 bp, Homo sapien
tgagcagagtcaccagtttcgaggc

SEQ ID NO: 3706440 - DNA, 25 bp, Homo sapien
gtttcgaggcatagtggcagcagct

SEQ ID NO: 3706441 - DNA, 25 bp, Homo sapien
tcatcttcaggctgttaggcaacca

SEQ ID NO: 3706442 - DNA, 25 bp, Homo sapien
tctttttgccgtggataccgaatcc

SEQ ID NO: 3706443 - DNA, 25 bp, Homo sapien
tttatatgtactgtctaagaaatct

SEQ ID NO: 3706444 - DNA, 25 bp, Homo sapien
tttctcattatgaagttgtaagagc

SEQ ID NO: 3706445 - DNA, 25 bp, Homo sapien
gttgtaagagcatctttatgtatat

SEQ ID NO: 3706446 - DNA, 25 bp, Homo sapien
aatgttgataaagtcaaatttgtcc

SEQ ID NO: 3706447 - DNA, 25 bp, Homo sapien
gaaaggtttaatcagaggcctcagg

SEQ ID NO: 3706448 - DNA, 25 bp, Homo sapien
tagaaccctagtgtaactacagcgg

SEQ ID NO: 3706449 - DNA, 25 bp, Homo sapien
caggagaactctttcgcgagacagc

SEQ ID NO: 3706450 - DNA, 25 bp, Homo sapien
cgagacagctctagggtgatagtgc

SEQ ID NO: 3706451 - DNA, 25 bp, Homo sapien
ctcatagagatttacaagacagtca

SEQ ID NO: 3706452 - DNA, 25 bp, Homo sapien
agctcatagagatttacaagacagt

SEQ ID NO: 3706453 - DNA, 25 bp, Homo sapien
gctcatagagatttacaagacagtc

SEQ ID NO: 3706454 - DNA, 25 bp, Homo sapien
cttgtaatggtttttatgctttgaa

SEQ ID NO: 3706455 - DNA, 25 bp, Homo sapien
tgttgaaaagccaacgatcaccttt

SEQ ID NO: 3706456 - DNA, 25 bp, Homo sapien
catatcagtgtggttagcagtaccc

SEQ ID NO: 3706457 - DNA, 25 bp, Homo sapien
cacttagagcgaagagtaaaacatt

SEQ ID NO: 3706458 - DNA, 25 bp, Homo sapien
taaaggtccatagctccttaacctg

SEQ ID NO: 3706459 - DNA, 25 bp, Homo sapien
ctctgcaattaaatttggcggtgtc

SEQ ID NO: 3706460 - DNA, 25 bp, Homo sapien
tctgcaattaaatttggcggtgtca

SEQ ID NO: 3706461 - DNA, 25 bp, Homo sapien
ctgcaattaaatttggcggtgtcat

SEQ ID NO: 3706462 - DNA, 25 bp, Homo sapien
gtgggttatggtcttcaaaaggata

SEQ ID NO: 3706463 - DNA, 25 bp, Homo sapien
ggttatggtcttcaaaaggatattg

SEQ ID NO: 3706464 - DNA, 25 bp, Homo sapien
tgggttatggtcttcaaaaggatat

SEQ ID NO: 3706465 - DNA, 25 bp, Homo sapien
aaatatgcacatatcattacaccag

SEQ ID NO: 3706466 - DNA, 25 bp, Homo sapien
tatgcacatatcattacaccagttc

SEQ ID NO: 3706467 - DNA, 25 bp, Homo sapien
catatcattacaccagttcgtccct

SEQ ID NO: 3706468 - DNA, 25 bp, Homo sapien
tgcacatatcattacaccagttcgt

SEQ ID NO: 3706469 - DNA, 25 bp, Homo sapien
tgatgaatatgttaagtagtttgac

SEQ ID NO: 3706470 - DNA, 25 bp, Homo sapien
tccaataaattctcagatccaggaa

SEQ ID NO: 3706471 - DNA, 25 bp, Homo sapien
caaaacatcatattatacattgtat

SEQ ID NO: 3706472 - DNA, 25 bp, Homo sapien
taagtagtttgactgtagtaatcat

SEQ ID NO: 3706473 - DNA, 25 bp, Homo sapien
tatgaaaatggtagcgtgaacagaa

SEQ ID NO: 3706474 - DNA, 25 bp, Homo sapien
caaaggcattctatgctcaaacaag

SEQ ID NO: 3706475 - DNA, 25 bp, Homo sapien
tctgcaatacagttaatgggtaaca

SEQ ID NO: 3706476 - DNA, 25 bp, Homo sapien
gattaacatgaaggagaactctcta

SEQ ID NO: 3706477 - DNA, 25 bp, Homo sapien
gcaattgtttccctgcagatgataa

SEQ ID NO: 3706478 - DNA, 25 bp, Homo sapien
tcatgccagtgctatcattccaagg

SEQ ID NO: 3706479 - DNA, 25 bp, Homo sapien
caaggaatctatgcaattacacagc

SEQ ID NO: 3706480 - DNA, 25 bp, Homo sapien
caataaacagtatttcggcatcctt

SEQ ID NO: 3706481 - DNA, 25 bp, Homo sapien
gtccttcttaaatggcaagttctca

SEQ ID NO: 3706482 - DNA, 25 bp, Homo sapien
ctatcccaagtccttcttaaatggc

SEQ ID NO: 3706483 - DNA, 25 bp, Homo sapien
cccaagtccttcttaaatggcaagt

SEQ ID NO: 3706484 - DNA, 25 bp, Homo sapien
cttaaatggcaagttctcatcatca

SEQ ID NO: 3706485 - DNA, 25 bp, Homo sapien
agccttctcttggatttaatttgga

SEQ ID NO: 3706486 - DNA, 25 bp, Homo sapien
tatggagccttctcttggatttaat

SEQ ID NO: 3706487 - DNA, 25 bp, Homo sapien
tttttgattatggagccttctcttg

SEQ ID NO: 3706488 - DNA, 25 bp, Homo sapien
gattatggagccttctcttggattt

SEQ ID NO: 3706489 - DNA, 25 bp, Homo sapien
tttcatcaaatagtctcccctcacc

SEQ ID NO: 3706490 - DNA, 25 bp, Homo sapien
gatttcatcaaatagtctcccctca

SEQ ID NO: 3706491 - DNA, 25 bp, Homo sapien
atttcatcaaatagtctcccctcac

SEQ ID NO: 3706492 - DNA, 25 bp, Homo sapien
cctgggtgattgagtgagactgtct

SEQ ID NO: 3706493 - DNA, 25 bp, Homo sapien
atgcctgtaatctcagcactttggg

SEQ ID NO: 3706494 - DNA, 25 bp, Homo sapien
aataagaggccaggcacagtgactc

SEQ ID NO: 3706495 - DNA, 25 bp, Homo sapien
aggccgaggtgggcggatcacttga

SEQ ID NO: 3706496 - DNA, 25 bp, Homo sapien
tgagtgatacattgcattgcaacgg

SEQ ID NO: 3706497 - DNA, 25 bp, Homo sapien
tataccaggtcaggtgttgactcaa

SEQ ID NO: 3706498 - DNA, 25 bp, Homo sapien
acctcctgtaggatctgcctaaaga

SEQ ID NO: 3706499 - DNA, 25 bp, Homo sapien
tagccttggcctctacaaggtcagg

SEQ ID NO: 3706500 - DNA, 25 bp, Homo sapien
tataagggctacataagcagccacc

SEQ ID NO: 3706501 - DNA, 25 bp, Homo sapien
tccaaaatgattagcacagacctga

SEQ ID NO: 3706502 - DNA, 25 bp, Homo sapien
accaggtatttcttgagggctccta

SEQ ID NO: 3706503 - DNA, 25 bp, Homo sapien
tacttcaaggtgtgataaccagcca

SEQ ID NO: 3706504 - DNA, 25 bp, Homo sapien
gagaacaggaagagcctggctgatc

SEQ ID NO: 3706505 - DNA, 25 bp, Homo sapien
ggagaacaggaagagcctggctgat

SEQ ID NO: 3706506 - DNA, 25 bp, Homo sapien
gcctggctgatctttctgcaatcat

SEQ ID NO: 3706507 - DNA, 25 bp, Homo sapien
agaacaggaagagcctggctgatct

SEQ ID NO: 3706508 - DNA, 25 bp, Homo sapien
aacagatgttgaagcggagcctgca

SEQ ID NO: 3706509 - DNA, 25 bp, Homo sapien
ctaaacagatgttgaagcggagcct

SEQ ID NO: 3706510 - DNA, 25 bp, Homo sapien
ctcctaaacagatgttgaagcggag

SEQ ID NO: 3706511 - DNA, 25 bp, Homo sapien
caaaattcctgcatggggttatcct

SEQ ID NO: 3706512 - DNA, 25 bp, Homo sapien
agttactcaggtcagtctgtctcca

SEQ ID NO: 3706513 - DNA, 25 bp, Homo sapien
ccttagttactcaggtcagtctgtc

SEQ ID NO: 3706514 - DNA, 25 bp, Homo sapien
ctgttccaagaccttagttactcag

SEQ ID NO: 3706515 - DNA, 25 bp, Homo sapien
caagaccttagttactcaggtcagt

SEQ ID NO: 3706516 - DNA, 25 bp, Homo sapien
ctgttgccaaaggcgctaacagtat

SEQ ID NO: 3706517 - DNA, 25 bp, Homo sapien
ccaaaggcgctaacagtatatctag

SEQ ID NO: 3706518 - DNA, 25 bp, Homo sapien
ttgccaaaggcgctaacagtatatc

SEQ ID NO: 3706519 - DNA, 25 bp, Homo sapien
tgccaaaggcgctaacagtatatct

SEQ ID NO: 3706520 - DNA, 25 bp, Homo sapien
ctgtagacatcaatgcttgggtcat

SEQ ID NO: 3706521 - DNA, 25 bp, Homo sapien
cacactcctgcacctttagatcatt

SEQ ID NO: 3706522 - DNA, 25 bp, Homo sapien
ggctgtagacatcaatgcttgggtc

SEQ ID NO: 3706523 - DNA, 25 bp, Homo sapien
ctcacactcctgcacctttagatca

SEQ ID NO: 3706524 - DNA, 25 bp, Homo sapien
tgatgaaacctggcttttccagcac

SEQ ID NO: 3706525 - DNA, 25 bp, Homo sapien
ctgcaatgatgaaacctggcttttc

SEQ ID NO: 3706526 - DNA, 25 bp, Homo sapien
aatgatgaaacctggcttttccagc

SEQ ID NO: 3706527 - DNA, 25 bp, Homo sapien
gcaatgatgaaacctggcttttcca

SEQ ID NO: 3706528 - DNA, 25 bp, Homo sapien
ctatttggcaccaatgaagcctgtc

SEQ ID NO: 3706529 - DNA, 25 bp, Homo sapien
tctgctggaaccagcgcatggcctc

SEQ ID NO: 3706530 - DNA, 25 bp, Homo sapien
ttgccaggaaggatgatcccatcat

SEQ ID NO: 3706531 - DNA, 25 bp, Homo sapien
gccaggaaggatgatcccatcatac

SEQ ID NO: 3706532 - DNA, 25 bp, Homo sapien
ttatttgccaggaaggatgatccca

SEQ ID NO: 3706533 - DNA, 25 bp, Homo sapien
atttgccaggaaggatgatcccatc

SEQ ID NO: 3706534 - DNA, 25 bp, Homo sapien
cagtgggctacattatcgaacggtc

SEQ ID NO: 3706535 - DNA, 25 bp, Homo sapien
ttatccaaggctggcaaacaactga

SEQ ID NO: 3706536 - DNA, 25 bp, Homo sapien
gtagctgctggccatttcagacaga

SEQ ID NO: 3706537 - DNA, 25 bp, Homo sapien
tcacagaccaggaggtagacctcag

SEQ ID NO: 3706538 - DNA, 25 bp, Homo sapien
gctaacttctgttgctactgcagtg

SEQ ID NO: 3706539 - DNA, 25 bp, Homo sapien
taagaccagacataataccacttgt

SEQ ID NO: 3706540 - DNA, 25 bp, Homo sapien
cactgtagggatggccactgcgcct

SEQ ID NO: 3706541 - DNA, 25 bp, Homo sapien
cagtgaactccagggttgcaagaat

SEQ ID NO: 3706542 - DNA, 25 bp, Homo sapien
gctgccttgtcagcacccaaaattc

SEQ ID NO: 3706543 - DNA, 25 bp, Homo sapien
tgctgccttgtcagcacccaaaatt

SEQ ID NO: 3706544 - DNA, 25 bp, Homo sapien
ctgctgccttgtcagcacccaaaat

SEQ ID NO: 3706545 - DNA, 25 bp, Homo sapien
gcagtactactactcttcatactct

SEQ ID NO: 3706546 - DNA, 25 bp, Homo sapien
actttgaagagcagtactactactc

SEQ ID NO: 3706547 - DNA, 25 bp, Homo sapien
ctttgaagagcagtactactactct

SEQ ID NO: 3706548 - DNA, 25 bp, Homo sapien
gaagagcagtactactactcttcat

SEQ ID NO: 3706549 - DNA, 25 bp, Homo sapien
taaagctatccttgtactacatgca

SEQ ID NO: 3706550 - DNA, 25 bp, Homo sapien
ctaacacaggtaaagctatccttgt

SEQ ID NO: 3706551 - DNA, 25 bp, Homo sapien
agaaaaatctaatatgtacaacaat

SEQ ID NO: 3706552 - DNA, 25 bp, Homo sapien
taacgaagacgaataaatgaggtat

SEQ ID NO: 3706553 - DNA, 25 bp, Homo sapien
gttccgccactgaacattggaatag

SEQ ID NO: 3706554 - DNA, 25 bp, Homo sapien
tacacatagcgcctctgactgggaa

SEQ ID NO: 3706555 - DNA, 25 bp, Homo sapien
aagttccgccactgaacattggaat

SEQ ID NO: 3706556 - DNA, 25 bp, Homo sapien
gcctctgactgggaatagttactcc

SEQ ID NO: 3706557 - DNA, 25 bp, Homo sapien
caggttcttccatcatctagtcaga

SEQ ID NO: 3706558 - DNA, 25 bp, Homo sapien
tgccctaagagcagcaaattgctga

SEQ ID NO: 3706559 - DNA, 25 bp, Homo sapien
tagatatggttaagaaaactgttcc

SEQ ID NO: 3706560 - DNA, 25 bp, Homo sapien
tggacctcatgctggacctctgatg

SEQ ID NO: 3706561 - DNA, 25 bp, Homo sapien
gaggatgatcacacctatctgacaa

SEQ ID NO: 3706562 - DNA, 25 bp, Homo sapien
caggatgactgaggtagacttatag

SEQ ID NO: 3706563 - DNA, 25 bp, Homo sapien
cagctcagtaccttgcattcagcag

SEQ ID NO: 3706564 - DNA, 25 bp, Homo sapien
ttacacgtgtgagcctcgtgcctag

SEQ ID NO: 3706565 - DNA, 25 bp, Homo sapien
gtggaagaactctactttgatatca

SEQ ID NO: 3706566 - DNA, 25 bp, Homo sapien
tcttgttctgtttgtggaagaactc

SEQ ID NO: 3706567 - DNA, 25 bp, Homo sapien
tcgtgtgggtcctgaattggaggaa

SEQ ID NO: 3706568 - DNA, 25 bp, Homo sapien
gaactctactttgatatcaccacac

SEQ ID NO: 3706569 - DNA, 25 bp, Homo sapien
tatttctcccaatgaaagtaaagta

SEQ ID NO: 3706570 - DNA, 25 bp, Homo sapien
ttttggatatttctcccaatgaaag

SEQ ID NO: 3706571 - DNA, 25 bp, Homo sapien
taatctgtccttattttggatattt

SEQ ID NO: 3706572 - DNA, 25 bp, Homo sapien
ggatatttctcccaatgaaagtaaa

SEQ ID NO: 3706573 - DNA, 25 bp, Homo sapien
gcctgggcaacatagtgagaccctg

SEQ ID NO: 3706574 - DNA, 25 bp, Homo sapien
ggatgccaaagcgtgaggactgctt

SEQ ID NO: 3706575 - DNA, 25 bp, Homo sapien
tgggcaacatagtgagaccctgtcc

SEQ ID NO: 3706576 - DNA, 25 bp, Homo sapien
gtgcccaggagtttgagaccagcct

SEQ ID NO: 3706577 - DNA, 25 bp, Homo sapien
tagccagtaattgtattttacttag

SEQ ID NO: 3706578 - DNA, 25 bp, Homo sapien
aaatggaaatttatgtagtcaagga

SEQ ID NO: 3706579 - DNA, 25 bp, Homo sapien
tatatatatgggttatactaaaatt

SEQ ID NO: 3706580 - DNA, 25 bp, Homo sapien
ggaaattcctaaaggtatgcagaga

SEQ ID NO: 3706581 - DNA, 25 bp, Homo sapien
ggtgagtgcaacttccctgatgacg

SEQ ID NO: 3706582 - DNA, 25 bp, Homo sapien
aaaatacaatctcacaagatctaag

SEQ ID NO: 3706583 - DNA, 25 bp, Homo sapien
tcaaatgagctacctattccaagat

SEQ ID NO: 3706584 - DNA, 25 bp, Homo sapien
gatctaagataaactacttttgcct

SEQ ID NO: 3706585 - DNA, 25 bp, Homo sapien
ggtatgaagaatgtatttacccaaa

SEQ ID NO: 3706586 - DNA, 25 bp, Homo sapien
tatgaagaatgtatttacccaaaag

SEQ ID NO: 3706587 - DNA, 25 bp, Homo sapien
ctggtatgaagaatgtatttaccca

SEQ ID NO: 3706588 - DNA, 25 bp, Homo sapien
atgaagaatgtatttacccaaaagt

SEQ ID NO: 3706589 - DNA, 25 bp, Homo sapien
cacgctctatactgcaaatgctatc

SEQ ID NO: 3706590 - DNA, 25 bp, Homo sapien
tccttgtcattatctgcacgctcta

SEQ ID NO: 3706591 - DNA, 25 bp, Homo sapien
tgctttgtcaagatcattttttgtt

SEQ ID NO: 3706592 - DNA, 25 bp, Homo sapien
cacatagacttccattttctacttt

SEQ ID NO: 3706593 - DNA, 25 bp, Homo sapien
tcttcatcagctgtactcctagaat

SEQ ID NO: 3706594 - DNA, 25 bp, Homo sapien
caagtcaacaacccccacaaaatgt

SEQ ID NO: 3706595 - DNA, 25 bp, Homo sapien
gttcttcatcagctgtactcctaga

SEQ ID NO: 3706596 - DNA, 25 bp, Homo sapien
cacatacatacaagtcaacaacccc

SEQ ID NO: 3706597 - DNA, 25 bp, Homo sapien
tgacgctgtgtacattgggtatttt

SEQ ID NO: 3706598 - DNA, 25 bp, Homo sapien
gaaactttcatgttactgctacgta

SEQ ID NO: 3706599 - DNA, 25 bp, Homo sapien
tttcagcaaacaacgaagaattagg

SEQ ID NO: 3706600 - DNA, 25 bp, Homo sapien
aaaatgcagcttttttgacgctgtg

SEQ ID NO: 3706601 - DNA, 25 bp, Homo sapien
catcttaaactatttagtgaaatat

SEQ ID NO: 3706602 - DNA, 25 bp, Homo sapien
aaacccacaaatatgactcatctta

SEQ ID NO: 3706603 - DNA, 25 bp, Homo sapien
actcatcttaaactatttagtgaaa

SEQ ID NO: 3706604 - DNA, 25 bp, Homo sapien
aaaatgaaaacccacaaatatgact

SEQ ID NO: 3706605 - DNA, 25 bp, Homo sapien
caggttcattgtcactaacatctgg

SEQ ID NO: 3706606 - DNA, 25 bp, Homo sapien
gcctctggatttgacggctcctcta

SEQ ID NO: 3706607 - DNA, 25 bp, Homo sapien
cttcatcaaaaggttcattctctgg

SEQ ID NO: 3706608 - DNA, 25 bp, Homo sapien
ttctctggatcagagtcagtggtgt

SEQ ID NO: 3706609 - DNA, 25 bp, Homo sapien
cagtttattcaagtttattttcatg

SEQ ID NO: 3706610 - DNA, 25 bp, Homo sapien
catggtgttttatccctcttgataa

SEQ ID NO: 3706611 - DNA, 25 bp, Homo sapien
tttattcaagtttattttcatggtg

SEQ ID NO: 3706612 - DNA, 25 bp, Homo sapien
tattcaagtttattttcatggtgtt

SEQ ID NO: 3706613 - DNA, 25 bp, Homo sapien
tttcaactggacaacaagtgtcaaa

SEQ ID NO: 3706614 - DNA, 25 bp, Homo sapien
cttttgacacaaaaaggtatataca

SEQ ID NO: 3706615 - DNA, 25 bp, Homo sapien
gacacagctacacaaccttttttca

SEQ ID NO: 3706616 - DNA, 25 bp, Homo sapien
ccctgtggatgtatagggtaaaaca

SEQ ID NO: 3706617 - DNA, 25 bp, Homo sapien
taacccgaatacatgcattagaatg

SEQ ID NO: 3706618 - DNA, 25 bp, Homo sapien
ccgaatacatgcattagaatgtagc

SEQ ID NO: 3706619 - DNA, 25 bp, Homo sapien
gaatacatgcattagaatgtagcaa

SEQ ID NO: 3706620 - DNA, 25 bp, Homo sapien
tcccctaacccgaatacatgcatta

SEQ ID NO: 3706621 - DNA, 25 bp, Homo sapien
caatagtagttgtactccgcttaaa

SEQ ID NO: 3706622 - DNA, 25 bp, Homo sapien
gcttaaaatcgtatgcagtctgggc

SEQ ID NO: 3706623 - DNA, 25 bp, Homo sapien
agaagtgaaattgaagccctagtcc

SEQ ID NO: 3706624 - DNA, 25 bp, Homo sapien
tcaaaagggtggaacggctgacagc

SEQ ID NO: 3706625 - DNA, 25 bp, Homo sapien
gatgctgccggtaaactccacttaa

SEQ ID NO: 3706626 - DNA, 25 bp, Homo sapien
tgttcaagaggagctacaaaggact

SEQ ID NO: 3706627 - DNA, 25 bp, Homo sapien
taaacgaggcactttgtggcaacca

SEQ ID NO: 3706628 - DNA, 25 bp, Homo sapien
tacgttttaatatgcggtgcccgaa

SEQ ID NO: 3706629 - DNA, 25 bp, Homo sapien
actgcacattaggacatgagggcaa

SEQ ID NO: 3706630 - DNA, 25 bp, Homo sapien
tggactttttcaggactagaacgct

SEQ ID NO: 3706631 - DNA, 25 bp, Homo sapien
tattaacgatggctatgtctccagg

SEQ ID NO: 3706632 - DNA, 25 bp, Homo sapien
tactaaacgcggtaattttcagagc

SEQ ID NO: 3706633 - DNA, 25 bp, Homo sapien
taaaggaaaaatactctccatagga

SEQ ID NO: 3706634 - DNA, 25 bp, Homo sapien
tactctccataggaaggcatttcta

SEQ ID NO: 3706635 - DNA, 25 bp, Homo sapien
cagtagccaaatggaacttgatata

SEQ ID NO: 3706636 - DNA, 25 bp, Homo sapien
ctattttttgtccatcagtagccaa

SEQ ID NO: 3706637 - DNA, 25 bp, Homo sapien
ggagtgtaaactcttcaagggcagg

SEQ ID NO: 3706638 - DNA, 25 bp, Homo sapien
ctttacagaaagtggagtgtcacac

SEQ ID NO: 3706639 - DNA, 25 bp, Homo sapien
tacataggcctcattcaactgcaag

SEQ ID NO: 3706640 - DNA, 25 bp, Homo sapien
tccagtatcactcaagacccaggct

SEQ ID NO: 3706641 - DNA, 25 bp, Homo sapien
ctgtcaagaatgttgcaagatacat

SEQ ID NO: 3706642 - DNA, 25 bp, Homo sapien
tcaagaatgttgcaagatacataat

SEQ ID NO: 3706643 - DNA, 25 bp, Homo sapien
tgttgcaagatacataattttctca

SEQ ID NO: 3706644 - DNA, 25 bp, Homo sapien
agcttgaacaattgttaaatattta

SEQ ID NO: 3706645 - DNA, 25 bp, Homo sapien
tgcgtctctccaaccaaacctctaa

SEQ ID NO: 3706646 - DNA, 25 bp, Homo sapien
tccaaccaaacctctaacaccagtg

SEQ ID NO: 3706647 - DNA, 25 bp, Homo sapien
aaccaaacctctaacaccagtgatc

SEQ ID NO: 3706648 - DNA, 25 bp, Homo sapien
aacctctaacaccagtgatcctcaa

SEQ ID NO: 3706649 - DNA, 25 bp, Homo sapien
taggcaccacttaaaaatcgcctct

SEQ ID NO: 3706650 - DNA, 25 bp, Homo sapien
taaaaatcgcctcttagatccattt

SEQ ID NO: 3706651 - DNA, 25 bp, Homo sapien
ccatttggagggctgatgatgtatg

SEQ ID NO: 3706652 - DNA, 25 bp, Homo sapien
tatggtcttctcataactgttctaa

SEQ ID NO: 3706653 - DNA, 25 bp, Homo sapien
tgatacctaactggcttagtctctc

SEQ ID NO: 3706654 - DNA, 25 bp, Homo sapien
cacctgtgatacctaactggcttag

SEQ ID NO: 3706655 - DNA, 25 bp, Homo sapien
agtctctcagtgttccaattcttcc

SEQ ID NO: 3706656 - DNA, 25 bp, Homo sapien
agcctgccccaacttcacctgtgat

SEQ ID NO: 3706657 - DNA, 25 bp, Homo sapien
aagggcccactgataagcctagggc

SEQ ID NO: 3706658 - DNA, 25 bp, Homo sapien
gcctagggccttatcagccttagta

SEQ ID NO: 3706659 - DNA, 25 bp, Homo sapien
ttttatgctcccaagggcccactga

SEQ ID NO: 3706660 - DNA, 25 bp, Homo sapien
ttagtaagttcctgtgtccaaggaa

SEQ ID NO: 3706661 - DNA, 25 bp, Homo sapien
gagtctccgcttccttgctttacac

SEQ ID NO: 3706662 - DNA, 25 bp, Homo sapien
tgctttacacaactcctgatattcc

SEQ ID NO: 3706663 - DNA, 25 bp, Homo sapien
tcatgcattcgttccacaaacaaaa

SEQ ID NO: 3706664 - DNA, 25 bp, Homo sapien
cagtacaaagttgtgatccaggcct

SEQ ID NO: 3706665 - DNA, 25 bp, Homo sapien
cttgaaactcagacaacgacacgaa

SEQ ID NO: 3706666 - DNA, 25 bp, Homo sapien
tcagacaacgacacgaacgagcttg

SEQ ID NO: 3706667 - DNA, 25 bp, Homo sapien
aactcagacaacgacacgaacgagc

SEQ ID NO: 3706668 - DNA, 25 bp, Homo sapien
aacgacacgaacgagcttgtcgcca

SEQ ID NO: 3706669 - DNA, 25 bp, Homo sapien
agaaacccaagtcctatctcaggat

SEQ ID NO: 3706670 - DNA, 25 bp, Homo sapien
tgcccagaaacccaagtcctatctc

SEQ ID NO: 3706671 - DNA, 25 bp, Homo sapien
cccagaaacccaagtcctatctcag

SEQ ID NO: 3706672 - DNA, 25 bp, Homo sapien
gaaacccaagtcctatctcaggatt

SEQ ID NO: 3706673 - DNA, 25 bp, Homo sapien
gctcgcaaggcgtcaattcagtgct

SEQ ID NO: 3706674 - DNA, 25 bp, Homo sapien
caaggcgtcaattcagtgctgcttt

SEQ ID NO: 3706675 - DNA, 25 bp, Homo sapien
aacagggctcctcagaaacgctctg

SEQ ID NO: 3706676 - DNA, 25 bp, Homo sapien
aagaaaactcccaagctcgcaaggc

SEQ ID NO: 3706677 - DNA, 25 bp, Homo sapien
gttcatcatagtatttctcaacatg

SEQ ID NO: 3706678 - DNA, 25 bp, Homo sapien
cagcatagaggagatccaaccaggg

SEQ ID NO: 3706679 - DNA, 25 bp, Homo sapien
tccagcatagaggagatccaaccag

SEQ ID NO: 3706680 - DNA, 25 bp, Homo sapien
tctccagcatagaggagatccaacc

SEQ ID NO: 3706681 - DNA, 25 bp, Homo sapien
caaagatcacgcatgctgtttaatc

SEQ ID NO: 3706682 - DNA, 25 bp, Homo sapien
ggactctgaatcaaagatcacgcat

SEQ ID NO: 3706683 - DNA, 25 bp, Homo sapien
tctcttgtcctcaaagtagctactc

SEQ ID NO: 3706684 - DNA, 25 bp, Homo sapien
ctcaaagtagctactccaaatggca

SEQ ID NO: 3706685 - DNA, 25 bp, Homo sapien
tcgggggggaaatccatagcatttg

SEQ ID NO: 3706686 - DNA, 25 bp, Homo sapien
gacaacattgcactggacccttgcc

SEQ ID NO: 3706687 - DNA, 25 bp, Homo sapien
aagttgcaggtgagtataagtcggg

SEQ ID NO: 3706688 - DNA, 25 bp, Homo sapien
tttatgccgtactgcttctcgtggg

SEQ ID NO: 3706689 - DNA, 25 bp, Homo sapien
cagagaggtcctctaaacacagcac

SEQ ID NO: 3706690 - DNA, 25 bp, Homo sapien
ggtcactggtgtcgtttctccagta

SEQ ID NO: 3706691 - DNA, 25 bp, Homo sapien
tcactggtgtcgtttctccagtaac

SEQ ID NO: 3706692 - DNA, 25 bp, Homo sapien
tgaaaggtcactggtgtcgtttctc

SEQ ID NO: 3706693 - DNA, 25 bp, Homo sapien
gaaaggtcactggtgtcgtttctcc

SEQ ID NO: 3706694 - DNA, 25 bp, Homo sapien
tctgcaggacttgtcagtgagtcta

SEQ ID NO: 3706695 - DNA, 25 bp, Homo sapien
tgtttggtgtgaaagaaggagcttc

SEQ ID NO: 3706696 - DNA, 25 bp, Homo sapien
tgagtctaatgaactcatcaaggag

SEQ ID NO: 3706697 - DNA, 25 bp, Homo sapien
gcacacagctggcatcaagaagcaa

SEQ ID NO: 3706698 - DNA, 25 bp, Homo sapien
agacatctcaaagaacctaatcacc

SEQ ID NO: 3706699 - DNA, 25 bp, Homo sapien
cagacatctcaaagaacctaatcac

SEQ ID NO: 3706700 - DNA, 25 bp, Homo sapien
acatctcaaagaacctaatcaccat

SEQ ID NO: 3706701 - DNA, 25 bp, Homo sapien
gacatctcaaagaacctaatcacca

SEQ ID NO: 3706702 - DNA, 25 bp, Homo sapien
agcgcctgaattcccacaaccaaat

SEQ ID NO: 3706703 - DNA, 25 bp, Homo sapien
tgaattcccacaaccaaattgtttc

SEQ ID NO: 3706704 - DNA, 25 bp, Homo sapien
tccctttactagcaccctggtccag

SEQ ID NO: 3706705 - DNA, 25 bp, Homo sapien
gtccaggtcttcagcgcctgaattc

SEQ ID NO: 3706706 - DNA, 25 bp, Homo sapien
aagtaacatctaaaggtatccttat

SEQ ID NO: 3706707 - DNA, 25 bp, Homo sapien
gtaacatctaaaggtatccttataa

SEQ ID NO: 3706708 - DNA, 25 bp, Homo sapien
acatctaaaggtatccttataatca

SEQ ID NO: 3706709 - DNA, 25 bp, Homo sapien
taacatctaaaggtatccttataat

SEQ ID NO: 3706710 - DNA, 25 bp, Homo sapien
gaggattcagtggtattgcaaaaat

SEQ ID NO: 3706711 - DNA, 25 bp, Homo sapien
aaaactggaggattcagtggtattg

SEQ ID NO: 3706712 - DNA, 25 bp, Homo sapien
tggaggattcagtggtattgcaaaa

SEQ ID NO: 3706713 - DNA, 25 bp, Homo sapien
aactggaggattcagtggtattgca

SEQ ID NO: 3706714 - DNA, 25 bp, Homo sapien
cgttgtggctcttctccacagcttc

SEQ ID NO: 3706715 - DNA, 25 bp, Homo sapien
tttggcacgttgtggctcttctcca

SEQ ID NO: 3706716 - DNA, 25 bp, Homo sapien
ttgggtttggcacgttgtggctctt

SEQ ID NO: 3706717 - DNA, 25 bp, Homo sapien
ggcacgttgtggctcttctccacag

SEQ ID NO: 3706718 - DNA, 25 bp, Homo sapien
ctttcaagacggtgttgcaacagga

SEQ ID NO: 3706719 - DNA, 25 bp, Homo sapien
gtcctttcaagacggtgttgcaaca

SEQ ID NO: 3706720 - DNA, 25 bp, Homo sapien
ggagtcctttcaagacggtgttgca

SEQ ID NO: 3706721 - DNA, 25 bp, Homo sapien
aagggaaatggtgagggtgtagagc

SEQ ID NO: 3706722 - DNA, 25 bp, Homo sapien
ggagctgctgggatgttcgcctatc

SEQ ID NO: 3706723 - DNA, 25 bp, Homo sapien
tgggatgttcgcctatcaaaggagg

SEQ ID NO: 3706724 - DNA, 25 bp, Homo sapien
aaggccgaagcttagcaagtaaaca

SEQ ID NO: 3706725 - DNA, 25 bp, Homo sapien
gtggaaaaggccgaagcttagcaag

SEQ ID NO: 3706726 - DNA, 25 bp, Homo sapien
aagtaatgaccctgccttttcaaag

SEQ ID NO: 3706727 - DNA, 25 bp, Homo sapien
gcctcgctgtaactccagattttgc

SEQ ID NO: 3706728 - DNA, 25 bp, Homo sapien
taactccagattttgccccagtcac

SEQ ID NO: 3706729 - DNA, 25 bp, Homo sapien
cctgagcctcgctgtaactccagat

SEQ ID NO: 3706730 - DNA, 25 bp, Homo sapien
ctatgagacagcaaagggaagagac

SEQ ID NO: 3706731 - DNA, 25 bp, Homo sapien
gagacagcaaagggaagagacccac

SEQ ID NO: 3706732 - DNA, 25 bp, Homo sapien
atgagacagcaaagggaagagaccc

SEQ ID NO: 3706733 - DNA, 25 bp, Homo sapien
tatgagacagcaaagggaagagacc

SEQ ID NO: 3706734 - DNA, 25 bp, Homo sapien
ccccattttatctacacctctgtaa

SEQ ID NO: 3706735 - DNA, 25 bp, Homo sapien
tttatctacacctctgtaatctgta

SEQ ID NO: 3706736 - DNA, 25 bp, Homo sapien
ctcagagtccccattttatctacac

SEQ ID NO: 3706737 - DNA, 25 bp, Homo sapien
cagagtccccattttatctacacct

SEQ ID NO: 3706738 - DNA, 25 bp, Homo sapien
catgacaggagctactgagtaggga

SEQ ID NO: 3706739 - DNA, 25 bp, Homo sapien
agcagacccaacagccgggccccag

SEQ ID NO: 3706740 - DNA, 25 bp, Homo sapien
ctactgagtagggaatagggaagga

SEQ ID NO: 3706741 - DNA, 25 bp, Homo sapien
cactgctgacatgcaatagcagacc

SEQ ID NO: 3706742 - DNA, 25 bp, Homo sapien
gggccaaaatggtggaatgagtgca

SEQ ID NO: 3706743 - DNA, 25 bp, Homo sapien
tggggccaaaatggtggaatgagtg

SEQ ID NO: 3706744 - DNA, 25 bp, Homo sapien
gccaaaatggtggaatgagtgcagg

SEQ ID NO: 3706745 - DNA, 25 bp, Homo sapien
aaatggtggaatgagtgcagggaga

SEQ ID NO: 3706746 - DNA, 25 bp, Homo sapien
tctcctttccgaggtgttgtttgct

SEQ ID NO: 3706747 - DNA, 25 bp, Homo sapien
ctccttctcctttccgaggtgttgt

SEQ ID NO: 3706748 - DNA, 25 bp, Homo sapien
tcctttccgaggtgttgtttgctct

SEQ ID NO: 3706749 - DNA, 25 bp, Homo sapien
cttctcctttccgaggtgttgtttg

SEQ ID NO: 3706750 - DNA, 25 bp, Homo sapien
gggcagaaacagtgggatttcctac

SEQ ID NO: 3706751 - DNA, 25 bp, Homo sapien
actgggggcagaaacagtgggattt

SEQ ID NO: 3706752 - DNA, 25 bp, Homo sapien
ctttcactgggggcagaaacagtgg

SEQ ID NO: 3706753 - DNA, 25 bp, Homo sapien
tgggggcagaaacagtgggatttcc

SEQ ID NO: 3706754 - DNA, 25 bp, Homo sapien
cattgatgacactgacaatcatgga

SEQ ID NO: 3706755 - DNA, 25 bp, Homo sapien
aaatggagtcagagggtctatatgg

SEQ ID NO: 3706756 - DNA, 25 bp, Homo sapien
cagtgagtgtgtcttcgtcctgcac

SEQ ID NO: 3706757 - DNA, 25 bp, Homo sapien
aatcatggatccagtcacttgctcc

SEQ ID NO: 3706758 - DNA, 25 bp, Homo sapien
tacaagacacgaaagctgccactgt

SEQ ID NO: 3706759 - DNA, 25 bp, Homo sapien
ctgaccctgtttggagtgtggcatt

SEQ ID NO: 3706760 - DNA, 25 bp, Homo sapien
ggcattttaactgattccgacagac

SEQ ID NO: 3706761 - DNA, 25 bp, Homo sapien
tccgacagacatttgaacgacgctt

SEQ ID NO: 3706762 - DNA, 25 bp, Homo sapien
ggccctggtaaagcaaacaggtatc

SEQ ID NO: 3706763 - DNA, 25 bp, Homo sapien
actccctgtgccaaaatctaggcag

SEQ ID NO: 3706764 - DNA, 25 bp, Homo sapien
gtccagaggccctggtaaagcaaac

SEQ ID NO: 3706765 - DNA, 25 bp, Homo sapien
tgtgccaaaatctaggcagtctgaa

SEQ ID NO: 3706766 - DNA, 25 bp, Homo sapien
ccaagaagtagtgcaaatactggat

SEQ ID NO: 3706767 - DNA, 25 bp, Homo sapien
gggatgtctggatagggcaggtaaa

SEQ ID NO: 3706768 - DNA, 25 bp, Homo sapien
tctggatagggcaggtaaatgacag

SEQ ID NO: 3706769 - DNA, 25 bp, Homo sapien
gaaaaattccttgagagctggggat

SEQ ID NO: 3706770 - DNA, 25 bp, Homo sapien
tctgtgcccaggagtcaggtaaagc

SEQ ID NO: 3706771 - DNA, 25 bp, Homo sapien
tgatgtgcccttcctgaaaatgagg

SEQ ID NO: 3706772 - DNA, 25 bp, Homo sapien
tcagaaggccctaggtctgtgccca

SEQ ID NO: 3706773 - DNA, 25 bp, Homo sapien
ccatatgactaagggagggaagcag

SEQ ID NO: 3706774 - DNA, 25 bp, Homo sapien
catggtccaatattgctaatttagc

SEQ ID NO: 3706775 - DNA, 25 bp, Homo sapien
taatttagcctcaatctccagtttc

SEQ ID NO: 3706776 - DNA, 25 bp, Homo sapien
tttttctgagtgctcattttgggca

SEQ ID NO: 3706777 - DNA, 25 bp, Homo sapien
tcactcaaggatttataccaactgg

SEQ ID NO: 3706778 - DNA, 25 bp, Homo sapien
cattatatctggagggctactatca

SEQ ID NO: 3706779 - DNA, 25 bp, Homo sapien
tatctggagggctactatcaagggt

SEQ ID NO: 3706780 - DNA, 25 bp, Homo sapien
ggctactatcaagggtagcctttct

SEQ ID NO: 3706781 - DNA, 25 bp, Homo sapien
caccctcctcattatatctggaggg

SEQ ID NO: 3706782 - DNA, 25 bp, Homo sapien
gacagcaggcctcgacatgtgctgg

SEQ ID NO: 3706783 - DNA, 25 bp, Homo sapien
agcaggcctcgacatgtgctggcca

SEQ ID NO: 3706784 - DNA, 25 bp, Homo sapien
gcaggcctcgacatgtgctggccat

SEQ ID NO: 3706785 - DNA, 25 bp, Homo sapien
aggacagcaggcctcgacatgtgct

SEQ ID NO: 3706786 - DNA, 25 bp, Homo sapien
cagaaaggaggaataggactaaggc

SEQ ID NO: 3706787 - DNA, 25 bp, Homo sapien
tgtgaattaaaatatcgatgccctg

SEQ ID NO: 3706788 - DNA, 25 bp, Homo sapien
ggtaacgaatgttgccaagtttgtg

SEQ ID NO: 3706789 - DNA, 25 bp, Homo sapien
cgtttttccccgcagttcatagagg

SEQ ID NO: 3706790 - DNA, 25 bp, Homo sapien
tgccctgatttttggtaacgaatgt

SEQ ID NO: 3706791 - DNA, 25 bp, Homo sapien
cggtgcctgtcacaccatcggctga

SEQ ID NO: 3706792 - DNA, 25 bp, Homo sapien
ggtgtacggatctggctgccctcct

SEQ ID NO: 3706793 - DNA, 25 bp, Homo sapien
ccatcggctgacaagacagaacatg

SEQ ID NO: 3706794 - DNA, 25 bp, Homo sapien
acatggtgtacggatctggctgccc

SEQ ID NO: 3706795 - DNA, 25 bp, Homo sapien
gggccacaatagcttcatgcttggg

SEQ ID NO: 3706796 - DNA, 25 bp, Homo sapien
tcatgcttggggaaatcatctgctg

SEQ ID NO: 3706797 - DNA, 25 bp, Homo sapien
tggggaaatcatctgctgtaaacat

SEQ ID NO: 3706798 - DNA, 25 bp, Homo sapien
tgggccacaatagcttcatgcttgg

SEQ ID NO: 3706799 - DNA, 25 bp, Homo sapien
tgtgctccagtgtacccatcctaga

SEQ ID NO: 3706800 - DNA, 25 bp, Homo sapien
cgcaaaaactctctgctgaagcaaa

SEQ ID NO: 3706801 - DNA, 25 bp, Homo sapien
tctgaagagatgtgctgccctaggg

SEQ ID NO: 3706802 - DNA, 25 bp, Homo sapien
tgaagcaaatccctggatgattggc

SEQ ID NO: 3706803 - DNA, 25 bp, Homo sapien
ccctgtagagattgatgtgatagtt

SEQ ID NO: 3706804 - DNA, 25 bp, Homo sapien
tctctggctccaattaaaatcaatg

SEQ ID NO: 3706805 - DNA, 25 bp, Homo sapien
tgcattcctcactcagataggagtg

SEQ ID NO: 3706806 - DNA, 25 bp, Homo sapien
aaaatcaatgccctgtagagattga

SEQ ID NO: 3706807 - DNA, 25 bp, Homo sapien
tgataacccatttctttttgtttga

SEQ ID NO: 3706808 - DNA, 25 bp, Homo sapien
ggtgatgataacccatttctttttg

SEQ ID NO: 3706809 - DNA, 25 bp, Homo sapien
tgatgataacccatttctttttgtt

SEQ ID NO: 3706810 - DNA, 25 bp, Homo sapien
atgataacccatttctttttgtttg

SEQ ID NO: 3706811 - DNA, 25 bp, Homo sapien
atttttccactgccctatgtttctt

SEQ ID NO: 3706812 - DNA, 25 bp, Homo sapien
gctgtaaatccagcattcatcttct

SEQ ID NO: 3706813 - DNA, 25 bp, Homo sapien
gagagaaagtatatcgatccttacc

SEQ ID NO: 3706814 - DNA, 25 bp, Homo sapien
tgctgtggcatttagactgtgtcga

SEQ ID NO: 3706815 - DNA, 25 bp, Homo sapien
ggtggttcagcatatcacccacatg

SEQ ID NO: 3706816 - DNA, 25 bp, Homo sapien
tgaccccacgacttgctagctggag

SEQ ID NO: 3706817 - DNA, 25 bp, Homo sapien
gaagaatattatgaggacaagcctg

SEQ ID NO: 3706818 - DNA, 25 bp, Homo sapien
tcatattaaatgcacttctaccctt

SEQ ID NO: 3706819 - DNA, 25 bp, Homo sapien
aaaaaatggaccctgccctgaagag

SEQ ID NO: 3706820 - DNA, 25 bp, Homo sapien
caaaatatatttcaacccattaagc

SEQ ID NO: 3706821 - DNA, 25 bp, Homo sapien
acatctagttgtaaagaggttcaca

SEQ ID NO: 3706822 - DNA, 25 bp, Homo sapien
gaataagtgggacaaatacaaagaa

SEQ ID NO: 3706823 - DNA, 25 bp, Homo sapien
gcaaacatgcatgctgaataagtgg

SEQ ID NO: 3706824 - DNA, 25 bp, Homo sapien
gctctagtattatttaggagaagga

SEQ ID NO: 3706825 - DNA, 25 bp, Homo sapien
taggagagatctgtctcacaaaacc

SEQ ID NO: 3706826 - DNA, 25 bp, Homo sapien
gaacctggaaatctcacctccttgg

SEQ ID NO: 3706827 - DNA, 25 bp, Homo sapien
caaatctatttcctgcacttgcaag

SEQ ID NO: 3706828 - DNA, 25 bp, Homo sapien
gtctcaagtcctaagaacgaggtgt

SEQ ID NO: 3706829 - DNA, 25 bp, Homo sapien
gtttatgcaatggaatgtttattgg

SEQ ID NO: 3706830 - DNA, 25 bp, Homo sapien
tggtaatcctagttgggtctttaga

SEQ ID NO: 3706831 - DNA, 25 bp, Homo sapien
tagaaatccttgagttacacttaca

SEQ ID NO: 3706832 - DNA, 25 bp, Homo sapien
gaagaggtagtatcataaaacaatg

SEQ ID NO: 3706833 - DNA, 25 bp, Homo sapien
tcacgtctagaaaagtgcatggcat

SEQ ID NO: 3706834 - DNA, 25 bp, Homo sapien
gttattcaggagtacagccaggtct

SEQ ID NO: 3706835 - DNA, 25 bp, Homo sapien
ccacgagtatgtaggctacaggaga

SEQ ID NO: 3706836 - DNA, 25 bp, Homo sapien
catatcctacatatacgtacgtgtg

SEQ ID NO: 3706837 - DNA, 25 bp, Homo sapien
tattggacattggttattaacaaaa

SEQ ID NO: 3706838 - DNA, 25 bp, Homo sapien
cttcggggaactcttactagttcat

SEQ ID NO: 3706839 - DNA, 25 bp, Homo sapien
tggagtcttttgtgagattcggaag

SEQ ID NO: 3706840 - DNA, 25 bp, Homo sapien
tagtcctttatgacatctaatttca

SEQ ID NO: 3706841 - DNA, 25 bp, Homo sapien
ctattcaggagtctgtcatgtctgg

SEQ ID NO: 3706842 - DNA, 25 bp, Homo sapien
ttagcaagttggaaacacatttgac

SEQ ID NO: 3706843 - DNA, 25 bp, Homo sapien
gactcttttgaattctgtgccttgg

SEQ ID NO: 3706844 - DNA, 25 bp, Homo sapien
tgtctgggcttactaaattctacca

SEQ ID NO: 3706845 - DNA, 25 bp, Homo sapien
ggaataggatcctgtcttgttaggg

SEQ ID NO: 3706846 - DNA, 25 bp, Homo sapien
tttctccatagtgtggaataggatc

SEQ ID NO: 3706847 - DNA, 25 bp, Homo sapien
ttaagaatttgtctggcccagattg

SEQ ID NO: 3706848 - DNA, 25 bp, Homo sapien
taagaatttgtctggcccagattga

SEQ ID NO: 3706849 - DNA, 25 bp, Homo sapien
cttccagagtgtcaaaaagaactga

SEQ ID NO: 3706850 - DNA, 25 bp, Homo sapien
ttccagagtgtcaaaaagaactgat

SEQ ID NO: 3706851 - DNA, 25 bp, Homo sapien
tccagagtgtcaaaaagaactgata

SEQ ID NO: 3706852 - DNA, 25 bp, Homo sapien
tcctttatccagtgttgaacttcca

SEQ ID NO: 3706853 - DNA, 25 bp, Homo sapien
cattcctggattatttcctttatcc

SEQ ID NO: 3706854 - DNA, 25 bp, Homo sapien
tttcctttatccagtgttgaacttc

SEQ ID NO: 3706855 - DNA, 25 bp, Homo sapien
ctttatccagtgttgaacttccagt

SEQ ID NO: 3706856 - DNA, 25 bp, Homo sapien
ttctataatagccacataccccagg

SEQ ID NO: 3706857 - DNA, 25 bp, Homo sapien
ggcaatctggctgtcccctttattt

SEQ ID NO: 3706858 - DNA, 25 bp, Homo sapien
gatgaatcacttcagggagtgtccc

SEQ ID NO: 3706859 - DNA, 25 bp, Homo sapien
gggtaaagtaatggatctctggcaa

SEQ ID NO: 3706860 - DNA, 25 bp, Homo sapien
ttattggtgctctaaaataaaagga

SEQ ID NO: 3706861 - DNA, 25 bp, Homo sapien
gatgtagattctaattattggtgct

SEQ ID NO: 3706862 - DNA, 25 bp, Homo sapien
tgcagtgtgctggaaactttccctc

SEQ ID NO: 3706863 - DNA, 25 bp, Homo sapien
aataagtatgctcattgcagtgtgc

SEQ ID NO: 3706864 - DNA, 25 bp, Homo sapien
caagagagtaccaagagacaccgaa

SEQ ID NO: 3706865 - DNA, 25 bp, Homo sapien
gagccccatgatcaccacattcttt

SEQ ID NO: 3706866 - DNA, 25 bp, Homo sapien
agagacaccgaattacttgactggt

SEQ ID NO: 3706867 - DNA, 25 bp, Homo sapien
ctggacatggttttgagccccatga

SEQ ID NO: 3706868 - DNA, 25 bp, Homo sapien
gcattggtttcaacgtcattgcatt

SEQ ID NO: 3706869 - DNA, 25 bp, Homo sapien
tggtttcaacgtcattgcatttttc

SEQ ID NO: 3706870 - DNA, 25 bp, Homo sapien
ttgcattggtttcaacgtcattgca

SEQ ID NO: 3706871 - DNA, 25 bp, Homo sapien
cattggtttcaacgtcattgcattt

SEQ ID NO: 3706872 - DNA, 25 bp, Homo sapien
ttcttgtgaacctttgtgtgcagta

SEQ ID NO: 3706873 - DNA, 25 bp, Homo sapien
ttcaaagcccggttgaggactgtta

SEQ ID NO: 3706874 - DNA, 25 bp, Homo sapien
tttttcctgacataatccatacaca

SEQ ID NO: 3706875 - DNA, 25 bp, Homo sapien
ccggttgaggactgttatcatgggt

SEQ ID NO: 3706876 - DNA, 25 bp, Homo sapien
ttttagccattgcatgtccccaaaa

SEQ ID NO: 3706877 - DNA, 25 bp, Homo sapien
gtccccaaaagctaagggcagattg

SEQ ID NO: 3706878 - DNA, 25 bp, Homo sapien
acaagggcttttagccattgcatgt

SEQ ID NO: 3706879 - DNA, 25 bp, Homo sapien
ggcttttagccattgcatgtcccca

SEQ ID NO: 3706880 - DNA, 25 bp, Homo sapien
tccagggtcagttttattataaatc

SEQ ID NO: 3706881 - DNA, 25 bp, Homo sapien
atccagggtcagttttattataaat

SEQ ID NO: 3706882 - DNA, 25 bp, Homo sapien
caatccagggtcagttttattataa

SEQ ID NO: 3706883 - DNA, 25 bp, Homo sapien
cagggtcagttttattataaatcat

SEQ ID NO: 3706884 - DNA, 25 bp, Homo sapien
ttttcggcaactcttgaagtcttgt

SEQ ID NO: 3706885 - DNA, 25 bp, Homo sapien
ctttgtccacctattttcggcaact

SEQ ID NO: 3706886 - DNA, 25 bp, Homo sapien
gaagtcttgtttgggcagatccctt

SEQ ID NO: 3706887 - DNA, 25 bp, Homo sapien
cttgaagtcttgtttgggcagatcc

SEQ ID NO: 3706888 - DNA, 25 bp, Homo sapien
gtttgataacattaaagcggctcgg

SEQ ID NO: 3706889 - DNA, 25 bp, Homo sapien
tcttgagtttgataacattaaagcg

SEQ ID NO: 3706890 - DNA, 25 bp, Homo sapien
cattaaagcggctcggttggttgct

SEQ ID NO: 3706891 - DNA, 25 bp, Homo sapien
ggttgctggccatcacttttagtgt

SEQ ID NO: 3706892 - DNA, 25 bp, Homo sapien
cttctcattataatcttctgtagta

SEQ ID NO: 3706893 - DNA, 25 bp, Homo sapien
ttctcattataatcttctgtagtag

SEQ ID NO: 3706894 - DNA, 25 bp, Homo sapien
tcttctcattataatcttctgtagt

SEQ ID NO: 3706895 - DNA, 25 bp, Homo sapien
caatttattgctagggtccgagtac

SEQ ID NO: 3706896 - DNA, 25 bp, Homo sapien
tattgctagggtccgagtacctggg

SEQ ID NO: 3706897 - DNA, 25 bp, Homo sapien
tgctagggtccgagtacctgggtac

SEQ ID NO: 3706898 - DNA, 25 bp, Homo sapien
tgttcccaatttattgctagggtcc

SEQ ID NO: 3706899 - DNA, 25 bp, Homo sapien
caaatgggaagctttgcaccctgag

SEQ ID NO: 3706900 - DNA, 25 bp, Homo sapien
taaagccttctaacagtgttaaaca

SEQ ID NO: 3706901 - DNA, 25 bp, Homo sapien
gagatcaagacaatcactagcagag

SEQ ID NO: 3706902 - DNA, 25 bp, Homo sapien
tttgcaccctgagagatcaagacaa

SEQ ID NO: 3706903 - DNA, 25 bp, Homo sapien
tgttaaacatagatggcttggcccc

SEQ ID NO: 3706904 - DNA, 25 bp, Homo sapien
cagagccatctagagggattgttaa

SEQ ID NO: 3706905 - DNA, 25 bp, Homo sapien
caaactttagggtatttcagagcca

SEQ ID NO: 3706906 - DNA, 25 bp, Homo sapien
taggtaatgataaatgcacactgtg

SEQ ID NO: 3706907 - DNA, 25 bp, Homo sapien
cagtgcagctgtagaaggcttggaa

SEQ ID NO: 3706908 - DNA, 25 bp, Homo sapien
tgtggcctgtacatcatagagaggt

SEQ ID NO: 3706909 - DNA, 25 bp, Homo sapien
agtgcagctgtagaaggcttggaac

SEQ ID NO: 3706910 - DNA, 25 bp, Homo sapien
tcagtgcagctgtagaaggcttgga

SEQ ID NO: 3706911 - DNA, 25 bp, Homo sapien
ctttataggcttaaactgacatttg

SEQ ID NO: 3706912 - DNA, 25 bp, Homo sapien
tgtattgctttataggcttaaactg

SEQ ID NO: 3706913 - DNA, 25 bp, Homo sapien
catctagttgtattgctttataggc

SEQ ID NO: 3706914 - DNA, 25 bp, Homo sapien
aatgccatctagttgtattgcttta

SEQ ID NO: 3706915 - DNA, 25 bp, Homo sapien
tctgagcttggaacctgatgtaaag

SEQ ID NO: 3706916 - DNA, 25 bp, Homo sapien
gaacctgatgtaaagcgatcccttg

SEQ ID NO: 3706917 - DNA, 25 bp, Homo sapien
acctgatgtaaagcgatcccttgct

SEQ ID NO: 3706918 - DNA, 25 bp, Homo sapien
cttggaacctgatgtaaagcgatcc

SEQ ID NO: 3706919 - DNA, 25 bp, Homo sapien
tttcagtgagaatttggaatacatg

SEQ ID NO: 3706920 - DNA, 25 bp, Homo sapien
tttggaatacatgaaagagatggga

SEQ ID NO: 3706921 - DNA, 25 bp, Homo sapien
ttcgatcgttatctaaatagtgttg

SEQ ID NO: 3706922 - DNA, 25 bp, Homo sapien
tacacagatatgtcgttcctttcga

SEQ ID NO: 3706923 - DNA, 25 bp, Homo sapien
gatatgtcgttcctttcgatcgtta

SEQ ID NO: 3706924 - DNA, 25 bp, Homo sapien
agacacgtacacagatatgtcgttc

SEQ ID NO: 3706925 - DNA, 25 bp, Homo sapien
tgttaccaactagaggttgcctcag

SEQ ID NO: 3706926 - DNA, 25 bp, Homo sapien
cagttcggcagccttgcagctttga

SEQ ID NO: 3706927 - DNA, 25 bp, Homo sapien
tgacatcacttgtggtttgcagaag

SEQ ID NO: 3706928 - DNA, 25 bp, Homo sapien
catgcagtgctgtctagtgctcctg

SEQ ID NO: 3706929 - DNA, 25 bp, Homo sapien
tagaaacagcggagacttccatcat

SEQ ID NO: 3706930 - DNA, 25 bp, Homo sapien
gacatcagtagaaacagcggagact

SEQ ID NO: 3706931 - DNA, 25 bp, Homo sapien
tgcctgagaggctgcccaactgaat

SEQ ID NO: 3706932 - DNA, 25 bp, Homo sapien
gcagattgggagtctgttctactta

SEQ ID NO: 3706933 - DNA, 25 bp, Homo sapien
tcccaacaggcatgagagttatcgc

SEQ ID NO: 3706934 - DNA, 25 bp, Homo sapien
tagtggccgttcaagcattagagga

SEQ ID NO: 3706935 - DNA, 25 bp, Homo sapien
tgacaggaagcttgtgcgctgcgct

SEQ ID NO: 3706936 - DNA, 25 bp, Homo sapien
gggcctgcacccaagaaagtctaag

SEQ ID NO: 3706937 - DNA, 25 bp, Homo sapien
tattctgttcactgttttctaccat

SEQ ID NO: 3706938 - DNA, 25 bp, Homo sapien
catattctgttcactgttttctacc

SEQ ID NO: 3706939 - DNA, 25 bp, Homo sapien
atattctgttcactgttttctacca

SEQ ID NO: 3706940 - DNA, 25 bp, Homo sapien
acagatagtgaaccctcatagtctc

SEQ ID NO: 3706941 - DNA, 25 bp, Homo sapien
aaaagtcttgtatatcttccagcaa

SEQ ID NO: 3706942 - DNA, 25 bp, Homo sapien
tccggtctatcttcatttaagtatt

SEQ ID NO: 3706943 - DNA, 25 bp, Homo sapien
cagcaaacagatagtgaaccctcat

SEQ ID NO: 3706944 - DNA, 25 bp, Homo sapien
tagctcaaggcaatattaaattcag

SEQ ID NO: 3706945 - DNA, 25 bp, Homo sapien
acatcttgacgaaaatgagaaaacc

SEQ ID NO: 3706946 - DNA, 25 bp, Homo sapien
tagtgatagtttcccgctagtgtcc

SEQ ID NO: 3706947 - DNA, 25 bp, Homo sapien
agaagacatttacacggccaatgaa

SEQ ID NO: 3706948 - DNA, 25 bp, Homo sapien
gcttttgttgattttaagtgtccaa

SEQ ID NO: 3706949 - DNA, 25 bp, Homo sapien
tgttgattttaagtgtccaatatat

SEQ ID NO: 3706950 - DNA, 25 bp, Homo sapien
gttgctaagtagagtcataggaaag

SEQ ID NO: 3706951 - DNA, 25 bp, Homo sapien
aagttgctaagtagagtcataggaa

SEQ ID NO: 3706952 - DNA, 25 bp, Homo sapien
tgtgaaaagataccacgtttgggac

SEQ ID NO: 3706953 - DNA, 25 bp, Homo sapien
caagaattcggataaaatacatcat

SEQ ID NO: 3706954 - DNA, 25 bp, Homo sapien
aaagacaccatgagtaattccaaga

SEQ ID NO: 3706955 - DNA, 25 bp, Homo sapien
gcttcaggtttcacagatctttaat

SEQ ID NO: 3706956 - DNA, 25 bp, Homo sapien
tctataaaggccaaggatataacca

SEQ ID NO: 3706957 - DNA, 25 bp, Homo sapien
catattcttcatcagggtagcccca

SEQ ID NO: 3706958 - DNA, 25 bp, Homo sapien
tattgtctgtcctccaataaggaat

SEQ ID NO: 3706959 - DNA, 25 bp, Homo sapien
catcttcggttacaatatcatattc

SEQ ID NO: 3706960 - DNA, 25 bp, Homo sapien
taggtctgctgctacaaaacgagga

SEQ ID NO: 3706961 - DNA, 25 bp, Homo sapien
tatctagaggccctggtctccagag

SEQ ID NO: 3706962 - DNA, 25 bp, Homo sapien
tctctaatctcagggtgggaccacc

SEQ ID NO: 3706963 - DNA, 25 bp, Homo sapien
gatatgaatatgttagcccctaggg

SEQ ID NO: 3706964 - DNA, 25 bp, Homo sapien
tggaactcgtttctaggtacaagtg

SEQ ID NO: 3706965 - DNA, 25 bp, Homo sapien
caaaccatgttgcaagtatacaaca

SEQ ID NO: 3706966 - DNA, 25 bp, Homo sapien
gaagcccagactattgttgggaaga

SEQ ID NO: 3706967 - DNA, 25 bp, Homo sapien
gctgctggcagatgtaagcaaacca

SEQ ID NO: 3706968 - DNA, 25 bp, Homo sapien
cataaattgtaatagtctatggaaa

SEQ ID NO: 3706969 - DNA, 25 bp, Homo sapien
aattcacataaattgtaatagtcta

SEQ ID NO: 3706970 - DNA, 25 bp, Homo sapien
aattgtaatagtctatggaaagtcc

SEQ ID NO: 3706971 - DNA, 25 bp, Homo sapien
tcacataaattgtaatagtctatgg

SEQ ID NO: 3706972 - DNA, 25 bp, Homo sapien
caatagtagtaccctgtgaatggcc

SEQ ID NO: 3706973 - DNA, 25 bp, Homo sapien
ttgtctggtttgcttcacagtgaaa

SEQ ID NO: 3706974 - DNA, 25 bp, Homo sapien
gtagtaccctgtgaatggcctacat

SEQ ID NO: 3706975 - DNA, 25 bp, Homo sapien
tgtctggtttgcttcacagtgaaat

SEQ ID NO: 3706976 - DNA, 25 bp, Homo sapien
ttaagggatattagcaataatcttt

SEQ ID NO: 3706977 - DNA, 25 bp, Homo sapien
tattagcttcattataagatggctt

SEQ ID NO: 3706978 - DNA, 25 bp, Homo sapien
ttaatattagcttcattataagatg

SEQ ID NO: 3706979 - DNA, 25 bp, Homo sapien
agcttcattataagatggctttttc

SEQ ID NO: 3706980 - DNA, 25 bp, Homo sapien
taatattagcttcattataagatgg

SEQ ID NO: 3706981 - DNA, 25 bp, Homo sapien
ctttcagctatctttgatatagtag

SEQ ID NO: 3706982 - DNA, 25 bp, Homo sapien
tcagctatctttgatatagtagaaa

SEQ ID NO: 3706983 - DNA, 25 bp, Homo sapien
tttcagctatctttgatatagtaga

SEQ ID NO: 3706984 - DNA, 25 bp, Homo sapien
tctttcagctatctttgatatagta

SEQ ID NO: 3706985 - DNA, 25 bp, Homo sapien
tatcaaaaatctgtagtggacacag

SEQ ID NO: 3706986 - DNA, 25 bp, Homo sapien
gggtcatatccaaacatcataaaca

SEQ ID NO: 3706987 - DNA, 25 bp, Homo sapien
caagaagtctttgttgcctgaaaaa

SEQ ID NO: 3706988 - DNA, 25 bp, Homo sapien
taaacaagatattgaggcaaatctt

SEQ ID NO: 3706989 - DNA, 25 bp, Homo sapien
gaggcttatacaacccaaatcgcac

SEQ ID NO: 3706990 - DNA, 25 bp, Homo sapien
tacaacccaaatcgcactgttctgt

SEQ ID NO: 3706991 - DNA, 25 bp, Homo sapien
caaatcgcactgttctgttcatcct

SEQ ID NO: 3706992 - DNA, 25 bp, Homo sapien
gtaggtcagaggcttatacaaccca

SEQ ID NO: 3706993 - DNA, 25 bp, Homo sapien
gatgttcctgctgggttgtgtgaaa

SEQ ID NO: 3706994 - DNA, 25 bp, Homo sapien
gtgaaaaatacacatccaaacgact

SEQ ID NO: 3706995 - DNA, 25 bp, Homo sapien
ctgactccaatgaagcatattttga

SEQ ID NO: 3706996 - DNA, 25 bp, Homo sapien
cctgctgggttgtgtgaaaaataca

SEQ ID NO: 3706997 - DNA, 25 bp, Homo sapien
tttaaaagtggaatagctttgaagc

SEQ ID NO: 3706998 - DNA, 25 bp, Homo sapien
taaaagtggaatagctttgaagcat

SEQ ID NO: 3706999 - DNA, 25 bp, Homo sapien
agctttgaagcattgggcaagtcga

SEQ ID NO: 3707000 - DNA, 25 bp, Homo sapien
cattgggcaagtcgactgtgggaca

SEQ ID NO: 3707001 - DNA, 25 bp, Homo sapien
gctggtatttatgcaggtgggcttc

SEQ ID NO: 3707002 - DNA, 25 bp, Homo sapien
tatttatgcaggtgggcttcttcgt

SEQ ID NO: 3707003 - DNA, 25 bp, Homo sapien
ctgctggtatttatgcaggtgggct

SEQ ID NO: 3707004 - DNA, 25 bp, Homo sapien
atgcaggtgggcttcttcgttcttc

SEQ ID NO: 3707005 - DNA, 25 bp, Homo sapien
cagatcaggactgccccagtcataa

SEQ ID NO: 3707006 - DNA, 25 bp, Homo sapien
atgaaccaagttcagatcaggactg

SEQ ID NO: 3707007 - DNA, 25 bp, Homo sapien
taatgaaccaagttcagatcaggac

SEQ ID NO: 3707008 - DNA, 25 bp, Homo sapien
tataatgaaccaagttcagatcagg

SEQ ID NO: 3707009 - DNA, 25 bp, Homo sapien
caacaagtcacttttaccattccaa

SEQ ID NO: 3707010 - DNA, 25 bp, Homo sapien
catggtaaacttgatcatagacatc

SEQ ID NO: 3707011 - DNA, 25 bp, Homo sapien
atgtaaaatgttaacgtcttcaggg

SEQ ID NO: 3707012 - DNA, 25 bp, Homo sapien
gtcttcagggtcagccaacaagtca

SEQ ID NO: 3707013 - DNA, 25 bp, Homo sapien
tttaaacacacagcgccatggttct

SEQ ID NO: 3707014 - DNA, 25 bp, Homo sapien
aagaattggatttcattaggaatga

SEQ ID NO: 3707015 - DNA, 25 bp, Homo sapien
aatgatgtagatctttaaacacaca

SEQ ID NO: 3707016 - DNA, 25 bp, Homo sapien
tcattaggaatgatgtagatcttta

SEQ ID NO: 3707017 - DNA, 25 bp, Homo sapien
ccattttgtgaatttaatccattga

SEQ ID NO: 3707018 - DNA, 25 bp, Homo sapien
tatatatcaggatgcctttagtttc

SEQ ID NO: 3707019 - DNA, 25 bp, Homo sapien
ttaatccattgatgccttttcctct

SEQ ID NO: 3707020 - DNA, 25 bp, Homo sapien
gaagatctcccttatgctatcccca

SEQ ID NO: 3707021 - DNA, 25 bp, Homo sapien
ctgatcccaagccttccccggacat

SEQ ID NO: 3707022 - DNA, 25 bp, Homo sapien
cccctttcagctgatcccaagcctt

SEQ ID NO: 3707023 - DNA, 25 bp, Homo sapien
ttggctagatgccctcagcatcttc

SEQ ID NO: 3707024 - DNA, 25 bp, Homo sapien
tggctagatgccctcagcatcttcc

SEQ ID NO: 3707025 - DNA, 25 bp, Homo sapien
ttaaaagttgtgtatgtctgagatg

SEQ ID NO: 3707026 - DNA, 25 bp, Homo sapien
gtttccctcggtacctgacaactca

SEQ ID NO: 3707027 - DNA, 25 bp, Homo sapien
tgtttccctcggtacctgacaactc

SEQ ID NO: 3707028 - DNA, 25 bp, Homo sapien
tcttgtttccctcggtacctgacaa

SEQ ID NO: 3707029 - DNA, 25 bp, Homo sapien
ttttggtcaatgttgtattgacttc

SEQ ID NO: 3707030 - DNA, 25 bp, Homo sapien
ctctggctggttagtattttggtca

SEQ ID NO: 3707031 - DNA, 25 bp, Homo sapien
caatgttgtattgacttcttatata

SEQ ID NO: 3707032 - DNA, 25 bp, Homo sapien
gtttctctggctggttagtattttg

SEQ ID NO: 3707033 - DNA, 25 bp, Homo sapien
atttctcaaaatgcttgttgccaag

SEQ ID NO: 3707034 - DNA, 25 bp, Homo sapien
gagaacatctcaatgggctcaaaga

SEQ ID NO: 3707035 - DNA, 25 bp, Homo sapien
tctcaatgggctcaaagatgttcaa

SEQ ID NO: 3707036 - DNA, 25 bp, Homo sapien
tgcgttggagaacatctcaatgggc

SEQ ID NO: 3707037 - DNA, 25 bp, Homo sapien
acatttcaggaacccacatgacctc

SEQ ID NO: 3707038 - DNA, 25 bp, Homo sapien
caaacatttcaggaacccacatgac

SEQ ID NO: 3707039 - DNA, 25 bp, Homo sapien
aacatttcaggaacccacatgacct

SEQ ID NO: 3707040 - DNA, 25 bp, Homo sapien
aaacatttcaggaacccacatgacc

SEQ ID NO: 3707041 - DNA, 25 bp, Homo sapien
tagtccccagtacagatatcaaact

SEQ ID NO: 3707042 - DNA, 25 bp, Homo sapien
ccaaacaaaccatgtgtagtcccca

SEQ ID NO: 3707043 - DNA, 25 bp, Homo sapien
gttcatagtcacttcagggcttcca

SEQ ID NO: 3707044 - DNA, 25 bp, Homo sapien
aatgttcatagtcacttcagggctt

SEQ ID NO: 3707045 - DNA, 25 bp, Homo sapien
tcatttgggtatccccaataagtaa

SEQ ID NO: 3707046 - DNA, 25 bp, Homo sapien
tatccccaataagtaatcatctgac

SEQ ID NO: 3707047 - DNA, 25 bp, Homo sapien
catattcttcatttgggtatcccca

SEQ ID NO: 3707048 - DNA, 25 bp, Homo sapien
ttcatattcttcatttgggtatccc

SEQ ID NO: 3707049 - DNA, 25 bp, Homo sapien
tcttcccataaggaattctattgac

SEQ ID NO: 3707050 - DNA, 25 bp, Homo sapien
gctgatgcaagcaaaccatgctgca

SEQ ID NO: 3707051 - DNA, 25 bp, Homo sapien
ggcaaggctgttgttcggcaggttg

SEQ ID NO: 3707052 - DNA, 25 bp, Homo sapien
ttgtggctgatgcaagcaaaccatg

SEQ ID NO: 3707053 - DNA, 25 bp, Homo sapien
tgcaagcaaaccatgctgcaaaaac

SEQ ID NO: 3707054 - DNA, 25 bp, Homo sapien
ttcaactgaatctggtgaatagtac

SEQ ID NO: 3707055 - DNA, 25 bp, Homo sapien
ctgaatctggtgaatagtacaagtt

SEQ ID NO: 3707056 - DNA, 25 bp, Homo sapien
tggtgaatagtacaagtttcttctg

SEQ ID NO: 3707057 - DNA, 25 bp, Homo sapien
tctggtgaatagtacaagtttcttc

SEQ ID NO: 3707058 - DNA, 25 bp, Homo sapien
tttacaatgaagtcgattgtggctg

SEQ ID NO: 3707059 - DNA, 25 bp, Homo sapien
ctttacaatgaagtcgattgtggct

SEQ ID NO: 3707060 - DNA, 25 bp, Homo sapien
tggccaacatagtgtagctgcttct

SEQ ID NO: 3707061 - DNA, 25 bp, Homo sapien
tgagacagcctgagaaattggcatc

SEQ ID NO: 3707062 - DNA, 25 bp, Homo sapien
aaggatggtgtttgagacagcctga

SEQ ID NO: 3707063 - DNA, 25 bp, Homo sapien
taaggatggtgtttgagacagcctg

SEQ ID NO: 3707064 - DNA, 25 bp, Homo sapien
caggctgggattggtggaaaaggca

SEQ ID NO: 3707065 - DNA, 25 bp, Homo sapien
tagccaggctgggattggtggaaaa

SEQ ID NO: 3707066 - DNA, 25 bp, Homo sapien
tcacagtggcaacaggagctagagc

SEQ ID NO: 3707067 - DNA, 25 bp, Homo sapien
ggcaacaggagctagagcatagaag

SEQ ID NO: 3707068 - DNA, 25 bp, Homo sapien
attgaggaacaaatctaagtttgtt

SEQ ID NO: 3707069 - DNA, 25 bp, Homo sapien
tgaggaacaaatctaagtttgttta

SEQ ID NO: 3707070 - DNA, 25 bp, Homo sapien
tagcaagaaattgatcaaagaagtt

SEQ ID NO: 3707071 - DNA, 25 bp, Homo sapien
attataaataaggcattgctgcaaa

SEQ ID NO: 3707072 - DNA, 25 bp, Homo sapien
agattcagcatctcacgggagcaca

SEQ ID NO: 3707073 - DNA, 25 bp, Homo sapien
aaagttcttactgtcaaatccacaa

SEQ ID NO: 3707074 - DNA, 25 bp, Homo sapien
caaaggagattcagcatctcacggg

SEQ ID NO: 3707075 - DNA, 25 bp, Homo sapien
gtgctatatgctttgtacaatgttc

SEQ ID NO: 3707076 - DNA, 25 bp, Homo sapien
cgtttaagtcagttccaaatgtagg

SEQ ID NO: 3707077 - DNA, 25 bp, Homo sapien
actccaactcaatacaaagtgaatg

SEQ ID NO: 3707078 - DNA, 25 bp, Homo sapien
aacatactagctcatttgatcttcc

SEQ ID NO: 3707079 - DNA, 25 bp, Homo sapien
ctagaaatcaacagacacacatatt

SEQ ID NO: 3707080 - DNA, 25 bp, Homo sapien
tatacatactaagacacatactcag

SEQ ID NO: 3707081 - DNA, 25 bp, Homo sapien
tacatactaagacacatactcagtt

SEQ ID NO: 3707082 - DNA, 25 bp, Homo sapien
tactaagacacatactcagtttctt

SEQ ID NO: 3707083 - DNA, 25 bp, Homo sapien
gtgatagatacacatccaagcgact

SEQ ID NO: 3707084 - DNA, 25 bp, Homo sapien
ctgctggattatgtgatagatacac

SEQ ID NO: 3707085 - DNA, 25 bp, Homo sapien
gttttgaacagaagttcctgctgga

SEQ ID NO: 3707086 - DNA, 25 bp, Homo sapien
gttcctgctggattatgtgatagat

SEQ ID NO: 3707087 - DNA, 25 bp, Homo sapien
tagtgcatcctattctgaactgggc

SEQ ID NO: 3707088 - DNA, 25 bp, Homo sapien
ctgatcatagtgcatcctattctga

SEQ ID NO: 3707089 - DNA, 25 bp, Homo sapien
cagtcataagcttggaatttcccag

SEQ ID NO: 3707090 - DNA, 25 bp, Homo sapien
cttggaatttcccagacttaacagc

SEQ ID NO: 3707091 - DNA, 25 bp, Homo sapien
tgtcacattgtagtagggaggttgg

SEQ ID NO: 3707092 - DNA, 25 bp, Homo sapien
tcacattgtagtagggaggttggga

SEQ ID NO: 3707093 - DNA, 25 bp, Homo sapien
ctgtcacattgtagtagggaggttg

SEQ ID NO: 3707094 - DNA, 25 bp, Homo sapien
gtcacattgtagtagggaggttggg

SEQ ID NO: 3707095 - DNA, 25 bp, Homo sapien
ataaagtccaagtgattgtaaaaag

SEQ ID NO: 3707096 - DNA, 25 bp, Homo sapien
ttttggaagcaaaaggccaacatct

SEQ ID NO: 3707097 - DNA, 25 bp, Homo sapien
aaggaatctccttgtggtaaataag

SEQ ID NO: 3707098 - DNA, 25 bp, Homo sapien
aggtccttgccaccgttccacactg

SEQ ID NO: 3707099 - DNA, 25 bp, Homo sapien
tatcatagaaacaatgtcattgtaa

SEQ ID NO: 3707100 - DNA, 25 bp, Homo sapien
ttatcttctgatatcatagaaacaa

SEQ ID NO: 3707101 - DNA, 25 bp, Homo sapien
ttctgatatcatagaaacaatgtca

SEQ ID NO: 3707102 - DNA, 25 bp, Homo sapien
ttttatcttctgatatcatagaaac

SEQ ID NO: 3707103 - DNA, 25 bp, Homo sapien
aatactatgtatgagagaataaagt

SEQ ID NO: 3707104 - DNA, 25 bp, Homo sapien
caaacggataattctttaaatccag

SEQ ID NO: 3707105 - DNA, 25 bp, Homo sapien
ttatgaaaatactatgtatgagaga

SEQ ID NO: 3707106 - DNA, 25 bp, Homo sapien
aggtagtttgcaggtatttatctgc

SEQ ID NO: 3707107 - DNA, 25 bp, Homo sapien
ttccacattcaaaaaaggcaccgtc

SEQ ID NO: 3707108 - DNA, 25 bp, Homo sapien
aaaggcaccgtcacagtctggcttc

SEQ ID NO: 3707109 - DNA, 25 bp, Homo sapien
tatttctcttttgcactaccatgtc

SEQ ID NO: 3707110 - DNA, 25 bp, Homo sapien
cacgcagactggttgtttctgcatc

SEQ ID NO: 3707111 - DNA, 25 bp, Homo sapien
tcacgcagactggttgtttctgcat

SEQ ID NO: 3707112 - DNA, 25 bp, Homo sapien
atcacgcagactggttgtttctgca

SEQ ID NO: 3707113 - DNA, 25 bp, Homo sapien
cgcagactggttgtttctgcatctc

SEQ ID NO: 3707114 - DNA, 25 bp, Homo sapien
ctatgagctttccagcttgctccac

SEQ ID NO: 3707115 - DNA, 25 bp, Homo sapien
ccacttctgaggttgctgggtcagg

SEQ ID NO: 3707116 - DNA, 25 bp, Homo sapien
gatacaattgtacagccttttctgg

SEQ ID NO: 3707117 - DNA, 25 bp, Homo sapien
ttctggatctacattttctatgagc

SEQ ID NO: 3707118 - DNA, 25 bp, Homo sapien
ttcaggtgcattccagatccttcca

SEQ ID NO: 3707119 - DNA, 25 bp, Homo sapien
ccaagtctttggaggtctgtcttca

SEQ ID NO: 3707120 - DNA, 25 bp, Homo sapien
tgaagttgtcacattatactcttgc

SEQ ID NO: 3707121 - DNA, 25 bp, Homo sapien
gaagttgtcacattatactcttgct

SEQ ID NO: 3707122 - DNA, 25 bp, Homo sapien
cagtcatttttattgttgctgtcat

SEQ ID NO: 3707123 - DNA, 25 bp, Homo sapien
tgcattgttaccagtcatttttatt

SEQ ID NO: 3707124 - DNA, 25 bp, Homo sapien
taccagtcatttttattgttgctgt

SEQ ID NO: 3707125 - DNA, 25 bp, Homo sapien
ttgcattgttaccagtcatttttat

SEQ ID NO: 3707126 - DNA, 25 bp, Homo sapien
atccagcatgctgctgctaaaagct

SEQ ID NO: 3707127 - DNA, 25 bp, Homo sapien
gcatccagcatgctgctgctaaaag

SEQ ID NO: 3707128 - DNA, 25 bp, Homo sapien
gaagcatccagcatgctgctgctaa

SEQ ID NO: 3707129 - DNA, 25 bp, Homo sapien
tagatccaagaagaagcatccagca

SEQ ID NO: 3707130 - DNA, 25 bp, Homo sapien
tattcatattagcttcagggtttgc

SEQ ID NO: 3707131 - DNA, 25 bp, Homo sapien
aatattcatattagcttcagggttt

SEQ ID NO: 3707132 - DNA, 25 bp, Homo sapien
catattagcttcagggtttgcattg

SEQ ID NO: 3707133 - DNA, 25 bp, Homo sapien
tcatattagcttcagggtttgcatt

SEQ ID NO: 3707134 - DNA, 25 bp, Homo sapien
ttgttgacctgtccttacagttcag

SEQ ID NO: 3707135 - DNA, 25 bp, Homo sapien
gtcaagggagcttgttgacctgtcc

SEQ ID NO: 3707136 - DNA, 25 bp, Homo sapien
tgttgacctgtccttacagttcagc

SEQ ID NO: 3707137 - DNA, 25 bp, Homo sapien
cctataaattccaaggatataacca

SEQ ID NO: 3707138 - DNA, 25 bp, Homo sapien
taaccatcttttgttgtaacatcat

SEQ ID NO: 3707139 - DNA, 25 bp, Homo sapien
catcatactcttcataaggataacc

SEQ ID NO: 3707140 - DNA, 25 bp, Homo sapien
gataaccccagtaagaaataatctg

SEQ ID NO: 3707141 - DNA, 25 bp, Homo sapien
tgctttaagtatttttcctttcata

SEQ ID NO: 3707142 - DNA, 25 bp, Homo sapien
ctgctttaagtatttttcctttcat

SEQ ID NO: 3707143 - DNA, 25 bp, Homo sapien
tctgctttaagtatttttcctttca

SEQ ID NO: 3707144 - DNA, 25 bp, Homo sapien
tgctgaaggcggagttctgggtcac

SEQ ID NO: 3707145 - DNA, 25 bp, Homo sapien
ctgctgaaggcggagttctgggtca

SEQ ID NO: 3707146 - DNA, 25 bp, Homo sapien
gctgaaggcggagttctgggtcacc

SEQ ID NO: 3707147 - DNA, 25 bp, Homo sapien
ttctgatacaagcactgggtatgct

SEQ ID NO: 3707148 - DNA, 25 bp, Homo sapien
agcttgaggttctgatacaagcact

SEQ ID NO: 3707149 - DNA, 25 bp, Homo sapien
actgggtatgctcctgtaccaacag

SEQ ID NO: 3707150 - DNA, 25 bp, Homo sapien
aagcactgggtatgctcctgtacca

SEQ ID NO: 3707151 - DNA, 25 bp, Homo sapien
ctcagcagactctgggtcacagtga

SEQ ID NO: 3707152 - DNA, 25 bp, Homo sapien
agccccagcatagacctcacccaga

SEQ ID NO: 3707153 - DNA, 25 bp, Homo sapien
tgggatccacctccacttttaggga

SEQ ID NO: 3707154 - DNA, 25 bp, Homo sapien
gcagactctgggtcacagtgaaaat

SEQ ID NO: 3707155 - DNA, 25 bp, Homo sapien
cacatggtctccagcatcttgttct

SEQ ID NO: 3707156 - DNA, 25 bp, Homo sapien
ccacatggtctccagcatcttgttc

SEQ ID NO: 3707157 - DNA, 25 bp, Homo sapien
acatggtctccagcatcttgttctg

SEQ ID NO: 3707158 - DNA, 25 bp, Homo sapien
ctcccagctgtcttctgctgctgca

SEQ ID NO: 3707159 - DNA, 25 bp, Homo sapien
ccagctgtcttctgctgctgcaggc

SEQ ID NO: 3707160 - DNA, 25 bp, Homo sapien
cagctgtcttctgctgctgcaggct

SEQ ID NO: 3707161 - DNA, 25 bp, Homo sapien
gttctcccagctgtcttctgctgct

SEQ ID NO: 3707162 - DNA, 25 bp, Homo sapien
agaaagttgttgatgcagctctcca

SEQ ID NO: 3707163 - DNA, 25 bp, Homo sapien
cagaaagttgttgatgcagctctcc

SEQ ID NO: 3707164 - DNA, 25 bp, Homo sapien
cgcagaaagttgttgatgcagctct

SEQ ID NO: 3707165 - DNA, 25 bp, Homo sapien
tgtaggtggcgctctcgatgcccaa

SEQ ID NO: 3707166 - DNA, 25 bp, Homo sapien
ccactgcttgtcttcctatgcatac

SEQ ID NO: 3707167 - DNA, 25 bp, Homo sapien
cccattgcaggggtcaatcttcttc

SEQ ID NO: 3707168 - DNA, 25 bp, Homo sapien
cggagtccccgccacagtcaaagct

SEQ ID NO: 3707169 - DNA, 25 bp, Homo sapien
attgcaggggtcaatcttcttcaca

SEQ ID NO: 3707170 - DNA, 25 bp, Homo sapien
ggtgcggctgaaagagccggagtcc

SEQ ID NO: 3707171 - DNA, 25 bp, Homo sapien
cttgggcaggacatcagaggactcg

SEQ ID NO: 3707172 - DNA, 25 bp, Homo sapien
ggcaggacatcagaggactcggata

SEQ ID NO: 3707173 - DNA, 25 bp, Homo sapien
cacttgggcaggacatcagaggact

SEQ ID NO: 3707174 - DNA, 25 bp, Homo sapien
ttgggcaggacatcagaggactcgg

SEQ ID NO: 3707175 - DNA, 25 bp, Homo sapien
ctgcaaatacacagcaggctttgga

SEQ ID NO: 3707176 - DNA, 25 bp, Homo sapien
tgcaaatacacagcaggctttggag

SEQ ID NO: 3707177 - DNA, 25 bp, Homo sapien
cgtcataaccactatctgccagaag

SEQ ID NO: 3707178 - DNA, 25 bp, Homo sapien
tactggcagatgcaattaagccatg

SEQ ID NO: 3707179 - DNA, 25 bp, Homo sapien
cagaaggaaagccaaactgttgttg

SEQ ID NO: 3707180 - DNA, 25 bp, Homo sapien
ctgaaggcccagtattccggtgatt

SEQ ID NO: 3707181 - DNA, 25 bp, Homo sapien
tagtagagtcgcttctgtccagttt

SEQ ID NO: 3707182 - DNA, 25 bp, Homo sapien
tggcccacgtagtagagtcgcttct

SEQ ID NO: 3707183 - DNA, 25 bp, Homo sapien
gtgccttgtgagtggcccacgtagt

SEQ ID NO: 3707184 - DNA, 25 bp, Homo sapien
tctctatgataaaattgattgtggc

SEQ ID NO: 3707185 - DNA, 25 bp, Homo sapien
tctgatcacatctgccccaaacaca

SEQ ID NO: 3707186 - DNA, 25 bp, Homo sapien
ctgatcacatctgccccaaacacac

SEQ ID NO: 3707187 - DNA, 25 bp, Homo sapien
attctctgatcacatctgccccaaa

SEQ ID NO: 3707188 - DNA, 25 bp, Homo sapien
tctctgatcacatctgccccaaaca

SEQ ID NO: 3707189 - DNA, 25 bp, Homo sapien
tttcataggactttgggtgtattta

SEQ ID NO: 3707190 - DNA, 25 bp, Homo sapien
tgggtgtatttaactgtgacaactg

SEQ ID NO: 3707191 - DNA, 25 bp, Homo sapien
taactgtgacaactggagccagtgc

SEQ ID NO: 3707192 - DNA, 25 bp, Homo sapien
tcataggactttgggtgtatttaac

SEQ ID NO: 3707193 - DNA, 25 bp, Homo sapien
gttttgcggatcaaatccactcaga

SEQ ID NO: 3707194 - DNA, 25 bp, Homo sapien
gcaaatacgacggaatagctttcga

SEQ ID NO: 3707195 - DNA, 25 bp, Homo sapien
ccactcagagtaaataggaagttgc

SEQ ID NO: 3707196 - DNA, 25 bp, Homo sapien
tagctttcgattgcacactttggtg

SEQ ID NO: 3707197 - DNA, 25 bp, Homo sapien
cagatgttcccgcaggattgtgtga

SEQ ID NO: 3707198 - DNA, 25 bp, Homo sapien
catattctgaacagatgttcccgca

SEQ ID NO: 3707199 - DNA, 25 bp, Homo sapien
gttcccgcaggattgtgtgacaaat

SEQ ID NO: 3707200 - DNA, 25 bp, Homo sapien
tgaacagatgttcccgcaggattgt

SEQ ID NO: 3707201 - DNA, 25 bp, Homo sapien
tattctcatcatgatttatattcag

SEQ ID NO: 3707202 - DNA, 25 bp, Homo sapien
ttctgatcagagtttccccaatcaa

SEQ ID NO: 3707203 - DNA, 25 bp, Homo sapien
tcagagtttccccaatcaaaagctt

SEQ ID NO: 3707204 - DNA, 25 bp, Homo sapien
gagtttccccaatcaaaagcttgga

SEQ ID NO: 3707205 - DNA, 25 bp, Homo sapien
tgatcagagtttccccaatcaaaag

SEQ ID NO: 3707206 - DNA, 25 bp, Homo sapien
gtaatgttgtataaaggaggtgtaa

SEQ ID NO: 3707207 - DNA, 25 bp, Homo sapien
aatccacatgattgtagtgtggaat

SEQ ID NO: 3707208 - DNA, 25 bp, Homo sapien
ttccatcaatataattaggtcttgg

SEQ ID NO: 3707209 - DNA, 25 bp, Homo sapien
gtggaatcagcttgtaataaataag

SEQ ID NO: 3707210 - DNA, 25 bp, Homo sapien
gtgtctgttcatctcattattatta

SEQ ID NO: 3707211 - DNA, 25 bp, Homo sapien
ctggggatcactctagtgtctgttc

SEQ ID NO: 3707212 - DNA, 25 bp, Homo sapien
tcactggggatcactctagtgtctg

SEQ ID NO: 3707213 - DNA, 25 bp, Homo sapien
aatcactggggatcactctagtgtc

SEQ ID NO: 3707214 - DNA, 25 bp, Homo sapien
tgtaatcagggattgacattttatc

SEQ ID NO: 3707215 - DNA, 25 bp, Homo sapien
tatcccacccacattgaatgggagg

SEQ ID NO: 3707216 - DNA, 25 bp, Homo sapien
cctaatcaagggtgtgacatcttac

SEQ ID NO: 3707217 - DNA, 25 bp, Homo sapien
ctgttggcttgaaagaagtctcata

SEQ ID NO: 3707218 - DNA, 25 bp, Homo sapien
caagtttattcaggtttgggcagaa

SEQ ID NO: 3707219 - DNA, 25 bp, Homo sapien
tctcaatgggaggttactagggaag

SEQ ID NO: 3707220 - DNA, 25 bp, Homo sapien
gctatgctcagttccttgtaaggtc

SEQ ID NO: 3707221 - DNA, 25 bp, Homo sapien
gtgtgtcagtagtccaggcatggca

SEQ ID NO: 3707222 - DNA, 25 bp, Homo sapien
ccgtgtttgtgacaaaggtcaaatc

SEQ ID NO: 3707223 - DNA, 25 bp, Homo sapien
agctgtccttgataacgtccatgtt

SEQ ID NO: 3707224 - DNA, 25 bp, Homo sapien
gagtgacacgatcaggaccatccgt

SEQ ID NO: 3707225 - DNA, 25 bp, Homo sapien
aacgtccatgttccggagtgacacg

SEQ ID NO: 3707226 - DNA, 25 bp, Homo sapien
taaccagtttgacggaatccttcat

SEQ ID NO: 3707227 - DNA, 25 bp, Homo sapien
tgggaaatagtggtctacatgatgc

SEQ ID NO: 3707228 - DNA, 25 bp, Homo sapien
aaggccatgatgcacttgcaggttg

SEQ ID NO: 3707229 - DNA, 25 bp, Homo sapien
ataaccagtttgacggaatccttca

SEQ ID NO: 3707230 - DNA, 25 bp, Homo sapien
ccaagaggtgagagatctaggatgg

SEQ ID NO: 3707231 - DNA, 25 bp, Homo sapien
tcaaggtcacagagccaagaggtga

SEQ ID NO: 3707232 - DNA, 25 bp, Homo sapien
tcacagagccaagaggtgagagatc

SEQ ID NO: 3707233 - DNA, 25 bp, Homo sapien
gagccaagaggtgagagatctagga

SEQ ID NO: 3707234 - DNA, 25 bp, Homo sapien
tttccaaatcaaggaatccaccagc

SEQ ID NO: 3707235 - DNA, 25 bp, Homo sapien
tattcatccacacctcaggattcac

SEQ ID NO: 3707236 - DNA, 25 bp, Homo sapien
atccacacctcaggattcacttcat

SEQ ID NO: 3707237 - DNA, 25 bp, Homo sapien
atccaccagcatttaaagttccaca

SEQ ID NO: 3707238 - DNA, 25 bp, Homo sapien
tgaaatttgtagcaccaggtaactg

SEQ ID NO: 3707239 - DNA, 25 bp, Homo sapien
ctaactagcttgactcttgcagagg

SEQ ID NO: 3707240 - DNA, 25 bp, Homo sapien
tgagacccctcttgctttaaaagta

SEQ ID NO: 3707241 - DNA, 25 bp, Homo sapien
ggaaaatttagcattgacccattct

SEQ ID NO: 3707242 - DNA, 25 bp, Homo sapien
gttagtggaacttctccaaaggata

SEQ ID NO: 3707243 - DNA, 25 bp, Homo sapien
cagtcgttagtggaacttctccaaa

SEQ ID NO: 3707244 - DNA, 25 bp, Homo sapien
aaatacagtcgttagtggaacttct

SEQ ID NO: 3707245 - DNA, 25 bp, Homo sapien
tacagtcgttagtggaacttctcca

SEQ ID NO: 3707246 - DNA, 25 bp, Homo sapien
ttcactggggtagccattgtagatg

SEQ ID NO: 3707247 - DNA, 25 bp, Homo sapien
tcagtggtgacttcatactcttcac

SEQ ID NO: 3707248 - DNA, 25 bp, Homo sapien
gcatgtgttcgcccataaggaattc

SEQ ID NO: 3707249 - DNA, 25 bp, Homo sapien
gttgacaaggagtatatacccatct

SEQ ID NO: 3707250 - DNA, 25 bp, Homo sapien
tccattagcataattctcaagccag

SEQ ID NO: 3707251 - DNA, 25 bp, Homo sapien
gcatctgctagaaggaatccaaggc

SEQ ID NO: 3707252 - DNA, 25 bp, Homo sapien
gccagtaggcattgtctgcaaacag

SEQ ID NO: 3707253 - DNA, 25 bp, Homo sapien
caaacagggcatgctgcatatacac

SEQ ID NO: 3707254 - DNA, 25 bp, Homo sapien
cctgggagatcatatttggccattt

SEQ ID NO: 3707255 - DNA, 25 bp, Homo sapien
caatgaagtctattactcctgggag

SEQ ID NO: 3707256 - DNA, 25 bp, Homo sapien
gccaagtgaatgtccaatgaaatac

SEQ ID NO: 3707257 - DNA, 25 bp, Homo sapien
ctattgtagtgccaagtgaatgtcc

SEQ ID NO: 3707258 - DNA, 25 bp, Homo sapien
ctaacagtgaccctcataaacatac

SEQ ID NO: 3707259 - DNA, 25 bp, Homo sapien
cacctaacagtgaccctcataaaca

SEQ ID NO: 3707260 - DNA, 25 bp, Homo sapien
cacacctaacagtgaccctcataaa

SEQ ID NO: 3707261 - DNA, 25 bp, Homo sapien
acctaacagtgaccctcataaacat

SEQ ID NO: 3707262 - DNA, 25 bp, Homo sapien
tccggaatccttacacaccctattg

SEQ ID NO: 3707263 - DNA, 25 bp, Homo sapien
gactgatgctaactgcctgttctga

SEQ ID NO: 3707264 - DNA, 25 bp, Homo sapien
ggaaggtcctgaacacaagacccta

SEQ ID NO: 3707265 - DNA, 25 bp, Homo sapien
caagaccctacacataacgaatgct

SEQ ID NO: 3707266 - DNA, 25 bp, Homo sapien
cagtagcattgcacccctttgtata

SEQ ID NO: 3707267 - DNA, 25 bp, Homo sapien
acgatggcccagtaaggaccaggca

SEQ ID NO: 3707268 - DNA, 25 bp, Homo sapien
cctagcatccacgatggcccagtaa

SEQ ID NO: 3707269 - DNA, 25 bp, Homo sapien
tgtttttcaaccctctagactcttc

SEQ ID NO: 3707270 - DNA, 25 bp, Homo sapien
tctttgtgccagttcaggcatggtg

SEQ ID NO: 3707271 - DNA, 25 bp, Homo sapien
ggcatggtggaaaaggctacaaacc

SEQ ID NO: 3707272 - DNA, 25 bp, Homo sapien
gcccgtgggatatttgaatgagatc

SEQ ID NO: 3707273 - DNA, 25 bp, Homo sapien
tcgtaggacccaaggcaaaattcat

SEQ ID NO: 3707274 - DNA, 25 bp, Homo sapien
ggtagaagctatcttcgttttctta

SEQ ID NO: 3707275 - DNA, 25 bp, Homo sapien
tcaaccagagtatcttattgttgca

SEQ ID NO: 3707276 - DNA, 25 bp, Homo sapien
tccagcccataaggacataaattcg

SEQ ID NO: 3707277 - DNA, 25 bp, Homo sapien
gcagattttggtagaagctatcttc

SEQ ID NO: 3707278 - DNA, 25 bp, Homo sapien
cagtgggagcatgtgacatatacac

SEQ ID NO: 3707279 - DNA, 25 bp, Homo sapien
gttttatatgcagaatgttgtgtac

SEQ ID NO: 3707280 - DNA, 25 bp, Homo sapien
tgtgtactgatgaaccagtgggagc

SEQ ID NO: 3707281 - DNA, 25 bp, Homo sapien
tatgcagaatgttgtgtactgatga

SEQ ID NO: 3707282 - DNA, 25 bp, Homo sapien
gattcttagggtaggcctgttaaca

SEQ ID NO: 3707283 - DNA, 25 bp, Homo sapien
cctgttaacagggtcaattctgtct

SEQ ID NO: 3707284 - DNA, 25 bp, Homo sapien
ggaaaaccaagcctcattagaaaga

SEQ ID NO: 3707285 - DNA, 25 bp, Homo sapien
gaaatcaaggcatacagaaggcagc

SEQ ID NO: 3707286 - DNA, 25 bp, Homo sapien
ttagaaaaatgctgtatgctaggac

SEQ ID NO: 3707287 - DNA, 25 bp, Homo sapien
gtatgctaggacgaaaatagggctc

SEQ ID NO: 3707288 - DNA, 25 bp, Homo sapien
aaaaatgctgtatgctaggacgaaa

SEQ ID NO: 3707289 - DNA, 25 bp, Homo sapien
aatgctgtatgctaggacgaaaata

SEQ ID NO: 3707290 - DNA, 25 bp, Homo sapien
aagaatagttagggtaagaatcatg

SEQ ID NO: 3707291 - DNA, 25 bp, Homo sapien
aaagaatagttagggtaagaatcat

SEQ ID NO: 3707292 - DNA, 25 bp, Homo sapien
agaatagttagggtaagaatcatga

SEQ ID NO: 3707293 - DNA, 25 bp, Homo sapien
ttcatattatcagcgtcatttcccc

SEQ ID NO: 3707294 - DNA, 25 bp, Homo sapien
atgtttcatattatcagcgtcattt

SEQ ID NO: 3707295 - DNA, 25 bp, Homo sapien
gtttcatattatcagcgtcatttcc

SEQ ID NO: 3707296 - DNA, 25 bp, Homo sapien
tcatattatcagcgtcatttcccca

SEQ ID NO: 3707297 - DNA, 25 bp, Homo sapien
aatagcagtaggcactttcatggca

SEQ ID NO: 3707298 - DNA, 25 bp, Homo sapien
catggcagtcaggtcatatataggg

SEQ ID NO: 3707299 - DNA, 25 bp, Homo sapien
gatttgagggagtatcctggccaca

SEQ ID NO: 3707300 - DNA, 25 bp, Homo sapien
aaaatcaaagtggttccaatctggc

SEQ ID NO: 3707301 - DNA, 25 bp, Homo sapien
tgccttcattaaagctatgatttca

SEQ ID NO: 3707302 - DNA, 25 bp, Homo sapien
ttaggaatatgccttcattaaagct

SEQ ID NO: 3707303 - DNA, 25 bp, Homo sapien
atatgccttcattaaagctatgatt

SEQ ID NO: 3707304 - DNA, 25 bp, Homo sapien
gccttcattaaagctatgatttcac

SEQ ID NO: 3707305 - DNA, 25 bp, Homo sapien
gaagtacgttagtgatcctgagaaa

SEQ ID NO: 3707306 - DNA, 25 bp, Homo sapien
aagacttgattaccaagcccacagg

SEQ ID NO: 3707307 - DNA, 25 bp, Homo sapien
ccagaccctggtagtaaatatagat

SEQ ID NO: 3707308 - DNA, 25 bp, Homo sapien
taccaaaattgatgcagtgagacaa

SEQ ID NO: 3707309 - DNA, 25 bp, Homo sapien
tcacccacgtctgcactgatgacac

SEQ ID NO: 3707310 - DNA, 25 bp, Homo sapien
tgacacatttatctgctttgctgct

SEQ ID NO: 3707311 - DNA, 25 bp, Homo sapien
ctgatgacacatttatctgctttgc

SEQ ID NO: 3707312 - DNA, 25 bp, Homo sapien
gcactgatgacacatttatctgctt

SEQ ID NO: 3707313 - DNA, 25 bp, Homo sapien
tgtgtgtacatgtggggccagggcc

SEQ ID NO: 3707314 - DNA, 25 bp, Homo sapien
gattatagagattgcagtctgtcac

SEQ ID NO: 3707315 - DNA, 25 bp, Homo sapien
aggattatagagattgcagtctgtc

SEQ ID NO: 3707316 - DNA, 25 bp, Homo sapien
gggccagttgatgatattccctcac

SEQ ID NO: 3707317 - DNA, 25 bp, Homo sapien
agtcactggctgcttacggaataaa

SEQ ID NO: 3707318 - DNA, 25 bp, Homo sapien
gcaggtgtgctccatggtggcggta

SEQ ID NO: 3707319 - DNA, 25 bp, Homo sapien
tgcttacggaataaaaaggctgtga

SEQ ID NO: 3707320 - DNA, 25 bp, Homo sapien
tagacactggggaggctacttgaac

SEQ ID NO: 3707321 - DNA, 25 bp, Homo sapien
caaagtaggctggaaacattgccta

SEQ ID NO: 3707322 - DNA, 25 bp, Homo sapien
taggctggaaacattgcctaggatg

SEQ ID NO: 3707323 - DNA, 25 bp, Homo sapien
tagggaaagaacacaaagtaggctg

SEQ ID NO: 3707324 - DNA, 25 bp, Homo sapien
tgcctaggatgtcccaatactatct

SEQ ID NO: 3707325 - DNA, 25 bp, Homo sapien
tttattttttcctgccaatgtaaca

SEQ ID NO: 3707326 - DNA, 25 bp, Homo sapien
tgcatttattttttcctgccaatgt

SEQ ID NO: 3707327 - DNA, 25 bp, Homo sapien
ttattttttcctgccaatgtaacaa

SEQ ID NO: 3707328 - DNA, 25 bp, Homo sapien
ttttttcctgccaatgtaacaacta

SEQ ID NO: 3707329 - DNA, 25 bp, Homo sapien
aatccactgtcttgacaaggtttcc

SEQ ID NO: 3707330 - DNA, 25 bp, Homo sapien
cactgtcttgacaaggtttccaaca

SEQ ID NO: 3707331 - DNA, 25 bp, Homo sapien
gtgagacaatccactgtcttgacaa

SEQ ID NO: 3707332 - DNA, 25 bp, Homo sapien
gacaatccactgtcttgacaaggtt

SEQ ID NO: 3707333 - DNA, 25 bp, Homo sapien
cacagctttagttggcatatgtact

SEQ ID NO: 3707334 - DNA, 25 bp, Homo sapien
tctgggtccacagctttagttggca

SEQ ID NO: 3707335 - DNA, 25 bp, Homo sapien
tatacgccaccagaatcagaagcca

SEQ ID NO: 3707336 - DNA, 25 bp, Homo sapien
ctctggaacatatacgccaccagaa

SEQ ID NO: 3707337 - DNA, 25 bp, Homo sapien
tgtttgcggtctaaaggcctggtca

SEQ ID NO: 3707338 - DNA, 25 bp, Homo sapien
ccaacgtaggacatctctgaagagc

SEQ ID NO: 3707339 - DNA, 25 bp, Homo sapien
gccttagctgtagaaagccacttcc

SEQ ID NO: 3707340 - DNA, 25 bp, Homo sapien
ctacaggtggcaagatggtcaacat

SEQ ID NO: 3707341 - DNA, 25 bp, Homo sapien
tcgaggaatcctgttaacagaaagg

SEQ ID NO: 3707342 - DNA, 25 bp, Homo sapien
ctgtcttcttaggttgcactaggcc

SEQ ID NO: 3707343 - DNA, 25 bp, Homo sapien
taggttgcactaggcctcgaggaat

SEQ ID NO: 3707344 - DNA, 25 bp, Homo sapien
taacagaaaggatatacccatcttc

SEQ ID NO: 3707345 - DNA, 25 bp, Homo sapien
caactttgaatagggtggccaggga

SEQ ID NO: 3707346 - DNA, 25 bp, Homo sapien
ggtgcacgctagacatgtataaggc

SEQ ID NO: 3707347 - DNA, 25 bp, Homo sapien
tcaaagacactaaggcaggtgcacg

SEQ ID NO: 3707348 - DNA, 25 bp, Homo sapien
tattctgcacggactggaacaagga

SEQ ID NO: 3707349 - DNA, 25 bp, Homo sapien
catcttggtctatggagagtgtctt

SEQ ID NO: 3707350 - DNA, 25 bp, Homo sapien
tgtcttgtgttttcgagaccaggcg

SEQ ID NO: 3707351 - DNA, 25 bp, Homo sapien
gttgctagcacctccaactaggcca

SEQ ID NO: 3707352 - DNA, 25 bp, Homo sapien
gagaccaggcgtttcccctgctgtt

SEQ ID NO: 3707353 - DNA, 25 bp, Homo sapien
gacatgtctacctctgttctcgaga

SEQ ID NO: 3707354 - DNA, 25 bp, Homo sapien
tagctagacccaccttctacatggg

SEQ ID NO: 3707355 - DNA, 25 bp, Homo sapien
tcaaccaaatactagaagccgtaat

SEQ ID NO: 3707356 - DNA, 25 bp, Homo sapien
tacttcaaccaaggaatcactagtt

SEQ ID NO: 3707357 - DNA, 25 bp, Homo sapien
ctgttaagcagaaccgcacagggct

SEQ ID NO: 3707358 - DNA, 25 bp, Homo sapien
gtaagtcaaatcgatggtccctagg

SEQ ID NO: 3707359 - DNA, 25 bp, Homo sapien
tgtaaagatgctgaagtggtccgtc

SEQ ID NO: 3707360 - DNA, 25 bp, Homo sapien
taacgcaactgctagtggaagtgtc

SEQ ID NO: 3707361 - DNA, 25 bp, Homo sapien
ggatttctttcaaacctatgaagca

SEQ ID NO: 3707362 - DNA, 25 bp, Homo sapien
accgtgtccctcacaacactcagaa

SEQ ID NO: 3707363 - DNA, 25 bp, Homo sapien
caccaggtttacaaacaagcccttg

SEQ ID NO: 3707364 - DNA, 25 bp, Homo sapien
tgacagcttgttaccgtgtccctca

SEQ ID NO: 3707365 - DNA, 25 bp, Homo sapien
tgtgaatagccgacataatagatct

SEQ ID NO: 3707366 - DNA, 25 bp, Homo sapien
gccgacataatagatcttttcctgg

SEQ ID NO: 3707367 - DNA, 25 bp, Homo sapien
catggtggtgccctgtgaatagccg

SEQ ID NO: 3707368 - DNA, 25 bp, Homo sapien
taaagtttatcactgcaggaaggtc

SEQ ID NO: 3707369 - DNA, 25 bp, Homo sapien
ctctggcatggtggaaaatgcaata

SEQ ID NO: 3707370 - DNA, 25 bp, Homo sapien
ttttgcatgcttaacagtggctatg

SEQ ID NO: 3707371 - DNA, 25 bp, Homo sapien
aacagtggctatgggtgctaaagca

SEQ ID NO: 3707372 - DNA, 25 bp, Homo sapien
gctatgggtgctaaagcaaaataca

SEQ ID NO: 3707373 - DNA, 25 bp, Homo sapien
aacaagttgtctgagaaatctggtc

SEQ ID NO: 3707374 - DNA, 25 bp, Homo sapien
aaatctgatcaagaatcacctggcc

SEQ ID NO: 3707375 - DNA, 25 bp, Homo sapien
gttgaatccacccagaagtaacatg

SEQ ID NO: 3707376 - DNA, 25 bp, Homo sapien
cctggccacaaaggtaaataacaag

SEQ ID NO: 3707377 - DNA, 25 bp, Homo sapien
agtcttcactggcattagctctccc

SEQ ID NO: 3707378 - DNA, 25 bp, Homo sapien
ctgggatgctgggaatttactaggc

SEQ ID NO: 3707379 - DNA, 25 bp, Homo sapien
gggtgagccatatgactcccagctt

SEQ ID NO: 3707380 - DNA, 25 bp, Homo sapien
tatgactcccagctttatgctggga

SEQ ID NO: 3707381 - DNA, 25 bp, Homo sapien
agtgtgggcagcatatacacttgct

SEQ ID NO: 3707382 - DNA, 25 bp, Homo sapien
cagatgttccagcaagagtgtgggc

SEQ ID NO: 3707383 - DNA, 25 bp, Homo sapien
agatgttccagcaagagtgtgggca

SEQ ID NO: 3707384 - DNA, 25 bp, Homo sapien
gggcagcatatacacttgctcggct

SEQ ID NO: 3707385 - DNA, 25 bp, Homo sapien
tataacaggacatttagcaaagact

SEQ ID NO: 3707386 - DNA, 25 bp, Homo sapien
aaatataacaggacatttagcaaag

SEQ ID NO: 3707387 - DNA, 25 bp, Homo sapien
acaaaatataacaggacatttagca

SEQ ID NO: 3707388 - DNA, 25 bp, Homo sapien
agcaaagactgcaaattcaacattc

SEQ ID NO: 3707389 - DNA, 25 bp, Homo sapien
cagtcaaatgcccggagttcaccag

SEQ ID NO: 3707390 - DNA, 25 bp, Homo sapien
ccccagtcaaatgcccggagttcac

SEQ ID NO: 3707391 - DNA, 25 bp, Homo sapien
cccggagttcaccagaattcactgc

SEQ ID NO: 3707392 - DNA, 25 bp, Homo sapien
caaatgcccggagttcaccagaatt

SEQ ID NO: 3707393 - DNA, 25 bp, Homo sapien
tgggaaaggttggtctcctcctgct

SEQ ID NO: 3707394 - DNA, 25 bp, Homo sapien
tgtacatacggtgaggagcatccaa

SEQ ID NO: 3707395 - DNA, 25 bp, Homo sapien
ccacattgctgtagggaccgtcata

SEQ ID NO: 3707396 - DNA, 25 bp, Homo sapien
tcacgtcttctggatttgaaagcca

SEQ ID NO: 3707397 - DNA, 25 bp, Homo sapien
gttgttgtccttaaagcagctcagc

SEQ ID NO: 3707398 - DNA, 25 bp, Homo sapien
aaacttggccttattctgagaatgc

SEQ ID NO: 3707399 - DNA, 25 bp, Homo sapien
cggatttagtgccaagtgcagggaa

SEQ ID NO: 3707400 - DNA, 25 bp, Homo sapien
tcctaagatcgtcagtgtcagatgc

SEQ ID NO: 3707401 - DNA, 25 bp, Homo sapien
aatcatggtttgtcaatgagttgca

SEQ ID NO: 3707402 - DNA, 25 bp, Homo sapien
cacacaagtgaatttcacacaccag

SEQ ID NO: 3707403 - DNA, 25 bp, Homo sapien
caacaatatacttttgacacacaca

SEQ ID NO: 3707404 - DNA, 25 bp, Homo sapien
aaattaagattcactggcattgagc

SEQ ID NO: 3707405 - DNA, 25 bp, Homo sapien
tctaagtgagagattgcgaatatca

SEQ ID NO: 3707406 - DNA, 25 bp, Homo sapien
tagctgcagacaggaactaagccag

SEQ ID NO: 3707407 - DNA, 25 bp, Homo sapien
cagagctatacaatgaggtaggatc

SEQ ID NO: 3707408 - DNA, 25 bp, Homo sapien
tccttgaaagctctaatgaaaatca

SEQ ID NO: 3707409 - DNA, 25 bp, Homo sapien
aaaagccctggtgttccaaactcag

SEQ ID NO: 3707410 - DNA, 25 bp, Homo sapien
gactgtccagtctatgtcatgccct

SEQ ID NO: 3707411 - DNA, 25 bp, Homo sapien
tcatgccctaggagacaaactgttc

SEQ ID NO: 3707412 - DNA, 25 bp, Homo sapien
cccctttgagtattgagcagaagaa

SEQ ID NO: 3707413 - DNA, 25 bp, Homo sapien
tcctccacccttactcctcgctgga

SEQ ID NO: 3707414 - DNA, 25 bp, Homo sapien
ttgccattttctagcagccagaacc

SEQ ID NO: 3707415 - DNA, 25 bp, Homo sapien
gcagccagaacccactcttcctcca

SEQ ID NO: 3707416 - DNA, 25 bp, Homo sapien
gtagtaggggaatatcagggcttct

SEQ ID NO: 3707417 - DNA, 25 bp, Homo sapien
tatgggcaccctactgccttctctc

SEQ ID NO: 3707418 - DNA, 25 bp, Homo sapien
tagttatgggcaccctactgccttc

SEQ ID NO: 3707419 - DNA, 25 bp, Homo sapien
ctagttatgggcaccctactgcctt

SEQ ID NO: 3707420 - DNA, 25 bp, Homo sapien
gttatgggcaccctactgccttctc

SEQ ID NO: 3707421 - DNA, 25 bp, Homo sapien
ccagcttggacttctagggactttc

SEQ ID NO: 3707422 - DNA, 25 bp, Homo sapien
ttagatgatacaggcttgggtcgtt

SEQ ID NO: 3707423 - DNA, 25 bp, Homo sapien
gttacacatgacaccagtgcctttg

SEQ ID NO: 3707424 - DNA, 25 bp, Homo sapien
tttgctagaaaagcactcctggagc

SEQ ID NO: 3707425 - DNA, 25 bp, Homo sapien
ttaacatcatgcattagtttgcctc

SEQ ID NO: 3707426 - DNA, 25 bp, Homo sapien
tgaatatgcctacaaaaccacaatc

SEQ ID NO: 3707427 - DNA, 25 bp, Homo sapien
aagctgttttccaactaccatccct

SEQ ID NO: 3707428 - DNA, 25 bp, Homo sapien
catgtacagatcataaagtcaactg

SEQ ID NO: 3707429 - DNA, 25 bp, Homo sapien
aaattagtaaactttatgctttctg

SEQ ID NO: 3707430 - DNA, 25 bp, Homo sapien
tagtaaactttatgctttctggatt

SEQ ID NO: 3707431 - DNA, 25 bp, Homo sapien
aattagtaaactttatgctttctgg

SEQ ID NO: 3707432 - DNA, 25 bp, Homo sapien
gtaaactttatgctttctggattca

SEQ ID NO: 3707433 - DNA, 25 bp, Homo sapien
ccatcacagttgctaacatatttga

SEQ ID NO: 3707434 - DNA, 25 bp, Homo sapien
caaagacaagcgcaactttcccttt

SEQ ID NO: 3707435 - DNA, 25 bp, Homo sapien
tttccttctgcaacgccctttagta

SEQ ID NO: 3707436 - DNA, 25 bp, Homo sapien
gaactcacgtctttcaacgaatctt

SEQ ID NO: 3707437 - DNA, 25 bp, Homo sapien
ttaaacggatgtcgcagagcagaac

SEQ ID NO: 3707438 - DNA, 25 bp, Homo sapien
atttttaaacggatgtcgcagagca

SEQ ID NO: 3707439 - DNA, 25 bp, Homo sapien
aacggatgtcgcagagcagaacatc

SEQ ID NO: 3707440 - DNA, 25 bp, Homo sapien
ttttaaacggatgtcgcagagcaga

SEQ ID NO: 3707441 - DNA, 25 bp, Homo sapien
gtaatttcagctgctaagcttccct

SEQ ID NO: 3707442 - DNA, 25 bp, Homo sapien
taatttcagctgctaagcttccctt

SEQ ID NO: 3707443 - DNA, 25 bp, Homo sapien
aatttcagctgctaagcttcccttc

SEQ ID NO: 3707444 - DNA, 25 bp, Homo sapien
cagggacagtagtgccagaggtaac

SEQ ID NO: 3707445 - DNA, 25 bp, Homo sapien
ttgtgacccaacatcagcctcagag

SEQ ID NO: 3707446 - DNA, 25 bp, Homo sapien
gccaaaatggcccaatacccatcgt

SEQ ID NO: 3707447 - DNA, 25 bp, Homo sapien
tccccagcggctagagtaccatttt

SEQ ID NO: 3707448 - DNA, 25 bp, Homo sapien
taaattgtcactgcgatggtcccgg

SEQ ID NO: 3707449 - DNA, 25 bp, Homo sapien
gactgcacagtacacaagccttgat

SEQ ID NO: 3707450 - DNA, 25 bp, Homo sapien
gccttgatgcagctgaccgttaaac

SEQ ID NO: 3707451 - DNA, 25 bp, Homo sapien
tcaatttcaccgagatggacaggag

SEQ ID NO: 3707452 - DNA, 25 bp, Homo sapien
tcctctgccgacagatggagctttg

SEQ ID NO: 3707453 - DNA, 25 bp, Homo sapien
cttggcatccgtccggctgctgcaa

SEQ ID NO: 3707454 - DNA, 25 bp, Homo sapien
gcgacgaggcgtccgctcgtttgcc

SEQ ID NO: 3707455 - DNA, 25 bp, Homo sapien
aacccttggtgtccgcagcccgtgt

SEQ ID NO: 3707456 - DNA, 25 bp, Homo sapien
agcgatcagccgccaaagtgcattt

SEQ ID NO: 3707457 - DNA, 25 bp, Homo sapien
tgcattttttcctcccctagagcca

SEQ ID NO: 3707458 - DNA, 25 bp, Homo sapien
aggaagcgatcagccgccaaagtgc

SEQ ID NO: 3707459 - DNA, 25 bp, Homo sapien
cccgggaccggacgctgccagcgga

SEQ ID NO: 3707460 - DNA, 25 bp, Homo sapien
tcccaaggtcgacatcatctccaag

SEQ ID NO: 3707461 - DNA, 25 bp, Homo sapien
cacgtataggtcacggccagagtcc

SEQ ID NO: 3707462 - DNA, 25 bp, Homo sapien
caatgtcttagtcgctcataaaggg

SEQ ID NO: 3707463 - DNA, 25 bp, Homo sapien
catctggaaaggcatggcacctgct

SEQ ID NO: 3707464 - DNA, 25 bp, Homo sapien
tataggtgaggataagaaaacaagt

SEQ ID NO: 3707465 - DNA, 25 bp, Homo sapien
tttataggtgaggataagaaaacaa

SEQ ID NO: 3707466 - DNA, 25 bp, Homo sapien
ataggtgaggataagaaaacaagtt

SEQ ID NO: 3707467 - DNA, 25 bp, Homo sapien
tgaggataagaaaacaagtttcttc

SEQ ID NO: 3707468 - DNA, 25 bp, Homo sapien
tcttggattgtagctgtaaattctt

SEQ ID NO: 3707469 - DNA, 25 bp, Homo sapien
tagctgtaaattcttacagctggga

SEQ ID NO: 3707470 - DNA, 25 bp, Homo sapien
tagcacttcctggacggaatctaca

SEQ ID NO: 3707471 - DNA, 25 bp, Homo sapien
cttctcatgttttgggcaagaatca

SEQ ID NO: 3707472 - DNA, 25 bp, Homo sapien
tcagccctaaggaatggaaatctgg

SEQ ID NO: 3707473 - DNA, 25 bp, Homo sapien
gataaccatgagtcatttcctgtag

SEQ ID NO: 3707474 - DNA, 25 bp, Homo sapien
gaaatctggctctaatatcttcagg

SEQ ID NO: 3707475 - DNA, 25 bp, Homo sapien
tagcagacagaatcacaaatccagt

SEQ ID NO: 3707476 - DNA, 25 bp, Homo sapien
gatctgagatcaggctgtcatcatc

SEQ ID NO: 3707477 - DNA, 25 bp, Homo sapien
acccaactgccaaagtgttcttctg

SEQ ID NO: 3707478 - DNA, 25 bp, Homo sapien
tgccaaagtgttcttctgacaacat

SEQ ID NO: 3707479 - DNA, 25 bp, Homo sapien
ttctccatctcaatgggatctgaga

SEQ ID NO: 3707480 - DNA, 25 bp, Homo sapien
gagaaccctactgcataaacccttg

SEQ ID NO: 3707481 - DNA, 25 bp, Homo sapien
tatacttgcatgctgggtaccaagg

SEQ ID NO: 3707482 - DNA, 25 bp, Homo sapien
tcttgaccgctaggcagaatggcct

SEQ ID NO: 3707483 - DNA, 25 bp, Homo sapien
caggaacattagcataggaagggca

SEQ ID NO: 3707484 - DNA, 25 bp, Homo sapien
ggctaactggatgcatgaacacaca

SEQ ID NO: 3707485 - DNA, 25 bp, Homo sapien
ggaaccactaacagcagaactgcag

SEQ ID NO: 3707486 - DNA, 25 bp, Homo sapien
tcagttagccttctccaataggagg

SEQ ID NO: 3707487 - DNA, 25 bp, Homo sapien
gttcagggcttatactcacagtcac

SEQ ID NO: 3707488 - DNA, 25 bp, Homo sapien
ctttctgttaatccgactcacaaga

SEQ ID NO: 3707489 - DNA, 25 bp, Homo sapien
gactcacaagaatgtggggaatcat

SEQ ID NO: 3707490 - DNA, 25 bp, Homo sapien
ttctgttaatccgactcacaagaat

SEQ ID NO: 3707491 - DNA, 25 bp, Homo sapien
gctttctgttaatccgactcacaag

SEQ ID NO: 3707492 - DNA, 25 bp, Homo sapien
gacacccagtatgaatctgctgcgg

SEQ ID NO: 3707493 - DNA, 25 bp, Homo sapien
taagacctgtagttggcttctaacc

SEQ ID NO: 3707494 - DNA, 25 bp, Homo sapien
taagatagctctgtgattcctgccc

SEQ ID NO: 3707495 - DNA, 25 bp, Homo sapien
tgctgcgggataccttacttagaac

SEQ ID NO: 3707496 - DNA, 25 bp, Homo sapien
tgtgaaatgaggatgttcactgttt

SEQ ID NO: 3707497 - DNA, 25 bp, Homo sapien
ctgtgaaatgaggatgttcactgtt

SEQ ID NO: 3707498 - DNA, 25 bp, Homo sapien
gaaatgaggatgttcactgtttctt

SEQ ID NO: 3707499 - DNA, 25 bp, Homo sapien
gagaattcacagtaaaaggctgatc

SEQ ID NO: 3707500 - DNA, 25 bp, Homo sapien
gaattcacagtaaaaggctgatcca

SEQ ID NO: 3707501 - DNA, 25 bp, Homo sapien
aattcacagtaaaaggctgatccat

SEQ ID NO: 3707502 - DNA, 25 bp, Homo sapien
cagagaattcacagtaaaaggctga

SEQ ID NO: 3707503 - DNA, 25 bp, Homo sapien
ctgcaaagcaaaatttaaatctctg

SEQ ID NO: 3707504 - DNA, 25 bp, Homo sapien
gcaaagcaaaatttaaatctctgat

SEQ ID NO: 3707505 - DNA, 25 bp, Homo sapien
caaagcaaaatttaaatctctgatt

SEQ ID NO: 3707506 - DNA, 25 bp, Homo sapien
aagcaaaatttaaatctctgattaa

SEQ ID NO: 3707507 - DNA, 25 bp, Homo sapien
tccaaatacacagacgccatcctct

SEQ ID NO: 3707508 - DNA, 25 bp, Homo sapien
cagacctaaagtaacgtcgtggagt

SEQ ID NO: 3707509 - DNA, 25 bp, Homo sapien
tacaaccaagcttgcttagggcacg

SEQ ID NO: 3707510 - DNA, 25 bp, Homo sapien
ggcacggactcgctcttctgggctt

SEQ ID NO: 3707511 - DNA, 25 bp, Homo sapien
tagaaggaatctaaaatagttgaat

SEQ ID NO: 3707512 - DNA, 25 bp, Homo sapien
caggggggcagagagtagtctggta

SEQ ID NO: 3707513 - DNA, 25 bp, Homo sapien
aaatagttgaattcacaggggggca

SEQ ID NO: 3707514 - DNA, 25 bp, Homo sapien
aatgtagaaggaatctaaaatagtt

SEQ ID NO: 3707515 - DNA, 25 bp, Homo sapien
cataactaagaaaagtgacaaccag

SEQ ID NO: 3707516 - DNA, 25 bp, Homo sapien
tcataactaagaaaagtgacaacca

SEQ ID NO: 3707517 - DNA, 25 bp, Homo sapien
attaggagttgctaattaggaattc

SEQ ID NO: 3707518 - DNA, 25 bp, Homo sapien
ccagaatccctagtgaattaggagt

SEQ ID NO: 3707519 - DNA, 25 bp, Homo sapien
ccttttcactaaagtctggcatgag

SEQ ID NO: 3707520 - DNA, 25 bp, Homo sapien
catggaaagagtgatgtaaatccct

SEQ ID NO: 3707521 - DNA, 25 bp, Homo sapien
gtcagggtactttccaaacagttca

SEQ ID NO: 3707522 - DNA, 25 bp, Homo sapien
gctaacaagattaaggtcagggtac

SEQ ID NO: 3707523 - DNA, 25 bp, Homo sapien
gagaaaacatgtccttagcattatg

SEQ ID NO: 3707524 - DNA, 25 bp, Homo sapien
tgacagcaaaagttcaataatgctt

SEQ ID NO: 3707525 - DNA, 25 bp, Homo sapien
gaaaacatgtccttagcattatgtg

SEQ ID NO: 3707526 - DNA, 25 bp, Homo sapien
aaacatgtccttagcattatgtgac

SEQ ID NO: 3707527 - DNA, 25 bp, Homo sapien
cattgctggtaatctcgatggttag

SEQ ID NO: 3707528 - DNA, 25 bp, Homo sapien
tcataatatcctgcttttcaggtac

SEQ ID NO: 3707529 - DNA, 25 bp, Homo sapien
ggtaatctcgatggttaggaagctt

SEQ ID NO: 3707530 - DNA, 25 bp, Homo sapien
ttcaggtactgcacattgctggtaa

SEQ ID NO: 3707531 - DNA, 25 bp, Homo sapien
tatagtattttagtctaccacctcc

SEQ ID NO: 3707532 - DNA, 25 bp, Homo sapien
ggaatgaatttcttgcgctcaaact

SEQ ID NO: 3707533 - DNA, 25 bp, Homo sapien
tcaattagacaaaccacactggctc

SEQ ID NO: 3707534 - DNA, 25 bp, Homo sapien
aaatagctagaactttgtggctgcc

SEQ ID NO: 3707535 - DNA, 25 bp, Homo sapien
tcggtattatgcaaccagctagcgg

SEQ ID NO: 3707536 - DNA, 25 bp, Homo sapien
tgtggtaccccatttttaggcagtg

SEQ ID NO: 3707537 - DNA, 25 bp, Homo sapien
tgtaagacctttattggccccactg

SEQ ID NO: 3707538 - DNA, 25 bp, Homo sapien
gcttcctcagagatcgttaatggca

SEQ ID NO: 3707539 - DNA, 25 bp, Homo sapien
tcatctgtccttgggaatgcaatct

SEQ ID NO: 3707540 - DNA, 25 bp, Homo sapien
tattcttggtattctacgttatatt

SEQ ID NO: 3707541 - DNA, 25 bp, Homo sapien
ctgtccttgggaatgcaatctcctt

SEQ ID NO: 3707542 - DNA, 25 bp, Homo sapien
tggtattctacgttatatttcttta

SEQ ID NO: 3707543 - DNA, 25 bp, Homo sapien
agctcaatgagcattctcagagatg

SEQ ID NO: 3707544 - DNA, 25 bp, Homo sapien
gattgaactgaagtgagagtcagtg

SEQ ID NO: 3707545 - DNA, 25 bp, Homo sapien
cagagatgatgagattgaactgaag

SEQ ID NO: 3707546 - DNA, 25 bp, Homo sapien
gagagtcagtgaaggtggtaacccc

SEQ ID NO: 3707547 - DNA, 25 bp, Homo sapien
acagtgctgccctagaacctttcgc

SEQ ID NO: 3707548 - DNA, 25 bp, Homo sapien
gtcacatttaagtacccagaagcca

SEQ ID NO: 3707549 - DNA, 25 bp, Homo sapien
tgatattttaccagagacaggccat

SEQ ID NO: 3707550 - DNA, 25 bp, Homo sapien
gatatgcccacagggacactcatgg

SEQ ID NO: 3707551 - DNA, 25 bp, Homo sapien
gaaaagcaggacaaagcgctcccat

SEQ ID NO: 3707552 - DNA, 25 bp, Homo sapien
gacttcgcatttgacctcgggctaa

SEQ ID NO: 3707553 - DNA, 25 bp, Homo sapien
tttacaggaggagagtggctagcat

SEQ ID NO: 3707554 - DNA, 25 bp, Homo sapien
gaaactgctccgattctagctgctg

SEQ ID NO: 3707555 - DNA, 25 bp, Homo sapien
caaattctatctgacagtgtctgcg

SEQ ID NO: 3707556 - DNA, 25 bp, Homo sapien
caaaatggttgcctattatcgctca

SEQ ID NO: 3707557 - DNA, 25 bp, Homo sapien
tgatcagtaagtaaaagcacaacgt

SEQ ID NO: 3707558 - DNA, 25 bp, Homo sapien
taattcttgcggaaacacacggtcc

SEQ ID NO: 3707559 - DNA, 25 bp, Homo sapien
catcgcagtccttcaaccactaaat

SEQ ID NO: 3707560 - DNA, 25 bp, Homo sapien
tgtattagattctgccagttgcaga

SEQ ID NO: 3707561 - DNA, 25 bp, Homo sapien
agttgcagaaatttgtggcaaagat

SEQ ID NO: 3707562 - DNA, 25 bp, Homo sapien
ttgtggcaaagatcttctggcaaaa

SEQ ID NO: 3707563 - DNA, 25 bp, Homo sapien
ttccacaggtttctattcctctcac

SEQ ID NO: 3707564 - DNA, 25 bp, Homo sapien
tgtgcaatgagaggctatcttcccc

SEQ ID NO: 3707565 - DNA, 25 bp, Homo sapien
gataatgttttggatttgcaatcag

SEQ ID NO: 3707566 - DNA, 25 bp, Homo sapien
aatgctgggaggacttactaggatc

SEQ ID NO: 3707567 - DNA, 25 bp, Homo sapien
aagtgccacgggatcctcaaggaac

SEQ ID NO: 3707568 - DNA, 25 bp, Homo sapien
gaaagaatgacatgcatctcacaga

SEQ ID NO: 3707569 - DNA, 25 bp, Homo sapien
cagaaagaatgacatgcatctcaca

SEQ ID NO: 3707570 - DNA, 25 bp, Homo sapien
aagaatgacatgcatctcacagaaa

SEQ ID NO: 3707571 - DNA, 25 bp, Homo sapien
tagcagaaagaatgacatgcatctc

SEQ ID NO: 3707572 - DNA, 25 bp, Homo sapien
tttggcacaattacatgggtaatag

SEQ ID NO: 3707573 - DNA, 25 bp, Homo sapien
atccatcctagagtgaggagatcat

SEQ ID NO: 3707574 - DNA, 25 bp, Homo sapien
catgtcacaatagtctggtcccgca

SEQ ID NO: 3707575 - DNA, 25 bp, Homo sapien
ggtcccgcagactgctttggcacaa

SEQ ID NO: 3707576 - DNA, 25 bp, Homo sapien
gctttggtgagcaaacaatggcaat

SEQ ID NO: 3707577 - DNA, 25 bp, Homo sapien
gatcaacgctggataaaaatgcagt

SEQ ID NO: 3707578 - DNA, 25 bp, Homo sapien
ggcctctggcaacatgagttgatag

SEQ ID NO: 3707579 - DNA, 25 bp, Homo sapien
caacatgagttgataggaacagtga

SEQ ID NO: 3707580 - DNA, 25 bp, Homo sapien
caatccaagtaccacaacctggtgt

SEQ ID NO: 3707581 - DNA, 25 bp, Homo sapien
tgtgtgcttgccaatccaagtacca

SEQ ID NO: 3707582 - DNA, 25 bp, Homo sapien
cccgagggcgttgtgtgcttgccaa

SEQ ID NO: 3707583 - DNA, 25 bp, Homo sapien
tctttttcccgagggcgttgtgtgc

SEQ ID NO: 3707584 - DNA, 25 bp, Homo sapien
ccttggtgtgtggatgaaagccctt

SEQ ID NO: 3707585 - DNA, 25 bp, Homo sapien
tccttggtgtgtggatgaaagccct

SEQ ID NO: 3707586 - DNA, 25 bp, Homo sapien
cttggtgtgtggatgaaagcccttt

SEQ ID NO: 3707587 - DNA, 25 bp, Homo sapien
tcttttaccaacacatgtttgcata

SEQ ID NO: 3707588 - DNA, 25 bp, Homo sapien
tgtcttttaccaacacatgtttgca

SEQ ID NO: 3707589 - DNA, 25 bp, Homo sapien
tatgtcttttaccaacacatgtttg

SEQ ID NO: 3707590 - DNA, 25 bp, Homo sapien
atgtcttttaccaacacatgtttgc

SEQ ID NO: 3707591 - DNA, 25 bp, Homo sapien
gatgttgacggtgcttacattcaga

SEQ ID NO: 3707592 - DNA, 25 bp, Homo sapien
tatcaggtaccgatttaacaccatg

SEQ ID NO: 3707593 - DNA, 25 bp, Homo sapien
gaaaatccggcaaccacatgtccat

SEQ ID NO: 3707594 - DNA, 25 bp, Homo sapien
catgtaacctctcttgacacagagc

SEQ ID NO: 3707595 - DNA, 25 bp, Homo sapien
aggtgtctatggagccagccttgca

SEQ ID NO: 3707596 - DNA, 25 bp, Homo sapien
actaaagtctccatgcacaaggcaa

SEQ ID NO: 3707597 - DNA, 25 bp, Homo sapien
aatctgctcttaactagtggtggcc

SEQ ID NO: 3707598 - DNA, 25 bp, Homo sapien
tacttctgaagtctgatacctgagc

SEQ ID NO: 3707599 - DNA, 25 bp, Homo sapien
gacaaggcctatggaaagaatgatt

SEQ ID NO: 3707600 - DNA, 25 bp, Homo sapien
aactgacaaggcctatggaaagaat

SEQ ID NO: 3707601 - DNA, 25 bp, Homo sapien
ctacaactgacaaggcctatggaaa

SEQ ID NO: 3707602 - DNA, 25 bp, Homo sapien
tacaactgacaaggcctatggaaag

SEQ ID NO: 3707603 - DNA, 25 bp, Homo sapien
ttgcaacagaaacctcaacctaagg

SEQ ID NO: 3707604 - DNA, 25 bp, Homo sapien
tgccagataattctgcaagacatgc

SEQ ID NO: 3707605 - DNA, 25 bp, Homo sapien
catgccagaagagaaacatctgctt

SEQ ID NO: 3707606 - DNA, 25 bp, Homo sapien
tctggccttatgaagaacaaaagag

SEQ ID NO: 3707607 - DNA, 25 bp, Homo sapien
ggtcaggccctcgtgatagtatttg

SEQ ID NO: 3707608 - DNA, 25 bp, Homo sapien
tgaaacctcatcctcgttgcaatgg

SEQ ID NO: 3707609 - DNA, 25 bp, Homo sapien
gttacggatcaaatattggtgcccc

SEQ ID NO: 3707610 - DNA, 25 bp, Homo sapien
agttggcactcgcatagttacggat

SEQ ID NO: 3707611 - DNA, 25 bp, Homo sapien
gacagcctgctgaatcagttgattc

SEQ ID NO: 3707612 - DNA, 25 bp, Homo sapien
gattcacatgccttatttctgtagg

SEQ ID NO: 3707613 - DNA, 25 bp, Homo sapien
ctgatagagatgcacgggtaatgct

SEQ ID NO: 3707614 - DNA, 25 bp, Homo sapien
tccattggtacatctgggacccagt

SEQ ID NO: 3707615 - DNA, 25 bp, Homo sapien
ttcggaatataacatggtacagctg

SEQ ID NO: 3707616 - DNA, 25 bp, Homo sapien
ggtctctcaaaaacctaagcctaga

SEQ ID NO: 3707617 - DNA, 25 bp, Homo sapien
gagttaccgataaccctgcaattcc

SEQ ID NO: 3707618 - DNA, 25 bp, Homo sapien
actttagaggaattaagctgatcac

SEQ ID NO: 3707619 - DNA, 25 bp, Homo sapien
gcggcatgagctcctagtaaagcaa

SEQ ID NO: 3707620 - DNA, 25 bp, Homo sapien
aaactggtctgttgcactgctgtac

SEQ ID NO: 3707621 - DNA, 25 bp, Homo sapien
gaaccacccactgaatacgcattag

SEQ ID NO: 3707622 - DNA, 25 bp, Homo sapien
catatttaccaccaggcggcatgag

SEQ ID NO: 3707623 - DNA, 25 bp, Homo sapien
ccaggcccaggactgagtgtctgtt

SEQ ID NO: 3707624 - DNA, 25 bp, Homo sapien
cagtgcatagtgtgtgtcggaagcc

SEQ ID NO: 3707625 - DNA, 25 bp, Homo sapien
gccactggttgtcctgaggagttaa

SEQ ID NO: 3707626 - DNA, 25 bp, Homo sapien
gctgttcagggtcttagcctcagag

SEQ ID NO: 3707627 - DNA, 25 bp, Homo sapien
tagccaaagctctgactcgttacct

SEQ ID NO: 3707628 - DNA, 25 bp, Homo sapien
tacaggatggctccctctagtggtc

SEQ ID NO: 3707629 - DNA, 25 bp, Homo sapien
tggtaacttcttgcgttggcctccg

SEQ ID NO: 3707630 - DNA, 25 bp, Homo sapien
aggttgacctcacccgttacaggat

SEQ ID NO: 3707631 - DNA, 25 bp, Homo sapien
gaatacgatgaagccgggccttcca

SEQ ID NO: 3707632 - DNA, 25 bp, Homo sapien
ttggcatctaacagacaagcctgtg

SEQ ID NO: 3707633 - DNA, 25 bp, Homo sapien
gtgtccctgctgaacaagaaactag

SEQ ID NO: 3707634 - DNA, 25 bp, Homo sapien
tgactgacagatcattgcccctccg

SEQ ID NO: 3707635 - DNA, 25 bp, Homo sapien
gacctctatgctaacaatgtcctat

SEQ ID NO: 3707636 - DNA, 25 bp, Homo sapien
cctctatgctaacaatgtcctatca

SEQ ID NO: 3707637 - DNA, 25 bp, Homo sapien
ctatgctaacaatgtcctatcaggg

SEQ ID NO: 3707638 - DNA, 25 bp, Homo sapien
aaggacctctatgctaacaatgtcc

SEQ ID NO: 3707639 - DNA, 25 bp, Homo sapien
tactctccacttaaggaccatggcc

SEQ ID NO: 3707640 - DNA, 25 bp, Homo sapien
tcagtccactgcaagatcatccaga

SEQ ID NO: 3707641 - DNA, 25 bp, Homo sapien
gtctctcagacaggtggttcctaga

SEQ ID NO: 3707642 - DNA, 25 bp, Homo sapien
tcttttccagggatggagtctgctg

SEQ ID NO: 3707643 - DNA, 25 bp, Homo sapien
catggagacaagtgacggttgcccc

SEQ ID NO: 3707644 - DNA, 25 bp, Homo sapien
tgagggcctactatgcatgagacac

SEQ ID NO: 3707645 - DNA, 25 bp, Homo sapien
gaaatgaacgtttccgctgcccaga

SEQ ID NO: 3707646 - DNA, 25 bp, Homo sapien
ccttgagaagagttacgagttgcct

SEQ ID NO: 3707647 - DNA, 25 bp, Homo sapien
catagttaacaagccctaggatgtc

SEQ ID NO: 3707648 - DNA, 25 bp, Homo sapien
gatgtctgcactggaaaaatgggag

SEQ ID NO: 3707649 - DNA, 25 bp, Homo sapien
tcctctttaacgtgaccagggctgt

SEQ ID NO: 3707650 - DNA, 25 bp, Homo sapien
gactattagtcaaagccaggaccag

SEQ ID NO: 3707651 - DNA, 25 bp, Homo sapien
tgggttagggattctgctcagtcac

SEQ ID NO: 3707652 - DNA, 25 bp, Homo sapien
caatgagcttcgtgttgcccctgaa

SEQ ID NO: 3707653 - DNA, 25 bp, Homo sapien
caactaagaagtgtccgagctgggc

SEQ ID NO: 3707654 - DNA, 25 bp, Homo sapien
cactgggctggacaataactcgagg

SEQ ID NO: 3707655 - DNA, 25 bp, Homo sapien
taacggtggataattgcagccccta

SEQ ID NO: 3707656 - DNA, 25 bp, Homo sapien
gtaaagtaaaagtcctcatgattca

SEQ ID NO: 3707657 - DNA, 25 bp, Homo sapien
ggcagtaaagtattctaccatatga

SEQ ID NO: 3707658 - DNA, 25 bp, Homo sapien
cataataacctcagtcaacatcttg

SEQ ID NO: 3707659 - DNA, 25 bp, Homo sapien
tcccgagcagtatagagaaatcctg

SEQ ID NO: 3707660 - DNA, 25 bp, Homo sapien
tggtaaaagctagacaaatcccgag

SEQ ID NO: 3707661 - DNA, 25 bp, Homo sapien
tgtgggcaccattaatcaaacagat

SEQ ID NO: 3707662 - DNA, 25 bp, Homo sapien
tagtaacatgagtgaacagctggtc

SEQ ID NO: 3707663 - DNA, 25 bp, Homo sapien
atcagagcatcaccctctgaacacc

SEQ ID NO: 3707664 - DNA, 25 bp, Homo sapien
catcagagcatcaccctctgaacac

SEQ ID NO: 3707665 - DNA, 25 bp, Homo sapien
cagagcatcaccctctgaacaccaa

SEQ ID NO: 3707666 - DNA, 25 bp, Homo sapien
gagcatcaccctctgaacaccaatt

SEQ ID NO: 3707667 - DNA, 25 bp, Homo sapien
aattatcccagaaaggaatttctga

SEQ ID NO: 3707668 - DNA, 25 bp, Homo sapien
ggaatccatttggtccatagccaat

SEQ ID NO: 3707669 - DNA, 25 bp, Homo sapien
atttggtccatagccaattttcagg

SEQ ID NO: 3707670 - DNA, 25 bp, Homo sapien
gtgggaatccatttggtccatagcc

SEQ ID NO: 3707671 - DNA, 25 bp, Homo sapien
gattttcacaattgttcgcctggca

SEQ ID NO: 3707672 - DNA, 25 bp, Homo sapien
caaggtgacagggtacctggcctca

SEQ ID NO: 3707673 - DNA, 25 bp, Homo sapien
aactgatctcactggctacaagagg

SEQ ID NO: 3707674 - DNA, 25 bp, Homo sapien
ccaaattgagtccttgagagcctga

SEQ ID NO: 3707675 - DNA, 25 bp, Homo sapien
tctttcttgcactgggtaagtctgc

SEQ ID NO: 3707676 - DNA, 25 bp, Homo sapien
gaatcatagctcacatagccatgca

SEQ ID NO: 3707677 - DNA, 25 bp, Homo sapien
tacctcagtggccttatcatcaaga

SEQ ID NO: 3707678 - DNA, 25 bp, Homo sapien
tgttgaacacatggtttccggttga

SEQ ID NO: 3707679 - DNA, 25 bp, Homo sapien
tcctccgaagtgaaagagcttcccc

SEQ ID NO: 3707680 - DNA, 25 bp, Homo sapien
gaagcgtctttgaacacctgtgtgt

SEQ ID NO: 3707681 - DNA, 25 bp, Homo sapien
tcagagacgagctcacgaaaagccc

SEQ ID NO: 3707682 - DNA, 25 bp, Homo sapien
cactcttgcgcgagatcagagacga

SEQ ID NO: 3707683 - DNA, 25 bp, Homo sapien
agaggtaggagggtccagatgccca

SEQ ID NO: 3707684 - DNA, 25 bp, Homo sapien
cagaggtaggagggtccagatgccc

SEQ ID NO: 3707685 - DNA, 25 bp, Homo sapien
gtaggagggtccagatgcccagcat

SEQ ID NO: 3707686 - DNA, 25 bp, Homo sapien
aggtaggagggtccagatgcccagc

SEQ ID NO: 3707687 - DNA, 25 bp, Homo sapien
aagcaagtcctccagcgttctgagc

SEQ ID NO: 3707688 - DNA, 25 bp, Homo sapien
caacgtggagcgcagtggtctccga

SEQ ID NO: 3707689 - DNA, 25 bp, Homo sapien
agcgttctgagcacccgggcctgag

SEQ ID NO: 3707690 - DNA, 25 bp, Homo sapien
gcacttcgcatcaaggcccaagaaa

SEQ ID NO: 3707691 - DNA, 25 bp, Homo sapien
tcttccgagccctccggcttaacca

SEQ ID NO: 3707692 - DNA, 25 bp, Homo sapien
cagcccccatataactttttcgaga

SEQ ID NO: 3707693 - DNA, 25 bp, Homo sapien
agaagctcattcagcccccatataa

SEQ ID NO: 3707694 - DNA, 25 bp, Homo sapien
taaccactgcttcggtgctgactta

SEQ ID NO: 3707695 - DNA, 25 bp, Homo sapien
aaatgaaaccactcaggcagcgact

SEQ ID NO: 3707696 - DNA, 25 bp, Homo sapien
aacaaaatgaaaccactcaggcagc

SEQ ID NO: 3707697 - DNA, 25 bp, Homo sapien
tgaaaccactcaggcagcgacttac

SEQ ID NO: 3707698 - DNA, 25 bp, Homo sapien
caaaatgaaaccactcaggcagcga

SEQ ID NO: 3707699 - DNA, 25 bp, Homo sapien
tctgtgcggtgggaacgagtaccac

SEQ ID NO: 3707700 - DNA, 25 bp, Homo sapien
gcatttctgagcgagggacttttca

SEQ ID NO: 3707701 - DNA, 25 bp, Homo sapien
tcagaggctccggtactcaaatgag

SEQ ID NO: 3707702 - DNA, 25 bp, Homo sapien
tcttggccaataataggcgccgggt

SEQ ID NO: 3707703 - DNA, 25 bp, Homo sapien
tggcactttgttggggcccaataaa

SEQ ID NO: 3707704 - DNA, 25 bp, Homo sapien
atgcctggcactttgttggggccca

SEQ ID NO: 3707705 - DNA, 25 bp, Homo sapien
cctggcactttgttggggcccaata

SEQ ID NO: 3707706 - DNA, 25 bp, Homo sapien
gctatgcctggcactttgttggggc

SEQ ID NO: 3707707 - DNA, 25 bp, Homo sapien
aagaaaactacacactaaggctatt

SEQ ID NO: 3707708 - DNA, 25 bp, Homo sapien
tgtagtgttgtaccttataaggaag

SEQ ID NO: 3707709 - DNA, 25 bp, Homo sapien
taaggaagtacaaggtacaacatat

SEQ ID NO: 3707710 - DNA, 25 bp, Homo sapien
ctaaggctattgtagtgttgtacct

SEQ ID NO: 3707711 - DNA, 25 bp, Homo sapien
tttctacttagtgggactcaggcta

SEQ ID NO: 3707712 - DNA, 25 bp, Homo sapien
gggtgactgggctgtacaacagttt

SEQ ID NO: 3707713 - DNA, 25 bp, Homo sapien
cccagcctaaaggtataatcttata

SEQ ID NO: 3707714 - DNA, 25 bp, Homo sapien
tcaagaaagcagttgtgatcaaagg

SEQ ID NO: 3707715 - DNA, 25 bp, Homo sapien
taaaaagtgctaaggcccctacata

SEQ ID NO: 3707716 - DNA, 25 bp, Homo sapien
cctgtagtgatgcattatttaataa

SEQ ID NO: 3707717 - DNA, 25 bp, Homo sapien
aatagttctcaagaccccgacagac

SEQ ID NO: 3707718 - DNA, 25 bp, Homo sapien
cccctacatagacctaaggaatcag

SEQ ID NO: 3707719 - DNA, 25 bp, Homo sapien
ttccaatcccttggagttgatgtca

SEQ ID NO: 3707720 - DNA, 25 bp, Homo sapien
catcatgatgcaggccttccaagtt

SEQ ID NO: 3707721 - DNA, 25 bp, Homo sapien
tagtaacagtcttcctcaattccaa

SEQ ID NO: 3707722 - DNA, 25 bp, Homo sapien
taacacttttggacgataatctagc

SEQ ID NO: 3707723 - DNA, 25 bp, Homo sapien
tctccaaagcactcaacctagtttt

SEQ ID NO: 3707724 - DNA, 25 bp, Homo sapien
acataccaataatctctatgaatgg

SEQ ID NO: 3707725 - DNA, 25 bp, Homo sapien
taccaataatctctatgaatggctt

SEQ ID NO: 3707726 - DNA, 25 bp, Homo sapien
caataatctctatgaatggctttag

SEQ ID NO: 3707727 - DNA, 25 bp, Homo sapien
taaacataccaataatctctatgaa

SEQ ID NO: 3707728 - DNA, 25 bp, Homo sapien
aagtcacatccataatgcatcacct

SEQ ID NO: 3707729 - DNA, 25 bp, Homo sapien
tcatttgacaattttgtgatataga

SEQ ID NO: 3707730 - DNA, 25 bp, Homo sapien
tcccaggttctttcttaagtcacat

SEQ ID NO: 3707731 - DNA, 25 bp, Homo sapien
catccataatgcatcacctataatt

SEQ ID NO: 3707732 - DNA, 25 bp, Homo sapien
ttcttggcagggcacgcagtctggt

SEQ ID NO: 3707733 - DNA, 25 bp, Homo sapien
ggttcatccccattgactgtgcagt

SEQ ID NO: 3707734 - DNA, 25 bp, Homo sapien
catgtccttcatcacacaatctaca

SEQ ID NO: 3707735 - DNA, 25 bp, Homo sapien
aaatgggctttgtctgtgtactcct

SEQ ID NO: 3707736 - DNA, 25 bp, Homo sapien
tgtgtccttgtatctgcaggcttct

SEQ ID NO: 3707737 - DNA, 25 bp, Homo sapien
tgtccttgtatctgcaggcttctga

SEQ ID NO: 3707738 - DNA, 25 bp, Homo sapien
tctgtgtccttgtatctgcaggctt

SEQ ID NO: 3707739 - DNA, 25 bp, Homo sapien
gtgtccttgtatctgcaggcttctg

SEQ ID NO: 3707740 - DNA, 25 bp, Homo sapien
ttggtattctgggtccgggtgcagt

SEQ ID NO: 3707741 - DNA, 25 bp, Homo sapien
tattctgggtccgggtgcagtttat

SEQ ID NO: 3707742 - DNA, 25 bp, Homo sapien
tgggtccgggtgcagtttatttcca

SEQ ID NO: 3707743 - DNA, 25 bp, Homo sapien
tctgggtccgggtgcagtttatttc

SEQ ID NO: 3707744 - DNA, 25 bp, Homo sapien
tcacatacagtagagttacaaaaaa

SEQ ID NO: 3707745 - DNA, 25 bp, Homo sapien
acagtgttcacatacagtagagtta

SEQ ID NO: 3707746 - DNA, 25 bp, Homo sapien
gtgttcacatacagtagagttacaa

SEQ ID NO: 3707747 - DNA, 25 bp, Homo sapien
gttcacatacagtagagttacaaaa

SEQ ID NO: 3707748 - DNA, 25 bp, Homo sapien
tgctggtgagtgtgcattccttgat

SEQ ID NO: 3707749 - DNA, 25 bp, Homo sapien
ggtgagtgtgcattccttgatgatt

SEQ ID NO: 3707750 - DNA, 25 bp, Homo sapien
ctggtgagtgtgcattccttgatga

SEQ ID NO: 3707751 - DNA, 25 bp, Homo sapien
gctggtgagtgtgcattccttgatg

SEQ ID NO: 3707752 - DNA, 25 bp, Homo sapien
ttagtggaattggcaaaagaagaag

SEQ ID NO: 3707753 - DNA, 25 bp, Homo sapien
aaagccaccccaagttagatctgga

SEQ ID NO: 3707754 - DNA, 25 bp, Homo sapien
agtggaattggcaaaagaagaagac

SEQ ID NO: 3707755 - DNA, 25 bp, Homo sapien
aagaagaagacaaagccaccccaag

SEQ ID NO: 3707756 - DNA, 25 bp, Homo sapien
aggatttaaagttggagattcatga

SEQ ID NO: 3707757 - DNA, 25 bp, Homo sapien
cagataaatttattgccactgtttc

SEQ ID NO: 3707758 - DNA, 25 bp, Homo sapien
tgggccacaatacataacatttctg

SEQ ID NO: 3707759 - DNA, 25 bp, Homo sapien
taagtcctaaaggtctatgaagagc

SEQ ID NO: 3707760 - DNA, 25 bp, Homo sapien
ggatccaatgatcaatgacccacaa

SEQ ID NO: 3707761 - DNA, 25 bp, Homo sapien
gagttctaactccaaatcctgccat

SEQ ID NO: 3707762 - DNA, 25 bp, Homo sapien
tgagtcactagtaatgtccttgagg

SEQ ID NO: 3707763 - DNA, 25 bp, Homo sapien
catctattttggcttcattgacacc

SEQ ID NO: 3707764 - DNA, 25 bp, Homo sapien
tctctgcaagagtacaaagattggc

SEQ ID NO: 3707765 - DNA, 25 bp, Homo sapien
gatgccaattacgaagcagttgaac

SEQ ID NO: 3707766 - DNA, 25 bp, Homo sapien
cctatttgggtacttagcatgccac

SEQ ID NO: 3707767 - DNA, 25 bp, Homo sapien
gattttaaacatccttggaggcaga

SEQ ID NO: 3707768 - DNA, 25 bp, Homo sapien
tacaaatatgttggctcttcagcgc

SEQ ID NO: 3707769 - DNA, 25 bp, Homo sapien
gaatcatatgttagatgccagagca

SEQ ID NO: 3707770 - DNA, 25 bp, Homo sapien
ggtggcaaagctctagtaatactct

SEQ ID NO: 3707771 - DNA, 25 bp, Homo sapien
tgggttcatgacatgtcacaaagct

SEQ ID NO: 3707772 - DNA, 25 bp, Homo sapien
gagcagttagtatctccaaaccagg

SEQ ID NO: 3707773 - DNA, 25 bp, Homo sapien
gacaagagcaattcctaaatccaga

SEQ ID NO: 3707774 - DNA, 25 bp, Homo sapien
tttccagaccataacacaggaggga

SEQ ID NO: 3707775 - DNA, 25 bp, Homo sapien
gagaaccaggttcaccagaatgagg

SEQ ID NO: 3707776 - DNA, 25 bp, Homo sapien
ggagggaaccctaagcaaagcacaa

SEQ ID NO: 3707777 - DNA, 25 bp, Homo sapien
gagcagacagcacagactatgatgg

SEQ ID NO: 3707778 - DNA, 25 bp, Homo sapien
caccatgatgtatgagcctcaagat

SEQ ID NO: 3707779 - DNA, 25 bp, Homo sapien
gaaagccagcctacaaggtcagcat

SEQ ID NO: 3707780 - DNA, 25 bp, Homo sapien
aggaaaatcacatgaggaaagccag

SEQ ID NO: 3707781 - DNA, 25 bp, Homo sapien
ccaaatgcatgactgaatctgtgat

SEQ ID NO: 3707782 - DNA, 25 bp, Homo sapien
aagctctccgcagcaaagaggaggc

SEQ ID NO: 3707783 - DNA, 25 bp, Homo sapien
gctgcaggtatgtcttaggtaagca

SEQ ID NO: 3707784 - DNA, 25 bp, Homo sapien
gctgattatccaaagaacaaaggct

SEQ ID NO: 3707785 - DNA, 25 bp, Homo sapien
tgtgtaacttcccttaactgtgtag

SEQ ID NO: 3707786 - DNA, 25 bp, Homo sapien
gacttcaggtgatgcaccctcctcg

SEQ ID NO: 3707787 - DNA, 25 bp, Homo sapien
ctgacttcaggtgatgcaccctcct

SEQ ID NO: 3707788 - DNA, 25 bp, Homo sapien
ctcctgacttcaggtgatgcaccct

SEQ ID NO: 3707789 - DNA, 25 bp, Homo sapien
tcctgacttcaggtgatgcaccctc

SEQ ID NO: 3707790 - DNA, 25 bp, Homo sapien
tgactaatggttccaggaggtaacc

SEQ ID NO: 3707791 - DNA, 25 bp, Homo sapien
tataagccagacctagtacagtgcc

SEQ ID NO: 3707792 - DNA, 25 bp, Homo sapien
ccattggatggagtagtcagataac

SEQ ID NO: 3707793 - DNA, 25 bp, Homo sapien
tcctagcaggacgttaaagattgca

SEQ ID NO: 3707794 - DNA, 25 bp, Homo sapien
ttttgcaaggccgtgatttcaagca

SEQ ID NO: 3707795 - DNA, 25 bp, Homo sapien
ttcaaaattttgcaaggccgtgatt

SEQ ID NO: 3707796 - DNA, 25 bp, Homo sapien
aaaattttgcaaggccgtgatttca

SEQ ID NO: 3707797 - DNA, 25 bp, Homo sapien
tttgcaaggccgtgatttcaagcat

SEQ ID NO: 3707798 - DNA, 25 bp, Homo sapien
tgagattgaatttctagtggaaagt

SEQ ID NO: 3707799 - DNA, 25 bp, Homo sapien
gattgaatttctagtggaaagtggc

SEQ ID NO: 3707800 - DNA, 25 bp, Homo sapien
gtgttcagatcaaaagtgcctaggc

SEQ ID NO: 3707801 - DNA, 25 bp, Homo sapien
tcaaaagtgcctaggccccatggca

SEQ ID NO: 3707802 - DNA, 25 bp, Homo sapien
catgaattctttctttggatgtcat

SEQ ID NO: 3707803 - DNA, 25 bp, Homo sapien
caggtttcctgacatgaattctttc

SEQ ID NO: 3707804 - DNA, 25 bp, Homo sapien
ctgacatgaattctttctttggatg

SEQ ID NO: 3707805 - DNA, 25 bp, Homo sapien
ttcctgacatgaattctttctttgg

SEQ ID NO: 3707806 - DNA, 25 bp, Homo sapien
tggagtcaatgagtcatttaaattc

SEQ ID NO: 3707807 - DNA, 25 bp, Homo sapien
tcccaacagggcttcttagttcaag

SEQ ID NO: 3707808 - DNA, 25 bp, Homo sapien
ctctgcttgctcatggttaccccag

SEQ ID NO: 3707809 - DNA, 25 bp, Homo sapien
caagttccaggagttgactccctgg

SEQ ID NO: 3707810 - DNA, 25 bp, Homo sapien
cagaaaaccatatttccacttgttt

SEQ ID NO: 3707811 - DNA, 25 bp, Homo sapien
acagaaaaccatatttccacttgtt

SEQ ID NO: 3707812 - DNA, 25 bp, Homo sapien
tttttgctcaacttcggctattgcc

SEQ ID NO: 3707813 - DNA, 25 bp, Homo sapien
tgagcctttttgctcaacttcggct

SEQ ID NO: 3707814 - DNA, 25 bp, Homo sapien
gcctttttgctcaacttcggctatt

SEQ ID NO: 3707815 - DNA, 25 bp, Homo sapien
tttgctcaacttcggctattgccat

SEQ ID NO: 3707816 - DNA, 25 bp, Homo sapien
agtctcagagtactgtaattttcca

SEQ ID NO: 3707817 - DNA, 25 bp, Homo sapien
tccttcctacggtcactcattttag

SEQ ID NO: 3707818 - DNA, 25 bp, Homo sapien
gcagaattctcaagttgtaggccag

SEQ ID NO: 3707819 - DNA, 25 bp, Homo sapien
ctaggactcagtggatttgttaaca

SEQ ID NO: 3707820 - DNA, 25 bp, Homo sapien
ctgagggctagaagcactgctgatt

SEQ ID NO: 3707821 - DNA, 25 bp, Homo sapien
tgagggctagaagcactgctgattg

SEQ ID NO: 3707822 - DNA, 25 bp, Homo sapien
gtgtactggatgtgaagtcttcaca

SEQ ID NO: 3707823 - DNA, 25 bp, Homo sapien
tgcctataactttgtatatctggtg

SEQ ID NO: 3707824 - DNA, 25 bp, Homo sapien
atgcctataactttgtatatctggt

SEQ ID NO: 3707825 - DNA, 25 bp, Homo sapien
gtactggatgtgaagtcttcacact

SEQ ID NO: 3707826 - DNA, 25 bp, Homo sapien
ttcaatgtagacattattatgaatg

SEQ ID NO: 3707827 - DNA, 25 bp, Homo sapien
tcaatgtagacattattatgaatga

SEQ ID NO: 3707828 - DNA, 25 bp, Homo sapien
tttcaatgtagacattattatgaat

SEQ ID NO: 3707829 - DNA, 25 bp, Homo sapien
tttaaatatcacgatcagggcataa

SEQ ID NO: 3707830 - DNA, 25 bp, Homo sapien
cttgcaatgcgggaaagaaaagggc

SEQ ID NO: 3707831 - DNA, 25 bp, Homo sapien
cagaagttataaggttagttcctca

SEQ ID NO: 3707832 - DNA, 25 bp, Homo sapien
cattgaaaccatcttgaagtctagt

SEQ ID NO: 3707833 - DNA, 25 bp, Homo sapien
ctatgtatttgagtgaccaaaggta

SEQ ID NO: 3707834 - DNA, 25 bp, Homo sapien
ggctgattaatagttgtcgaataaa

SEQ ID NO: 3707835 - DNA, 25 bp, Homo sapien
taatctccatgctgttgttgacaag

SEQ ID NO: 3707836 - DNA, 25 bp, Homo sapien
tgttgacaagcacgagatccaggtc

SEQ ID NO: 3707837 - DNA, 25 bp, Homo sapien
tcgacatgatgaacgtcacactgct

SEQ ID NO: 3707838 - DNA, 25 bp, Homo sapien
gatgaacgtcacactgctcgggtgc

SEQ ID NO: 3707839 - DNA, 25 bp, Homo sapien
ctttgggcttcttcgacatgatgaa

SEQ ID NO: 3707840 - DNA, 25 bp, Homo sapien
gcttcttcgacatgatgaacgtcac

SEQ ID NO: 3707841 - DNA, 25 bp, Homo sapien
tctgcctgctactcttcgacatgga

SEQ ID NO: 3707842 - DNA, 25 bp, Homo sapien
gatgtttgtgttccccgtgacgctg

SEQ ID NO: 3707843 - DNA, 25 bp, Homo sapien
ggctgtaccgcaccttccacaaggt

SEQ ID NO: 3707844 - DNA, 25 bp, Homo sapien
catggagttcttcgtgtggcacctg

SEQ ID NO: 3707845 - DNA, 25 bp, Homo sapien
ggaccagcggttccctgtgcaaagg

SEQ ID NO: 3707846 - DNA, 25 bp, Homo sapien
gcaaagggctcgtttctcgatcgcc

SEQ ID NO: 3707847 - DNA, 25 bp, Homo sapien
ggttctcagaaaacacccgagctac

SEQ ID NO: 3707848 - DNA, 25 bp, Homo sapien
tggatagaccgcaaccgggttctca

SEQ ID NO: 3707849 - DNA, 25 bp, Homo sapien
cacgtctagccggaatgagaagaaa

SEQ ID NO: 3707850 - DNA, 25 bp, Homo sapien
tctgaaacactgcatcaaggacaag

SEQ ID NO: 3707851 - DNA, 25 bp, Homo sapien
gaaggacgctcttctctgaaacact

SEQ ID NO: 3707852 - DNA, 25 bp, Homo sapien
taatggtccgtttggagcagtgaga

SEQ ID NO: 3707853 - DNA, 25 bp, Homo sapien
gctagttgctatccttcaaagtgcc

SEQ ID NO: 3707854 - DNA, 25 bp, Homo sapien
tgaagccagcgctctcaagttttgc

SEQ ID NO: 3707855 - DNA, 25 bp, Homo sapien
tatagagtggagaactaacaggact

SEQ ID NO: 3707856 - DNA, 25 bp, Homo sapien
taacagcgatagacggtggatacac

SEQ ID NO: 3707857 - DNA, 25 bp, Homo sapien
gctctctagtctaacggtcttgtag

SEQ ID NO: 3707858 - DNA, 25 bp, Homo sapien
ttatcaaacctaactgtgacagctg

SEQ ID NO: 3707859 - DNA, 25 bp, Homo sapien
tctgtcactgacttaagcgaggtat

SEQ ID NO: 3707860 - DNA, 25 bp, Homo sapien
gaagccagtgtctcaaccatagtat

SEQ ID NO: 3707861 - DNA, 25 bp, Homo sapien
catgagagcattccggaatgggagc

SEQ ID NO: 3707862 - DNA, 25 bp, Homo sapien
tggtgttccatgagagcattccgga

SEQ ID NO: 3707863 - DNA, 25 bp, Homo sapien
ctcagatcaccaacttggtgttcca

SEQ ID NO: 3707864 - DNA, 25 bp, Homo sapien
gatcaccaacttggtgttccatgag

SEQ ID NO: 3707865 - DNA, 25 bp, Homo sapien
caaagcccagatttgctgtacaagg

SEQ ID NO: 3707866 - DNA, 25 bp, Homo sapien
tttgtgcagccattgtatcggatct

SEQ ID NO: 3707867 - DNA, 25 bp, Homo sapien
ggcctttgctcttctacccgctgta

SEQ ID NO: 3707868 - DNA, 25 bp, Homo sapien
tttgtcagtaaaatggttggttgct

SEQ ID NO: 3707869 - DNA, 25 bp, Homo sapien
tgttagggcacacggaagttcagag

SEQ ID NO: 3707870 - DNA, 25 bp, Homo sapien
cccatgtcaagtgttttggctcctg

SEQ ID NO: 3707871 - DNA, 25 bp, Homo sapien
gtattgtttgcgtgggtctcaggcc

SEQ ID NO: 3707872 - DNA, 25 bp, Homo sapien
cagatccctgagctggctaaaagga

SEQ ID NO: 3707873 - DNA, 25 bp, Homo sapien
ttggagcaagcattaacaaatgctt

SEQ ID NO: 3707874 - DNA, 25 bp, Homo sapien
tttggagcaagcattaacaaatgct

SEQ ID NO: 3707875 - DNA, 25 bp, Homo sapien
agccttcctcttgcctctctctgac

SEQ ID NO: 3707876 - DNA, 25 bp, Homo sapien
cgagccttcctcttgcctctctctg

SEQ ID NO: 3707877 - DNA, 25 bp, Homo sapien
cttcctcttgcctctctctgactct

SEQ ID NO: 3707878 - DNA, 25 bp, Homo sapien
ccttcctcttgcctctctctgactc

SEQ ID NO: 3707879 - DNA, 25 bp, Homo sapien
ggcaacagttggctgggcctgcttc

SEQ ID NO: 3707880 - DNA, 25 bp, Homo sapien
tttgccagtcaatccttaaatcctt

SEQ ID NO: 3707881 - DNA, 25 bp, Homo sapien
ttgccagtcaatccttaaatccttc

SEQ ID NO: 3707882 - DNA, 25 bp, Homo sapien
tgccagtcaatccttaaatccttct

SEQ ID NO: 3707883 - DNA, 25 bp, Homo sapien
ggctcagcacattcagtttcggagc

SEQ ID NO: 3707884 - DNA, 25 bp, Homo sapien
aaggcagcgttgtcgtggactgcca

SEQ ID NO: 3707885 - DNA, 25 bp, Homo sapien
gagcttgagtaatcgcctcctggct

SEQ ID NO: 3707886 - DNA, 25 bp, Homo sapien
ctcctgcgggactgtgggctcagca

SEQ ID NO: 3707887 - DNA, 25 bp, Homo sapien
gtgtgacggagtcctgtccggactc

SEQ ID NO: 3707888 - DNA, 25 bp, Homo sapien
agtgtgacggagtcctgtccggact

SEQ ID NO: 3707889 - DNA, 25 bp, Homo sapien
tttggagtgtgacggagtcctgtcc

SEQ ID NO: 3707890 - DNA, 25 bp, Homo sapien
gtgttttggagtgtgacggagtcct

SEQ ID NO: 3707891 - DNA, 25 bp, Homo sapien
aagttttgtagccagtaagaactga

SEQ ID NO: 3707892 - DNA, 25 bp, Homo sapien
gcttcatgctaacgccctggtgtct

SEQ ID NO: 3707893 - DNA, 25 bp, Homo sapien
gaggtctgcttcatgctaacgccct

SEQ ID NO: 3707894 - DNA, 25 bp, Homo sapien
ccagtaagaactgaggtctgcttca

SEQ ID NO: 3707895 - DNA, 25 bp, Homo sapien
gatgtcctgcttgtgcctactacag

SEQ ID NO: 3707896 - DNA, 25 bp, Homo sapien
atctgagataatgcgtgtaaagtgc

SEQ ID NO: 3707897 - DNA, 25 bp, Homo sapien
gataaagtcacactgtggaaagtgg

SEQ ID NO: 3707898 - DNA, 25 bp, Homo sapien
cagagagctgttaggtgacttatct

SEQ ID NO: 3707899 - DNA, 25 bp, Homo sapien
gagaattttggatgagagctggata

SEQ ID NO: 3707900 - DNA, 25 bp, Homo sapien
aaattcgctcaactgtgaagctctg

SEQ ID NO: 3707901 - DNA, 25 bp, Homo sapien
taatttcccaaaattcgctcaactg

SEQ ID NO: 3707902 - DNA, 25 bp, Homo sapien
ttgagggagaattttggatgagagc

SEQ ID NO: 3707903 - DNA, 25 bp, Homo sapien
ttaaaagtctcaccgtgtctcccag

SEQ ID NO: 3707904 - DNA, 25 bp, Homo sapien
gattaagccctccatgacagggatg

SEQ ID NO: 3707905 - DNA, 25 bp, Homo sapien
gatggtggtctctgatattgacttc

SEQ ID NO: 3707906 - DNA, 25 bp, Homo sapien
gatgtattctaaactgtgtggacag

SEQ ID NO: 3707907 - DNA, 25 bp, Homo sapien
ccccttagctcctccaggcatccca

SEQ ID NO: 3707908 - DNA, 25 bp, Homo sapien
cccttagctcctccaggcatcccat

SEQ ID NO: 3707909 - DNA, 25 bp, Homo sapien
cgtgctctccccttagctcctccag

SEQ ID NO: 3707910 - DNA, 25 bp, Homo sapien
cctcgtgctctccccttagctcctc

SEQ ID NO: 3707911 - DNA, 25 bp, Homo sapien
agtgctcctggaccgcgaggacagc

SEQ ID NO: 3707912 - DNA, 25 bp, Homo sapien
acaggcgcggtctccggtcagtgaa

SEQ ID NO: 3707913 - DNA, 25 bp, Homo sapien
gggatgtctgattcctctctctgca

SEQ ID NO: 3707914 - DNA, 25 bp, Homo sapien
tctccggtcagtgaagctgcccagt

SEQ ID NO: 3707915 - DNA, 25 bp, Homo sapien
tgattggctgaacaaatagtccgag

SEQ ID NO: 3707916 - DNA, 25 bp, Homo sapien
tttctgcgggcgttggctcaaggca

SEQ ID NO: 3707917 - DNA, 25 bp, Homo sapien
agagctggcactgcgactcgagaca

SEQ ID NO: 3707918 - DNA, 25 bp, Homo sapien
tgcgtttggacccagcgagtcttgc

SEQ ID NO: 3707919 - DNA, 25 bp, Homo sapien
cactgcttgtgtgaacttgcatccg

SEQ ID NO: 3707920 - DNA, 25 bp, Homo sapien
caatcaggcagacttccgagccaga

SEQ ID NO: 3707921 - DNA, 25 bp, Homo sapien
ttcagtgtgttccttaagtgcagca

SEQ ID NO: 3707922 - DNA, 25 bp, Homo sapien
gaaatggaagtgttggttacagccc

SEQ ID NO: 3707923 - DNA, 25 bp, Homo sapien
tcctgcagtgttctggcaaaggctg

SEQ ID NO: 3707924 - DNA, 25 bp, Homo sapien
tatgaaatggaagtgtatcctggca

SEQ ID NO: 3707925 - DNA, 25 bp, Homo sapien
tcctggcaagtacaaacaacataac

SEQ ID NO: 3707926 - DNA, 25 bp, Homo sapien
ttagaaatctgcctgagctgatggc

SEQ ID NO: 3707927 - DNA, 25 bp, Homo sapien
tgatatgagtctggaagcgccacag

SEQ ID NO: 3707928 - DNA, 25 bp, Homo sapien
taagaacgtttcagcctggtttgca

SEQ ID NO: 3707929 - DNA, 25 bp, Homo sapien
cctcctatgagggacgttcgtctct

SEQ ID NO: 3707930 - DNA, 25 bp, Homo sapien
gattgctaaaggcttccatcaggga

SEQ ID NO: 3707931 - DNA, 25 bp, Homo sapien
gatgggatgggctgtttttataaga

SEQ ID NO: 3707932 - DNA, 25 bp, Homo sapien
gaggcctgacatatagcgtatacag

SEQ ID NO: 3707933 - DNA, 25 bp, Homo sapien
tcatccggatttatacgtgcaggtc

SEQ ID NO: 3707934 - DNA, 25 bp, Homo sapien
gcgtatacaggtgtacacagaagca

SEQ ID NO: 3707935 - DNA, 25 bp, Homo sapien
gtcacggcaccaaatgtcactcgcg

SEQ ID NO: 3707936 - DNA, 25 bp, Homo sapien
ccaaatgtcactcgcgtccatgtga

SEQ ID NO: 3707937 - DNA, 25 bp, Homo sapien
gcaccaaatgtcactcgcgtccatg

SEQ ID NO: 3707938 - DNA, 25 bp, Homo sapien
acggcaccaaatgtcactcgcgtcc

SEQ ID NO: 3707939 - DNA, 25 bp, Homo sapien
tctaggaatgcttgactgctgcggc

SEQ ID NO: 3707940 - DNA, 25 bp, Homo sapien
ggaatgcttgactgctgcggcttag

SEQ ID NO: 3707941 - DNA, 25 bp, Homo sapien
taggaatgcttgactgctgcggctt

SEQ ID NO: 3707942 - DNA, 25 bp, Homo sapien
cctctaggaatgcttgactgctgcg

SEQ ID NO: 3707943 - DNA, 25 bp, Homo sapien
ttcttgttcacataactgtccaagg

SEQ ID NO: 3707944 - DNA, 25 bp, Homo sapien
ttccatcctgtgactctaccatccc

SEQ ID NO: 3707945 - DNA, 25 bp, Homo sapien
ttctcttccatgcaatgattcaagg

SEQ ID NO: 3707946 - DNA, 25 bp, Homo sapien
tgttcacataactgtccaaggctgg

SEQ ID NO: 3707947 - DNA, 25 bp, Homo sapien
cagctgttcggcagggctcggttca

SEQ ID NO: 3707948 - DNA, 25 bp, Homo sapien
atatatacaagtggcctctggttcc

SEQ ID NO: 3707949 - DNA, 25 bp, Homo sapien
ggttgcagtgcaattctcagctgtt

SEQ ID NO: 3707950 - DNA, 25 bp, Homo sapien
gagacctatatatacaagtggcctc

SEQ ID NO: 3707951 - DNA, 25 bp, Homo sapien
taccagcccttgtgcaaatctgaga

SEQ ID NO: 3707952 - DNA, 25 bp, Homo sapien
cctctccagggcagtctcatgtttt

SEQ ID NO: 3707953 - DNA, 25 bp, Homo sapien
tgtctcataggaagtaagcacaggg

SEQ ID NO: 3707954 - DNA, 25 bp, Homo sapien
ttggtaacacgggattccagagctc

SEQ ID NO: 3707955 - DNA, 25 bp, Homo sapien
tggcattttagttgccgtaggctgc

SEQ ID NO: 3707956 - DNA, 25 bp, Homo sapien
ggtgaaatggcattttagttgccgt

SEQ ID NO: 3707957 - DNA, 25 bp, Homo sapien
aaatggcattttagttgccgtaggc

SEQ ID NO: 3707958 - DNA, 25 bp, Homo sapien
ggcattttagttgccgtaggctgct

SEQ ID NO: 3707959 - DNA, 25 bp, Homo sapien
cagttgtccagacggtagcttgcta

SEQ ID NO: 3707960 - DNA, 25 bp, Homo sapien
aatctgaacgtctgagagtcggccc

SEQ ID NO: 3707961 - DNA, 25 bp, Homo sapien
gataggccagtaggttgcacattgt

SEQ ID NO: 3707962 - DNA, 25 bp, Homo sapien
gcacattgtggctttgaattcacga

SEQ ID NO: 3707963 - DNA, 25 bp, Homo sapien
gccacagcgtgtcctattagttcca

SEQ ID NO: 3707964 - DNA, 25 bp, Homo sapien
gctgcactgcgaagaacatctgtta

SEQ ID NO: 3707965 - DNA, 25 bp, Homo sapien
tgcctcagagggtcaatggcgttct

SEQ ID NO: 3707966 - DNA, 25 bp, Homo sapien
tggaagacttttgccctatagcagc

SEQ ID NO: 3707967 - DNA, 25 bp, Homo sapien
ggaagtaatactctgcgtcttcata

SEQ ID NO: 3707968 - DNA, 25 bp, Homo sapien
cacacttcatttggtacagctgaaa

SEQ ID NO: 3707969 - DNA, 25 bp, Homo sapien
gagcagttgtttcgctacaggagta

SEQ ID NO: 3707970 - DNA, 25 bp, Homo sapien
gctgaaagttgccataccgcagatg

SEQ ID NO: 3707971 - DNA, 25 bp, Homo sapien
ctttctcccttgatttctggtttat

SEQ ID NO: 3707972 - DNA, 25 bp, Homo sapien
tctttctcccttgatttctggttta

SEQ ID NO: 3707973 - DNA, 25 bp, Homo sapien
tttttagaaagtcgcattttggcaa

SEQ ID NO: 3707974 - DNA, 25 bp, Homo sapien
ccagactccaaacccctctcagagt

SEQ ID NO: 3707975 - DNA, 25 bp, Homo sapien
gacatgcaaagcctcagaatctgct

SEQ ID NO: 3707976 - DNA, 25 bp, Homo sapien
aaggaatgccaagacatgcaaagcc

SEQ ID NO: 3707977 - DNA, 25 bp, Homo sapien
cctagtgggcaccacatctctattc

SEQ ID NO: 3707978 - DNA, 25 bp, Homo sapien
gtagcctagtgggcaccacatctct

SEQ ID NO: 3707979 - DNA, 25 bp, Homo sapien
tagcctagtgggcaccacatctcta

SEQ ID NO: 3707980 - DNA, 25 bp, Homo sapien
tcagcagtagcctagtgggcaccac

SEQ ID NO: 3707981 - DNA, 25 bp, Homo sapien
tgatgacctcaaatgcgtgcaacaa

SEQ ID NO: 3707982 - DNA, 25 bp, Homo sapien
cctatttagactttggtccgccagc

SEQ ID NO: 3707983 - DNA, 25 bp, Homo sapien
tctcaatcgttccaagcataccgtg

SEQ ID NO: 3707984 - DNA, 25 bp, Homo sapien
ccaacttggtggaggaatttcagct

SEQ ID NO: 3707985 - DNA, 25 bp, Homo sapien
ttcacgtaggtcaatggtagcaggt

SEQ ID NO: 3707986 - DNA, 25 bp, Homo sapien
gacagaatgtctgtgttcacgtagg

SEQ ID NO: 3707987 - DNA, 25 bp, Homo sapien
gattatgatagtagaccagtcgagg

SEQ ID NO: 3707988 - DNA, 25 bp, Homo sapien
ggatttggttcacacctgtgtaacg

SEQ ID NO: 3707989 - DNA, 25 bp, Homo sapien
gaatacgtgtggtgttccttcccag

SEQ ID NO: 3707990 - DNA, 25 bp, Homo sapien
catacacttgtccattttgatccaa

SEQ ID NO: 3707991 - DNA, 25 bp, Homo sapien
tcaaggtgagctagatcttcccctg

SEQ ID NO: 3707992 - DNA, 25 bp, Homo sapien
ccagatgtagtcctaatttactcag

SEQ ID NO: 3707993 - DNA, 25 bp, Homo sapien
gagtgtctcaatattccaagtacca

SEQ ID NO: 3707994 - DNA, 25 bp, Homo sapien
aatattccaagtaccatctgtcatg

SEQ ID NO: 3707995 - DNA, 25 bp, Homo sapien
gctttggcccacactgtgtgggctg

SEQ ID NO: 3707996 - DNA, 25 bp, Homo sapien
gggtgggagtgtctcaatattccaa

SEQ ID NO: 3707997 - DNA, 25 bp, Homo sapien
caccagtcagatgtatgtttggtct

SEQ ID NO: 3707998 - DNA, 25 bp, Homo sapien
tgaaggttgtgcatgcgtcatatag

SEQ ID NO: 3707999 - DNA, 25 bp, Homo sapien
gaaggttgtgcatgcgtcatatagt

SEQ ID NO: 3708000 - DNA, 25 bp, Homo sapien
ggtacaccagtcagatgtatgtttg

SEQ ID NO: 3708001 - DNA, 25 bp, Homo sapien
tctgcctcaagtaaatactgaagga

SEQ ID NO: 3708002 - DNA, 25 bp, Homo sapien
cagctgatgttttctccgtttttga

SEQ ID NO: 3708003 - DNA, 25 bp, Homo sapien
gggtgggagagtagggcacgcatca

SEQ ID NO: 3708004 - DNA, 25 bp, Homo sapien
ctgctgttccgaaaagctggtgacc

SEQ ID NO: 3708005 - DNA, 25 bp, Homo sapien
acccagggtgctgttaggtctgtgc

SEQ ID NO: 3708006 - DNA, 25 bp, Homo sapien
ccacccagggtgctgttaggtctgt

SEQ ID NO: 3708007 - DNA, 25 bp, Homo sapien
ctgaagaggtttccacccagggtgc

SEQ ID NO: 3708008 - DNA, 25 bp, Homo sapien
ccagggtgctgttaggtctgtgctt

SEQ ID NO: 3708009 - DNA, 25 bp, Homo sapien
gtttttagcttactgattccaagca

SEQ ID NO: 3708010 - DNA, 25 bp, Homo sapien
tgtttttagcttactgattccaagc

SEQ ID NO: 3708011 - DNA, 25 bp, Homo sapien
tgagcccaggaggcaaaagttgtag

SEQ ID NO: 3708012 - DNA, 25 bp, Homo sapien
ccagccagggtgatagagtgggacc

SEQ ID NO: 3708013 - DNA, 25 bp, Homo sapien
gcccaggaggcaaaagttgtagtga

SEQ ID NO: 3708014 - DNA, 25 bp, Homo sapien
gtagtcctcgccattcgggaggctg

SEQ ID NO: 3708015 - DNA, 25 bp, Homo sapien
tatccattctgttgagggccttaat

SEQ ID NO: 3708016 - DNA, 25 bp, Homo sapien
agcagattgctctccccagtatggg

SEQ ID NO: 3708017 - DNA, 25 bp, Homo sapien
tatatgtcaattgaactgggccaca

SEQ ID NO: 3708018 - DNA, 25 bp, Homo sapien
tgccaagcactgcaccctgtgatca

SEQ ID NO: 3708019 - DNA, 25 bp, Homo sapien
gacgtattggttatcaggactcagc

SEQ ID NO: 3708020 - DNA, 25 bp, Homo sapien
gtacatcgcaattgccagtccagag

SEQ ID NO: 3708021 - DNA, 25 bp, Homo sapien
gggctgcctcgttgttaccatctag

SEQ ID NO: 3708022 - DNA, 25 bp, Homo sapien
tgcactgcggaggacatctgtttgg

SEQ ID NO: 3708023 - DNA, 25 bp, Homo sapien
gcttttcagcatcagggacttcctt

SEQ ID NO: 3708024 - DNA, 25 bp, Homo sapien
cccaatctggtgatagaggtagcca

SEQ ID NO: 3708025 - DNA, 25 bp, Homo sapien
tatgcattcagaggattcagtccct

SEQ ID NO: 3708026 - DNA, 25 bp, Homo sapien
tcagcgagatcggagtatgcattca

SEQ ID NO: 3708027 - DNA, 25 bp, Homo sapien
ccagtgattagttgtaagaccttcg

SEQ ID NO: 3708028 - DNA, 25 bp, Homo sapien
aagaccttcggactatgtaactgta

SEQ ID NO: 3708029 - DNA, 25 bp, Homo sapien
catgtgggcctgaagcatttattgc

SEQ ID NO: 3708030 - DNA, 25 bp, Homo sapien
gagaactaatcagcatcatgtgggc

SEQ ID NO: 3708031 - DNA, 25 bp, Homo sapien
cttaatacggtataatgccttggca

SEQ ID NO: 3708032 - DNA, 25 bp, Homo sapien
gaaatggtccaaggtgcatatacta

SEQ ID NO: 3708033 - DNA, 25 bp, Homo sapien
ccaaaatccctagcaggtctggatc

SEQ ID NO: 3708034 - DNA, 25 bp, Homo sapien
tctgtgaataccagagggcaactct

SEQ ID NO: 3708035 - DNA, 25 bp, Homo sapien
acctgctggctgatgggcatcctcc

SEQ ID NO: 3708036 - DNA, 25 bp, Homo sapien
ctgagaaaacccctgacacctgctg

SEQ ID NO: 3708037 - DNA, 25 bp, Homo sapien
ctgatgggcatcctcctttgctcca

SEQ ID NO: 3708038 - DNA, 25 bp, Homo sapien
tggctgatgggcatcctcctttgct

SEQ ID NO: 3708039 - DNA, 25 bp, Homo sapien
ttctctaggtttccaacttggtcca

SEQ ID NO: 3708040 - DNA, 25 bp, Homo sapien
tctctaggtttccaacttggtccat

SEQ ID NO: 3708041 - DNA, 25 bp, Homo sapien
tgtactttgtgtccacgaactggat

SEQ ID NO: 3708042 - DNA, 25 bp, Homo sapien
ttcaagggcttcaattagcaacccc

SEQ ID NO: 3708043 - DNA, 25 bp, Homo sapien
tctttgactccatgataatcagcat

SEQ ID NO: 3708044 - DNA, 25 bp, Homo sapien
aaagtgacatctcaactgctcaagc

SEQ ID NO: 3708045 - DNA, 25 bp, Homo sapien
tatgtggtgatacgcccaggcaaat

SEQ ID NO: 3708046 - DNA, 25 bp, Homo sapien
ctatgtggtgatacgcccaggcaaa

SEQ ID NO: 3708047 - DNA, 25 bp, Homo sapien
gatacgcccaggcaaatttgcccca

SEQ ID NO: 3708048 - DNA, 25 bp, Homo sapien
tggtgatacgcccaggcaaatttgc

SEQ ID NO: 3708049 - DNA, 25 bp, Homo sapien
aggattttcagggcccacctctaga

SEQ ID NO: 3708050 - DNA, 25 bp, Homo sapien
ttttcagggcccacctctagagcct

SEQ ID NO: 3708051 - DNA, 25 bp, Homo sapien
gacactccattctatagcgggaagc

SEQ ID NO: 3708052 - DNA, 25 bp, Homo sapien
ggcccacctctagagccttttcaaa

SEQ ID NO: 3708053 - DNA, 25 bp, Homo sapien
tgttaaaaccgtccaggcaataggc

SEQ ID NO: 3708054 - DNA, 25 bp, Homo sapien
ctttgataaaactgggctgcatata

SEQ ID NO: 3708055 - DNA, 25 bp, Homo sapien
tctgtgaagacatactgattagagc

SEQ ID NO: 3708056 - DNA, 25 bp, Homo sapien
cattactgtctgttgtgttaaaacc

SEQ ID NO: 3708057 - DNA, 25 bp, Homo sapien
ggtggagagagaccgcttcttggct

SEQ ID NO: 3708058 - DNA, 25 bp, Homo sapien
ttcagaacttagctcaatggcttgg

SEQ ID NO: 3708059 - DNA, 25 bp, Homo sapien
gagagagaccgcttcttggctgctc

SEQ ID NO: 3708060 - DNA, 25 bp, Homo sapien
acttagctcaatggcttggttccca

SEQ ID NO: 3708061 - DNA, 25 bp, Homo sapien
cttgataaagataactccaacatac

SEQ ID NO: 3708062 - DNA, 25 bp, Homo sapien
tcttgagctgcagcttttatagctt

SEQ ID NO: 3708063 - DNA, 25 bp, Homo sapien
ggtagcacatagcagtttcttgagc

SEQ ID NO: 3708064 - DNA, 25 bp, Homo sapien
gaaacttcctacattttctgggcac

SEQ ID NO: 3708065 - DNA, 25 bp, Homo sapien
agcagcacttgccttcggtagcaca

SEQ ID NO: 3708066 - DNA, 25 bp, Homo sapien
ttggtaaaacgatggagatgcctct

SEQ ID NO: 3708067 - DNA, 25 bp, Homo sapien
cagttggtaaaacgatggagatgcc

SEQ ID NO: 3708068 - DNA, 25 bp, Homo sapien
gaacaccagttggtaaaacgatgga

SEQ ID NO: 3708069 - DNA, 25 bp, Homo sapien
tctgagaacaccagttggtaaaacg

SEQ ID NO: 3708070 - DNA, 25 bp, Homo sapien
gatctgtagtgctttggttcaggct

SEQ ID NO: 3708071 - DNA, 25 bp, Homo sapien
gaagatagcaggtgatctgtagtgc

SEQ ID NO: 3708072 - DNA, 25 bp, Homo sapien
ctcatggtgctatgaagatagcagg

SEQ ID NO: 3708073 - DNA, 25 bp, Homo sapien
caggtgatctgtagtgctttggttc

SEQ ID NO: 3708074 - DNA, 25 bp, Homo sapien
catcatctggatttagcctgacagc

SEQ ID NO: 3708075 - DNA, 25 bp, Homo sapien
gacagctcgttttaggacgtgcaga

SEQ ID NO: 3708076 - DNA, 25 bp, Homo sapien
cggtgattgcgtacccagtattgaa

SEQ ID NO: 3708077 - DNA, 25 bp, Homo sapien
tatccaggcgatagacggtgattgc

SEQ ID NO: 3708078 - DNA, 25 bp, Homo sapien
catgatgttcttggaaacggccgta

SEQ ID NO: 3708079 - DNA, 25 bp, Homo sapien
aacggccgtagtggtaatgaatctc

SEQ ID NO: 3708080 - DNA, 25 bp, Homo sapien
tgcatacgtttcagccaggtcaaca

SEQ ID NO: 3708081 - DNA, 25 bp, Homo sapien
aatttgtggataagcccaaggaggc

SEQ ID NO: 3708082 - DNA, 25 bp, Homo sapien
ttaaaatatagggttcaggtcagca

SEQ ID NO: 3708083 - DNA, 25 bp, Homo sapien
taaaatatagggttcaggtcagcag

SEQ ID NO: 3708084 - DNA, 25 bp, Homo sapien
gagcacaaagcttgagggtaaccac

SEQ ID NO: 3708085 - DNA, 25 bp, Homo sapien
tgctttaccattccatcaggaggga

SEQ ID NO: 3708086 - DNA, 25 bp, Homo sapien
tacacacgttatagcaatttgatcg

SEQ ID NO: 3708087 - DNA, 25 bp, Homo sapien
tatgtctggtgccacaaggcctttc

SEQ ID NO: 3708088 - DNA, 25 bp, Homo sapien
cttctaatgctgtgtaagttggttc

SEQ ID NO: 3708089 - DNA, 25 bp, Homo sapien
gctgtgtaagttggttctacatttt

SEQ ID NO: 3708090 - DNA, 25 bp, Homo sapien
tcaggccttctaatgctgtgtaagt

SEQ ID NO: 3708091 - DNA, 25 bp, Homo sapien
tctgcttcaggccttctaatgctgt

SEQ ID NO: 3708092 - DNA, 25 bp, Homo sapien
ccaggtgtcatctaaatgactccac

SEQ ID NO: 3708093 - DNA, 25 bp, Homo sapien
ctccccgctttcaaggatccaagta

SEQ ID NO: 3708094 - DNA, 25 bp, Homo sapien
aattcttggtaggaagtggtacatg

SEQ ID NO: 3708095 - DNA, 25 bp, Homo sapien
tcccaaatctccatcattggtcact

SEQ ID NO: 3708096 - DNA, 25 bp, Homo sapien
gaactgagccaaaccaaaagcttag

SEQ ID NO: 3708097 - DNA, 25 bp, Homo sapien
tttttgccaagagtaaccagtagct

SEQ ID NO: 3708098 - DNA, 25 bp, Homo sapien
tccatgaatggaggcaaatctcccc

SEQ ID NO: 3708099 - DNA, 25 bp, Homo sapien
tgtccagttagaagaacattgtctc

SEQ ID NO: 3708100 - DNA, 25 bp, Homo sapien
attctgtaagcttccacagagagtt

SEQ ID NO: 3708101 - DNA, 25 bp, Homo sapien
aattctgtaagcttccacagagagt

SEQ ID NO: 3708102 - DNA, 25 bp, Homo sapien
ttctgtaagcttccacagagagttc

SEQ ID NO: 3708103 - DNA, 25 bp, Homo sapien
ttttggaaacacttaactgggcaca

SEQ ID NO: 3708104 - DNA, 25 bp, Homo sapien
ggagcaggtgcaagagtattttcct

SEQ ID NO: 3708105 - DNA, 25 bp, Homo sapien
gggcacactgccagatctaaacagt

SEQ ID NO: 3708106 - DNA, 25 bp, Homo sapien
tcttttaacataagaagcagaagag

SEQ ID NO: 3708107 - DNA, 25 bp, Homo sapien
aaattgttgtccgggtgcattggct

SEQ ID NO: 3708108 - DNA, 25 bp, Homo sapien
gcatttggaacgagattcacgtcct

SEQ ID NO: 3708109 - DNA, 25 bp, Homo sapien
cagaaacccaatgactggccagcat

SEQ ID NO: 3708110 - DNA, 25 bp, Homo sapien
caatgactggccagcatttggaacg

SEQ ID NO: 3708111 - DNA, 25 bp, Homo sapien
cgagattcacgtcctccctaaagaa

SEQ ID NO: 3708112 - DNA, 25 bp, Homo sapien
tgtcttgtggattttcagttacgtt

SEQ ID NO: 3708113 - DNA, 25 bp, Homo sapien
cgttctgcagggttttgcttagcca

SEQ ID NO: 3708114 - DNA, 25 bp, Homo sapien
gagatctggctattctgtcttgtgg

SEQ ID NO: 3708115 - DNA, 25 bp, Homo sapien
ccaagacagtgttatataagggagc

SEQ ID NO: 3708116 - DNA, 25 bp, Homo sapien
cttcaaaattttgccaactggagca

SEQ ID NO: 3708117 - DNA, 25 bp, Homo sapien
ctcttcaaaattttgccaactggag

SEQ ID NO: 3708118 - DNA, 25 bp, Homo sapien
tcttcaaaattttgccaactggagc

SEQ ID NO: 3708119 - DNA, 25 bp, Homo sapien
gaatctagagaaatgtgcactgcta

SEQ ID NO: 3708120 - DNA, 25 bp, Homo sapien
gaaaaatggtatggtaattcctcag

SEQ ID NO: 3708121 - DNA, 25 bp, Homo sapien
ggatttggcaattggcagtgattca

SEQ ID NO: 3708122 - DNA, 25 bp, Homo sapien
tggattaaggcctcactcttacgat

SEQ ID NO: 3708123 - DNA, 25 bp, Homo sapien
tggttcctggcaaggaatttcttcc

SEQ ID NO: 3708124 - DNA, 25 bp, Homo sapien
aaacagattttctttgttaggtgag

SEQ ID NO: 3708125 - DNA, 25 bp, Homo sapien
cagattttctttgttaggtgaggaa

SEQ ID NO: 3708126 - DNA, 25 bp, Homo sapien
attttctttgttaggtgaggaacag

SEQ ID NO: 3708127 - DNA, 25 bp, Homo sapien
acagattttctttgttaggtgagga

SEQ ID NO: 3708128 - DNA, 25 bp, Homo sapien
cagcttcttttaagctcttcagggc

SEQ ID NO: 3708129 - DNA, 25 bp, Homo sapien
caatggataactcccatgtaaagtg

SEQ ID NO: 3708130 - DNA, 25 bp, Homo sapien
tcaggcatttcatcgtcatcaatgg

SEQ ID NO: 3708131 - DNA, 25 bp, Homo sapien
aaagtgacatctcaattgctccaga

SEQ ID NO: 3708132 - DNA, 25 bp, Homo sapien
cctcacagtctatttctggacactc

SEQ ID NO: 3708133 - DNA, 25 bp, Homo sapien
ccttcctcacagtctatttctggac

SEQ ID NO: 3708134 - DNA, 25 bp, Homo sapien
cggaagggatttgaaagcttcttgc

SEQ ID NO: 3708135 - DNA, 25 bp, Homo sapien
gggatttgaaagcttcttgcaaatg

SEQ ID NO: 3708136 - DNA, 25 bp, Homo sapien
ttcagggtccacttcaagcaccttt

SEQ ID NO: 3708137 - DNA, 25 bp, Homo sapien
tcagggtccacttcaagcacctttt

SEQ ID NO: 3708138 - DNA, 25 bp, Homo sapien
ccatccaggcgataggcagagatcg

SEQ ID NO: 3708139 - DNA, 25 bp, Homo sapien
ccaggcgataggcagagatcgcata

SEQ ID NO: 3708140 - DNA, 25 bp, Homo sapien
caggcgataggcagagatcgcatac

SEQ ID NO: 3708141 - DNA, 25 bp, Homo sapien
atccaggcgataggcagagatcgca

SEQ ID NO: 3708142 - DNA, 25 bp, Homo sapien
gaaccttaatatatccattgtctgg

SEQ ID NO: 3708143 - DNA, 25 bp, Homo sapien
gagaaccttaatatatccattgtct

SEQ ID NO: 3708144 - DNA, 25 bp, Homo sapien
gtctggatttaagcggacagcctgc

SEQ ID NO: 3708145 - DNA, 25 bp, Homo sapien
ttgtctggatttaagcggacagcct

SEQ ID NO: 3708146 - DNA, 25 bp, Homo sapien
taaaacttggctgcatatcgaaaga

SEQ ID NO: 3708147 - DNA, 25 bp, Homo sapien
gtgaggacatgttggctagagcttc

SEQ ID NO: 3708148 - DNA, 25 bp, Homo sapien
aaaacttggctgcatatcgaaagac

SEQ ID NO: 3708149 - DNA, 25 bp, Homo sapien
tgtgaggacatgttggctagagctt

SEQ ID NO: 3708150 - DNA, 25 bp, Homo sapien
tgtgccttgtagcaaagccctatct

SEQ ID NO: 3708151 - DNA, 25 bp, Homo sapien
tcctgaaaccgaccatagtggaaat

SEQ ID NO: 3708152 - DNA, 25 bp, Homo sapien
tttgtagacgaacccaaggaggctc

SEQ ID NO: 3708153 - DNA, 25 bp, Homo sapien
ccgctcatagtactccagggcttca

SEQ ID NO: 3708154 - DNA, 25 bp, Homo sapien
aagatgattagtaaatgttagcata

SEQ ID NO: 3708155 - DNA, 25 bp, Homo sapien
gtaagcagaaaagatgattagtaaa

SEQ ID NO: 3708156 - DNA, 25 bp, Homo sapien
gaaatgtgaaagtggctgatatctg

SEQ ID NO: 3708157 - DNA, 25 bp, Homo sapien
atgtgaaagtggctgatatctgggt

SEQ ID NO: 3708158 - DNA, 25 bp, Homo sapien
agaattacatcattacagtgaatta

SEQ ID NO: 3708159 - DNA, 25 bp, Homo sapien
caagaattacatcattacagtgaat

SEQ ID NO: 3708160 - DNA, 25 bp, Homo sapien
attcaagaattacatcattacagtg

SEQ ID NO: 3708161 - DNA, 25 bp, Homo sapien
ttattcaagaattacatcattacag

SEQ ID NO: 3708162 - DNA, 25 bp, Homo sapien
tctactacatagcactcatacaaat

SEQ ID NO: 3708163 - DNA, 25 bp, Homo sapien
ctctactacatagcactcatacaaa

SEQ ID NO: 3708164 - DNA, 25 bp, Homo sapien
tactacatagcactcatacaaatga

SEQ ID NO: 3708165 - DNA, 25 bp, Homo sapien
ctactacatagcactcatacaaatg

SEQ ID NO: 3708166 - DNA, 25 bp, Homo sapien
gcctcgtcccatcgaagtgctgaga

SEQ ID NO: 3708167 - DNA, 25 bp, Homo sapien
tatggttggtggattggctagacac

SEQ ID NO: 3708168 - DNA, 25 bp, Homo sapien
ggtctcgttctatcatccagaatgg

SEQ ID NO: 3708169 - DNA, 25 bp, Homo sapien
ggctagacacacatagttaacaggt

SEQ ID NO: 3708170 - DNA, 25 bp, Homo sapien
ccttcttaagggcaatggatgaaat

SEQ ID NO: 3708171 - DNA, 25 bp, Homo sapien
cccgcaatcgtatccatggccaagt

SEQ ID NO: 3708172 - DNA, 25 bp, Homo sapien
gatgtgccataatctctgtcctacc

SEQ ID NO: 3708173 - DNA, 25 bp, Homo sapien
tcacctctcaatgggatgatctgtt

SEQ ID NO: 3708174 - DNA, 25 bp, Homo sapien
cagtaggtttttggtcttggtgact

SEQ ID NO: 3708175 - DNA, 25 bp, Homo sapien
atacgtaggtgatggtgtgtccgga

SEQ ID NO: 3708176 - DNA, 25 bp, Homo sapien
actctcgctgtgagtgctacagttg

SEQ ID NO: 3708177 - DNA, 25 bp, Homo sapien
agtatagctaagtgatgctgagctt

SEQ ID NO: 3708178 - DNA, 25 bp, Homo sapien
ggcgcagtccctcggatcgctctct

SEQ ID NO: 3708179 - DNA, 25 bp, Homo sapien
agcgctctgcaggccgtccgggcgg

SEQ ID NO: 3708180 - DNA, 25 bp, Homo sapien
tctctcctcagcaccggggaccgcg

SEQ ID NO: 3708181 - DNA, 25 bp, Homo sapien
gccgcgcggcgtgtctttgttaaag

SEQ ID NO: 3708182 - DNA, 25 bp, Homo sapien
aaaccaaggccgacgcagggcttgg

SEQ ID NO: 3708183 - DNA, 25 bp, Homo sapien
cggtttgaaaccaaggccgacgcag

SEQ ID NO: 3708184 - DNA, 25 bp, Homo sapien
agaactgcgctggaaatgaataaaa

SEQ ID NO: 3708185 - DNA, 25 bp, Homo sapien
ctgaaaaggccgcagaactgcgctg

SEQ ID NO: 3708186 - DNA, 25 bp, Homo sapien
ggggagggtccccaacgcagatgcc

SEQ ID NO: 3708187 - DNA, 25 bp, Homo sapien
gatgcccggttgctgggcgcgaggg

SEQ ID NO: 3708188 - DNA, 25 bp, Homo sapien
gccgcgcgccgggacagagcgcccg

SEQ ID NO: 3708189 - DNA, 25 bp, Homo sapien
ggactcccgagaagcgtccactcgg

SEQ ID NO: 3708190 - DNA, 25 bp, Homo sapien
tcctcctccctgaccggccttctta

SEQ ID NO: 3708191 - DNA, 25 bp, Homo sapien
tgttcctcctccctgaccggccttc

SEQ ID NO: 3708192 - DNA, 25 bp, Homo sapien
tcctccctgaccggccttcttaggc

SEQ ID NO: 3708193 - DNA, 25 bp, Homo sapien
tcctgttcctcctccctgaccggcc

SEQ ID NO: 3708194 - DNA, 25 bp, Homo sapien
acaccgagggaatggcagctggaaa

SEQ ID NO: 3708195 - DNA, 25 bp, Homo sapien
aggcacgcgacaggcctaaggagac

SEQ ID NO: 3708196 - DNA, 25 bp, Homo sapien
taaggagacccgtggcacgtagcag

SEQ ID NO: 3708197 - DNA, 25 bp, Homo sapien
ggctgcggcgaaaccgcgtatgcca

SEQ ID NO: 3708198 - DNA, 25 bp, Homo sapien
aatcagaaacgcaaactggcagtgg

SEQ ID NO: 3708199 - DNA, 25 bp, Homo sapien
cgcaaactggcagtggcaggcgaac

SEQ ID NO: 3708200 - DNA, 25 bp, Homo sapien
gaaacgcaaactggcagtggcaggc

SEQ ID NO: 3708201 - DNA, 25 bp, Homo sapien
ccagaaatcagaaacgcaaactggc

SEQ ID NO: 3708202 - DNA, 25 bp, Homo sapien
tctaactccaacagaatggccttca

SEQ ID NO: 3708203 - DNA, 25 bp, Homo sapien
cttcaaggtgtccttacgaatttca

SEQ ID NO: 3708204 - DNA, 25 bp, Homo sapien
aatggccttcaaggtgtccttacga

SEQ ID NO: 3708205 - DNA, 25 bp, Homo sapien
aaaatgacattctaactccaacaga

SEQ ID NO: 3708206 - DNA, 25 bp, Homo sapien
tgttctccagacgaagagctttccg

SEQ ID NO: 3708207 - DNA, 25 bp, Homo sapien
gaacttggctgcataacgaaggacg

SEQ ID NO: 3708208 - DNA, 25 bp, Homo sapien
tacggtgaaattcctgaaagcggcc

SEQ ID NO: 3708209 - DNA, 25 bp, Homo sapien
tgttccaagcactcaagggcgtctt

SEQ ID NO: 3708210 - DNA, 25 bp, Homo sapien
ttagagctaatttcctagagtatgt

SEQ ID NO: 3708211 - DNA, 25 bp, Homo sapien
tgcttggtacacaataactattcaa

SEQ ID NO: 3708212 - DNA, 25 bp, Homo sapien
tattagctctataataaacaaggga

SEQ ID NO: 3708213 - DNA, 25 bp, Homo sapien
agaaaaccgcacaagattcatcata

SEQ ID NO: 3708214 - DNA, 25 bp, Homo sapien
gtcttttgcaagctacacaattaag

SEQ ID NO: 3708215 - DNA, 25 bp, Homo sapien
ttgtactcctggaagagtattcctg

SEQ ID NO: 3708216 - DNA, 25 bp, Homo sapien
cctgatctaggtatcaaaggtttac

SEQ ID NO: 3708217 - DNA, 25 bp, Homo sapien
aaacatctgtaactaaaaagtgctg

SEQ ID NO: 3708218 - DNA, 25 bp, Homo sapien
tctagttttttctttattgaagtca

SEQ ID NO: 3708219 - DNA, 25 bp, Homo sapien
taggtgattccaatacgtagccaag

SEQ ID NO: 3708220 - DNA, 25 bp, Homo sapien
aagcagcgacccctcaaggtggata

SEQ ID NO: 3708221 - DNA, 25 bp, Homo sapien
aagtcccctgggataagagccctca

SEQ ID NO: 3708222 - DNA, 25 bp, Homo sapien
gatttcctgggttaagcctattagc

SEQ ID NO: 3708223 - DNA, 25 bp, Homo sapien
gccagatgttggcagcactcactgt

SEQ ID NO: 3708224 - DNA, 25 bp, Homo sapien
ggcaggacttttagccactaggctg

SEQ ID NO: 3708225 - DNA, 25 bp, Homo sapien
ttgtgcatgttggcattcttcaagc

SEQ ID NO: 3708226 - DNA, 25 bp, Homo sapien
gcagtgcccagtagatcaattctag

SEQ ID NO: 3708227 - DNA, 25 bp, Homo sapien
ccttgaatgccatcaggaagtcact

SEQ ID NO: 3708228 - DNA, 25 bp, Homo sapien
ttttagatggcgagtaacccatggg

SEQ ID NO: 3708229 - DNA, 25 bp, Homo sapien
ggtagcgttctatgccaaccttgaa

SEQ ID NO: 3708230 - DNA, 25 bp, Homo sapien
gaaaaatcaacctttggacatagca

SEQ ID NO: 3708231 - DNA, 25 bp, Homo sapien
tgctggaagtcctcaaaaagtacct

SEQ ID NO: 3708232 - DNA, 25 bp, Homo sapien
ttgccacaactaccttcaagagagg

SEQ ID NO: 3708233 - DNA, 25 bp, Homo sapien
tgccagcccctagactgatgtcctg

SEQ ID NO: 3708234 - DNA, 25 bp, Homo sapien
cctttgcctttgagttgatgaacca

SEQ ID NO: 3708235 - DNA, 25 bp, Homo sapien
cagttcttaacttattacatgtgga

SEQ ID NO: 3708236 - DNA, 25 bp, Homo sapien
gtggaaatgccaaacagaagatgct

SEQ ID NO: 3708237 - DNA, 25 bp, Homo sapien
tatttggatttatacaattgcattt

SEQ ID NO: 3708238 - DNA, 25 bp, Homo sapien
tattacatgtggaaatgccaaacag

SEQ ID NO: 3708239 - DNA, 25 bp, Homo sapien
tgtagtatatccataacacatagta

SEQ ID NO: 3708240 - DNA, 25 bp, Homo sapien
aatcagtggtattctggtgccaggg

SEQ ID NO: 3708241 - DNA, 25 bp, Homo sapien
cagaaagcaatctatattgacaact

SEQ ID NO: 3708242 - DNA, 25 bp, Homo sapien
gtaacaattatcaacaaacaaatga

SEQ ID NO: 3708243 - DNA, 25 bp, Homo sapien
gaatgccacactctggtgtgcgctg

SEQ ID NO: 3708244 - DNA, 25 bp, Homo sapien
agctggttgtgttaaatactgttcg

SEQ ID NO: 3708245 - DNA, 25 bp, Homo sapien
tccgtgacatgaatgccacactctg

SEQ ID NO: 3708246 - DNA, 25 bp, Homo sapien
tctggtgtgcgctgtttagagagaa

SEQ ID NO: 3708247 - DNA, 25 bp, Homo sapien
caagagtcagacacttgagctctga

SEQ ID NO: 3708248 - DNA, 25 bp, Homo sapien
cagacacttgagctctgagtgctgg

SEQ ID NO: 3708249 - DNA, 25 bp, Homo sapien
gttccaagagtcagacacttgagct

SEQ ID NO: 3708250 - DNA, 25 bp, Homo sapien
gagtcagacacttgagctctgagtg

SEQ ID NO: 3708251 - DNA, 25 bp, Homo sapien
gcctccgatataatctgacttaatg

SEQ ID NO: 3708252 - DNA, 25 bp, Homo sapien
caagatgcctccgatataatctgac

SEQ ID NO: 3708253 - DNA, 25 bp, Homo sapien
agccaagatgcctccgatataatct

SEQ ID NO: 3708254 - DNA, 25 bp, Homo sapien
gatataatctgacttaatgatgcca

SEQ ID NO: 3708255 - DNA, 25 bp, Homo sapien
tggcaattcagacagctgttgtggc

SEQ ID NO: 3708256 - DNA, 25 bp, Homo sapien
aatttggcaattcagacagctgttg

SEQ ID NO: 3708257 - DNA, 25 bp, Homo sapien
gcaattcagacagctgttgtggcat

SEQ ID NO: 3708258 - DNA, 25 bp, Homo sapien
tagtgaatttggcaattcagacagc

SEQ ID NO: 3708259 - DNA, 25 bp, Homo sapien
gactgcggatctgtgttgaaaagcc

SEQ ID NO: 3708260 - DNA, 25 bp, Homo sapien
cggatctgtgttgaaaagcctggga

SEQ ID NO: 3708261 - DNA, 25 bp, Homo sapien
tcaagctacgactgcggatctgtgt

SEQ ID NO: 3708262 - DNA, 25 bp, Homo sapien
gctacgactgcggatctgtgttgaa

SEQ ID NO: 3708263 - DNA, 25 bp, Homo sapien
aaggccgagcactgggattttccgc

SEQ ID NO: 3708264 - DNA, 25 bp, Homo sapien
tgcattacataaccgcgagacgtcc

SEQ ID NO: 3708265 - DNA, 25 bp, Homo sapien
taaatcctctttgccggccaggcag

SEQ ID NO: 3708266 - DNA, 25 bp, Homo sapien
acagtacttagagcggatccccgcg

SEQ ID NO: 3708267 - DNA, 25 bp, Homo sapien
tccacatctggttgggagacagcac

SEQ ID NO: 3708268 - DNA, 25 bp, Homo sapien
gccttagacggtcagagaaccacca

SEQ ID NO: 3708269 - DNA, 25 bp, Homo sapien
tctaggcattcaagggaggagcatt

SEQ ID NO: 3708270 - DNA, 25 bp, Homo sapien
tagatcgaactgatccaatgggatc

SEQ ID NO: 3708271 - DNA, 25 bp, Homo sapien
tgctcattatcactcattcctctct

SEQ ID NO: 3708272 - DNA, 25 bp, Homo sapien
ctgcctgatcctgctgcgagcaggt

SEQ ID NO: 3708273 - DNA, 25 bp, Homo sapien
caggtcctgctcattatcactcatt

SEQ ID NO: 3708274 - DNA, 25 bp, Homo sapien
gatcctgctgcgagcaggtcctgct

SEQ ID NO: 3708275 - DNA, 25 bp, Homo sapien
tggttcaattcagaaacttgatttt

SEQ ID NO: 3708276 - DNA, 25 bp, Homo sapien
ttcccagaatggtaaggaatacaag

SEQ ID NO: 3708277 - DNA, 25 bp, Homo sapien
cccagaatggtaaggaatacaagca

SEQ ID NO: 3708278 - DNA, 25 bp, Homo sapien
agaatggtaaggaatacaagcaagc

SEQ ID NO: 3708279 - DNA, 25 bp, Homo sapien
tgttcccagaatggtaaggaataca

SEQ ID NO: 3708280 - DNA, 25 bp, Homo sapien
cacctgcacattgttatcacgaata

SEQ ID NO: 3708281 - DNA, 25 bp, Homo sapien
gtcacctgcacattgttatcacgaa

SEQ ID NO: 3708282 - DNA, 25 bp, Homo sapien
cctgcacattgttatcacgaatatt

SEQ ID NO: 3708283 - DNA, 25 bp, Homo sapien
tgtcacctgcacattgttatcacga

SEQ ID NO: 3708284 - DNA, 25 bp, Homo sapien
gcagaaggatgatgtgacccaacca

SEQ ID NO: 3708285 - DNA, 25 bp, Homo sapien
gatgtaaacgttgtaaaataacgca

SEQ ID NO: 3708286 - DNA, 25 bp, Homo sapien
gatgtgacccaaccacgtttcttta

SEQ ID NO: 3708287 - DNA, 25 bp, Homo sapien
tatttatgttttgccgatgtaaacg

SEQ ID NO: 3708288 - DNA, 25 bp, Homo sapien
tcttttaggctataaggcaaccaga

SEQ ID NO: 3708289 - DNA, 25 bp, Homo sapien
catttagtcaaacgtgtgtggccca

SEQ ID NO: 3708290 - DNA, 25 bp, Homo sapien
tcaagtagcctcaataccatttgcg

SEQ ID NO: 3708291 - DNA, 25 bp, Homo sapien
ggttaatactaagggcactgtgaca

SEQ ID NO: 3708292 - DNA, 25 bp, Homo sapien
ggtaactttcaaatgagggtcatgt

SEQ ID NO: 3708293 - DNA, 25 bp, Homo sapien
ttttgaaggacagaacaattactcc

SEQ ID NO: 3708294 - DNA, 25 bp, Homo sapien
ccatgatcttgtgtattgagcttat

SEQ ID NO: 3708295 - DNA, 25 bp, Homo sapien
ggtcatgtacaaatattgggatgca

SEQ ID NO: 3708296 - DNA, 25 bp, Homo sapien
cacaagcaaccctgtatagccatca

SEQ ID NO: 3708297 - DNA, 25 bp, Homo sapien
aacattataggtactcagaaagccc

SEQ ID NO: 3708298 - DNA, 25 bp, Homo sapien
tgaatgttagtgtatgaggcagtct

SEQ ID NO: 3708299 - DNA, 25 bp, Homo sapien
gacatacatacagaagaaggctcaa

SEQ ID NO: 3708300 - DNA, 25 bp, Homo sapien
cctgcatggtcaaaactgtggactc

SEQ ID NO: 3708301 - DNA, 25 bp, Homo sapien
tggtgacttgtcaagacagaaagct

SEQ ID NO: 3708302 - DNA, 25 bp, Homo sapien
catcttgagccttagtgccgggcat

SEQ ID NO: 3708303 - DNA, 25 bp, Homo sapien
cgtggtggtcatgtcccttggcaca

SEQ ID NO: 3708304 - DNA, 25 bp, Homo sapien
gagattggatttcagagtattcccc

SEQ ID NO: 3708305 - DNA, 25 bp, Homo sapien
caagtttagcataccctgtctgaga

SEQ ID NO: 3708306 - DNA, 25 bp, Homo sapien
ccctgactgggaatctttcggagat

SEQ ID NO: 3708307 - DNA, 25 bp, Homo sapien
gattatcatagattgcctcaccaag

SEQ ID NO: 3708308 - DNA, 25 bp, Homo sapien
tttcacaggcttacagctagaggga

SEQ ID NO: 3708309 - DNA, 25 bp, Homo sapien
agggtttgaggctgtgagttcactc

SEQ ID NO: 3708310 - DNA, 25 bp, Homo sapien
gaaagcacgtgttgaaaatccccag

SEQ ID NO: 3708311 - DNA, 25 bp, Homo sapien
ccttttatgcttctatcatgggatg

SEQ ID NO: 3708312 - DNA, 25 bp, Homo sapien
aacggcttccatccgccgccagtcc

SEQ ID NO: 3708313 - DNA, 25 bp, Homo sapien
tccagccgccgcacgtctgcagccg

SEQ ID NO: 3708314 - DNA, 25 bp, Homo sapien
gggtccagtgggcggcagcgacgcg

SEQ ID NO: 3708315 - DNA, 25 bp, Homo sapien
agtccagccgccgcacgtctgcagc

SEQ ID NO: 3708316 - DNA, 25 bp, Homo sapien
gtattcctcctgaaacggttcgctc

SEQ ID NO: 3708317 - DNA, 25 bp, Homo sapien
catgttgaaactcgtcggtggcggt

SEQ ID NO: 3708318 - DNA, 25 bp, Homo sapien
tggttttcacatcgccatacaaagc

SEQ ID NO: 3708319 - DNA, 25 bp, Homo sapien
gagaacttgattccccatgttgaaa

SEQ ID NO: 3708320 - DNA, 25 bp, Homo sapien
gcaaaggtatcttgctcactgggga

SEQ ID NO: 3708321 - DNA, 25 bp, Homo sapien
aggtatcttgctcactggggacagg

SEQ ID NO: 3708322 - DNA, 25 bp, Homo sapien
cttgcaaaggtatcttgctcactgg

SEQ ID NO: 3708323 - DNA, 25 bp, Homo sapien
aaaggtatcttgctcactggggaca

SEQ ID NO: 3708324 - DNA, 25 bp, Homo sapien
tggagttacctcccgcagcatagat

SEQ ID NO: 3708325 - DNA, 25 bp, Homo sapien
tacctcccgcagcatagatggcata

SEQ ID NO: 3708326 - DNA, 25 bp, Homo sapien
tagatggcatactttgcttccttca

SEQ ID NO: 3708327 - DNA, 25 bp, Homo sapien
gtttctccaagccatgatgatcatc

SEQ ID NO: 3708328 - DNA, 25 bp, Homo sapien
aaaatctagtagttcttatgctgcc

SEQ ID NO: 3708329 - DNA, 25 bp, Homo sapien
tcttcagtagtttccaatggccctc

SEQ ID NO: 3708330 - DNA, 25 bp, Homo sapien
ggatcctcccacaatgaaaatctag

SEQ ID NO: 3708331 - DNA, 25 bp, Homo sapien
tggtctccctgactagggatctcct

SEQ ID NO: 3708332 - DNA, 25 bp, Homo sapien
tgaacacattttggctggggggagt

SEQ ID NO: 3708333 - DNA, 25 bp, Homo sapien
gtttcttgtttgcaggtccttgagg

SEQ ID NO: 3708334 - DNA, 25 bp, Homo sapien
ttggtttcttgtttgcaggtccttg

SEQ ID NO: 3708335 - DNA, 25 bp, Homo sapien
acacagctggtcaaaatgaacacat

SEQ ID NO: 3708336 - DNA, 25 bp, Homo sapien
ggtataacatcacgtgacagccagt

SEQ ID NO: 3708337 - DNA, 25 bp, Homo sapien
tgggtatatgttctcagggcctcct

SEQ ID NO: 3708338 - DNA, 25 bp, Homo sapien
cctgaggctgtatgggcaatggtcc

SEQ ID NO: 3708339 - DNA, 25 bp, Homo sapien
catctattctcgctgaagcctggag

SEQ ID NO: 3708340 - DNA, 25 bp, Homo sapien
gggcacctacagaaagtatggtgat

SEQ ID NO: 3708341 - DNA, 25 bp, Homo sapien
tagtctcttgtatgaggtaacccca

SEQ ID NO: 3708342 - DNA, 25 bp, Homo sapien
ttgtttgtggtaacctctgactgcc

SEQ ID NO: 3708343 - DNA, 25 bp, Homo sapien
tgatgaaaatctgtacctgaaggta

SEQ ID NO: 3708344 - DNA, 25 bp, Homo sapien
gggcatgcgttttgcgtgtatagat

SEQ ID NO: 3708345 - DNA, 25 bp, Homo sapien
cgtgtatagatttgacccgagatgg

SEQ ID NO: 3708346 - DNA, 25 bp, Homo sapien
gattgtaacagaagtagctactccc

SEQ ID NO: 3708347 - DNA, 25 bp, Homo sapien
cccgagatggtcagtcctgaagcca

SEQ ID NO: 3708348 - DNA, 25 bp, Homo sapien
aaacctagagctgtctcatctacag

SEQ ID NO: 3708349 - DNA, 25 bp, Homo sapien
gttcaaacctagagctgtctcatct

SEQ ID NO: 3708350 - DNA, 25 bp, Homo sapien
tgcagttcaaacctagagctgtctc

SEQ ID NO: 3708351 - DNA, 25 bp, Homo sapien
ctagagctgtctcatctacagcagg

SEQ ID NO: 3708352 - DNA, 25 bp, Homo sapien
gtatatgcccactgagtactcccgg

SEQ ID NO: 3708353 - DNA, 25 bp, Homo sapien
gtaatacacaagtgttctcattcac

SEQ ID NO: 3708354 - DNA, 25 bp, Homo sapien
caagctaagggggtcatcagctcat

SEQ ID NO: 3708355 - DNA, 25 bp, Homo sapien
cattcaccgggtattgcttttgctg

SEQ ID NO: 3708356 - DNA, 25 bp, Homo sapien
tcatagttgcccctcttatttccca

SEQ ID NO: 3708357 - DNA, 25 bp, Homo sapien
ttttccatcatagttgcccctctta

SEQ ID NO: 3708358 - DNA, 25 bp, Homo sapien
tatttcccattagctcatgctgcag

SEQ ID NO: 3708359 - DNA, 25 bp, Homo sapien
tcttaccaggtataagaaaccttca

SEQ ID NO: 3708360 - DNA, 25 bp, Homo sapien
caagggtaagcattattctgcagtc

SEQ ID NO: 3708361 - DNA, 25 bp, Homo sapien
aggcccaagggtaagcattattctg

SEQ ID NO: 3708362 - DNA, 25 bp, Homo sapien
ggtaagcattattctgcagtccctc

SEQ ID NO: 3708363 - DNA, 25 bp, Homo sapien
taagcattattctgcagtccctctg

SEQ ID NO: 3708364 - DNA, 25 bp, Homo sapien
tctcgcggctgtcataagtaccacg

SEQ ID NO: 3708365 - DNA, 25 bp, Homo sapien
gcaataaagatgtggcgaaggcccg

SEQ ID NO: 3708366 - DNA, 25 bp, Homo sapien
tgctagccgggctttagtagtgcgc

SEQ ID NO: 3708367 - DNA, 25 bp, Homo sapien
tgctgacggtctggtttgcctccca

SEQ ID NO: 3708368 - DNA, 25 bp, Homo sapien
aagaagctctccaatatgggggcgg

SEQ ID NO: 3708369 - DNA, 25 bp, Homo sapien
ctaccggaagaagctctccaatatg

SEQ ID NO: 3708370 - DNA, 25 bp, Homo sapien
ggaagaagctctccaatatgggggc

SEQ ID NO: 3708371 - DNA, 25 bp, Homo sapien
accggaagaagctctccaatatggg

SEQ ID NO: 3708372 - DNA, 25 bp, Homo sapien
tgcaaacttcgcctgactagccaga

SEQ ID NO: 3708373 - DNA, 25 bp, Homo sapien
gcactgcgatgttaccgttttcaaa

SEQ ID NO: 3708374 - DNA, 25 bp, Homo sapien
cagagctccgccagggagcgtagcc

SEQ ID NO: 3708375 - DNA, 25 bp, Homo sapien
caccgcactgaacgctgggagtagg

SEQ ID NO: 3708376 - DNA, 25 bp, Homo sapien
tccccacacattcccgcgggtcacc

SEQ ID NO: 3708377 - DNA, 25 bp, Homo sapien
cttccccacacattcccgcgggtca

SEQ ID NO: 3708378 - DNA, 25 bp, Homo sapien
acattcccgcgggtcacctcctcac

SEQ ID NO: 3708379 - DNA, 25 bp, Homo sapien
cacacattcccgcgggtcacctcct

SEQ ID NO: 3708380 - DNA, 25 bp, Homo sapien
ttgctgaatgaggtttctgaatgtg

SEQ ID NO: 3708381 - DNA, 25 bp, Homo sapien
tgctgaatgaggtttctgaatgtgg

SEQ ID NO: 3708382 - DNA, 25 bp, Homo sapien
gctgaatgaggtttctgaatgtggt

SEQ ID NO: 3708383 - DNA, 25 bp, Homo sapien
gttgctgaatgaggtttctgaatgt

SEQ ID NO: 3708384 - DNA, 25 bp, Homo sapien
tccaataagaatccacaattggaga

SEQ ID NO: 3708385 - DNA, 25 bp, Homo sapien
tctccaataagaatccacaattgga

SEQ ID NO: 3708386 - DNA, 25 bp, Homo sapien
cctctctccaataagaatccacaat

SEQ ID NO: 3708387 - DNA, 25 bp, Homo sapien
tctctccaataagaatccacaattg

SEQ ID NO: 3708388 - DNA, 25 bp, Homo sapien
tgtaatattatctttcgtgacagca

SEQ ID NO: 3708389 - DNA, 25 bp, Homo sapien
ctagtctgtaatattatctttcgtg

SEQ ID NO: 3708390 - DNA, 25 bp, Homo sapien
tctgactggaaaactgcatatttac

SEQ ID NO: 3708391 - DNA, 25 bp, Homo sapien
tgctctgactggaaaactgcatatt

SEQ ID NO: 3708392 - DNA, 25 bp, Homo sapien
cgaggtactccctcttgattaaaat

SEQ ID NO: 3708393 - DNA, 25 bp, Homo sapien
cataagatggtcgaggtactccctc

SEQ ID NO: 3708394 - DNA, 25 bp, Homo sapien
gatggtcgaggtactccctcttgat

SEQ ID NO: 3708395 - DNA, 25 bp, Homo sapien
ctaaaaacataagatggtcgaggta

SEQ ID NO: 3708396 - DNA, 25 bp, Homo sapien
ctcagtatttggagcaactaaggaa

SEQ ID NO: 3708397 - DNA, 25 bp, Homo sapien
gaaaattcatgagacagatcaagct

SEQ ID NO: 3708398 - DNA, 25 bp, Homo sapien
cagatcaagcttaatgccatcgaaa

SEQ ID NO: 3708399 - DNA, 25 bp, Homo sapien
tgaaggccttgcaattgggtcagca

SEQ ID NO: 3708400 - DNA, 25 bp, Homo sapien
caaattgtacataaactctttaaga

SEQ ID NO: 3708401 - DNA, 25 bp, Homo sapien
ttgagtttgacataagccgaataac

SEQ ID NO: 3708402 - DNA, 25 bp, Homo sapien
aattcaggccctagtagtttaacag

SEQ ID NO: 3708403 - DNA, 25 bp, Homo sapien
taagccgaataacacaattgacaaa

SEQ ID NO: 3708404 - DNA, 25 bp, Homo sapien
gagataatctttagattcgaaactg

SEQ ID NO: 3708405 - DNA, 25 bp, Homo sapien
ctgactgtgtaaatggtcttattcg

SEQ ID NO: 3708406 - DNA, 25 bp, Homo sapien
tggtcttattcgaagacaaacctgg

SEQ ID NO: 3708407 - DNA, 25 bp, Homo sapien
tcgaagacaaacctggagataatct

SEQ ID NO: 3708408 - DNA, 25 bp, Homo sapien
ccgaccaaggatgcattgaggctct

SEQ ID NO: 3708409 - DNA, 25 bp, Homo sapien
ttttcacttaaccgaccaaggatgc

SEQ ID NO: 3708410 - DNA, 25 bp, Homo sapien
aaggatgcattgaggctctttcagc

SEQ ID NO: 3708411 - DNA, 25 bp, Homo sapien
cttaaccgaccaaggatgcattgag

SEQ ID NO: 3708412 - DNA, 25 bp, Homo sapien
ttggaaaaactgaatttctgtgcca

SEQ ID NO: 3708413 - DNA, 25 bp, Homo sapien
tggaaaaactgaatttctgtgccat

SEQ ID NO: 3708414 - DNA, 25 bp, Homo sapien
cttggaaaaactgaatttctgtgcc

SEQ ID NO: 3708415 - DNA, 25 bp, Homo sapien
tttcaagaggtcttttactggttgc

SEQ ID NO: 3708416 - DNA, 25 bp, Homo sapien
tcctgaattggttagcccgtaagta

SEQ ID NO: 3708417 - DNA, 25 bp, Homo sapien
gttgcataatgcaaccctgaaagaa

SEQ ID NO: 3708418 - DNA, 25 bp, Homo sapien
cagacgactctgtcctttcaagagg

SEQ ID NO: 3708419 - DNA, 25 bp, Homo sapien
taatacattcaaagttcgaggcaga

SEQ ID NO: 3708420 - DNA, 25 bp, Homo sapien
tattctctggatctatgtggtttaa

SEQ ID NO: 3708421 - DNA, 25 bp, Homo sapien
ccgaagcaatgcacttttgctagca

SEQ ID NO: 3708422 - DNA, 25 bp, Homo sapien
gatgataaccttaagtattctctgg

SEQ ID NO: 3708423 - DNA, 25 bp, Homo sapien
cataaagagtatcatcactatcatt

SEQ ID NO: 3708424 - DNA, 25 bp, Homo sapien
catcactatcattatgcacagtaac

SEQ ID NO: 3708425 - DNA, 25 bp, Homo sapien
ataaagagtatcatcactatcatta

SEQ ID NO: 3708426 - DNA, 25 bp, Homo sapien
actattagccatattcaagttggct

SEQ ID NO: 3708427 - DNA, 25 bp, Homo sapien
cttcaaactctgagatattcaaaga

SEQ ID NO: 3708428 - DNA, 25 bp, Homo sapien
tattagccatattcaagttggcttg

SEQ ID NO: 3708429 - DNA, 25 bp, Homo sapien
tagccatattcaagttggcttgttc

SEQ ID NO: 3708430 - DNA, 25 bp, Homo sapien
cgtcttgggaaaggcgcagcatctt

SEQ ID NO: 3708431 - DNA, 25 bp, Homo sapien
cctttacgtcttgggaaaggcgcag

SEQ ID NO: 3708432 - DNA, 25 bp, Homo sapien
tttacgtcttgggaaaggcgcagca

SEQ ID NO: 3708433 - DNA, 25 bp, Homo sapien
tacgtcttgggaaaggcgcagcatc

SEQ ID NO: 3708434 - DNA, 25 bp, Homo sapien
cttctactggaagcattattcaatt

SEQ ID NO: 3708435 - DNA, 25 bp, Homo sapien
tcagatacttgaatccattgtagat

SEQ ID NO: 3708436 - DNA, 25 bp, Homo sapien
aagtctataggcttctttggaatca

SEQ ID NO: 3708437 - DNA, 25 bp, Homo sapien
cactctggtgctttattcctagttt

SEQ ID NO: 3708438 - DNA, 25 bp, Homo sapien
attacacgagacatttcagaatctt

SEQ ID NO: 3708439 - DNA, 25 bp, Homo sapien
cactgactcgaattacacgagacat

SEQ ID NO: 3708440 - DNA, 25 bp, Homo sapien
acacgagacatttcagaatcttcaa

SEQ ID NO: 3708441 - DNA, 25 bp, Homo sapien
tcactgactcgaattacacgagaca

SEQ ID NO: 3708442 - DNA, 25 bp, Homo sapien
tcaagacgttaatacactttcccag

SEQ ID NO: 3708443 - DNA, 25 bp, Homo sapien
attcttcaagacgttaatacacttt

SEQ ID NO: 3708444 - DNA, 25 bp, Homo sapien
cagtctctcttaacctttcaccttc

SEQ ID NO: 3708445 - DNA, 25 bp, Homo sapien
tgtcttcatagttcgttctgaacca

SEQ ID NO: 3708446 - DNA, 25 bp, Homo sapien
tacacagtcattacataagaagcag

SEQ ID NO: 3708447 - DNA, 25 bp, Homo sapien
tctcttaagtacttgaatcacaatc

SEQ ID NO: 3708448 - DNA, 25 bp, Homo sapien
tgtctttaatccaagatctcttaag

SEQ ID NO: 3708449 - DNA, 25 bp, Homo sapien
tttaatatgctaataacactttcag

SEQ ID NO: 3708450 - DNA, 25 bp, Homo sapien
aaactttgaaaatagtgagtcagtt

SEQ ID NO: 3708451 - DNA, 25 bp, Homo sapien
tagtgagtcagtttactttcccgga

SEQ ID NO: 3708452 - DNA, 25 bp, Homo sapien
ttactttcccggaaaggcacatgct

SEQ ID NO: 3708453 - DNA, 25 bp, Homo sapien
atagtgagtcagtttactttcccgg

SEQ ID NO: 3708454 - DNA, 25 bp, Homo sapien
tggcggagaacttcaatacattgag

SEQ ID NO: 3708455 - DNA, 25 bp, Homo sapien
ggctgatattgacaatcatacaaat

SEQ ID NO: 3708456 - DNA, 25 bp, Homo sapien
cattggctgatattgacaatcatac

SEQ ID NO: 3708457 - DNA, 25 bp, Homo sapien
cattgagtgtttcatcataggctaa

SEQ ID NO: 3708458 - DNA, 25 bp, Homo sapien
ccatgaaatggtggctctttttaca

SEQ ID NO: 3708459 - DNA, 25 bp, Homo sapien
aatcctcgtcttccatcaaatcttc

SEQ ID NO: 3708460 - DNA, 25 bp, Homo sapien
tgaattactgtctagtgatacatct

SEQ ID NO: 3708461 - DNA, 25 bp, Homo sapien
tctcctcgtggctaatgaaagcctt

SEQ ID NO: 3708462 - DNA, 25 bp, Homo sapien
tatatcccaagagaaataccgtcca

SEQ ID NO: 3708463 - DNA, 25 bp, Homo sapien
tcacaggtgggaagcataaggatca

SEQ ID NO: 3708464 - DNA, 25 bp, Homo sapien
gacctttggtaactcgtctcactgt

SEQ ID NO: 3708465 - DNA, 25 bp, Homo sapien
tcaggttggcctttccacattttag

SEQ ID NO: 3708466 - DNA, 25 bp, Homo sapien
aagtcttctattaagtccaacagtt

SEQ ID NO: 3708467 - DNA, 25 bp, Homo sapien
gagcccaatactgagtaaactcctg

SEQ ID NO: 3708468 - DNA, 25 bp, Homo sapien
ttaaagtcagcttcccgttgagccc

SEQ ID NO: 3708469 - DNA, 25 bp, Homo sapien
gagtaaactcctgtgtaacttcttc

SEQ ID NO: 3708470 - DNA, 25 bp, Homo sapien
ttctaatatctctcgttcttgaagc

SEQ ID NO: 3708471 - DNA, 25 bp, Homo sapien
gccaaacgacgttcagcattttctt

SEQ ID NO: 3708472 - DNA, 25 bp, Homo sapien
tgaagatagccaaacgacgttcagc

SEQ ID NO: 3708473 - DNA, 25 bp, Homo sapien
caaatccttgaagatagccaaacga

SEQ ID NO: 3708474 - DNA, 25 bp, Homo sapien
gcacaaatgtctttcgctgcttctt

SEQ ID NO: 3708475 - DNA, 25 bp, Homo sapien
gcttcttctcgagtgtcacatttac

SEQ ID NO: 3708476 - DNA, 25 bp, Homo sapien
aaatgtctttcgctgcttcttctcg

SEQ ID NO: 3708477 - DNA, 25 bp, Homo sapien
tgtctttcgctgcttcttctcgagt

SEQ ID NO: 3708478 - DNA, 25 bp, Homo sapien
tggtaccaaaacctcactggatatt

SEQ ID NO: 3708479 - DNA, 25 bp, Homo sapien
ctaaactatcttggtgtttctcatc

SEQ ID NO: 3708480 - DNA, 25 bp, Homo sapien
gatgtggtacactaaaccctggtac

SEQ ID NO: 3708481 - DNA, 25 bp, Homo sapien
ccctggtaccaaaacctcactggat

SEQ ID NO: 3708482 - DNA, 25 bp, Homo sapien
taatcagaacagcaagtaaatgacg

SEQ ID NO: 3708483 - DNA, 25 bp, Homo sapien
tctgcctacaacacaatgattcaag

SEQ ID NO: 3708484 - DNA, 25 bp, Homo sapien
aatgacgtcttaggtctcttacacc

SEQ ID NO: 3708485 - DNA, 25 bp, Homo sapien
tacaagtagagaataagctgagcac

SEQ ID NO: 3708486 - DNA, 25 bp, Homo sapien
gcctaatattaacagtagggttcac

SEQ ID NO: 3708487 - DNA, 25 bp, Homo sapien
ggttcaccctttacatgtggtacca

SEQ ID NO: 3708488 - DNA, 25 bp, Homo sapien
aaaaccacatgcctaatattaacag

SEQ ID NO: 3708489 - DNA, 25 bp, Homo sapien
cagtagggttcaccctttacatgtg

SEQ ID NO: 3708490 - DNA, 25 bp, Homo sapien
cttaatatcagcaacattatcttga

SEQ ID NO: 3708491 - DNA, 25 bp, Homo sapien
tgagcaatttcagcctgtttcttaa

SEQ ID NO: 3708492 - DNA, 25 bp, Homo sapien
gatgcaatatataagtgagcaattt

SEQ ID NO: 3708493 - DNA, 25 bp, Homo sapien
gtttcttaatatcagcaacattatc

SEQ ID NO: 3708494 - DNA, 25 bp, Homo sapien
ttagttctaaacaagcagtagcttc

SEQ ID NO: 3708495 - DNA, 25 bp, Homo sapien
ctttagttctaaacaagcagtagct

SEQ ID NO: 3708496 - DNA, 25 bp, Homo sapien
cagctttaatttgattaaactttag

SEQ ID NO: 3708497 - DNA, 25 bp, Homo sapien
aactttagttctaaacaagcagtag

SEQ ID NO: 3708498 - DNA, 25 bp, Homo sapien
tcttctttggttttgattaattctc

SEQ ID NO: 3708499 - DNA, 25 bp, Homo sapien
ctcttctttggttttgattaattct

SEQ ID NO: 3708500 - DNA, 25 bp, Homo sapien
cttattagatgtctcaagctcttga

SEQ ID NO: 3708501 - DNA, 25 bp, Homo sapien
tagatgtctcaagctcttgaatcaa

SEQ ID NO: 3708502 - DNA, 25 bp, Homo sapien
tgtctcaagctcttgaatcaatgaa

SEQ ID NO: 3708503 - DNA, 25 bp, Homo sapien
tattagatgtctcaagctcttgaat

SEQ ID NO: 3708504 - DNA, 25 bp, Homo sapien
tttaggttctgaaattcgttgatag

SEQ ID NO: 3708505 - DNA, 25 bp, Homo sapien
ccatatgagactttaggttctgaaa

SEQ ID NO: 3708506 - DNA, 25 bp, Homo sapien
tttccatatgagactttaggttctg

SEQ ID NO: 3708507 - DNA, 25 bp, Homo sapien
ttaggttctgaaattcgttgatagt

SEQ ID NO: 3708508 - DNA, 25 bp, Homo sapien
tgaacagattttagatttgctgtcc

SEQ ID NO: 3708509 - DNA, 25 bp, Homo sapien
ttaaagaagatgtatcagccttgtc

SEQ ID NO: 3708510 - DNA, 25 bp, Homo sapien
tattaaagaagatgtatcagccttg

SEQ ID NO: 3708511 - DNA, 25 bp, Homo sapien
gtccttaggtacttcaactgtttca

SEQ ID NO: 3708512 - DNA, 25 bp, Homo sapien
aattagctttcttaaacgcctgctg

SEQ ID NO: 3708513 - DNA, 25 bp, Homo sapien
agaaattagctttcttaaacgcctg

SEQ ID NO: 3708514 - DNA, 25 bp, Homo sapien
agctttcttaaacgcctgctgctgg

SEQ ID NO: 3708515 - DNA, 25 bp, Homo sapien
ttagctttcttaaacgcctgctgct

SEQ ID NO: 3708516 - DNA, 25 bp, Homo sapien
tcaagacgtttagattttctcaaga

SEQ ID NO: 3708517 - DNA, 25 bp, Homo sapien
aagctttaactatgcccatccctag

SEQ ID NO: 3708518 - DNA, 25 bp, Homo sapien
ttccttagacaagtgaatgcccctc

SEQ ID NO: 3708519 - DNA, 25 bp, Homo sapien
tacatagactgcgaaagaaataata

SEQ ID NO: 3708520 - DNA, 25 bp, Homo sapien
tgtgagatgatagcccatgggatgc

SEQ ID NO: 3708521 - DNA, 25 bp, Homo sapien
tatgaaaggtccctcaggtactacc

SEQ ID NO: 3708522 - DNA, 25 bp, Homo sapien
gagccaaacgtcaaacctcttgtag

SEQ ID NO: 3708523 - DNA, 25 bp, Homo sapien
ggcagcacttttgagatcattacaa

SEQ ID NO: 3708524 - DNA, 25 bp, Homo sapien
gaaaattgttattaatctggcaaac

SEQ ID NO: 3708525 - DNA, 25 bp, Homo sapien
aagaaaattgttattaatctggcaa

SEQ ID NO: 3708526 - DNA, 25 bp, Homo sapien
aataagaaaattgttattaatctgg

SEQ ID NO: 3708527 - DNA, 25 bp, Homo sapien
taagaaaattgttattaatctggca

SEQ ID NO: 3708528 - DNA, 25 bp, Homo sapien
gaatcaagagtacgtagttcgtcta

SEQ ID NO: 3708529 - DNA, 25 bp, Homo sapien
caatttctgcaatgttcggtcgcac

SEQ ID NO: 3708530 - DNA, 25 bp, Homo sapien
gagtaaaaatgctctcagtccttca

SEQ ID NO: 3708531 - DNA, 25 bp, Homo sapien
cagaaccatttgacagatccctgag

SEQ ID NO: 3708532 - DNA, 25 bp, Homo sapien
caaatagcttcaatactagagtgga

SEQ ID NO: 3708533 - DNA, 25 bp, Homo sapien
gaatgactacattcaactttctgag

SEQ ID NO: 3708534 - DNA, 25 bp, Homo sapien
gccttatagcaagtaacaccttgtg

SEQ ID NO: 3708535 - DNA, 25 bp, Homo sapien
tgtgtaagttctgaaagcgctctct

SEQ ID NO: 3708536 - DNA, 25 bp, Homo sapien
ttcagattctgggtacgagcagagc

SEQ ID NO: 3708537 - DNA, 25 bp, Homo sapien
tttctgtacttgcttaatctgcttt

SEQ ID NO: 3708538 - DNA, 25 bp, Homo sapien
ttggcatcagtcagtttctctttca

SEQ ID NO: 3708539 - DNA, 25 bp, Homo sapien
gcttgcagagagttcctctttcaat

SEQ ID NO: 3708540 - DNA, 25 bp, Homo sapien
taatgccataaacgtagggaaatcg

SEQ ID NO: 3708541 - DNA, 25 bp, Homo sapien
gattcatggcaactatgttcaaaga

SEQ ID NO: 3708542 - DNA, 25 bp, Homo sapien
caaaaggtacccacgcaagtgaagg

SEQ ID NO: 3708543 - DNA, 25 bp, Homo sapien
tgctgttgccggtaatctaatgcca

SEQ ID NO: 3708544 - DNA, 25 bp, Homo sapien
aatttatcctcatcacgcattacag

SEQ ID NO: 3708545 - DNA, 25 bp, Homo sapien
catatctaattcctgagaacactgg

SEQ ID NO: 3708546 - DNA, 25 bp, Homo sapien
aatggttcgctgtttcatatctaat

SEQ ID NO: 3708547 - DNA, 25 bp, Homo sapien
cttgagttgctgaatggttcgctgt

SEQ ID NO: 3708548 - DNA, 25 bp, Homo sapien
accaagagaatgcatttaaatcatc

SEQ ID NO: 3708549 - DNA, 25 bp, Homo sapien
aaatataccaagagaatgcatttaa

SEQ ID NO: 3708550 - DNA, 25 bp, Homo sapien
taaaatataccaagagaatgcattt

SEQ ID NO: 3708551 - DNA, 25 bp, Homo sapien
ataccaagagaatgcatttaaatca

SEQ ID NO: 3708552 - DNA, 25 bp, Homo sapien
gctctctcatactgttgtatagctt

SEQ ID NO: 3708553 - DNA, 25 bp, Homo sapien
tgctctctcatactgttgtatagct

SEQ ID NO: 3708554 - DNA, 25 bp, Homo sapien
ctctctcatactgttgtatagcttc

SEQ ID NO: 3708555 - DNA, 25 bp, Homo sapien
tcctgttcttctagtgtcattcgca

SEQ ID NO: 3708556 - DNA, 25 bp, Homo sapien
tagcctcaagcacttgatcctgttc

SEQ ID NO: 3708557 - DNA, 25 bp, Homo sapien
cctgttctacctgagtttgttcctg

SEQ ID NO: 3708558 - DNA, 25 bp, Homo sapien
tctagtgtcattcgcatgtcttcaa

SEQ ID NO: 3708559 - DNA, 25 bp, Homo sapien
gaagattagtgagctttccaagcac

SEQ ID NO: 3708560 - DNA, 25 bp, Homo sapien
ttgaagattagtgagctttccaagc

SEQ ID NO: 3708561 - DNA, 25 bp, Homo sapien
gattagtgagctttccaagcacatc

SEQ ID NO: 3708562 - DNA, 25 bp, Homo sapien
tggtttccaaatcattgcatttttc

SEQ ID NO: 3708563 - DNA, 25 bp, Homo sapien
ctttatttcgtatattctctgcttc

SEQ ID NO: 3708564 - DNA, 25 bp, Homo sapien
tcatctctttatttcgtatattctc

SEQ ID NO: 3708565 - DNA, 25 bp, Homo sapien
ttatttcgtatattctctgcttctt

SEQ ID NO: 3708566 - DNA, 25 bp, Homo sapien
ctctttatttcgtatattctctgct

SEQ ID NO: 3708567 - DNA, 25 bp, Homo sapien
catcaaagatacaattgttactaac

SEQ ID NO: 3708568 - DNA, 25 bp, Homo sapien
acatcaaagatacaattgttactaa

SEQ ID NO: 3708569 - DNA, 25 bp, Homo sapien
gatatgatcctttttagttgttcaa

SEQ ID NO: 3708570 - DNA, 25 bp, Homo sapien
ctggatatcagtgcttttagctgta

SEQ ID NO: 3708571 - DNA, 25 bp, Homo sapien
gaaggtcactatctttctctgtcag

SEQ ID NO: 3708572 - DNA, 25 bp, Homo sapien
ttctaaagctgcaaccagttgatct

SEQ ID NO: 3708573 - DNA, 25 bp, Homo sapien
gaaatttcaaaacttgtcgatagag

SEQ ID NO: 3708574 - DNA, 25 bp, Homo sapien
aatacgtttgggcttgatatccatg

SEQ ID NO: 3708575 - DNA, 25 bp, Homo sapien
caaaacttgtcgatagaggttcagt

SEQ ID NO: 3708576 - DNA, 25 bp, Homo sapien
cagtttgaagtttgtcaggatctgc

SEQ ID NO: 3708577 - DNA, 25 bp, Homo sapien
taactgtcactggtgtggtacaacc

SEQ ID NO: 3708578 - DNA, 25 bp, Homo sapien
gacacttcacaagagtcaaggacta

SEQ ID NO: 3708579 - DNA, 25 bp, Homo sapien
gagccttgggaatcttaactgtcac

SEQ ID NO: 3708580 - DNA, 25 bp, Homo sapien
gtacaaccagggtgtttcactgcca

SEQ ID NO: 3708581 - DNA, 25 bp, Homo sapien
ttttgacagaagaatttctatcatc

SEQ ID NO: 3708582 - DNA, 25 bp, Homo sapien
cttttgattgaagaattgagggaga

SEQ ID NO: 3708583 - DNA, 25 bp, Homo sapien
gtttacaccaattatggatgcctga

SEQ ID NO: 3708584 - DNA, 25 bp, Homo sapien
tgcctgactccgtaaagaatatgtt

SEQ ID NO: 3708585 - DNA, 25 bp, Homo sapien
agggagaatgttgtaagaagtctcc

SEQ ID NO: 3708586 - DNA, 25 bp, Homo sapien
atttcacttgtgtataatttccgtt

SEQ ID NO: 3708587 - DNA, 25 bp, Homo sapien
tcacttgtgtataatttccgtttgg

SEQ ID NO: 3708588 - DNA, 25 bp, Homo sapien
cttgtgtataatttccgtttggctc

SEQ ID NO: 3708589 - DNA, 25 bp, Homo sapien
tgtgtataatttccgtttggctcgt

SEQ ID NO: 3708590 - DNA, 25 bp, Homo sapien
tgttcgaagtcgtcgtttgataatc

SEQ ID NO: 3708591 - DNA, 25 bp, Homo sapien
gaagtcgtcgtttgataatctggtg

SEQ ID NO: 3708592 - DNA, 25 bp, Homo sapien
gataatctggtgatcactctccttc

SEQ ID NO: 3708593 - DNA, 25 bp, Homo sapien
ttggctgtttttgttcgaagtcgtc

SEQ ID NO: 3708594 - DNA, 25 bp, Homo sapien
tctatatgcagagtgatttaatgca

SEQ ID NO: 3708595 - DNA, 25 bp, Homo sapien
gcaagttccaatgactatgactata

SEQ ID NO: 3708596 - DNA, 25 bp, Homo sapien
gcagagtgatttaatgcataatata

SEQ ID NO: 3708597 - DNA, 25 bp, Homo sapien
aaaacagcaatctatatgcagagtg

SEQ ID NO: 3708598 - DNA, 25 bp, Homo sapien
ggatcttcactgatccaatgtctga

SEQ ID NO: 3708599 - DNA, 25 bp, Homo sapien
catgatacacgtatttcacattgca

SEQ ID NO: 3708600 - DNA, 25 bp, Homo sapien
caatgtctgagataatagggaaata

SEQ ID NO: 3708601 - DNA, 25 bp, Homo sapien
caaatacctgacctattacatcctg

SEQ ID NO: 3708602 - DNA, 25 bp, Homo sapien
gacctcatgggcatacagagtagaa

SEQ ID NO: 3708603 - DNA, 25 bp, Homo sapien
atcaattgacctcatgggcatacag

SEQ ID NO: 3708604 - DNA, 25 bp, Homo sapien
catgggcatacagagtagaagaatg

SEQ ID NO: 3708605 - DNA, 25 bp, Homo sapien
aaatcaattgacctcatgggcatac

SEQ ID NO: 3708606 - DNA, 25 bp, Homo sapien
tcctttcttcccgtgaatgccaata

SEQ ID NO: 3708607 - DNA, 25 bp, Homo sapien
agggccctcgagtgccttcggtgcc

SEQ ID NO: 3708608 - DNA, 25 bp, Homo sapien
agcacagggccctcgagtgccttcg

SEQ ID NO: 3708609 - DNA, 25 bp, Homo sapien
gtgaatgccaatacttgccaaagag

SEQ ID NO: 3708610 - DNA, 25 bp, Homo sapien
gatgtatttgctctgacctggtgcc

SEQ ID NO: 3708611 - DNA, 25 bp, Homo sapien
gcaaacaccttgttgtctgttgcta

SEQ ID NO: 3708612 - DNA, 25 bp, Homo sapien
caccttgttgtctgttgctatttca

SEQ ID NO: 3708613 - DNA, 25 bp, Homo sapien
ttattgtttctagtgatgtatttgc

SEQ ID NO: 3708614 - DNA, 25 bp, Homo sapien
cccatgctgcttacaggactggcat

SEQ ID NO: 3708615 - DNA, 25 bp, Homo sapien
gaaggccaaccttttgtctttatga

SEQ ID NO: 3708616 - DNA, 25 bp, Homo sapien
actggcatatgacacggccccaggg

SEQ ID NO: 3708617 - DNA, 25 bp, Homo sapien
cggccccaggggacatatttctatg

SEQ ID NO: 3708618 - DNA, 25 bp, Homo sapien
gaatccatgtgaccattttccagcc

SEQ ID NO: 3708619 - DNA, 25 bp, Homo sapien
cattttccagccattctgggagtcc

SEQ ID NO: 3708620 - DNA, 25 bp, Homo sapien
cttcaaccagggaatccatgtgacc

SEQ ID NO: 3708621 - DNA, 25 bp, Homo sapien
ctctgagcagccagaacagaagcat

SEQ ID NO: 3708622 - DNA, 25 bp, Homo sapien
tatcctcatgaggtatccttcccat

SEQ ID NO: 3708623 - DNA, 25 bp, Homo sapien
agccaggtgtttatctcccagtgca

SEQ ID NO: 3708624 - DNA, 25 bp, Homo sapien
cctgaaaaattccacttggcctttg

SEQ ID NO: 3708625 - DNA, 25 bp, Homo sapien
ggataaatcttggacagttaagctt

SEQ ID NO: 3708626 - DNA, 25 bp, Homo sapien
gtcacacttcccatcaattcacacc

SEQ ID NO: 3708627 - DNA, 25 bp, Homo sapien
ggtttgtcacacttcccatcaattc

SEQ ID NO: 3708628 - DNA, 25 bp, Homo sapien
tttgtcacacttcccatcaattcac

SEQ ID NO: 3708629 - DNA, 25 bp, Homo sapien
cacacttcccatcaattcacaccat

SEQ ID NO: 3708630 - DNA, 25 bp, Homo sapien
ttttaatatcctgagatacatgctg

SEQ ID NO: 3708631 - DNA, 25 bp, Homo sapien
gctgaactacaatactattgacacg

SEQ ID NO: 3708632 - DNA, 25 bp, Homo sapien
catccttttctagctgagtcacact

SEQ ID NO: 3708633 - DNA, 25 bp, Homo sapien
ttcaatagtagaatggatggaggaa

SEQ ID NO: 3708634 - DNA, 25 bp, Homo sapien
cagttgatacaaaaccagcacggtc

SEQ ID NO: 3708635 - DNA, 25 bp, Homo sapien
aaaatcttgcttcaacctaaggtgc

SEQ ID NO: 3708636 - DNA, 25 bp, Homo sapien
catcccttgtcaaattggcggccga

SEQ ID NO: 3708637 - DNA, 25 bp, Homo sapien
agttctagcttaggccagttgatac

SEQ ID NO: 3708638 - DNA, 25 bp, Homo sapien
gggaacatccagttgcaagagtgag

SEQ ID NO: 3708639 - DNA, 25 bp, Homo sapien
tccgcaccagctacacagagtaacg

SEQ ID NO: 3708640 - DNA, 25 bp, Homo sapien
cacaggttacatatagagaactggg

SEQ ID NO: 3708641 - DNA, 25 bp, Homo sapien
aagaagtgcatggaaggctgttgcc

SEQ ID NO: 3708642 - DNA, 25 bp, Homo sapien
gtttgagatgactttctgtgtcact

SEQ ID NO: 3708643 - DNA, 25 bp, Homo sapien
ttgtgtttcagctagtttgagatga

SEQ ID NO: 3708644 - DNA, 25 bp, Homo sapien
tgtgtttcagctagtttgagatgac

SEQ ID NO: 3708645 - DNA, 25 bp, Homo sapien
ctagtttgagatgactttctgtgtc

SEQ ID NO: 3708646 - DNA, 25 bp, Homo sapien
atcttggtcccgagcgtcttccccg

SEQ ID NO: 3708647 - DNA, 25 bp, Homo sapien
ccgcatcttggtcccgagcgtcttc

SEQ ID NO: 3708648 - DNA, 25 bp, Homo sapien
ctcccctctcttgccggtctccgcc

SEQ ID NO: 3708649 - DNA, 25 bp, Homo sapien
ccccgcatcttggtcccgagcgtct

SEQ ID NO: 3708650 - DNA, 25 bp, Homo sapien
gctccctgcccttgaggcggaggct

SEQ ID NO: 3708651 - DNA, 25 bp, Homo sapien
ggaggacactccgacctcacatggg

SEQ ID NO: 3708652 - DNA, 25 bp, Homo sapien
ctaagggaggactcaggcgacaact

SEQ ID NO: 3708653 - DNA, 25 bp, Homo sapien
cccgctcggtgctgcggagactgca

SEQ ID NO: 3708654 - DNA, 25 bp, Homo sapien
tgtcgtaccccacggagagcagctg

SEQ ID NO: 3708655 - DNA, 25 bp, Homo sapien
tagctgcgggtttgcccaaaggaac

SEQ ID NO: 3708656 - DNA, 25 bp, Homo sapien
cagcccaaccaggtctcggtgtcgt

SEQ ID NO: 3708657 - DNA, 25 bp, Homo sapien
tcacaagctggactcttagctgcgg

SEQ ID NO: 3708658 - DNA, 25 bp, Homo sapien
gagcaggaattcctcactcggggca

SEQ ID NO: 3708659 - DNA, 25 bp, Homo sapien
gaattcctcactcggggcaaaagcc

SEQ ID NO: 3708660 - DNA, 25 bp, Homo sapien
caggaattcctcactcggggcaaaa

SEQ ID NO: 3708661 - DNA, 25 bp, Homo sapien
gcaggaattcctcactcggggcaaa

SEQ ID NO: 3708662 - DNA, 25 bp, Homo sapien
ctaagcgggatcaagagacagagca

SEQ ID NO: 3708663 - DNA, 25 bp, Homo sapien
agcagaaaggcagcactgcgcccgc

SEQ ID NO: 3708664 - DNA, 25 bp, Homo sapien
cagccccgtactcgcctggagggga

SEQ ID NO: 3708665 - DNA, 25 bp, Homo sapien
ccctctgtgaatagcgacctcttac

SEQ ID NO: 3708666 - DNA, 25 bp, Homo sapien
tcacggcctctctaagaagactcag

SEQ ID NO: 3708667 - DNA, 25 bp, Homo sapien
atctttcacggcctctctaagaaga

SEQ ID NO: 3708668 - DNA, 25 bp, Homo sapien
cagcgtttcagcaacctgcctttcc

SEQ ID NO: 3708669 - DNA, 25 bp, Homo sapien
tttcacggcctctctaagaagactc

SEQ ID NO: 3708670 - DNA, 25 bp, Homo sapien
gaagggacccttactggcagctagg

SEQ ID NO: 3708671 - DNA, 25 bp, Homo sapien
catgggttacggacaggaaagatcc

SEQ ID NO: 3708672 - DNA, 25 bp, Homo sapien
agcatgaacaggaacttaagccccg

SEQ ID NO: 3708673 - DNA, 25 bp, Homo sapien
tgtcatgaagcacactagccaggag

SEQ ID NO: 3708674 - DNA, 25 bp, Homo sapien
catcccatgctaagtgaaacgtgct

SEQ ID NO: 3708675 - DNA, 25 bp, Homo sapien
taccagtacacacgtacagacaggc

SEQ ID NO: 3708676 - DNA, 25 bp, Homo sapien
gccagtgacatatccagtacctcga

SEQ ID NO: 3708677 - DNA, 25 bp, Homo sapien
tgttacagtcgtacaatgggcattt

SEQ ID NO: 3708678 - DNA, 25 bp, Homo sapien
gtgggctttgcattgaccctctgaa

SEQ ID NO: 3708679 - DNA, 25 bp, Homo sapien
cctctgaatgtagctgagttcctac

SEQ ID NO: 3708680 - DNA, 25 bp, Homo sapien
tttgcattgaccctctgaatgtagc

SEQ ID NO: 3708681 - DNA, 25 bp, Homo sapien
gtagctgagttcctacatatggaaa

SEQ ID NO: 3708682 - DNA, 25 bp, Homo sapien
tccaggaagttagcagccgtagggt

SEQ ID NO: 3708683 - DNA, 25 bp, Homo sapien
agttagcagccgtagggtcagtaga

SEQ ID NO: 3708684 - DNA, 25 bp, Homo sapien
ctgctccaggaagttagcagccgta

SEQ ID NO: 3708685 - DNA, 25 bp, Homo sapien
caggaagttagcagccgtagggtca

SEQ ID NO: 3708686 - DNA, 25 bp, Homo sapien
agggtatacgtgttggagtcctcgg

SEQ ID NO: 3708687 - DNA, 25 bp, Homo sapien
taagggtatacgtgttggagtcctc

SEQ ID NO: 3708688 - DNA, 25 bp, Homo sapien
gtatacgtgttggagtcctcggttc

SEQ ID NO: 3708689 - DNA, 25 bp, Homo sapien
ctaagggtatacgtgttggagtcct

SEQ ID NO: 3708690 - DNA, 25 bp, Homo sapien
tggaaatccgggcagctgctgtgta

SEQ ID NO: 3708691 - DNA, 25 bp, Homo sapien
ttggaaatccgggcagctgctgtgt

SEQ ID NO: 3708692 - DNA, 25 bp, Homo sapien
tgtaacctccttggaaatccgggca

SEQ ID NO: 3708693 - DNA, 25 bp, Homo sapien
ctgctgacagtagacagggcagaac

SEQ ID NO: 3708694 - DNA, 25 bp, Homo sapien
gaaccccgtgtctgaggccttgtct

SEQ ID NO: 3708695 - DNA, 25 bp, Homo sapien
gctgacagtagacagggcagaaccc

SEQ ID NO: 3708696 - DNA, 25 bp, Homo sapien
gggcagaaccccgtgtctgaggcct

SEQ ID NO: 3708697 - DNA, 25 bp, Homo sapien
gagctgagaattaggccccaaacac

SEQ ID NO: 3708698 - DNA, 25 bp, Homo sapien
taatctcagcaattactgtgcacac

SEQ ID NO: 3708699 - DNA, 25 bp, Homo sapien
tgcacacataagtggcatgagtcat

SEQ ID NO: 3708700 - DNA, 25 bp, Homo sapien
aaacaccctgccataagcccagtaa

SEQ ID NO: 3708701 - DNA, 25 bp, Homo sapien
tgctctctccctagtgcacaatata

SEQ ID NO: 3708702 - DNA, 25 bp, Homo sapien
caatatatagagatccctgctgtcc

SEQ ID NO: 3708703 - DNA, 25 bp, Homo sapien
caacatggtccctgaattttcaagc

SEQ ID NO: 3708704 - DNA, 25 bp, Homo sapien
ctcagcgttgcaagcaggttaattc

SEQ ID NO: 3708705 - DNA, 25 bp, Homo sapien
actcctttctcagcacagagatttg

SEQ ID NO: 3708706 - DNA, 25 bp, Homo sapien
tgtttggactcgtaagcctcttctc

SEQ ID NO: 3708707 - DNA, 25 bp, Homo sapien
ttagttgcttaagtaggttgaggcg

SEQ ID NO: 3708708 - DNA, 25 bp, Homo sapien
ggttgaggcgttaatgtttatctga

SEQ ID NO: 3708709 - DNA, 25 bp, Homo sapien
tctccaaacaaggagcggatcagtt

SEQ ID NO: 3708710 - DNA, 25 bp, Homo sapien
ggcccctctcagaatactaatcttg

SEQ ID NO: 3708711 - DNA, 25 bp, Homo sapien
ctaatcttgtgacctttcattgtct

SEQ ID NO: 3708712 - DNA, 25 bp, Homo sapien
cattgtcttacaaagactgtttcag

SEQ ID NO: 3708713 - DNA, 25 bp, Homo sapien
taaggctttcacatcattggcagtg

SEQ ID NO: 3708714 - DNA, 25 bp, Homo sapien
ggcagtggatgttttcttggacttg

SEQ ID NO: 3708715 - DNA, 25 bp, Homo sapien
cttggacttggtggacacattacac

SEQ ID NO: 3708716 - DNA, 25 bp, Homo sapien
tattctaaggctttcacatcattgg

SEQ ID NO: 3708717 - DNA, 25 bp, Homo sapien
gattgaagttagagggtccatttcc

SEQ ID NO: 3708718 - DNA, 25 bp, Homo sapien
tttccaaggtaggatactcacgtgg

SEQ ID NO: 3708719 - DNA, 25 bp, Homo sapien
tttgaaggctgattgaagttagagg

SEQ ID NO: 3708720 - DNA, 25 bp, Homo sapien
ggttgcagtcaagccatcaactggg

SEQ ID NO: 3708721 - DNA, 25 bp, Homo sapien
gactagccctacatgcttcggtcat

SEQ ID NO: 3708722 - DNA, 25 bp, Homo sapien
cactgctatattgactagccctaca

SEQ ID NO: 3708723 - DNA, 25 bp, Homo sapien
tccagccactgctatattgactagc

SEQ ID NO: 3708724 - DNA, 25 bp, Homo sapien
tgactagccctacatgcttcggtca

SEQ ID NO: 3708725 - DNA, 25 bp, Homo sapien
ctgaaggcactgaggcttcagcatc

SEQ ID NO: 3708726 - DNA, 25 bp, Homo sapien
tctcacagacgctcaggtcttcact

SEQ ID NO: 3708727 - DNA, 25 bp, Homo sapien
aagcagtagcccatccagacaacag

SEQ ID NO: 3708728 - DNA, 25 bp, Homo sapien
cctgtgtctcacagacgctcaggtc

SEQ ID NO: 3708729 - DNA, 25 bp, Homo sapien
actacgctctcggttcattcccgtt

SEQ ID NO: 3708730 - DNA, 25 bp, Homo sapien
gatggtcactacgctctcggttcat

SEQ ID NO: 3708731 - DNA, 25 bp, Homo sapien
ggtcactacgctctcggttcattcc

SEQ ID NO: 3708732 - DNA, 25 bp, Homo sapien
tacgctctcggttcattcccgtttc

SEQ ID NO: 3708733 - DNA, 25 bp, Homo sapien
tgtggaaggccttcacgtggcccag

SEQ ID NO: 3708734 - DNA, 25 bp, Homo sapien
gaacatcctggagatatagcagtct

SEQ ID NO: 3708735 - DNA, 25 bp, Homo sapien
acgatgaccaagtccccgtgcagga

SEQ ID NO: 3708736 - DNA, 25 bp, Homo sapien
ccaggagtttcgtgttgtggcgaca

SEQ ID NO: 3708737 - DNA, 25 bp, Homo sapien
gcggagtgagttctgtcgacagata

SEQ ID NO: 3708738 - DNA, 25 bp, Homo sapien
taggccagcggagtgagttctgtcg

SEQ ID NO: 3708739 - DNA, 25 bp, Homo sapien
tgagttctgtcgacagataggtggc

SEQ ID NO: 3708740 - DNA, 25 bp, Homo sapien
tctgtcgacagataggtggccccta

SEQ ID NO: 3708741 - DNA, 25 bp, Homo sapien
tcagctaatagaggctccaaagcct

SEQ ID NO: 3708742 - DNA, 25 bp, Homo sapien
tttctaggtcttgttgcttctcaga

SEQ ID NO: 3708743 - DNA, 25 bp, Homo sapien
ttgcttctcagacacccaatttagg

SEQ ID NO: 3708744 - DNA, 25 bp, Homo sapien
ctcttttctaggtcttgttgcttct

SEQ ID NO: 3708745 - DNA, 25 bp, Homo sapien
gaataagtatgctcagacctgtgag

SEQ ID NO: 3708746 - DNA, 25 bp, Homo sapien
agatgagcacccactcttctagagg

SEQ ID NO: 3708747 - DNA, 25 bp, Homo sapien
ctaggaccaatgattggaaagatga

SEQ ID NO: 3708748 - DNA, 25 bp, Homo sapien
tgtagcctacgtcctttgcaagaat

SEQ ID NO: 3708749 - DNA, 25 bp, Homo sapien
ctctctggtcatagtgcaagcccat

SEQ ID NO: 3708750 - DNA, 25 bp, Homo sapien
tccctctggctgctagtagcatctt

SEQ ID NO: 3708751 - DNA, 25 bp, Homo sapien
cctctggctgctagtagcatcttcc

SEQ ID NO: 3708752 - DNA, 25 bp, Homo sapien
ccctctggctgctagtagcatcttc

SEQ ID NO: 3708753 - DNA, 25 bp, Homo sapien
tactgggatgcacagatcagttcca

SEQ ID NO: 3708754 - DNA, 25 bp, Homo sapien
gaagatactgggatgcacagatcag

SEQ ID NO: 3708755 - DNA, 25 bp, Homo sapien
tcctcttgagccataactgtagaaa

SEQ ID NO: 3708756 - DNA, 25 bp, Homo sapien
tgtagaaatgctggccagacaaatg

SEQ ID NO: 3708757 - DNA, 25 bp, Homo sapien
gaccatgactatctttggtctggat

SEQ ID NO: 3708758 - DNA, 25 bp, Homo sapien
aacagctgagtgagtttggtgtatt

SEQ ID NO: 3708759 - DNA, 25 bp, Homo sapien
tggtgtatttgggaccaaacacagc

SEQ ID NO: 3708760 - DNA, 25 bp, Homo sapien
gatgacatatgcagggcagtgacca

SEQ ID NO: 3708761 - DNA, 25 bp, Homo sapien
gcccttttcatttacaaactgtcca

SEQ ID NO: 3708762 - DNA, 25 bp, Homo sapien
tatcagagaggtaacacaattcagg

SEQ ID NO: 3708763 - DNA, 25 bp, Homo sapien
aaagtatctaagacctatcagagag

SEQ ID NO: 3708764 - DNA, 25 bp, Homo sapien
caaactgtccattaaagtaaatcat

SEQ ID NO: 3708765 - DNA, 25 bp, Homo sapien
aagaagacattataagaggcaattc

SEQ ID NO: 3708766 - DNA, 25 bp, Homo sapien
ttctttggatacagctaagacaggg

SEQ ID NO: 3708767 - DNA, 25 bp, Homo sapien
ttcatttcgaagcatccacaggaca

SEQ ID NO: 3708768 - DNA, 25 bp, Homo sapien
ggtgaatccagcaggtgatcttgtc

SEQ ID NO: 3708769 - DNA, 25 bp, Homo sapien
gcaacttgccgacagaattttgtga

SEQ ID NO: 3708770 - DNA, 25 bp, Homo sapien
taagtctcggtctggcatctgcatt

SEQ ID NO: 3708771 - DNA, 25 bp, Homo sapien
tgtccccttggggtccacgatacca

SEQ ID NO: 3708772 - DNA, 25 bp, Homo sapien
gagggagagctaggtgtccccttgg

SEQ ID NO: 3708773 - DNA, 25 bp, Homo sapien
ccagaacagttatcctcttcctgta

SEQ ID NO: 3708774 - DNA, 25 bp, Homo sapien
ggcagggcctccagaacagttatcc

SEQ ID NO: 3708775 - DNA, 25 bp, Homo sapien
cagggcctccagaacagttatcctc

SEQ ID NO: 3708776 - DNA, 25 bp, Homo sapien
ggcctccagaacagttatcctcttc

SEQ ID NO: 3708777 - DNA, 25 bp, Homo sapien
tcaagttctattctagtgtcaatgc

SEQ ID NO: 3708778 - DNA, 25 bp, Homo sapien
ggatgacttgaagccctttaaacca

SEQ ID NO: 3708779 - DNA, 25 bp, Homo sapien
tctagtgtcaatgccagttttctct

SEQ ID NO: 3708780 - DNA, 25 bp, Homo sapien
cttgctttcagaaaggagtcctcaa

SEQ ID NO: 3708781 - DNA, 25 bp, Homo sapien
cacttagcattaggaacaaactgag

SEQ ID NO: 3708782 - DNA, 25 bp, Homo sapien
gaaatgctcacgcttcttccaagac

SEQ ID NO: 3708783 - DNA, 25 bp, Homo sapien
ggcgtgacgattaacatataggaca

SEQ ID NO: 3708784 - DNA, 25 bp, Homo sapien
ccttgaatgttagtcatgcacggag

SEQ ID NO: 3708785 - DNA, 25 bp, Homo sapien
gaaagtccttccaattatgcaaaac

SEQ ID NO: 3708786 - DNA, 25 bp, Homo sapien
tctcatagtaacttccatacactgc

SEQ ID NO: 3708787 - DNA, 25 bp, Homo sapien
catacactgctgcaaatggtacaca

SEQ ID NO: 3708788 - DNA, 25 bp, Homo sapien
aaatgctgcaagtcatagtgaagac

SEQ ID NO: 3708789 - DNA, 25 bp, Homo sapien
ggccaggaaaggagcataaacccag

SEQ ID NO: 3708790 - DNA, 25 bp, Homo sapien
cccaggttaagccagaggagatagg

SEQ ID NO: 3708791 - DNA, 25 bp, Homo sapien
caccctctaacaacacagatgttgc

SEQ ID NO: 3708792 - DNA, 25 bp, Homo sapien
tgccgattataccaacagggccagg

SEQ ID NO: 3708793 - DNA, 25 bp, Homo sapien
tgttgccttaatgaaatatgatgtc

SEQ ID NO: 3708794 - DNA, 25 bp, Homo sapien
tagatagcatggctctagtaagtag

SEQ ID NO: 3708795 - DNA, 25 bp, Homo sapien
ttagtgtctgccatattagatagca

SEQ ID NO: 3708796 - DNA, 25 bp, Homo sapien
catcttctatgctgttagaacctac

SEQ ID NO: 3708797 - DNA, 25 bp, Homo sapien
ggatacataagtgccagtgacccaa

SEQ ID NO: 3708798 - DNA, 25 bp, Homo sapien
cccattatgagtggagcattgtcta

SEQ ID NO: 3708799 - DNA, 25 bp, Homo sapien
aaaccgcatggtacattcaccaaga

SEQ ID NO: 3708800 - DNA, 25 bp, Homo sapien
cataatataatgagattgggccaag

SEQ ID NO: 3708801 - DNA, 25 bp, Homo sapien
gattctcagcatctggcttagactt

SEQ ID NO: 3708802 - DNA, 25 bp, Homo sapien
gactttagctctatcttatgttggg

SEQ ID NO: 3708803 - DNA, 25 bp, Homo sapien
gctctatcttatgttgggccaccat

SEQ ID NO: 3708804 - DNA, 25 bp, Homo sapien
tcagcatctggcttagactttagct

SEQ ID NO: 3708805 - DNA, 25 bp, Homo sapien
tgcatttctgaatctcttagaagga

SEQ ID NO: 3708806 - DNA, 25 bp, Homo sapien
ttgcatttctgaatctcttagaagg

SEQ ID NO: 3708807 - DNA, 25 bp, Homo sapien
gcatttctgaatctcttagaaggaa

SEQ ID NO: 3708808 - DNA, 25 bp, Homo sapien
tgattgtgtcatgctcatcacaatg

SEQ ID NO: 3708809 - DNA, 25 bp, Homo sapien
catatgtctgctaatactttgacca

SEQ ID NO: 3708810 - DNA, 25 bp, Homo sapien
caccccttccatatgtctgctaata

SEQ ID NO: 3708811 - DNA, 25 bp, Homo sapien
tcacaatgtgttgctccaatagcag

SEQ ID NO: 3708812 - DNA, 25 bp, Homo sapien
ttagccactagcctaaagcctaggg

SEQ ID NO: 3708813 - DNA, 25 bp, Homo sapien
tttagccactagcctaaagcctagg

SEQ ID NO: 3708814 - DNA, 25 bp, Homo sapien
agccactagcctaaagcctaggggt

SEQ ID NO: 3708815 - DNA, 25 bp, Homo sapien
tagccactagcctaaagcctagggg

SEQ ID NO: 3708816 - DNA, 25 bp, Homo sapien
tgttgggttgctgccttaacattgc

SEQ ID NO: 3708817 - DNA, 25 bp, Homo sapien
cttgctgttgggttgctgccttaac

SEQ ID NO: 3708818 - DNA, 25 bp, Homo sapien
tgggttgctgccttaacattgcctt

SEQ ID NO: 3708819 - DNA, 25 bp, Homo sapien
ggttgctgccttaacattgcctttc

SEQ ID NO: 3708820 - DNA, 25 bp, Homo sapien
taaccatggttgaagataaatgatg

SEQ ID NO: 3708821 - DNA, 25 bp, Homo sapien
acctgaaaatatgagcagttttcat

SEQ ID NO: 3708822 - DNA, 25 bp, Homo sapien
gagcagttttcattagtcttacgaa

SEQ ID NO: 3708823 - DNA, 25 bp, Homo sapien
gggtaattactgattctgaaagcaa

SEQ ID NO: 3708824 - DNA, 25 bp, Homo sapien
gctgggtaattactgattctgaaag

SEQ ID NO: 3708825 - DNA, 25 bp, Homo sapien
cttgcagacaacggaagtggtagat

SEQ ID NO: 3708826 - DNA, 25 bp, Homo sapien
tggtagatatctggggtatagtgaa

SEQ ID NO: 3708827 - DNA, 25 bp, Homo sapien
gcagacaacggaagtggtagatatc

SEQ ID NO: 3708828 - DNA, 25 bp, Homo sapien
tagatatctggggtatagtgaatgt

SEQ ID NO: 3708829 - DNA, 25 bp, Homo sapien
ccagtcagaggaactgaatcaatac

SEQ ID NO: 3708830 - DNA, 25 bp, Homo sapien
gtcagaggaactgaatcaatactac

SEQ ID NO: 3708831 - DNA, 25 bp, Homo sapien
ctccagtcagaggaactgaatcaat

SEQ ID NO: 3708832 - DNA, 25 bp, Homo sapien
ctctccagtcagaggaactgaatca

SEQ ID NO: 3708833 - DNA, 25 bp, Homo sapien
tatatctggtgtcctggacagttcc

SEQ ID NO: 3708834 - DNA, 25 bp, Homo sapien
tccttttatatctggtgtcctggac

SEQ ID NO: 3708835 - DNA, 25 bp, Homo sapien
ggacagttccaaggtaagtgcccat

SEQ ID NO: 3708836 - DNA, 25 bp, Homo sapien
tggacagttccaaggtaagtgccca

SEQ ID NO: 3708837 - DNA, 25 bp, Homo sapien
tgcagagttactaggcacaaggttg

SEQ ID NO: 3708838 - DNA, 25 bp, Homo sapien
gcagaggctgcgcattgcagagtta

SEQ ID NO: 3708839 - DNA, 25 bp, Homo sapien
gcgcattgcagagttactaggcaca

SEQ ID NO: 3708840 - DNA, 25 bp, Homo sapien
gctgcgcattgcagagttactaggc

SEQ ID NO: 3708841 - DNA, 25 bp, Homo sapien
taaaaatgaagtgtaaatggtattc

SEQ ID NO: 3708842 - DNA, 25 bp, Homo sapien
tttgcaaaattgaaatgactctcat

SEQ ID NO: 3708843 - DNA, 25 bp, Homo sapien
gactctcattaaggctgttaaaaat

SEQ ID NO: 3708844 - DNA, 25 bp, Homo sapien
atttatttgacttttgctgcccagc

SEQ ID NO: 3708845 - DNA, 25 bp, Homo sapien
cactgtcctatctctttttccctgg

SEQ ID NO: 3708846 - DNA, 25 bp, Homo sapien
atgatagggtttctaaaattgtggc

SEQ ID NO: 3708847 - DNA, 25 bp, Homo sapien
gcagcctgatgcaataagcagataa

SEQ ID NO: 3708848 - DNA, 25 bp, Homo sapien
tccaattctatgatacactgtccta

SEQ ID NO: 3708849 - DNA, 25 bp, Homo sapien
tacaatgccgtaatcttccttccag

SEQ ID NO: 3708850 - DNA, 25 bp, Homo sapien
taactttagcatcactacaatgccg

SEQ ID NO: 3708851 - DNA, 25 bp, Homo sapien
catcactacaatgccgtaatcttcc

SEQ ID NO: 3708852 - DNA, 25 bp, Homo sapien
cttcctgttaactttagcatcacta

SEQ ID NO: 3708853 - DNA, 25 bp, Homo sapien
gtgacctaggcaggtcccgccatga

SEQ ID NO: 3708854 - DNA, 25 bp, Homo sapien
acctaggcaggtcccgccatgagtg

SEQ ID NO: 3708855 - DNA, 25 bp, Homo sapien
ctgtgacctaggcaggtcccgccat

SEQ ID NO: 3708856 - DNA, 25 bp, Homo sapien
tgacctaggcaggtcccgccatgag

SEQ ID NO: 3708857 - DNA, 25 bp, Homo sapien
ggtattgagggacgtatcacaaaat

SEQ ID NO: 3708858 - DNA, 25 bp, Homo sapien
ctggaagtgttcactttgaaaaccg

SEQ ID NO: 3708859 - DNA, 25 bp, Homo sapien
taaactaggtattgagggacgtatc

SEQ ID NO: 3708860 - DNA, 25 bp, Homo sapien
gaagtgttcactttgaaaaccggca

SEQ ID NO: 3708861 - DNA, 25 bp, Homo sapien
cagagttcaattggggcctgcagtg

SEQ ID NO: 3708862 - DNA, 25 bp, Homo sapien
gtcttgttcgtgtgagtttagaagg

SEQ ID NO: 3708863 - DNA, 25 bp, Homo sapien
tggcatctattctcagatcttctgt

SEQ ID NO: 3708864 - DNA, 25 bp, Homo sapien
atttttggtcttgttcgtgtgagtt

SEQ ID NO: 3708865 - DNA, 25 bp, Homo sapien
tagatgcattactccaatcctccac

SEQ ID NO: 3708866 - DNA, 25 bp, Homo sapien
gcattctcccgttgtctcttgacat

SEQ ID NO: 3708867 - DNA, 25 bp, Homo sapien
tgtagatgcattactccaatcctcc

SEQ ID NO: 3708868 - DNA, 25 bp, Homo sapien
ccttttgataaggatctcagccata

SEQ ID NO: 3708869 - DNA, 25 bp, Homo sapien
aggccactatcctaaatgagctaaa

SEQ ID NO: 3708870 - DNA, 25 bp, Homo sapien
ctttgtcagaacgtggatagagctg

SEQ ID NO: 3708871 - DNA, 25 bp, Homo sapien
ttgtcagaacgtggatagagctgga

SEQ ID NO: 3708872 - DNA, 25 bp, Homo sapien
tgagctaaacgaaagagaaaaccaa

SEQ ID NO: 3708873 - DNA, 25 bp, Homo sapien
tctaactgtcatcaaccctgtaagg

SEQ ID NO: 3708874 - DNA, 25 bp, Homo sapien
cagttggttgacctcacaggtttca

SEQ ID NO: 3708875 - DNA, 25 bp, Homo sapien
cctttggtctgagctaactggattc

SEQ ID NO: 3708876 - DNA, 25 bp, Homo sapien
tctcaaggaccaaggaagaaatgcc

SEQ ID NO: 3708877 - DNA, 25 bp, Homo sapien
ctggtctgcgtacaaggcgtttcaa

SEQ ID NO: 3708878 - DNA, 25 bp, Homo sapien
cgtacaaggcgtttcaagctgtgtg

SEQ ID NO: 3708879 - DNA, 25 bp, Homo sapien
tggctaggggtatcaggaggctccc

SEQ ID NO: 3708880 - DNA, 25 bp, Homo sapien
gtctgcgtacaaggcgtttcaagct

SEQ ID NO: 3708881 - DNA, 25 bp, Homo sapien
gacaaatcccctgttcatgagggct

SEQ ID NO: 3708882 - DNA, 25 bp, Homo sapien
catcatctaggccttgtttcagctc

SEQ ID NO: 3708883 - DNA, 25 bp, Homo sapien
tattactaacataacagcctgagtc

SEQ ID NO: 3708884 - DNA, 25 bp, Homo sapien
tgctcaagagccttcaatgttctca

SEQ ID NO: 3708885 - DNA, 25 bp, Homo sapien
ctagtgacgctgaatgagtaaatga

SEQ ID NO: 3708886 - DNA, 25 bp, Homo sapien
ggtcccactagtgacgctgaatgag

SEQ ID NO: 3708887 - DNA, 25 bp, Homo sapien
tgccttgtgaaggtcccactagtga

SEQ ID NO: 3708888 - DNA, 25 bp, Homo sapien
tgaaggtcccactagtgacgctgaa

SEQ ID NO: 3708889 - DNA, 25 bp, Homo sapien
tgtgccattgatttactgtgataaa

SEQ ID NO: 3708890 - DNA, 25 bp, Homo sapien
gtgccattgatttactgtgataaaa

SEQ ID NO: 3708891 - DNA, 25 bp, Homo sapien
tctttctcagccgtctaatcaaact

SEQ ID NO: 3708892 - DNA, 25 bp, Homo sapien
cgtctaatcaaactcccaacaaggt

SEQ ID NO: 3708893 - DNA, 25 bp, Homo sapien
agccgtctaatcaaactcccaacaa

SEQ ID NO: 3708894 - DNA, 25 bp, Homo sapien
tttctcagccgtctaatcaaactcc

SEQ ID NO: 3708895 - DNA, 25 bp, Homo sapien
gggactcatagaaagcaccagactg

SEQ ID NO: 3708896 - DNA, 25 bp, Homo sapien
ctggtgaaagggactcatagaaagc

SEQ ID NO: 3708897 - DNA, 25 bp, Homo sapien
gaaagggactcatagaaagcaccag

SEQ ID NO: 3708898 - DNA, 25 bp, Homo sapien
gactcatagaaagcaccagactgtg

SEQ ID NO: 3708899 - DNA, 25 bp, Homo sapien
ggccctgactagatcctgctgagga

SEQ ID NO: 3708900 - DNA, 25 bp, Homo sapien
gaatgtactttgtgaaggccctgac

SEQ ID NO: 3708901 - DNA, 25 bp, Homo sapien
ggagtcctggccaaaaatctatgtt

SEQ ID NO: 3708902 - DNA, 25 bp, Homo sapien
cctagcctaggtgtcttcattcaga

SEQ ID NO: 3708903 - DNA, 25 bp, Homo sapien
ttaatcgactgttggtggaaagcac

SEQ ID NO: 3708904 - DNA, 25 bp, Homo sapien
gaacacggatgctcactaaacactg

SEQ ID NO: 3708905 - DNA, 25 bp, Homo sapien
gtgattatcttagccagggagaggc

SEQ ID NO: 3708906 - DNA, 25 bp, Homo sapien
cattctgcaatacgactataagggc

SEQ ID NO: 3708907 - DNA, 25 bp, Homo sapien
tctagtcttcggtaaactgaatcca

SEQ ID NO: 3708908 - DNA, 25 bp, Homo sapien
actatgcatagaacaggatatcggc

SEQ ID NO: 3708909 - DNA, 25 bp, Homo sapien
gctactctatcattagtggaagcag

SEQ ID NO: 3708910 - DNA, 25 bp, Homo sapien
ttaaatgggtctgcctgaacagaat

SEQ ID NO: 3708911 - DNA, 25 bp, Homo sapien
catctgttcttgatcccagtaagaa

SEQ ID NO: 3708912 - DNA, 25 bp, Homo sapien
tgatcaccaatgttgcgggtagggc

SEQ ID NO: 3708913 - DNA, 25 bp, Homo sapien
cagtaagaagtcactaaatgtttca

SEQ ID NO: 3708914 - DNA, 25 bp, Homo sapien
cactattgcactagttagattacac

SEQ ID NO: 3708915 - DNA, 25 bp, Homo sapien
ttaatgcctgactttttgctcgaca

SEQ ID NO: 3708916 - DNA, 25 bp, Homo sapien
tgagtgtgtactggcatcttctgat

SEQ ID NO: 3708917 - DNA, 25 bp, Homo sapien
agtcaatgacctcttcacccaaagg

SEQ ID NO: 3708918 - DNA, 25 bp, Homo sapien
ccccagtgattgacttgtgagtatt

SEQ ID NO: 3708919 - DNA, 25 bp, Homo sapien
attagttaagccattgtggaaaaca

SEQ ID NO: 3708920 - DNA, 25 bp, Homo sapien
gaaaacagtgtggtgattcctcaaa

SEQ ID NO: 3708921 - DNA, 25 bp, Homo sapien
aacagtgtggtgattcctcaaagac

SEQ ID NO: 3708922 - DNA, 25 bp, Homo sapien
agttaagccattgtggaaaacagtg

SEQ ID NO: 3708923 - DNA, 25 bp, Homo sapien
gagactcagagatgtgctagcttca

SEQ ID NO: 3708924 - DNA, 25 bp, Homo sapien
ctcagagatgtgctagcttcaggtg

SEQ ID NO: 3708925 - DNA, 25 bp, Homo sapien
atgggccttaggtgagactcagaga

SEQ ID NO: 3708926 - DNA, 25 bp, Homo sapien
catgggccttaggtgagactcagag

SEQ ID NO: 3708927 - DNA, 25 bp, Homo sapien
catgaggtgtctcggtcatgggatc

SEQ ID NO: 3708928 - DNA, 25 bp, Homo sapien
aaggcatgaggtgtctcggtcatgg

SEQ ID NO: 3708929 - DNA, 25 bp, Homo sapien
ggaaggcatgaggtgtctcggtcat

SEQ ID NO: 3708930 - DNA, 25 bp, Homo sapien
ggcatgaggtgtctcggtcatggga

SEQ ID NO: 3708931 - DNA, 25 bp, Homo sapien
tcagttgggcacactgacaaacatg

SEQ ID NO: 3708932 - DNA, 25 bp, Homo sapien
actgacaaacatgctgaggctgagg

SEQ ID NO: 3708933 - DNA, 25 bp, Homo sapien
gagctttgtctcagctgtgatactt

SEQ ID NO: 3708934 - DNA, 25 bp, Homo sapien
gttgggcacactgacaaacatgctg

SEQ ID NO: 3708935 - DNA, 25 bp, Homo sapien
gctgattcgggtgtccatttgccag

SEQ ID NO: 3708936 - DNA, 25 bp, Homo sapien
tgatgctaatctctggattgctgat

SEQ ID NO: 3708937 - DNA, 25 bp, Homo sapien
gtgaatggatagctccagacctagg

SEQ ID NO: 3708938 - DNA, 25 bp, Homo sapien
agtgttcataggctgcttctcggtg

SEQ ID NO: 3708939 - DNA, 25 bp, Homo sapien
ccagctttatgggtatagaggattt

SEQ ID NO: 3708940 - DNA, 25 bp, Homo sapien
acttgtaggtattctgctagtctcc

SEQ ID NO: 3708941 - DNA, 25 bp, Homo sapien
tccactcaaggacataaaataggct

SEQ ID NO: 3708942 - DNA, 25 bp, Homo sapien
tggctgcatactggactctacttgt

SEQ ID NO: 3708943 - DNA, 25 bp, Homo sapien
tctaaattgtgacatgagtctgtcc

SEQ ID NO: 3708944 - DNA, 25 bp, Homo sapien
agaactgggcttttggccaggaaca

SEQ ID NO: 3708945 - DNA, 25 bp, Homo sapien
gagtctgtccagtcatggtcctcca

SEQ ID NO: 3708946 - DNA, 25 bp, Homo sapien
ggtctgatgaatagaccacttccta

SEQ ID NO: 3708947 - DNA, 25 bp, Homo sapien
ctcgtactgtataggccttgtcttt

SEQ ID NO: 3708948 - DNA, 25 bp, Homo sapien
aggccttgtcttttagccgtatgca

SEQ ID NO: 3708949 - DNA, 25 bp, Homo sapien
tcttttagccgtatgcaattatgca

SEQ ID NO: 3708950 - DNA, 25 bp, Homo sapien
cgtatgcaattatgcatgaatctgc

SEQ ID NO: 3708951 - DNA, 25 bp, Homo sapien
taaagtatgcggagaggctctgctt

SEQ ID NO: 3708952 - DNA, 25 bp, Homo sapien
accacttcacctgctgctattgctt

SEQ ID NO: 3708953 - DNA, 25 bp, Homo sapien
ttaaagtatgcggagaggctctgct

SEQ ID NO: 3708954 - DNA, 25 bp, Homo sapien
gctattgcttcttctgtggccatct

SEQ ID NO: 3708955 - DNA, 25 bp, Homo sapien
ttttctcagcgagcaccaaaaacca

SEQ ID NO: 3708956 - DNA, 25 bp, Homo sapien
tgttttctcagcgagcaccaaaaac

SEQ ID NO: 3708957 - DNA, 25 bp, Homo sapien
gctgttttctcagcgagcaccaaaa

SEQ ID NO: 3708958 - DNA, 25 bp, Homo sapien
ttctcagcgagcaccaaaaaccaca

SEQ ID NO: 3708959 - DNA, 25 bp, Homo sapien
cctgtgcagccccaactcgctcttc

SEQ ID NO: 3708960 - DNA, 25 bp, Homo sapien
ggagtcctgcttgctggttgggctg

SEQ ID NO: 3708961 - DNA, 25 bp, Homo sapien
aatctgattggggagtcctgcttgc

SEQ ID NO: 3708962 - DNA, 25 bp, Homo sapien
agccccaactcgctcttcccttcta

SEQ ID NO: 3708963 - DNA, 25 bp, Homo sapien
agtgggacataaacctggatctctg

SEQ ID NO: 3708964 - DNA, 25 bp, Homo sapien
gatagattctctagcctctccttag

SEQ ID NO: 3708965 - DNA, 25 bp, Homo sapien
tcgttacacaggtttaggcaaggga

SEQ ID NO: 3708966 - DNA, 25 bp, Homo sapien
tatatatcttaccagcacaagtggg

SEQ ID NO: 3708967 - DNA, 25 bp, Homo sapien
tgaatggcacacatggtcatccagg

SEQ ID NO: 3708968 - DNA, 25 bp, Homo sapien
aagtgcatttacagcccgttcccct

SEQ ID NO: 3708969 - DNA, 25 bp, Homo sapien
gacttggtgctgattcacatggact

SEQ ID NO: 3708970 - DNA, 25 bp, Homo sapien
tccaggccaagtctaaaggactggg

SEQ ID NO: 3708971 - DNA, 25 bp, Homo sapien
ctctagaccctggctcctatgcagc

SEQ ID NO: 3708972 - DNA, 25 bp, Homo sapien
gtggtggttgctctagaccctggct

SEQ ID NO: 3708973 - DNA, 25 bp, Homo sapien
aagtggtggttgctctagaccctgg

SEQ ID NO: 3708974 - DNA, 25 bp, Homo sapien
cctaaccgcaagtggtggttgctct

SEQ ID NO: 3708975 - DNA, 25 bp, Homo sapien
caagggcaaagcattaggtccctcc

SEQ ID NO: 3708976 - DNA, 25 bp, Homo sapien
atctatgttgcccttgccatggctc

SEQ ID NO: 3708977 - DNA, 25 bp, Homo sapien
gttgcccttgccatggctcctcagg

SEQ ID NO: 3708978 - DNA, 25 bp, Homo sapien
aaagcattaggtccctccatctgcg

SEQ ID NO: 3708979 - DNA, 25 bp, Homo sapien
caggagcagtatggagagcagggaa

SEQ ID NO: 3708980 - DNA, 25 bp, Homo sapien
gcagtatggagagcagggaaaccat

SEQ ID NO: 3708981 - DNA, 25 bp, Homo sapien
agcagtatggagagcagggaaacca

SEQ ID NO: 3708982 - DNA, 25 bp, Homo sapien
ggagcagtatggagagcagggaaac

SEQ ID NO: 3708983 - DNA, 25 bp, Homo sapien
ccagatgtcggggacaccgcagagc

SEQ ID NO: 3708984 - DNA, 25 bp, Homo sapien
gccccagatgtcggggacaccgcag

SEQ ID NO: 3708985 - DNA, 25 bp, Homo sapien
tttccgccccagatgtcggggacac

SEQ ID NO: 3708986 - DNA, 25 bp, Homo sapien
ttttccgccccagatgtcggggaca

SEQ ID NO: 3708987 - DNA, 25 bp, Homo sapien
ggaatggaatcattttggaactgga

SEQ ID NO: 3708988 - DNA, 25 bp, Homo sapien
aaaatggcataaacactgacgtccc

SEQ ID NO: 3708989 - DNA, 25 bp, Homo sapien
cactgacgtcccttaaaacttcaat

SEQ ID NO: 3708990 - DNA, 25 bp, Homo sapien
tattaaggatttcaggttacatact

SEQ ID NO: 3708991 - DNA, 25 bp, Homo sapien
ggtgacttctgccttgccgaggttg

SEQ ID NO: 3708992 - DNA, 25 bp, Homo sapien
gacttctgccttgccgaggttgtca

SEQ ID NO: 3708993 - DNA, 25 bp, Homo sapien
ttctgccttgccgaggttgtcagct

SEQ ID NO: 3708994 - DNA, 25 bp, Homo sapien
tgccttgccgaggttgtcagctgcc

SEQ ID NO: 3708995 - DNA, 25 bp, Homo sapien
ttatggtataactcaggaacaggtc

SEQ ID NO: 3708996 - DNA, 25 bp, Homo sapien
aagctttttctcgtgctctgaaggg

SEQ ID NO: 3708997 - DNA, 25 bp, Homo sapien
ggatttttatcgcagtgaagctcaa

SEQ ID NO: 3708998 - DNA, 25 bp, Homo sapien
gaagctcaagtggtacccaactgcg

SEQ ID NO: 3708999 - DNA, 25 bp, Homo sapien
ggctgacacttctctatcactaatg

SEQ ID NO: 3709000 - DNA, 25 bp, Homo sapien
cacttctctatcactaatgccactt

SEQ ID NO: 3709001 - DNA, 25 bp, Homo sapien
tggctttacaccaggagaaagggac

SEQ ID NO: 3709002 - DNA, 25 bp, Homo sapien
tcaggggagtggctttacaccagga

SEQ ID NO: 3709003 - DNA, 25 bp, Homo sapien
gcattgagtgcagtctctcgcccat

SEQ ID NO: 3709004 - DNA, 25 bp, Homo sapien
cagagcagccagtgtcgtatcctga

SEQ ID NO: 3709005 - DNA, 25 bp, Homo sapien
ggcattgagtgcagtctctcgccca

SEQ ID NO: 3709006 - DNA, 25 bp, Homo sapien
cagtgtcgtatcctgaggagtctgg

SEQ ID NO: 3709007 - DNA, 25 bp, Homo sapien
cttgtcatcaggtgttgtggtgcgt

SEQ ID NO: 3709008 - DNA, 25 bp, Homo sapien
aggccacaagactttgtggattgct

SEQ ID NO: 3709009 - DNA, 25 bp, Homo sapien
tgctgtattcttggcccaattcttg

SEQ ID NO: 3709010 - DNA, 25 bp, Homo sapien
gggcagatacattcccaggtcgggt

SEQ ID NO: 3709011 - DNA, 25 bp, Homo sapien
gaactcatctgccttatttgcaaga

SEQ ID NO: 3709012 - DNA, 25 bp, Homo sapien
tctgattggtatctggctgaagcct

SEQ ID NO: 3709013 - DNA, 25 bp, Homo sapien
tgatgatctgagttctgcttttggc

SEQ ID NO: 3709014 - DNA, 25 bp, Homo sapien
tcctcgccaggtactatgactcatt

SEQ ID NO: 3709015 - DNA, 25 bp, Homo sapien
gcgcggctgccgcaggggagcggcg

SEQ ID NO: 3709016 - DNA, 25 bp, Homo sapien
cagttgactagggattcggagaaac

SEQ ID NO: 3709017 - DNA, 25 bp, Homo sapien
cgacaatgtttggttccccctggag

SEQ ID NO: 3709018 - DNA, 25 bp, Homo sapien
gtcttcttctgaacgacaatgtttg

SEQ ID NO: 3709019 - DNA, 25 bp, Homo sapien
tgtagttaacctgcgcagtccgtct

SEQ ID NO: 3709020 - DNA, 25 bp, Homo sapien
ccgctcgcaggtccaaatctgcaaa

SEQ ID NO: 3709021 - DNA, 25 bp, Homo sapien
gagccttcaggtcagaacccgctcg

SEQ ID NO: 3709022 - DNA, 25 bp, Homo sapien
ggtccaaatctgcaaacaccgccat

SEQ ID NO: 3709023 - DNA, 25 bp, Homo sapien
ggctgtctccacaagtccgcgcaga

SEQ ID NO: 3709024 - DNA, 25 bp, Homo sapien
atgaggttggccaggcgcgaagccg

SEQ ID NO: 3709025 - DNA, 25 bp, Homo sapien
ggtctgggtggcatgaggttggcca

SEQ ID NO: 3709026 - DNA, 25 bp, Homo sapien
tggcccgatggtctgggtggcatga

SEQ ID NO: 3709027 - DNA, 25 bp, Homo sapien
gagtgtggcccgatggtctgggtgg

SEQ ID NO: 3709028 - DNA, 25 bp, Homo sapien
actgtcacttttattcccgttcatt

SEQ ID NO: 3709029 - DNA, 25 bp, Homo sapien
taatacacatgaggtgtttgagaac

SEQ ID NO: 3709030 - DNA, 25 bp, Homo sapien
gatactaaagactcttaactttgtg

SEQ ID NO: 3709031 - DNA, 25 bp, Homo sapien
taaaatgatactaaagactcttaac

SEQ ID NO: 3709032 - DNA, 25 bp, Homo sapien
ttccttaaagtcaacgatatgattg

SEQ ID NO: 3709033 - DNA, 25 bp, Homo sapien
gattgatagcaacaactgaatagcc

SEQ ID NO: 3709034 - DNA, 25 bp, Homo sapien
caacgatatgattgatagcaacaac

SEQ ID NO: 3709035 - DNA, 25 bp, Homo sapien
taaagtcaacgatatgattgatagc

SEQ ID NO: 3709036 - DNA, 25 bp, Homo sapien
ctgtacaattggcaaagttgtgaag

SEQ ID NO: 3709037 - DNA, 25 bp, Homo sapien
cattgcagtgagatggatccgagac

SEQ ID NO: 3709038 - DNA, 25 bp, Homo sapien
gatggatccgagacaataattgtta

SEQ ID NO: 3709039 - DNA, 25 bp, Homo sapien
caaaacattgcagtgagatggatcc

SEQ ID NO: 3709040 - DNA, 25 bp, Homo sapien
gcagtgagatggatccgagacaata

SEQ ID NO: 3709041 - DNA, 25 bp, Homo sapien
catgagtaagtggaacagacatatt

SEQ ID NO: 3709042 - DNA, 25 bp, Homo sapien
tggaacagacatattacactgtgtg

SEQ ID NO: 3709043 - DNA, 25 bp, Homo sapien
cttaagtctggtgcacgtgagttca

SEQ ID NO: 3709044 - DNA, 25 bp, Homo sapien
ggtatcactacacatgtgccatgag

SEQ ID NO: 3709045 - DNA, 25 bp, Homo sapien
gaaaaactgcaacaacatcatagag

SEQ ID NO: 3709046 - DNA, 25 bp, Homo sapien
caacatcatagagccgggcccttga

SEQ ID NO: 3709047 - DNA, 25 bp, Homo sapien
tggaaaaactgcaacaacatcatag

SEQ ID NO: 3709048 - DNA, 25 bp, Homo sapien
gccgggcccttgaagaagttgctct

SEQ ID NO: 3709049 - DNA, 25 bp, Homo sapien
gacatcttccggatactctgagtag

SEQ ID NO: 3709050 - DNA, 25 bp, Homo sapien
aactgcttgcatttgacctgattcc

SEQ ID NO: 3709051 - DNA, 25 bp, Homo sapien
tagaataccatacctacagagatag

SEQ ID NO: 3709052 - DNA, 25 bp, Homo sapien
tcatcttggagacctaacttagttt

SEQ ID NO: 3709053 - DNA, 25 bp, Homo sapien
caggtaattctaaagccagtggagc

SEQ ID NO: 3709054 - DNA, 25 bp, Homo sapien
gaagagacaatcaggcttaccaagg

SEQ ID NO: 3709055 - DNA, 25 bp, Homo sapien
tactgcaagtaacaccaggacactc

SEQ ID NO: 3709056 - DNA, 25 bp, Homo sapien
cagtggagccagaccatactgcaag

SEQ ID NO: 3709057 - DNA, 25 bp, Homo sapien
gtttctctgttacagttatgcagac

SEQ ID NO: 3709058 - DNA, 25 bp, Homo sapien
tagtttctctgttacagttatgcag

SEQ ID NO: 3709059 - DNA, 25 bp, Homo sapien
ggtagtttctctgttacagttatgc

SEQ ID NO: 3709060 - DNA, 25 bp, Homo sapien
tttctctgttacagttatgcagact

SEQ ID NO: 3709061 - DNA, 25 bp, Homo sapien
tatagacaagttcaaaagccaggcc

SEQ ID NO: 3709062 - DNA, 25 bp, Homo sapien
attgtggagtctttgatagcagggc

SEQ ID NO: 3709063 - DNA, 25 bp, Homo sapien
gttcaaaagccaggcctcggtcaat

SEQ ID NO: 3709064 - DNA, 25 bp, Homo sapien
gatagcagggctatagacaagttca

SEQ ID NO: 3709065 - DNA, 25 bp, Homo sapien
gatttgcatcaaattgagggcactg

SEQ ID NO: 3709066 - DNA, 25 bp, Homo sapien
attgagggcactggaaattgtatac

SEQ ID NO: 3709067 - DNA, 25 bp, Homo sapien
tgcatcaaattgagggcactggaaa

SEQ ID NO: 3709068 - DNA, 25 bp, Homo sapien
tgcagatttgcatcaaattgagggc

SEQ ID NO: 3709069 - DNA, 25 bp, Homo sapien
taataaactgccagatgcgaaaaac

SEQ ID NO: 3709070 - DNA, 25 bp, Homo sapien
tatcttaattcaactcagtgaggac

SEQ ID NO: 3709071 - DNA, 25 bp, Homo sapien
tcatgtcaaactaaaggcaatctgt

SEQ ID NO: 3709072 - DNA, 25 bp, Homo sapien
ttcctatgctatgagaacattctgc

SEQ ID NO: 3709073 - DNA, 25 bp, Homo sapien
tctgcagcactagatataattacat

SEQ ID NO: 3709074 - DNA, 25 bp, Homo sapien
ctgcagcactagatataattacatt

SEQ ID NO: 3709075 - DNA, 25 bp, Homo sapien
tttcaatgacttatagcaaattaat

SEQ ID NO: 3709076 - DNA, 25 bp, Homo sapien
tcaatgacttatagcaaattaatag

SEQ ID NO: 3709077 - DNA, 25 bp, Homo sapien
aaaatgaacaaagagtagatatgag

SEQ ID NO: 3709078 - DNA, 25 bp, Homo sapien
aatgacttatagcaaattaatagaa

SEQ ID NO: 3709079 - DNA, 25 bp, Homo sapien
cgtcatatggccctcttatttctaa

SEQ ID NO: 3709080 - DNA, 25 bp, Homo sapien
tcatatggccctcttatttctaaag

SEQ ID NO: 3709081 - DNA, 25 bp, Homo sapien
agatttgccacgtcatatggccctc

SEQ ID NO: 3709082 - DNA, 25 bp, Homo sapien
tgccacgtcatatggccctcttatt

SEQ ID NO: 3709083 - DNA, 25 bp, Homo sapien
agatttcaacccagagtcacccaag

SEQ ID NO: 3709084 - DNA, 25 bp, Homo sapien
cccaaggacacgagactaacacaaa

SEQ ID NO: 3709085 - DNA, 25 bp, Homo sapien
gctaacctggtcatcttgagaggct

SEQ ID NO: 3709086 - DNA, 25 bp, Homo sapien
taattcaacagcagttcttagtcca

SEQ ID NO: 3709087 - DNA, 25 bp, Homo sapien
tggacaccgcagccttggcgtcact

SEQ ID NO: 3709088 - DNA, 25 bp, Homo sapien
ccgcagccttggcgtcactttcaga

SEQ ID NO: 3709089 - DNA, 25 bp, Homo sapien
gcagccttggcgtcactttcagaga

SEQ ID NO: 3709090 - DNA, 25 bp, Homo sapien
gacaccgcagccttggcgtcacttt

SEQ ID NO: 3709091 - DNA, 25 bp, Homo sapien
ccatggagaagcgctgctcggcagt

SEQ ID NO: 3709092 - DNA, 25 bp, Homo sapien
catggagaagcgctgctcggcagtt

SEQ ID NO: 3709093 - DNA, 25 bp, Homo sapien
tccatggagaagcgctgctcggcag

SEQ ID NO: 3709094 - DNA, 25 bp, Homo sapien
tggagaagcgctgctcggcagttgg

SEQ ID NO: 3709095 - DNA, 25 bp, Homo sapien
tgctagtgccatttaccgtcattat

SEQ ID NO: 3709096 - DNA, 25 bp, Homo sapien
ccactgtgcttgaagttaagacata

SEQ ID NO: 3709097 - DNA, 25 bp, Homo sapien
tcattcctaaagattacctcatggg

SEQ ID NO: 3709098 - DNA, 25 bp, Homo sapien
caaatgataagccataatgaactgc

SEQ ID NO: 3709099 - DNA, 25 bp, Homo sapien
tcatctccttctgatggccgaggtt

SEQ ID NO: 3709100 - DNA, 25 bp, Homo sapien
tctccttctgatggccgaggtttct

SEQ ID NO: 3709101 - DNA, 25 bp, Homo sapien
tctgatggccgaggtttcttcactg

SEQ ID NO: 3709102 - DNA, 25 bp, Homo sapien
gtttcttcactgtagagataattcc

SEQ ID NO: 3709103 - DNA, 25 bp, Homo sapien
agtgctgacagagactggggcattc

SEQ ID NO: 3709104 - DNA, 25 bp, Homo sapien
ggagtgctgacagagactggggcat

SEQ ID NO: 3709105 - DNA, 25 bp, Homo sapien
tgctgacagagactggggcattctt

SEQ ID NO: 3709106 - DNA, 25 bp, Homo sapien
gctgacagagactggggcattcttt

SEQ ID NO: 3709107 - DNA, 25 bp, Homo sapien
ctgatgaactataaaagggaagaag

SEQ ID NO: 3709108 - DNA, 25 bp, Homo sapien
tgttgttttaatggattgcaagtaa

SEQ ID NO: 3709109 - DNA, 25 bp, Homo sapien
aaaactgtttttatagactattgat

SEQ ID NO: 3709110 - DNA, 25 bp, Homo sapien
ttgttgttttaatggattgcaagta

SEQ ID NO: 3709111 - DNA, 25 bp, Homo sapien
tagactattgatttctagctccaaa

SEQ ID NO: 3709112 - DNA, 25 bp, Homo sapien
aaggagaaataaccagtctttctct

SEQ ID NO: 3709113 - DNA, 25 bp, Homo sapien
ttctctcttaaagtacatctaaatt

SEQ ID NO: 3709114 - DNA, 25 bp, Homo sapien
tttgctgttgtttatcacttacaca

SEQ ID NO: 3709115 - DNA, 25 bp, Homo sapien
tcattaagctggcagccttttaaaa

SEQ ID NO: 3709116 - DNA, 25 bp, Homo sapien
caaagaccttacgtaggcatgaagc

SEQ ID NO: 3709117 - DNA, 25 bp, Homo sapien
tattttctccaacccgcagaacagt

SEQ ID NO: 3709118 - DNA, 25 bp, Homo sapien
tgctaaatacatggcgagcgcctgt

SEQ ID NO: 3709119 - DNA, 25 bp, Homo sapien
tccaaagttggttcagtccgatgct

SEQ ID NO: 3709120 - DNA, 25 bp, Homo sapien
ctccagcctgggtgacagagtgaga

SEQ ID NO: 3709121 - DNA, 25 bp, Homo sapien
gatggcttgagcccaagaggcaaag

SEQ ID NO: 3709122 - DNA, 25 bp, Homo sapien
cactccagcctgggtgacagagtga

SEQ ID NO: 3709123 - DNA, 25 bp, Homo sapien
ccagcctgggtgacagagtgagacc

SEQ ID NO: 3709124 - DNA, 25 bp, Homo sapien
acagactgcttgaatctgccaggag

SEQ ID NO: 3709125 - DNA, 25 bp, Homo sapien
gaggcggacagactgcttgaatctg

SEQ ID NO: 3709126 - DNA, 25 bp, Homo sapien
gcggacagactgcttgaatctgcca

SEQ ID NO: 3709127 - DNA, 25 bp, Homo sapien
ggacagactgcttgaatctgccagg

SEQ ID NO: 3709128 - DNA, 25 bp, Homo sapien
ctgatgagagatcaaaagttgtctt

SEQ ID NO: 3709129 - DNA, 25 bp, Homo sapien
gcctgttcttgggagtatgatctct

SEQ ID NO: 3709130 - DNA, 25 bp, Homo sapien
cctgttcttgggagtatgatctctc

SEQ ID NO: 3709131 - DNA, 25 bp, Homo sapien
gctaagcatatgaaaccttcctgga

SEQ ID NO: 3709132 - DNA, 25 bp, Homo sapien
gctttgatgaccatgctcggcaggt

SEQ ID NO: 3709133 - DNA, 25 bp, Homo sapien
gcaatataggtacaccaccctggga

SEQ ID NO: 3709134 - DNA, 25 bp, Homo sapien
gggatctctatggatgctaacagca

SEQ ID NO: 3709135 - DNA, 25 bp, Homo sapien
tccacacacagcgtaatcccatggg

SEQ ID NO: 3709136 - DNA, 25 bp, Homo sapien
tcttcaggtaaagtgactctcatca

SEQ ID NO: 3709137 - DNA, 25 bp, Homo sapien
caaaacttcccaggtatcttcaggt

SEQ ID NO: 3709138 - DNA, 25 bp, Homo sapien
gcataaattgtaccaccgaggccag

SEQ ID NO: 3709139 - DNA, 25 bp, Homo sapien
gacttgcatcaaattgtatctccct

SEQ ID NO: 3709140 - DNA, 25 bp, Homo sapien
gcagtgaatatccttatccatccac

SEQ ID NO: 3709141 - DNA, 25 bp, Homo sapien
cagatatatttgtggtgatttcccc

SEQ ID NO: 3709142 - DNA, 25 bp, Homo sapien
taactttcaacctgatcagccagat

SEQ ID NO: 3709143 - DNA, 25 bp, Homo sapien
tctgggagagtgtatacgcatagtc

SEQ ID NO: 3709144 - DNA, 25 bp, Homo sapien
cacagaatggtgtttcggccaacaa

SEQ ID NO: 3709145 - DNA, 25 bp, Homo sapien
cgcatagtccataaccagaaggtct

SEQ ID NO: 3709146 - DNA, 25 bp, Homo sapien
caggaacactgctctatggaataca

SEQ ID NO: 3709147 - DNA, 25 bp, Homo sapien
caataaaaggaggtatgccagtagt

SEQ ID NO: 3709148 - DNA, 25 bp, Homo sapien
caatagacttgctggttacagaggt

SEQ ID NO: 3709149 - DNA, 25 bp, Homo sapien
tgacatgagcgagacaggaaacagg

SEQ ID NO: 3709150 - DNA, 25 bp, Homo sapien
ggtatgccagtagttcttggccagg

SEQ ID NO: 3709151 - DNA, 25 bp, Homo sapien
ttcaaaattggagtacatcctcgca

SEQ ID NO: 3709152 - DNA, 25 bp, Homo sapien
agctgttcaagttttatgacaagat

SEQ ID NO: 3709153 - DNA, 25 bp, Homo sapien
tcaacagttacttactccaccgaag

SEQ ID NO: 3709154 - DNA, 25 bp, Homo sapien
ccagttaatgatatttttacctcct

SEQ ID NO: 3709155 - DNA, 25 bp, Homo sapien
tagaaatgtcccgtacaacagcact

SEQ ID NO: 3709156 - DNA, 25 bp, Homo sapien
taccgagtacacagagtacccaagt

SEQ ID NO: 3709157 - DNA, 25 bp, Homo sapien
gtacccaagtgaagagaacgtcatg

SEQ ID NO: 3709158 - DNA, 25 bp, Homo sapien
caaatcagtggaaggagcggcaaac

SEQ ID NO: 3709159 - DNA, 25 bp, Homo sapien
tgtggctctagggaagcctctgaaa

SEQ ID NO: 3709160 - DNA, 25 bp, Homo sapien
ctgtggctctagggaagcctctgaa

SEQ ID NO: 3709161 - DNA, 25 bp, Homo sapien
ctctagggaagcctctgaaaaacac

SEQ ID NO: 3709162 - DNA, 25 bp, Homo sapien
ggctctagggaagcctctgaaaaac

SEQ ID NO: 3709163 - DNA, 25 bp, Homo sapien
taatcttctgcccagctgcctgcac

SEQ ID NO: 3709164 - DNA, 25 bp, Homo sapien
ctaatcttctgcccagctgcctgca

SEQ ID NO: 3709165 - DNA, 25 bp, Homo sapien
gggaataagatcacctcccttgcag

SEQ ID NO: 3709166 - DNA, 25 bp, Homo sapien
gtttagaagcactgccaggctcctt

SEQ ID NO: 3709167 - DNA, 25 bp, Homo sapien
cttgtgttggcagcaaaagagtatg

SEQ ID NO: 3709168 - DNA, 25 bp, Homo sapien
ggctccttctcagtgggaataagat

SEQ ID NO: 3709169 - DNA, 25 bp, Homo sapien
tataaattcctttgtgaaacctgag

SEQ ID NO: 3709170 - DNA, 25 bp, Homo sapien
attcctttgtgaaacctgagagcct

SEQ ID NO: 3709171 - DNA, 25 bp, Homo sapien
ctttgtgaaacctgagagccttggc

SEQ ID NO: 3709172 - DNA, 25 bp, Homo sapien
aaattcctttgtgaaacctgagagc

SEQ ID NO: 3709173 - DNA, 25 bp, Homo sapien
tcattctccacttagtcctgagctg

SEQ ID NO: 3709174 - DNA, 25 bp, Homo sapien
attctccacttagtcctgagctgat

SEQ ID NO: 3709175 - DNA, 25 bp, Homo sapien
cattctccacttagtcctgagctga

SEQ ID NO: 3709176 - DNA, 25 bp, Homo sapien
ggttccacttttcgtcttaagatca

SEQ ID NO: 3709177 - DNA, 25 bp, Homo sapien
ctgtctgcccttgggttccactttt

SEQ ID NO: 3709178 - DNA, 25 bp, Homo sapien
ttttaatggtcctgaacacagacat

SEQ ID NO: 3709179 - DNA, 25 bp, Homo sapien
taagatcattttaatggtcctgaac

SEQ ID NO: 3709180 - DNA, 25 bp, Homo sapien
ccatgtgcctgggtcgctggcaaga

SEQ ID NO: 3709181 - DNA, 25 bp, Homo sapien
gggaagcagatatgtagagataaga

SEQ ID NO: 3709182 - DNA, 25 bp, Homo sapien
ctcttcataagagggaagcagatat

SEQ ID NO: 3709183 - DNA, 25 bp, Homo sapien
gatatgtagagataagaggccatgt

SEQ ID NO: 3709184 - DNA, 25 bp, Homo sapien
gagctgcactttgcagcagactttt

SEQ ID NO: 3709185 - DNA, 25 bp, Homo sapien
gctgcactttgcagcagactttttc

SEQ ID NO: 3709186 - DNA, 25 bp, Homo sapien
agagagctgcactttgcagcagact

SEQ ID NO: 3709187 - DNA, 25 bp, Homo sapien
ctgcactttgcagcagactttttca

SEQ ID NO: 3709188 - DNA, 25 bp, Homo sapien
taacaccagagagcttcacgataac

SEQ ID NO: 3709189 - DNA, 25 bp, Homo sapien
gttaacaccagagagcttcacgata

SEQ ID NO: 3709190 - DNA, 25 bp, Homo sapien
agttaacaccagagagcttcacgat

SEQ ID NO: 3709191 - DNA, 25 bp, Homo sapien
aacaccagagagcttcacgataacc

SEQ ID NO: 3709192 - DNA, 25 bp, Homo sapien
tacctgcaatggagacattacgctg

SEQ ID NO: 3709193 - DNA, 25 bp, Homo sapien
ccagatacctaatttccgtatgaaa

SEQ ID NO: 3709194 - DNA, 25 bp, Homo sapien
tgtctctacgagaatattggccctc

SEQ ID NO: 3709195 - DNA, 25 bp, Homo sapien
tgaggtacatgaggccttttaagga

SEQ ID NO: 3709196 - DNA, 25 bp, Homo sapien
gactagatagttgcacactttggac

SEQ ID NO: 3709197 - DNA, 25 bp, Homo sapien
gtatggtgatatggaaaaatggccc

SEQ ID NO: 3709198 - DNA, 25 bp, Homo sapien
gggtccatatcactgcttatccagg

SEQ ID NO: 3709199 - DNA, 25 bp, Homo sapien
aatttagatcacgtctcttgcaagg

SEQ ID NO: 3709200 - DNA, 25 bp, Homo sapien
tagcagtatcaaacgttctccaagc

SEQ ID NO: 3709201 - DNA, 25 bp, Homo sapien
tctgcttagcagtatcaaacgttct

SEQ ID NO: 3709202 - DNA, 25 bp, Homo sapien
ggttcttctctgcttagcagtatca

SEQ ID NO: 3709203 - DNA, 25 bp, Homo sapien
tggttcttctctgcttagcagtatc

SEQ ID NO: 3709204 - DNA, 25 bp, Homo sapien
cagagtgcagatagtaaaccctgga

SEQ ID NO: 3709205 - DNA, 25 bp, Homo sapien
gcagatagtaaaccctggaacagtg

SEQ ID NO: 3709206 - DNA, 25 bp, Homo sapien
ggaacagagtgcagatagtaaaccc

SEQ ID NO: 3709207 - DNA, 25 bp, Homo sapien
gagtgcagatagtaaaccctggaac

SEQ ID NO: 3709208 - DNA, 25 bp, Homo sapien
taatcagaatggattggcaggtggc

SEQ ID NO: 3709209 - DNA, 25 bp, Homo sapien
tgttatagaaaccagattcctccgg

SEQ ID NO: 3709210 - DNA, 25 bp, Homo sapien
gggaaatactgatgatcagtgctgg

SEQ ID NO: 3709211 - DNA, 25 bp, Homo sapien
tgcctgaatgggaattggtgtgaca

SEQ ID NO: 3709212 - DNA, 25 bp, Homo sapien
gcaaatctaaacaggcattgatccc

SEQ ID NO: 3709213 - DNA, 25 bp, Homo sapien
gaattccaaaagctccgtttctctg

SEQ ID NO: 3709214 - DNA, 25 bp, Homo sapien
caggcaagcaagcacagatttaaat

SEQ ID NO: 3709215 - DNA, 25 bp, Homo sapien
acagttccctgctgaaagaattcca

SEQ ID NO: 3709216 - DNA, 25 bp, Homo sapien
cagtagcagaggatgttgagctcaa

SEQ ID NO: 3709217 - DNA, 25 bp, Homo sapien
tctccagtagcagaggatgttgagc

SEQ ID NO: 3709218 - DNA, 25 bp, Homo sapien
agaggatgttgagctcaatcctcat

SEQ ID NO: 3709219 - DNA, 25 bp, Homo sapien
cagcatttgtttactgggtctccag

SEQ ID NO: 3709220 - DNA, 25 bp, Homo sapien
cagcatgttggatagaaaaagtaat

SEQ ID NO: 3709221 - DNA, 25 bp, Homo sapien
agcatgttggatagaaaaagtaatg

SEQ ID NO: 3709222 - DNA, 25 bp, Homo sapien
aagtaatggcggtttgaatccgaat

SEQ ID NO: 3709223 - DNA, 25 bp, Homo sapien
ccatccttttggtgagtagctgtgc

SEQ ID NO: 3709224 - DNA, 25 bp, Homo sapien
catccttttggtgagtagctgtgct

SEQ ID NO: 3709225 - DNA, 25 bp, Homo sapien
actgctgcctaatacaacacgttct

SEQ ID NO: 3709226 - DNA, 25 bp, Homo sapien
tctgtctccagtctggtcttgtggg

SEQ ID NO: 3709227 - DNA, 25 bp, Homo sapien
tgcttgtcccttgcctgtttactgc

SEQ ID NO: 3709228 - DNA, 25 bp, Homo sapien
agaaagcagggaggcttgttgctgc

SEQ ID NO: 3709229 - DNA, 25 bp, Homo sapien
gaagtagcagcatactgccagtggg

SEQ ID NO: 3709230 - DNA, 25 bp, Homo sapien
tctggatctctgaccggagtgtccc

SEQ ID NO: 3709231 - DNA, 25 bp, Homo sapien
tcattttcaggaccaggccatcttg

SEQ ID NO: 3709232 - DNA, 25 bp, Homo sapien
tatgtctggagatcctggagcacag

SEQ ID NO: 3709233 - DNA, 25 bp, Homo sapien
aaacacttctgaaccactgctgcgc

SEQ ID NO: 3709234 - DNA, 25 bp, Homo sapien
tgaaccactgctgcgcagcaagcat

SEQ ID NO: 3709235 - DNA, 25 bp, Homo sapien
acttctgaaccactgctgcgcagca

SEQ ID NO: 3709236 - DNA, 25 bp, Homo sapien
ctgctgcgcagcaagcatctctggc

SEQ ID NO: 3709237 - DNA, 25 bp, Homo sapien
agtggaaaacgtccccaagcctgct

SEQ ID NO: 3709238 - DNA, 25 bp, Homo sapien
ccatagccagcttcttgagtggaaa

SEQ ID NO: 3709239 - DNA, 25 bp, Homo sapien
gcttcttgagtggaaaacgtcccca

SEQ ID NO: 3709240 - DNA, 25 bp, Homo sapien
gctccccctgcagtggtgtctcttg

SEQ ID NO: 3709241 - DNA, 25 bp, Homo sapien
tggcataggaaccaggtctgtctga

SEQ ID NO: 3709242 - DNA, 25 bp, Homo sapien
ggcataggaaccaggtctgtctgac

SEQ ID NO: 3709243 - DNA, 25 bp, Homo sapien
gcataggaaccaggtctgtctgaca

SEQ ID NO: 3709244 - DNA, 25 bp, Homo sapien
ctagagatgagtagaaaaccctggc

SEQ ID NO: 3709245 - DNA, 25 bp, Homo sapien
tagagatgagtagaaaaccctggcc

SEQ ID NO: 3709246 - DNA, 25 bp, Homo sapien
gagatgagtagaaaaccctggcctt

SEQ ID NO: 3709247 - DNA, 25 bp, Homo sapien
gatgagtagaaaaccctggccttcc

SEQ ID NO: 3709248 - DNA, 25 bp, Homo sapien
tctcgagtgtgtggaaactttgcac

SEQ ID NO: 3709249 - DNA, 25 bp, Homo sapien
gaactcttctcgagtgtgtggaaac

SEQ ID NO: 3709250 - DNA, 25 bp, Homo sapien
agtgtgtggaaactttgcactgctc

SEQ ID NO: 3709251 - DNA, 25 bp, Homo sapien
cttgaactcttctcgagtgtgtgga

SEQ ID NO: 3709252 - DNA, 25 bp, Homo sapien
cggatacctgggtttatcagtgctc

SEQ ID NO: 3709253 - DNA, 25 bp, Homo sapien
tctgccggatacctgggtttatcag

SEQ ID NO: 3709254 - DNA, 25 bp, Homo sapien
tcacttctgccggatacctgggttt

SEQ ID NO: 3709255 - DNA, 25 bp, Homo sapien
gatacctgggtttatcagtgctctg

SEQ ID NO: 3709256 - DNA, 25 bp, Homo sapien
cttcacactgcttggctgtagccat

SEQ ID NO: 3709257 - DNA, 25 bp, Homo sapien
ttggctgtagccatctccttaattg

SEQ ID NO: 3709258 - DNA, 25 bp, Homo sapien
tagccatctccttaattgctaagag

SEQ ID NO: 3709259 - DNA, 25 bp, Homo sapien
cacttcacactgcttggctgtagcc

SEQ ID NO: 3709260 - DNA, 25 bp, Homo sapien
tgtctgccggcaacttctttcctga

SEQ ID NO: 3709261 - DNA, 25 bp, Homo sapien
gaaacagcaggatcattctggcaca

SEQ ID NO: 3709262 - DNA, 25 bp, Homo sapien
tggcaattctaagtaaatggctaaa

SEQ ID NO: 3709263 - DNA, 25 bp, Homo sapien
caaccagttggcagaaaaatgcctc

SEQ ID NO: 3709264 - DNA, 25 bp, Homo sapien
gcctagaccgcggtgccacagtacg

SEQ ID NO: 3709265 - DNA, 25 bp, Homo sapien
cgcggtgccacagtacggctctgca

SEQ ID NO: 3709266 - DNA, 25 bp, Homo sapien
accgcggtgccacagtacggctctg

SEQ ID NO: 3709267 - DNA, 25 bp, Homo sapien
agaagtgcctagaccgcggtgccac

SEQ ID NO: 3709268 - DNA, 25 bp, Homo sapien
ttttttttatcaggcccagcatcat

SEQ ID NO: 3709269 - DNA, 25 bp, Homo sapien
tatcaggcccagcatcattcgccat

SEQ ID NO: 3709270 - DNA, 25 bp, Homo sapien
aggccacatttatagaatgttttga

SEQ ID NO: 3709271 - DNA, 25 bp, Homo sapien
tgacttgggagactgcatttctgca

SEQ ID NO: 3709272 - DNA, 25 bp, Homo sapien
gcaaatgaagtatcctcaaaagctc

SEQ ID NO: 3709273 - DNA, 25 bp, Homo sapien
cattgacaagattacatagagaagc

SEQ ID NO: 3709274 - DNA, 25 bp, Homo sapien
aagctcctgtcagtcccaggagcag

SEQ ID NO: 3709275 - DNA, 25 bp, Homo sapien
ttcatcattatctagcttctccaca

SEQ ID NO: 3709276 - DNA, 25 bp, Homo sapien
taacttaacaacgagttcaatagca

SEQ ID NO: 3709277 - DNA, 25 bp, Homo sapien
aacttaacaacgagttcaatagcag

SEQ ID NO: 3709278 - DNA, 25 bp, Homo sapien
acttaacaacgagttcaatagcagg

SEQ ID NO: 3709279 - DNA, 25 bp, Homo sapien
ttcagcagatctgttactgccacct

SEQ ID NO: 3709280 - DNA, 25 bp, Homo sapien
ctattatcaacccataggtgtgcac

SEQ ID NO: 3709281 - DNA, 25 bp, Homo sapien
gcagatctgttactgccacctatta

SEQ ID NO: 3709282 - DNA, 25 bp, Homo sapien
gccacctattatcaacccataggtg

SEQ ID NO: 3709283 - DNA, 25 bp, Homo sapien
aaaccctggggtattctgcgtatgg

SEQ ID NO: 3709284 - DNA, 25 bp, Homo sapien
gggtattctgcgtatggtccagcag

SEQ ID NO: 3709285 - DNA, 25 bp, Homo sapien
tgcgtatggtccagcagacggcctg

SEQ ID NO: 3709286 - DNA, 25 bp, Homo sapien
tctgcgtatggtccagcagacggcc

SEQ ID NO: 3709287 - DNA, 25 bp, Homo sapien
ccaatgtccaagatacaatcagctt

SEQ ID NO: 3709288 - DNA, 25 bp, Homo sapien
tcttttcagagggacaaacaaagtg

SEQ ID NO: 3709289 - DNA, 25 bp, Homo sapien
caaacaaagtgtccctgctcaagac

SEQ ID NO: 3709290 - DNA, 25 bp, Homo sapien
ccacagttgcattagctttatcttc

SEQ ID NO: 3709291 - DNA, 25 bp, Homo sapien
agagggacaaacaaagtgtccctgc

SEQ ID NO: 3709292 - DNA, 25 bp, Homo sapien
ccaagacagcaaatcaatgtacttc

SEQ ID NO: 3709293 - DNA, 25 bp, Homo sapien
cgttgcagtactagaagaatgtggt

SEQ ID NO: 3709294 - DNA, 25 bp, Homo sapien
caatgtacttcagcaacccgtaggg

SEQ ID NO: 3709295 - DNA, 25 bp, Homo sapien
ctgcgttgcagtactagaagaatgt

SEQ ID NO: 3709296 - DNA, 25 bp, Homo sapien
agtcctcttgctgccacatccttac

SEQ ID NO: 3709297 - DNA, 25 bp, Homo sapien
ttagggtcatctggagggtcatact

SEQ ID NO: 3709298 - DNA, 25 bp, Homo sapien
actgaacaatccagttgacttcagg

SEQ ID NO: 3709299 - DNA, 25 bp, Homo sapien
tcacacaatgaatacattccttagg

SEQ ID NO: 3709300 - DNA, 25 bp, Homo sapien
tgtttcaagtagtgaaggaaaccca

SEQ ID NO: 3709301 - DNA, 25 bp, Homo sapien
caaggcatgccttcccccatttagg

SEQ ID NO: 3709302 - DNA, 25 bp, Homo sapien
gcaaaatgagcaaggcatgccttcc

SEQ ID NO: 3709303 - DNA, 25 bp, Homo sapien
gaaacccagttcttctgggtgcaaa

SEQ ID NO: 3709304 - DNA, 25 bp, Homo sapien
gagaataggaatcataagctcgtat

SEQ ID NO: 3709305 - DNA, 25 bp, Homo sapien
ggaatcataagctcgtatgtatgac

SEQ ID NO: 3709306 - DNA, 25 bp, Homo sapien
tcagagaataggaatcataagctcg

SEQ ID NO: 3709307 - DNA, 25 bp, Homo sapien
taggaatcataagctcgtatgtatg

SEQ ID NO: 3709308 - DNA, 25 bp, Homo sapien
caaagggaggcaacttgaagccaaa

SEQ ID NO: 3709309 - DNA, 25 bp, Homo sapien
tggtagccaaatcctccttgctttt

SEQ ID NO: 3709310 - DNA, 25 bp, Homo sapien
cattgctgttcatgttcagatcaac

SEQ ID NO: 3709311 - DNA, 25 bp, Homo sapien
gccttcattgctgttcatgttcaga

SEQ ID NO: 3709312 - DNA, 25 bp, Homo sapien
gcagatgactttttgctaatgtgtt

SEQ ID NO: 3709313 - DNA, 25 bp, Homo sapien
gcctgctgcagatgactttttgcta

SEQ ID NO: 3709314 - DNA, 25 bp, Homo sapien
gctgcagatgactttttgctaatgt

SEQ ID NO: 3709315 - DNA, 25 bp, Homo sapien
cctgctgcagatgactttttgctaa

SEQ ID NO: 3709316 - DNA, 25 bp, Homo sapien
ttgataattcctggtcccaagtgcc

SEQ ID NO: 3709317 - DNA, 25 bp, Homo sapien
atgaagacagtgattatggccacca

SEQ ID NO: 3709318 - DNA, 25 bp, Homo sapien
tgcagaatacacaccaggactgggt

SEQ ID NO: 3709319 - DNA, 25 bp, Homo sapien
gtctctgagctaacctggccttgat

SEQ ID NO: 3709320 - DNA, 25 bp, Homo sapien
aatattgaatatgactgcacagccc

SEQ ID NO: 3709321 - DNA, 25 bp, Homo sapien
taattctgtagcaggttaagggagt

SEQ ID NO: 3709322 - DNA, 25 bp, Homo sapien
gaatgtcttgtatgtgccaggtccg

SEQ ID NO: 3709323 - DNA, 25 bp, Homo sapien
gaggcagctggtaatcgttgattca

SEQ ID NO: 3709324 - DNA, 25 bp, Homo sapien
taagacagcgacaaatgctttccct

SEQ ID NO: 3709325 - DNA, 25 bp, Homo sapien
tgccatctgagattgcgacctgaaa

SEQ ID NO: 3709326 - DNA, 25 bp, Homo sapien
taaagcgggctctgcattatgacaa

SEQ ID NO: 3709327 - DNA, 25 bp, Homo sapien
tttccctgtggctgcgattaaagcg

SEQ ID NO: 3709328 - DNA, 25 bp, Homo sapien
tgccttgccgctccgacctcacaca

SEQ ID NO: 3709329 - DNA, 25 bp, Homo sapien
tctgcttgccttgccgctccgacct

SEQ ID NO: 3709330 - DNA, 25 bp, Homo sapien
ttgccttgccgctccgacctcacac

SEQ ID NO: 3709331 - DNA, 25 bp, Homo sapien
tgcttgccttgccgctccgacctca

SEQ ID NO: 3709332 - DNA, 25 bp, Homo sapien
taataaacgcatacagtcccctggg

SEQ ID NO: 3709333 - DNA, 25 bp, Homo sapien
agataataaacgcatacagtcccct

SEQ ID NO: 3709334 - DNA, 25 bp, Homo sapien
ggttctgccatttcatgcatccctt

SEQ ID NO: 3709335 - DNA, 25 bp, Homo sapien
agggctggtcataccccacagctgc

SEQ ID NO: 3709336 - DNA, 25 bp, Homo sapien
gaagaatgacgaggtgctacaggca

SEQ ID NO: 3709337 - DNA, 25 bp, Homo sapien
gcagaacagatgaacttggccaaga

SEQ ID NO: 3709338 - DNA, 25 bp, Homo sapien
ctgcgagtgtggaccaagggctgcc

SEQ ID NO: 3709339 - DNA, 25 bp, Homo sapien
ggctgcccgcccagtgtggaagaat

SEQ ID NO: 3709340 - DNA, 25 bp, Homo sapien
ctagaaatggtctcccatgtggtac

SEQ ID NO: 3709341 - DNA, 25 bp, Homo sapien
gtaacatctcctttgagatcagagc

SEQ ID NO: 3709342 - DNA, 25 bp, Homo sapien
ctgctgaagttctccctgcctttcc

SEQ ID NO: 3709343 - DNA, 25 bp, Homo sapien
aaaatagtaacatctcctttgagat

SEQ ID NO: 3709344 - DNA, 25 bp, Homo sapien
acaggtaccacatgggagaccattt

SEQ ID NO: 3709345 - DNA, 25 bp, Homo sapien
accacatgggagaccatttctggga

SEQ ID NO: 3709346 - DNA, 25 bp, Homo sapien
attcttccacactgggcgggcaggc

SEQ ID NO: 3709347 - DNA, 25 bp, Homo sapien
aggccttggtccacactcacaggta

SEQ ID NO: 3709348 - DNA, 25 bp, Homo sapien
ggagggaggacactacaccttctcc

SEQ ID NO: 3709349 - DNA, 25 bp, Homo sapien
gagggaggacactacaccttctccc

SEQ ID NO: 3709350 - DNA, 25 bp, Homo sapien
gggaggacactacaccttctccctc

SEQ ID NO: 3709351 - DNA, 25 bp, Homo sapien
agggaggacactacaccttctccct

SEQ ID NO: 3709352 - DNA, 25 bp, Homo sapien
cctatttgcacagtggcacaggaac

SEQ ID NO: 3709353 - DNA, 25 bp, Homo sapien
gaggcctgtgtcttaaggtccagag

SEQ ID NO: 3709354 - DNA, 25 bp, Homo sapien
tcaggacattggcagcctggtgccc

SEQ ID NO: 3709355 - DNA, 25 bp, Homo sapien
tgaggcctgtgtcttaaggtccaga

SEQ ID NO: 3709356 - DNA, 25 bp, Homo sapien
aaatgtcactggctttttcacataa

SEQ ID NO: 3709357 - DNA, 25 bp, Homo sapien
tgcctcctcttagctttaggaaaaa

SEQ ID NO: 3709358 - DNA, 25 bp, Homo sapien
ctcttagctttaggaaaaatgtcac

SEQ ID NO: 3709359 - DNA, 25 bp, Homo sapien
cttcaaataagtgagaagatactga

SEQ ID NO: 3709360 - DNA, 25 bp, Homo sapien
atgccactcatgcccatcaagcatg

SEQ ID NO: 3709361 - DNA, 25 bp, Homo sapien
ttattggataagcatcagggtctgt

SEQ ID NO: 3709362 - DNA, 25 bp, Homo sapien
ccatcaagcatgagctcagatcctc

SEQ ID NO: 3709363 - DNA, 25 bp, Homo sapien
tgtcctgacttgtgagcaccctgag

SEQ ID NO: 3709364 - DNA, 25 bp, Homo sapien
tcaaccatacagatatgactgactt

SEQ ID NO: 3709365 - DNA, 25 bp, Homo sapien
accatacagatatgactgacttctc

SEQ ID NO: 3709366 - DNA, 25 bp, Homo sapien
agtctcattaccacctgtgtgcaga

SEQ ID NO: 3709367 - DNA, 25 bp, Homo sapien
gtctcattaccacctgtgtgcagac

SEQ ID NO: 3709368 - DNA, 25 bp, Homo sapien
tttccttgcaagattcagcacagta

SEQ ID NO: 3709369 - DNA, 25 bp, Homo sapien
gcacagtagggacacttagcaaaga

SEQ ID NO: 3709370 - DNA, 25 bp, Homo sapien
tgaaaatgccaaaggggtagtctat

SEQ ID NO: 3709371 - DNA, 25 bp, Homo sapien
ttcagcacagtagggacacttagca

SEQ ID NO: 3709372 - DNA, 25 bp, Homo sapien
tacgctgggaagtttagggcgccaa

SEQ ID NO: 3709373 - DNA, 25 bp, Homo sapien
caattggagttgctcgtatcgcctc

SEQ ID NO: 3709374 - DNA, 25 bp, Homo sapien
caagactggtgtagctcagggaaac

SEQ ID NO: 3709375 - DNA, 25 bp, Homo sapien
tgcagccacggtaagaggagctcct

SEQ ID NO: 3709376 - DNA, 25 bp, Homo sapien
tcccgaggcctagaattctctcctt

SEQ ID NO: 3709377 - DNA, 25 bp, Homo sapien
tcctttaggccggattccgcagtgc

SEQ ID NO: 3709378 - DNA, 25 bp, Homo sapien
ctttctcttcccgaggcctagaatt

SEQ ID NO: 3709379 - DNA, 25 bp, Homo sapien
gccggattccgcagtgcagcaggaa

SEQ ID NO: 3709380 - DNA, 25 bp, Homo sapien
ctgatctgtggattccttaaagagg

SEQ ID NO: 3709381 - DNA, 25 bp, Homo sapien
gctgtaagactaatattgcctccga

SEQ ID NO: 3709382 - DNA, 25 bp, Homo sapien
tattgcctccgagtgtctgcagctc

SEQ ID NO: 3709383 - DNA, 25 bp, Homo sapien
taaagaggagtctgcttttaacaga

SEQ ID NO: 3709384 - DNA, 25 bp, Homo sapien
ctcaggccggagacttcgaatcgta

SEQ ID NO: 3709385 - DNA, 25 bp, Homo sapien
tgtagtggcccgaccttggcaagga

SEQ ID NO: 3709386 - DNA, 25 bp, Homo sapien
ggcaaggagaaattcgaaacttctc

SEQ ID NO: 3709387 - DNA, 25 bp, Homo sapien
acttcgaatcgtacagcctctgagg

SEQ ID NO: 3709388 - DNA, 25 bp, Homo sapien
gggcacggcccacggcggtgcccag

SEQ ID NO: 3709389 - DNA, 25 bp, Homo sapien
cgggcacggcccacggcggtgccca

SEQ ID NO: 3709390 - DNA, 25 bp, Homo sapien
agcgtcctgccgggcacggcccacg

SEQ ID NO: 3709391 - DNA, 25 bp, Homo sapien
tcctgccgggcacggcccacggcgg

SEQ ID NO: 3709392 - DNA, 25 bp, Homo sapien
cgcactccctgattggacacaaact

SEQ ID NO: 3709393 - DNA, 25 bp, Homo sapien
gcccgcactccctgattggacacaa

SEQ ID NO: 3709394 - DNA, 25 bp, Homo sapien
acagcccgcactccctgattggaca

SEQ ID NO: 3709395 - DNA, 25 bp, Homo sapien
actccctgattggacacaaactggg

SEQ ID NO: 3709396 - DNA, 25 bp, Homo sapien
gcgtggggcggtaggtgagggagcc

SEQ ID NO: 3709397 - DNA, 25 bp, Homo sapien
ctcgagaggccacgatccgggcggg

SEQ ID NO: 3709398 - DNA, 25 bp, Homo sapien
agaggccacgatccgggcgggccgc

SEQ ID NO: 3709399 - DNA, 25 bp, Homo sapien
tcgagaggccacgatccgggcgggc

SEQ ID NO: 3709400 - DNA, 25 bp, Homo sapien
tcagcttcttcgaacacatttcatg

SEQ ID NO: 3709401 - DNA, 25 bp, Homo sapien
tcttcgaacacatttcatggtctcc

SEQ ID NO: 3709402 - DNA, 25 bp, Homo sapien
ttcgaacacatttcatggtctccct

SEQ ID NO: 3709403 - DNA, 25 bp, Homo sapien
gcttcttcgaacacatttcatggtc

SEQ ID NO: 3709404 - DNA, 25 bp, Homo sapien
tccctgccactcgcggaaggccacc

SEQ ID NO: 3709405 - DNA, 25 bp, Homo sapien
cctgccactcgcggaaggccaccgc

SEQ ID NO: 3709406 - DNA, 25 bp, Homo sapien
gcgcggagggcgtacaggtgggtcc

SEQ ID NO: 3709407 - DNA, 25 bp, Homo sapien
tgccactcgcggaaggccaccgcgc

SEQ ID NO: 3709408 - DNA, 25 bp, Homo sapien
tattaaacaaatgtttcaaagtaca

SEQ ID NO: 3709409 - DNA, 25 bp, Homo sapien
ccgggtgtactatgacggccgcaca

SEQ ID NO: 3709410 - DNA, 25 bp, Homo sapien
ctatgacggccgcacacgcagcttt

SEQ ID NO: 3709411 - DNA, 25 bp, Homo sapien
gagctcacggccacacgttccgggt

SEQ ID NO: 3709412 - DNA, 25 bp, Homo sapien
cggccacacgttccgggtgtactat

SEQ ID NO: 3709413 - DNA, 25 bp, Homo sapien
cccgcatgaatcatcggggcccggt

SEQ ID NO: 3709414 - DNA, 25 bp, Homo sapien
gtccgcggggcgatgattcattcac

SEQ ID NO: 3709415 - DNA, 25 bp, Homo sapien
cgcatgaatcatcggggcccggtcc

SEQ ID NO: 3709416 - DNA, 25 bp, Homo sapien
cccggtccgcggggcgatgattcat

SEQ ID NO: 3709417 - DNA, 25 bp, Homo sapien
taatggctctcatccatctagatgg

SEQ ID NO: 3709418 - DNA, 25 bp, Homo sapien
tagatggtccatagccacatacaag

SEQ ID NO: 3709419 - DNA, 25 bp, Homo sapien
cttgcaggtgctttactagtgtccc

SEQ ID NO: 3709420 - DNA, 25 bp, Homo sapien
tattgattgcagactacttgcaggt

SEQ ID NO: 3709421 - DNA, 25 bp, Homo sapien
gagagcctagtgtattaattgccct

SEQ ID NO: 3709422 - DNA, 25 bp, Homo sapien
aaactggtgtgaactagcactgccc

SEQ ID NO: 3709423 - DNA, 25 bp, Homo sapien
actgccctgggcaattgcatgtatg

SEQ ID NO: 3709424 - DNA, 25 bp, Homo sapien
tatcctatctctcctgcttgaggag

SEQ ID NO: 3709425 - DNA, 25 bp, Homo sapien
caaattctaatctgaagtcccatga

SEQ ID NO: 3709426 - DNA, 25 bp, Homo sapien
tcaaaaccagagattgccaccaaag

SEQ ID NO: 3709427 - DNA, 25 bp, Homo sapien
taaacacatgcgttccatccaccaa

SEQ ID NO: 3709428 - DNA, 25 bp, Homo sapien
tgcaggagagactgacagtaaacac

SEQ ID NO: 3709429 - DNA, 25 bp, Homo sapien
acctggtcacaatgctaataaaatg

SEQ ID NO: 3709430 - DNA, 25 bp, Homo sapien
aatgcaaggcttggatataatcctg

SEQ ID NO: 3709431 - DNA, 25 bp, Homo sapien
ttggatataatcctggacagtgtag

SEQ ID NO: 3709432 - DNA, 25 bp, Homo sapien
cacaatgctaataaaatgcaaggct

SEQ ID NO: 3709433 - DNA, 25 bp, Homo sapien
tgtcttaagtgctccaagaaaacgc

SEQ ID NO: 3709434 - DNA, 25 bp, Homo sapien
caaagccctgctgaatgggttagtc

SEQ ID NO: 3709435 - DNA, 25 bp, Homo sapien
tttattttaactcagcaggatggca

SEQ ID NO: 3709436 - DNA, 25 bp, Homo sapien
gagaattacatgatccttggctggt

SEQ ID NO: 3709437 - DNA, 25 bp, Homo sapien
ggaaatgcagccaagtgtactctcc

SEQ ID NO: 3709438 - DNA, 25 bp, Homo sapien
gaggctccatgcaggctttccctat

SEQ ID NO: 3709439 - DNA, 25 bp, Homo sapien
gttgcataatgaagggaccactgtg

SEQ ID NO: 3709440 - DNA, 25 bp, Homo sapien
tctcctaagtgcactgaggctccat

SEQ ID NO: 3709441 - DNA, 25 bp, Homo sapien
tatttcccatggtcccagaaaccag

SEQ ID NO: 3709442 - DNA, 25 bp, Homo sapien
tgaaacctaccaatggcagaaagct

SEQ ID NO: 3709443 - DNA, 25 bp, Homo sapien
tggccagagtgccaacaacaatctg

SEQ ID NO: 3709444 - DNA, 25 bp, Homo sapien
gcatgagtgtgaggccagcattcct

SEQ ID NO: 3709445 - DNA, 25 bp, Homo sapien
tgcagatcaggtccgatagtaaatg

SEQ ID NO: 3709446 - DNA, 25 bp, Homo sapien
ttatgcagatcaggtccgatagtaa

SEQ ID NO: 3709447 - DNA, 25 bp, Homo sapien
ctgacgtttcacatttatgcagatc

SEQ ID NO: 3709448 - DNA, 25 bp, Homo sapien
gttttgggtcagtactgacgtttca

SEQ ID NO: 3709449 - DNA, 25 bp, Homo sapien
tgtttgtcgtgctcctctaccagtg

SEQ ID NO: 3709450 - DNA, 25 bp, Homo sapien
ttcctcagacccaatgcaatcatca

SEQ ID NO: 3709451 - DNA, 25 bp, Homo sapien
ctttagccttttggccgttcatctg

SEQ ID NO: 3709452 - DNA, 25 bp, Homo sapien
catattttatctgcagttctttagc

SEQ ID NO: 3709453 - DNA, 25 bp, Homo sapien
gggacaaagccatcccttgatttgc

SEQ ID NO: 3709454 - DNA, 25 bp, Homo sapien
cccttgatttgcaccttatctgaaa

SEQ ID NO: 3709455 - DNA, 25 bp, Homo sapien
ctgacaaacttgttactgtagtgtg

SEQ ID NO: 3709456 - DNA, 25 bp, Homo sapien
tctgtcccacctgcgccgaagtggg

SEQ ID NO: 3709457 - DNA, 25 bp, Homo sapien
gcctgcgctgctcgcaggtgcagct

SEQ ID NO: 3709458 - DNA, 25 bp, Homo sapien
gctccctgtgctacacgtagctctg

SEQ ID NO: 3709459 - DNA, 25 bp, Homo sapien
ttatctcggttcttcttatcctcac

SEQ ID NO: 3709460 - DNA, 25 bp, Homo sapien
tagctctggccaaatattatctcgg

SEQ ID NO: 3709461 - DNA, 25 bp, Homo sapien
tgaggcatgagaactagcatccaga

SEQ ID NO: 3709462 - DNA, 25 bp, Homo sapien
taagtagatgaaagtctgatcccag

SEQ ID NO: 3709463 - DNA, 25 bp, Homo sapien
tcatgagatcgttgatcatcactcc

SEQ ID NO: 3709464 - DNA, 25 bp, Homo sapien
tcccagtaggatgtcctgaggcatg

SEQ ID NO: 3709465 - DNA, 25 bp, Homo sapien
tcgtggctagtgaagactggcttta

SEQ ID NO: 3709466 - DNA, 25 bp, Homo sapien
gctttagtagtctgggcaaagaggg

SEQ ID NO: 3709467 - DNA, 25 bp, Homo sapien
aagactggctttagtagtctgggca

SEQ ID NO: 3709468 - DNA, 25 bp, Homo sapien
ctggctttagtagtctgggcaaaga

SEQ ID NO: 3709469 - DNA, 25 bp, Homo sapien
tgttgttggcttgatcagataccct

SEQ ID NO: 3709470 - DNA, 25 bp, Homo sapien
gatatagcaggtaatgtaaggatta

SEQ ID NO: 3709471 - DNA, 25 bp, Homo sapien
gaggcattccgtcactgttgttggc

SEQ ID NO: 3709472 - DNA, 25 bp, Homo sapien
ccaagtgtttcctttgggtagccat

SEQ ID NO: 3709473 - DNA, 25 bp, Homo sapien
ggccaagtgtatttccatctcaagg

SEQ ID NO: 3709474 - DNA, 25 bp, Homo sapien
taactctagggtagccaattggttc

SEQ ID NO: 3709475 - DNA, 25 bp, Homo sapien
catgcttggtgaaacgggaaacgga

SEQ ID NO: 3709476 - DNA, 25 bp, Homo sapien
tatatccacagagtccttcagtccc

SEQ ID NO: 3709477 - DNA, 25 bp, Homo sapien
tgagtctccataaaacctagcgttt

SEQ ID NO: 3709478 - DNA, 25 bp, Homo sapien
tgtatatgcctaagtcaagatctaa

SEQ ID NO: 3709479 - DNA, 25 bp, Homo sapien
ccagagagtccagaagggcaggttc

SEQ ID NO: 3709480 - DNA, 25 bp, Homo sapien
gagttgaaacccaggatatcaccac

SEQ ID NO: 3709481 - DNA, 25 bp, Homo sapien
gctcaatagtgtatacatttcacat

SEQ ID NO: 3709482 - DNA, 25 bp, Homo sapien
taaagatttgagaggcctcagcaca

SEQ ID NO: 3709483 - DNA, 25 bp, Homo sapien
ataaagatttgagaggcctcagcac

SEQ ID NO: 3709484 - DNA, 25 bp, Homo sapien
cttcttggcatataagtttgctcaa

SEQ ID NO: 3709485 - DNA, 25 bp, Homo sapien
tcaggacatccaagtggacatccag

SEQ ID NO: 3709486 - DNA, 25 bp, Homo sapien
caagtggacatccagtaggattctg

SEQ ID NO: 3709487 - DNA, 25 bp, Homo sapien
gtggacatccagtaggattctgcag

SEQ ID NO: 3709488 - DNA, 25 bp, Homo sapien
ggacatccaagtggacatccagtag

SEQ ID NO: 3709489 - DNA, 25 bp, Homo sapien
tctgcaggtggtagggcacatctta

SEQ ID NO: 3709490 - DNA, 25 bp, Homo sapien
tcttgcttggataactgagtgctgg

SEQ ID NO: 3709491 - DNA, 25 bp, Homo sapien
gatgggtaactgctagctgggcaca

SEQ ID NO: 3709492 - DNA, 25 bp, Homo sapien
gagaccagcaggactttgcccagtt

SEQ ID NO: 3709493 - DNA, 25 bp, Homo sapien
tcaatttctagtccccagtccagag

SEQ ID NO: 3709494 - DNA, 25 bp, Homo sapien
gagacagaacatcccttaatctagg

SEQ ID NO: 3709495 - DNA, 25 bp, Homo sapien
gatgcctatgtagatcctaggagac

SEQ ID NO: 3709496 - DNA, 25 bp, Homo sapien
gcctctgaccacaaaagggttaaga

SEQ ID NO: 3709497 - DNA, 25 bp, Homo sapien
tatattgaacccttgtgctagactc

SEQ ID NO: 3709498 - DNA, 25 bp, Homo sapien
tagtgtccactatgacgttttgctc

SEQ ID NO: 3709499 - DNA, 25 bp, Homo sapien
gaaaatatagctttgcgccctggct

SEQ ID NO: 3709500 - DNA, 25 bp, Homo sapien
gatgacaccaagattaagacctata

SEQ ID NO: 3709501 - DNA, 25 bp, Homo sapien
agtcataagtccaactcccaaatgg

SEQ ID NO: 3709502 - DNA, 25 bp, Homo sapien
caggtctgctttcgacatagtagtc

SEQ ID NO: 3709503 - DNA, 25 bp, Homo sapien
gatgcatatgctgatcattccagga

SEQ ID NO: 3709504 - DNA, 25 bp, Homo sapien
ccttttagtggtacctcagggctca

SEQ ID NO: 3709505 - DNA, 25 bp, Homo sapien
ggatcttagactgagcaagccagca

SEQ ID NO: 3709506 - DNA, 25 bp, Homo sapien
gacccctaggtcatagaggctggta

SEQ ID NO: 3709507 - DNA, 25 bp, Homo sapien
ggttaccctacttctgtaggctggc

SEQ ID NO: 3709508 - DNA, 25 bp, Homo sapien
gcttgtagagtcgagtgggacccct

SEQ ID NO: 3709509 - DNA, 25 bp, Homo sapien
cttgaacagggttaggaaagagtct

SEQ ID NO: 3709510 - DNA, 25 bp, Homo sapien
ttgaacagggttaggaaagagtctg

SEQ ID NO: 3709511 - DNA, 25 bp, Homo sapien
cttgcttgaacagggttaggaaaga

SEQ ID NO: 3709512 - DNA, 25 bp, Homo sapien
tgcttgaacagggttaggaaagagt

SEQ ID NO: 3709513 - DNA, 25 bp, Homo sapien
ggttgccacaccttgggcaatcatt

SEQ ID NO: 3709514 - DNA, 25 bp, Homo sapien
tcatgaacttggttgccacaccttg

SEQ ID NO: 3709515 - DNA, 25 bp, Homo sapien
agtgctgaacaatacaagtcttaca

SEQ ID NO: 3709516 - DNA, 25 bp, Homo sapien
caccttgggcaatcattgctatctt

SEQ ID NO: 3709517 - DNA, 25 bp, Homo sapien
tataatttcctctaatgtattgtcc

SEQ ID NO: 3709518 - DNA, 25 bp, Homo sapien
tagtccagggaccagcttaaatata

SEQ ID NO: 3709519 - DNA, 25 bp, Homo sapien
tccagggaccagcttaaatataatt

SEQ ID NO: 3709520 - DNA, 25 bp, Homo sapien
aatttcctctaatgtattgtccaac

SEQ ID NO: 3709521 - DNA, 25 bp, Homo sapien
tttcttgaggcttatttttcttcca

SEQ ID NO: 3709522 - DNA, 25 bp, Homo sapien
tttcttccaaaattcagattcacgc

SEQ ID NO: 3709523 - DNA, 25 bp, Homo sapien
cttgtccattttcttgaggcttatt

SEQ ID NO: 3709524 - DNA, 25 bp, Homo sapien
ccaaaattcagattcacgctcaagt

SEQ ID NO: 3709525 - DNA, 25 bp, Homo sapien
ctactttcggtttgtcagcttttga

SEQ ID NO: 3709526 - DNA, 25 bp, Homo sapien
gatagcaatttgtgggtcacttctg

SEQ ID NO: 3709527 - DNA, 25 bp, Homo sapien
ccctgattgcccattatttcgtaaa

SEQ ID NO: 3709528 - DNA, 25 bp, Homo sapien
tatttcgtaaacaatctagacagat

SEQ ID NO: 3709529 - DNA, 25 bp, Homo sapien
cagttcagttgtgggaatagtaacc

SEQ ID NO: 3709530 - DNA, 25 bp, Homo sapien
tagctctgacatggaaatcttgttg

SEQ ID NO: 3709531 - DNA, 25 bp, Homo sapien
gaggtgtgattctgggcattagcca

SEQ ID NO: 3709532 - DNA, 25 bp, Homo sapien
tctctaagtctaagttggtcaccac

SEQ ID NO: 3709533 - DNA, 25 bp, Homo sapien
tgaggagccatagggttcaacagag

SEQ ID NO: 3709534 - DNA, 25 bp, Homo sapien
gggacacccaagctgaaaatgaagt

SEQ ID NO: 3709535 - DNA, 25 bp, Homo sapien
cacagcatgccccagaaattagaag

SEQ ID NO: 3709536 - DNA, 25 bp, Homo sapien
tataagaaccaatccagaagggaca

SEQ ID NO: 3709537 - DNA, 25 bp, Homo sapien
ttaatagttcccacagttacacgtg

SEQ ID NO: 3709538 - DNA, 25 bp, Homo sapien
tagttcccacagttacacgtgtaga

SEQ ID NO: 3709539 - DNA, 25 bp, Homo sapien
cacagttacacgtgtagaacatcga

SEQ ID NO: 3709540 - DNA, 25 bp, Homo sapien
cacgtgtagaacatcgaatgaattt

SEQ ID NO: 3709541 - DNA, 25 bp, Homo sapien
aataagctcaggatcagcggcttcc

SEQ ID NO: 3709542 - DNA, 25 bp, Homo sapien
taatacaaacgttgatgtctctaga

SEQ ID NO: 3709543 - DNA, 25 bp, Homo sapien
caattttcaacccatagactagtca

SEQ ID NO: 3709544 - DNA, 25 bp, Homo sapien
ccatacatggtattttgcgtgaaga

SEQ ID NO: 3709545 - DNA, 25 bp, Homo sapien
tcatgtctcttagaggtttaaggca

SEQ ID NO: 3709546 - DNA, 25 bp, Homo sapien
ttaaggcatagttctgtgactgccc

SEQ ID NO: 3709547 - DNA, 25 bp, Homo sapien
gcaatgtaacctttcttagtccaaa

SEQ ID NO: 3709548 - DNA, 25 bp, Homo sapien
tttcttagtccaaatctctgtcatg

SEQ ID NO: 3709549 - DNA, 25 bp, Homo sapien
tccatagtatgatccttccccataa

SEQ ID NO: 3709550 - DNA, 25 bp, Homo sapien
tcttagtcgccatcttgtcatgtag

SEQ ID NO: 3709551 - DNA, 25 bp, Homo sapien
gttttcgcctcttagtcgccatctt

SEQ ID NO: 3709552 - DNA, 25 bp, Homo sapien
ttccatagtatgatccttccccata

SEQ ID NO: 3709553 - DNA, 25 bp, Homo sapien
tctcccatatgcttagggcctaagg

SEQ ID NO: 3709554 - DNA, 25 bp, Homo sapien
taatatcccatgcttgaacctaagt

SEQ ID NO: 3709555 - DNA, 25 bp, Homo sapien
tatgagtcctacaatccctagtacc

SEQ ID NO: 3709556 - DNA, 25 bp, Homo sapien
gggcctaaggcacaataatctaatt

SEQ ID NO: 3709557 - DNA, 25 bp, Homo sapien
gagagcagacttgcgaagctgagca

SEQ ID NO: 3709558 - DNA, 25 bp, Homo sapien
ctgatacaaagggccatcctgagag

SEQ ID NO: 3709559 - DNA, 25 bp, Homo sapien
aagctgagcagttcagacaccgaaa

SEQ ID NO: 3709560 - DNA, 25 bp, Homo sapien
gcagacttgcgaagctgagcagttc

SEQ ID NO: 3709561 - DNA, 25 bp, Homo sapien
tatgtacagtcgtgagtgcctctta

SEQ ID NO: 3709562 - DNA, 25 bp, Homo sapien
catatgtacagtcgtgagtgcctct

SEQ ID NO: 3709563 - DNA, 25 bp, Homo sapien
tggtcatatgtacagtcgtgagtgc

SEQ ID NO: 3709564 - DNA, 25 bp, Homo sapien
tcatatgtacagtcgtgagtgcctc

SEQ ID NO: 3709565 - DNA, 25 bp, Homo sapien
acgtgaaaggccatccccactctga

SEQ ID NO: 3709566 - DNA, 25 bp, Homo sapien
tacaacgtgaaaggccatccccact

SEQ ID NO: 3709567 - DNA, 25 bp, Homo sapien
taggtacaacgtgaaaggccatccc

SEQ ID NO: 3709568 - DNA, 25 bp, Homo sapien
tttaggtacaacgtgaaaggccatc

SEQ ID NO: 3709569 - DNA, 25 bp, Homo sapien
caattcttggtcgatactgcagtac

SEQ ID NO: 3709570 - DNA, 25 bp, Homo sapien
ggtcgatactgcagtaccatagggt

SEQ ID NO: 3709571 - DNA, 25 bp, Homo sapien
gatactgcagtaccatagggtatga

SEQ ID NO: 3709572 - DNA, 25 bp, Homo sapien
ctaaccgaaatcaattcttggtcga

SEQ ID NO: 3709573 - DNA, 25 bp, Homo sapien
tgacgtttcatgaagcagcacctgc

SEQ ID NO: 3709574 - DNA, 25 bp, Homo sapien
tttcaatctggagggctaacatgcc

SEQ ID NO: 3709575 - DNA, 25 bp, Homo sapien
ttggtagactacacggacagatgct

SEQ ID NO: 3709576 - DNA, 25 bp, Homo sapien
gaatcatggcggcacagctaactga

SEQ ID NO: 3709577 - DNA, 25 bp, Homo sapien
tgcctccatgaaataaaaaccctct

SEQ ID NO: 3709578 - DNA, 25 bp, Homo sapien
tgttaaaaccgtctctccaacatgg

SEQ ID NO: 3709579 - DNA, 25 bp, Homo sapien
gcactttagtaatgaggcactttct

SEQ ID NO: 3709580 - DNA, 25 bp, Homo sapien
gaaaagcctgcatttgactgatctc

SEQ ID NO: 3709581 - DNA, 25 bp, Homo sapien
gatgtacatgcttgttctgtgaccc

SEQ ID NO: 3709582 - DNA, 25 bp, Homo sapien
tttaaggtagcccatagcatgagtt

SEQ ID NO: 3709583 - DNA, 25 bp, Homo sapien
cttgatgtacatgcttgttctgtga

SEQ ID NO: 3709584 - DNA, 25 bp, Homo sapien
cccatagcatgagttcccaaggaga

SEQ ID NO: 3709585 - DNA, 25 bp, Homo sapien
ggagttttacctagtgacctatcag

SEQ ID NO: 3709586 - DNA, 25 bp, Homo sapien
ttaatgtgtagaactcctgctccag

SEQ ID NO: 3709587 - DNA, 25 bp, Homo sapien
accaaacaatgctaggctgatccca

SEQ ID NO: 3709588 - DNA, 25 bp, Homo sapien
tcgtggaccacagcttcataaggac

SEQ ID NO: 3709589 - DNA, 25 bp, Homo sapien
tatcttgtactgattaaatatctac

SEQ ID NO: 3709590 - DNA, 25 bp, Homo sapien
cattccatagatcaacagaaaatac

SEQ ID NO: 3709591 - DNA, 25 bp, Homo sapien
aaaaagtatctagcccaacagtaca

SEQ ID NO: 3709592 - DNA, 25 bp, Homo sapien
agctttgtacagaacattccataga

SEQ ID NO: 3709593 - DNA, 25 bp, Homo sapien
ttttaatgaaggctgcaatctacag

SEQ ID NO: 3709594 - DNA, 25 bp, Homo sapien
ggctgcaatctacagtgactaatat

SEQ ID NO: 3709595 - DNA, 25 bp, Homo sapien
caatctacagtgactaatattaaag

SEQ ID NO: 3709596 - DNA, 25 bp, Homo sapien
aatgaaggctgcaatctacagtgac

SEQ ID NO: 3709597 - DNA, 25 bp, Homo sapien
gcagagtgactcccaagcttctcat

SEQ ID NO: 3709598 - DNA, 25 bp, Homo sapien
agcagagtgactcccaagcttctca

SEQ ID NO: 3709599 - DNA, 25 bp, Homo sapien
ggcttcctaagaggatcaaaagttc

SEQ ID NO: 3709600 - DNA, 25 bp, Homo sapien
tgcaggaacaggtctttttagggag

SEQ ID NO: 3709601 - DNA, 25 bp, Homo sapien
gaggagcaaggcactatatgcagaa

SEQ ID NO: 3709602 - DNA, 25 bp, Homo sapien
agaaacagagcttgtaggaggagca

SEQ ID NO: 3709603 - DNA, 25 bp, Homo sapien
tataggaggagcagaacttcacagg

SEQ ID NO: 3709604 - DNA, 25 bp, Homo sapien
agaaagaggactttgtgaggaagaa

SEQ ID NO: 3709605 - DNA, 25 bp, Homo sapien
caagttttgtaaaatggagcagggc

SEQ ID NO: 3709606 - DNA, 25 bp, Homo sapien
gaaggagcaggactgtatgacagca

SEQ ID NO: 3709607 - DNA, 25 bp, Homo sapien
atgtgtgtgtgaagtgagtggaaat

SEQ ID NO: 3709608 - DNA, 25 bp, Homo sapien
tatgtgtgtgtgaagtgagtggaaa

SEQ ID NO: 3709609 - DNA, 25 bp, Homo sapien
ctgtatgtgtgtgtgaagtgagtgg

SEQ ID NO: 3709610 - DNA, 25 bp, Homo sapien
ttcccactgtatgtgtgtgtgaagt

SEQ ID NO: 3709611 - DNA, 25 bp, Homo sapien
gaagcatttactgaaggatccaagc

SEQ ID NO: 3709612 - DNA, 25 bp, Homo sapien
aggttggaagcatttactgaaggat

SEQ ID NO: 3709613 - DNA, 25 bp, Homo sapien
tgggccttattagagaggtctggct

SEQ ID NO: 3709614 - DNA, 25 bp, Homo sapien
cccttgggccttattagagaggtct

SEQ ID NO: 3709615 - DNA, 25 bp, Homo sapien
tggtgcgtcggacagagcttcactc

SEQ ID NO: 3709616 - DNA, 25 bp, Homo sapien
agatttggcccatggtgcgtcggac

SEQ ID NO: 3709617 - DNA, 25 bp, Homo sapien
cagaacagctggcaccgactccgtg

SEQ ID NO: 3709618 - DNA, 25 bp, Homo sapien
tctgcatttagatcagcagcagatt

SEQ ID NO: 3709619 - DNA, 25 bp, Homo sapien
gaatgacgctggtgttcttcccctg

SEQ ID NO: 3709620 - DNA, 25 bp, Homo sapien
gtgtgatccccagagaatgacgctg

SEQ ID NO: 3709621 - DNA, 25 bp, Homo sapien
tccccagagaatgacgctggtgttc

SEQ ID NO: 3709622 - DNA, 25 bp, Homo sapien
caggctcccaggttacctggaccca

SEQ ID NO: 3709623 - DNA, 25 bp, Homo sapien
cagcccacgggtctttgagattatg

SEQ ID NO: 3709624 - DNA, 25 bp, Homo sapien
gtgcatcatagtccccaaactctag

SEQ ID NO: 3709625 - DNA, 25 bp, Homo sapien
tgtgcattcctgagcggctgtatgt

SEQ ID NO: 3709626 - DNA, 25 bp, Homo sapien
ttccactcgcgaagaaaaggcaaga

SEQ ID NO: 3709627 - DNA, 25 bp, Homo sapien
tgtccacaacatgaaacccctaagt

SEQ ID NO: 3709628 - DNA, 25 bp, Homo sapien
tatgacccctgcagtagcctgttga

SEQ ID NO: 3709629 - DNA, 25 bp, Homo sapien
tctggtccaggcgatatgactgaca

SEQ ID NO: 3709630 - DNA, 25 bp, Homo sapien
taactgtaagatgcaagaaatgagg

SEQ ID NO: 3709631 - DNA, 25 bp, Homo sapien
caaagaaccactgcgggctgatggc

SEQ ID NO: 3709632 - DNA, 25 bp, Homo sapien
ggcaaagaaccactgcgggctgatg

SEQ ID NO: 3709633 - DNA, 25 bp, Homo sapien
aaggcaaagaaccactgcgggctga

SEQ ID NO: 3709634 - DNA, 25 bp, Homo sapien
aaccactgcgggctgatggcgccct

SEQ ID NO: 3709635 - DNA, 25 bp, Homo sapien
gaagtgggttgcagctctcgttacc

SEQ ID NO: 3709636 - DNA, 25 bp, Homo sapien
tcattcgagttggtgacccagggcc

SEQ ID NO: 3709637 - DNA, 25 bp, Homo sapien
acattcaagcactgcgagcggtcca

SEQ ID NO: 3709638 - DNA, 25 bp, Homo sapien
tatgaggcggaggtgcttatcccag

SEQ ID NO: 3709639 - DNA, 25 bp, Homo sapien
cactggtatcccacgaataatacca

SEQ ID NO: 3709640 - DNA, 25 bp, Homo sapien
gtttcctatcactggtatcccacga

SEQ ID NO: 3709641 - DNA, 25 bp, Homo sapien
ctccatttcttgtaaccaaatatgg

SEQ ID NO: 3709642 - DNA, 25 bp, Homo sapien
gtatcccacgaataataccattccc

SEQ ID NO: 3709643 - DNA, 25 bp, Homo sapien
tacatcggcctgagggcagatgagt

SEQ ID NO: 3709644 - DNA, 25 bp, Homo sapien
aggccttccccttgtatgtgtgggc

SEQ ID NO: 3709645 - DNA, 25 bp, Homo sapien
agctactgattgtacatcggcctga

SEQ ID NO: 3709646 - DNA, 25 bp, Homo sapien
gccttccccttgtatgtgtgggcct

SEQ ID NO: 3709647 - DNA, 25 bp, Homo sapien
gagagtaatactgtggcacaattgt

SEQ ID NO: 3709648 - DNA, 25 bp, Homo sapien
gccaaatatcttgtggacacattcc

SEQ ID NO: 3709649 - DNA, 25 bp, Homo sapien
ttgtaatagttggtggaactaccat

SEQ ID NO: 3709650 - DNA, 25 bp, Homo sapien
cagagagtaatactgtggcacaatt

SEQ ID NO: 3709651 - DNA, 25 bp, Homo sapien
gaagagtctctcgattatgggaaga

SEQ ID NO: 3709652 - DNA, 25 bp, Homo sapien
cagggaacagaatagtcatgataca

SEQ ID NO: 3709653 - DNA, 25 bp, Homo sapien
gaagaactgttttgctcagagcaca

SEQ ID NO: 3709654 - DNA, 25 bp, Homo sapien
gacagaagggccagggaacagaata

SEQ ID NO: 3709655 - DNA, 25 bp, Homo sapien
gttgatagctctgattaagccttgg

SEQ ID NO: 3709656 - DNA, 25 bp, Homo sapien
gcacgatgttctccaatgttcccaa

SEQ ID NO: 3709657 - DNA, 25 bp, Homo sapien
tggtgctgattccaggttgatagct

SEQ ID NO: 3709658 - DNA, 25 bp, Homo sapien
cacttccttggcacgctgtttccgg

SEQ ID NO: 3709659 - DNA, 25 bp, Homo sapien
tcaagtctcccagtgcagtaggcag

SEQ ID NO: 3709660 - DNA, 25 bp, Homo sapien
atcaagtctcccagtgcagtaggca

SEQ ID NO: 3709661 - DNA, 25 bp, Homo sapien
aagtctcccagtgcagtaggcagcc

SEQ ID NO: 3709662 - DNA, 25 bp, Homo sapien
caagtctcccagtgcagtaggcagc

SEQ ID NO: 3709663 - DNA, 25 bp, Homo sapien
ggaagtatactcaggctctgaccct

SEQ ID NO: 3709664 - DNA, 25 bp, Homo sapien
caaggaagtatactcaggctctgac

SEQ ID NO: 3709665 - DNA, 25 bp, Homo sapien
tatactcaggctctgacccttcagc

SEQ ID NO: 3709666 - DNA, 25 bp, Homo sapien
actcaggctctgacccttcagccac

SEQ ID NO: 3709667 - DNA, 25 bp, Homo sapien
ccagcccagtttttggcttagctct

SEQ ID NO: 3709668 - DNA, 25 bp, Homo sapien
cagcccagtttttggcttagctctt

SEQ ID NO: 3709669 - DNA, 25 bp, Homo sapien
tccagcccagtttttggcttagctc

SEQ ID NO: 3709670 - DNA, 25 bp, Homo sapien
gcccagtttttggcttagctctttc

SEQ ID NO: 3709671 - DNA, 25 bp, Homo sapien
tccacattcgaaactgatgggtgct

SEQ ID NO: 3709672 - DNA, 25 bp, Homo sapien
acattcgaaactgatgggtgctgct

SEQ ID NO: 3709673 - DNA, 25 bp, Homo sapien
ttaatcaaaatgaatctgtccacat

SEQ ID NO: 3709674 - DNA, 25 bp, Homo sapien
ctgtccacattcgaaactgatgggt

SEQ ID NO: 3709675 - DNA, 25 bp, Homo sapien
ctgctgcacagtcctcaatcaaatc

SEQ ID NO: 3709676 - DNA, 25 bp, Homo sapien
aacttgaaagccgaagaagagagct

SEQ ID NO: 3709677 - DNA, 25 bp, Homo sapien
ccgaagaagagagcttttaattatg

SEQ ID NO: 3709678 - DNA, 25 bp, Homo sapien
cattacaaataggagtaaaaacttg

SEQ ID NO: 3709679 - DNA, 25 bp, Homo sapien
gggctcgcgcgtcgcgggtcgggag

SEQ ID NO: 3709680 - DNA, 25 bp, Homo sapien
ctttgcgcgcgagcccgaggccgcc

SEQ ID NO: 3709681 - DNA, 25 bp, Homo sapien
ccgcgcccgcgcctttgcgcgcgag

SEQ ID NO: 3709682 - DNA, 25 bp, Homo sapien
tcccacaggtttcttgctctcgcct

SEQ ID NO: 3709683 - DNA, 25 bp, Homo sapien
cggcggcggcggcctcagtgttgct

SEQ ID NO: 3709684 - DNA, 25 bp, Homo sapien
tgttgctggggctggcgctgctgct

SEQ ID NO: 3709685 - DNA, 25 bp, Homo sapien
cggcggcggcctcagtgttgctggg

SEQ ID NO: 3709686 - DNA, 25 bp, Homo sapien
cgggcggcgggagcgccaggcggcg

SEQ ID NO: 3709687 - DNA, 25 bp, Homo sapien
caccaccagcggagtggcgggcgag

SEQ ID NO: 3709688 - DNA, 25 bp, Homo sapien
ccgccaccaccagcggagtggcggg

SEQ ID NO: 3709689 - DNA, 25 bp, Homo sapien
agggtacccgaaccgcctcactcat

SEQ ID NO: 3709690 - DNA, 25 bp, Homo sapien
gagggtacccgaaccgcctcactca

SEQ ID NO: 3709691 - DNA, 25 bp, Homo sapien
ggcgcccgccgatacgatgggcggc

SEQ ID NO: 3709692 - DNA, 25 bp, Homo sapien
ccggcgcccgccgatacgatgggcg

SEQ ID NO: 3709693 - DNA, 25 bp, Homo sapien
cgccggcgcccgccgatacgatggg

SEQ ID NO: 3709694 - DNA, 25 bp, Homo sapien
cgcccgccgatacgatgggcggcag

SEQ ID NO: 3709695 - DNA, 25 bp, Homo sapien
ggctgtccacgaggcacaactcttt

SEQ ID NO: 3709696 - DNA, 25 bp, Homo sapien
ggaagggcggcctgagtgcgtctcc

SEQ ID NO: 3709697 - DNA, 25 bp, Homo sapien
gggctgtccacgaggcacaactctt

SEQ ID NO: 3709698 - DNA, 25 bp, Homo sapien
ctgcccaaggaagggcggcctgagt

SEQ ID NO: 3709699 - DNA, 25 bp, Homo sapien
gaaactcgccgcagagcctgtttaa

SEQ ID NO: 3709700 - DNA, 25 bp, Homo sapien
actacactgacagcaacggaaaggt

SEQ ID NO: 3709701 - DNA, 25 bp, Homo sapien
tcacaattaagtggaaactcgccgc

SEQ ID NO: 3709702 - DNA, 25 bp, Homo sapien
caacggaaaggtcacaattaagtgg

SEQ ID NO: 3709703 - DNA, 25 bp, Homo sapien
aataaaaccatcactgatgcatcta

SEQ ID NO: 3709704 - DNA, 25 bp, Homo sapien
acatgtctgtaccatatgaaaaata

SEQ ID NO: 3709705 - DNA, 25 bp, Homo sapien
tacgttatctatgagtcctacagga

SEQ ID NO: 3709706 - DNA, 25 bp, Homo sapien
gtggccagcctacaaacagtgggct

SEQ ID NO: 3709707 - DNA, 25 bp, Homo sapien
tagtagtgggatactcaaccagctg

SEQ ID NO: 3709708 - DNA, 25 bp, Homo sapien
taatagacctgactctctaggcaga

SEQ ID NO: 3709709 - DNA, 25 bp, Homo sapien
ctaatgttggcccttcatgctggac

SEQ ID NO: 3709710 - DNA, 25 bp, Homo sapien
tagcctatcataacttgtttctgaa

SEQ ID NO: 3709711 - DNA, 25 bp, Homo sapien
gcccttcatgctggactagaagttc

SEQ ID NO: 3709712 - DNA, 25 bp, Homo sapien
agctttttccagtgttcaccatttc

SEQ ID NO: 3709713 - DNA, 25 bp, Homo sapien
tcttcgggctaacagctgaaataaa

SEQ ID NO: 3709714 - DNA, 25 bp, Homo sapien
gcagcttctttcttcgggctaacag

SEQ ID NO: 3709715 - DNA, 25 bp, Homo sapien
tctttcttcgggctaacagctgaaa

SEQ ID NO: 3709716 - DNA, 25 bp, Homo sapien
cagcttctttcttcgggctaacagc

SEQ ID NO: 3709717 - DNA, 25 bp, Homo sapien
cattcttgatgttagggaaaacaag

SEQ ID NO: 3709718 - DNA, 25 bp, Homo sapien
atttgtgtgggaaatattcctccat

SEQ ID NO: 3709719 - DNA, 25 bp, Homo sapien
ctagctgtttattttgcccattggt

SEQ ID NO: 3709720 - DNA, 25 bp, Homo sapien
aatttgctagtgtgtgtctttcaac

SEQ ID NO: 3709721 - DNA, 25 bp, Homo sapien
tctttttccaatttgctagtgtgtg

SEQ ID NO: 3709722 - DNA, 25 bp, Homo sapien
ccgtgagctaaaggcttagatattt

SEQ ID NO: 3709723 - DNA, 25 bp, Homo sapien
tttcctacgtccgtgagctaaaggc

SEQ ID NO: 3709724 - DNA, 25 bp, Homo sapien
cctgcttgctttcggttgattttct

SEQ ID NO: 3709725 - DNA, 25 bp, Homo sapien
cctacgtccgtgagctaaaggctta

SEQ ID NO: 3709726 - DNA, 25 bp, Homo sapien
gggccttcatttcggatgatgatgc

SEQ ID NO: 3709727 - DNA, 25 bp, Homo sapien
acagttttgggctggataggaagaa

SEQ ID NO: 3709728 - DNA, 25 bp, Homo sapien
tgatgatgcatccatagatgtacgc

SEQ ID NO: 3709729 - DNA, 25 bp, Homo sapien
tgtctaacatcaaggcaaattggtg

SEQ ID NO: 3709730 - DNA, 25 bp, Homo sapien
tctgggaaagaatcaaacgttgtta

SEQ ID NO: 3709731 - DNA, 25 bp, Homo sapien
tcaaacgttgttagataaaaatcat

SEQ ID NO: 3709732 - DNA, 25 bp, Homo sapien
taaatgcagcatttaattctgggaa

SEQ ID NO: 3709733 - DNA, 25 bp, Homo sapien
tgcagcatttaattctgggaaagaa

SEQ ID NO: 3709734 - DNA, 25 bp, Homo sapien
ttaagtaaggtatcatacacagcat

SEQ ID NO: 3709735 - DNA, 25 bp, Homo sapien
ggtatcatacacagcattcacaaat

SEQ ID NO: 3709736 - DNA, 25 bp, Homo sapien
caatggtgttaaatgaggcagtggc

SEQ ID NO: 3709737 - DNA, 25 bp, Homo sapien
cacaaatttagcattaatcccagag

SEQ ID NO: 3709738 - DNA, 25 bp, Homo sapien
aagaggtcccagtcaatgcaaacac

SEQ ID NO: 3709739 - DNA, 25 bp, Homo sapien
tacaggctaatgtttaagaaccact

SEQ ID NO: 3709740 - DNA, 25 bp, Homo sapien
cataaatcaacatatcctgggaact

SEQ ID NO: 3709741 - DNA, 25 bp, Homo sapien
cagttgactcttgaatacaggcttg

SEQ ID NO: 3709742 - DNA, 25 bp, Homo sapien
tagtgaagtactcagattgggaata

SEQ ID NO: 3709743 - DNA, 25 bp, Homo sapien
gaagtactcagattgggaataagac

SEQ ID NO: 3709744 - DNA, 25 bp, Homo sapien
aagtactcagattgggaataagaca

SEQ ID NO: 3709745 - DNA, 25 bp, Homo sapien
gtgaagtactcagattgggaataag

SEQ ID NO: 3709746 - DNA, 25 bp, Homo sapien
aatactgtcttctgaacgtcttgag

SEQ ID NO: 3709747 - DNA, 25 bp, Homo sapien
tttccattctcgtaacaggctgtta

SEQ ID NO: 3709748 - DNA, 25 bp, Homo sapien
gttaatgattccctttaatactgtc

SEQ ID NO: 3709749 - DNA, 25 bp, Homo sapien
ggctgttaatgattccctttaatac

SEQ ID NO: 3709750 - DNA, 25 bp, Homo sapien
aagtataaaatatgctctaagatca

SEQ ID NO: 3709751 - DNA, 25 bp, Homo sapien
atgctctaagatcatcttttgttcg

SEQ ID NO: 3709752 - DNA, 25 bp, Homo sapien
tctaagatcatcttttgttcgtgga

SEQ ID NO: 3709753 - DNA, 25 bp, Homo sapien
aaatatgctctaagatcatcttttg

SEQ ID NO: 3709754 - DNA, 25 bp, Homo sapien
gctgataacttcatctggtaatggc

SEQ ID NO: 3709755 - DNA, 25 bp, Homo sapien
agctgataacttcatctggtaatgg

SEQ ID NO: 3709756 - DNA, 25 bp, Homo sapien
taaggtagctatctgtcgtagcaag

SEQ ID NO: 3709757 - DNA, 25 bp, Homo sapien
catacgtagatgtgttattaaactg

SEQ ID NO: 3709758 - DNA, 25 bp, Homo sapien
ccagtgaactaggaaatgatggtca

SEQ ID NO: 3709759 - DNA, 25 bp, Homo sapien
tcgtagcaagtgagcatagatgaca

SEQ ID NO: 3709760 - DNA, 25 bp, Homo sapien
tatcctttatgtagtactaaagtag

SEQ ID NO: 3709761 - DNA, 25 bp, Homo sapien
tttaattatcctttatgtagtacta

SEQ ID NO: 3709762 - DNA, 25 bp, Homo sapien
aattatcctttatgtagtactaaag

SEQ ID NO: 3709763 - DNA, 25 bp, Homo sapien
taattatcctttatgtagtactaaa

SEQ ID NO: 3709764 - DNA, 25 bp, Homo sapien
gaatactgtcttcgttaaatgagaa

SEQ ID NO: 3709765 - DNA, 25 bp, Homo sapien
ctgacatgcacatttccagctgagg

SEQ ID NO: 3709766 - DNA, 25 bp, Homo sapien
tagatattaaactacatcctaagcc

SEQ ID NO: 3709767 - DNA, 25 bp, Homo sapien
aaagatgttagtctcctgacatgca

SEQ ID NO: 3709768 - DNA, 25 bp, Homo sapien
taaattgcagcaatctctctaccaa

SEQ ID NO: 3709769 - DNA, 25 bp, Homo sapien
acactttagcggctgatggaatcca

SEQ ID NO: 3709770 - DNA, 25 bp, Homo sapien
aggctttgcaggaaacaggcgtaaa

SEQ ID NO: 3709771 - DNA, 25 bp, Homo sapien
accaattgtttgaacctcttctggg

SEQ ID NO: 3709772 - DNA, 25 bp, Homo sapien
gagggtgaactaaattgtttgcagt

SEQ ID NO: 3709773 - DNA, 25 bp, Homo sapien
tccaatgtagaattatagaaatcag

SEQ ID NO: 3709774 - DNA, 25 bp, Homo sapien
gaaatcagtataaggaataagggga

SEQ ID NO: 3709775 - DNA, 25 bp, Homo sapien
caagtatgatattcttccatgagat

SEQ ID NO: 3709776 - DNA, 25 bp, Homo sapien
caattctgataaagagggtccctgg

SEQ ID NO: 3709777 - DNA, 25 bp, Homo sapien
agtagtacagaaaacccaggtgctc

SEQ ID NO: 3709778 - DNA, 25 bp, Homo sapien
ttcaggctggctacccaagggttga

SEQ ID NO: 3709779 - DNA, 25 bp, Homo sapien
gctgacccctgtgcatagaatagta

SEQ ID NO: 3709780 - DNA, 25 bp, Homo sapien
aaataatttcattgtatatcatcac

SEQ ID NO: 3709781 - DNA, 25 bp, Homo sapien
acaaataatttcattgtatatcatc

SEQ ID NO: 3709782 - DNA, 25 bp, Homo sapien
tgtctatacaaataatttcattgta

SEQ ID NO: 3709783 - DNA, 25 bp, Homo sapien
attgtctatacaaataatttcattg

SEQ ID NO: 3709784 - DNA, 25 bp, Homo sapien
tacttttggattgtgttttaccata

SEQ ID NO: 3709785 - DNA, 25 bp, Homo sapien
caaaattatactaagggaatctaag

SEQ ID NO: 3709786 - DNA, 25 bp, Homo sapien
ggaatctaaggtaccccttgtagca

SEQ ID NO: 3709787 - DNA, 25 bp, Homo sapien
ttactagatgtgcaatgcctttatt

SEQ ID NO: 3709788 - DNA, 25 bp, Homo sapien
gcgatgtttatcatctgttgctctg

SEQ ID NO: 3709789 - DNA, 25 bp, Homo sapien
ttatcatctgttgctctgagtctct

SEQ ID NO: 3709790 - DNA, 25 bp, Homo sapien
tgttgctctgagtctctctgaataa

SEQ ID NO: 3709791 - DNA, 25 bp, Homo sapien
ccttgcgatgtttatcatctgttgc

SEQ ID NO: 3709792 - DNA, 25 bp, Homo sapien
gctctgtagaaaacttagcctgtca

SEQ ID NO: 3709793 - DNA, 25 bp, Homo sapien
ggaattcccttgatgggcataggca

SEQ ID NO: 3709794 - DNA, 25 bp, Homo sapien
tacattactgtgctgagctgaaaca

SEQ ID NO: 3709795 - DNA, 25 bp, Homo sapien
tggtttgcctaatgacactctgcct

SEQ ID NO: 3709796 - DNA, 25 bp, Homo sapien
gccatgtctcatctcttaaatagca

SEQ ID NO: 3709797 - DNA, 25 bp, Homo sapien
taaatagtacaaggaaggtacactg

SEQ ID NO: 3709798 - DNA, 25 bp, Homo sapien
tattcctgatgataaacctggactt

SEQ ID NO: 3709799 - DNA, 25 bp, Homo sapien
gacttgtcaacatgtatcaaagacc

SEQ ID NO: 3709800 - DNA, 25 bp, Homo sapien
tctgtcttcgagatactttatccac

SEQ ID NO: 3709801 - DNA, 25 bp, Homo sapien
aggtctctgtcttcgagatacttta

SEQ ID NO: 3709802 - DNA, 25 bp, Homo sapien
cttcgagatactttatccaccagac

SEQ ID NO: 3709803 - DNA, 25 bp, Homo sapien
atatattcatatcaggtctctgtct

SEQ ID NO: 3709804 - DNA, 25 bp, Homo sapien
tcgctaaccagatgtgtccgtctta

SEQ ID NO: 3709805 - DNA, 25 bp, Homo sapien
tcaagtgaatcgctaaccagatgtg

SEQ ID NO: 3709806 - DNA, 25 bp, Homo sapien
ctcatcaagtgaatcgctaaccaga

SEQ ID NO: 3709807 - DNA, 25 bp, Homo sapien
gtgaatcgctaaccagatgtgtccg

SEQ ID NO: 3709808 - DNA, 25 bp, Homo sapien
tgcaatgctacaaaactccatccct

SEQ ID NO: 3709809 - DNA, 25 bp, Homo sapien
tttgcaatgctacaaaactccatcc

SEQ ID NO: 3709810 - DNA, 25 bp, Homo sapien
ctatttgaagatattatacagtaga

SEQ ID NO: 3709811 - DNA, 25 bp, Homo sapien
gaagatattatacagtagaggagaa

SEQ ID NO: 3709812 - DNA, 25 bp, Homo sapien
ttctttagtcaaaccacccatatcc

SEQ ID NO: 3709813 - DNA, 25 bp, Homo sapien
gcgaattagaagaaggaaccattct

SEQ ID NO: 3709814 - DNA, 25 bp, Homo sapien
acccatatccaaaccagcttcccct

SEQ ID NO: 3709815 - DNA, 25 bp, Homo sapien
tctggatgaaaaatttggcgaatta

SEQ ID NO: 3709816 - DNA, 25 bp, Homo sapien
tcaacatttacgatggacaaaaagt

SEQ ID NO: 3709817 - DNA, 25 bp, Homo sapien
aaaataagggtgactacttcactct

SEQ ID NO: 3709818 - DNA, 25 bp, Homo sapien
tgatcaacaattcggtcaaacaagt

SEQ ID NO: 3709819 - DNA, 25 bp, Homo sapien
aaagatatggatgtttcctcataaa

SEQ ID NO: 3709820 - DNA, 25 bp, Homo sapien
ttaaagctgctaaaccaatggcagt

SEQ ID NO: 3709821 - DNA, 25 bp, Homo sapien
aattccaaccaatcggaattcagaa

SEQ ID NO: 3709822 - DNA, 25 bp, Homo sapien
agctgctaaaccaatggcagtgtga

SEQ ID NO: 3709823 - DNA, 25 bp, Homo sapien
gaatagttatcacatttaaagctgc

SEQ ID NO: 3709824 - DNA, 25 bp, Homo sapien
gcagggagggaaacgaatatccaag

SEQ ID NO: 3709825 - DNA, 25 bp, Homo sapien
atgatgggagggctcaataatttct

SEQ ID NO: 3709826 - DNA, 25 bp, Homo sapien
taggaatgatgggagggctcaataa

SEQ ID NO: 3709827 - DNA, 25 bp, Homo sapien
agggaaacgaatatccaaggtgatg

SEQ ID NO: 3709828 - DNA, 25 bp, Homo sapien
ggtaacattgcagatgcctactggt

SEQ ID NO: 3709829 - DNA, 25 bp, Homo sapien
ttgacataagtcgtccacggtaaca

SEQ ID NO: 3709830 - DNA, 25 bp, Homo sapien
gatgcctactggtatattttgatca

SEQ ID NO: 3709831 - DNA, 25 bp, Homo sapien
aggcataatttgacataagtcgtcc

SEQ ID NO: 3709832 - DNA, 25 bp, Homo sapien
catgtgataagagttcacttaatcc

SEQ ID NO: 3709833 - DNA, 25 bp, Homo sapien
tgtgataagagttcacttaatccat

SEQ ID NO: 3709834 - DNA, 25 bp, Homo sapien
caacattgccttcatgtgataagag

SEQ ID NO: 3709835 - DNA, 25 bp, Homo sapien
gataagagttcacttaatccatggg

SEQ ID NO: 3709836 - DNA, 25 bp, Homo sapien
ccattacacatattaatatggttga

SEQ ID NO: 3709837 - DNA, 25 bp, Homo sapien
ttaatatggttgatataataacata

SEQ ID NO: 3709838 - DNA, 25 bp, Homo sapien
ctgatgggagatgccattacacata

SEQ ID NO: 3709839 - DNA, 25 bp, Homo sapien
gatgggagatgccattacacatatt

SEQ ID NO: 3709840 - DNA, 25 bp, Homo sapien
attataggacttgattattccaaat

SEQ ID NO: 3709841 - DNA, 25 bp, Homo sapien
atcaccaccgggctttaaattatag

SEQ ID NO: 3709842 - DNA, 25 bp, Homo sapien
tatcaccaccgggctttaaattata

SEQ ID NO: 3709843 - DNA, 25 bp, Homo sapien
taaattataggacttgattattcca

SEQ ID NO: 3709844 - DNA, 25 bp, Homo sapien
tatagatggatttgttcagaaggaa

SEQ ID NO: 3709845 - DNA, 25 bp, Homo sapien
aaactgcttatagatggatttgttc

SEQ ID NO: 3709846 - DNA, 25 bp, Homo sapien
agatggatttgttcagaaggaagtc

SEQ ID NO: 3709847 - DNA, 25 bp, Homo sapien
aagcacacacactatgaaatccata

SEQ ID NO: 3709848 - DNA, 25 bp, Homo sapien
taagtccgtttttgcatagccatca

SEQ ID NO: 3709849 - DNA, 25 bp, Homo sapien
tagttaagtccgtttttgcatagcc

SEQ ID NO: 3709850 - DNA, 25 bp, Homo sapien
catactgagtacttctctgcagagc

SEQ ID NO: 3709851 - DNA, 25 bp, Homo sapien
catgcatatccaggtcaggacttcc

SEQ ID NO: 3709852 - DNA, 25 bp, Homo sapien
cagttagtagaagtttcattctttg

SEQ ID NO: 3709853 - DNA, 25 bp, Homo sapien
ctgtagtaaaatgtagcaacttctt

SEQ ID NO: 3709854 - DNA, 25 bp, Homo sapien
tcttttgaagatcaagaggaaatcc

SEQ ID NO: 3709855 - DNA, 25 bp, Homo sapien
gaggaaatccaagcacaacatccca

SEQ ID NO: 3709856 - DNA, 25 bp, Homo sapien
ttaggattcttacagctatcttaag

SEQ ID NO: 3709857 - DNA, 25 bp, Homo sapien
ctttccttcagtctttatgaacttc

SEQ ID NO: 3709858 - DNA, 25 bp, Homo sapien
cttacagctatcttaagactctttc

SEQ ID NO: 3709859 - DNA, 25 bp, Homo sapien
ccttcagtctttatgaacttcacag

SEQ ID NO: 3709860 - DNA, 25 bp, Homo sapien
gaaggcaaagttgattgaagcaggt

SEQ ID NO: 3709861 - DNA, 25 bp, Homo sapien
ttactcaagtccaaaaccttctgaa

SEQ ID NO: 3709862 - DNA, 25 bp, Homo sapien
tttgctcttgtaggggggaaggcaa

SEQ ID NO: 3709863 - DNA, 25 bp, Homo sapien
gggggaaggcaaagttgattgaagc

SEQ ID NO: 3709864 - DNA, 25 bp, Homo sapien
gctaaaggcacagtaagagggaagt

SEQ ID NO: 3709865 - DNA, 25 bp, Homo sapien
taggtcccaagccagtatatcaaaa

SEQ ID NO: 3709866 - DNA, 25 bp, Homo sapien
tataaaagaggaactggaccatacc

SEQ ID NO: 3709867 - DNA, 25 bp, Homo sapien
gtggacttttcctcactcaagcgat

SEQ ID NO: 3709868 - DNA, 25 bp, Homo sapien
tcaagcagtgtaagagagaagcagt

SEQ ID NO: 3709869 - DNA, 25 bp, Homo sapien
tacccaaatggaagagcagaatcac

SEQ ID NO: 3709870 - DNA, 25 bp, Homo sapien
tagcaagaaaatagcctagcccaga

SEQ ID NO: 3709871 - DNA, 25 bp, Homo sapien
ggacttcgtcatctaaaaatttggc

SEQ ID NO: 3709872 - DNA, 25 bp, Homo sapien
aaaacttctaatcatacagacaaaa

SEQ ID NO: 3709873 - DNA, 25 bp, Homo sapien
cagacaaaaatatgactgactaagc

SEQ ID NO: 3709874 - DNA, 25 bp, Homo sapien
tatgactgactaagcaaagatttta

SEQ ID NO: 3709875 - DNA, 25 bp, Homo sapien
aaaatatgactgactaagcaaagat

SEQ ID NO: 3709876 - DNA, 25 bp, Homo sapien
ttgcatccagaaattaatacaatac

SEQ ID NO: 3709877 - DNA, 25 bp, Homo sapien
aattgcatccagaaattaatacaat

SEQ ID NO: 3709878 - DNA, 25 bp, Homo sapien
atacaatacagatttgtacaaaaaa

SEQ ID NO: 3709879 - DNA, 25 bp, Homo sapien
gcatccagaaattaatacaatacag

SEQ ID NO: 3709880 - DNA, 25 bp, Homo sapien
taattgcccaagtgttcaaaaaata

SEQ ID NO: 3709881 - DNA, 25 bp, Homo sapien
tatggctttaattaattgcccaagt

SEQ ID NO: 3709882 - DNA, 25 bp, Homo sapien
acatatggctttaattaattgccca

SEQ ID NO: 3709883 - DNA, 25 bp, Homo sapien
ttaaacatatggctttaattaattg

SEQ ID NO: 3709884 - DNA, 25 bp, Homo sapien
taccaggctctcctcaataaagaag

SEQ ID NO: 3709885 - DNA, 25 bp, Homo sapien
cagatgcaatggcaggtctttcggg

SEQ ID NO: 3709886 - DNA, 25 bp, Homo sapien
tcccagagaacgagagagaagaaca

SEQ ID NO: 3709887 - DNA, 25 bp, Homo sapien
actatacctaggctcaggcaggcca

SEQ ID NO: 3709888 - DNA, 25 bp, Homo sapien
ctaaggcaaggtcatagtctaactt

SEQ ID NO: 3709889 - DNA, 25 bp, Homo sapien
gagtgggtgtactattgatgatacc

SEQ ID NO: 3709890 - DNA, 25 bp, Homo sapien
tctttggcatgattgagttgaggag

SEQ ID NO: 3709891 - DNA, 25 bp, Homo sapien
ccattgattacttgaacttgtaaac

SEQ ID NO: 3709892 - DNA, 25 bp, Homo sapien
aaaccgcaatgtgtgcgtggccgaa

SEQ ID NO: 3709893 - DNA, 25 bp, Homo sapien
cagaggagcatccttctgtgagcct

SEQ ID NO: 3709894 - DNA, 25 bp, Homo sapien
tggccgaagaccgaggcaactgtgt

SEQ ID NO: 3709895 - DNA, 25 bp, Homo sapien
gcaaactggctaagagtagcagagc

SEQ ID NO: 3709896 - DNA, 25 bp, Homo sapien
cactggcatttggaattgtcctccc

SEQ ID NO: 3709897 - DNA, 25 bp, Homo sapien
gccactggcatttggaattgtcctc

SEQ ID NO: 3709898 - DNA, 25 bp, Homo sapien
ggcatttggaattgtcctccccata

SEQ ID NO: 3709899 - DNA, 25 bp, Homo sapien
ttggaattgtcctccccatactttc

SEQ ID NO: 3709900 - DNA, 25 bp, Homo sapien
ggtcttgtcctattctctgaccagg

SEQ ID NO: 3709901 - DNA, 25 bp, Homo sapien
cagtagatggcagtcctcatcaaat

SEQ ID NO: 3709902 - DNA, 25 bp, Homo sapien
tgttgtcaagatcttctctccctgg

SEQ ID NO: 3709903 - DNA, 25 bp, Homo sapien
ggtgagccctgaacattcagagttc

SEQ ID NO: 3709904 - DNA, 25 bp, Homo sapien
tttatgtttccgcagtctgtccatc

SEQ ID NO: 3709905 - DNA, 25 bp, Homo sapien
tcatttatgtttccgcagtctgtcc

SEQ ID NO: 3709906 - DNA, 25 bp, Homo sapien
tgtttccgcagtctgtccatcttcg

SEQ ID NO: 3709907 - DNA, 25 bp, Homo sapien
ttccgcagtctgtccatcttcgttc

SEQ ID NO: 3709908 - DNA, 25 bp, Homo sapien
aggcctgagcatacccgctcgcttt

SEQ ID NO: 3709909 - DNA, 25 bp, Homo sapien
ctcgctttgcgatagaagtggatta

SEQ ID NO: 3709910 - DNA, 25 bp, Homo sapien
tacccgctcgctttgcgatagaagt

SEQ ID NO: 3709911 - DNA, 25 bp, Homo sapien
tagaagtggattatgctagcaggct

SEQ ID NO: 3709912 - DNA, 25 bp, Homo sapien
gcccaggtgatagtttgagactcca

SEQ ID NO: 3709913 - DNA, 25 bp, Homo sapien
gagcttggtccgtgttcccaggtga

SEQ ID NO: 3709914 - DNA, 25 bp, Homo sapien
ccaggtgatagtttttacccctgag

SEQ ID NO: 3709915 - DNA, 25 bp, Homo sapien
gccccgagcttggtccgtgttccca

SEQ ID NO: 3709916 - DNA, 25 bp, Homo sapien
caggtgatagtttttacccctgagg

SEQ ID NO: 3709917 - DNA, 25 bp, Homo sapien
tctttctggatgatgtttactccag

SEQ ID NO: 3709918 - DNA, 25 bp, Homo sapien
aatatggcaggtggaggtatgcggg

SEQ ID NO: 3709919 - DNA, 25 bp, Homo sapien
gggcagtaggcaacacatttttctt

SEQ ID NO: 3709920 - DNA, 25 bp, Homo sapien
gctggtattcgtggtgcgggtgtgc

SEQ ID NO: 3709921 - DNA, 25 bp, Homo sapien
tgactgaggccaaaccagtatggga

SEQ ID NO: 3709922 - DNA, 25 bp, Homo sapien
tatgggagctcctttgaaaaaccca

SEQ ID NO: 3709923 - DNA, 25 bp, Homo sapien
cagacaagtggactttcattgcagg

SEQ ID NO: 3709924 - DNA, 25 bp, Homo sapien
tcattgcaggtcaagtatcgcatgt

SEQ ID NO: 3709925 - DNA, 25 bp, Homo sapien
gtcacctttgagaacaaccttggct

SEQ ID NO: 3709926 - DNA, 25 bp, Homo sapien
tcccaggatggcaccacggttgtgt

SEQ ID NO: 3709927 - DNA, 25 bp, Homo sapien
taagagacttagcaaacagtacggc

SEQ ID NO: 3709928 - DNA, 25 bp, Homo sapien
ccttggctccagaatgagggtgact

SEQ ID NO: 3709929 - DNA, 25 bp, Homo sapien
gaagagaaaaacaatgcgacagatc

SEQ ID NO: 3709930 - DNA, 25 bp, Homo sapien
aaggaagagaaaaacaatgcgacag

SEQ ID NO: 3709931 - DNA, 25 bp, Homo sapien
ggaagagaaaaacaatgcgacagat

SEQ ID NO: 3709932 - DNA, 25 bp, Homo sapien
aaaggaagagaaaaacaatgcgaca

SEQ ID NO: 3709933 - DNA, 25 bp, Homo sapien
tcatggtttcaaactgaaaccgctt

SEQ ID NO: 3709934 - DNA, 25 bp, Homo sapien
gaaggctgtactccattccagatgg

SEQ ID NO: 3709935 - DNA, 25 bp, Homo sapien
aacgttttctctgcagttagtgaca

SEQ ID NO: 3709936 - DNA, 25 bp, Homo sapien
tagtgacagggtagacaaatagcat

SEQ ID NO: 3709937 - DNA, 25 bp, Homo sapien
tataagactgaaggttagaaaagac

SEQ ID NO: 3709938 - DNA, 25 bp, Homo sapien
gaaaagactaatatctcagctccag

SEQ ID NO: 3709939 - DNA, 25 bp, Homo sapien
taaaaaggtgtctacagttacagtg

SEQ ID NO: 3709940 - DNA, 25 bp, Homo sapien
tagggagggcagtctgcttcactca

SEQ ID NO: 3709941 - DNA, 25 bp, Homo sapien
ggttgacttgcataagaggctcagg

SEQ ID NO: 3709942 - DNA, 25 bp, Homo sapien
ttgtggcttaacagcaactgcttct

SEQ ID NO: 3709943 - DNA, 25 bp, Homo sapien
tcttttgtggcttaacagcaactgc

SEQ ID NO: 3709944 - DNA, 25 bp, Homo sapien
tccctttggtttgcagtgtgcagaa

SEQ ID NO: 3709945 - DNA, 25 bp, Homo sapien
aaatggttgagctgtacagagagct

SEQ ID NO: 3709946 - DNA, 25 bp, Homo sapien
agcagggcagcactctcagatccag

SEQ ID NO: 3709947 - DNA, 25 bp, Homo sapien
cagtggatacttccaaagtatgaca

SEQ ID NO: 3709948 - DNA, 25 bp, Homo sapien
agagagctccgagtgaccacagcag

SEQ ID NO: 3709949 - DNA, 25 bp, Homo sapien
ccctggacctacagctggctgcctc

SEQ ID NO: 3709950 - DNA, 25 bp, Homo sapien
aggagtttgtgaacattcctgcccc

SEQ ID NO: 3709951 - DNA, 25 bp, Homo sapien
cctcagattcatcaagcagaaagcc

SEQ ID NO: 3709952 - DNA, 25 bp, Homo sapien
gcagaaagccctgaccatcatgctc

SEQ ID NO: 3709953 - DNA, 25 bp, Homo sapien
ctccttgaattgggcactggttcgc

SEQ ID NO: 3709954 - DNA, 25 bp, Homo sapien
aggctccgctcagagttatgaaggt

SEQ ID NO: 3709955 - DNA, 25 bp, Homo sapien
gcactggttcgcagtggccctgcct

SEQ ID NO: 3709956 - DNA, 25 bp, Homo sapien
ccgctcagagttatgaaggtgcttc

SEQ ID NO: 3709957 - DNA, 25 bp, Homo sapien
cctgtattataatgagtcagctgcc

SEQ ID NO: 3709958 - DNA, 25 bp, Homo sapien
cgattacttgacgagcctagacgcc

SEQ ID NO: 3709959 - DNA, 25 bp, Homo sapien
gctatctggcttgagtgtgtatcta

SEQ ID NO: 3709960 - DNA, 25 bp, Homo sapien
cttgggctgctaatagggagtccgt

SEQ ID NO: 3709961 - DNA, 25 bp, Homo sapien
gaggaggtataatgaggagagatgg

SEQ ID NO: 3709962 - DNA, 25 bp, Homo sapien
gccttggaagatagagccatcgttc

SEQ ID NO: 3709963 - DNA, 25 bp, Homo sapien
tcgttcttaacagcttcctggttcc

SEQ ID NO: 3709964 - DNA, 25 bp, Homo sapien
ggagagatgggtcatgcaggccttg

SEQ ID NO: 3709965 - DNA, 25 bp, Homo sapien
tcttggagagcttctaagtcccctg

SEQ ID NO: 3709966 - DNA, 25 bp, Homo sapien
accactggattgtaagcagcaggca

SEQ ID NO: 3709967 - DNA, 25 bp, Homo sapien
atcctgtttactgggggccacacca

SEQ ID NO: 3709968 - DNA, 25 bp, Homo sapien
agagcttctaagtcccctgctgtgg

SEQ ID NO: 3709969 - DNA, 25 bp, Homo sapien
tatttcaagccctcgttgtctcaga

SEQ ID NO: 3709970 - DNA, 25 bp, Homo sapien
caacatgaccaagatgactttggcc

SEQ ID NO: 3709971 - DNA, 25 bp, Homo sapien
gaagagtataactaggctggtagcc

SEQ ID NO: 3709972 - DNA, 25 bp, Homo sapien
cctaaagaggtgtttgatagcatcc

SEQ ID NO: 3709973 - DNA, 25 bp, Homo sapien
ctaatagctctatcaatgttattgg

SEQ ID NO: 3709974 - DNA, 25 bp, Homo sapien
tgaggccactaatagctctatcaat

SEQ ID NO: 3709975 - DNA, 25 bp, Homo sapien
gccactaatagctctatcaatgtta

SEQ ID NO: 3709976 - DNA, 25 bp, Homo sapien
gctctatcaatgttattggccctca

SEQ ID NO: 3709977 - DNA, 25 bp, Homo sapien
agtaggcgccagtcctggactgaag

SEQ ID NO: 3709978 - DNA, 25 bp, Homo sapien
tagggaaggggcagtaggcgccagt

SEQ ID NO: 3709979 - DNA, 25 bp, Homo sapien
agcactgctccttggggtgagaggc

SEQ ID NO: 3709980 - DNA, 25 bp, Homo sapien
gactgaagggagcagcactgctcct

SEQ ID NO: 3709981 - DNA, 25 bp, Homo sapien
tgagctacagcacgttcctgaacgg

SEQ ID NO: 3709982 - DNA, 25 bp, Homo sapien
ttggagtggctgctacgtcttgagc

SEQ ID NO: 3709983 - DNA, 25 bp, Homo sapien
cacgttcctgaacgggcagaacttc

SEQ ID NO: 3709984 - DNA, 25 bp, Homo sapien
cgtcttgagctacagcacgttcctg

SEQ ID NO: 3709985 - DNA, 25 bp, Homo sapien
tattgtgcacaaccattgagaggtg

SEQ ID NO: 3709986 - DNA, 25 bp, Homo sapien
tatcggaataactctgcagtgacag

SEQ ID NO: 3709987 - DNA, 25 bp, Homo sapien
cagaatttgaagtttggctagcatc

SEQ ID NO: 3709988 - DNA, 25 bp, Homo sapien
tctcctctagctatccttgatgagc

SEQ ID NO: 3709989 - DNA, 25 bp, Homo sapien
cacaaatgtcccaaagactcgggca

SEQ ID NO: 3709990 - DNA, 25 bp, Homo sapien
gactgactgcgtagttgaatctggc

SEQ ID NO: 3709991 - DNA, 25 bp, Homo sapien
aactctgcgcgctaggaacacaggg

SEQ ID NO: 3709992 - DNA, 25 bp, Homo sapien
tgaatctggcaaccgagaggccttg

SEQ ID NO: 3709993 - DNA, 25 bp, Homo sapien
cttctccttgtagttactcaataag

SEQ ID NO: 3709994 - DNA, 25 bp, Homo sapien
agttactcaataagtcctggtcctc

SEQ ID NO: 3709995 - DNA, 25 bp, Homo sapien
tgtagttactcaataagtcctggtc

SEQ ID NO: 3709996 - DNA, 25 bp, Homo sapien
tccttgtagttactcaataagtcct

SEQ ID NO: 3709997 - DNA, 25 bp, Homo sapien
cacatcatttcacatcgtttcaaca

SEQ ID NO: 3709998 - DNA, 25 bp, Homo sapien
tcacatcatttcacatcgtttcaac

SEQ ID NO: 3709999 - DNA, 25 bp, Homo sapien
catcatttcacatcgtttcaacatc

SEQ ID NO: 3710000 - DNA, 25 bp, Homo sapien
tcatttcacatcgtttcaacatcat

SEQ ID NO: 3710001 - DNA, 25 bp, Homo sapien
attatgttgtgtagtccactggcat

SEQ ID NO: 3710002 - DNA, 25 bp, Homo sapien
ttctaagagcgagatcccaccaaaa

SEQ ID NO: 3710003 - DNA, 25 bp, Homo sapien
tcttctaagagcgagatcccaccaa

SEQ ID NO: 3710004 - DNA, 25 bp, Homo sapien
catcttctaagagcgagatcccacc

SEQ ID NO: 3710005 - DNA, 25 bp, Homo sapien
caccctcaactcctgctactttctc

SEQ ID NO: 3710006 - DNA, 25 bp, Homo sapien
gctttgacatagaatctgccgtctg

SEQ ID NO: 3710007 - DNA, 25 bp, Homo sapien
ctggaaatctgtgtggatactggat

SEQ ID NO: 3710008 - DNA, 25 bp, Homo sapien
gaaatctgtgtggatactggatgat

SEQ ID NO: 3710009 - DNA, 25 bp, Homo sapien
tatgtcacgtgtgttgtctgctttg

SEQ ID NO: 3710010 - DNA, 25 bp, Homo sapien
gcacgtgacgtcgtcccgcgcgtgc

SEQ ID NO: 3710011 - DNA, 25 bp, Homo sapien
aggtttcggctagcgaggcggcgcg

SEQ ID NO: 3710012 - DNA, 25 bp, Homo sapien
gccccgggagcgcacgtgacgtcgt

SEQ ID NO: 3710013 - DNA, 25 bp, Homo sapien
ccgggcaccggctgggcaggtttcg

SEQ ID NO: 3710014 - DNA, 25 bp, Homo sapien
cggaggcagcgcgaatccgccgtcc

SEQ ID NO: 3710015 - DNA, 25 bp, Homo sapien
ggcggaggcagcgcgaatccgccgt

SEQ ID NO: 3710016 - DNA, 25 bp, Homo sapien
gaggcagcgcgaatccgccgtccgg

SEQ ID NO: 3710017 - DNA, 25 bp, Homo sapien
ggcagcgcgaatccgccgtccgggt

SEQ ID NO: 3710018 - DNA, 25 bp, Homo sapien
aacagcgccagcaaccggagcagga

SEQ ID NO: 3710019 - DNA, 25 bp, Homo sapien
tggctccctgctgtcaccggatccg

SEQ ID NO: 3710020 - DNA, 25 bp, Homo sapien
agcaacagcgccagcaaccggagca

SEQ ID NO: 3710021 - DNA, 25 bp, Homo sapien
gatccggcgcagtcccatggccgcg

SEQ ID NO: 3710022 - DNA, 25 bp, Homo sapien
ggatttcctgcccgccgtgtcgcgg

SEQ ID NO: 3710023 - DNA, 25 bp, Homo sapien
ttgactcgttccacgtccccgttgc

SEQ ID NO: 3710024 - DNA, 25 bp, Homo sapien
gttcaccttctcaggcgtcaccagc

SEQ ID NO: 3710025 - DNA, 25 bp, Homo sapien
gttgcggcacgcctcgaacagctct

SEQ ID NO: 3710026 - DNA, 25 bp, Homo sapien
ggtggggtctggagcgaggcgaggg

SEQ ID NO: 3710027 - DNA, 25 bp, Homo sapien
gcgaggcgaggggacgctggccccg

SEQ ID NO: 3710028 - DNA, 25 bp, Homo sapien
gccccggctgcgcaggtggggtctg

SEQ ID NO: 3710029 - DNA, 25 bp, Homo sapien
cccggctgcgcaggtggggtctgga

SEQ ID NO: 3710030 - DNA, 25 bp, Homo sapien
taaggtctatcaactacgtccccta

SEQ ID NO: 3710031 - DNA, 25 bp, Homo sapien
ctactctttcttgtgtgtagaggcc

SEQ ID NO: 3710032 - DNA, 25 bp, Homo sapien
caagaccggaagttggtacaggtat

SEQ ID NO: 3710033 - DNA, 25 bp, Homo sapien
tagaggccttctagggtaacaagac

SEQ ID NO: 3710034 - DNA, 25 bp, Homo sapien
gaccttaacccaaatggaacttgca

SEQ ID NO: 3710035 - DNA, 25 bp, Homo sapien
cccaaatggaacttgcaagaacgaa

SEQ ID NO: 3710036 - DNA, 25 bp, Homo sapien
caaatggaacttgcaagaacgaaaa

SEQ ID NO: 3710037 - DNA, 25 bp, Homo sapien
taacccaaatggaacttgcaagaac

SEQ ID NO: 3710038 - DNA, 25 bp, Homo sapien
taagctgaatatcccatctatggct

SEQ ID NO: 3710039 - DNA, 25 bp, Homo sapien
tatttcccgttctagtcactccaga

SEQ ID NO: 3710040 - DNA, 25 bp, Homo sapien
tgtgtcaacgtcctattaagctact

SEQ ID NO: 3710041 - DNA, 25 bp, Homo sapien
tcagaatgaagcaaggttagtccca

SEQ ID NO: 3710042 - DNA, 25 bp, Homo sapien
ctgaagttagaaacagtcatcatct

SEQ ID NO: 3710043 - DNA, 25 bp, Homo sapien
aagttagaaacagtcatcatctttc

SEQ ID NO: 3710044 - DNA, 25 bp, Homo sapien
tgaagttagaaacagtcatcatctt

SEQ ID NO: 3710045 - DNA, 25 bp, Homo sapien
gaagttagaaacagtcatcatcttt

SEQ ID NO: 3710046 - DNA, 25 bp, Homo sapien
aaccaggattgtcagaggtaagagg

SEQ ID NO: 3710047 - DNA, 25 bp, Homo sapien
tcttcatcaatctagccccaaaaga

SEQ ID NO: 3710048 - DNA, 25 bp, Homo sapien
actcccattttcaatcacgcatgac

SEQ ID NO: 3710049 - DNA, 25 bp, Homo sapien
caatctagccccaaaagaacaggag

SEQ ID NO: 3710050 - DNA, 25 bp, Homo sapien
taattatgtatagcagtgtagtctc

SEQ ID NO: 3710051 - DNA, 25 bp, Homo sapien
tagtatcagcttgttgagcaatgac

SEQ ID NO: 3710052 - DNA, 25 bp, Homo sapien
caaatccttgcatacttctgtgaca

SEQ ID NO: 3710053 - DNA, 25 bp, Homo sapien
tgtgctataatgtactgaaaccacc

SEQ ID NO: 3710054 - DNA, 25 bp, Homo sapien
gtgtataaaacagaccaagctcaag

SEQ ID NO: 3710055 - DNA, 25 bp, Homo sapien
caagctcaagatgtaaagaagattg

SEQ ID NO: 3710056 - DNA, 25 bp, Homo sapien
taatgcgacttatggtagccaagga

SEQ ID NO: 3710057 - DNA, 25 bp, Homo sapien
ttccacagtcaactaatgcgactta

SEQ ID NO: 3710058 - DNA, 25 bp, Homo sapien
ctaaggcaattccagtgatgacacc

SEQ ID NO: 3710059 - DNA, 25 bp, Homo sapien
ggcaattccagtgatgacacctgag

SEQ ID NO: 3710060 - DNA, 25 bp, Homo sapien
taaggcaattccagtgatgacacct

SEQ ID NO: 3710061 - DNA, 25 bp, Homo sapien
aaggcaattccagtgatgacacctg

SEQ ID NO: 3710062 - DNA, 25 bp, Homo sapien
gggtctgcaccatgtcgcaaaagga

SEQ ID NO: 3710063 - DNA, 25 bp, Homo sapien
aattccaattatctcgagcattggg

SEQ ID NO: 3710064 - DNA, 25 bp, Homo sapien
catgaccaaaagagcatgcattatg

SEQ ID NO: 3710065 - DNA, 25 bp, Homo sapien
agattgactacttcagcatgaccaa

SEQ ID NO: 3710066 - DNA, 25 bp, Homo sapien
aatccaatgctgtccttccatctgt

SEQ ID NO: 3710067 - DNA, 25 bp, Homo sapien
tgctttggcagatggatctgctaaa

SEQ ID NO: 3710068 - DNA, 25 bp, Homo sapien
tccatctgtatttcggatggttggc

SEQ ID NO: 3710069 - DNA, 25 bp, Homo sapien
tatttcggatggttggctcagctcc

SEQ ID NO: 3710070 - DNA, 25 bp, Homo sapien
aatactcaacctgcatgtaaagggc

SEQ ID NO: 3710071 - DNA, 25 bp, Homo sapien
gaaaaggatagctactgaactgaca

SEQ ID NO: 3710072 - DNA, 25 bp, Homo sapien
ctggcaaggttgttctttacaggct

SEQ ID NO: 3710073 - DNA, 25 bp, Homo sapien
aaaatgtcagctatctagacgtaga

SEQ ID NO: 3710074 - DNA, 25 bp, Homo sapien
gcactttctaagagttcatctttct

SEQ ID NO: 3710075 - DNA, 25 bp, Homo sapien
taagagttcatctttcttatattca

SEQ ID NO: 3710076 - DNA, 25 bp, Homo sapien
ctggcactttctaagagttcatctt

SEQ ID NO: 3710077 - DNA, 25 bp, Homo sapien
aagagttcatctttcttatattcac

SEQ ID NO: 3710078 - DNA, 25 bp, Homo sapien
cagttgacatttaatggtgtgagta

SEQ ID NO: 3710079 - DNA, 25 bp, Homo sapien
ggtgtgagtagagccatcatttttt

SEQ ID NO: 3710080 - DNA, 25 bp, Homo sapien
tttctgccatcacttgcgtggcagt

SEQ ID NO: 3710081 - DNA, 25 bp, Homo sapien
tgcgtggcagttgacatttaatggt

SEQ ID NO: 3710082 - DNA, 25 bp, Homo sapien
ggagataagcacaaactcagttgca

SEQ ID NO: 3710083 - DNA, 25 bp, Homo sapien
agataagcacaaactcagttgcaaa

SEQ ID NO: 3710084 - DNA, 25 bp, Homo sapien
aagcacaaactcagttgcaaaagga

SEQ ID NO: 3710085 - DNA, 25 bp, Homo sapien
caggagataagcacaaactcagttg

SEQ ID NO: 3710086 - DNA, 25 bp, Homo sapien
catgttgcagtaacagctgtacaat

SEQ ID NO: 3710087 - DNA, 25 bp, Homo sapien
cctgctgccaaatgtaatggagttg

SEQ ID NO: 3710088 - DNA, 25 bp, Homo sapien
taacagctgtacaatctttactctg

SEQ ID NO: 3710089 - DNA, 25 bp, Homo sapien
ctgttatatcctgctgccaaatgta

SEQ ID NO: 3710090 - DNA, 25 bp, Homo sapien
gttacttcataatgaccataagaac

SEQ ID NO: 3710091 - DNA, 25 bp, Homo sapien
agttcagttacttcataatgaccat

SEQ ID NO: 3710092 - DNA, 25 bp, Homo sapien
tcagttacttcataatgaccataag

SEQ ID NO: 3710093 - DNA, 25 bp, Homo sapien
tacttcataatgaccataagaacag

SEQ ID NO: 3710094 - DNA, 25 bp, Homo sapien
cccgaaaggaaccaaagaggcactg

SEQ ID NO: 3710095 - DNA, 25 bp, Homo sapien
ttcataagactcaggcccgaaagga

SEQ ID NO: 3710096 - DNA, 25 bp, Homo sapien
aaggtataggtaacatcctgggatc

SEQ ID NO: 3710097 - DNA, 25 bp, Homo sapien
tctcatctaaaagggatcaaaatgg

SEQ ID NO: 3710098 - DNA, 25 bp, Homo sapien
ggtctgcaccataacttaagagaag

SEQ ID NO: 3710099 - DNA, 25 bp, Homo sapien
gaacatacttcaaccctgttcttag

SEQ ID NO: 3710100 - DNA, 25 bp, Homo sapien
tattgtgacaattgagcagtgttgg

SEQ ID NO: 3710101 - DNA, 25 bp, Homo sapien
ggtgtgggagccaagtctatagcac

SEQ ID NO: 3710102 - DNA, 25 bp, Homo sapien
tgaacattcataattttatactcac

SEQ ID NO: 3710103 - DNA, 25 bp, Homo sapien
ctgaacattcataattttatactca

SEQ ID NO: 3710104 - DNA, 25 bp, Homo sapien
ctaataagtctaatacagcacatat

SEQ ID NO: 3710105 - DNA, 25 bp, Homo sapien
aataagtctaatacagcacatataa

SEQ ID NO: 3710106 - DNA, 25 bp, Homo sapien
catctaataagtctaatacagcaca

SEQ ID NO: 3710107 - DNA, 25 bp, Homo sapien
tctaatacagcacatataaaaagca

SEQ ID NO: 3710108 - DNA, 25 bp, Homo sapien
tgttttttgattcgagtaacatcag

SEQ ID NO: 3710109 - DNA, 25 bp, Homo sapien
tttttgattcgagtaacatcagctt

SEQ ID NO: 3710110 - DNA, 25 bp, Homo sapien
gcagcaacgagtggcctttaaattc

SEQ ID NO: 3710111 - DNA, 25 bp, Homo sapien
gtgcagcttgcagcaacgagtggcc

SEQ ID NO: 3710112 - DNA, 25 bp, Homo sapien
tcatgtgtttgaggatgcttgaaat

SEQ ID NO: 3710113 - DNA, 25 bp, Homo sapien
gtgtttgaggatgcttgaaattcac

SEQ ID NO: 3710114 - DNA, 25 bp, Homo sapien
caatgctgtttcatgtgtttgagga

SEQ ID NO: 3710115 - DNA, 25 bp, Homo sapien
gtttcatgtgtttgaggatgcttga

SEQ ID NO: 3710116 - DNA, 25 bp, Homo sapien
caataatgtctgaatgatacatgac

SEQ ID NO: 3710117 - DNA, 25 bp, Homo sapien
cctaatatctgcacaataggtgttc

SEQ ID NO: 3710118 - DNA, 25 bp, Homo sapien
ctatgatgtatccaggaggaaagga

SEQ ID NO: 3710119 - DNA, 25 bp, Homo sapien
tgccagttataagcctaagcctaat

SEQ ID NO: 3710120 - DNA, 25 bp, Homo sapien
cagtggtggaaaatgatataatctg

SEQ ID NO: 3710121 - DNA, 25 bp, Homo sapien
aaatgatataatctggagtttcagg

SEQ ID NO: 3710122 - DNA, 25 bp, Homo sapien
gatataatctggagtttcaggctgc

SEQ ID NO: 3710123 - DNA, 25 bp, Homo sapien
ctctgcaaaatcagtggtggaaaat

SEQ ID NO: 3710124 - DNA, 25 bp, Homo sapien
cttcggcagaataaggagcatgcat

SEQ ID NO: 3710125 - DNA, 25 bp, Homo sapien
gagcagtatttatatctctctcaac

SEQ ID NO: 3710126 - DNA, 25 bp, Homo sapien
tcagctgagcagtatttatatctct

SEQ ID NO: 3710127 - DNA, 25 bp, Homo sapien
tctctcaactagttgcttcggcaga

SEQ ID NO: 3710128 - DNA, 25 bp, Homo sapien
ttttgggatatggagatgcagcagc

SEQ ID NO: 3710129 - DNA, 25 bp, Homo sapien
tcttttcattgatgtttgctccttt

SEQ ID NO: 3710130 - DNA, 25 bp, Homo sapien
ttcttagcaacagttcacatatttg

SEQ ID NO: 3710131 - DNA, 25 bp, Homo sapien
ctttcttttgggatatggagatgca

SEQ ID NO: 3710132 - DNA, 25 bp, Homo sapien
agagtaaaatctcaatgatatttaa

SEQ ID NO: 3710133 - DNA, 25 bp, Homo sapien
aaagagtaaaatctcaatgatattt

SEQ ID NO: 3710134 - DNA, 25 bp, Homo sapien
gagtaaaatctcaatgatatttaat

SEQ ID NO: 3710135 - DNA, 25 bp, Homo sapien
aagagtaaaatctcaatgatattta

SEQ ID NO: 3710136 - DNA, 25 bp, Homo sapien
cattatgagctttctcagatgccac

SEQ ID NO: 3710137 - DNA, 25 bp, Homo sapien
tgcttcatgtttcaccactacttca

SEQ ID NO: 3710138 - DNA, 25 bp, Homo sapien
gatgccacgtgcagaggagtcaaga

SEQ ID NO: 3710139 - DNA, 25 bp, Homo sapien
cttcaacaacatcattatgagcttt

SEQ ID NO: 3710140 - DNA, 25 bp, Homo sapien
tagatgttctagcaaaaattagata

SEQ ID NO: 3710141 - DNA, 25 bp, Homo sapien
gtgtatctgaataaacccatagatg

SEQ ID NO: 3710142 - DNA, 25 bp, Homo sapien
gcaggacaattcttaagcatagatt

SEQ ID NO: 3710143 - DNA, 25 bp, Homo sapien
ttagatatagaaaaggttacctgca

SEQ ID NO: 3710144 - DNA, 25 bp, Homo sapien
tgaagggatataatgttaggatcac

SEQ ID NO: 3710145 - DNA, 25 bp, Homo sapien
tctgaccaagattatccagagcatt

SEQ ID NO: 3710146 - DNA, 25 bp, Homo sapien
cccatagctcaggagtaggcggcag

SEQ ID NO: 3710147 - DNA, 25 bp, Homo sapien
gatgaccacaatatgcagctctgtg

SEQ ID NO: 3710148 - DNA, 25 bp, Homo sapien
ttggaggagttgctgtacattttca

SEQ ID NO: 3710149 - DNA, 25 bp, Homo sapien
ggaggagttgctgtacattttcatt

SEQ ID NO: 3710150 - DNA, 25 bp, Homo sapien
agttgctgtacattttcatttccca

SEQ ID NO: 3710151 - DNA, 25 bp, Homo sapien
aggagttgctgtacattttcatttc

SEQ ID NO: 3710152 - DNA, 25 bp, Homo sapien
ttttacagtttcgacatctccagcc

SEQ ID NO: 3710153 - DNA, 25 bp, Homo sapien
tgcctctgaattacctaatgagata

SEQ ID NO: 3710154 - DNA, 25 bp, Homo sapien
tctgaattacctaatgagataccct

SEQ ID NO: 3710155 - DNA, 25 bp, Homo sapien
ttacagtttcgacatctccagcctt

SEQ ID NO: 3710156 - DNA, 25 bp, Homo sapien
gtctctactacttgggagggtcaag

SEQ ID NO: 3710157 - DNA, 25 bp, Homo sapien
ccctgtctctactacttgggagggt

SEQ ID NO: 3710158 - DNA, 25 bp, Homo sapien
ctactacttgggagggtcaagcagg

SEQ ID NO: 3710159 - DNA, 25 bp, Homo sapien
tctactacttgggagggtcaagcag

SEQ ID NO: 3710160 - DNA, 25 bp, Homo sapien
tgtagcagatattccaccacggaca

SEQ ID NO: 3710161 - DNA, 25 bp, Homo sapien
tgcagttgacactctgaacagtaca

SEQ ID NO: 3710162 - DNA, 25 bp, Homo sapien
ggacactctgttatacccagctgca

SEQ ID NO: 3710163 - DNA, 25 bp, Homo sapien
gactgacgcccttcaatgtctctgc

SEQ ID NO: 3710164 - DNA, 25 bp, Homo sapien
ataaatgaacaataatgccacagaa

SEQ ID NO: 3710165 - DNA, 25 bp, Homo sapien
taaatgaacaataatgccacagaag

SEQ ID NO: 3710166 - DNA, 25 bp, Homo sapien
aatgaacaataatgccacagaagaa

SEQ ID NO: 3710167 - DNA, 25 bp, Homo sapien
gaacaataatgccacagaagaacat

SEQ ID NO: 3710168 - DNA, 25 bp, Homo sapien
aactactgctccatgtttaacaaga

SEQ ID NO: 3710169 - DNA, 25 bp, Homo sapien
tccataaatcagctacattaactac

SEQ ID NO: 3710170 - DNA, 25 bp, Homo sapien
gaacatgcattgtgcaaaggtacaa

SEQ ID NO: 3710171 - DNA, 25 bp, Homo sapien
tgctgcttcatgtaaaggtgtaaat

SEQ ID NO: 3710172 - DNA, 25 bp, Homo sapien
gactctactttgaaggttaacatca

SEQ ID NO: 3710173 - DNA, 25 bp, Homo sapien
tagtcagtgttaactataccaaaga

SEQ ID NO: 3710174 - DNA, 25 bp, Homo sapien
gcttaaatgtgcctttggtcaatga

SEQ ID NO: 3710175 - DNA, 25 bp, Homo sapien
catcactgttactaatgtttataca

SEQ ID NO: 3710176 - DNA, 25 bp, Homo sapien
gcatctcccctaagcagatcttgaa

SEQ ID NO: 3710177 - DNA, 25 bp, Homo sapien
gaatgtctgccttgggtatcgcggc

SEQ ID NO: 3710178 - DNA, 25 bp, Homo sapien
tatcgcggcaatttacattatcagg

SEQ ID NO: 3710179 - DNA, 25 bp, Homo sapien
ctggctaaacaacccttcttggcag

SEQ ID NO: 3710180 - DNA, 25 bp, Homo sapien
gatattaccagcctaaatctgtgaa

SEQ ID NO: 3710181 - DNA, 25 bp, Homo sapien
aatgaatctcagatattaccagcct

SEQ ID NO: 3710182 - DNA, 25 bp, Homo sapien
agcctaaatctgtgaaacttcattc

SEQ ID NO: 3710183 - DNA, 25 bp, Homo sapien
gaatctcagatattaccagcctaaa

SEQ ID NO: 3710184 - DNA, 25 bp, Homo sapien
gaaggctggctcaagtaggcatatt

SEQ ID NO: 3710185 - DNA, 25 bp, Homo sapien
aatagcttcaagtacggtcgtcctg

SEQ ID NO: 3710186 - DNA, 25 bp, Homo sapien
caaggcttattgcatccgtgacctc

SEQ ID NO: 3710187 - DNA, 25 bp, Homo sapien
taataaagtgaactcgaactcagct

SEQ ID NO: 3710188 - DNA, 25 bp, Homo sapien
cctgatagccagtggaagtaaagct

SEQ ID NO: 3710189 - DNA, 25 bp, Homo sapien
caaggtatggtatttaacgctgcag

SEQ ID NO: 3710190 - DNA, 25 bp, Homo sapien
catggactagaaactcctgatagcc

SEQ ID NO: 3710191 - DNA, 25 bp, Homo sapien
taagtgttctagataggctacaaga

SEQ ID NO: 3710192 - DNA, 25 bp, Homo sapien
cccttgcctcaagttggaagctttt

SEQ ID NO: 3710193 - DNA, 25 bp, Homo sapien
cacttcttgaactcaggtacatggg

SEQ ID NO: 3710194 - DNA, 25 bp, Homo sapien
tgccttcatgggtgttacataccac

SEQ ID NO: 3710195 - DNA, 25 bp, Homo sapien
cagaggctgcaagtcaaaggtctgc

SEQ ID NO: 3710196 - DNA, 25 bp, Homo sapien
attatgtaaaggaataagtcctcct

SEQ ID NO: 3710197 - DNA, 25 bp, Homo sapien
cgtaagatgctgcattatgtaaagg

SEQ ID NO: 3710198 - DNA, 25 bp, Homo sapien
tttgtcttgggcattcacatcagct

SEQ ID NO: 3710199 - DNA, 25 bp, Homo sapien
tccgtgttgtaacaaatactctgca

SEQ ID NO: 3710200 - DNA, 25 bp, Homo sapien
gaacagattcagaaccgaaatttgg

SEQ ID NO: 3710201 - DNA, 25 bp, Homo sapien
tgataagtcaggaacaatgcatctg

SEQ ID NO: 3710202 - DNA, 25 bp, Homo sapien
aaactacattccatttgagctgcaa

SEQ ID NO: 3710203 - DNA, 25 bp, Homo sapien
acagattccatctaccccgttggtg

SEQ ID NO: 3710204 - DNA, 25 bp, Homo sapien
caaagctgtgttcgtcccttttggg

SEQ ID NO: 3710205 - DNA, 25 bp, Homo sapien
tgatttttaagagtcgggtcagctc

SEQ ID NO: 3710206 - DNA, 25 bp, Homo sapien
gctccatgggctagcaacaaagcac

SEQ ID NO: 3710207 - DNA, 25 bp, Homo sapien
gcttcgtgcaaaggtgtgaaagccc

SEQ ID NO: 3710208 - DNA, 25 bp, Homo sapien
cagttggggccgtgtgtaagaccca

SEQ ID NO: 3710209 - DNA, 25 bp, Homo sapien
ggccgtgtgtaagacccatggtctg

SEQ ID NO: 3710210 - DNA, 25 bp, Homo sapien
ccatggtctgtaccatctgcgctgt

SEQ ID NO: 3710211 - DNA, 25 bp, Homo sapien
gcaatgttcccagttggggccgtgt

SEQ ID NO: 3710212 - DNA, 25 bp, Homo sapien
agaggcaagagaggcatctgcttca

SEQ ID NO: 3710213 - DNA, 25 bp, Homo sapien
tcagtggaagctcctacacctgctc

SEQ ID NO: 3710214 - DNA, 25 bp, Homo sapien
gtggaaggttcagtggaagctccta

SEQ ID NO: 3710215 - DNA, 25 bp, Homo sapien
cttcagtgcccaaagcagaggtgga

SEQ ID NO: 3710216 - DNA, 25 bp, Homo sapien
aaaacccagcaatttgtgccagtac

SEQ ID NO: 3710217 - DNA, 25 bp, Homo sapien
gggtacgtgtcagagacaacatctg

SEQ ID NO: 3710218 - DNA, 25 bp, Homo sapien
gcaaacaggttaatacaggtcaaac

SEQ ID NO: 3710219 - DNA, 25 bp, Homo sapien
tatcacaatggaggattattcattt

SEQ ID NO: 3710220 - DNA, 25 bp, Homo sapien
ggctgctgtcagaagagcgctgaca

SEQ ID NO: 3710221 - DNA, 25 bp, Homo sapien
tcagaagagcgctgacatcatccgc

SEQ ID NO: 3710222 - DNA, 25 bp, Homo sapien
gctgtcagaagagcgctgacatcat

SEQ ID NO: 3710223 - DNA, 25 bp, Homo sapien
gtcagaagagcgctgacatcatccg

SEQ ID NO: 3710224 - DNA, 25 bp, Homo sapien
tgcagaaaggcttgatgggctagat

SEQ ID NO: 3710225 - DNA, 25 bp, Homo sapien
cacttgaactaactactgaagacag

SEQ ID NO: 3710226 - DNA, 25 bp, Homo sapien
cagataagttgtcaagactgctggc

SEQ ID NO: 3710227 - DNA, 25 bp, Homo sapien
ccattgagcacttgaggcttgtaac

SEQ ID NO: 3710228 - DNA, 25 bp, Homo sapien
ccaagattccttacgaattgagtta

SEQ ID NO: 3710229 - DNA, 25 bp, Homo sapien
cgaattgagttatgctaaaatctac

SEQ ID NO: 3710230 - DNA, 25 bp, Homo sapien
tccattaggtgctcaagtccaagat

SEQ ID NO: 3710231 - DNA, 25 bp, Homo sapien
caaatatatccattaggtgctcaag

SEQ ID NO: 3710232 - DNA, 25 bp, Homo sapien
tcgactcctttaattagtttgtgcc

SEQ ID NO: 3710233 - DNA, 25 bp, Homo sapien
gagataagtctctcgactcctttaa

SEQ ID NO: 3710234 - DNA, 25 bp, Homo sapien
cctttaattagtttgtgcctatgtc

SEQ ID NO: 3710235 - DNA, 25 bp, Homo sapien
cttgttgtccggagataagtctctc

SEQ ID NO: 3710236 - DNA, 25 bp, Homo sapien
cacttacagaagtggctgaactgca

SEQ ID NO: 3710237 - DNA, 25 bp, Homo sapien
gagaaatccacagtttaccacctat

SEQ ID NO: 3710238 - DNA, 25 bp, Homo sapien
gaagaacaggactactaccaacatg

SEQ ID NO: 3710239 - DNA, 25 bp, Homo sapien
tcaaagctatggtctgaagaacagg

SEQ ID NO: 3710240 - DNA, 25 bp, Homo sapien
tgcacctggccgcttactatcaatt

SEQ ID NO: 3710241 - DNA, 25 bp, Homo sapien
tttcactagtttccccacttatgtc

SEQ ID NO: 3710242 - DNA, 25 bp, Homo sapien
tgttaccattttatataaccatagc

SEQ ID NO: 3710243 - DNA, 25 bp, Homo sapien
tagatgtcattttttcactagtttc

SEQ ID NO: 3710244 - DNA, 25 bp, Homo sapien
ccagaggtgttcaaagttaaatatg

SEQ ID NO: 3710245 - DNA, 25 bp, Homo sapien
cttcctccacagactgaaactcttt

SEQ ID NO: 3710246 - DNA, 25 bp, Homo sapien
gaattgttccactaccagaggtgtt

SEQ ID NO: 3710247 - DNA, 25 bp, Homo sapien
tcatcaggagacagatctataagaa

SEQ ID NO: 3710248 - DNA, 25 bp, Homo sapien
tgaagattccacctgcatgacctcc

SEQ ID NO: 3710249 - DNA, 25 bp, Homo sapien
gttgaagattccacctgcatgacct

SEQ ID NO: 3710250 - DNA, 25 bp, Homo sapien
ctccatctctgtgctctcgaactgt

SEQ ID NO: 3710251 - DNA, 25 bp, Homo sapien
tgtgctctcgaactgtactttgcat

SEQ ID NO: 3710252 - DNA, 25 bp, Homo sapien
ttcgttcattggcatggttgtggtt

SEQ ID NO: 3710253 - DNA, 25 bp, Homo sapien
tggcatggttgtggttttcttcaga

SEQ ID NO: 3710254 - DNA, 25 bp, Homo sapien
attcgttcattggcatggttgtggt

SEQ ID NO: 3710255 - DNA, 25 bp, Homo sapien
tcattggcatggttgtggttttctt

SEQ ID NO: 3710256 - DNA, 25 bp, Homo sapien
gctccaaacataccacctatgtacg

SEQ ID NO: 3710257 - DNA, 25 bp, Homo sapien
tacgcatgcctttcatcaaagcctt

SEQ ID NO: 3710258 - DNA, 25 bp, Homo sapien
tgtggcaaatgtaacaagatctgtc

SEQ ID NO: 3710259 - DNA, 25 bp, Homo sapien
gataattgcattcacaaaaggagac

SEQ ID NO: 3710260 - DNA, 25 bp, Homo sapien
cataggagggcctactgtgtactac

SEQ ID NO: 3710261 - DNA, 25 bp, Homo sapien
gaagtaaactggtagtctcccctca

SEQ ID NO: 3710262 - DNA, 25 bp, Homo sapien
gactgcaattcttcagctcggaagc

SEQ ID NO: 3710263 - DNA, 25 bp, Homo sapien
tgtgtactacctatgcaggcctaaa

SEQ ID NO: 3710264 - DNA, 25 bp, Homo sapien
taatgctaggccatttacactgggc

SEQ ID NO: 3710265 - DNA, 25 bp, Homo sapien
ggttacccggcaaaagagcagctgc

SEQ ID NO: 3710266 - DNA, 25 bp, Homo sapien
tacactgggcctaccagtgactgag

SEQ ID NO: 3710267 - DNA, 25 bp, Homo sapien
catattcagctaatgctaggccatt

SEQ ID NO: 3710268 - DNA, 25 bp, Homo sapien
tagttaatggtaaagggacatgccc

SEQ ID NO: 3710269 - DNA, 25 bp, Homo sapien
aatccggaacgactggcgaaatttg

SEQ ID NO: 3710270 - DNA, 25 bp, Homo sapien
gattttagtaactgcggtgattccg

SEQ ID NO: 3710271 - DNA, 25 bp, Homo sapien
ggtgattccgatacctactcccagt

SEQ ID NO: 3710272 - DNA, 25 bp, Homo sapien
cttcaggcctcataatctggtaagt

SEQ ID NO: 3710273 - DNA, 25 bp, Homo sapien
ttcaggcctcataatctggtaagta

SEQ ID NO: 3710274 - DNA, 25 bp, Homo sapien
aagtaattaaatactcaggataagc

SEQ ID NO: 3710275 - DNA, 25 bp, Homo sapien
taatctggtaagtaattaaatactc

SEQ ID NO: 3710276 - DNA, 25 bp, Homo sapien
gaagcttctttagtaatcaggacct

SEQ ID NO: 3710277 - DNA, 25 bp, Homo sapien
tactgggctagtacaaaagctctta

SEQ ID NO: 3710278 - DNA, 25 bp, Homo sapien
ggagtaaaacgtagaggccactgct

SEQ ID NO: 3710279 - DNA, 25 bp, Homo sapien
gataaaggctcccatcggcaaatta

SEQ ID NO: 3710280 - DNA, 25 bp, Homo sapien
cctggaggggactgagacaactaca

SEQ ID NO: 3710281 - DNA, 25 bp, Homo sapien
attgggcataacatcatggagagaa

SEQ ID NO: 3710282 - DNA, 25 bp, Homo sapien
gtttcactgcacttgcccattcagg

SEQ ID NO: 3710283 - DNA, 25 bp, Homo sapien
cccatgatgtatagattggctataa

SEQ ID NO: 3710284 - DNA, 25 bp, Homo sapien
tgccatgctaacatatgaaccacgg

SEQ ID NO: 3710285 - DNA, 25 bp, Homo sapien
gagcacaggcgtggtcaccatatgg

SEQ ID NO: 3710286 - DNA, 25 bp, Homo sapien
caccatatggtgcacaaactgacag

SEQ ID NO: 3710287 - DNA, 25 bp, Homo sapien
tgcaaagggccagttaatttacaga

SEQ ID NO: 3710288 - DNA, 25 bp, Homo sapien
ttctcaaagaccattcaacacattt

SEQ ID NO: 3710289 - DNA, 25 bp, Homo sapien
cctgcaattgtggtttattgtaatc

SEQ ID NO: 3710290 - DNA, 25 bp, Homo sapien
attcaacacatttatactattccag

SEQ ID NO: 3710291 - DNA, 25 bp, Homo sapien
tccagtaattaccatgctacccaga

SEQ ID NO: 3710292 - DNA, 25 bp, Homo sapien
aatttcccaggaatgagctttaagg

SEQ ID NO: 3710293 - DNA, 25 bp, Homo sapien
gactaaatgttgaaagcatctcaca

SEQ ID NO: 3710294 - DNA, 25 bp, Homo sapien
cagggaattgctcacacacaaggaa

SEQ ID NO: 3710295 - DNA, 25 bp, Homo sapien
taccagttgtgctgaatagactaaa

SEQ ID NO: 3710296 - DNA, 25 bp, Homo sapien
taaatgaagtaacaccccagtatag

SEQ ID NO: 3710297 - DNA, 25 bp, Homo sapien
caccccagtataggggcaagggatg

SEQ ID NO: 3710298 - DNA, 25 bp, Homo sapien
aatgaagtaacaccccagtataggg

SEQ ID NO: 3710299 - DNA, 25 bp, Homo sapien
agtaacaccccagtataggggcaag

SEQ ID NO: 3710300 - DNA, 25 bp, Homo sapien
tagagaaaaatctcttgcagctgcc

SEQ ID NO: 3710301 - DNA, 25 bp, Homo sapien
gagtgacactctgtactgggaggcc

SEQ ID NO: 3710302 - DNA, 25 bp, Homo sapien
aatcttcagtgacaaccagagagag

SEQ ID NO: 3710303 - DNA, 25 bp, Homo sapien
ctgggaggcccattgactgagtcac

SEQ ID NO: 3710304 - DNA, 25 bp, Homo sapien
ctctgaagccaacccgtaatgcatg

SEQ ID NO: 3710305 - DNA, 25 bp, Homo sapien
tgcatgatcagcacaaagccctgag

SEQ ID NO: 3710306 - DNA, 25 bp, Homo sapien
gcggtaaggtgtctgtgcctctgaa

SEQ ID NO: 3710307 - DNA, 25 bp, Homo sapien
cagtggaagctgacctaacatgacg

SEQ ID NO: 3710308 - DNA, 25 bp, Homo sapien
gtgtggccggagaggacttttttca

SEQ ID NO: 3710309 - DNA, 25 bp, Homo sapien
aagctctctcaaatgccggagactc

SEQ ID NO: 3710310 - DNA, 25 bp, Homo sapien
tctcaaatgccggagactccacggg

SEQ ID NO: 3710311 - DNA, 25 bp, Homo sapien
ccaggcagggaacggggtgtggccg

SEQ ID NO: 3710312 - DNA, 25 bp, Homo sapien
gaggcggtggtctgatgccggtggg

SEQ ID NO: 3710313 - DNA, 25 bp, Homo sapien
ttccccgctattcacgcggccctgg

SEQ ID NO: 3710314 - DNA, 25 bp, Homo sapien
tgagctccgcagtcacgttaccttc

SEQ ID NO: 3710315 - DNA, 25 bp, Homo sapien
attcctccgctgaatggaggcggtg

SEQ ID NO: 3710316 - DNA, 25 bp, Homo sapien
tgcggcctcgacattccagtctcaa

SEQ ID NO: 3710317 - DNA, 25 bp, Homo sapien
caagcatgcacagctgcacttggct

SEQ ID NO: 3710318 - DNA, 25 bp, Homo sapien
tgtaataataggcactgcagtctcc

SEQ ID NO: 3710319 - DNA, 25 bp, Homo sapien
gggtgtgccactagaagtgctactt

SEQ ID NO: 3710320 - DNA, 25 bp, Homo sapien
ttctggaacggctgagactgcctgc

SEQ ID NO: 3710321 - DNA, 25 bp, Homo sapien
cctgccggcttagggagggttgatg

SEQ ID NO: 3710322 - DNA, 25 bp, Homo sapien
tgtcaatttctggaacggctgagac

SEQ ID NO: 3710323 - DNA, 25 bp, Homo sapien
ctgagactgcctgccggcttaggga

SEQ ID NO: 3710324 - DNA, 25 bp, Homo sapien
gaagaccaacgagggcaagaggaag

SEQ ID NO: 3710325 - DNA, 25 bp, Homo sapien
gggctggacgggaacgcggagctca

SEQ ID NO: 3710326 - DNA, 25 bp, Homo sapien
ggccttggtccccaacgaggagcga

SEQ ID NO: 3710327 - DNA, 25 bp, Homo sapien
gcggacccgggagcgtgcgtccggc

SEQ ID NO: 3710328 - DNA, 25 bp, Homo sapien
ggctagcaacgtggcggagccggtc

SEQ ID NO: 3710329 - DNA, 25 bp, Homo sapien
tcgggtcgcttcctcagccccgagc

SEQ ID NO: 3710330 - DNA, 25 bp, Homo sapien
ccaccagtgcgcctaccgcgggcat

SEQ ID NO: 3710331 - DNA, 25 bp, Homo sapien
cgagcagcacgcgtgcagctggcag

SEQ ID NO: 3710332 - DNA, 25 bp, Homo sapien
tgtggctcagttggtggcagtctct

SEQ ID NO: 3710333 - DNA, 25 bp, Homo sapien
gggaatgctctttgcctggtccagc

SEQ ID NO: 3710334 - DNA, 25 bp, Homo sapien
ccgacaaacgtggtctgagaacagc

SEQ ID NO: 3710335 - DNA, 25 bp, Homo sapien
gcggaaaccgcggagcatgactcct

SEQ ID NO: 3710336 - DNA, 25 bp, Homo sapien
tctaccctaataaggctttggcgcc

SEQ ID NO: 3710337 - DNA, 25 bp, Homo sapien
ggcggtgataagtctcccagtgtga

SEQ ID NO: 3710338 - DNA, 25 bp, Homo sapien
tatttcatactacaggaccgcttcc

SEQ ID NO: 3710339 - DNA, 25 bp, Homo sapien
cagggagccggctaaaacagactac

SEQ ID NO: 3710340 - DNA, 25 bp, Homo sapien
ctgacgcgggcgtcggcacgcacaa

SEQ ID NO: 3710341 - DNA, 25 bp, Homo sapien
tcaaaccgggtaccctcagctccgc

SEQ ID NO: 3710342 - DNA, 25 bp, Homo sapien
caaaccgggtaccctcagctccgct

SEQ ID NO: 3710343 - DNA, 25 bp, Homo sapien
gctagtttccagagagctgagcggc

SEQ ID NO: 3710344 - DNA, 25 bp, Homo sapien
gcagctgaggcgctagtttccagag

SEQ ID NO: 3710345 - DNA, 25 bp, Homo sapien
gggcatctgccctgccgcctacccg

SEQ ID NO: 3710346 - DNA, 25 bp, Homo sapien
gcggttcggagctccccgcgaccta

SEQ ID NO: 3710347 - DNA, 25 bp, Homo sapien
ccaaaattgcctccctgaatagagg

SEQ ID NO: 3710348 - DNA, 25 bp, Homo sapien
tcttcaggacagcagattggacacc

SEQ ID NO: 3710349 - DNA, 25 bp, Homo sapien
gatctgacaagagggcagtctgacc

SEQ ID NO: 3710350 - DNA, 25 bp, Homo sapien
tgacctgttatctcaggatagccag

SEQ ID NO: 3710351 - DNA, 25 bp, Homo sapien
tttgagaaacatccttaatctgtga

SEQ ID NO: 3710352 - DNA, 25 bp, Homo sapien
cttcctttgagaaacatccttaatc

SEQ ID NO: 3710353 - DNA, 25 bp, Homo sapien
cagttggtaatgtaatgtttcagta

SEQ ID NO: 3710354 - DNA, 25 bp, Homo sapien
tcagttggtaatgtaatgtttcagt

SEQ ID NO: 3710355 - DNA, 25 bp, Homo sapien
agctgtgcagatataatggccccat

SEQ ID NO: 3710356 - DNA, 25 bp, Homo sapien
cagctgtgcagatataatggcccca

SEQ ID NO: 3710357 - DNA, 25 bp, Homo sapien
actcttaggctccaaatccaatagt

SEQ ID NO: 3710358 - DNA, 25 bp, Homo sapien
cttctttgacagctgcgaccagcaa

SEQ ID NO: 3710359 - DNA, 25 bp, Homo sapien
tcttaggctccaaatccaatagttt

SEQ ID NO: 3710360 - DNA, 25 bp, Homo sapien
tctttgacagctgcgaccagcaagc

SEQ ID NO: 3710361 - DNA, 25 bp, Homo sapien
tttagacaggagattatttagttca

SEQ ID NO: 3710362 - DNA, 25 bp, Homo sapien
ttttcttgtaacaggagtagtgcca

SEQ ID NO: 3710363 - DNA, 25 bp, Homo sapien
ggagtagtgccagtatccagtaaaa

SEQ ID NO: 3710364 - DNA, 25 bp, Homo sapien
gacaggagattatttagttcatggg

SEQ ID NO: 3710365 - DNA, 25 bp, Homo sapien
gctgacagccgaggaaaaaggaaag

SEQ ID NO: 3710366 - DNA, 25 bp, Homo sapien
aaacgctgacagccgaggaaaaagg

SEQ ID NO: 3710367 - DNA, 25 bp, Homo sapien
aaaacgctgacagccgaggaaaaag

SEQ ID NO: 3710368 - DNA, 25 bp, Homo sapien
ttggcaataagaatgaatatacatg

SEQ ID NO: 3710369 - DNA, 25 bp, Homo sapien
aaaaatcagtaagatgtacacatgt

SEQ ID NO: 3710370 - DNA, 25 bp, Homo sapien
tatttggcaataagaatgaatatac

SEQ ID NO: 3710371 - DNA, 25 bp, Homo sapien
aatcagtaagatgtacacatgtata

SEQ ID NO: 3710372 - DNA, 25 bp, Homo sapien
tatgaagaactttcgcaactcataa

SEQ ID NO: 3710373 - DNA, 25 bp, Homo sapien
tgaagaactataccatatgaagaac

SEQ ID NO: 3710374 - DNA, 25 bp, Homo sapien
catatgcctgatatcattagtcatc

SEQ ID NO: 3710375 - DNA, 25 bp, Homo sapien
atgcaaatcaaaccccttcatatcc

SEQ ID NO: 3710376 - DNA, 25 bp, Homo sapien
tattgtttgcgcaaggtagccagaa

SEQ ID NO: 3710377 - DNA, 25 bp, Homo sapien
aatattgtttgcgcaaggtagccag

SEQ ID NO: 3710378 - DNA, 25 bp, Homo sapien
aaaatattgtttgcgcaaggtagcc

SEQ ID NO: 3710379 - DNA, 25 bp, Homo sapien
caaaaatattgtttgcgcaaggtag

SEQ ID NO: 3710380 - DNA, 25 bp, Homo sapien
tcactatagcttcaacagcttgtcc

SEQ ID NO: 3710381 - DNA, 25 bp, Homo sapien
ttgtctggttctcggcactggattc

SEQ ID NO: 3710382 - DNA, 25 bp, Homo sapien
ctggattccactcaggtacattttt

SEQ ID NO: 3710383 - DNA, 25 bp, Homo sapien
gcttgtcctgctgcaatccgggtat

SEQ ID NO: 3710384 - DNA, 25 bp, Homo sapien
gacaaagctgtacctaaaagcatgg

SEQ ID NO: 3710385 - DNA, 25 bp, Homo sapien
tgtacctaaaagcatggaaattaag

SEQ ID NO: 3710386 - DNA, 25 bp, Homo sapien
caaagctgtacctaaaagcatggaa

SEQ ID NO: 3710387 - DNA, 25 bp, Homo sapien
ttcctgacaaagctgtacctaaaag

SEQ ID NO: 3710388 - DNA, 25 bp, Homo sapien
cagatcccaggagtgatgcaccatg

SEQ ID NO: 3710389 - DNA, 25 bp, Homo sapien
cgctctgtagtaggtgaatcttcca

SEQ ID NO: 3710390 - DNA, 25 bp, Homo sapien
tctgtcaaaattcaatcgctctgta

SEQ ID NO: 3710391 - DNA, 25 bp, Homo sapien
tggacttcaaattcggcaccagcag

SEQ ID NO: 3710392 - DNA, 25 bp, Homo sapien
tgttgagacaacaggatagccacat

SEQ ID NO: 3710393 - DNA, 25 bp, Homo sapien
ggtactcgcgtaagaatagacatca

SEQ ID NO: 3710394 - DNA, 25 bp, Homo sapien
tggacccttaacctcaaaacatata

SEQ ID NO: 3710395 - DNA, 25 bp, Homo sapien
gacaagagttccagagcaattcaat

SEQ ID NO: 3710396 - DNA, 25 bp, Homo sapien
tcttcagtactcattccaattgctt

SEQ ID NO: 3710397 - DNA, 25 bp, Homo sapien
gcttctcccatattaaggccaagtt

SEQ ID NO: 3710398 - DNA, 25 bp, Homo sapien
tcttctgtaataattttcgttggcg

SEQ ID NO: 3710399 - DNA, 25 bp, Homo sapien
gtttgttaacaaaggatgctgaagt

SEQ ID NO: 3710400 - DNA, 25 bp, Homo sapien
tgctgagttggaacttttgaaatta

SEQ ID NO: 3710401 - DNA, 25 bp, Homo sapien
cctcagaagaagaccaagtctataa

SEQ ID NO: 3710402 - DNA, 25 bp, Homo sapien
cagtatatatacatcgatcacattc

SEQ ID NO: 3710403 - DNA, 25 bp, Homo sapien
aagaataaaagaatgctgagttgga

SEQ ID NO: 3710404 - DNA, 25 bp, Homo sapien
tgtctattgctcattcctgctcgaa

SEQ ID NO: 3710405 - DNA, 25 bp, Homo sapien
tgagtcaatcaattcagctgcctga

SEQ ID NO: 3710406 - DNA, 25 bp, Homo sapien
ttttgcaaataacttggccattctt

SEQ ID NO: 3710407 - DNA, 25 bp, Homo sapien
cattcctgctcgaaactctgagtca

SEQ ID NO: 3710408 - DNA, 25 bp, Homo sapien
tggagatcctcagccctcattcaaa

SEQ ID NO: 3710409 - DNA, 25 bp, Homo sapien
gacacagattaaagccacagagccc

SEQ ID NO: 3710410 - DNA, 25 bp, Homo sapien
gtggtctcagttcctagtacaatga

SEQ ID NO: 3710411 - DNA, 25 bp, Homo sapien
agtactccccagctaaatatgtcag

SEQ ID NO: 3710412 - DNA, 25 bp, Homo sapien
tctttggctaaaagtgcttgtatga

SEQ ID NO: 3710413 - DNA, 25 bp, Homo sapien
tccagactataacctccgaaggcag

SEQ ID NO: 3710414 - DNA, 25 bp, Homo sapien
tattttattcacacatgtcctcagg

SEQ ID NO: 3710415 - DNA, 25 bp, Homo sapien
gcagttaaagatttaccctcaagta

SEQ ID NO: 3710416 - DNA, 25 bp, Homo sapien
tctggaatattatcaatcaagactt

SEQ ID NO: 3710417 - DNA, 25 bp, Homo sapien
tggctccccatcagtgctatcattg

SEQ ID NO: 3710418 - DNA, 25 bp, Homo sapien
agctgtctggaatattatcaatcaa

SEQ ID NO: 3710419 - DNA, 25 bp, Homo sapien
cagactgattaataacaacatttgc

SEQ ID NO: 3710420 - DNA, 25 bp, Homo sapien
tggatactttagagtctttcaagag

SEQ ID NO: 3710421 - DNA, 25 bp, Homo sapien
ttaatggatactttagagtctttca

SEQ ID NO: 3710422 - DNA, 25 bp, Homo sapien
aatggatactttagagtctttcaag

SEQ ID NO: 3710423 - DNA, 25 bp, Homo sapien
gatactttagagtctttcaagagta

SEQ ID NO: 3710424 - DNA, 25 bp, Homo sapien
gattaaaaaggtcattgcaaagttc

SEQ ID NO: 3710425 - DNA, 25 bp, Homo sapien
attaaaaaggtcattgcaaagttct

SEQ ID NO: 3710426 - DNA, 25 bp, Homo sapien
taaaaaggtcattgcaaagttcttc

SEQ ID NO: 3710427 - DNA, 25 bp, Homo sapien
agtccagtgcctgcaccatgtcgaa

SEQ ID NO: 3710428 - DNA, 25 bp, Homo sapien
agtgctgtcacccattttaccacca

SEQ ID NO: 3710429 - DNA, 25 bp, Homo sapien
agaatttccctaagtccagtgcctg

SEQ ID NO: 3710430 - DNA, 25 bp, Homo sapien
cctaagtccagtgcctgcaccatgt

SEQ ID NO: 3710431 - DNA, 25 bp, Homo sapien
tctcattcctacttcacggcacata

SEQ ID NO: 3710432 - DNA, 25 bp, Homo sapien
tactcgttacttccctacattggaa

SEQ ID NO: 3710433 - DNA, 25 bp, Homo sapien
ctcttatttacctctcattcctact

SEQ ID NO: 3710434 - DNA, 25 bp, Homo sapien
tacttcacggcacatactcgttact

SEQ ID NO: 3710435 - DNA, 25 bp, Homo sapien
taataaccaagtcttccaaccactc

SEQ ID NO: 3710436 - DNA, 25 bp, Homo sapien
tcttccaaccactcttgatgctgct

SEQ ID NO: 3710437 - DNA, 25 bp, Homo sapien
aacacaaaggagtctaataaccaag

SEQ ID NO: 3710438 - DNA, 25 bp, Homo sapien
gagtctaataaccaagtcttccaac

SEQ ID NO: 3710439 - DNA, 25 bp, Homo sapien
caagtttcacgaactggtgccacaa

SEQ ID NO: 3710440 - DNA, 25 bp, Homo sapien
gacggactgccaaagcatattttat

SEQ ID NO: 3710441 - DNA, 25 bp, Homo sapien
accacacctaatgtttgagcacaag

SEQ ID NO: 3710442 - DNA, 25 bp, Homo sapien
taattttagcagcacatccacagtc

SEQ ID NO: 3710443 - DNA, 25 bp, Homo sapien
caatgccaccgacaaccaaaaggaa

SEQ ID NO: 3710444 - DNA, 25 bp, Homo sapien
catgttttatacgtaagactatgaa

SEQ ID NO: 3710445 - DNA, 25 bp, Homo sapien
gaagcctaagtaatcccatttgaaa

SEQ ID NO: 3710446 - DNA, 25 bp, Homo sapien
tgccagaatcctagcctccatatct

SEQ ID NO: 3710447 - DNA, 25 bp, Homo sapien
cctggagtccttcaattattctagt

SEQ ID NO: 3710448 - DNA, 25 bp, Homo sapien
agacaaggctttctactacaggcac

SEQ ID NO: 3710449 - DNA, 25 bp, Homo sapien
agatagacaaggctttctactacag

SEQ ID NO: 3710450 - DNA, 25 bp, Homo sapien
tggagtccttcaattattctagtta

SEQ ID NO: 3710451 - DNA, 25 bp, Homo sapien
gagagtggggctacatgtcatccac

SEQ ID NO: 3710452 - DNA, 25 bp, Homo sapien
tacatgtcatccactgcactctggc

SEQ ID NO: 3710453 - DNA, 25 bp, Homo sapien
gggctacatgtcatccactgcactc

SEQ ID NO: 3710454 - DNA, 25 bp, Homo sapien
aggagagtggggctacatgtcatcc

SEQ ID NO: 3710455 - DNA, 25 bp, Homo sapien
gtaagttaacaaggatgaaaggaga

SEQ ID NO: 3710456 - DNA, 25 bp, Homo sapien
tgaaaggagagtcataatactattt

SEQ ID NO: 3710457 - DNA, 25 bp, Homo sapien
ggagagtcataatactatttgttga

SEQ ID NO: 3710458 - DNA, 25 bp, Homo sapien
acctgagggtaagttaacaaggatg

SEQ ID NO: 3710459 - DNA, 25 bp, Homo sapien
cactgaacgccctcactaggacaag

SEQ ID NO: 3710460 - DNA, 25 bp, Homo sapien
tctaacaatattcaagggccagtct

SEQ ID NO: 3710461 - DNA, 25 bp, Homo sapien
tagagccagaaaccacatataagca

SEQ ID NO: 3710462 - DNA, 25 bp, Homo sapien
catctatgggtttcatgggaaatac

SEQ ID NO: 3710463 - DNA, 25 bp, Homo sapien
tattacccatgtacagctgttttca

SEQ ID NO: 3710464 - DNA, 25 bp, Homo sapien
gtgtacacaggcacgttcattctct

SEQ ID NO: 3710465 - DNA, 25 bp, Homo sapien
taaactagaagaaagtatctgccaa

SEQ ID NO: 3710466 - DNA, 25 bp, Homo sapien
tgtctaactgttcatgctccaaata

SEQ ID NO: 3710467 - DNA, 25 bp, Homo sapien
gctgctcttcgaactgatgatatag

SEQ ID NO: 3710468 - DNA, 25 bp, Homo sapien
ctggtcctgtgttgataataacgta

SEQ ID NO: 3710469 - DNA, 25 bp, Homo sapien
aacgtaaacagagtttccaatgctg

SEQ ID NO: 3710470 - DNA, 25 bp, Homo sapien
tgatatagtgtgatgcaaaaaaggc

SEQ ID NO: 3710471 - DNA, 25 bp, Homo sapien
gccatgggttctgccagccacccaa

SEQ ID NO: 3710472 - DNA, 25 bp, Homo sapien
tgggccatgggttctgccagccacc

SEQ ID NO: 3710473 - DNA, 25 bp, Homo sapien
ctgggccatgggttctgccagccac

SEQ ID NO: 3710474 - DNA, 25 bp, Homo sapien
ggccatgggttctgccagccaccca

SEQ ID NO: 3710475 - DNA, 25 bp, Homo sapien
tgtacagaagagtgaacgaacccta

SEQ ID NO: 3710476 - DNA, 25 bp, Homo sapien
tactgtaaagtgtggactttaatgt

SEQ ID NO: 3710477 - DNA, 25 bp, Homo sapien
gtaaagtgtggactttaatgtatca

SEQ ID NO: 3710478 - DNA, 25 bp, Homo sapien
aatattggctcatcagttttaataa

SEQ ID NO: 3710479 - DNA, 25 bp, Homo sapien
tctagtaatgtaaagttggtattac

SEQ ID NO: 3710480 - DNA, 25 bp, Homo sapien
gcctgcaggtggcttgatcacctaa

SEQ ID NO: 3710481 - DNA, 25 bp, Homo sapien
caagttaaaaatagcctgcaggtgg

SEQ ID NO: 3710482 - DNA, 25 bp, Homo sapien
ggcttgatcacctaataaggaataa

SEQ ID NO: 3710483 - DNA, 25 bp, Homo sapien
cattgcataatgacgactttaaaca

SEQ ID NO: 3710484 - DNA, 25 bp, Homo sapien
cagaaagcaaataatgggatcacaa

SEQ ID NO: 3710485 - DNA, 25 bp, Homo sapien
agatttgatttgtctcatgagagaa

SEQ ID NO: 3710486 - DNA, 25 bp, Homo sapien
gctttgtcgcactagagatttgatt

SEQ ID NO: 3710487 - DNA, 25 bp, Homo sapien
gccacctcatgtaaactgcttagca

SEQ ID NO: 3710488 - DNA, 25 bp, Homo sapien
gttcctagcataaagtaagccctca

SEQ ID NO: 3710489 - DNA, 25 bp, Homo sapien
ggcagtagccacctcatgtaaactg

SEQ ID NO: 3710490 - DNA, 25 bp, Homo sapien
aagccctcaacagcttagattatta

SEQ ID NO: 3710491 - DNA, 25 bp, Homo sapien
ctgaaaaatgtgtcggagcatatca

SEQ ID NO: 3710492 - DNA, 25 bp, Homo sapien
tatcaggcagtataggtataagcca

SEQ ID NO: 3710493 - DNA, 25 bp, Homo sapien
tgtgtcggagcatatcaggcagtat

SEQ ID NO: 3710494 - DNA, 25 bp, Homo sapien
cttgtgaataaggtccagaatttcc

SEQ ID NO: 3710495 - DNA, 25 bp, Homo sapien
tcgataggtaaatgagaaggctgca

SEQ ID NO: 3710496 - DNA, 25 bp, Homo sapien
tactgaactgaagccttactcaaca

SEQ ID NO: 3710497 - DNA, 25 bp, Homo sapien
gcagctgctaccacatactgaactg

SEQ ID NO: 3710498 - DNA, 25 bp, Homo sapien
aaggctgcatcatcaagcaaagcca

SEQ ID NO: 3710499 - DNA, 25 bp, Homo sapien
tctggcccgcataactacaaaatcc

SEQ ID NO: 3710500 - DNA, 25 bp, Homo sapien
caaaatccctggtggctgggtcttc

SEQ ID NO: 3710501 - DNA, 25 bp, Homo sapien
tggctttggccttggcgcaccttac

SEQ ID NO: 3710502 - DNA, 25 bp, Homo sapien
cggcacctgcaatatactcctgaag

SEQ ID NO: 3710503 - DNA, 25 bp, Homo sapien
cctttgaaagccagacttgtaaatg

SEQ ID NO: 3710504 - DNA, 25 bp, Homo sapien
ccttaggctataattagtgtgatga

SEQ ID NO: 3710505 - DNA, 25 bp, Homo sapien
tgtaaatgtatgactacctgacact

SEQ ID NO: 3710506 - DNA, 25 bp, Homo sapien
gactacctgacacttaatgtacact

SEQ ID NO: 3710507 - DNA, 25 bp, Homo sapien
gcagacttggagttcaaatggaaga

SEQ ID NO: 3710508 - DNA, 25 bp, Homo sapien
tacacctggatcacaaatacagcaa

SEQ ID NO: 3710509 - DNA, 25 bp, Homo sapien
ttgagttaccacatttacacctgga

SEQ ID NO: 3710510 - DNA, 25 bp, Homo sapien
aaagctacactaatcctctgtaaag

SEQ ID NO: 3710511 - DNA, 25 bp, Homo sapien
caagtaactctcacagcaagtgcag

SEQ ID NO: 3710512 - DNA, 25 bp, Homo sapien
tggagcatggctcaattacttttag

SEQ ID NO: 3710513 - DNA, 25 bp, Homo sapien
tttagatacagctttgacaaactgc

SEQ ID NO: 3710514 - DNA, 25 bp, Homo sapien
aactcctgcctaaaaacagatgagc

SEQ ID NO: 3710515 - DNA, 25 bp, Homo sapien
tctgcattcgtgtgaatggaacggc

SEQ ID NO: 3710516 - DNA, 25 bp, Homo sapien
cagctaaggtaacagctttacactc

SEQ ID NO: 3710517 - DNA, 25 bp, Homo sapien
gaaaggatatcaagtaaacgcggct

SEQ ID NO: 3710518 - DNA, 25 bp, Homo sapien
aacattgttgtttactcgattacca

SEQ ID NO: 3710519 - DNA, 25 bp, Homo sapien
tcataggcatatgcatctgtcaaaa

SEQ ID NO: 3710520 - DNA, 25 bp, Homo sapien
gtatcttgacagtggttcaggtttc

SEQ ID NO: 3710521 - DNA, 25 bp, Homo sapien
aattcaccaaatggtccacctaaga

SEQ ID NO: 3710522 - DNA, 25 bp, Homo sapien
tgtgctttagcacataaatttttcc

SEQ ID NO: 3710523 - DNA, 25 bp, Homo sapien
tagggacatcttggcaaacaaagtg

SEQ ID NO: 3710524 - DNA, 25 bp, Homo sapien
tgcgcaagaagaaagctaactgggc

SEQ ID NO: 3710525 - DNA, 25 bp, Homo sapien
caaaggaaatagaagctcgggccca

SEQ ID NO: 3710526 - DNA, 25 bp, Homo sapien
taagtgtagcgtacttgcgcaagaa

SEQ ID NO: 3710527 - DNA, 25 bp, Homo sapien
taactgaggtaagtgcaagttgctg

SEQ ID NO: 3710528 - DNA, 25 bp, Homo sapien
tataactgaggtaagtgcaagttgc

SEQ ID NO: 3710529 - DNA, 25 bp, Homo sapien
aagttgctgtgggaatacagagcac

SEQ ID NO: 3710530 - DNA, 25 bp, Homo sapien
agtgcaagttgctgtgggaatacag

SEQ ID NO: 3710531 - DNA, 25 bp, Homo sapien
gaaggagtttagctatgcactgagc

SEQ ID NO: 3710532 - DNA, 25 bp, Homo sapien
ggacctgctgtcgtttactatctaa

SEQ ID NO: 3710533 - DNA, 25 bp, Homo sapien
gacagggcgtccttgttgtgcactg

SEQ ID NO: 3710534 - DNA, 25 bp, Homo sapien
cacaaggagttagatatgggtccac

SEQ ID NO: 3710535 - DNA, 25 bp, Homo sapien
tgtgatagcaaaggcagctttctgg

SEQ ID NO: 3710536 - DNA, 25 bp, Homo sapien
gaatatttccactacttcctgcagg

SEQ ID NO: 3710537 - DNA, 25 bp, Homo sapien
taggacctcgcctacttgtgatagc

SEQ ID NO: 3710538 - DNA, 25 bp, Homo sapien
gctttctggtgcctgtagagtgtaa

SEQ ID NO: 3710539 - DNA, 25 bp, Homo sapien
aatgggccaaccatagcatcccaga

SEQ ID NO: 3710540 - DNA, 25 bp, Homo sapien
gcatcccagagatgtggcaacttca

SEQ ID NO: 3710541 - DNA, 25 bp, Homo sapien
gctcctctccgttgtaccaggtaag

SEQ ID NO: 3710542 - DNA, 25 bp, Homo sapien
tcgattgtattcctcaatgggccaa

SEQ ID NO: 3710543 - DNA, 25 bp, Homo sapien
caattcttgagcagggctatctccc

SEQ ID NO: 3710544 - DNA, 25 bp, Homo sapien
agggctatctcccttatccaggagg

SEQ ID NO: 3710545 - DNA, 25 bp, Homo sapien
aattcaccaattcttgagcagggct

SEQ ID NO: 3710546 - DNA, 25 bp, Homo sapien
gagcagggctatctcccttatccag

SEQ ID NO: 3710547 - DNA, 25 bp, Homo sapien
gctcagaatccattgaagctgctgc

SEQ ID NO: 3710548 - DNA, 25 bp, Homo sapien
gggatgaagctcagaatccattgaa

SEQ ID NO: 3710549 - DNA, 25 bp, Homo sapien
gatgaagctcagaatccattgaagc

SEQ ID NO: 3710550 - DNA, 25 bp, Homo sapien
caagggatgaagctcagaatccatt

SEQ ID NO: 3710551 - DNA, 25 bp, Homo sapien
cattgtttccatggtagctattttg

SEQ ID NO: 3710552 - DNA, 25 bp, Homo sapien
ctattttgctcatgacacctacaca

SEQ ID NO: 3710553 - DNA, 25 bp, Homo sapien
acaacgagcagccatgtgcctcact

SEQ ID NO: 3710554 - DNA, 25 bp, Homo sapien
cagccacggaagaaccttctccaaa

SEQ ID NO: 3710555 - DNA, 25 bp, Homo sapien
taattatccttaagtgaaatgaata

SEQ ID NO: 3710556 - DNA, 25 bp, Homo sapien
ttttaattatccttaagtgaaatga

SEQ ID NO: 3710557 - DNA, 25 bp, Homo sapien
ttaattatccttaagtgaaatgaat

SEQ ID NO: 3710558 - DNA, 25 bp, Homo sapien
tttaattatccttaagtgaaatgaa

SEQ ID NO: 3710559 - DNA, 25 bp, Homo sapien
gcgcagttctcctgtaatcttcagt

SEQ ID NO: 3710560 - DNA, 25 bp, Homo sapien
gcctagtaagcgcagttctcctgta

SEQ ID NO: 3710561 - DNA, 25 bp, Homo sapien
agtgagcctagtaagcgcagttctc

SEQ ID NO: 3710562 - DNA, 25 bp, Homo sapien
gtttctactgatttgatcttcatcc

SEQ ID NO: 3710563 - DNA, 25 bp, Homo sapien
caaacaaactgataccaagatttta

SEQ ID NO: 3710564 - DNA, 25 bp, Homo sapien
caaactgataccaagattttaactt

SEQ ID NO: 3710565 - DNA, 25 bp, Homo sapien
ttcacaaacaaactgataccaagat

SEQ ID NO: 3710566 - DNA, 25 bp, Homo sapien
gttttcacaaacaaactgataccaa

SEQ ID NO: 3710567 - DNA, 25 bp, Homo sapien
aacaataccaacatctagttgttcc

SEQ ID NO: 3710568 - DNA, 25 bp, Homo sapien
aaggacaatatatggaacaatacca

SEQ ID NO: 3710569 - DNA, 25 bp, Homo sapien
aaaaggacaatatatggaacaatac

SEQ ID NO: 3710570 - DNA, 25 bp, Homo sapien
caataccaacatctagttgttccat

SEQ ID NO: 3710571 - DNA, 25 bp, Homo sapien
gcatgagtctaattagcgttgcaaa

SEQ ID NO: 3710572 - DNA, 25 bp, Homo sapien
tctaattagcgttgcaaagcactgc

SEQ ID NO: 3710573 - DNA, 25 bp, Homo sapien
ggccatgaatctcacactgtctgtc

SEQ ID NO: 3710574 - DNA, 25 bp, Homo sapien
gcgttgcaaagcactgcgtggccat

SEQ ID NO: 3710575 - DNA, 25 bp, Homo sapien
aaagggttacaattattatggatca

SEQ ID NO: 3710576 - DNA, 25 bp, Homo sapien
ggttacaattattatggatcaagtt

SEQ ID NO: 3710577 - DNA, 25 bp, Homo sapien
agggttacaattattatggatcaag

SEQ ID NO: 3710578 - DNA, 25 bp, Homo sapien
tatggatcaagttatagaaaacatt

SEQ ID NO: 3710579 - DNA, 25 bp, Homo sapien
ttaattaccatctctcaaatttatc

SEQ ID NO: 3710580 - DNA, 25 bp, Homo sapien
gcccacagtctacacctagatgtta

SEQ ID NO: 3710581 - DNA, 25 bp, Homo sapien
ctttagcccacagtctacacctaga

SEQ ID NO: 3710582 - DNA, 25 bp, Homo sapien
gtctacacctagatgttaccagaaa

SEQ ID NO: 3710583 - DNA, 25 bp, Homo sapien
tttcagttggtcaggctaatttcga

SEQ ID NO: 3710584 - DNA, 25 bp, Homo sapien
attttcagttggtcaggctaatttc

SEQ ID NO: 3710585 - DNA, 25 bp, Homo sapien
ttgtattttcagttggtcaggctaa

SEQ ID NO: 3710586 - DNA, 25 bp, Homo sapien
ttttcagttggtcaggctaatttcg

SEQ ID NO: 3710587 - DNA, 25 bp, Homo sapien
ttttggtgaatgtcaaacatctgaa

SEQ ID NO: 3710588 - DNA, 25 bp, Homo sapien
tgtattttcccccagttactggaca

SEQ ID NO: 3710589 - DNA, 25 bp, Homo sapien
gaagttttatgttgttgggtgctgt

SEQ ID NO: 3710590 - DNA, 25 bp, Homo sapien
ttacagaggtgaactactgcactca

SEQ ID NO: 3710591 - DNA, 25 bp, Homo sapien
cctgctattaatgcaatccagtgtg

SEQ ID NO: 3710592 - DNA, 25 bp, Homo sapien
gtgctcgtcatcacactcatgcttt

SEQ ID NO: 3710593 - DNA, 25 bp, Homo sapien
ggaacaggaatgaacttaaacgaca

SEQ ID NO: 3710594 - DNA, 25 bp, Homo sapien
ctatgaagacttaacagagagaatc

SEQ ID NO: 3710595 - DNA, 25 bp, Homo sapien
ttgagaactactgtcctatgatgtc

SEQ ID NO: 3710596 - DNA, 25 bp, Homo sapien
gatgtctctcaacttaagaaattta

SEQ ID NO: 3710597 - DNA, 25 bp, Homo sapien
gaactactgtcctatgatgtctctc

SEQ ID NO: 3710598 - DNA, 25 bp, Homo sapien
tactgtcctatgatgtctctcaact

SEQ ID NO: 3710599 - DNA, 25 bp, Homo sapien
taaaatgtcaaactcatggaagcag

SEQ ID NO: 3710600 - DNA, 25 bp, Homo sapien
ggatagatgctggttaaagggtaca

SEQ ID NO: 3710601 - DNA, 25 bp, Homo sapien
ggatactattcagcctctaagaagg

SEQ ID NO: 3710602 - DNA, 25 bp, Homo sapien
tagtggttactaggtgcttagtgcg

SEQ ID NO: 3710603 - DNA, 25 bp, Homo sapien
tcaattggattaattctgctgacat

SEQ ID NO: 3710604 - DNA, 25 bp, Homo sapien
gagttcagcattgattggtactgga

SEQ ID NO: 3710605 - DNA, 25 bp, Homo sapien
ttcccatctaacaattgctccaaaa

SEQ ID NO: 3710606 - DNA, 25 bp, Homo sapien
tccaaaaagtgtcgctccttggctt

SEQ ID NO: 3710607 - DNA, 25 bp, Homo sapien
cctgctagaatgcagatggactgta

SEQ ID NO: 3710608 - DNA, 25 bp, Homo sapien
tctcctgctagaatgcagatggact

SEQ ID NO: 3710609 - DNA, 25 bp, Homo sapien
tttttcctaaacccatgtcatcaca

SEQ ID NO: 3710610 - DNA, 25 bp, Homo sapien
tcctgctagaatgcagatggactgt

SEQ ID NO: 3710611 - DNA, 25 bp, Homo sapien
tttacctacttcatccacccaatgg

SEQ ID NO: 3710612 - DNA, 25 bp, Homo sapien
tcagtgggaggtccagtgtaatgca

SEQ ID NO: 3710613 - DNA, 25 bp, Homo sapien
caatggcctgttaatgttggcggac

SEQ ID NO: 3710614 - DNA, 25 bp, Homo sapien
cgggttgagatattctctagagcaa

SEQ ID NO: 3710615 - DNA, 25 bp, Homo sapien
tgactgtgagaatacataatgcaca

SEQ ID NO: 3710616 - DNA, 25 bp, Homo sapien
aattggaacaacagtattcctacct

SEQ ID NO: 3710617 - DNA, 25 bp, Homo sapien
atgccttagactccttatttgcaaa

SEQ ID NO: 3710618 - DNA, 25 bp, Homo sapien
tattcctacctcataaagtgactgt

SEQ ID NO: 3710619 - DNA, 25 bp, Homo sapien
aaatctatgtcattcctcacaacat

SEQ ID NO: 3710620 - DNA, 25 bp, Homo sapien
ccactattagattgtgcctttttac

SEQ ID NO: 3710621 - DNA, 25 bp, Homo sapien
cattcctcacaacatcatatgaagc

SEQ ID NO: 3710622 - DNA, 25 bp, Homo sapien
tcatatgaagccactattagattgt

SEQ ID NO: 3710623 - DNA, 25 bp, Homo sapien
ccagaaagaataatcctataattag

SEQ ID NO: 3710624 - DNA, 25 bp, Homo sapien
gaaagaataatcctataattagcag

SEQ ID NO: 3710625 - DNA, 25 bp, Homo sapien
tcctataattagcagtcagttgttt

SEQ ID NO: 3710626 - DNA, 25 bp, Homo sapien
gaataatcctataattagcagtcag

SEQ ID NO: 3710627 - DNA, 25 bp, Homo sapien
tataggtttaccatatcgagcagca

SEQ ID NO: 3710628 - DNA, 25 bp, Homo sapien
tggcgttcagtacccaaaaatcctg

SEQ ID NO: 3710629 - DNA, 25 bp, Homo sapien
tcttgctctcgactggagcttcgag

SEQ ID NO: 3710630 - DNA, 25 bp, Homo sapien
gagcatccctacttgctaatatagg

SEQ ID NO: 3710631 - DNA, 25 bp, Homo sapien
ttttaggtggaagatcctgcaaaac

SEQ ID NO: 3710632 - DNA, 25 bp, Homo sapien
cttggcggtgcagcgcatccatagc

SEQ ID NO: 3710633 - DNA, 25 bp, Homo sapien
aaacggtagtacttggcggtgcagc

SEQ ID NO: 3710634 - DNA, 25 bp, Homo sapien
ctggagaggactaagagtacaataa

SEQ ID NO: 3710635 - DNA, 25 bp, Homo sapien
cacttggcacgagacttagcaaaat

SEQ ID NO: 3710636 - DNA, 25 bp, Homo sapien
catcacacttggcacgagacttagc

SEQ ID NO: 3710637 - DNA, 25 bp, Homo sapien
tcagaaagtgtagctgaagaaactg

SEQ ID NO: 3710638 - DNA, 25 bp, Homo sapien
acgtggcctgtagctttaagctttg

SEQ ID NO: 3710639 - DNA, 25 bp, Homo sapien
tagagaagaattctgaactgccagt

SEQ ID NO: 3710640 - DNA, 25 bp, Homo sapien
ttgtttcaaagctgagagcttaggg

SEQ ID NO: 3710641 - DNA, 25 bp, Homo sapien
ccagtttttcggcagtggtcttgaa

SEQ ID NO: 3710642 - DNA, 25 bp, Homo sapien
gatgttgaggtgttaagactaatgc

SEQ ID NO: 3710643 - DNA, 25 bp, Homo sapien
tctgtgccactctcggaagtgctgc

SEQ ID NO: 3710644 - DNA, 25 bp, Homo sapien
gaatatcagtatcctgtgctgggcc

SEQ ID NO: 3710645 - DNA, 25 bp, Homo sapien
gaccaggaggtatgctgccatctaa

SEQ ID NO: 3710646 - DNA, 25 bp, Homo sapien
ggagatcatgctctactatatcaag

SEQ ID NO: 3710647 - DNA, 25 bp, Homo sapien
taataaaaattaaagagcacaaatg

SEQ ID NO: 3710648 - DNA, 25 bp, Homo sapien
atagggatacttacatgatcatctg

SEQ ID NO: 3710649 - DNA, 25 bp, Homo sapien
cctctcaatatgtataacgttttta

SEQ ID NO: 3710650 - DNA, 25 bp, Homo sapien
tcttaagtcctataacagaaactgt

SEQ ID NO: 3710651 - DNA, 25 bp, Homo sapien
caacgtgagtggtaagtaacagaac

SEQ ID NO: 3710652 - DNA, 25 bp, Homo sapien
caaatactactgtgtcagcgcctgt

SEQ ID NO: 3710653 - DNA, 25 bp, Homo sapien
tgtagatctcgcataggattccagt

SEQ ID NO: 3710654 - DNA, 25 bp, Homo sapien
tgtcaaattaagtcccaggccacca

SEQ ID NO: 3710655 - DNA, 25 bp, Homo sapien
tattagggatgaacagtgatccagg

SEQ ID NO: 3710656 - DNA, 25 bp, Homo sapien
tttaatgcatgaggaagtgatacca

SEQ ID NO: 3710657 - DNA, 25 bp, Homo sapien
tgtatgttaacaccagagcaagaac

SEQ ID NO: 3710658 - DNA, 25 bp, Homo sapien
tgtccaaggtcataacacatgtatg

SEQ ID NO: 3710659 - DNA, 25 bp, Homo sapien
tgatcagtccccatgctctgcaaac

SEQ ID NO: 3710660 - DNA, 25 bp, Homo sapien
tctcttggctaataacagtattcgc

SEQ ID NO: 3710661 - DNA, 25 bp, Homo sapien
cagtattcgctatgttcatcttgaa

SEQ ID NO: 3710662 - DNA, 25 bp, Homo sapien
tcaatcggtatacgttaaccacacg

SEQ ID NO: 3710663 - DNA, 25 bp, Homo sapien
ctcaggttttcaagaattgatttca

SEQ ID NO: 3710664 - DNA, 25 bp, Homo sapien
aggctgtactctgaatcatactgct

SEQ ID NO: 3710665 - DNA, 25 bp, Homo sapien
tactgctcttgatcccaaagatcac

SEQ ID NO: 3710666 - DNA, 25 bp, Homo sapien
tcccagaagtagaggtgtcagcttt

SEQ ID NO: 3710667 - DNA, 25 bp, Homo sapien
gactaaagataggaggcctgttccc

SEQ ID NO: 3710668 - DNA, 25 bp, Homo sapien
ccagtgaaacaagagccagcattat

SEQ ID NO: 3710669 - DNA, 25 bp, Homo sapien
gatgcctatgtgtatggccagccac

SEQ ID NO: 3710670 - DNA, 25 bp, Homo sapien
caccaagggcccgattaaattcatt

SEQ ID NO: 3710671 - DNA, 25 bp, Homo sapien
tgttacagtatggttgtcaaagcta

SEQ ID NO: 3710672 - DNA, 25 bp, Homo sapien
atgttacagtatggttgtcaaagct

SEQ ID NO: 3710673 - DNA, 25 bp, Homo sapien
cttgtggaatgctaggtttaatgtt

SEQ ID NO: 3710674 - DNA, 25 bp, Homo sapien
tgctaggtttaatgttacagtatgg

SEQ ID NO: 3710675 - DNA, 25 bp, Homo sapien
tagccactctaagttttcctgtcag

SEQ ID NO: 3710676 - DNA, 25 bp, Homo sapien
aagatgtactacaatgactgggtca

SEQ ID NO: 3710677 - DNA, 25 bp, Homo sapien
ttcccattcagaagcaaccacacat

SEQ ID NO: 3710678 - DNA, 25 bp, Homo sapien
taaagagctggtttatggaactagc

SEQ ID NO: 3710679 - DNA, 25 bp, Homo sapien
caagggaagtagtacaatggatatc

SEQ ID NO: 3710680 - DNA, 25 bp, Homo sapien
gctataccagttcaatcagtcccaa

SEQ ID NO: 3710681 - DNA, 25 bp, Homo sapien
taagttcatataaaccatccagaag

SEQ ID NO: 3710682 - DNA, 25 bp, Homo sapien
gatatctatgaacccaattcccagt

SEQ ID NO: 3710683 - DNA, 25 bp, Homo sapien
tcctcactcgtctttgagtttctcc

SEQ ID NO: 3710684 - DNA, 25 bp, Homo sapien
taatgtaacaatgccaactgttggc

SEQ ID NO: 3710685 - DNA, 25 bp, Homo sapien
gagataccctctactccaagtaata

SEQ ID NO: 3710686 - DNA, 25 bp, Homo sapien
ctgttggctgcagtatcctccttcc

SEQ ID NO: 3710687 - DNA, 25 bp, Homo sapien
gatctaaggtatattgtcggagcac

SEQ ID NO: 3710688 - DNA, 25 bp, Homo sapien
gtttctctcagctaggtgcaatggc

SEQ ID NO: 3710689 - DNA, 25 bp, Homo sapien
tatggtctaccttggtcagtgctcc

SEQ ID NO: 3710690 - DNA, 25 bp, Homo sapien
tcagcataatggtcactttgggtcc

SEQ ID NO: 3710691 - DNA, 25 bp, Homo sapien
ttaactgccctgaaaaccccatgtg

SEQ ID NO: 3710692 - DNA, 25 bp, Homo sapien
cccatgtgttctagctgttcatccc

SEQ ID NO: 3710693 - DNA, 25 bp, Homo sapien
tctggacccctggacttttgactgt

SEQ ID NO: 3710694 - DNA, 25 bp, Homo sapien
cagcagatgcatgtagggttcctcc

SEQ ID NO: 3710695 - DNA, 25 bp, Homo sapien
tccaggtcccacgttctgcccctcc

SEQ ID NO: 3710696 - DNA, 25 bp, Homo sapien
cgctccaggtcccacgttctgcccc

SEQ ID NO: 3710697 - DNA, 25 bp, Homo sapien
caggtcccacgttctgcccctcccg

SEQ ID NO: 3710698 - DNA, 25 bp, Homo sapien
cccgctccaggtcccacgttctgcc

SEQ ID NO: 3710699 - DNA, 25 bp, Homo sapien
gaaaacggatcacaagtggctgcac

SEQ ID NO: 3710700 - DNA, 25 bp, Homo sapien
cgagacagattcacttgggttaggc

SEQ ID NO: 3710701 - DNA, 25 bp, Homo sapien
cttcagaacaagcagggaccagcgt

SEQ ID NO: 3710702 - DNA, 25 bp, Homo sapien
ccatgataggaaaccgctgtgtcgg

SEQ ID NO: 3710703 - DNA, 25 bp, Homo sapien
ggtgccccttgcctttcattgtggc

SEQ ID NO: 3710704 - DNA, 25 bp, Homo sapien
cattgtggcaactgcgtgcatgatc

SEQ ID NO: 3710705 - DNA, 25 bp, Homo sapien
tggcaactgcgtgcatgatctgtct

SEQ ID NO: 3710706 - DNA, 25 bp, Homo sapien
tgcctttcattgtggcaactgcgtg

SEQ ID NO: 3710707 - DNA, 25 bp, Homo sapien
gtctgtggaccctgactatgtgtcg

SEQ ID NO: 3710708 - DNA, 25 bp, Homo sapien
gaccctgactatgtgtcgggttgca

SEQ ID NO: 3710709 - DNA, 25 bp, Homo sapien
tgtgtcgggttgcatcttcctccac

SEQ ID NO: 3710710 - DNA, 25 bp, Homo sapien
cctgactatgtgtcgggttgcatct

SEQ ID NO: 3710711 - DNA, 25 bp, Homo sapien
tgacctgcaacttgactgggaagcc

SEQ ID NO: 3710712 - DNA, 25 bp, Homo sapien
gaaggctataacctaacctcgacta

SEQ ID NO: 3710713 - DNA, 25 bp, Homo sapien
ttggtgtgacacttgaactagtcga

SEQ ID NO: 3710714 - DNA, 25 bp, Homo sapien
taaaacacagaggtgttctgacctg

SEQ ID NO: 3710715 - DNA, 25 bp, Homo sapien
gatgaagtactttgcggtgctctgt

SEQ ID NO: 3710716 - DNA, 25 bp, Homo sapien
tacatagcttcagaccttgtccaga

SEQ ID NO: 3710717 - DNA, 25 bp, Homo sapien
cagaatgacctatattacaaccgat

SEQ ID NO: 3710718 - DNA, 25 bp, Homo sapien
gtctgtacaaaataagatggcctgg

SEQ ID NO: 3710719 - DNA, 25 bp, Homo sapien
gattttagggatagagtcagctgcc

SEQ ID NO: 3710720 - DNA, 25 bp, Homo sapien
gaacggagatcagaatagacttcag

SEQ ID NO: 3710721 - DNA, 25 bp, Homo sapien
tagacttcagaaagcttcggtggaa

SEQ ID NO: 3710722 - DNA, 25 bp, Homo sapien
ggaaggtcactatttctgactgcat

SEQ ID NO: 3710723 - DNA, 25 bp, Homo sapien
tccacaaaccgctggtgaaggaggg

SEQ ID NO: 3710724 - DNA, 25 bp, Homo sapien
tattactgtgaatactgctgggcga

SEQ ID NO: 3710725 - DNA, 25 bp, Homo sapien
gtcacgtcccgttccgctggagctg

SEQ ID NO: 3710726 - DNA, 25 bp, Homo sapien
gcatacattcccgagccgggcggga

SEQ ID NO: 3710727 - DNA, 25 bp, Homo sapien
ccagtgatgaaagtagggtgttaaa

SEQ ID NO: 3710728 - DNA, 25 bp, Homo sapien
aagatctagccagtgatgaaagtag

SEQ ID NO: 3710729 - DNA, 25 bp, Homo sapien
attattgtatcggagcctatctttc

SEQ ID NO: 3710730 - DNA, 25 bp, Homo sapien
tattgtatcggagcctatctttctc

SEQ ID NO: 3710731 - DNA, 25 bp, Homo sapien
tggatgttagtcaagacatgcatgt

SEQ ID NO: 3710732 - DNA, 25 bp, Homo sapien
ggttggatgttagtcaagacatgca

SEQ ID NO: 3710733 - DNA, 25 bp, Homo sapien
attctggttggatgttagtcaagac

SEQ ID NO: 3710734 - DNA, 25 bp, Homo sapien
ttaccagtatcttttcgatactgaa

SEQ ID NO: 3710735 - DNA, 25 bp, Homo sapien
ggtatgtggtctctgtactcttccc

SEQ ID NO: 3710736 - DNA, 25 bp, Homo sapien
tcatgacttccttaggccctgcaaa

SEQ ID NO: 3710737 - DNA, 25 bp, Homo sapien
gagagagtgctcatctgaatcccca

SEQ ID NO: 3710738 - DNA, 25 bp, Homo sapien
cccagtgaccaagcttttggatcca

SEQ ID NO: 3710739 - DNA, 25 bp, Homo sapien
gaacaagtcgcttaatcactctgtg

SEQ ID NO: 3710740 - DNA, 25 bp, Homo sapien
tacatctctgtaaggtaattgggac

SEQ ID NO: 3710741 - DNA, 25 bp, Homo sapien
tgaaatgagttaatgtccacaaggc

SEQ ID NO: 3710742 - DNA, 25 bp, Homo sapien
gcagaattcaaaatagggcttacca

SEQ ID NO: 3710743 - DNA, 25 bp, Homo sapien
tttccacactggcagcgctgacgtc

SEQ ID NO: 3710744 - DNA, 25 bp, Homo sapien
gcgtccatggctgaggcggtcggtg

SEQ ID NO: 3710745 - DNA, 25 bp, Homo sapien
tgaggcggtcggtggtggcccggcg

SEQ ID NO: 3710746 - DNA, 25 bp, Homo sapien
ccgggctctacttcctcctcccgcg

SEQ ID NO: 3710747 - DNA, 25 bp, Homo sapien
agggatccgagatcgcctcactgca

SEQ ID NO: 3710748 - DNA, 25 bp, Homo sapien
cagggatccgagatcgcctcactgc

SEQ ID NO: 3710749 - DNA, 25 bp, Homo sapien
gttgcagggatccgagatcgcctca

SEQ ID NO: 3710750 - DNA, 25 bp, Homo sapien
gcagggatccgagatcgcctcactg

SEQ ID NO: 3710751 - DNA, 25 bp, Homo sapien
ttgtttgcctgtggttcccaaagga

SEQ ID NO: 3710752 - DNA, 25 bp, Homo sapien
ctcttgtttgcctgtggttcccaaa

SEQ ID NO: 3710753 - DNA, 25 bp, Homo sapien
cttgtttgcctgtggttcccaaagg

SEQ ID NO: 3710754 - DNA, 25 bp, Homo sapien
tcttgtttgcctgtggttcccaaag

SEQ ID NO: 3710755 - DNA, 25 bp, Homo sapien
agatacaggacggtttaaacctgtg

SEQ ID NO: 3710756 - DNA, 25 bp, Homo sapien
ccaactgtagatagtgacgtgggga

SEQ ID NO: 3710757 - DNA, 25 bp, Homo sapien
tgttcttattccagaaccgctccat

SEQ ID NO: 3710758 - DNA, 25 bp, Homo sapien
tagatagtgacgtggggagatacag

SEQ ID NO: 3710759 - DNA, 25 bp, Homo sapien
gtgtcatggtggcagatggccattg

SEQ ID NO: 3710760 - DNA, 25 bp, Homo sapien
catggtggcagatggccattgccat

SEQ ID NO: 3710761 - DNA, 25 bp, Homo sapien
cagtgtcatggtggcagatggccat

SEQ ID NO: 3710762 - DNA, 25 bp, Homo sapien
gtcatggtggcagatggccattgcc

SEQ ID NO: 3710763 - DNA, 25 bp, Homo sapien
cttcatatggctgccggccctacag

SEQ ID NO: 3710764 - DNA, 25 bp, Homo sapien
gaacctccgttcttcatatggctgc

SEQ ID NO: 3710765 - DNA, 25 bp, Homo sapien
aggaatatgatgctgggaacctccg

SEQ ID NO: 3710766 - DNA, 25 bp, Homo sapien
gaatatgatgctgggaacctccgtt

SEQ ID NO: 3710767 - DNA, 25 bp, Homo sapien
cgcacccggcgtagcaatttggttt

SEQ ID NO: 3710768 - DNA, 25 bp, Homo sapien
ccgcacccggcgtagcaatttggtt

SEQ ID NO: 3710769 - DNA, 25 bp, Homo sapien
atgccgtggcctgtgcaccttcctg

SEQ ID NO: 3710770 - DNA, 25 bp, Homo sapien
ctttggcctttccatgccgtggcct

SEQ ID NO: 3710771 - DNA, 25 bp, Homo sapien
ttcctgaacttggaatgcctttact

SEQ ID NO: 3710772 - DNA, 25 bp, Homo sapien
tggcctgtgcaccttcctgaacttg

SEQ ID NO: 3710773 - DNA, 25 bp, Homo sapien
aggctccatctcatcgggaccattg

SEQ ID NO: 3710774 - DNA, 25 bp, Homo sapien
tcaggctccatctcatcgggaccat

SEQ ID NO: 3710775 - DNA, 25 bp, Homo sapien
caggctccatctcatcgggaccatt

SEQ ID NO: 3710776 - DNA, 25 bp, Homo sapien
ttcaggctccatctcatcgggacca

SEQ ID NO: 3710777 - DNA, 25 bp, Homo sapien
atgccatggaggagggattccaaga

SEQ ID NO: 3710778 - DNA, 25 bp, Homo sapien
gaggagggattccaagaggttcata

SEQ ID NO: 3710779 - DNA, 25 bp, Homo sapien
agaggacttctcaaaaccataggca

SEQ ID NO: 3710780 - DNA, 25 bp, Homo sapien
ccataggcatagatgccatggagga

SEQ ID NO: 3710781 - DNA, 25 bp, Homo sapien
tgagtgatcacatcataatccttga

SEQ ID NO: 3710782 - DNA, 25 bp, Homo sapien
gagtgatcacatcataatccttgat

SEQ ID NO: 3710783 - DNA, 25 bp, Homo sapien
cttttgagccaattatcaagtggat

SEQ ID NO: 3710784 - DNA, 25 bp, Homo sapien
ttttgagccaattatcaagtggatg

SEQ ID NO: 3710785 - DNA, 25 bp, Homo sapien
ctagtgtcatgaccaccttttctat

SEQ ID NO: 3710786 - DNA, 25 bp, Homo sapien
tcctagtgtcatgaccaccttttct

SEQ ID NO: 3710787 - DNA, 25 bp, Homo sapien
tctcctagtgtcatgaccacctttt

SEQ ID NO: 3710788 - DNA, 25 bp, Homo sapien
gtagtctcctagtgtcatgaccacc

SEQ ID NO: 3710789 - DNA, 25 bp, Homo sapien
gaatatgtcatagattgagtccttg

SEQ ID NO: 3710790 - DNA, 25 bp, Homo sapien
ttgatgtagaattggtggaccccct

SEQ ID NO: 3710791 - DNA, 25 bp, Homo sapien
aagcatatcagatatatggccaggg

SEQ ID NO: 3710792 - DNA, 25 bp, Homo sapien
ccccaatacagccatgacaggaggc

SEQ ID NO: 3710793 - DNA, 25 bp, Homo sapien
actgcctagggtgacaatcagggtt

SEQ ID NO: 3710794 - DNA, 25 bp, Homo sapien
tgactgcctagggtgacaatcaggg

SEQ ID NO: 3710795 - DNA, 25 bp, Homo sapien
gactgcctagggtgacaatcagggt

SEQ ID NO: 3710796 - DNA, 25 bp, Homo sapien
ctgcctagggtgacaatcagggttt

SEQ ID NO: 3710797 - DNA, 25 bp, Homo sapien
tgggaaggtcacagttgataactga

SEQ ID NO: 3710798 - DNA, 25 bp, Homo sapien
gggaaggtcacagttgataactgaa

SEQ ID NO: 3710799 - DNA, 25 bp, Homo sapien
tttcctcctaaaggtaatgctctta

SEQ ID NO: 3710800 - DNA, 25 bp, Homo sapien
gagatcactgccagctttcgcaggt

SEQ ID NO: 3710801 - DNA, 25 bp, Homo sapien
caggtttggacctctcgtagtagac

SEQ ID NO: 3710802 - DNA, 25 bp, Homo sapien
tcgtagtagactggcctcacaaagc

SEQ ID NO: 3710803 - DNA, 25 bp, Homo sapien
tgtctactagctcaagagtcacccc

SEQ ID NO: 3710804 - DNA, 25 bp, Homo sapien
cagagtcctgaatttattaacggaa

SEQ ID NO: 3710805 - DNA, 25 bp, Homo sapien
gagtcaccccttcacaattgcagag

SEQ ID NO: 3710806 - DNA, 25 bp, Homo sapien
caagggattactggacaaatcagaa

SEQ ID NO: 3710807 - DNA, 25 bp, Homo sapien
gctggacattagctcctggtaagga

SEQ ID NO: 3710808 - DNA, 25 bp, Homo sapien
gaggaagcctagaatgactgatgct

SEQ ID NO: 3710809 - DNA, 25 bp, Homo sapien
tttttaaaagagcacgtctggttgc

SEQ ID NO: 3710810 - DNA, 25 bp, Homo sapien
gaacttggtccaagtacaagaggaa

SEQ ID NO: 3710811 - DNA, 25 bp, Homo sapien
gccattccttttccgagatctttga

SEQ ID NO: 3710812 - DNA, 25 bp, Homo sapien
gaaagatgattgtttaccctcactc

SEQ ID NO: 3710813 - DNA, 25 bp, Homo sapien
caatgtatacatagctgatacacca

SEQ ID NO: 3710814 - DNA, 25 bp, Homo sapien
gtaccacttcccttctgacaaggaa

SEQ ID NO: 3710815 - DNA, 25 bp, Homo sapien
tctgaaactttgaatcatgatagac

SEQ ID NO: 3710816 - DNA, 25 bp, Homo sapien
gcatgagtttagttggattctgaaa

SEQ ID NO: 3710817 - DNA, 25 bp, Homo sapien
gattagaggaaggtacagcagttgt

SEQ ID NO: 3710818 - DNA, 25 bp, Homo sapien
tttttcgagcaaagggagtgattag

SEQ ID NO: 3710819 - DNA, 25 bp, Homo sapien
gaattgtgatttaattgttctcgag

SEQ ID NO: 3710820 - DNA, 25 bp, Homo sapien
ctcgagtacagtctttattaaatga

SEQ ID NO: 3710821 - DNA, 25 bp, Homo sapien
cccgctattagtatgtgaataaact

SEQ ID NO: 3710822 - DNA, 25 bp, Homo sapien
cttgccaaaaattacccgctattag

SEQ ID NO: 3710823 - DNA, 25 bp, Homo sapien
gcagatgtagtaggagggagcaact

SEQ ID NO: 3710824 - DNA, 25 bp, Homo sapien
gagggagcaactgttctctgttctc

SEQ ID NO: 3710825 - DNA, 25 bp, Homo sapien
tacagaaatccttgggttggcagat

SEQ ID NO: 3710826 - DNA, 25 bp, Homo sapien
gagggtaatactctaatgacagctg

SEQ ID NO: 3710827 - DNA, 25 bp, Homo sapien
agtccctggcactagaaactgctca

SEQ ID NO: 3710828 - DNA, 25 bp, Homo sapien
tatggtatccttacagtactgactt

SEQ ID NO: 3710829 - DNA, 25 bp, Homo sapien
tgagtgcgaagatcaaataaagtcc

SEQ ID NO: 3710830 - DNA, 25 bp, Homo sapien
ccctacttcatagagtgagtgcgaa

SEQ ID NO: 3710831 - DNA, 25 bp, Homo sapien
cggctgatacttgcattttaaggaa

SEQ ID NO: 3710832 - DNA, 25 bp, Homo sapien
cccggctgatacttgcattttaagg

SEQ ID NO: 3710833 - DNA, 25 bp, Homo sapien
gcacccggctgatacttgcatttta

SEQ ID NO: 3710834 - DNA, 25 bp, Homo sapien
cgcacccggctgatacttgcatttt

SEQ ID NO: 3710835 - DNA, 25 bp, Homo sapien
ggttcagctacctataataatcaag

SEQ ID NO: 3710836 - DNA, 25 bp, Homo sapien
agtggcccaccaatgagtttcgctg

SEQ ID NO: 3710837 - DNA, 25 bp, Homo sapien
gaattgggtagctgaggttagtcac

SEQ ID NO: 3710838 - DNA, 25 bp, Homo sapien
gataaggactgatcatgaacctctg

SEQ ID NO: 3710839 - DNA, 25 bp, Homo sapien
agcggccgctgaaacctagtcccag

SEQ ID NO: 3710840 - DNA, 25 bp, Homo sapien
ggccgctgaaacctagtcccaggga

SEQ ID NO: 3710841 - DNA, 25 bp, Homo sapien
gcggccgctgaaacctagtcccagg

SEQ ID NO: 3710842 - DNA, 25 bp, Homo sapien
cggccgctgaaacctagtcccaggg

SEQ ID NO: 3710843 - DNA, 25 bp, Homo sapien
tttctcctttgttgacaaatttctg

SEQ ID NO: 3710844 - DNA, 25 bp, Homo sapien
gcagtatacctcaatgggcagtgtg

SEQ ID NO: 3710845 - DNA, 25 bp, Homo sapien
tcctttgttgacaaatttctgaacc

SEQ ID NO: 3710846 - DNA, 25 bp, Homo sapien
gtatacctcaatgggcagtgtgtct

SEQ ID NO: 3710847 - DNA, 25 bp, Homo sapien
ttagaggggatatagacatagggca

SEQ ID NO: 3710848 - DNA, 25 bp, Homo sapien
cgtcttagaggggatatagacatag

SEQ ID NO: 3710849 - DNA, 25 bp, Homo sapien
cttagaggggatatagacatagggc

SEQ ID NO: 3710850 - DNA, 25 bp, Homo sapien
tcttagaggggatatagacataggg

SEQ ID NO: 3710851 - DNA, 25 bp, Homo sapien
ctagcattaccttcatgaaagggct

SEQ ID NO: 3710852 - DNA, 25 bp, Homo sapien
gatggacagaagactagcattacct

SEQ ID NO: 3710853 - DNA, 25 bp, Homo sapien
gaagatgccgtcagtgtgggtgggc

SEQ ID NO: 3710854 - DNA, 25 bp, Homo sapien
ggaacagcctttagttctacaggaa

SEQ ID NO: 3710855 - DNA, 25 bp, Homo sapien
tttgacttcctttgacaagtaaagc

SEQ ID NO: 3710856 - DNA, 25 bp, Homo sapien
gacttcctttgacaagtaaagctgc

SEQ ID NO: 3710857 - DNA, 25 bp, Homo sapien
tttgacaagtaaagctgcaagtgtg

SEQ ID NO: 3710858 - DNA, 25 bp, Homo sapien
caagtaaagctgcaagtgtgtggca

SEQ ID NO: 3710859 - DNA, 25 bp, Homo sapien
cctcgccgggcggtcggtgtgggcg

SEQ ID NO: 3710860 - DNA, 25 bp, Homo sapien
gctttccggaccgataatggtaaca

SEQ ID NO: 3710861 - DNA, 25 bp, Homo sapien
cttctccagcaacgtgatcgcgccg

SEQ ID NO: 3710862 - DNA, 25 bp, Homo sapien
tccaagtcctggatggaggataacg

SEQ ID NO: 3710863 - DNA, 25 bp, Homo sapien
ctggaacacgcaccaaagcgtgaat

SEQ ID NO: 3710864 - DNA, 25 bp, Homo sapien
acacgcaccaaagcgtgaatgcagc

SEQ ID NO: 3710865 - DNA, 25 bp, Homo sapien
cgcaccaaagcgtgaatgcagcctg

SEQ ID NO: 3710866 - DNA, 25 bp, Homo sapien
gaacacgcaccaaagcgtgaatgca

SEQ ID NO: 3710867 - DNA, 25 bp, Homo sapien
cgtcctcgtcttcggcggttgcagc

SEQ ID NO: 3710868 - DNA, 25 bp, Homo sapien
tcgtcttcggcggttgcagccgctg

SEQ ID NO: 3710869 - DNA, 25 bp, Homo sapien
agccgtcctcgtcttcggcggttgc

SEQ ID NO: 3710870 - DNA, 25 bp, Homo sapien
cgtcttcggcggttgcagccgctgc

SEQ ID NO: 3710871 - DNA, 25 bp, Homo sapien
cgccgccgcggcgtacggccaccag

SEQ ID NO: 3710872 - DNA, 25 bp, Homo sapien
cgtacggccaccagcccatcatgac

SEQ ID NO: 3710873 - DNA, 25 bp, Homo sapien
ggcgtacggccaccagcccatcatg

SEQ ID NO: 3710874 - DNA, 25 bp, Homo sapien
gcggcgtacggccaccagcccatca

SEQ ID NO: 3710875 - DNA, 25 bp, Homo sapien
gcgcccgcgccgcagccggcacagc

SEQ ID NO: 3710876 - DNA, 25 bp, Homo sapien
gcagcgccgctcacccgccagcccc

SEQ ID NO: 3710877 - DNA, 25 bp, Homo sapien
agccagcgcagccaccacaggcgca

SEQ ID NO: 3710878 - DNA, 25 bp, Homo sapien
agccggcacagccagcgcagccacc

SEQ ID NO: 3710879 - DNA, 25 bp, Homo sapien
agtcaacgggaccatgctcttccag

SEQ ID NO: 3710880 - DNA, 25 bp, Homo sapien
ggatcaccccagtcaacgggaccat

SEQ ID NO: 3710881 - DNA, 25 bp, Homo sapien
cggtagaggacagcttcttccaggg

SEQ ID NO: 3710882 - DNA, 25 bp, Homo sapien
acgggcaccaccaacgcggtagagg

SEQ ID NO: 3710883 - DNA, 25 bp, Homo sapien
cgctgtcgccgtccttcggcagcac

SEQ ID NO: 3710884 - DNA, 25 bp, Homo sapien
tcctgccaggcttgagtttccatca

SEQ ID NO: 3710885 - DNA, 25 bp, Homo sapien
caccgctcctgccaggcttgagttt

SEQ ID NO: 3710886 - DNA, 25 bp, Homo sapien
gccaggcttgagtttccatcagcct

SEQ ID NO: 3710887 - DNA, 25 bp, Homo sapien
gctcctgccaggcttgagtttccat

SEQ ID NO: 3710888 - DNA, 25 bp, Homo sapien
gatggattttcgcaagtgaaacacc

SEQ ID NO: 3710889 - DNA, 25 bp, Homo sapien
tcacattgacaataacgcgtctctc

SEQ ID NO: 3710890 - DNA, 25 bp, Homo sapien
ccgcttcagcgagggacattcatga

SEQ ID NO: 3710891 - DNA, 25 bp, Homo sapien
tttcagctgcgcaaaccatgcagga

SEQ ID NO: 3710892 - DNA, 25 bp, Homo sapien
aacgctctgagttccggtgaaggga

SEQ ID NO: 3710893 - DNA, 25 bp, Homo sapien
tgaaggacgcagcagtatttattga

SEQ ID NO: 3710894 - DNA, 25 bp, Homo sapien
gaaaagagacgtggcgaaattgctg

SEQ ID NO: 3710895 - DNA, 25 bp, Homo sapien
tttctcattgcagggcgaacgctct

SEQ ID NO: 3710896 - DNA, 25 bp, Homo sapien
taggctcctgttgagacctgaagca

SEQ ID NO: 3710897 - DNA, 25 bp, Homo sapien
gagaaattcttaggctcctgttgag

SEQ ID NO: 3710898 - DNA, 25 bp, Homo sapien
aatccaaccagaagcatttctccac

SEQ ID NO: 3710899 - DNA, 25 bp, Homo sapien
ttctccactctgcagagaaattctt

SEQ ID NO: 3710900 - DNA, 25 bp, Homo sapien
gaatccaaatagtgaccacagcacc

SEQ ID NO: 3710901 - DNA, 25 bp, Homo sapien
tggaatccaaatagtgaccacagca

SEQ ID NO: 3710902 - DNA, 25 bp, Homo sapien
tggcaaaagtggagctttctttagg

SEQ ID NO: 3710903 - DNA, 25 bp, Homo sapien
caaaagtggagctttctttaggagg

SEQ ID NO: 3710904 - DNA, 25 bp, Homo sapien
catcaatcttgaacatctcatcaat

SEQ ID NO: 3710905 - DNA, 25 bp, Homo sapien
cacctcatcaatcttgaacatctca

SEQ ID NO: 3710906 - DNA, 25 bp, Homo sapien
cctcatcaatcttgaacatctcatc

SEQ ID NO: 3710907 - DNA, 25 bp, Homo sapien
ggaacacctcatcaatcttgaacat

SEQ ID NO: 3710908 - DNA, 25 bp, Homo sapien
cagccacctgagtaggtgggatcac

SEQ ID NO: 3710909 - DNA, 25 bp, Homo sapien
aggcatgcatcaccacgcccagcta

SEQ ID NO: 3710910 - DNA, 25 bp, Homo sapien
gccacctgagtaggtgggatcacag

SEQ ID NO: 3710911 - DNA, 25 bp, Homo sapien
tgagattgcaggcatgagccactgt

SEQ ID NO: 3710912 - DNA, 25 bp, Homo sapien
gcaaatagggactgcctggaccaga

SEQ ID NO: 3710913 - DNA, 25 bp, Homo sapien
tctttcgggccgctttccaggaagc

SEQ ID NO: 3710914 - DNA, 25 bp, Homo sapien
gcttccacccgagtctctctgtgtg

SEQ ID NO: 3710915 - DNA, 25 bp, Homo sapien
tgtcggtagcaacaaggtcagccct

SEQ ID NO: 3710916 - DNA, 25 bp, Homo sapien
gcctgccgccgtctggccggcgccc

SEQ ID NO: 3710917 - DNA, 25 bp, Homo sapien
cgcccggaccaacgcctccgcgcct

SEQ ID NO: 3710918 - DNA, 25 bp, Homo sapien
gctgcacagcccgcccggaccaacg

SEQ ID NO: 3710919 - DNA, 25 bp, Homo sapien
gcgcctgccgccgtctggccggcgc

SEQ ID NO: 3710920 - DNA, 25 bp, Homo sapien
cgggcgccgagttgctgccggcgga

SEQ ID NO: 3710921 - DNA, 25 bp, Homo sapien
gaggagctacctttgtgaggtaaga

SEQ ID NO: 3710922 - DNA, 25 bp, Homo sapien
ctccgtgcgcgccagggttacgacg

SEQ ID NO: 3710923 - DNA, 25 bp, Homo sapien
tcggcccgaggttccggtccatgga

SEQ ID NO: 3710924 - DNA, 25 bp, Homo sapien
ggcgcacacggccttccccagtgga

SEQ ID NO: 3710925 - DNA, 25 bp, Homo sapien
agccgcgaacccgtcacccagcttc

SEQ ID NO: 3710926 - DNA, 25 bp, Homo sapien
aatagcactgagaggcggcggagta

SEQ ID NO: 3710927 - DNA, 25 bp, Homo sapien
gagtaggccgcagtccggcggcagc

SEQ ID NO: 3710928 - DNA, 25 bp, Homo sapien
catctgctgtagggcttggtccggc

SEQ ID NO: 3710929 - DNA, 25 bp, Homo sapien
cagcatctgctgtagggcttggtcc

SEQ ID NO: 3710930 - DNA, 25 bp, Homo sapien
tctgctgtagggcttggtccggcat

SEQ ID NO: 3710931 - DNA, 25 bp, Homo sapien
agcatctgctgtagggcttggtccg

SEQ ID NO: 3710932 - DNA, 25 bp, Homo sapien
cagggccagagcgagggtcggcggc

SEQ ID NO: 3710933 - DNA, 25 bp, Homo sapien
gggccagagcgagggtcggcggctc

SEQ ID NO: 3710934 - DNA, 25 bp, Homo sapien
cggctcccggtcccccccacagctg

SEQ ID NO: 3710935 - DNA, 25 bp, Homo sapien
cgcgggcagggccagagcgagggtc

SEQ ID NO: 3710936 - DNA, 25 bp, Homo sapien
ctgaccgttaaatctcccttgcgga

SEQ ID NO: 3710937 - DNA, 25 bp, Homo sapien
taaatctcccttgcggatactctga

SEQ ID NO: 3710938 - DNA, 25 bp, Homo sapien
cgttaaatctcccttgcggatactc

SEQ ID NO: 3710939 - DNA, 25 bp, Homo sapien
gaccgttaaatctcccttgcggata

SEQ ID NO: 3710940 - DNA, 25 bp, Homo sapien
ctaaatgttcagcgttggactcatt

SEQ ID NO: 3710941 - DNA, 25 bp, Homo sapien
ggactcatttggctgttttccataa

SEQ ID NO: 3710942 - DNA, 25 bp, Homo sapien
tttggctgttttccataacctctac

SEQ ID NO: 3710943 - DNA, 25 bp, Homo sapien
taaatgttcagcgttggactcattt

SEQ ID NO: 3710944 - DNA, 25 bp, Homo sapien
taggacccacggaccagaatttcaa

SEQ ID NO: 3710945 - DNA, 25 bp, Homo sapien
caagaatgggcaactggactcctgt

SEQ ID NO: 3710946 - DNA, 25 bp, Homo sapien
ggcggtgcacccgacttcacaaaga

SEQ ID NO: 3710947 - DNA, 25 bp, Homo sapien
tcctgtacgagctgaaacgtcttca

SEQ ID NO: 3710948 - DNA, 25 bp, Homo sapien
tatagaaagcaagcgtggaataagc

SEQ ID NO: 3710949 - DNA, 25 bp, Homo sapien
tctcactggcactaaattaagcaag

SEQ ID NO: 3710950 - DNA, 25 bp, Homo sapien
tcagactcctgcctgagaaatcact

SEQ ID NO: 3710951 - DNA, 25 bp, Homo sapien
cagctggtagtaaagcctttgcaga

SEQ ID NO: 3710952 - DNA, 25 bp, Homo sapien
attcaggatattctagctggttaaa

SEQ ID NO: 3710953 - DNA, 25 bp, Homo sapien
ggttcaaacccctgctaactacata

SEQ ID NO: 3710954 - DNA, 25 bp, Homo sapien
tacataggtttaatgatagaatctc

SEQ ID NO: 3710955 - DNA, 25 bp, Homo sapien
gaaaaagataatgcgaattcaggat

SEQ ID NO: 3710956 - DNA, 25 bp, Homo sapien
tccgtcttgattgaataggagctgg

SEQ ID NO: 3710957 - DNA, 25 bp, Homo sapien
agagcaactccgtcttgattgaata

SEQ ID NO: 3710958 - DNA, 25 bp, Homo sapien
aatagcagtattagaggcatgtgaa

SEQ ID NO: 3710959 - DNA, 25 bp, Homo sapien
ttatcaggagttaggctttcagttg

SEQ ID NO: 3710960 - DNA, 25 bp, Homo sapien
ccattcagctgttctatcatcttca

SEQ ID NO: 3710961 - DNA, 25 bp, Homo sapien
cattcagctgttctatcatcttcat

SEQ ID NO: 3710962 - DNA, 25 bp, Homo sapien
atcagtagcaaaacaaacccagcaa

SEQ ID NO: 3710963 - DNA, 25 bp, Homo sapien
atcatcttcatcagtagcaaaacaa

SEQ ID NO: 3710964 - DNA, 25 bp, Homo sapien
gaacccattttgtagatcctctgca

SEQ ID NO: 3710965 - DNA, 25 bp, Homo sapien
atccacccagcgttgtagacaggcc

SEQ ID NO: 3710966 - DNA, 25 bp, Homo sapien
aactattaggtattcagcattgcac

SEQ ID NO: 3710967 - DNA, 25 bp, Homo sapien
tagacaggcctggtgaacccatttt

SEQ ID NO: 3710968 - DNA, 25 bp, Homo sapien
aagatcccaagtcaactaatcttct

SEQ ID NO: 3710969 - DNA, 25 bp, Homo sapien
aaggacataaatattagggtggata

SEQ ID NO: 3710970 - DNA, 25 bp, Homo sapien
taaatattagggtggataaaaatga

SEQ ID NO: 3710971 - DNA, 25 bp, Homo sapien
tcccaagtcaactaatcttctacct

SEQ ID NO: 3710972 - DNA, 25 bp, Homo sapien
ttgcttgtgcataatgttagtactt

SEQ ID NO: 3710973 - DNA, 25 bp, Homo sapien
agttgtctcaatatcctttatgtct

SEQ ID NO: 3710974 - DNA, 25 bp, Homo sapien
ccctttgcttgtgcataatgttagt

SEQ ID NO: 3710975 - DNA, 25 bp, Homo sapien
tgtctcaatatcctttatgtctgtc

SEQ ID NO: 3710976 - DNA, 25 bp, Homo sapien
tgaactgatttcgacctagaccaaa

SEQ ID NO: 3710977 - DNA, 25 bp, Homo sapien
aatgccaactttcttccgagacaga

SEQ ID NO: 3710978 - DNA, 25 bp, Homo sapien
gtttctgagacgataagttccttct

SEQ ID NO: 3710979 - DNA, 25 bp, Homo sapien
tcaacaagcaagacagactgctcac

SEQ ID NO: 3710980 - DNA, 25 bp, Homo sapien
ttgtaaataccaatgcacttggact

SEQ ID NO: 3710981 - DNA, 25 bp, Homo sapien
gtaaataccaatgcacttggactgg

SEQ ID NO: 3710982 - DNA, 25 bp, Homo sapien
gtgaagctgttggagtggagaagaa

SEQ ID NO: 3710983 - DNA, 25 bp, Homo sapien
aaataccaatgcacttggactggca

SEQ ID NO: 3710984 - DNA, 25 bp, Homo sapien
ggcaggtaggtaatacttaatgttc

SEQ ID NO: 3710985 - DNA, 25 bp, Homo sapien
tcagcatttgctggcattgcttata

SEQ ID NO: 3710986 - DNA, 25 bp, Homo sapien
ccttggaagttcagaagtcaatgac

SEQ ID NO: 3710987 - DNA, 25 bp, Homo sapien
tgcttataataacacccagaactcc

SEQ ID NO: 3710988 - DNA, 25 bp, Homo sapien
tttcactactcaattttcagtctcc

SEQ ID NO: 3710989 - DNA, 25 bp, Homo sapien
tcactactcaattttcagtctcctt

SEQ ID NO: 3710990 - DNA, 25 bp, Homo sapien
ctttctatttcactactcaattttc

SEQ ID NO: 3710991 - DNA, 25 bp, Homo sapien
ctatttcactactcaattttcagtc

SEQ ID NO: 3710992 - DNA, 25 bp, Homo sapien
ccgcacccagccagctatttattta

SEQ ID NO: 3710993 - DNA, 25 bp, Homo sapien
tgcatctggccctaagtttattttt

SEQ ID NO: 3710994 - DNA, 25 bp, Homo sapien
accgcacccagccagctatttattt

SEQ ID NO: 3710995 - DNA, 25 bp, Homo sapien
cactgcatctggccctaagtttatt

SEQ ID NO: 3710996 - DNA, 25 bp, Homo sapien
tgtataccttgatacagtacataaa

SEQ ID NO: 3710997 - DNA, 25 bp, Homo sapien
gatacagtacataaaggtaaccagg

SEQ ID NO: 3710998 - DNA, 25 bp, Homo sapien
tacagtacataaaggtaaccagggc

SEQ ID NO: 3710999 - DNA, 25 bp, Homo sapien
tataccttgatacagtacataaagg

SEQ ID NO: 3711000 - DNA, 25 bp, Homo sapien
cactgctccataagtcacagctgtc

SEQ ID NO: 3711001 - DNA, 25 bp, Homo sapien
aatggacaggcttttgagatcagtc

SEQ ID NO: 3711002 - DNA, 25 bp, Homo sapien
tgtccaatagatagagccgaccatt

SEQ ID NO: 3711003 - DNA, 25 bp, Homo sapien
gagatcagtctatctgcaagatcca

SEQ ID NO: 3711004 - DNA, 25 bp, Homo sapien
cacaccaagtaatatcactatatag

SEQ ID NO: 3711005 - DNA, 25 bp, Homo sapien
gatcttcacaccaagtaatatcact

SEQ ID NO: 3711006 - DNA, 25 bp, Homo sapien
taatatcactatataggtaaaatag

SEQ ID NO: 3711007 - DNA, 25 bp, Homo sapien
ccaagtaatatcactatataggtaa

SEQ ID NO: 3711008 - DNA, 25 bp, Homo sapien
tcccagcgaatcatcttgcctaata

SEQ ID NO: 3711009 - DNA, 25 bp, Homo sapien
tattcgagtatttgcgccacagtct

SEQ ID NO: 3711010 - DNA, 25 bp, Homo sapien
cagtctaagcacatagtcctcccag

SEQ ID NO: 3711011 - DNA, 25 bp, Homo sapien
cagcatgacaggaatagtaggaagt

SEQ ID NO: 3711012 - DNA, 25 bp, Homo sapien
ctattgtagcaatagtaggaaagac

SEQ ID NO: 3711013 - DNA, 25 bp, Homo sapien
caagggctccacacaagattcgagt

SEQ ID NO: 3711014 - DNA, 25 bp, Homo sapien
gaattcgaggaacaggacaacctat

SEQ ID NO: 3711015 - DNA, 25 bp, Homo sapien
ttcgagtagcagagacatgatctgc

SEQ ID NO: 3711016 - DNA, 25 bp, Homo sapien
tgtaaattagagttaacactactga

SEQ ID NO: 3711017 - DNA, 25 bp, Homo sapien
tgtcctttgtaaattagagttaaca

SEQ ID NO: 3711018 - DNA, 25 bp, Homo sapien
ttgtaaattagagttaacactactg

SEQ ID NO: 3711019 - DNA, 25 bp, Homo sapien
aagattgtcctttgtaaattagagt

SEQ ID NO: 3711020 - DNA, 25 bp, Homo sapien
aaagtactgtaatcccactggcaag

SEQ ID NO: 3711021 - DNA, 25 bp, Homo sapien
ccaggtggtctgatcgtaaagtact

SEQ ID NO: 3711022 - DNA, 25 bp, Homo sapien
caaggtccgtgcaggttacatgcca

SEQ ID NO: 3711023 - DNA, 25 bp, Homo sapien
taggagccacagaccgaatatttat

SEQ ID NO: 3711024 - DNA, 25 bp, Homo sapien
tagatcacaaaagacgtaggctttg

SEQ ID NO: 3711025 - DNA, 25 bp, Homo sapien
cagactatacgctgttactacaggt

SEQ ID NO: 3711026 - DNA, 25 bp, Homo sapien
gagagagacagactatacgctgtta

SEQ ID NO: 3711027 - DNA, 25 bp, Homo sapien
ttttctactaggagatgagataggg

SEQ ID NO: 3711028 - DNA, 25 bp, Homo sapien
ttaaatgctccttttatggcaacaa

SEQ ID NO: 3711029 - DNA, 25 bp, Homo sapien
ttatggcaacaaacgcaattccacc

SEQ ID NO: 3711030 - DNA, 25 bp, Homo sapien
cgtaaatattgctgctgtttgaagt

SEQ ID NO: 3711031 - DNA, 25 bp, Homo sapien
gaattttgcggtgtgcctgtcgtaa

SEQ ID NO: 3711032 - DNA, 25 bp, Homo sapien
ccaggtttaccatgctaagataatg

SEQ ID NO: 3711033 - DNA, 25 bp, Homo sapien
gattaccgagatgatttcccctgcc

SEQ ID NO: 3711034 - DNA, 25 bp, Homo sapien
catccttaggttccatgattaccga

SEQ ID NO: 3711035 - DNA, 25 bp, Homo sapien
gattcataaggatgagagaactgca

SEQ ID NO: 3711036 - DNA, 25 bp, Homo sapien
tcctcttatttagtatgtaatcaaa

SEQ ID NO: 3711037 - DNA, 25 bp, Homo sapien
aaaatcctcatagtaccttgagttg

SEQ ID NO: 3711038 - DNA, 25 bp, Homo sapien
aaacactaaacatgaacatgtacaa

SEQ ID NO: 3711039 - DNA, 25 bp, Homo sapien
catgaacatgtacaaaagaggcatt

SEQ ID NO: 3711040 - DNA, 25 bp, Homo sapien
ttgaaaaagtgatctggaagccctg

SEQ ID NO: 3711041 - DNA, 25 bp, Homo sapien
gaaaaagtgatctggaagccctgtg

SEQ ID NO: 3711042 - DNA, 25 bp, Homo sapien
tctcatttgttcagataatcatttg

SEQ ID NO: 3711043 - DNA, 25 bp, Homo sapien
ccctgtgaatttttaccctacacat

SEQ ID NO: 3711044 - DNA, 25 bp, Homo sapien
tcaaactactataaactggcagctg

SEQ ID NO: 3711045 - DNA, 25 bp, Homo sapien
acacgactgcatgagtcaaaattac

SEQ ID NO: 3711046 - DNA, 25 bp, Homo sapien
cgactgcatgagtcaaaattacttc

SEQ ID NO: 3711047 - DNA, 25 bp, Homo sapien
cacgactgcatgagtcaaaattact

SEQ ID NO: 3711048 - DNA, 25 bp, Homo sapien
taaacagtgattaaggtgctagcct

SEQ ID NO: 3711049 - DNA, 25 bp, Homo sapien
taaagtggccgcttatcagtaaggg

SEQ ID NO: 3711050 - DNA, 25 bp, Homo sapien
tatttgctacactcctaaagtggcc

SEQ ID NO: 3711051 - DNA, 25 bp, Homo sapien
tgctgaaactagactgtcaactctg

SEQ ID NO: 3711052 - DNA, 25 bp, Homo sapien
tccagccagtattgagatagtttgc

SEQ ID NO: 3711053 - DNA, 25 bp, Homo sapien
ccctgtcaagggcattaatgtagta

SEQ ID NO: 3711054 - DNA, 25 bp, Homo sapien
gattagagttgttccccggccttca

SEQ ID NO: 3711055 - DNA, 25 bp, Homo sapien
ttgttgcttcatggtcaggcaggtc

SEQ ID NO: 3711056 - DNA, 25 bp, Homo sapien
gtatctcgataactgtgattaaaaa

SEQ ID NO: 3711057 - DNA, 25 bp, Homo sapien
tacttacaaaaactagtatctcgat

SEQ ID NO: 3711058 - DNA, 25 bp, Homo sapien
tttgagatttaacaaagtacaccta

SEQ ID NO: 3711059 - DNA, 25 bp, Homo sapien
tgagatttaacaaagtacacctaga

SEQ ID NO: 3711060 - DNA, 25 bp, Homo sapien
aatgccggatgaaggaaagtgaagc

SEQ ID NO: 3711061 - DNA, 25 bp, Homo sapien
cattccactgttcgtgggtcccttt

SEQ ID NO: 3711062 - DNA, 25 bp, Homo sapien
aaggtaatgccggatgaaggaaagt

SEQ ID NO: 3711063 - DNA, 25 bp, Homo sapien
ttctttgccattccactgttcgtgg

SEQ ID NO: 3711064 - DNA, 25 bp, Homo sapien
tgtctgtaacccacggataccatga

SEQ ID NO: 3711065 - DNA, 25 bp, Homo sapien
gaggtctggccaaaccggcttttgc

SEQ ID NO: 3711066 - DNA, 25 bp, Homo sapien
gcttttgccccgagtgaggaattcc

SEQ ID NO: 3711067 - DNA, 25 bp, Homo sapien
gctgcaaggagaccgactgggattc

SEQ ID NO: 3711068 - DNA, 25 bp, Homo sapien
tgttgggctgcccggccgcgcgtac

SEQ ID NO: 3711069 - DNA, 25 bp, Homo sapien
tcaccctgttggaacccatttctgg

SEQ ID NO: 3711070 - DNA, 25 bp, Homo sapien
ttggaacccatttctggggctggca

SEQ ID NO: 3711071 - DNA, 25 bp, Homo sapien
ctgttgggctgcccggccgcgcgta

SEQ ID NO: 3711072 - DNA, 25 bp, Homo sapien
tacccaacggctgtcgaaagaggag

SEQ ID NO: 3711073 - DNA, 25 bp, Homo sapien
aacggccgcttgcagtttggccaca

SEQ ID NO: 3711074 - DNA, 25 bp, Homo sapien
ttcgtagtgcaaaaccctctcctgg

SEQ ID NO: 3711075 - DNA, 25 bp, Homo sapien
gacgtgaacttccaccgacaatcgt

SEQ ID NO: 3711076 - DNA, 25 bp, Homo sapien
caggtccagctgattgacgatgccc

SEQ ID NO: 3711077 - DNA, 25 bp, Homo sapien
cagaccatggtctatcttggcgaat

SEQ ID NO: 3711078 - DNA, 25 bp, Homo sapien
tagtctatacatatcaacaggtcca

SEQ ID NO: 3711079 - DNA, 25 bp, Homo sapien
ctttctggagaattgacccctagtc

SEQ ID NO: 3711080 - DNA, 25 bp, Homo sapien
cagctctggagctaggtagtccaag

SEQ ID NO: 3711081 - DNA, 25 bp, Homo sapien
ctctggagctaggtagtccaagatc

SEQ ID NO: 3711082 - DNA, 25 bp, Homo sapien
acagctctggagctaggtagtccaa

SEQ ID NO: 3711083 - DNA, 25 bp, Homo sapien
tcacagctctggagctaggtagtcc

SEQ ID NO: 3711084 - DNA, 25 bp, Homo sapien
tcttatgatcactttttgttggttc

SEQ ID NO: 3711085 - DNA, 25 bp, Homo sapien
ctagaagtagtgagaggagacattc

SEQ ID NO: 3711086 - DNA, 25 bp, Homo sapien
gaacctcctgcaatgttgactagaa

SEQ ID NO: 3711087 - DNA, 25 bp, Homo sapien
gacattcttgtttctgatccgaggg

SEQ ID NO: 3711088 - DNA, 25 bp, Homo sapien
gatatatagattattgccaagcatg

SEQ ID NO: 3711089 - DNA, 25 bp, Homo sapien
attatcagatatatagattattgcc

SEQ ID NO: 3711090 - DNA, 25 bp, Homo sapien
gagatgaggtggctatataattata

SEQ ID NO: 3711091 - DNA, 25 bp, Homo sapien
aatagagatgaggtggctatataat

SEQ ID NO: 3711092 - DNA, 25 bp, Homo sapien
gtcttatgacctactgtcaagccag

SEQ ID NO: 3711093 - DNA, 25 bp, Homo sapien
caactgtggcaaagggtgtgatcta

SEQ ID NO: 3711094 - DNA, 25 bp, Homo sapien
gccagataggtcagggaatttcttt

SEQ ID NO: 3711095 - DNA, 25 bp, Homo sapien
ctaatgtagtagaccgagaggagga

SEQ ID NO: 3711096 - DNA, 25 bp, Homo sapien
tctactgtcagatcaatgtggtgct

SEQ ID NO: 3711097 - DNA, 25 bp, Homo sapien
caagaacctccttatatgaagcctg

SEQ ID NO: 3711098 - DNA, 25 bp, Homo sapien
cagatctgaaattaggcctgagtgt

SEQ ID NO: 3711099 - DNA, 25 bp, Homo sapien
tgttccgatccaccactgtactagt

SEQ ID NO: 3711100 - DNA, 25 bp, Homo sapien
tgtatctgttctgtcggccgtgctc

SEQ ID NO: 3711101 - DNA, 25 bp, Homo sapien
ctgtccaccaaggatgtgactttat

SEQ ID NO: 3711102 - DNA, 25 bp, Homo sapien
taattaccacagacacatttcccag

SEQ ID NO: 3711103 - DNA, 25 bp, Homo sapien
ggaaaactcagggataagctaacat

SEQ ID NO: 3711104 - DNA, 25 bp, Homo sapien
tggcttgagccagtgagttcaactg

SEQ ID NO: 3711105 - DNA, 25 bp, Homo sapien
gagccagtgagttcaactgcagtga

SEQ ID NO: 3711106 - DNA, 25 bp, Homo sapien
agtgagacactatctttacaagaaa

SEQ ID NO: 3711107 - DNA, 25 bp, Homo sapien
tttcaaaagcattacattcaaatgg

SEQ ID NO: 3711108 - DNA, 25 bp, Homo sapien
ccaaagcattatggtaggcagtagt

SEQ ID NO: 3711109 - DNA, 25 bp, Homo sapien
gatgccaaggtgtaattctgcaact

SEQ ID NO: 3711110 - DNA, 25 bp, Homo sapien
tagttccctgggatcatacactgaa

SEQ ID NO: 3711111 - DNA, 25 bp, Homo sapien
tgctgggccaaagtagtctgtttcc

SEQ ID NO: 3711112 - DNA, 25 bp, Homo sapien
ttctgcaaggaactgggaatgttat

SEQ ID NO: 3711113 - DNA, 25 bp, Homo sapien
gtggtgtggttttgattccatgcct

SEQ ID NO: 3711114 - DNA, 25 bp, Homo sapien
tggtgtggttttgattccatgcctt

SEQ ID NO: 3711115 - DNA, 25 bp, Homo sapien
caaggaactgggaatgttatgtggt

SEQ ID NO: 3711116 - DNA, 25 bp, Homo sapien
ttctggaactagtttatccaatcct

SEQ ID NO: 3711117 - DNA, 25 bp, Homo sapien
tatccaatccttgttgcttgcacaa

SEQ ID NO: 3711118 - DNA, 25 bp, Homo sapien
gttgttgaagctgaattagtttgcc

SEQ ID NO: 3711119 - DNA, 25 bp, Homo sapien
tgttgcttgcacaactttccaacat

SEQ ID NO: 3711120 - DNA, 25 bp, Homo sapien
atgtttgtctatattcatcaaggtt

SEQ ID NO: 3711121 - DNA, 25 bp, Homo sapien
catgagccactatacttagcctttt

SEQ ID NO: 3711122 - DNA, 25 bp, Homo sapien
gcatccctgagtacttgggaatata

SEQ ID NO: 3711123 - DNA, 25 bp, Homo sapien
gacctttctaccttagcatccctga

SEQ ID NO: 3711124 - DNA, 25 bp, Homo sapien
ttgcattgccgggataaatctcact

SEQ ID NO: 3711125 - DNA, 25 bp, Homo sapien
tcgaagcgcaagcaggaagcgtttg

SEQ ID NO: 3711126 - DNA, 25 bp, Homo sapien
aagcgtttgcggtgatcccggcgac

SEQ ID NO: 3711127 - DNA, 25 bp, Homo sapien
tgcgctggctaatgcggtaccggct

SEQ ID NO: 3711128 - DNA, 25 bp, Homo sapien
gtaccggctagcgtggcttctgcac

SEQ ID NO: 3711129 - DNA, 25 bp, Homo sapien
gccccatccggctccaggcaaaacc

SEQ ID NO: 3711130 - DNA, 25 bp, Homo sapien
catccggctccaggcaaaacccgga

SEQ ID NO: 3711131 - DNA, 25 bp, Homo sapien
tccggctccaggcaaaacccggagc

SEQ ID NO: 3711132 - DNA, 25 bp, Homo sapien
cccatccggctccaggcaaaacccg

SEQ ID NO: 3711133 - DNA, 25 bp, Homo sapien
gactcggcgcctcaatttgaaaaag

SEQ ID NO: 3711134 - DNA, 25 bp, Homo sapien
tactctggccgtggcgtttgtcccg

SEQ ID NO: 3711135 - DNA, 25 bp, Homo sapien
gatgcagtatcctcactggagcccc

SEQ ID NO: 3711136 - DNA, 25 bp, Homo sapien
ccagaaactaagcaacgactcggcg

SEQ ID NO: 3711137 - DNA, 25 bp, Homo sapien
gccgcggacctgggcgctgtgaggg

SEQ ID NO: 3711138 - DNA, 25 bp, Homo sapien
gccgacaggggccggagtctccctg

SEQ ID NO: 3711139 - DNA, 25 bp, Homo sapien
aaatcaaggcccggccgcggacctg

SEQ ID NO: 3711140 - DNA, 25 bp, Homo sapien
tggtccctctcgggcgctggcgtgg

SEQ ID NO: 3711141 - DNA, 25 bp, Homo sapien
ctttcttcttcgcagacgaatttgg

SEQ ID NO: 3711142 - DNA, 25 bp, Homo sapien
tcttcttcgcagacgaatttggctg

SEQ ID NO: 3711143 - DNA, 25 bp, Homo sapien
tcttcgcagacgaatttggctgcga

SEQ ID NO: 3711144 - DNA, 25 bp, Homo sapien
gcagacgaatttggctgcgacgcca

SEQ ID NO: 3711145 - DNA, 25 bp, Homo sapien
agctcataggccagacccctgtgtt

SEQ ID NO: 3711146 - DNA, 25 bp, Homo sapien
gccaaggtgttggagcagctcatag

SEQ ID NO: 3711147 - DNA, 25 bp, Homo sapien
ccaaagtcaaatacattgtcagatc

SEQ ID NO: 3711148 - DNA, 25 bp, Homo sapien
gacccctgtgttctccaaagtcaaa

SEQ ID NO: 3711149 - DNA, 25 bp, Homo sapien
gagttcatttttcccattgagtatc

SEQ ID NO: 3711150 - DNA, 25 bp, Homo sapien
gttcatttttcccattgagtatcat

SEQ ID NO: 3711151 - DNA, 25 bp, Homo sapien
tgagttcatttttcccattgagtat

SEQ ID NO: 3711152 - DNA, 25 bp, Homo sapien
ctgagttcatttttcccattgagta

SEQ ID NO: 3711153 - DNA, 25 bp, Homo sapien
cactaacttcttttcgtacaggatc

SEQ ID NO: 3711154 - DNA, 25 bp, Homo sapien
tgaatgggcgctagctttccgctct

SEQ ID NO: 3711155 - DNA, 25 bp, Homo sapien
tttccgctctgccaaattaaatggt

SEQ ID NO: 3711156 - DNA, 25 bp, Homo sapien
gccaatcctccagttcgtacactaa

SEQ ID NO: 3711157 - DNA, 25 bp, Homo sapien
catccagaattggacaaacaacact

SEQ ID NO: 3711158 - DNA, 25 bp, Homo sapien
catcaatctgtttagtagatgctcc

SEQ ID NO: 3711159 - DNA, 25 bp, Homo sapien
tctgtttagtagatgctccaaacac

SEQ ID NO: 3711160 - DNA, 25 bp, Homo sapien
caacacttcggtaaacatcaatctg

SEQ ID NO: 3711161 - DNA, 25 bp, Homo sapien
ctcttcccaggtatactcttcatta

SEQ ID NO: 3711162 - DNA, 25 bp, Homo sapien
ttcccaggtatactcttcattaggt

SEQ ID NO: 3711163 - DNA, 25 bp, Homo sapien
cttcccaggtatactcttcattagg

SEQ ID NO: 3711164 - DNA, 25 bp, Homo sapien
tcccaggtatactcttcattaggtg

SEQ ID NO: 3711165 - DNA, 25 bp, Homo sapien
aaatttgatgaagggtacgtggaat

SEQ ID NO: 3711166 - DNA, 25 bp, Homo sapien
tctgtagtctctcagaaacatcaga

SEQ ID NO: 3711167 - DNA, 25 bp, Homo sapien
aaaattcagtaccattatcagtaag

SEQ ID NO: 3711168 - DNA, 25 bp, Homo sapien
tagatctccaacagagacactttga

SEQ ID NO: 3711169 - DNA, 25 bp, Homo sapien
cttcatccttgttgtgtactgtaat

SEQ ID NO: 3711170 - DNA, 25 bp, Homo sapien
catccttgttgtgtactgtaatttc

SEQ ID NO: 3711171 - DNA, 25 bp, Homo sapien
ctagagtatgcattcatcagagtag

SEQ ID NO: 3711172 - DNA, 25 bp, Homo sapien
tcagagtagctgcagttgtcctttt

SEQ ID NO: 3711173 - DNA, 25 bp, Homo sapien
cataaaaagtgacctttatacaagt

SEQ ID NO: 3711174 - DNA, 25 bp, Homo sapien
ttcataaaaagtgacctttatacaa

SEQ ID NO: 3711175 - DNA, 25 bp, Homo sapien
tcataaaaagtgacctttatacaag

SEQ ID NO: 3711176 - DNA, 25 bp, Homo sapien
cttcataaaaagtgacctttataca

SEQ ID NO: 3711177 - DNA, 25 bp, Homo sapien
tcttctccatcaatcgtagtttctt

SEQ ID NO: 3711178 - DNA, 25 bp, Homo sapien
ttctccatcaatcgtagtttctttc

SEQ ID NO: 3711179 - DNA, 25 bp, Homo sapien
tctccatcaatcgtagtttctttca

SEQ ID NO: 3711180 - DNA, 25 bp, Homo sapien
tccatcaatcgtagtttctttcata

SEQ ID NO: 3711181 - DNA, 25 bp, Homo sapien
tgaggtgttctttctacaagggcag

SEQ ID NO: 3711182 - DNA, 25 bp, Homo sapien
acagctccagaacggccaatgtttt

SEQ ID NO: 3711183 - DNA, 25 bp, Homo sapien
tatagatgttcttgtacgccctcca

SEQ ID NO: 3711184 - DNA, 25 bp, Homo sapien
gattctcgataaggaacatgaggtg

SEQ ID NO: 3711185 - DNA, 25 bp, Homo sapien
gttctttgctctatgagcatattcc

SEQ ID NO: 3711186 - DNA, 25 bp, Homo sapien
catattccaatgtactcagagtttc

SEQ ID NO: 3711187 - DNA, 25 bp, Homo sapien
tgattcacttcaggcttattcaata

SEQ ID NO: 3711188 - DNA, 25 bp, Homo sapien
tctgattcacttcaggcttattcaa

SEQ ID NO: 3711189 - DNA, 25 bp, Homo sapien
cccaggttggtaggagtaattcaca

SEQ ID NO: 3711190 - DNA, 25 bp, Homo sapien
tcagtttgggaaggacatgcaacaa

SEQ ID NO: 3711191 - DNA, 25 bp, Homo sapien
tcaaaaggactcagtaagccacttg

SEQ ID NO: 3711192 - DNA, 25 bp, Homo sapien
ggaaataagctaagcaaagcctact

SEQ ID NO: 3711193 - DNA, 25 bp, Homo sapien
ttaaacgttctatctcctccgtata

SEQ ID NO: 3711194 - DNA, 25 bp, Homo sapien
gcagcaagatctcgttttaaacgtt

SEQ ID NO: 3711195 - DNA, 25 bp, Homo sapien
taaacgttctatctcctccgtatac

SEQ ID NO: 3711196 - DNA, 25 bp, Homo sapien
ttttctcacgggctgcagcaagatc

SEQ ID NO: 3711197 - DNA, 25 bp, Homo sapien
tacttactgctacataagttttact

SEQ ID NO: 3711198 - DNA, 25 bp, Homo sapien
cttggaaattaactccatagccaag

SEQ ID NO: 3711199 - DNA, 25 bp, Homo sapien
taaagattttacttactgctacata

SEQ ID NO: 3711200 - DNA, 25 bp, Homo sapien
tggaaattaactccatagccaaggg

SEQ ID NO: 3711201 - DNA, 25 bp, Homo sapien
ctcaacagcaccaattttttcaatc

SEQ ID NO: 3711202 - DNA, 25 bp, Homo sapien
cctcaacagcaccaattttttcaat

SEQ ID NO: 3711203 - DNA, 25 bp, Homo sapien
tcaacagcaccaattttttcaatca

SEQ ID NO: 3711204 - DNA, 25 bp, Homo sapien
ccaaagctgatgtgatatattcttc

SEQ ID NO: 3711205 - DNA, 25 bp, Homo sapien
aggtcagatttacactggtcaagtt

SEQ ID NO: 3711206 - DNA, 25 bp, Homo sapien
tacactggtcaagttcatttttatt

SEQ ID NO: 3711207 - DNA, 25 bp, Homo sapien
tttccaaagctgatgtgatatattc

SEQ ID NO: 3711208 - DNA, 25 bp, Homo sapien
gacaaaatggatacggtgaaaggaa

SEQ ID NO: 3711209 - DNA, 25 bp, Homo sapien
gtatctacacaaggatttatcttga

SEQ ID NO: 3711210 - DNA, 25 bp, Homo sapien
tctgatgaaagtatctacacaagga

SEQ ID NO: 3711211 - DNA, 25 bp, Homo sapien
aagaactagtaaattttccagcctg

SEQ ID NO: 3711212 - DNA, 25 bp, Homo sapien
tgcattgtgttggtcaactgccttc

SEQ ID NO: 3711213 - DNA, 25 bp, Homo sapien
ttttgccaaaaatatcctgagcttc

SEQ ID NO: 3711214 - DNA, 25 bp, Homo sapien
tattattaaacagactattcaggtt

SEQ ID NO: 3711215 - DNA, 25 bp, Homo sapien
tgccttcttacgatccagtttggaa

SEQ ID NO: 3711216 - DNA, 25 bp, Homo sapien
taaaaatctgagaaacatgagtaga

SEQ ID NO: 3711217 - DNA, 25 bp, Homo sapien
aaatctgagaaacatgagtagacac

SEQ ID NO: 3711218 - DNA, 25 bp, Homo sapien
gagaaacatgagtagacacattttc

SEQ ID NO: 3711219 - DNA, 25 bp, Homo sapien
tctgagaaacatgagtagacacatt

SEQ ID NO: 3711220 - DNA, 25 bp, Homo sapien
tttcagtatagacaccacagttggg

SEQ ID NO: 3711221 - DNA, 25 bp, Homo sapien
ttccagtgaacttagaagatcagtc

SEQ ID NO: 3711222 - DNA, 25 bp, Homo sapien
ttatcggccactgtcaatgaagtct

SEQ ID NO: 3711223 - DNA, 25 bp, Homo sapien
gctttagttgactattgattttcag

SEQ ID NO: 3711224 - DNA, 25 bp, Homo sapien
tcttcaggtcttcagttaggtttcc

SEQ ID NO: 3711225 - DNA, 25 bp, Homo sapien
tgactcaaccaaggaacaaatggta

SEQ ID NO: 3711226 - DNA, 25 bp, Homo sapien
ctgggaatgggtctgctttattgtc

SEQ ID NO: 3711227 - DNA, 25 bp, Homo sapien
gttcatgtagattgttacacagtat

SEQ ID NO: 3711228 - DNA, 25 bp, Homo sapien
ctctgtccaaagattcattaacttg

SEQ ID NO: 3711229 - DNA, 25 bp, Homo sapien
tgctgtatattttcctggacactac

SEQ ID NO: 3711230 - DNA, 25 bp, Homo sapien
tcctccaaagcacagaatctctctg

SEQ ID NO: 3711231 - DNA, 25 bp, Homo sapien
tcctggacactactaagtggtttct

SEQ ID NO: 3711232 - DNA, 25 bp, Homo sapien
cattttgttgactatatccttagat

SEQ ID NO: 3711233 - DNA, 25 bp, Homo sapien
tttgttgactatatccttagatttc

SEQ ID NO: 3711234 - DNA, 25 bp, Homo sapien
aagccatcagaatcagcacaaaatt

SEQ ID NO: 3711235 - DNA, 25 bp, Homo sapien
tcagaatcagcacaaaatttttgac

SEQ ID NO: 3711236 - DNA, 25 bp, Homo sapien
tccaggttgccattgagtttatcag

SEQ ID NO: 3711237 - DNA, 25 bp, Homo sapien
ggaagatacccactgttcagaaaaa

SEQ ID NO: 3711238 - DNA, 25 bp, Homo sapien
ctccaataagttgtgaagttcctgt

SEQ ID NO: 3711239 - DNA, 25 bp, Homo sapien
tctgttcagtctcttgagatatttt

SEQ ID NO: 3711240 - DNA, 25 bp, Homo sapien
catcaatagtcatctgatcaagaaa

SEQ ID NO: 3711241 - DNA, 25 bp, Homo sapien
catgagctgccttacgtccatctga

SEQ ID NO: 3711242 - DNA, 25 bp, Homo sapien
aaagcaattaagcttagtcaaacca

SEQ ID NO: 3711243 - DNA, 25 bp, Homo sapien
tgaacttgaagcctcacaacattgg

SEQ ID NO: 3711244 - DNA, 25 bp, Homo sapien
tagcatcattaacagctcaggctgt

SEQ ID NO: 3711245 - DNA, 25 bp, Homo sapien
cttaccagtgttgatgggtataaat

SEQ ID NO: 3711246 - DNA, 25 bp, Homo sapien
ttcagctgatcaaggagatgttcac

SEQ ID NO: 3711247 - DNA, 25 bp, Homo sapien
tcacgtggttcagttcttaccagtg

SEQ ID NO: 3711248 - DNA, 25 bp, Homo sapien
tggaaccccgccaattgatgaacaa

SEQ ID NO: 3711249 - DNA, 25 bp, Homo sapien
ggctcttgacttagaggttcttcag

SEQ ID NO: 3711250 - DNA, 25 bp, Homo sapien
ccagcatctacagatggctcttgac

SEQ ID NO: 3711251 - DNA, 25 bp, Homo sapien
ggttcttcagtatactgccccagaa

SEQ ID NO: 3711252 - DNA, 25 bp, Homo sapien
tctcatcagggagtgattctgctgc

SEQ ID NO: 3711253 - DNA, 25 bp, Homo sapien
tagtacagtccacaggaaagcccat

SEQ ID NO: 3711254 - DNA, 25 bp, Homo sapien
tacaatcagggagtgctactggctt

SEQ ID NO: 3711255 - DNA, 25 bp, Homo sapien
tatagattttactccagggtagtgg

SEQ ID NO: 3711256 - DNA, 25 bp, Homo sapien
gaggtaatctgctctttgtaaccaa

SEQ ID NO: 3711257 - DNA, 25 bp, Homo sapien
tctttgtaaccaagtgctctgtagt

SEQ ID NO: 3711258 - DNA, 25 bp, Homo sapien
taaaggttgatctgggctcgcagag

SEQ ID NO: 3711259 - DNA, 25 bp, Homo sapien
tagacctctccagtgtgttaatgcc

SEQ ID NO: 3711260 - DNA, 25 bp, Homo sapien
aaaggataccttttgtagctctaca

SEQ ID NO: 3711261 - DNA, 25 bp, Homo sapien
ctcaagctgagaagagtacagttct

SEQ ID NO: 3711262 - DNA, 25 bp, Homo sapien
tttaaaatctatacacaaggctcaa

SEQ ID NO: 3711263 - DNA, 25 bp, Homo sapien
gaagtctagggaggatgcaagaaaa

SEQ ID NO: 3711264 - DNA, 25 bp, Homo sapien
taaccatggatttactgagggcagt

SEQ ID NO: 3711265 - DNA, 25 bp, Homo sapien
ggtattatccatcgcttatgctgac

SEQ ID NO: 3711266 - DNA, 25 bp, Homo sapien
gatcaaaaataccagagtcctaagg

SEQ ID NO: 3711267 - DNA, 25 bp, Homo sapien
tgagcttctctaaaaggcacaggtc

SEQ ID NO: 3711268 - DNA, 25 bp, Homo sapien
aatctctatgagacattgtttccct

SEQ ID NO: 3711269 - DNA, 25 bp, Homo sapien
ctgagtgggctatactttctttgca

SEQ ID NO: 3711270 - DNA, 25 bp, Homo sapien
ctttctactgtctggccatatctgc

SEQ ID NO: 3711271 - DNA, 25 bp, Homo sapien
taaagtccaatgtctatgcttcctc

SEQ ID NO: 3711272 - DNA, 25 bp, Homo sapien
tcactagagggactcacaagcaaat

SEQ ID NO: 3711273 - DNA, 25 bp, Homo sapien
caacgaggtgttcctttagagtcaa

SEQ ID NO: 3711274 - DNA, 25 bp, Homo sapien
taaatggctcaaggcctactgtcag

SEQ ID NO: 3711275 - DNA, 25 bp, Homo sapien
cattggatctctaggaaacaccaga

SEQ ID NO: 3711276 - DNA, 25 bp, Homo sapien
gatgaaatactagagaaagatgaag

SEQ ID NO: 3711277 - DNA, 25 bp, Homo sapien
gaggatgaaatactagagaaagatg

SEQ ID NO: 3711278 - DNA, 25 bp, Homo sapien
agatgaggatgaaatactagagaaa

SEQ ID NO: 3711279 - DNA, 25 bp, Homo sapien
gagaaagatgaagttctagaagagg

SEQ ID NO: 3711280 - DNA, 25 bp, Homo sapien
gcaacaaaatgttgtgatgcgacat

SEQ ID NO: 3711281 - DNA, 25 bp, Homo sapien
ttaaggagcactgtaaagattctat

SEQ ID NO: 3711282 - DNA, 25 bp, Homo sapien
aaggcaacaaaatgttgtgatgcga

SEQ ID NO: 3711283 - DNA, 25 bp, Homo sapien
tttaaggagcactgtaaagattcta

SEQ ID NO: 3711284 - DNA, 25 bp, Homo sapien
aatcagagcccagaaatacataagc

SEQ ID NO: 3711285 - DNA, 25 bp, Homo sapien
gcctcatccccatcataaatggaat

SEQ ID NO: 3711286 - DNA, 25 bp, Homo sapien
tgatcaaatagagatgcctcatccc

SEQ ID NO: 3711287 - DNA, 25 bp, Homo sapien
gaatcagagcccagaaatacataag

SEQ ID NO: 3711288 - DNA, 25 bp, Homo sapien
tttgggaatcattgatccctctgtg

SEQ ID NO: 3711289 - DNA, 25 bp, Homo sapien
gcctgatgaattcaatgtgctcttc

SEQ ID NO: 3711290 - DNA, 25 bp, Homo sapien
catcattctcatcccatggcctgat

SEQ ID NO: 3711291 - DNA, 25 bp, Homo sapien
aatcattgatccctctgtgggtcag

SEQ ID NO: 3711292 - DNA, 25 bp, Homo sapien
gtgttttctattgaagcagtccgta

SEQ ID NO: 3711293 - DNA, 25 bp, Homo sapien
ggcctcggctctgtgcggctccact

SEQ ID NO: 3711294 - DNA, 25 bp, Homo sapien
tgaagcagtccgtactgctggcccg

SEQ ID NO: 3711295 - DNA, 25 bp, Homo sapien
tgctggcccgtatggcctcggctct

SEQ ID NO: 3711296 - DNA, 25 bp, Homo sapien
gcagaggccgctggcctaagacgcc

SEQ ID NO: 3711297 - DNA, 25 bp, Homo sapien
ggagcagaggccgctggcctaagac

SEQ ID NO: 3711298 - DNA, 25 bp, Homo sapien
gctggcctaagacgcctcctcggtg

SEQ ID NO: 3711299 - DNA, 25 bp, Homo sapien
cgctggcctaagacgcctcctcggt

SEQ ID NO: 3711300 - DNA, 25 bp, Homo sapien
ctctgccgaaattcgggggcgccgt

SEQ ID NO: 3711301 - DNA, 25 bp, Homo sapien
tctgccgaaattcgggggcgccgtc

SEQ ID NO: 3711302 - DNA, 25 bp, Homo sapien
tgccgaaattcgggggcgccgtcca

SEQ ID NO: 3711303 - DNA, 25 bp, Homo sapien
tccgtcgggggaggcgcgaggaaga

SEQ ID NO: 3711304 - DNA, 25 bp, Homo sapien
aagaccgccttctggagtgcgggct

SEQ ID NO: 3711305 - DNA, 25 bp, Homo sapien
accgccttctggagtgcgggctcca

SEQ ID NO: 3711306 - DNA, 25 bp, Homo sapien
cgcgaggaagaccgccttctggagt

SEQ ID NO: 3711307 - DNA, 25 bp, Homo sapien
gccctggtgccccgccgcggctgtc

SEQ ID NO: 3711308 - DNA, 25 bp, Homo sapien
cgcggctgtcgcccctggggactcc

SEQ ID NO: 3711309 - DNA, 25 bp, Homo sapien
gctccggggaactggcgccctggtg

SEQ ID NO: 3711310 - DNA, 25 bp, Homo sapien
ctccggggaactggcgccctggtgc

SEQ ID NO: 3711311 - DNA, 25 bp, Homo sapien
gccgcgctccggcccctcgcagagc

SEQ ID NO: 3711312 - DNA, 25 bp, Homo sapien
ccgcgctccggcccctcgcagagct

SEQ ID NO: 3711313 - DNA, 25 bp, Homo sapien
tgtcctcgatgtaaaagggcgtcgg

SEQ ID NO: 3711314 - DNA, 25 bp, Homo sapien
gcccgcggcccaggatgtcctcgat

SEQ ID NO: 3711315 - DNA, 25 bp, Homo sapien
cagcagcggcgtgggcgcgtacagc

SEQ ID NO: 3711316 - DNA, 25 bp, Homo sapien
tcgggtgtgcgggttgcagcagcgg

SEQ ID NO: 3711317 - DNA, 25 bp, Homo sapien
cggcggcggagtggtgcgagaaggc

SEQ ID NO: 3711318 - DNA, 25 bp, Homo sapien
cagggcgtgcgtgtagtcgttcacc

SEQ ID NO: 3711319 - DNA, 25 bp, Homo sapien
gaagccgccgggtccgtaggcagcg

SEQ ID NO: 3711320 - DNA, 25 bp, Homo sapien
atggatcggcgtgggctcgtacacc

SEQ ID NO: 3711321 - DNA, 25 bp, Homo sapien
aaaaagaatgggcactaccggctgg

SEQ ID NO: 3711322 - DNA, 25 bp, Homo sapien
gatctcccttggtgagccgcacttg

SEQ ID NO: 3711323 - DNA, 25 bp, Homo sapien
ccgcacttgcgaacaccgggtgtgt

SEQ ID NO: 3711324 - DNA, 25 bp, Homo sapien
ccccagtggctctcggatttataca

SEQ ID NO: 3711325 - DNA, 25 bp, Homo sapien
cgtcacacctagaactaaatccaga

SEQ ID NO: 3711326 - DNA, 25 bp, Homo sapien
caccggcacgtggacctaacacgtt

SEQ ID NO: 3711327 - DNA, 25 bp, Homo sapien
agacacacagccgtcacacctagaa

SEQ ID NO: 3711328 - DNA, 25 bp, Homo sapien
caaagtcacacactgacaccgcaga

SEQ ID NO: 3711329 - DNA, 25 bp, Homo sapien
ccagctcgatggtctggtcgttgga

SEQ ID NO: 3711330 - DNA, 25 bp, Homo sapien
cagacgcttcctctcgggcggagag

SEQ ID NO: 3711331 - DNA, 25 bp, Homo sapien
tgcgtctcgaatttcttctccagct

SEQ ID NO: 3711332 - DNA, 25 bp, Homo sapien
gttggagaatctcacctggccgcct

SEQ ID NO: 3711333 - DNA, 25 bp, Homo sapien
tccatttagcgcgtcgattctgaaa

SEQ ID NO: 3711334 - DNA, 25 bp, Homo sapien
tctcctccatttagcgcgtcgattc

SEQ ID NO: 3711335 - DNA, 25 bp, Homo sapien
ccatttagcgcgtcgattctgaaac

SEQ ID NO: 3711336 - DNA, 25 bp, Homo sapien
ttagtctcctccatttagcgcgtcg

SEQ ID NO: 3711337 - DNA, 25 bp, Homo sapien
tcttaaatgacttttgcatacaacc

SEQ ID NO: 3711338 - DNA, 25 bp, Homo sapien
caaggtgaagaggttaaatagtctc

SEQ ID NO: 3711339 - DNA, 25 bp, Homo sapien
tgaatttcagcaggactatttgtct

SEQ ID NO: 3711340 - DNA, 25 bp, Homo sapien
gacttttgcatacaacccataacag

SEQ ID NO: 3711341 - DNA, 25 bp, Homo sapien
aaagaagcacctttattctgttcac

SEQ ID NO: 3711342 - DNA, 25 bp, Homo sapien
ggagggcgaacattgagagctatcc

SEQ ID NO: 3711343 - DNA, 25 bp, Homo sapien
aacattgagagctatccaaagaagc

SEQ ID NO: 3711344 - DNA, 25 bp, Homo sapien
tgagagctatccaaagaagcacctt

SEQ ID NO: 3711345 - DNA, 25 bp, Homo sapien
caatgtccacttcctgatcagaatc

SEQ ID NO: 3711346 - DNA, 25 bp, Homo sapien
taaaatagcttttatcgccctcaat

SEQ ID NO: 3711347 - DNA, 25 bp, Homo sapien
gcttttatcgccctcaatgtccact

SEQ ID NO: 3711348 - DNA, 25 bp, Homo sapien
aatgtccacttcctgatcagaatcc

SEQ ID NO: 3711349 - DNA, 25 bp, Homo sapien
ctgaacatgccaatgccagtggtca

SEQ ID NO: 3711350 - DNA, 25 bp, Homo sapien
gaattgattccctttcttatatagc

SEQ ID NO: 3711351 - DNA, 25 bp, Homo sapien
cagttttctgaacatgccaatgcca

SEQ ID NO: 3711352 - DNA, 25 bp, Homo sapien
aattgattccctttcttatatagcc

SEQ ID NO: 3711353 - DNA, 25 bp, Homo sapien
cacatctctgagacaagagctctga

SEQ ID NO: 3711354 - DNA, 25 bp, Homo sapien
tctgcttgaattgggaggtactatc

SEQ ID NO: 3711355 - DNA, 25 bp, Homo sapien
ggtttgttaattgagcagtgcacca

SEQ ID NO: 3711356 - DNA, 25 bp, Homo sapien
cagaaaagtcgttcaagaaggtcct

SEQ ID NO: 3711357 - DNA, 25 bp, Homo sapien
aaatcaaagaattagacttgcaacg

SEQ ID NO: 3711358 - DNA, 25 bp, Homo sapien
aaaatcaaagaattagacttgcaac

SEQ ID NO: 3711359 - DNA, 25 bp, Homo sapien
ttaaaatcaaagaattagacttgca

SEQ ID NO: 3711360 - DNA, 25 bp, Homo sapien
atcaaagaattagacttgcaacgag

SEQ ID NO: 3711361 - DNA, 25 bp, Homo sapien
tgacaactccctaacagcaatgact

SEQ ID NO: 3711362 - DNA, 25 bp, Homo sapien
ctctgcttaaggactagtactgctt

SEQ ID NO: 3711363 - DNA, 25 bp, Homo sapien
taaggaagccggatgtgacaactcc

SEQ ID NO: 3711364 - DNA, 25 bp, Homo sapien
cttcatctgagtgtccatatctggg

SEQ ID NO: 3711365 - DNA, 25 bp, Homo sapien
gagatttgtgtacatccgactgaag

SEQ ID NO: 3711366 - DNA, 25 bp, Homo sapien
ctgcaactgcgaacccaagagctgt

SEQ ID NO: 3711367 - DNA, 25 bp, Homo sapien
cactcggggtgtctagcttttctga

SEQ ID NO: 3711368 - DNA, 25 bp, Homo sapien
actgaagaggtttcccgcctgcaac

SEQ ID NO: 3711369 - DNA, 25 bp, Homo sapien
gctgtccatcccttattgcagcatc

SEQ ID NO: 3711370 - DNA, 25 bp, Homo sapien
tccattacactccagtgctactgag

SEQ ID NO: 3711371 - DNA, 25 bp, Homo sapien
tccagtgctactgagcgcctggacc

SEQ ID NO: 3711372 - DNA, 25 bp, Homo sapien
tacaggatcatccttctccgtggaa

SEQ ID NO: 3711373 - DNA, 25 bp, Homo sapien
taaaagacgattgggattgggtcat

SEQ ID NO: 3711374 - DNA, 25 bp, Homo sapien
tgttggtcccgtccaaaacgcacag

SEQ ID NO: 3711375 - DNA, 25 bp, Homo sapien
caagaaggactcatcagatgtggcc

SEQ ID NO: 3711376 - DNA, 25 bp, Homo sapien
caaaacgcacagtgaaacttaatcc

SEQ ID NO: 3711377 - DNA, 25 bp, Homo sapien
ggtggtatggtcattaaagccatga

SEQ ID NO: 3711378 - DNA, 25 bp, Homo sapien
gggacccataaatacccaaatatga

SEQ ID NO: 3711379 - DNA, 25 bp, Homo sapien
aacaccctggggtatcatcattgta

SEQ ID NO: 3711380 - DNA, 25 bp, Homo sapien
gctgctgtgaaccattatcttacca

SEQ ID NO: 3711381 - DNA, 25 bp, Homo sapien
caaagatcgtaaatgtatggcctca

SEQ ID NO: 3711382 - DNA, 25 bp, Homo sapien
cctaataatgaatggcaagtgacta

SEQ ID NO: 3711383 - DNA, 25 bp, Homo sapien
agctcaaaaagggtaagcaacttgc

SEQ ID NO: 3711384 - DNA, 25 bp, Homo sapien
taatacgtattgagtgacttccatg

SEQ ID NO: 3711385 - DNA, 25 bp, Homo sapien
taaagggtccattagggaggattca

SEQ ID NO: 3711386 - DNA, 25 bp, Homo sapien
cctgggtccagtgctatttaaaggg

SEQ ID NO: 3711387 - DNA, 25 bp, Homo sapien
gaaagaagggcactgccacggctgt

SEQ ID NO: 3711388 - DNA, 25 bp, Homo sapien
caaggaaccgaggagagttttgaga

SEQ ID NO: 3711389 - DNA, 25 bp, Homo sapien
agccagttgtacaaagacccatgga

SEQ ID NO: 3711390 - DNA, 25 bp, Homo sapien
gccagttgtacaaagacccatggaa

SEQ ID NO: 3711391 - DNA, 25 bp, Homo sapien
caatcagtgggatcaaaacttggtg

SEQ ID NO: 3711392 - DNA, 25 bp, Homo sapien
gagagtatgtatttgtccacagcca

SEQ ID NO: 3711393 - DNA, 25 bp, Homo sapien
gaaaacaattggcaggcatccacag

SEQ ID NO: 3711394 - DNA, 25 bp, Homo sapien
gtgaactaattcttagcagcagagc

SEQ ID NO: 3711395 - DNA, 25 bp, Homo sapien
ttataccatgggctctggaccacct

SEQ ID NO: 3711396 - DNA, 25 bp, Homo sapien
tgtgtttcattccacttcagttgca

SEQ ID NO: 3711397 - DNA, 25 bp, Homo sapien
gcatgctccacctcagggtttatgc

SEQ ID NO: 3711398 - DNA, 25 bp, Homo sapien
ctcagggtttatgctcctgctctcc

SEQ ID NO: 3711399 - DNA, 25 bp, Homo sapien
ctcagtgttcctcacactttaccag

SEQ ID NO: 3711400 - DNA, 25 bp, Homo sapien
gtactggaaacactagtaggaagca

SEQ ID NO: 3711401 - DNA, 25 bp, Homo sapien
ctgtactggaaacactagtaggaag

SEQ ID NO: 3711402 - DNA, 25 bp, Homo sapien
tgtactggaaacactagtaggaagc

SEQ ID NO: 3711403 - DNA, 25 bp, Homo sapien
tctgtactggaaacactagtaggaa

SEQ ID NO: 3711404 - DNA, 25 bp, Homo sapien
ctcctacacagcacattcatcctct

SEQ ID NO: 3711405 - DNA, 25 bp, Homo sapien
cctcctacacagcacattcatcctc

SEQ ID NO: 3711406 - DNA, 25 bp, Homo sapien
tcctcctacacagcacattcatcct

SEQ ID NO: 3711407 - DNA, 25 bp, Homo sapien
tcctacacagcacattcatcctctt

SEQ ID NO: 3711408 - DNA, 25 bp, Homo sapien
ccaggacattctcataggtttgatc

SEQ ID NO: 3711409 - DNA, 25 bp, Homo sapien
cttaaagtagcttcaacaggcagtt

SEQ ID NO: 3711410 - DNA, 25 bp, Homo sapien
tcaacaggcagttcgaaagactgaa

SEQ ID NO: 3711411 - DNA, 25 bp, Homo sapien
gaaagactgaatctcagccaggaca

SEQ ID NO: 3711412 - DNA, 25 bp, Homo sapien
tcattgggaaagtcaggcaggaaac

SEQ ID NO: 3711413 - DNA, 25 bp, Homo sapien
ttggcaatgcaaataaaccttggga

SEQ ID NO: 3711414 - DNA, 25 bp, Homo sapien
gggagtagccatgtataaagtcagg

SEQ ID NO: 3711415 - DNA, 25 bp, Homo sapien
gcaggaaacgagctggaccatctgg

SEQ ID NO: 3711416 - DNA, 25 bp, Homo sapien
ctacagacgtgcaccactacgactg

SEQ ID NO: 3711417 - DNA, 25 bp, Homo sapien
agacgtgcaccactacgactggcta

SEQ ID NO: 3711418 - DNA, 25 bp, Homo sapien
acagacgtgcaccactacgactggc

SEQ ID NO: 3711419 - DNA, 25 bp, Homo sapien
gactacagacgtgcaccactacgac

SEQ ID NO: 3711420 - DNA, 25 bp, Homo sapien
cgagccccaggctacatccaggtct

SEQ ID NO: 3711421 - DNA, 25 bp, Homo sapien
tctgagtcagtatccaggggagcag

SEQ ID NO: 3711422 - DNA, 25 bp, Homo sapien
tcacgagccccaggctacatccagg

SEQ ID NO: 3711423 - DNA, 25 bp, Homo sapien
caggtctgagtcagtatccagggga

SEQ ID NO: 3711424 - DNA, 25 bp, Homo sapien
cttaaactgataaaacttcatggtc

SEQ ID NO: 3711425 - DNA, 25 bp, Homo sapien
cttttggaaaagtgcctgagagagt

SEQ ID NO: 3711426 - DNA, 25 bp, Homo sapien
gaaatatgatatcctgtttgctctt

SEQ ID NO: 3711427 - DNA, 25 bp, Homo sapien
atggtcagcttttggaaaagtgcct

SEQ ID NO: 3711428 - DNA, 25 bp, Homo sapien
catttgctagtaagccagagagccc

SEQ ID NO: 3711429 - DNA, 25 bp, Homo sapien
ctgattgtgtatcagggttttctgc

SEQ ID NO: 3711430 - DNA, 25 bp, Homo sapien
tcttggttccagacccattttagtg

SEQ ID NO: 3711431 - DNA, 25 bp, Homo sapien
ctgcatgtttggtggatgtaaacca

SEQ ID NO: 3711432 - DNA, 25 bp, Homo sapien
gcccagccccaaggagtgaatgatt

SEQ ID NO: 3711433 - DNA, 25 bp, Homo sapien
gaatgatttaacgtctgcactgaga

SEQ ID NO: 3711434 - DNA, 25 bp, Homo sapien
cctaaagtgattgccctgacttggc

SEQ ID NO: 3711435 - DNA, 25 bp, Homo sapien
tgtcttgggaaagcgcctccctcag

SEQ ID NO: 3711436 - DNA, 25 bp, Homo sapien
gcgactagtccctcctgggcgtctt

SEQ ID NO: 3711437 - DNA, 25 bp, Homo sapien
tggacactcagatcatcaccctgaa

SEQ ID NO: 3711438 - DNA, 25 bp, Homo sapien
tctgtaataagagccacggggacat

SEQ ID NO: 3711439 - DNA, 25 bp, Homo sapien
taccgtagtaatcagcaaggtggac

SEQ ID NO: 3711440 - DNA, 25 bp, Homo sapien
ctggaagctgaggagccagcgaggc

SEQ ID NO: 3711441 - DNA, 25 bp, Homo sapien
ggaagctgaggagccagcgaggcgc

SEQ ID NO: 3711442 - DNA, 25 bp, Homo sapien
gctgaggagccagcgaggcgcggcg

SEQ ID NO: 3711443 - DNA, 25 bp, Homo sapien
aagctgaggagccagcgaggcgcgg

SEQ ID NO: 3711444 - DNA, 25 bp, Homo sapien
caagatccgctcgtgctcggggacg

SEQ ID NO: 3711445 - DNA, 25 bp, Homo sapien
ggcggtgtcggtgctctcgatctcc

SEQ ID NO: 3711446 - DNA, 25 bp, Homo sapien
acggtgcccagactctcgctgttct

SEQ ID NO: 3711447 - DNA, 25 bp, Homo sapien
tctcctgcaagatccgctcgtgctc

SEQ ID NO: 3711448 - DNA, 25 bp, Homo sapien
ctagcgtgttcccaagcagcaagca

SEQ ID NO: 3711449 - DNA, 25 bp, Homo sapien
cctagcgtgttcccaagcagcaagc

SEQ ID NO: 3711450 - DNA, 25 bp, Homo sapien
aaagtttatcacgtgcttctcagga

SEQ ID NO: 3711451 - DNA, 25 bp, Homo sapien
tctagtagaggtgtttggtgccata

SEQ ID NO: 3711452 - DNA, 25 bp, Homo sapien
aagaaccatgttatatgtcagggcc

SEQ ID NO: 3711453 - DNA, 25 bp, Homo sapien
aggctgaaaaatcccgccgctgaga

SEQ ID NO: 3711454 - DNA, 25 bp, Homo sapien
gctctctacagccttaacgacccag

SEQ ID NO: 3711455 - DNA, 25 bp, Homo sapien
caaatgtatgagcatgaagttgttc

SEQ ID NO: 3711456 - DNA, 25 bp, Homo sapien
cagccttaacgacccagactctgag

SEQ ID NO: 3711457 - DNA, 25 bp, Homo sapien
gttgccaaatgtatgagcatgaagt

SEQ ID NO: 3711458 - DNA, 25 bp, Homo sapien
tatgtgggagcaaagccattctgga

SEQ ID NO: 3711459 - DNA, 25 bp, Homo sapien
caatcaaaaggcataggttctcaaa

SEQ ID NO: 3711460 - DNA, 25 bp, Homo sapien
tccaatgatgtgctatctacaagag

SEQ ID NO: 3711461 - DNA, 25 bp, Homo sapien
gtagattctgagagcaaccactaag

SEQ ID NO: 3711462 - DNA, 25 bp, Homo sapien
tgcaggttaaggtaaaaactcagcc

SEQ ID NO: 3711463 - DNA, 25 bp, Homo sapien
tccagggtgacagcgtatatgccag

SEQ ID NO: 3711464 - DNA, 25 bp, Homo sapien
gagagcactgctaaaatcactgtca

SEQ ID NO: 3711465 - DNA, 25 bp, Homo sapien
taacagccgaatgtgatgccaacga

SEQ ID NO: 3711466 - DNA, 25 bp, Homo sapien
gaaagccaagttgtaccataacatg

SEQ ID NO: 3711467 - DNA, 25 bp, Homo sapien
aggtgttccgatgtccatgggccag

SEQ ID NO: 3711468 - DNA, 25 bp, Homo sapien
gaccaagtcaaaaggcctgcaaacc

SEQ ID NO: 3711469 - DNA, 25 bp, Homo sapien
gggctgctcgtgtaagccccacagt

SEQ ID NO: 3711470 - DNA, 25 bp, Homo sapien
ctctgtgactcttacatctcttgac

SEQ ID NO: 3711471 - DNA, 25 bp, Homo sapien
ttgacatctggaccaatgagttttt

SEQ ID NO: 3711472 - DNA, 25 bp, Homo sapien
tagtatcctgtttccacgcacagaa

SEQ ID NO: 3711473 - DNA, 25 bp, Homo sapien
gaattcataatcagccagcacagat

SEQ ID NO: 3711474 - DNA, 25 bp, Homo sapien
tacattcctgaccaaagaggtatct

SEQ ID NO: 3711475 - DNA, 25 bp, Homo sapien
gactacagcagatctaatgtgcact

SEQ ID NO: 3711476 - DNA, 25 bp, Homo sapien
taaaagatacattcatatcttaaag

SEQ ID NO: 3711477 - DNA, 25 bp, Homo sapien
aaagatacattcatatcttaaagga

SEQ ID NO: 3711478 - DNA, 25 bp, Homo sapien
aaaagatacattcatatcttaaagg

SEQ ID NO: 3711479 - DNA, 25 bp, Homo sapien
agatacattcatatcttaaaggatt

SEQ ID NO: 3711480 - DNA, 25 bp, Homo sapien
tcaagttggtttgattacccacaac

SEQ ID NO: 3711481 - DNA, 25 bp, Homo sapien
ccttcatctgactagcacattagag

SEQ ID NO: 3711482 - DNA, 25 bp, Homo sapien
tgggaataccacaatattgatcatc

SEQ ID NO: 3711483 - DNA, 25 bp, Homo sapien
caaagatgctcacatgggtgtgcat

SEQ ID NO: 3711484 - DNA, 25 bp, Homo sapien
ttgtcttcttcatcagcatttgaaa

SEQ ID NO: 3711485 - DNA, 25 bp, Homo sapien
tgtcttcttcatcagcatttgaaaa

SEQ ID NO: 3711486 - DNA, 25 bp, Homo sapien
gtcttcttcatcagcatttgaaaat

SEQ ID NO: 3711487 - DNA, 25 bp, Homo sapien
gcaagagatatttcaggactacccg

SEQ ID NO: 3711488 - DNA, 25 bp, Homo sapien
ccgaatacagagtcccttcaaggga

SEQ ID NO: 3711489 - DNA, 25 bp, Homo sapien
tatcacattggagcaaaaatctagc

SEQ ID NO: 3711490 - DNA, 25 bp, Homo sapien
agaacaatagttctttcccagaagt

SEQ ID NO: 3711491 - DNA, 25 bp, Homo sapien
acatccgttgcccattgtttgaggt

SEQ ID NO: 3711492 - DNA, 25 bp, Homo sapien
cccacatccgttgcccattgtttga

SEQ ID NO: 3711493 - DNA, 25 bp, Homo sapien
tccgttgcccattgtttgaggttca

SEQ ID NO: 3711494 - DNA, 25 bp, Homo sapien
cgttgcccattgtttgaggttcatt

SEQ ID NO: 3711495 - DNA, 25 bp, Homo sapien
atttggttggtcatcatacacagac

SEQ ID NO: 3711496 - DNA, 25 bp, Homo sapien
acttcttgtgcgcatttggttggtc

SEQ ID NO: 3711497 - DNA, 25 bp, Homo sapien
ttcttgtgcgcatttggttggtcat

SEQ ID NO: 3711498 - DNA, 25 bp, Homo sapien
aaacttcttgtgcgcatttggttgg

SEQ ID NO: 3711499 - DNA, 25 bp, Homo sapien
tttctgcatcagtccttactttaag

SEQ ID NO: 3711500 - DNA, 25 bp, Homo sapien
taaggagttctgtaatagcatctac

SEQ ID NO: 3711501 - DNA, 25 bp, Homo sapien
aatttccttgtcatgattacggata

SEQ ID NO: 3711502 - DNA, 25 bp, Homo sapien
ggatacaagcatctaacttttccat

SEQ ID NO: 3711503 - DNA, 25 bp, Homo sapien
tccagcatcttgaaaccttcggttg

SEQ ID NO: 3711504 - DNA, 25 bp, Homo sapien
cagcatcttgaaaccttcggttggt

SEQ ID NO: 3711505 - DNA, 25 bp, Homo sapien
tcttgaaaccttcggttggtatcag

SEQ ID NO: 3711506 - DNA, 25 bp, Homo sapien
gcatcttgaaaccttcggttggtat

SEQ ID NO: 3711507 - DNA, 25 bp, Homo sapien
gctgaattctacatcgaatgatatc

SEQ ID NO: 3711508 - DNA, 25 bp, Homo sapien
tctacatcgaatgatatcttctgtg

SEQ ID NO: 3711509 - DNA, 25 bp, Homo sapien
ttctctgctgaattctacatcgaat

SEQ ID NO: 3711510 - DNA, 25 bp, Homo sapien
caggaaggcataactgcaatttttc

SEQ ID NO: 3711511 - DNA, 25 bp, Homo sapien
tgaatatggaggtttaggctccttc

SEQ ID NO: 3711512 - DNA, 25 bp, Homo sapien
tgctgaatatggaggtttaggctcc

SEQ ID NO: 3711513 - DNA, 25 bp, Homo sapien
tctgctgaatatggaggtttaggct

SEQ ID NO: 3711514 - DNA, 25 bp, Homo sapien
tattctgctgaatatggaggtttag

SEQ ID NO: 3711515 - DNA, 25 bp, Homo sapien
catctgttctttcagcttactgtac

SEQ ID NO: 3711516 - DNA, 25 bp, Homo sapien
ctttcagcttactgtacatttctag

SEQ ID NO: 3711517 - DNA, 25 bp, Homo sapien
gttctttcagcttactgtacatttc

SEQ ID NO: 3711518 - DNA, 25 bp, Homo sapien
cttttggcactcatctgttctttca

SEQ ID NO: 3711519 - DNA, 25 bp, Homo sapien
tgcgtaagttcacagccataatcgg

SEQ ID NO: 3711520 - DNA, 25 bp, Homo sapien
caaaatgccctggtctacaagagaa

SEQ ID NO: 3711521 - DNA, 25 bp, Homo sapien
caaaagacatctggtagacttcccc

SEQ ID NO: 3711522 - DNA, 25 bp, Homo sapien
gaactgacctgcactcttccatgaa

SEQ ID NO: 3711523 - DNA, 25 bp, Homo sapien
tgttccatagtttttagggcagaat

SEQ ID NO: 3711524 - DNA, 25 bp, Homo sapien
catgagctgacaaaaccggtattga

SEQ ID NO: 3711525 - DNA, 25 bp, Homo sapien
aatatcctcacggagtttgggaaga

SEQ ID NO: 3711526 - DNA, 25 bp, Homo sapien
ctaacccagggaaagtacacattct

SEQ ID NO: 3711527 - DNA, 25 bp, Homo sapien
aagatgctatgactatcgtgagccc

SEQ ID NO: 3711528 - DNA, 25 bp, Homo sapien
gaatcttagcataaaaaggctccca

SEQ ID NO: 3711529 - DNA, 25 bp, Homo sapien
tattgacttcctaactgctgaggct

SEQ ID NO: 3711530 - DNA, 25 bp, Homo sapien
ttagtctacctgctttcgaatgacg

SEQ ID NO: 3711531 - DNA, 25 bp, Homo sapien
tcctctggaattctatcacgattta

SEQ ID NO: 3711532 - DNA, 25 bp, Homo sapien
tctggaattctatcacgatttatat

SEQ ID NO: 3711533 - DNA, 25 bp, Homo sapien
ggaattctatcacgatttatataca

SEQ ID NO: 3711534 - DNA, 25 bp, Homo sapien
cctctggaattctatcacgatttat

SEQ ID NO: 3711535 - DNA, 25 bp, Homo sapien
gcatacaggaagactaaatcacaca

SEQ ID NO: 3711536 - DNA, 25 bp, Homo sapien
tacaggaagactaaatcacacagat

SEQ ID NO: 3711537 - DNA, 25 bp, Homo sapien
catacaggaagactaaatcacacag

SEQ ID NO: 3711538 - DNA, 25 bp, Homo sapien
aggaagactaaatcacacagatgta

SEQ ID NO: 3711539 - DNA, 25 bp, Homo sapien
tcaacttaaggtaaccaaggagaga

SEQ ID NO: 3711540 - DNA, 25 bp, Homo sapien
cctgttcttacgcagctatgtcata

SEQ ID NO: 3711541 - DNA, 25 bp, Homo sapien
aaactgctatggataactagatacc

SEQ ID NO: 3711542 - DNA, 25 bp, Homo sapien
tagaaagcatacactataaacgcaa

SEQ ID NO: 3711543 - DNA, 25 bp, Homo sapien
gaataaatgtgcaaacatcgataaa

SEQ ID NO: 3711544 - DNA, 25 bp, Homo sapien
aataaatgtgcaaacatcgataaac

SEQ ID NO: 3711545 - DNA, 25 bp, Homo sapien
aatgtgcaaacatcgataaacaggg

SEQ ID NO: 3711546 - DNA, 25 bp, Homo sapien
taaatgtgcaaacatcgataaacag

SEQ ID NO: 3711547 - DNA, 25 bp, Homo sapien
gtaatctgatgtggggtagcttcta

SEQ ID NO: 3711548 - DNA, 25 bp, Homo sapien
tattaatctcaacactggtaatctg

SEQ ID NO: 3711549 - DNA, 25 bp, Homo sapien
aacttattaatctcaacactggtaa

SEQ ID NO: 3711550 - DNA, 25 bp, Homo sapien
tggtaatctgatgtggggtagcttc

SEQ ID NO: 3711551 - DNA, 25 bp, Homo sapien
tctgagcatgttatacaaggcccta

SEQ ID NO: 3711552 - DNA, 25 bp, Homo sapien
tgagcatgttatacaagcccctgcc

SEQ ID NO: 3711553 - DNA, 25 bp, Homo sapien
gagggaagcccagtgaaagattagc

SEQ ID NO: 3711554 - DNA, 25 bp, Homo sapien
caaggccctatgtgtaacatgagca

SEQ ID NO: 3711555 - DNA, 25 bp, Homo sapien
gggttgcaataccagtcttgcttgt

SEQ ID NO: 3711556 - DNA, 25 bp, Homo sapien
ctggggttgcaataccagtcttgct

SEQ ID NO: 3711557 - DNA, 25 bp, Homo sapien
tgcaataccagtcttgcttgtttct

SEQ ID NO: 3711558 - DNA, 25 bp, Homo sapien
tattcgactggggttgcaataccag

SEQ ID NO: 3711559 - DNA, 25 bp, Homo sapien
aaaagtgacaacataaccaattcaa

SEQ ID NO: 3711560 - DNA, 25 bp, Homo sapien
ccttagcacctaaaccaatgtttgg

SEQ ID NO: 3711561 - DNA, 25 bp, Homo sapien
ccaattcaaaatatcgcatacttac

SEQ ID NO: 3711562 - DNA, 25 bp, Homo sapien
gctcatgagaaaagggacttatcta

SEQ ID NO: 3711563 - DNA, 25 bp, Homo sapien
catggaacgtacattcgaaaggaga

SEQ ID NO: 3711564 - DNA, 25 bp, Homo sapien
agaatgatattttccagcctgtcca

SEQ ID NO: 3711565 - DNA, 25 bp, Homo sapien
tgtcccctaccagaatgtccagctg

SEQ ID NO: 3711566 - DNA, 25 bp, Homo sapien
gagagtctactatatgccacgtaca

SEQ ID NO: 3711567 - DNA, 25 bp, Homo sapien
aaatatcttctatagccatcaactg

SEQ ID NO: 3711568 - DNA, 25 bp, Homo sapien
cctacaatttgagtgaaatatcttc

SEQ ID NO: 3711569 - DNA, 25 bp, Homo sapien
cttctatagccatcaactgtttcat

SEQ ID NO: 3711570 - DNA, 25 bp, Homo sapien
gagtgaaatatcttctatagccatc

SEQ ID NO: 3711571 - DNA, 25 bp, Homo sapien
actaatccttgggtcacatgtaaaa

SEQ ID NO: 3711572 - DNA, 25 bp, Homo sapien
gacagcaattatctttgagagggcc

SEQ ID NO: 3711573 - DNA, 25 bp, Homo sapien
gttccaaagttcatcagtgtatgcc

SEQ ID NO: 3711574 - DNA, 25 bp, Homo sapien
tgtatgccctggttactaatccttg

SEQ ID NO: 3711575 - DNA, 25 bp, Homo sapien
gaacaagatcaggatcagtgcaata

SEQ ID NO: 3711576 - DNA, 25 bp, Homo sapien
caagatcaggatcagtgcaatagga

SEQ ID NO: 3711577 - DNA, 25 bp, Homo sapien
cagaacaagatcaggatcagtgcaa

SEQ ID NO: 3711578 - DNA, 25 bp, Homo sapien
ccagaacaagatcaggatcagtgca

SEQ ID NO: 3711579 - DNA, 25 bp, Homo sapien
cagcccatttcttaagcagtgtttc

SEQ ID NO: 3711580 - DNA, 25 bp, Homo sapien
agtgtttcattgtattggtctctta

SEQ ID NO: 3711581 - DNA, 25 bp, Homo sapien
ttcattgtattggtctcttatttca

SEQ ID NO: 3711582 - DNA, 25 bp, Homo sapien
agcccatttcttaagcagtgtttca

SEQ ID NO: 3711583 - DNA, 25 bp, Homo sapien
tgatctggaagagtattaaaagcag

SEQ ID NO: 3711584 - DNA, 25 bp, Homo sapien
tcctccactattactttggaggata

SEQ ID NO: 3711585 - DNA, 25 bp, Homo sapien
ctcctccactattactttggaggat

SEQ ID NO: 3711586 - DNA, 25 bp, Homo sapien
tttttttgagacggagtctagctct

SEQ ID NO: 3711587 - DNA, 25 bp, Homo sapien
tcttttttttgagacggagtctagc

SEQ ID NO: 3711588 - DNA, 25 bp, Homo sapien
gttcaagcgattcttttttttgaga

SEQ ID NO: 3711589 - DNA, 25 bp, Homo sapien
agcgattcttttttttgagacggag

SEQ ID NO: 3711590 - DNA, 25 bp, Homo sapien
caacaaataggtcttgtccctcaaa

SEQ ID NO: 3711591 - DNA, 25 bp, Homo sapien
cttgtctattaaaggtccaaacagg

SEQ ID NO: 3711592 - DNA, 25 bp, Homo sapien
tccaaacaggaagatactgcctaag

SEQ ID NO: 3711593 - DNA, 25 bp, Homo sapien
gatccacgtaatggaaagtattcct

SEQ ID NO: 3711594 - DNA, 25 bp, Homo sapien
ttcattgacaacagggatggggctg

SEQ ID NO: 3711595 - DNA, 25 bp, Homo sapien
ttcttcttcattgacaacagggatg

SEQ ID NO: 3711596 - DNA, 25 bp, Homo sapien
tattcttcttcattgacaacaggga

SEQ ID NO: 3711597 - DNA, 25 bp, Homo sapien
cttcttcattgacaacagggatggg

SEQ ID NO: 3711598 - DNA, 25 bp, Homo sapien
aatgtaaatatgaggcactgactga

SEQ ID NO: 3711599 - DNA, 25 bp, Homo sapien
ttgaatgtaaatatgaggcactgac

SEQ ID NO: 3711600 - DNA, 25 bp, Homo sapien
gactctgaaaatttaaggctggcat

SEQ ID NO: 3711601 - DNA, 25 bp, Homo sapien
ctccggtgtagtgactctgaaaatt

SEQ ID NO: 3711602 - DNA, 25 bp, Homo sapien
tctggtcagcagcagatttgttgat

SEQ ID NO: 3711603 - DNA, 25 bp, Homo sapien
ggttcagtaaacagctactcaaagt

SEQ ID NO: 3711604 - DNA, 25 bp, Homo sapien
tgttgattttctaagcatatcgtct

SEQ ID NO: 3711605 - DNA, 25 bp, Homo sapien
taagcatatcgtctatttctgttga

SEQ ID NO: 3711606 - DNA, 25 bp, Homo sapien
tgttagttataaagtcctcaagata

SEQ ID NO: 3711607 - DNA, 25 bp, Homo sapien
ttgtgtttatgatgatttgtaccag

SEQ ID NO: 3711608 - DNA, 25 bp, Homo sapien
agaaagtccataaagtcttgtagta

SEQ ID NO: 3711609 - DNA, 25 bp, Homo sapien
tttacaagcttgctccaggtgtgtt

SEQ ID NO: 3711610 - DNA, 25 bp, Homo sapien
ttatgaccgataagaataattactt

SEQ ID NO: 3711611 - DNA, 25 bp, Homo sapien
tgaccgataagaataattacttgaa

SEQ ID NO: 3711612 - DNA, 25 bp, Homo sapien
atgaccgataagaataattacttga

SEQ ID NO: 3711613 - DNA, 25 bp, Homo sapien
tatgaccgataagaataattacttg

SEQ ID NO: 3711614 - DNA, 25 bp, Homo sapien
ttgtccagtcataatcagcaagctg

SEQ ID NO: 3711615 - DNA, 25 bp, Homo sapien
ggcaaatgagtaaacacttgaaaga

SEQ ID NO: 3711616 - DNA, 25 bp, Homo sapien
cacttgaaagatgcttctcaaaaaa

SEQ ID NO: 3711617 - DNA, 25 bp, Homo sapien
ggctcagacattgtccagtcataat

SEQ ID NO: 3711618 - DNA, 25 bp, Homo sapien
tcagcttccattgactctaacgtac

SEQ ID NO: 3711619 - DNA, 25 bp, Homo sapien
cattgactctaacgtactccattgt

SEQ ID NO: 3711620 - DNA, 25 bp, Homo sapien
gactctaacgtactccattgttcct

SEQ ID NO: 3711621 - DNA, 25 bp, Homo sapien
taacgtactccattgttcctgaaca

SEQ ID NO: 3711622 - DNA, 25 bp, Homo sapien
agctaaaagaggacatgaggtgtca

SEQ ID NO: 3711623 - DNA, 25 bp, Homo sapien
aatgtattcaaagctgcctacgtca

SEQ ID NO: 3711624 - DNA, 25 bp, Homo sapien
aggccatctgaacccatatacttag

SEQ ID NO: 3711625 - DNA, 25 bp, Homo sapien
catgattgtactgttgactactacc

SEQ ID NO: 3711626 - DNA, 25 bp, Homo sapien
tgaacttccagtatcgcctagactg

SEQ ID NO: 3711627 - DNA, 25 bp, Homo sapien
ggacagcagttgtgttaaccagaca

SEQ ID NO: 3711628 - DNA, 25 bp, Homo sapien
aaccctagtaggcagtgggacagca

SEQ ID NO: 3711629 - DNA, 25 bp, Homo sapien
tggaagaagcagatactcactagcc

SEQ ID NO: 3711630 - DNA, 25 bp, Homo sapien
cctggaattaactcataacaatgga

SEQ ID NO: 3711631 - DNA, 25 bp, Homo sapien
aatactcgatattcaagtgccaaac

SEQ ID NO: 3711632 - DNA, 25 bp, Homo sapien
aactttcaaaatctctaatgcaaat

SEQ ID NO: 3711633 - DNA, 25 bp, Homo sapien
aaaatatgtcatagaaataccactt

SEQ ID NO: 3711634 - DNA, 25 bp, Homo sapien
taggtggcagactattataaacagc

SEQ ID NO: 3711635 - DNA, 25 bp, Homo sapien
gacaaatgtcactcaagcaaactgg

SEQ ID NO: 3711636 - DNA, 25 bp, Homo sapien
gactgagtgcagtcaaagtctcaac

SEQ ID NO: 3711637 - DNA, 25 bp, Homo sapien
cagagtctagtacaagcagaacttc

SEQ ID NO: 3711638 - DNA, 25 bp, Homo sapien
catacacctggcattctttttgttg

SEQ ID NO: 3711639 - DNA, 25 bp, Homo sapien
acacctggcattctttttgttgctt

SEQ ID NO: 3711640 - DNA, 25 bp, Homo sapien
aatcatacacctggcattctttttg

SEQ ID NO: 3711641 - DNA, 25 bp, Homo sapien
tacacctggcattctttttgttgct

SEQ ID NO: 3711642 - DNA, 25 bp, Homo sapien
catgcaagctgtctgagcaactttc

SEQ ID NO: 3711643 - DNA, 25 bp, Homo sapien
tgcaagctgtctgagcaactttccc

SEQ ID NO: 3711644 - DNA, 25 bp, Homo sapien
caggctgacatgcaagctgtctgag

SEQ ID NO: 3711645 - DNA, 25 bp, Homo sapien
tgacatgcaagctgtctgagcaact

SEQ ID NO: 3711646 - DNA, 25 bp, Homo sapien
ttgttttaactcactgtccagtagc

SEQ ID NO: 3711647 - DNA, 25 bp, Homo sapien
tatttgttttaactcactgtccagt

SEQ ID NO: 3711648 - DNA, 25 bp, Homo sapien
gttttaactcactgtccagtagcat

SEQ ID NO: 3711649 - DNA, 25 bp, Homo sapien
gcttatttgttttaactcactgtcc

SEQ ID NO: 3711650 - DNA, 25 bp, Homo sapien
catctaagttaaactgctgaacagc

SEQ ID NO: 3711651 - DNA, 25 bp, Homo sapien
tgacatctaagttaaactgctgaac

SEQ ID NO: 3711652 - DNA, 25 bp, Homo sapien
gacatctaagttaaactgctgaaca

SEQ ID NO: 3711653 - DNA, 25 bp, Homo sapien
acatctaagttaaactgctgaacag

SEQ ID NO: 3711654 - DNA, 25 bp, Homo sapien
aaaaggcaagaatgaccagacaagg

SEQ ID NO: 3711655 - DNA, 25 bp, Homo sapien
ctaaaagtttagctgaaccaggcct

SEQ ID NO: 3711656 - DNA, 25 bp, Homo sapien
tctagaggccctaaatgtgaagctg

SEQ ID NO: 3711657 - DNA, 25 bp, Homo sapien
gaagttagccctactcctaaggctg

SEQ ID NO: 3711658 - DNA, 25 bp, Homo sapien
cagttttgaagctgattgactaaca

SEQ ID NO: 3711659 - DNA, 25 bp, Homo sapien
ttatggaatctgctagccttgttac

SEQ ID NO: 3711660 - DNA, 25 bp, Homo sapien
tgtaacaaggctaatgaccaaatag

SEQ ID NO: 3711661 - DNA, 25 bp, Homo sapien
tcagtgtaccacttatttgaaagca

SEQ ID NO: 3711662 - DNA, 25 bp, Homo sapien
cttaaaagcttataaaaatggccag

SEQ ID NO: 3711663 - DNA, 25 bp, Homo sapien
tagctcacgcctctaattccagcat

SEQ ID NO: 3711664 - DNA, 25 bp, Homo sapien
ttcagcttaaaagcttataaaaatg

SEQ ID NO: 3711665 - DNA, 25 bp, Homo sapien
cagcttaaaagcttataaaaatggc

SEQ ID NO: 3711666 - DNA, 25 bp, Homo sapien
tcaatcagaggattagcaactggct

SEQ ID NO: 3711667 - DNA, 25 bp, Homo sapien
catggagcaagatgccaaactgtga

SEQ ID NO: 3711668 - DNA, 25 bp, Homo sapien
tattaactcttcatgctagcaaggc

SEQ ID NO: 3711669 - DNA, 25 bp, Homo sapien
tactggacttccttggactatggct

SEQ ID NO: 3711670 - DNA, 25 bp, Homo sapien
accattgaaataggtgccagcactc

SEQ ID NO: 3711671 - DNA, 25 bp, Homo sapien
tcagatgttaaacccttaggagcta

SEQ ID NO: 3711672 - DNA, 25 bp, Homo sapien
aaaatgtattctagacctactctgg

SEQ ID NO: 3711673 - DNA, 25 bp, Homo sapien
tttaatctggagctattctaatgcc

SEQ ID NO: 3711674 - DNA, 25 bp, Homo sapien
aatacttttattatggggcacagcc

SEQ ID NO: 3711675 - DNA, 25 bp, Homo sapien
taatacttttattatggggcacagc

SEQ ID NO: 3711676 - DNA, 25 bp, Homo sapien
acttttattatggggcacagccctt

SEQ ID NO: 3711677 - DNA, 25 bp, Homo sapien
atacttttattatggggcacagccc

SEQ ID NO: 3711678 - DNA, 25 bp, Homo sapien
ttggctcataaaaaagaccctgtca

SEQ ID NO: 3711679 - DNA, 25 bp, Homo sapien
ttaactgaaaatggcctaggtagct

SEQ ID NO: 3711680 - DNA, 25 bp, Homo sapien
ttatacacgttcctttgagcacatg

SEQ ID NO: 3711681 - DNA, 25 bp, Homo sapien
tgtatcgtaattctctgggtcacca

SEQ ID NO: 3711682 - DNA, 25 bp, Homo sapien
gaatgctagctgcagggtatccccc

SEQ ID NO: 3711683 - DNA, 25 bp, Homo sapien
atgaatgctagctgcagggtatccc

SEQ ID NO: 3711684 - DNA, 25 bp, Homo sapien
aatgctagctgcagggtatccccct

SEQ ID NO: 3711685 - DNA, 25 bp, Homo sapien
tgaatgctagctgcagggtatcccc

SEQ ID NO: 3711686 - DNA, 25 bp, Homo sapien
taactgctcaaactggtgctgctcc

SEQ ID NO: 3711687 - DNA, 25 bp, Homo sapien
cattacaggttcaaagagatgtgcc

SEQ ID NO: 3711688 - DNA, 25 bp, Homo sapien
tacacttagagtattgtggccagaa

SEQ ID NO: 3711689 - DNA, 25 bp, Homo sapien
ccatatggttcttcttgcaaaggcc

SEQ ID NO: 3711690 - DNA, 25 bp, Homo sapien
gcatgagagagaatcgcagagtgat

SEQ ID NO: 3711691 - DNA, 25 bp, Homo sapien
agactggtcttgacacccggcttca

SEQ ID NO: 3711692 - DNA, 25 bp, Homo sapien
gagcctatgtgacaaaagtctgccc

SEQ ID NO: 3711693 - DNA, 25 bp, Homo sapien
tgcatgagtttagctaatacaaggg

SEQ ID NO: 3711694 - DNA, 25 bp, Homo sapien
tcttgtatcagctcatacttgtcat

SEQ ID NO: 3711695 - DNA, 25 bp, Homo sapien
aactcctctattcagaacagcaaat

SEQ ID NO: 3711696 - DNA, 25 bp, Homo sapien
gtcatcaactcctctattcagaaca

SEQ ID NO: 3711697 - DNA, 25 bp, Homo sapien
cttgtatcagctcatacttgtcatc

SEQ ID NO: 3711698 - DNA, 25 bp, Homo sapien
gcgccatcatgcctaatgttttgta

SEQ ID NO: 3711699 - DNA, 25 bp, Homo sapien
atgcgccatcatgcctaatgttttg

SEQ ID NO: 3711700 - DNA, 25 bp, Homo sapien
ggcatgcgccatcatgcctaatgtt

SEQ ID NO: 3711701 - DNA, 25 bp, Homo sapien
gcatgcgccatcatgcctaatgttt

SEQ ID NO: 3711702 - DNA, 25 bp, Homo sapien
tggtaaacagctattgaagtcacac

SEQ ID NO: 3711703 - DNA, 25 bp, Homo sapien
taatttgcgcgacaaacatgtcaga

SEQ ID NO: 3711704 - DNA, 25 bp, Homo sapien
gaagttcacatcatgtagtcagggc

SEQ ID NO: 3711705 - DNA, 25 bp, Homo sapien
gatgcagctcagttaagaagcagct

SEQ ID NO: 3711706 - DNA, 25 bp, Homo sapien
aatattccagattagccaacctcca

SEQ ID NO: 3711707 - DNA, 25 bp, Homo sapien
cagacatcacaatctctcctctggg

SEQ ID NO: 3711708 - DNA, 25 bp, Homo sapien
cattggtcttgcctattccctttgc

SEQ ID NO: 3711709 - DNA, 25 bp, Homo sapien
tattactacgcctgtcctagttcag

SEQ ID NO: 3711710 - DNA, 25 bp, Homo sapien
cttgagagtactgaacgtaagagtt

SEQ ID NO: 3711711 - DNA, 25 bp, Homo sapien
agagtactgaacgtaagagttcagc

SEQ ID NO: 3711712 - DNA, 25 bp, Homo sapien
tgagagtactgaacgtaagagttca

SEQ ID NO: 3711713 - DNA, 25 bp, Homo sapien
tactgaacgtaagagttcagcttca

SEQ ID NO: 3711714 - DNA, 25 bp, Homo sapien
tatggatgtactacaccttgtttat

SEQ ID NO: 3711715 - DNA, 25 bp, Homo sapien
gatgtactacaccttgtttatccaa

SEQ ID NO: 3711716 - DNA, 25 bp, Homo sapien
ccttgtttatccaatcatcagttga

SEQ ID NO: 3711717 - DNA, 25 bp, Homo sapien
aaataatgctgctgggccgggcacg

SEQ ID NO: 3711718 - DNA, 25 bp, Homo sapien
ggcctaccatggtggttcacccctg

SEQ ID NO: 3711719 - DNA, 25 bp, Homo sapien
aatcaaataacatgtggtcttctgg

SEQ ID NO: 3711720 - DNA, 25 bp, Homo sapien
catttaaagggcacaaatcaatggt

SEQ ID NO: 3711721 - DNA, 25 bp, Homo sapien
gaccctgtttcgacatacaattaaa

SEQ ID NO: 3711722 - DNA, 25 bp, Homo sapien
tttgcagattccaaaagtaaaccag

SEQ ID NO: 3711723 - DNA, 25 bp, Homo sapien
ttgcagattccaaaagtaaaccagg

SEQ ID NO: 3711724 - DNA, 25 bp, Homo sapien
tgcagattccaaaagtaaaccagga

SEQ ID NO: 3711725 - DNA, 25 bp, Homo sapien
gctttgcagattccaaaagtaaacc

SEQ ID NO: 3711726 - DNA, 25 bp, Homo sapien
aatgactgaagatccaatggctgag

SEQ ID NO: 3711727 - DNA, 25 bp, Homo sapien
cagtgtttgtgtcccaaagactaca

SEQ ID NO: 3711728 - DNA, 25 bp, Homo sapien
cagagatacagcattggaacaagac

SEQ ID NO: 3711729 - DNA, 25 bp, Homo sapien
ttccgctcagtctatgaatccaatg

SEQ ID NO: 3711730 - DNA, 25 bp, Homo sapien
caaggacgctgtttgcacctaagac

SEQ ID NO: 3711731 - DNA, 25 bp, Homo sapien
taacgtctccggaatgtgattctgc

SEQ ID NO: 3711732 - DNA, 25 bp, Homo sapien
tgggatacaagagccgaccactgac

SEQ ID NO: 3711733 - DNA, 25 bp, Homo sapien
tttcggacaagataccattctgggc

SEQ ID NO: 3711734 - DNA, 25 bp, Homo sapien
gctaggtaagtagaccaatcccaaa

SEQ ID NO: 3711735 - DNA, 25 bp, Homo sapien
tgtgtttggattcacccgaaggtac

SEQ ID NO: 3711736 - DNA, 25 bp, Homo sapien
ggctgcccataatcagctaggtaag

SEQ ID NO: 3711737 - DNA, 25 bp, Homo sapien
cgaaggtacttagaagctggctgcc

SEQ ID NO: 3711738 - DNA, 25 bp, Homo sapien
cagttgcatttcatggcattgtaaa

SEQ ID NO: 3711739 - DNA, 25 bp, Homo sapien
cagattcagagagtctcccaatagt

SEQ ID NO: 3711740 - DNA, 25 bp, Homo sapien
aaaatagcgatgtttttgcctcagt

SEQ ID NO: 3711741 - DNA, 25 bp, Homo sapien
tcatattcatagcaagataaggtga

SEQ ID NO: 3711742 - DNA, 25 bp, Homo sapien
aaaagctaagctgtcacaagtaaaa

SEQ ID NO: 3711743 - DNA, 25 bp, Homo sapien
ttaaaagctaagctgtcacaagtaa

SEQ ID NO: 3711744 - DNA, 25 bp, Homo sapien
attaaaagctaagctgtcacaagta

SEQ ID NO: 3711745 - DNA, 25 bp, Homo sapien
taaaagctaagctgtcacaagtaaa

SEQ ID NO: 3711746 - DNA, 25 bp, Homo sapien
tctgtttgtctcgatcattcttcct

SEQ ID NO: 3711747 - DNA, 25 bp, Homo sapien
gtttgtctcgatcattcttcctgaa

SEQ ID NO: 3711748 - DNA, 25 bp, Homo sapien
cttctcagctgtttcacgactgtct

SEQ ID NO: 3711749 - DNA, 25 bp, Homo sapien
gactgtctctatcaacttctgtttg

SEQ ID NO: 3711750 - DNA, 25 bp, Homo sapien
tgtgtgcaggaaccatctaccctcg

SEQ ID NO: 3711751 - DNA, 25 bp, Homo sapien
tggaccacggaaacatacacaaagg

SEQ ID NO: 3711752 - DNA, 25 bp, Homo sapien
aagctgcacctgaagtggttagccc

SEQ ID NO: 3711753 - DNA, 25 bp, Homo sapien
tgaagaaagtaacctgacccctgtg

SEQ ID NO: 3711754 - DNA, 25 bp, Homo sapien
ctttctctcgccactccaaggtgaa

SEQ ID NO: 3711755 - DNA, 25 bp, Homo sapien
gctccgactatttcagggaaactgc

SEQ ID NO: 3711756 - DNA, 25 bp, Homo sapien
actccaaggtgaaagaactgggctt

SEQ ID NO: 3711757 - DNA, 25 bp, Homo sapien
gccctcgagcttctaggtgcctttc

SEQ ID NO: 3711758 - DNA, 25 bp, Homo sapien
gggcttgcgccccgcagtgctcctg

SEQ ID NO: 3711759 - DNA, 25 bp, Homo sapien
ggcttgcgccccgcagtgctcctgg

SEQ ID NO: 3711760 - DNA, 25 bp, Homo sapien
cgggcttgcgccccgcagtgctcct

SEQ ID NO: 3711761 - DNA, 25 bp, Homo sapien
ggctcagcaccctttggatagaaga

SEQ ID NO: 3711762 - DNA, 25 bp, Homo sapien
tgaaagactgcagtgaccgtgcgcc

SEQ ID NO: 3711763 - DNA, 25 bp, Homo sapien
cgaaagaagagcaactcaccagtgt

SEQ ID NO: 3711764 - DNA, 25 bp, Homo sapien
tgcgcccttagggaacgtgccttcc

SEQ ID NO: 3711765 - DNA, 25 bp, Homo sapien
ctgagcagcaggcccgcgcacagga

SEQ ID NO: 3711766 - DNA, 25 bp, Homo sapien
cccggctcagcatccagcggagggt

SEQ ID NO: 3711767 - DNA, 25 bp, Homo sapien
gctcagcatccagcggagggtccag

SEQ ID NO: 3711768 - DNA, 25 bp, Homo sapien
ggctcagcatccagcggagggtcca

SEQ ID NO: 3711769 - DNA, 25 bp, Homo sapien
cagcgtttcgccgaagaagggccac

SEQ ID NO: 3711770 - DNA, 25 bp, Homo sapien
cagtgcagcgtttcgccgaagaagg

SEQ ID NO: 3711771 - DNA, 25 bp, Homo sapien
gaactaaccagtgcagcgtttcgcc

SEQ ID NO: 3711772 - DNA, 25 bp, Homo sapien
aaccagtgcagcgtttcgccgaaga

SEQ ID NO: 3711773 - DNA, 25 bp, Homo sapien
taaaggcgagagttgtgcgcgcttc

SEQ ID NO: 3711774 - DNA, 25 bp, Homo sapien
cctgcgttgtgtctgggagttgctc

SEQ ID NO: 3711775 - DNA, 25 bp, Homo sapien
gctacaaatcccatgggcattgaga

SEQ ID NO: 3711776 - DNA, 25 bp, Homo sapien
tcccttcgagggaacggagtatcta

SEQ ID NO: 3711777 - DNA, 25 bp, Homo sapien
actggctgcgcaccaggcggtgctc

SEQ ID NO: 3711778 - DNA, 25 bp, Homo sapien
tgtcccatagcgctctcggcgagaa

SEQ ID NO: 3711779 - DNA, 25 bp, Homo sapien
cgaccgcacctagcagtgtgtgcga

SEQ ID NO: 3711780 - DNA, 25 bp, Homo sapien
gcccagcaggatgtgcgcactctgc

SEQ ID NO: 3711781 - DNA, 25 bp, Homo sapien
atgcgcgcggccatgcggaaggtga

SEQ ID NO: 3711782 - DNA, 25 bp, Homo sapien
gtaggccactgaagggaacgtccag

SEQ ID NO: 3711783 - DNA, 25 bp, Homo sapien
agaggttctccacgagctgctcgaa

SEQ ID NO: 3711784 - DNA, 25 bp, Homo sapien
tttggaggcgtcgtagactgagacc

SEQ ID NO: 3711785 - DNA, 25 bp, Homo sapien
tgccgccgttcccagcagaggtgac

SEQ ID NO: 3711786 - DNA, 25 bp, Homo sapien
gaggaaggtctggagccggggcggc

SEQ ID NO: 3711787 - DNA, 25 bp, Homo sapien
gccgttcccagcagaggtgacggac

SEQ ID NO: 3711788 - DNA, 25 bp, Homo sapien
tgcgccgagggcgtcccgtctgggt

SEQ ID NO: 3711789 - DNA, 25 bp, Homo sapien
agtccgaccgactggcaggacgcct

SEQ ID NO: 3711790 - DNA, 25 bp, Homo sapien
tcccacggaggtcgtgtggccagcc

SEQ ID NO: 3711791 - DNA, 25 bp, Homo sapien
gcgccgctgtgggaaggagtccgac

SEQ ID NO: 3711792 - DNA, 25 bp, Homo sapien
tctgggcttccgaagaggtgatgga

SEQ ID NO: 3711793 - DNA, 25 bp, Homo sapien
tgttcgtgcccctactaacggtgtg

SEQ ID NO: 3711794 - DNA, 25 bp, Homo sapien
cagagttcagggaatagccgcagca

SEQ ID NO: 3711795 - DNA, 25 bp, Homo sapien
tatggctgggctcagtaaatggtcg

SEQ ID NO: 3711796 - DNA, 25 bp, Homo sapien
tatccacggtgatcagcctatagca

SEQ ID NO: 3711797 - DNA, 25 bp, Homo sapien
gcaggaaggctaagggggccaagcc

SEQ ID NO: 3711798 - DNA, 25 bp, Homo sapien
gatggggcaggaaggctaagggggc

SEQ ID NO: 3711799 - DNA, 25 bp, Homo sapien
ctgatgttcagggagagaagaaaga

SEQ ID NO: 3711800 - DNA, 25 bp, Homo sapien
gaaagatggggcaggaaggctaagg

SEQ ID NO: 3711801 - DNA, 25 bp, Homo sapien
cgtgaagcttctcagaaatggcccc

SEQ ID NO: 3711802 - DNA, 25 bp, Homo sapien
tgcactgtgaatgattaggtcgagg

SEQ ID NO: 3711803 - DNA, 25 bp, Homo sapien
gcagctggtcccttgcccggatgcc

SEQ ID NO: 3711804 - DNA, 25 bp, Homo sapien
tcgagggcatcacccggctctgcag

SEQ ID NO: 3711805 - DNA, 25 bp, Homo sapien
gctgagtcattactggaacccaggt

SEQ ID NO: 3711806 - DNA, 25 bp, Homo sapien
tggggccacacaagatgtggctctg

SEQ ID NO: 3711807 - DNA, 25 bp, Homo sapien
gtgtggctgagtcattactggaacc

SEQ ID NO: 3711808 - DNA, 25 bp, Homo sapien
tggctgagtcattactggaacccag

SEQ ID NO: 3711809 - DNA, 25 bp, Homo sapien
aatgccggcatcatggcttcatcct

SEQ ID NO: 3711810 - DNA, 25 bp, Homo sapien
caatgccggcatcatggcttcatcc

SEQ ID NO: 3711811 - DNA, 25 bp, Homo sapien
tgcagtagcagcaggacgagcgagg

SEQ ID NO: 3711812 - DNA, 25 bp, Homo sapien
tcctcccgaatcttggcgatggccg

SEQ ID NO: 3711813 - DNA, 25 bp, Homo sapien
tagcagcaggacgagcgaggtgctg

SEQ ID NO: 3711814 - DNA, 25 bp, Homo sapien
atggccgccggatgctgcagtagca

SEQ ID NO: 3711815 - DNA, 25 bp, Homo sapien
gccccgggcgcgcagccgcacgcgc

SEQ ID NO: 3711816 - DNA, 25 bp, Homo sapien
ctcgcagccgcagtcgggcgggggc

SEQ ID NO: 3711817 - DNA, 25 bp, Homo sapien
cgcgcagccgcacgcgcgccccagc

SEQ ID NO: 3711818 - DNA, 25 bp, Homo sapien
gggcccctcgctgcccccagcggcc

SEQ ID NO: 3711819 - DNA, 25 bp, Homo sapien
tcgaaggtgcgcagggcggtgcggt

SEQ ID NO: 3711820 - DNA, 25 bp, Homo sapien
tccttgaccacgcagtcgacgtagc

SEQ ID NO: 3711821 - DNA, 25 bp, Homo sapien
tcgacgtagcgcagacggcccagcg

SEQ ID NO: 3711822 - DNA, 25 bp, Homo sapien
tagcccccggacactggcggcagga

SEQ ID NO: 3711823 - DNA, 25 bp, Homo sapien
gagaggcgaggagatcagcctgacc

SEQ ID NO: 3711824 - DNA, 25 bp, Homo sapien
agagaggcgaggagatcagcctgac

SEQ ID NO: 3711825 - DNA, 25 bp, Homo sapien
cgtctcgtgcgtgtcccggatgcta

SEQ ID NO: 3711826 - DNA, 25 bp, Homo sapien
gcgctctggatcgaagccttcggga

SEQ ID NO: 3711827 - DNA, 25 bp, Homo sapien
tgcggtacaccgcagccgtctcgtg

SEQ ID NO: 3711828 - DNA, 25 bp, Homo sapien
cgcgctgcgccgaagcgctctggat

SEQ ID NO: 3711829 - DNA, 25 bp, Homo sapien
ggagcacggcttgcgccagctcctg

SEQ ID NO: 3711830 - DNA, 25 bp, Homo sapien
cagctggagcacggcttgcgccagc

SEQ ID NO: 3711831 - DNA, 25 bp, Homo sapien
agcacggcttgcgccagctcctggc

SEQ ID NO: 3711832 - DNA, 25 bp, Homo sapien
cacggcttgcgccagctcctggccg

SEQ ID NO: 3711833 - DNA, 25 bp, Homo sapien
ggtggaaaaagagccgcagcccgtc

SEQ ID NO: 3711834 - DNA, 25 bp, Homo sapien
agcccgtccactgggtgcacgatgg

SEQ ID NO: 3711835 - DNA, 25 bp, Homo sapien
cattccccgcaaccgaaggcgtgag

SEQ ID NO: 3711836 - DNA, 25 bp, Homo sapien
tgcacgatgggcaccgtctgcatgg

SEQ ID NO: 3711837 - DNA, 25 bp, Homo sapien
ttagatgcttctctggcgcggcagc

SEQ ID NO: 3711838 - DNA, 25 bp, Homo sapien
gagtccggcacacatccgcgtttgg

SEQ ID NO: 3711839 - DNA, 25 bp, Homo sapien
agccgtgtcctagagcgcaagcatg

SEQ ID NO: 3711840 - DNA, 25 bp, Homo sapien
ccgcgtttggcgaacatttgttgaa

SEQ ID NO: 3711841 - DNA, 25 bp, Homo sapien
gaagccaagcagcacctcgtgggga

SEQ ID NO: 3711842 - DNA, 25 bp, Homo sapien
tgcttggcccacgacattttccttc

SEQ ID NO: 3711843 - DNA, 25 bp, Homo sapien
cacctcgtggggatctatctattcc

SEQ ID NO: 3711844 - DNA, 25 bp, Homo sapien
atgcaccctccctggattggctcgg

SEQ ID NO: 3711845 - DNA, 25 bp, Homo sapien
gttgcaggtcccaccgcgtgcgtcg

SEQ ID NO: 3711846 - DNA, 25 bp, Homo sapien
acggcgtgcccgcttccttacaagg

SEQ ID NO: 3711847 - DNA, 25 bp, Homo sapien
tgtccccgagttgcaatattcccac

SEQ ID NO: 3711848 - DNA, 25 bp, Homo sapien
cgtgcgtcgggtctctgcaatgtcc

SEQ ID NO: 3711849 - DNA, 25 bp, Homo sapien
cagaatccggtgaccttgagccctt

SEQ ID NO: 3711850 - DNA, 25 bp, Homo sapien
cacagttgctagtttccgccgagac

SEQ ID NO: 3711851 - DNA, 25 bp, Homo sapien
tgagccctttcgagcctggaagtgc

SEQ ID NO: 3711852 - DNA, 25 bp, Homo sapien
ttaagaagtggccagcagaatccgg

SEQ ID NO: 3711853 - DNA, 25 bp, Homo sapien
gccaaagtgttcagccctacctgat

SEQ ID NO: 3711854 - DNA, 25 bp, Homo sapien
cactggttggaacctctgtaccgga

SEQ ID NO: 3711855 - DNA, 25 bp, Homo sapien
gagagtcctcaagtctagctagggc

SEQ ID NO: 3711856 - DNA, 25 bp, Homo sapien
taccggaatggttgagagagtcctc

SEQ ID NO: 3711857 - DNA, 25 bp, Homo sapien
ctggagccatccctacagaggctta

SEQ ID NO: 3711858 - DNA, 25 bp, Homo sapien
aggagctaagatatccctcaaaatt

SEQ ID NO: 3711859 - DNA, 25 bp, Homo sapien
tccctccagagcatatcaagtgcag

SEQ ID NO: 3711860 - DNA, 25 bp, Homo sapien
gagaatctgcagctactaaaacagg

SEQ ID NO: 3711861 - DNA, 25 bp, Homo sapien
gtcagacaattagttcacccaaagt

SEQ ID NO: 3711862 - DNA, 25 bp, Homo sapien
tttaattgcggattgggcccctggc

SEQ ID NO: 3711863 - DNA, 25 bp, Homo sapien
gaattccaagctctagccttcccgg

SEQ ID NO: 3711864 - DNA, 25 bp, Homo sapien
atccaaggtgtgctgagctccgagg

SEQ ID NO: 3711865 - DNA, 25 bp, Homo sapien
ggcgcgccgcgacctcccgcgccac

SEQ ID NO: 3711866 - DNA, 25 bp, Homo sapien
gcgccgcgacctcccgcgccacctg

SEQ ID NO: 3711867 - DNA, 25 bp, Homo sapien
cgcgacctcccgcgccacctgccgc

SEQ ID NO: 3711868 - DNA, 25 bp, Homo sapien
ccgcgacctcccgcgccacctgccg

SEQ ID NO: 3711869 - DNA, 25 bp, Homo sapien
aatgggagggcacaactgcggtcgc

SEQ ID NO: 3711870 - DNA, 25 bp, Homo sapien
tcgcggccgctcacgcagtacaggt

SEQ ID NO: 3711871 - DNA, 25 bp, Homo sapien
ccagagcttgatcgcagccaggaag

SEQ ID NO: 3711872 - DNA, 25 bp, Homo sapien
acgaaggtgcagagcgcactggcca

SEQ ID NO: 3711873 - DNA, 25 bp, Homo sapien
gcccgaacagatgcgtcttgtagat

SEQ ID NO: 3711874 - DNA, 25 bp, Homo sapien
cagccagatcccagaatggtgcgca

SEQ ID NO: 3711875 - DNA, 25 bp, Homo sapien
gtgctctccgagcaagatgcgccgc

SEQ ID NO: 3711876 - DNA, 25 bp, Homo sapien
tagatgaagccgtatttcctgcgct

SEQ ID NO: 3711877 - DNA, 25 bp, Homo sapien
cagcccagtaggatgcgcatggcga

SEQ ID NO: 3711878 - DNA, 25 bp, Homo sapien
gattcggaacatgaggcgcttcacc

SEQ ID NO: 3711879 - DNA, 25 bp, Homo sapien
gattgcgggtcatttcctcgaaggc

SEQ ID NO: 3711880 - DNA, 25 bp, Homo sapien
gatcaccggcacgtagcattcgagt

SEQ ID NO: 3711881 - DNA, 25 bp, Homo sapien
gtgaatgaggttccgcgccttcatg

SEQ ID NO: 3711882 - DNA, 25 bp, Homo sapien
aatgttctgctcgatgcgcgcgtga

SEQ ID NO: 3711883 - DNA, 25 bp, Homo sapien
gcccgcagatcttggcgcgaatgtt

SEQ ID NO: 3711884 - DNA, 25 bp, Homo sapien
gatcaacagctgcagcgcgtctttg

SEQ ID NO: 3711885 - DNA, 25 bp, Homo sapien
tggagaacatgtgggtagagcccca

SEQ ID NO: 3711886 - DNA, 25 bp, Homo sapien
ccaaagaggagttcggttgaagatt

SEQ ID NO: 3711887 - DNA, 25 bp, Homo sapien
cgtggtttcgtgtcctccaaagagg

SEQ ID NO: 3711888 - DNA, 25 bp, Homo sapien
ccaggtaagtgatcagagatgtggc

SEQ ID NO: 3711889 - DNA, 25 bp, Homo sapien
taacacacccgatgtatttaagttg

SEQ ID NO: 3711890 - DNA, 25 bp, Homo sapien
tcttgattgctcttgcaaagtaaac

SEQ ID NO: 3711891 - DNA, 25 bp, Homo sapien
tcagagcaacccgaaaccctcctgg

SEQ ID NO: 3711892 - DNA, 25 bp, Homo sapien
tgggggattcagtcgaagggtctcc

SEQ ID NO: 3711893 - DNA, 25 bp, Homo sapien
tacacggtgggactggttttcattg

SEQ ID NO: 3711894 - DNA, 25 bp, Homo sapien
gagattgtccacaggatacacggtg

SEQ ID NO: 3711895 - DNA, 25 bp, Homo sapien
gtgaagatctctgccacatcatgag

SEQ ID NO: 3711896 - DNA, 25 bp, Homo sapien
gatactgtagataacattccagccc

SEQ ID NO: 3711897 - DNA, 25 bp, Homo sapien
cactccttaaaaactcatatgtaca

SEQ ID NO: 3711898 - DNA, 25 bp, Homo sapien
aacactccttaaaaactcatatgta

SEQ ID NO: 3711899 - DNA, 25 bp, Homo sapien
tttaaagattgtggtagtatagtca

SEQ ID NO: 3711900 - DNA, 25 bp, Homo sapien
gattgtggtagtatagtcaaaacac

SEQ ID NO: 3711901 - DNA, 25 bp, Homo sapien
tggtgagttttacccaacaggaatc

SEQ ID NO: 3711902 - DNA, 25 bp, Homo sapien
taagtccaggtaggcattgtaaaat

SEQ ID NO: 3711903 - DNA, 25 bp, Homo sapien
gatacgtctggaataacacacacag

SEQ ID NO: 3711904 - DNA, 25 bp, Homo sapien
ataagctggagaggttagagtgaca

SEQ ID NO: 3711905 - DNA, 25 bp, Homo sapien
taaatggtgtcaattggccccaaga

SEQ ID NO: 3711906 - DNA, 25 bp, Homo sapien
taagattagaacaatgagacacagt

SEQ ID NO: 3711907 - DNA, 25 bp, Homo sapien
gccaggtcaagcgaatggtcagcat

SEQ ID NO: 3711908 - DNA, 25 bp, Homo sapien
cagcacatttcaggaggtggagaca

SEQ ID NO: 3711909 - DNA, 25 bp, Homo sapien
tcttggatggtttcccctcagtccc

SEQ ID NO: 3711910 - DNA, 25 bp, Homo sapien
tggagcatggcatcttggcaagcca

SEQ ID NO: 3711911 - DNA, 25 bp, Homo sapien
tgccctgaacaccagattgtatttg

SEQ ID NO: 3711912 - DNA, 25 bp, Homo sapien
tttcaacagattccacagatacccc

SEQ ID NO: 3711913 - DNA, 25 bp, Homo sapien
cagtgagtaccacggtcccattgat

SEQ ID NO: 3711914 - DNA, 25 bp, Homo sapien
gagtaccacggtcccattgatagcc

SEQ ID NO: 3711915 - DNA, 25 bp, Homo sapien
gtaccacggtcccattgatagccat

SEQ ID NO: 3711916 - DNA, 25 bp, Homo sapien
gtgagtaccacggtcccattgatag

SEQ ID NO: 3711917 - DNA, 25 bp, Homo sapien
tcatttcctttagtgaacgcctcca

SEQ ID NO: 3711918 - DNA, 25 bp, Homo sapien
aatgggttgggtatgaagtctcttt

SEQ ID NO: 3711919 - DNA, 25 bp, Homo sapien
gaaaaatcattgtaacctgggggca

SEQ ID NO: 3711920 - DNA, 25 bp, Homo sapien
gtgaacgcctccacaaaccacaatg

SEQ ID NO: 3711921 - DNA, 25 bp, Homo sapien
catgtaagatgtagcctgagaactc

SEQ ID NO: 3711922 - DNA, 25 bp, Homo sapien
taagatgtagcctgagaactctgac

SEQ ID NO: 3711923 - DNA, 25 bp, Homo sapien
tctccatgtaagatgtagcctgaga

SEQ ID NO: 3711924 - DNA, 25 bp, Homo sapien
tgtagcctgagaactctgacctacc

SEQ ID NO: 3711925 - DNA, 25 bp, Homo sapien
tatgacgatgtgcttccccagaaga

SEQ ID NO: 3711926 - DNA, 25 bp, Homo sapien
tatttcagccatgagtcagtttccc

SEQ ID NO: 3711927 - DNA, 25 bp, Homo sapien
tcatagaacagacagcgtggctcct

SEQ ID NO: 3711928 - DNA, 25 bp, Homo sapien
tcagtttcccagtggcggtcatcca

SEQ ID NO: 3711929 - DNA, 25 bp, Homo sapien
tattcactttccactatatttgtag

SEQ ID NO: 3711930 - DNA, 25 bp, Homo sapien
tacaaagttcatggttcagctgaac

SEQ ID NO: 3711931 - DNA, 25 bp, Homo sapien
aactcaagtgaggatttgacacagc

SEQ ID NO: 3711932 - DNA, 25 bp, Homo sapien
tatttgtagaactgcctgctgtgaa

SEQ ID NO: 3711933 - DNA, 25 bp, Homo sapien
cattcaggacagcagcatagcctcg

SEQ ID NO: 3711934 - DNA, 25 bp, Homo sapien
ttcaggacagcagcatagcctcgga

SEQ ID NO: 3711935 - DNA, 25 bp, Homo sapien
ggacagcagcatagcctcggaccat

SEQ ID NO: 3711936 - DNA, 25 bp, Homo sapien
tcaggacagcagcatagcctcggac

SEQ ID NO: 3711937 - DNA, 25 bp, Homo sapien
cttctaatttaactcgccttggtgc

SEQ ID NO: 3711938 - DNA, 25 bp, Homo sapien
aatttaactcgccttggtgccagag

SEQ ID NO: 3711939 - DNA, 25 bp, Homo sapien
agatctctctgaccaggtctttcct

SEQ ID NO: 3711940 - DNA, 25 bp, Homo sapien
tctgaccaggtctttcctttgtcca

SEQ ID NO: 3711941 - DNA, 25 bp, Homo sapien
taatttgccttctacccacatggcc

SEQ ID NO: 3711942 - DNA, 25 bp, Homo sapien
ttagcctgctatagaaaaccccaca

SEQ ID NO: 3711943 - DNA, 25 bp, Homo sapien
aatcaactgctatctttccacccag

SEQ ID NO: 3711944 - DNA, 25 bp, Homo sapien
ccagagataatctcacagttgatgt

SEQ ID NO: 3711945 - DNA, 25 bp, Homo sapien
aagagttagaatttcagcctgtctg

SEQ ID NO: 3711946 - DNA, 25 bp, Homo sapien
aggaatctggaattggaatggagaa

SEQ ID NO: 3711947 - DNA, 25 bp, Homo sapien
gaaagagttagaatttcagcctgtc

SEQ ID NO: 3711948 - DNA, 25 bp, Homo sapien
agttagaatttcagcctgtctggaa

SEQ ID NO: 3711949 - DNA, 25 bp, Homo sapien
ttgatttggtctcagatgtgtgggt

SEQ ID NO: 3711950 - DNA, 25 bp, Homo sapien
tccctcttggtgttcagcgccagac

SEQ ID NO: 3711951 - DNA, 25 bp, Homo sapien
cacatgtcgggattttcttgggatt

SEQ ID NO: 3711952 - DNA, 25 bp, Homo sapien
gactcatccgctccaggcagaagtt

SEQ ID NO: 3711953 - DNA, 25 bp, Homo sapien
agtcctctccatacagagttaccag

SEQ ID NO: 3711954 - DNA, 25 bp, Homo sapien
gttaccagcatggatgtggaaagcc

SEQ ID NO: 3711955 - DNA, 25 bp, Homo sapien
tgtgcctgtggtactgcaaagtcct

SEQ ID NO: 3711956 - DNA, 25 bp, Homo sapien
ttctggttcaagactcgagggccct

SEQ ID NO: 3711957 - DNA, 25 bp, Homo sapien
cagtagatctgacattgcccaaggt

SEQ ID NO: 3711958 - DNA, 25 bp, Homo sapien
tgaataaaagactgggatccctggt

SEQ ID NO: 3711959 - DNA, 25 bp, Homo sapien
aaaggtcatggcaactccagagtag

SEQ ID NO: 3711960 - DNA, 25 bp, Homo sapien
tttaaggagcttgtctacccgccag

SEQ ID NO: 3711961 - DNA, 25 bp, Homo sapien
tccctgttggtgtaccctgaggagt

SEQ ID NO: 3711962 - DNA, 25 bp, Homo sapien
tgggagctcaatcctgttcagtgct

SEQ ID NO: 3711963 - DNA, 25 bp, Homo sapien
aagaagcaccattacctgaggccct

SEQ ID NO: 3711964 - DNA, 25 bp, Homo sapien
tagcattgtgcagatacacgcccca

SEQ ID NO: 3711965 - DNA, 25 bp, Homo sapien
ggaatccagcaagctagaagacctg

SEQ ID NO: 3711966 - DNA, 25 bp, Homo sapien
gcaggttaaagctgaagctcaacaa

SEQ ID NO: 3711967 - DNA, 25 bp, Homo sapien
tgttgccgaaggttcacgccaagga

SEQ ID NO: 3711968 - DNA, 25 bp, Homo sapien
caaagatatagtgatctctgtgggc

SEQ ID NO: 3711969 - DNA, 25 bp, Homo sapien
taaggcacataactagaatgcctgg

SEQ ID NO: 3711970 - DNA, 25 bp, Homo sapien
ccggatttggttatcttaaggcaca

SEQ ID NO: 3711971 - DNA, 25 bp, Homo sapien
cttaaggcacataactagaatgcct

SEQ ID NO: 3711972 - DNA, 25 bp, Homo sapien
tggttatcttaaggcacataactag

SEQ ID NO: 3711973 - DNA, 25 bp, Homo sapien
taagcaacggcacctaagggaaatg

SEQ ID NO: 3711974 - DNA, 25 bp, Homo sapien
gactgagatcatatgtgcaaatcac

SEQ ID NO: 3711975 - DNA, 25 bp, Homo sapien
gggtggtttgtccaactgcctccat

SEQ ID NO: 3711976 - DNA, 25 bp, Homo sapien
gaagctattttgaagcccagtggtg

SEQ ID NO: 3711977 - DNA, 25 bp, Homo sapien
tatctctgccacgacttttctcttt

SEQ ID NO: 3711978 - DNA, 25 bp, Homo sapien
cctcgcctttctgacgcccttcata

SEQ ID NO: 3711979 - DNA, 25 bp, Homo sapien
ctctgcatcctagaagtctgcatat

SEQ ID NO: 3711980 - DNA, 25 bp, Homo sapien
gaagtctgcatatgactcctatctc

SEQ ID NO: 3711981 - DNA, 25 bp, Homo sapien
ctgggtggaagccacgccacctctg

SEQ ID NO: 3711982 - DNA, 25 bp, Homo sapien
gcagaagtgggtccatgccagtgcc

SEQ ID NO: 3711983 - DNA, 25 bp, Homo sapien
tgccacatgcacatactcgctcagg

SEQ ID NO: 3711984 - DNA, 25 bp, Homo sapien
tgcaggcatgcttgtttcagaagct

SEQ ID NO: 3711985 - DNA, 25 bp, Homo sapien
ttagaaagagcatgtacttggactc

SEQ ID NO: 3711986 - DNA, 25 bp, Homo sapien
aaagagcatgtacttggactctttg

SEQ ID NO: 3711987 - DNA, 25 bp, Homo sapien
ctttagaaagagcatgtacttggac

SEQ ID NO: 3711988 - DNA, 25 bp, Homo sapien
agagcatgtacttggactctttgct

SEQ ID NO: 3711989 - DNA, 25 bp, Homo sapien
gattgctggccctcaaacgcaatgg

SEQ ID NO: 3711990 - DNA, 25 bp, Homo sapien
aaggggcctgccacaagtctgtttt

SEQ ID NO: 3711991 - DNA, 25 bp, Homo sapien
ggacagtagtctcccctctgggtcg

SEQ ID NO: 3711992 - DNA, 25 bp, Homo sapien
gagaagtagagaagtcctccagtgc

SEQ ID NO: 3711993 - DNA, 25 bp, Homo sapien
ttctgagttcagacaagagcgggaa

SEQ ID NO: 3711994 - DNA, 25 bp, Homo sapien
agacaagagcgggaatgttcaggat

SEQ ID NO: 3711995 - DNA, 25 bp, Homo sapien
gttcagacaagagcgggaatgttca

SEQ ID NO: 3711996 - DNA, 25 bp, Homo sapien
tgagttcagacaagagcgggaatgt

SEQ ID NO: 3711997 - DNA, 25 bp, Homo sapien
tgcaatgcagtcgaccagaaacctc

SEQ ID NO: 3711998 - DNA, 25 bp, Homo sapien
aagtgggtcatcatcggcttgctgt

SEQ ID NO: 3711999 - DNA, 25 bp, Homo sapien
catgaagttcatcgtgtggcgccgc

SEQ ID NO: 3712000 - DNA, 25 bp, Homo sapien
tatgcatccctcctgagttgggtag

SEQ ID NO: 3712001 - DNA, 25 bp, Homo sapien
gacagacttctcagatacgttcaag

SEQ ID NO: 3712002 - DNA, 25 bp, Homo sapien
tacactcccgccagcgatttgggag

SEQ ID NO: 3712003 - DNA, 25 bp, Homo sapien
tcaggcccacttgatactgtcagcc

SEQ ID NO: 3712004 - DNA, 25 bp, Homo sapien
tacgttcaagttgtaccgaggcaag

SEQ ID NO: 3712005 - DNA, 25 bp, Homo sapien
taatgtgcaaactagcccaaaaatg

SEQ ID NO: 3712006 - DNA, 25 bp, Homo sapien
tgctagaaagcgaagtctgagaagc

SEQ ID NO: 3712007 - DNA, 25 bp, Homo sapien
tcagagataacatgcaacacgccag

SEQ ID NO: 3712008 - DNA, 25 bp, Homo sapien
tttatcagtgtatgggacacccagg

SEQ ID NO: 3712009 - DNA, 25 bp, Homo sapien
ggttatccctctgtcactgctgatg

SEQ ID NO: 3712010 - DNA, 25 bp, Homo sapien
aagatagtattgtagggcctcccca

SEQ ID NO: 3712011 - DNA, 25 bp, Homo sapien
caggaggctgcactcactatacagg

SEQ ID NO: 3712012 - DNA, 25 bp, Homo sapien
aaatgtgtcaaatgggctggaggca

SEQ ID NO: 3712013 - DNA, 25 bp, Homo sapien
tcattccacgaatcccaaagtcatt

SEQ ID NO: 3712014 - DNA, 25 bp, Homo sapien
ttcattccacgaatcccaaagtcat

SEQ ID NO: 3712015 - DNA, 25 bp, Homo sapien
tttcattccacgaatcccaaagtca

SEQ ID NO: 3712016 - DNA, 25 bp, Homo sapien
ctttcattccacgaatcccaaagtc

SEQ ID NO: 3712017 - DNA, 25 bp, Homo sapien
tcacaggaagtgaacacctgagggc

SEQ ID NO: 3712018 - DNA, 25 bp, Homo sapien
tgaagatgacaaaaggtagagacct

SEQ ID NO: 3712019 - DNA, 25 bp, Homo sapien
ggagcctacattcccgtagctggaa

SEQ ID NO: 3712020 - DNA, 25 bp, Homo sapien
ggcaacttaattcgccagatgtcag

SEQ ID NO: 3712021 - DNA, 25 bp, Homo sapien
tgcttggtcttggtcgcatccaaat

SEQ ID NO: 3712022 - DNA, 25 bp, Homo sapien
ggtcttggtcgcatccaaatctggc

SEQ ID NO: 3712023 - DNA, 25 bp, Homo sapien
tgtgctgtcccttatgcagccctga

SEQ ID NO: 3712024 - DNA, 25 bp, Homo sapien
ctgtgctgtcccttatgcagccctg

SEQ ID NO: 3712025 - DNA, 25 bp, Homo sapien
ttatttctcttcttaaacctctctc

SEQ ID NO: 3712026 - DNA, 25 bp, Homo sapien
tatttctcttcttaaacctctctct

SEQ ID NO: 3712027 - DNA, 25 bp, Homo sapien
catgctgcgagtgattgtggaatct

SEQ ID NO: 3712028 - DNA, 25 bp, Homo sapien
tctgccagcaatatccctaaaacga

SEQ ID NO: 3712029 - DNA, 25 bp, Homo sapien
cgaaatttggcaagccggatcctat

SEQ ID NO: 3712030 - DNA, 25 bp, Homo sapien
tgatgaagccaagtctctccagcag

SEQ ID NO: 3712031 - DNA, 25 bp, Homo sapien
tttcactgaaggcaattggcagcat

SEQ ID NO: 3712032 - DNA, 25 bp, Homo sapien
ccattttcactgaaggcaattggca

SEQ ID NO: 3712033 - DNA, 25 bp, Homo sapien
ctccattttcactgaaggcaattgg

SEQ ID NO: 3712034 - DNA, 25 bp, Homo sapien
attttcactgaaggcaattggcagc

SEQ ID NO: 3712035 - DNA, 25 bp, Homo sapien
ctggctaaaggtcgccctgtgagtg

SEQ ID NO: 3712036 - DNA, 25 bp, Homo sapien
tttctggctaaaggtcgccctgtga

SEQ ID NO: 3712037 - DNA, 25 bp, Homo sapien
gccagacactccaattccacacctg

SEQ ID NO: 3712038 - DNA, 25 bp, Homo sapien
ttttctggctaaaggtcgccctgtg

SEQ ID NO: 3712039 - DNA, 25 bp, Homo sapien
cgggagtttgaatcccgcggctgca

SEQ ID NO: 3712040 - DNA, 25 bp, Homo sapien
atcaggtgtggatgccgcttccggg

SEQ ID NO: 3712041 - DNA, 25 bp, Homo sapien
gcggcccgcaagaaggaggagcagc

SEQ ID NO: 3712042 - DNA, 25 bp, Homo sapien
gggcacgtcactgccggcagggcgc

SEQ ID NO: 3712043 - DNA, 25 bp, Homo sapien
cggcgctcgcgtcggccgagtcaca

SEQ ID NO: 3712044 - DNA, 25 bp, Homo sapien
agctgaagcgaagcgcggcgctcgc

SEQ ID NO: 3712045 - DNA, 25 bp, Homo sapien
gaagcgcggcgctcgcgtcggccga

SEQ ID NO: 3712046 - DNA, 25 bp, Homo sapien
agcagctgaagcgaagcgcggcgct

SEQ ID NO: 3712047 - DNA, 25 bp, Homo sapien
ctcgccaccctccgcggtcgcctcc

SEQ ID NO: 3712048 - DNA, 25 bp, Homo sapien
ccctcgccaccctccgcggtcgcct

SEQ ID NO: 3712049 - DNA, 25 bp, Homo sapien
gctgcgggtcctggccgcccctcgc

SEQ ID NO: 3712050 - DNA, 25 bp, Homo sapien
gggctgcgggtcctggccgcccctc

SEQ ID NO: 3712051 - DNA, 25 bp, Homo sapien
tcagagcgggcagagattgaatccc

SEQ ID NO: 3712052 - DNA, 25 bp, Homo sapien
agagacaacggtcttgaggcgccca

SEQ ID NO: 3712053 - DNA, 25 bp, Homo sapien
ccaagtccaaagaagcgatcgaaga

SEQ ID NO: 3712054 - DNA, 25 bp, Homo sapien
ttgaatcccgcggacgcgatctgcc

SEQ ID NO: 3712055 - DNA, 25 bp, Homo sapien
tttgaggaacacacaacgaaagtgc

SEQ ID NO: 3712056 - DNA, 25 bp, Homo sapien
gcatcttctacaaggcgacgccaat

SEQ ID NO: 3712057 - DNA, 25 bp, Homo sapien
ggtacaaggcctcaattacaagccg

SEQ ID NO: 3712058 - DNA, 25 bp, Homo sapien
gaaagtgcctgccaatcggaaaaag

SEQ ID NO: 3712059 - DNA, 25 bp, Homo sapien
tacacaatctagtacccaattacac

SEQ ID NO: 3712060 - DNA, 25 bp, Homo sapien
ttaacaaacgatatagctgccccac

SEQ ID NO: 3712061 - DNA, 25 bp, Homo sapien
gttacccacagagcctaacagcaag

SEQ ID NO: 3712062 - DNA, 25 bp, Homo sapien
caagccctcagatatgattggttga

SEQ ID NO: 3712063 - DNA, 25 bp, Homo sapien
gcggggcgttaggggcggcagagtc

SEQ ID NO: 3712064 - DNA, 25 bp, Homo sapien
gcgttaggggcggcagagtctcgct

SEQ ID NO: 3712065 - DNA, 25 bp, Homo sapien
cgttaggggcggcagagtctcgctc

SEQ ID NO: 3712066 - DNA, 25 bp, Homo sapien
gggcgttaggggcggcagagtctcg

SEQ ID NO: 3712067 - DNA, 25 bp, Homo sapien
taattaaatctttggtacttctgga

SEQ ID NO: 3712068 - DNA, 25 bp, Homo sapien
taaatctttggtacttctggaagac

SEQ ID NO: 3712069 - DNA, 25 bp, Homo sapien
aatctttggtacttctggaagacat

SEQ ID NO: 3712070 - DNA, 25 bp, Homo sapien
attaaatctttggtacttctggaag

SEQ ID NO: 3712071 - DNA, 25 bp, Homo sapien
tctaatgtagtttcggatttggagt

SEQ ID NO: 3712072 - DNA, 25 bp, Homo sapien
aagtctgtgtctctctttatcagtc

SEQ ID NO: 3712073 - DNA, 25 bp, Homo sapien
gttactaggcttcgatccccactta

SEQ ID NO: 3712074 - DNA, 25 bp, Homo sapien
taagtgtgcaatttctccctttaat

SEQ ID NO: 3712075 - DNA, 25 bp, Homo sapien
ggccttcagttggtctctcagtcgc

SEQ ID NO: 3712076 - DNA, 25 bp, Homo sapien
ggtagtactatatctggccttcagt

SEQ ID NO: 3712077 - DNA, 25 bp, Homo sapien
tgaggttgcagcagacaactgttgt

SEQ ID NO: 3712078 - DNA, 25 bp, Homo sapien
gctgttcaagcaatgtggtagtact

SEQ ID NO: 3712079 - DNA, 25 bp, Homo sapien
gagttgaagcagtttggagccacag

SEQ ID NO: 3712080 - DNA, 25 bp, Homo sapien
tatttattgatgagttgaagcagtt

SEQ ID NO: 3712081 - DNA, 25 bp, Homo sapien
ttattgatgagttgaagcagtttgg

SEQ ID NO: 3712082 - DNA, 25 bp, Homo sapien
attatttattgatgagttgaagcag

SEQ ID NO: 3712083 - DNA, 25 bp, Homo sapien
gagccactgctgatttttctccaga

SEQ ID NO: 3712084 - DNA, 25 bp, Homo sapien
tcaaagatctttgctaaaagtcctt

SEQ ID NO: 3712085 - DNA, 25 bp, Homo sapien
gacttcccgctgctgatcatacacg

SEQ ID NO: 3712086 - DNA, 25 bp, Homo sapien
gcttttttgtctgctgtgggagtga

SEQ ID NO: 3712087 - DNA, 25 bp, Homo sapien
gagatcgttgtaacatttctgcttc

SEQ ID NO: 3712088 - DNA, 25 bp, Homo sapien
tttgcacttgccaagagatcgttgt

SEQ ID NO: 3712089 - DNA, 25 bp, Homo sapien
tgtcgttcaacctcaagatcttttt

SEQ ID NO: 3712090 - DNA, 25 bp, Homo sapien
ctgagttatggtttgtcgttcaacc

SEQ ID NO: 3712091 - DNA, 25 bp, Homo sapien
gagctcttcggatctcttcttctct

SEQ ID NO: 3712092 - DNA, 25 bp, Homo sapien
gcccttctttgtgaatacaacagct

SEQ ID NO: 3712093 - DNA, 25 bp, Homo sapien
ttcttcaagttttcccctagcaata

SEQ ID NO: 3712094 - DNA, 25 bp, Homo sapien
gagataagagctcttcggatctctt

SEQ ID NO: 3712095 - DNA, 25 bp, Homo sapien
aaagagaaccaatgctgtcacatcc

SEQ ID NO: 3712096 - DNA, 25 bp, Homo sapien
taaagagaaccaatgctgtcacatc

SEQ ID NO: 3712097 - DNA, 25 bp, Homo sapien
gagaaccaatgctgtcacatccaac

SEQ ID NO: 3712098 - DNA, 25 bp, Homo sapien
aagagaaccaatgctgtcacatcca

SEQ ID NO: 3712099 - DNA, 25 bp, Homo sapien
ctgttgttccaacagagctaccctt

SEQ ID NO: 3712100 - DNA, 25 bp, Homo sapien
ttgctgctttagcagagatgtgtaa

SEQ ID NO: 3712101 - DNA, 25 bp, Homo sapien
gctgctttagcagagatgtgtaaag

SEQ ID NO: 3712102 - DNA, 25 bp, Homo sapien
cagagctacccttgtttgttcttct

SEQ ID NO: 3712103 - DNA, 25 bp, Homo sapien
gaattgaatttagaagcaacccgaa

SEQ ID NO: 3712104 - DNA, 25 bp, Homo sapien
catagaacagcataaacatgaggaa

SEQ ID NO: 3712105 - DNA, 25 bp, Homo sapien
agacacttttcacaactttcaaaca

SEQ ID NO: 3712106 - DNA, 25 bp, Homo sapien
gaatttagaagcaacccgaatgagt

SEQ ID NO: 3712107 - DNA, 25 bp, Homo sapien
caaggattccaactgtgttatttga

SEQ ID NO: 3712108 - DNA, 25 bp, Homo sapien
gaattacatgcaattgatgctgcac

SEQ ID NO: 3712109 - DNA, 25 bp, Homo sapien
gatgctgcacatgttgacggtcgag

SEQ ID NO: 3712110 - DNA, 25 bp, Homo sapien
cacatgttgacggtcgagtttttca

SEQ ID NO: 3712111 - DNA, 25 bp, Homo sapien
taagctgtatcctcctaagttcgga

SEQ ID NO: 3712112 - DNA, 25 bp, Homo sapien
gaggcagaggctctacctactgatt

SEQ ID NO: 3712113 - DNA, 25 bp, Homo sapien
tgtttccagatgtgatcatgtccct

SEQ ID NO: 3712114 - DNA, 25 bp, Homo sapien
caaagggcagttgcttcaaatgagg

SEQ ID NO: 3712115 - DNA, 25 bp, Homo sapien
catggacaagcagatcgcgatgctc

SEQ ID NO: 3712116 - DNA, 25 bp, Homo sapien
gctggatactgtatattgcacttgg

SEQ ID NO: 3712117 - DNA, 25 bp, Homo sapien
tccaccaggctttcattgagtgcag

SEQ ID NO: 3712118 - DNA, 25 bp, Homo sapien
ccttggaaagtgactaatggctctg

SEQ ID NO: 3712119 - DNA, 25 bp, Homo sapien
tagtctcagtagacgctgctcacca

SEQ ID NO: 3712120 - DNA, 25 bp, Homo sapien
cagatactgtttcgtgcgcagaaca

SEQ ID NO: 3712121 - DNA, 25 bp, Homo sapien
tgatgatgaaccatgtcagggaggt

SEQ ID NO: 3712122 - DNA, 25 bp, Homo sapien
ctagcatgctggagtgtcaaaggta

SEQ ID NO: 3712123 - DNA, 25 bp, Homo sapien
aaaatacctgttcagacaaacaaag

SEQ ID NO: 3712124 - DNA, 25 bp, Homo sapien
tttctcatttacagtagcccagtgg

SEQ ID NO: 3712125 - DNA, 25 bp, Homo sapien
ggtaagcatgttagaaaacctgaag

SEQ ID NO: 3712126 - DNA, 25 bp, Homo sapien
cctgttcagacaaacaaagatctga

SEQ ID NO: 3712127 - DNA, 25 bp, Homo sapien
gtacagccctccagtgaaacacaga

SEQ ID NO: 3712128 - DNA, 25 bp, Homo sapien
aatcaaacttcagaggtcatcaggc

SEQ ID NO: 3712129 - DNA, 25 bp, Homo sapien
gttccatacaggcacggaccaaagg

SEQ ID NO: 3712130 - DNA, 25 bp, Homo sapien
tcactggatgaccaagacatgttcc

SEQ ID NO: 3712131 - DNA, 25 bp, Homo sapien
ttatctgccaagaaaaaaggtggac

SEQ ID NO: 3712132 - DNA, 25 bp, Homo sapien
gagatgaactctgcgacacactgag

SEQ ID NO: 3712133 - DNA, 25 bp, Homo sapien
tgccctaagggtaagcggttatctg

SEQ ID NO: 3712134 - DNA, 25 bp, Homo sapien
tctgaaaaatggtgctggtgctagc

SEQ ID NO: 3712135 - DNA, 25 bp, Homo sapien
gatctgcattgatgtcggcctggcc

SEQ ID NO: 3712136 - DNA, 25 bp, Homo sapien
atctgcattgatgtcggcctggcca

SEQ ID NO: 3712137 - DNA, 25 bp, Homo sapien
tctgcattgatgtcggcctggccat

SEQ ID NO: 3712138 - DNA, 25 bp, Homo sapien
tgatctgcattgatgtcggcctggc

SEQ ID NO: 3712139 - DNA, 25 bp, Homo sapien
tcacttgtgtccaggagtttgagga

SEQ ID NO: 3712140 - DNA, 25 bp, Homo sapien
ggatcacttgtgtccaggagtttga

SEQ ID NO: 3712141 - DNA, 25 bp, Homo sapien
ttgtgtccaggagtttgaggatgca

SEQ ID NO: 3712142 - DNA, 25 bp, Homo sapien
acttgtgtccaggagtttgaggatg

SEQ ID NO: 3712143 - DNA, 25 bp, Homo sapien
catttgaatgcacctgcgttgatac

SEQ ID NO: 3712144 - DNA, 25 bp, Homo sapien
cgttgatactagtttcaggtgagga

SEQ ID NO: 3712145 - DNA, 25 bp, Homo sapien
aaactgcgagcatctgattccatac

SEQ ID NO: 3712146 - DNA, 25 bp, Homo sapien
tgaaattgctgatctaaactgcgag

SEQ ID NO: 3712147 - DNA, 25 bp, Homo sapien
cagttgtctggactcagaggtattg

SEQ ID NO: 3712148 - DNA, 25 bp, Homo sapien
gactcagaggtattgagtgacaccc

SEQ ID NO: 3712149 - DNA, 25 bp, Homo sapien
actcagaggtattgagtgacaccca

SEQ ID NO: 3712150 - DNA, 25 bp, Homo sapien
ttgtctggactcagaggtattgagt

SEQ ID NO: 3712151 - DNA, 25 bp, Homo sapien
agccacaaggagaaggggtgaccag

SEQ ID NO: 3712152 - DNA, 25 bp, Homo sapien
ttgcttggggctgcatgcttcagca

SEQ ID NO: 3712153 - DNA, 25 bp, Homo sapien
ttggggctgcatgcttcagcactct

SEQ ID NO: 3712154 - DNA, 25 bp, Homo sapien
gcttggggctgcatgcttcagcact

SEQ ID NO: 3712155 - DNA, 25 bp, Homo sapien
tggggctgcatgcttcagcactctg

SEQ ID NO: 3712156 - DNA, 25 bp, Homo sapien
tacaacacacttcagtggccagaac

SEQ ID NO: 3712157 - DNA, 25 bp, Homo sapien
gaaagtcccaaagctacaacacact

SEQ ID NO: 3712158 - DNA, 25 bp, Homo sapien
ttctggaattccactccgaaagtcc

SEQ ID NO: 3712159 - DNA, 25 bp, Homo sapien
cactccgaaagtcccaaagctacaa

SEQ ID NO: 3712160 - DNA, 25 bp, Homo sapien
tggcaggcagtccattgagcacaca

SEQ ID NO: 3712161 - DNA, 25 bp, Homo sapien
gccacagtggccagccgaggatggc

SEQ ID NO: 3712162 - DNA, 25 bp, Homo sapien
cacactgatggagcacgtactgcat

SEQ ID NO: 3712163 - DNA, 25 bp, Homo sapien
taagcggtagtgtttctctgtggcc

SEQ ID NO: 3712164 - DNA, 25 bp, Homo sapien
tctgcgacaatcttgcctgaggaga

SEQ ID NO: 3712165 - DNA, 25 bp, Homo sapien
gccaggcctgaccactgtcgctgga

SEQ ID NO: 3712166 - DNA, 25 bp, Homo sapien
cagccttttagcaactgtgagggcg

SEQ ID NO: 3712167 - DNA, 25 bp, Homo sapien
atgtccgcacactggacggccaggc

SEQ ID NO: 3712168 - DNA, 25 bp, Homo sapien
gtgtctgcttttcacggtatcaaac

SEQ ID NO: 3712169 - DNA, 25 bp, Homo sapien
ctgagctgatgatgtgacttctaac

SEQ ID NO: 3712170 - DNA, 25 bp, Homo sapien
cggtatcaaacaggtctgagctgat

SEQ ID NO: 3712171 - DNA, 25 bp, Homo sapien
gctggttgcgccagagtctgaagta

SEQ ID NO: 3712172 - DNA, 25 bp, Homo sapien
gcggcccgcagcggtctgagagagt

SEQ ID NO: 3712173 - DNA, 25 bp, Homo sapien
cggcccgcagcggtctgagagagtg

SEQ ID NO: 3712174 - DNA, 25 bp, Homo sapien
ccgctcagggtcatcacgtagaaga

SEQ ID NO: 3712175 - DNA, 25 bp, Homo sapien
cgcagaagaggttgagtaccaggca

SEQ ID NO: 3712176 - DNA, 25 bp, Homo sapien
caccagagggatagcgctgatgaag

SEQ ID NO: 3712177 - DNA, 25 bp, Homo sapien
tggtcgcccttgacgtcggagaaga

SEQ ID NO: 3712178 - DNA, 25 bp, Homo sapien
tccaccgtgactccgcgtctagatt

SEQ ID NO: 3712179 - DNA, 25 bp, Homo sapien
ccaccgggcaaagcggcaagagaaa

SEQ ID NO: 3712180 - DNA, 25 bp, Homo sapien
ttccgtgtggatcccggcgcacgaa

SEQ ID NO: 3712181 - DNA, 25 bp, Homo sapien
aagacagccagacggcggccactgt

SEQ ID NO: 3712182 - DNA, 25 bp, Homo sapien
cagagcccttggtctgcccataaat

SEQ ID NO: 3712183 - DNA, 25 bp, Homo sapien
tggtctgcccataaatggcacccac

SEQ ID NO: 3712184 - DNA, 25 bp, Homo sapien
gtgtgggctaagaacaagcctgtcc

SEQ ID NO: 3712185 - DNA, 25 bp, Homo sapien
ggtgtgtgtgggctaagaacaagcc

SEQ ID NO: 3712186 - DNA, 25 bp, Homo sapien
agtggctttgcccaaatccctctcc

SEQ ID NO: 3712187 - DNA, 25 bp, Homo sapien
tgcagcctcattctctcccagtggc

SEQ ID NO: 3712188 - DNA, 25 bp, Homo sapien
ttgcccaaatccctctccgaagctg

SEQ ID NO: 3712189 - DNA, 25 bp, Homo sapien
tggcccccagtgcacactgcagcct

SEQ ID NO: 3712190 - DNA, 25 bp, Homo sapien
ctaaacttcctaccaggatgactct

SEQ ID NO: 3712191 - DNA, 25 bp, Homo sapien
aaacttcctaccaggatgactctgg

SEQ ID NO: 3712192 - DNA, 25 bp, Homo sapien
caggccatcaccattaagtctaaac

SEQ ID NO: 3712193 - DNA, 25 bp, Homo sapien
ctctgccaacgcttccagcaccgtc

SEQ ID NO: 3712194 - DNA, 25 bp, Homo sapien
cagagatcggaaaggacatgctaca

SEQ ID NO: 3712195 - DNA, 25 bp, Homo sapien
ccacgttattgattttgaagggcca

SEQ ID NO: 3712196 - DNA, 25 bp, Homo sapien
tgagggtttcctgacacttacacgg

SEQ ID NO: 3712197 - DNA, 25 bp, Homo sapien
taaagtgtgtcgagctgcatcaacc

SEQ ID NO: 3712198 - DNA, 25 bp, Homo sapien
aaatcagtgtgcaaatcgaaatttc

SEQ ID NO: 3712199 - DNA, 25 bp, Homo sapien
tccaggaatggtgggccaaatcagt

SEQ ID NO: 3712200 - DNA, 25 bp, Homo sapien
acaaaagagacatcccacgagatct

SEQ ID NO: 3712201 - DNA, 25 bp, Homo sapien
tgatcacaatgaccagtcctggcac

SEQ ID NO: 3712202 - DNA, 25 bp, Homo sapien
ggcaggcaacttactcacaaatggg

SEQ ID NO: 3712203 - DNA, 25 bp, Homo sapien
tccacgaggattcaagggctttgca

SEQ ID NO: 3712204 - DNA, 25 bp, Homo sapien
cacaaatgggctaccttacgagata

SEQ ID NO: 3712205 - DNA, 25 bp, Homo sapien
taatgcattgggactctagggtcag

SEQ ID NO: 3712206 - DNA, 25 bp, Homo sapien
cagagccctcttggcgcctaaggaa

SEQ ID NO: 3712207 - DNA, 25 bp, Homo sapien
caaatctgggctgttgtttatcctc

SEQ ID NO: 3712208 - DNA, 25 bp, Homo sapien
gttcttgatgtgctccaaatctggg

SEQ ID NO: 3712209 - DNA, 25 bp, Homo sapien
caggaaggaggtcaaatgctgccgc

SEQ ID NO: 3712210 - DNA, 25 bp, Homo sapien
gagtcacgacagctcttgcatccag

SEQ ID NO: 3712211 - DNA, 25 bp, Homo sapien
ctcactgtgagtcacgacagctctt

SEQ ID NO: 3712212 - DNA, 25 bp, Homo sapien
actgtgagtcacgacagctcttgca

SEQ ID NO: 3712213 - DNA, 25 bp, Homo sapien
cacgacagctcttgcatccaggagg

SEQ ID NO: 3712214 - DNA, 25 bp, Homo sapien
ccttcagacattcggattgtgtggg

SEQ ID NO: 3712215 - DNA, 25 bp, Homo sapien
tgacatgcaaatgctggggggcccc

SEQ ID NO: 3712216 - DNA, 25 bp, Homo sapien
gccccttcagacattcggattgtgt

SEQ ID NO: 3712217 - DNA, 25 bp, Homo sapien
gggccccttcagacattcggattgt

SEQ ID NO: 3712218 - DNA, 25 bp, Homo sapien
acagcatctggggaatgtggtccac

SEQ ID NO: 3712219 - DNA, 25 bp, Homo sapien
tctggggaatgtggtccacggccac

SEQ ID NO: 3712220 - DNA, 25 bp, Homo sapien
cagaggtggacagcatctggggaat

SEQ ID NO: 3712221 - DNA, 25 bp, Homo sapien
agtgtcttctccggtgaggcacagc

SEQ ID NO: 3712222 - DNA, 25 bp, Homo sapien
gatatcgctctaggcctaagcacag

SEQ ID NO: 3712223 - DNA, 25 bp, Homo sapien
taaggatatcgctctaggcctaagc

SEQ ID NO: 3712224 - DNA, 25 bp, Homo sapien
cgcctctgagtaaggatatcgctct

SEQ ID NO: 3712225 - DNA, 25 bp, Homo sapien
gctctaggcctaagcacaggctggg

SEQ ID NO: 3712226 - DNA, 25 bp, Homo sapien
gttagatctaagagaatatcagttg

SEQ ID NO: 3712227 - DNA, 25 bp, Homo sapien
agaatatcagttgggcagggtgtca

SEQ ID NO: 3712228 - DNA, 25 bp, Homo sapien
tctaaggaagctgccttggctgtta

SEQ ID NO: 3712229 - DNA, 25 bp, Homo sapien
ggaagctgccttggctgttagatct

SEQ ID NO: 3712230 - DNA, 25 bp, Homo sapien
tcctgctgggacacgcggatctggt

SEQ ID NO: 3712231 - DNA, 25 bp, Homo sapien
tagccagaaataatcgacaagtcat

SEQ ID NO: 3712232 - DNA, 25 bp, Homo sapien
gatctggtggctctccgagtaggcc

SEQ ID NO: 3712233 - DNA, 25 bp, Homo sapien
gagtaggccaggcttaccgtgagcc

SEQ ID NO: 3712234 - DNA, 25 bp, Homo sapien
ccaggtgtgagaaactcggctataa

SEQ ID NO: 3712235 - DNA, 25 bp, Homo sapien
ccgacgctgtggatgtctatttgca

SEQ ID NO: 3712236 - DNA, 25 bp, Homo sapien
tattatgaaacttggtgatcacccc

SEQ ID NO: 3712237 - DNA, 25 bp, Homo sapien
tgtttaaaagcatgccacagctcgc

SEQ ID NO: 3712238 - DNA, 25 bp, Homo sapien
ccatggctggtgcttaagaggcatc

SEQ ID NO: 3712239 - DNA, 25 bp, Homo sapien
tggatgcgtcaggagtaaaccactc

SEQ ID NO: 3712240 - DNA, 25 bp, Homo sapien
cctgactcgaaggtaagttccctga

SEQ ID NO: 3712241 - DNA, 25 bp, Homo sapien
gaatgatcctaaacccttgcgagtc

SEQ ID NO: 3712242 - DNA, 25 bp, Homo sapien
agaataaactcctaggccctatgtg

SEQ ID NO: 3712243 - DNA, 25 bp, Homo sapien
gcagccagggtaatctttgcacaca

SEQ ID NO: 3712244 - DNA, 25 bp, Homo sapien
gaggaggctccatcaatagtcggct

SEQ ID NO: 3712245 - DNA, 25 bp, Homo sapien
tgatctaaccctgcaatttctctgg

SEQ ID NO: 3712246 - DNA, 25 bp, Homo sapien
ttcaccatccaaccaatgacaggct

SEQ ID NO: 3712247 - DNA, 25 bp, Homo sapien
gtcttcgagcttgtgatatccatga

SEQ ID NO: 3712248 - DNA, 25 bp, Homo sapien
ctgggttcggtctttggctctggtt

SEQ ID NO: 3712249 - DNA, 25 bp, Homo sapien
tctccaagggatgtattataaaacc

SEQ ID NO: 3712250 - DNA, 25 bp, Homo sapien
tgtgaaaccggtgatgccaggctga

SEQ ID NO: 3712251 - DNA, 25 bp, Homo sapien
ctcagttttccaggcgttcccaggg

SEQ ID NO: 3712252 - DNA, 25 bp, Homo sapien
ttagcagcacgtgggaaccctagtg

SEQ ID NO: 3712253 - DNA, 25 bp, Homo sapien
taggcaatgtcccttagagctctgg

SEQ ID NO: 3712254 - DNA, 25 bp, Homo sapien
gagaacttctgattagctctcagtc

SEQ ID NO: 3712255 - DNA, 25 bp, Homo sapien
tatcaagaatctagtttcatctgag

SEQ ID NO: 3712256 - DNA, 25 bp, Homo sapien
ggtcagtgaatctgcttgcctttcc

SEQ ID NO: 3712257 - DNA, 25 bp, Homo sapien
cagctctatttatcttaggagttta

SEQ ID NO: 3712258 - DNA, 25 bp, Homo sapien
gggtggcctccgacactttgaaatg

SEQ ID NO: 3712259 - DNA, 25 bp, Homo sapien
catcaccagtgtgtcccaggtcagg

SEQ ID NO: 3712260 - DNA, 25 bp, Homo sapien
tgactctgaagtcccttgtgccaca

SEQ ID NO: 3712261 - DNA, 25 bp, Homo sapien
cagggcaccgtaggaagcagattat

SEQ ID NO: 3712262 - DNA, 25 bp, Homo sapien
tgtgctgacagctactccttcgtgt

SEQ ID NO: 3712263 - DNA, 25 bp, Homo sapien
gaccactggatcgtcgacacagact

SEQ ID NO: 3712264 - DNA, 25 bp, Homo sapien
cacgtatgccgtgcagtactcctgc

SEQ ID NO: 3712265 - DNA, 25 bp, Homo sapien
cagctactccttcgtgttttcccgg

SEQ ID NO: 3712266 - DNA, 25 bp, Homo sapien
tcaatacagggtgacactgttcttt

SEQ ID NO: 3712267 - DNA, 25 bp, Homo sapien
acttttatctcaatacagggtgaca

SEQ ID NO: 3712268 - DNA, 25 bp, Homo sapien
tttctctgtggcaaatcgctcacat

SEQ ID NO: 3712269 - DNA, 25 bp, Homo sapien
tctgtggcaaatcgctcacatacat

SEQ ID NO: 3712270 - DNA, 25 bp, Homo sapien
cagttttggatcaatgtgagaggta

SEQ ID NO: 3712271 - DNA, 25 bp, Homo sapien
aattattaagtatctctgtgcctca

SEQ ID NO: 3712272 - DNA, 25 bp, Homo sapien
taaagtagaggatgatagtgtgcag

SEQ ID NO: 3712273 - DNA, 25 bp, Homo sapien
tcagtgtactgattgtctggagaca

SEQ ID NO: 3712274 - DNA, 25 bp, Homo sapien
gtactggggcgtagcctcctttctc

SEQ ID NO: 3712275 - DNA, 25 bp, Homo sapien
caagatgaagtactggggcgtagcc

SEQ ID NO: 3712276 - DNA, 25 bp, Homo sapien
gacgtgtgcgcagacatggtgggca

SEQ ID NO: 3712277 - DNA, 25 bp, Homo sapien
cgaggaccctgccaagttcaagatg

SEQ ID NO: 3712278 - DNA, 25 bp, Homo sapien
gccaagggccgagtccgtcttttga

SEQ ID NO: 3712279 - DNA, 25 bp, Homo sapien
gagaccggccagatgagcgccacag

SEQ ID NO: 3712280 - DNA, 25 bp, Homo sapien
gagttctccgtggacgagaccggcc

SEQ ID NO: 3712281 - DNA, 25 bp, Homo sapien
tgcaggacaacatcgtcgcggagtt

SEQ ID NO: 3712282 - DNA, 25 bp, Homo sapien
tcgcgggtccgctctcgctctgtga

SEQ ID NO: 3712283 - DNA, 25 bp, Homo sapien
ggtcttcccgccaggttgactcgag

SEQ ID NO: 3712284 - DNA, 25 bp, Homo sapien
ggaggccaccctagaccgcagctgg

SEQ ID NO: 3712285 - DNA, 25 bp, Homo sapien
gctctgtgaggccacggtcttcccg

SEQ ID NO: 3712286 - DNA, 25 bp, Homo sapien
cctcttatttcaggtcgggctgcag

SEQ ID NO: 3712287 - DNA, 25 bp, Homo sapien
tagataaaggattggtctgagaacc

SEQ ID NO: 3712288 - DNA, 25 bp, Homo sapien
ggccatggagacacaatcgatattg

SEQ ID NO: 3712289 - DNA, 25 bp, Homo sapien
caaaatggcccaaattgatctcgaa

SEQ ID NO: 3712290 - DNA, 25 bp, Homo sapien
tcatgagggtaaggacacaaatgtc

SEQ ID NO: 3712291 - DNA, 25 bp, Homo sapien
tcatccagtggaagctcatctctca

SEQ ID NO: 3712292 - DNA, 25 bp, Homo sapien
caggtaacctctcaaatctcagtag

SEQ ID NO: 3712293 - DNA, 25 bp, Homo sapien
tagttctgtgagttatggtaaaacc

SEQ ID NO: 3712294 - DNA, 25 bp, Homo sapien
ctacctgaggcagagtgatgagaag

SEQ ID NO: 3712295 - DNA, 25 bp, Homo sapien
gcttgctttgctgcgtttgttcaga

SEQ ID NO: 3712296 - DNA, 25 bp, Homo sapien
gaaaggacgaccttcagagcactac

SEQ ID NO: 3712297 - DNA, 25 bp, Homo sapien
ttcatcctggtggaaattactgagg

SEQ ID NO: 3712298 - DNA, 25 bp, Homo sapien
gtgacatccagcaacctagaggcca

SEQ ID NO: 3712299 - DNA, 25 bp, Homo sapien
caggtatttctccacggcaacttgg

SEQ ID NO: 3712300 - DNA, 25 bp, Homo sapien
gagttttcttcgtgtgagcagccca

SEQ ID NO: 3712301 - DNA, 25 bp, Homo sapien
aaagtactccttggcaaactgaggg

SEQ ID NO: 3712302 - DNA, 25 bp, Homo sapien
ccacgatcggggttgccagcaggtt

SEQ ID NO: 3712303 - DNA, 25 bp, Homo sapien
tacccagtttgcttgtccatgaagt

SEQ ID NO: 3712304 - DNA, 25 bp, Homo sapien
ccatgatcacagcaagaacctcctt

SEQ ID NO: 3712305 - DNA, 25 bp, Homo sapien
gccagcaggttcttagtgacatacc

SEQ ID NO: 3712306 - DNA, 25 bp, Homo sapien
gatgaagccttaggatgatagacac

SEQ ID NO: 3712307 - DNA, 25 bp, Homo sapien
gaagccttaggatgatagacacaaa

SEQ ID NO: 3712308 - DNA, 25 bp, Homo sapien
ggcttcttcgggattcaatattgta

SEQ ID NO: 3712309 - DNA, 25 bp, Homo sapien
acatgtagctggtgtgatgaagcct

SEQ ID NO: 3712310 - DNA, 25 bp, Homo sapien
caatggagtatcgttcacagttcag

SEQ ID NO: 3712311 - DNA, 25 bp, Homo sapien
tgtccagcagtccaatggagtatcg

SEQ ID NO: 3712312 - DNA, 25 bp, Homo sapien
taaccgtgtagagcgctttgtgaaa

SEQ ID NO: 3712313 - DNA, 25 bp, Homo sapien
gaaactgtcgctcaacatctgtgag

SEQ ID NO: 3712314 - DNA, 25 bp, Homo sapien
tgattggccattcatcgtagaattc

SEQ ID NO: 3712315 - DNA, 25 bp, Homo sapien
gccatcaggtgtctttggaccttta

SEQ ID NO: 3712316 - DNA, 25 bp, Homo sapien
ttataaggctctacttctccaagct

SEQ ID NO: 3712317 - DNA, 25 bp, Homo sapien
agcttgattggccattcatcgtaga

SEQ ID NO: 3712318 - DNA, 25 bp, Homo sapien
tgacaccatgcacagatggcatcaa

SEQ ID NO: 3712319 - DNA, 25 bp, Homo sapien
ctgacaccatgcacagatggcatca

SEQ ID NO: 3712320 - DNA, 25 bp, Homo sapien
catcaaggaagacatttgcacgtac

SEQ ID NO: 3712321 - DNA, 25 bp, Homo sapien
cagatggcatcaaggaagacatttg

SEQ ID NO: 3712322 - DNA, 25 bp, Homo sapien
gatctcttcttttccatgtaaaatg

SEQ ID NO: 3712323 - DNA, 25 bp, Homo sapien
caatgattttataaaagttgacttc

SEQ ID NO: 3712324 - DNA, 25 bp, Homo sapien
tttccatgtaaaatgtaatcaatga

SEQ ID NO: 3712325 - DNA, 25 bp, Homo sapien
ccatgtaaaatgtaatcaatgattt

SEQ ID NO: 3712326 - DNA, 25 bp, Homo sapien
gcaacccactaatgagtgtccagtg

SEQ ID NO: 3712327 - DNA, 25 bp, Homo sapien
agcaacatatgttggcaacccacta

SEQ ID NO: 3712328 - DNA, 25 bp, Homo sapien
aatgagtgtccagtggtctgcagga

SEQ ID NO: 3712329 - DNA, 25 bp, Homo sapien
tgttggcaacccactaatgagtgtc

SEQ ID NO: 3712330 - DNA, 25 bp, Homo sapien
agtattcatccgcaggggcattcat

SEQ ID NO: 3712331 - DNA, 25 bp, Homo sapien
tattcatccgcaggggcattcatca

SEQ ID NO: 3712332 - DNA, 25 bp, Homo sapien
tgaagtattcatccgcaggggcatt

SEQ ID NO: 3712333 - DNA, 25 bp, Homo sapien
atgtgaagtattcatccgcaggggc

SEQ ID NO: 3712334 - DNA, 25 bp, Homo sapien
ctttcttgttgacaataggcaggga

SEQ ID NO: 3712335 - DNA, 25 bp, Homo sapien
cattcttaatgacccaaccagtttc

SEQ ID NO: 3712336 - DNA, 25 bp, Homo sapien
attcttaatgacccaaccagtttcg

SEQ ID NO: 3712337 - DNA, 25 bp, Homo sapien
cttctttcttgttgacaataggcag

SEQ ID NO: 3712338 - DNA, 25 bp, Homo sapien
atgtattcatcatgctcatcgaaag

SEQ ID NO: 3712339 - DNA, 25 bp, Homo sapien
tgtattcatcatgctcatcgaaagg

SEQ ID NO: 3712340 - DNA, 25 bp, Homo sapien
ttcatcatgctcatcgaaaggtttt

SEQ ID NO: 3712341 - DNA, 25 bp, Homo sapien
tattcatcatgctcatcgaaaggtt

SEQ ID NO: 3712342 - DNA, 25 bp, Homo sapien
gaaatggataaaaggtgattctaat

SEQ ID NO: 3712343 - DNA, 25 bp, Homo sapien
atggataaaaggtgattctaattct

SEQ ID NO: 3712344 - DNA, 25 bp, Homo sapien
ctgaaatggataaaaggtgattcta

SEQ ID NO: 3712345 - DNA, 25 bp, Homo sapien
aatggataaaaggtgattctaattc

SEQ ID NO: 3712346 - DNA, 25 bp, Homo sapien
cagtatttaaaagagaccatccaag

SEQ ID NO: 3712347 - DNA, 25 bp, Homo sapien
gaccatccaagaaattgtgtgagag

SEQ ID NO: 3712348 - DNA, 25 bp, Homo sapien
ttaaaagagaccatccaagaaattg

SEQ ID NO: 3712349 - DNA, 25 bp, Homo sapien
cttatcgtaggtgtcagtatttaaa

SEQ ID NO: 3712350 - DNA, 25 bp, Homo sapien
ctttggtttggttcatgagcatttc

SEQ ID NO: 3712351 - DNA, 25 bp, Homo sapien
ttcttcacagtcgtcaattacatca

SEQ ID NO: 3712352 - DNA, 25 bp, Homo sapien
ttttcttcacagtcgtcaattacat

SEQ ID NO: 3712353 - DNA, 25 bp, Homo sapien
tcttcacagtcgtcaattacatcaa

SEQ ID NO: 3712354 - DNA, 25 bp, Homo sapien
ttcacagtcgtcaattacatcaaca

SEQ ID NO: 3712355 - DNA, 25 bp, Homo sapien
tacagttctgctgagcgtgggtctg

SEQ ID NO: 3712356 - DNA, 25 bp, Homo sapien
tatttcaaaaaacagtcgtattcca

SEQ ID NO: 3712357 - DNA, 25 bp, Homo sapien
cacatttaatcaatccgtgctctgt

SEQ ID NO: 3712358 - DNA, 25 bp, Homo sapien
gaagtcactgaagcggaattcgtac

SEQ ID NO: 3712359 - DNA, 25 bp, Homo sapien
taagtgacagctcggtaccctttcc

SEQ ID NO: 3712360 - DNA, 25 bp, Homo sapien
cgttgaacccatgccgccaattgtg

SEQ ID NO: 3712361 - DNA, 25 bp, Homo sapien
cacagtgtacatccatctggtaaga

SEQ ID NO: 3712362 - DNA, 25 bp, Homo sapien
tcagcaaagtaaacatggtctgccc

SEQ ID NO: 3712363 - DNA, 25 bp, Homo sapien
ttcatctggtacaaattattggtgc

SEQ ID NO: 3712364 - DNA, 25 bp, Homo sapien
tggcaaaggcttcgagatctgtgta

SEQ ID NO: 3712365 - DNA, 25 bp, Homo sapien
ggcttcgagatctgtgtagtacttc

SEQ ID NO: 3712366 - DNA, 25 bp, Homo sapien
cgagatctgtgtagtacttctttaa

SEQ ID NO: 3712367 - DNA, 25 bp, Homo sapien
tccaaaatagaagaaccatgaagtc

SEQ ID NO: 3712368 - DNA, 25 bp, Homo sapien
tcatcctgcaacagagtcttactgt

SEQ ID NO: 3712369 - DNA, 25 bp, Homo sapien
gaagtcttgctaatggagacgtgga

SEQ ID NO: 3712370 - DNA, 25 bp, Homo sapien
gaaccatgaagtcttgctaatggag

SEQ ID NO: 3712371 - DNA, 25 bp, Homo sapien
actgccgcttatttaggttctggaa

SEQ ID NO: 3712372 - DNA, 25 bp, Homo sapien
gttgctattattgcgacctcgaaca

SEQ ID NO: 3712373 - DNA, 25 bp, Homo sapien
gcgacctcgaacaaatgaataactg

SEQ ID NO: 3712374 - DNA, 25 bp, Homo sapien
ttgaaatataaagccaggtcagttg

SEQ ID NO: 3712375 - DNA, 25 bp, Homo sapien
tcttccgtttgcatttgttcacagg

SEQ ID NO: 3712376 - DNA, 25 bp, Homo sapien
cagttacatatttgatggcttcttc

SEQ ID NO: 3712377 - DNA, 25 bp, Homo sapien
tcttggttggatcaacagttacata

SEQ ID NO: 3712378 - DNA, 25 bp, Homo sapien
ttcacaggcatcaacaattttttga

SEQ ID NO: 3712379 - DNA, 25 bp, Homo sapien
cctcccagggcttggtaatagcaga

SEQ ID NO: 3712380 - DNA, 25 bp, Homo sapien
cccagggcttggtaatagcagacaa

SEQ ID NO: 3712381 - DNA, 25 bp, Homo sapien
tggtaatagcagacaagtcacatgc

SEQ ID NO: 3712382 - DNA, 25 bp, Homo sapien
gacaagtcacatgccgtcatcatca

SEQ ID NO: 3712383 - DNA, 25 bp, Homo sapien
tctccagatctccttgttcccaaaa

SEQ ID NO: 3712384 - DNA, 25 bp, Homo sapien
atgggttgttgctgcaacactgttc

SEQ ID NO: 3712385 - DNA, 25 bp, Homo sapien
gggttgttgctgcaacactgttctc

SEQ ID NO: 3712386 - DNA, 25 bp, Homo sapien
attcatttgcaaccataagtgctac

SEQ ID NO: 3712387 - DNA, 25 bp, Homo sapien
tccaacttgaagtttaggtaattca

SEQ ID NO: 3712388 - DNA, 25 bp, Homo sapien
caataaatccaacttgaagtttagg

SEQ ID NO: 3712389 - DNA, 25 bp, Homo sapien
tgaagtttaggtaattcatctcttt

SEQ ID NO: 3712390 - DNA, 25 bp, Homo sapien
tcaataaatccaacttgaagtttag

SEQ ID NO: 3712391 - DNA, 25 bp, Homo sapien
catactcatcagctagtgatttcca

SEQ ID NO: 3712392 - DNA, 25 bp, Homo sapien
tgaagaccactcagcataggtgtga

SEQ ID NO: 3712393 - DNA, 25 bp, Homo sapien
tttctttgtgaaaccgtgagaactc

SEQ ID NO: 3712394 - DNA, 25 bp, Homo sapien
gcatcatactcatcagctagtgatt

SEQ ID NO: 3712395 - DNA, 25 bp, Homo sapien
gcttttttgcctcctcttcaatgac

SEQ ID NO: 3712396 - DNA, 25 bp, Homo sapien
tcttgcttttttgcctcctcttcaa

SEQ ID NO: 3712397 - DNA, 25 bp, Homo sapien
cttcttgcttttttgcctcctcttc

SEQ ID NO: 3712398 - DNA, 25 bp, Homo sapien
ctttttcggctcctccttcttgctt

SEQ ID NO: 3712399 - DNA, 25 bp, Homo sapien
tggaccggtcaattcgatctggagt

SEQ ID NO: 3712400 - DNA, 25 bp, Homo sapien
taagatgttgtctgtggcagggcca

SEQ ID NO: 3712401 - DNA, 25 bp, Homo sapien
tcaactggaccggtcaattcgatct

SEQ ID NO: 3712402 - DNA, 25 bp, Homo sapien
tcgatctggagttatacataagatg

SEQ ID NO: 3712403 - DNA, 25 bp, Homo sapien
ttttggactttttgtcatcaccacc

SEQ ID NO: 3712404 - DNA, 25 bp, Homo sapien
ttacaacattaaacatgttttggac

SEQ ID NO: 3712405 - DNA, 25 bp, Homo sapien
aacatgttttggactttttgtcatc

SEQ ID NO: 3712406 - DNA, 25 bp, Homo sapien
tcaccacctcctgaatcttcagcag

SEQ ID NO: 3712407 - DNA, 25 bp, Homo sapien
ttcatagtcacagggtagtttttct

SEQ ID NO: 3712408 - DNA, 25 bp, Homo sapien
tctgaagatcctgttacgtgatgat

SEQ ID NO: 3712409 - DNA, 25 bp, Homo sapien
ggatttttgggctagcaatatatat

SEQ ID NO: 3712410 - DNA, 25 bp, Homo sapien
tatttgaagtttagaccagttagat

SEQ ID NO: 3712411 - DNA, 25 bp, Homo sapien
tgtaaaggaaccatctaggaagtaa

SEQ ID NO: 3712412 - DNA, 25 bp, Homo sapien
taaataacatttaaacacggaatga

SEQ ID NO: 3712413 - DNA, 25 bp, Homo sapien
tattatatgtgaggcactgagctgg

SEQ ID NO: 3712414 - DNA, 25 bp, Homo sapien
taaatcagtgttgggtttatcagtg

SEQ ID NO: 3712415 - DNA, 25 bp, Homo sapien
aagtttttatctgcaagttacagct

SEQ ID NO: 3712416 - DNA, 25 bp, Homo sapien
tttttatctgcaagttacagcttgt

SEQ ID NO: 3712417 - DNA, 25 bp, Homo sapien
ctccgctccttaatgtgaaacttca

SEQ ID NO: 3712418 - DNA, 25 bp, Homo sapien
gtttttatctgcaagttacagcttg

SEQ ID NO: 3712419 - DNA, 25 bp, Homo sapien
gatatgatctctgcctaaaagaacg

SEQ ID NO: 3712420 - DNA, 25 bp, Homo sapien
tttaatgagggagataagactaagg

SEQ ID NO: 3712421 - DNA, 25 bp, Homo sapien
ctggttatagctacaatgattgcac

SEQ ID NO: 3712422 - DNA, 25 bp, Homo sapien
cagtgaagtgcttatctgtaagact

SEQ ID NO: 3712423 - DNA, 25 bp, Homo sapien
gaagcatgattgttggagtatacta

SEQ ID NO: 3712424 - DNA, 25 bp, Homo sapien
aagtggtagagctaaaatgcaaatg

SEQ ID NO: 3712425 - DNA, 25 bp, Homo sapien
gattaatttgcccagtactatacaa

SEQ ID NO: 3712426 - DNA, 25 bp, Homo sapien
cctctgtgagtaccaaggaagtagg

SEQ ID NO: 3712427 - DNA, 25 bp, Homo sapien
gacgtgtgtctaccattatagtacc

SEQ ID NO: 3712428 - DNA, 25 bp, Homo sapien
taccatagagaatacttgcactgcc

SEQ ID NO: 3712429 - DNA, 25 bp, Homo sapien
gcataacatcccctactgtcagcat

SEQ ID NO: 3712430 - DNA, 25 bp, Homo sapien
tcagtgaacctacgttgatacatca

SEQ ID NO: 3712431 - DNA, 25 bp, Homo sapien
tcagttaggattaggtccagctgca

SEQ ID NO: 3712432 - DNA, 25 bp, Homo sapien
ttcttatacataaaagttcaagtcg

SEQ ID NO: 3712433 - DNA, 25 bp, Homo sapien
caagtcgatggtcataaagtcagaa

SEQ ID NO: 3712434 - DNA, 25 bp, Homo sapien
caaggacagagaagactccccgaaa

SEQ ID NO: 3712435 - DNA, 25 bp, Homo sapien
gcactgtatgctatacctaaaatgt

SEQ ID NO: 3712436 - DNA, 25 bp, Homo sapien
cccaagcactgtatgctatacctaa

SEQ ID NO: 3712437 - DNA, 25 bp, Homo sapien
ctgtatgctatacctaaaatgtagt

SEQ ID NO: 3712438 - DNA, 25 bp, Homo sapien
tcacccaagcactgtatgctatacc

SEQ ID NO: 3712439 - DNA, 25 bp, Homo sapien
cagcggctctctcaggccgtgggtc

SEQ ID NO: 3712440 - DNA, 25 bp, Homo sapien
gtgctgcagcggctctctcaggccg

SEQ ID NO: 3712441 - DNA, 25 bp, Homo sapien
ctctctcaggccgtgggtcgtcgct

SEQ ID NO: 3712442 - DNA, 25 bp, Homo sapien
ctctcaggccgtgggtcgtcgctgc

SEQ ID NO: 3712443 - DNA, 25 bp, Homo sapien
tattttcaaatgagaggcgtgggct

SEQ ID NO: 3712444 - DNA, 25 bp, Homo sapien
ttctggctgtagcacaaggtcggcg

SEQ ID NO: 3712445 - DNA, 25 bp, Homo sapien
gatctgaagcgctgatgagctgctc

SEQ ID NO: 3712446 - DNA, 25 bp, Homo sapien
gacttggcgaaagctggaagcctct

SEQ ID NO: 3712447 - DNA, 25 bp, Homo sapien
ttccaaaccaccatcgctaaaggca

SEQ ID NO: 3712448 - DNA, 25 bp, Homo sapien
atgcatctgagacagcgtcataacc

SEQ ID NO: 3712449 - DNA, 25 bp, Homo sapien
tctgagacagcgtcataacctctgc

SEQ ID NO: 3712450 - DNA, 25 bp, Homo sapien
gcacagtcctgagggaaatgaatca

SEQ ID NO: 3712451 - DNA, 25 bp, Homo sapien
gctgcttcagcgtcttacccacgta

SEQ ID NO: 3712452 - DNA, 25 bp, Homo sapien
gcttcagcgtcttacccacgtattt

SEQ ID NO: 3712453 - DNA, 25 bp, Homo sapien
cctgctgcttcagcgtcttacccac

SEQ ID NO: 3712454 - DNA, 25 bp, Homo sapien
cccaaggatgctctattgaaattat

SEQ ID NO: 3712455 - DNA, 25 bp, Homo sapien
ctcccatgatggtaacttcaaaagc

SEQ ID NO: 3712456 - DNA, 25 bp, Homo sapien
atttaccccatggctatcaactccc

SEQ ID NO: 3712457 - DNA, 25 bp, Homo sapien
caactcccatgatggtaacttcaaa

SEQ ID NO: 3712458 - DNA, 25 bp, Homo sapien
gctatcaactcccatgatggtaact

SEQ ID NO: 3712459 - DNA, 25 bp, Homo sapien
ctgtgtctgcaaataagcctttaag

SEQ ID NO: 3712460 - DNA, 25 bp, Homo sapien
gctgagctgtgtctgcaaataagcc

SEQ ID NO: 3712461 - DNA, 25 bp, Homo sapien
tgtgctgagctgtgtctgcaaataa

SEQ ID NO: 3712462 - DNA, 25 bp, Homo sapien
gagctgtgtctgcaaataagccttt

SEQ ID NO: 3712463 - DNA, 25 bp, Homo sapien
tgatgcctcgcatcttgtcctgaat

SEQ ID NO: 3712464 - DNA, 25 bp, Homo sapien
tgcttaggctgggttactccaagtt

SEQ ID NO: 3712465 - DNA, 25 bp, Homo sapien
tgagtgcttaggctgggttactcca

SEQ ID NO: 3712466 - DNA, 25 bp, Homo sapien
gtctgagtgtgatgcctcgcatctt

SEQ ID NO: 3712467 - DNA, 25 bp, Homo sapien
tctccttgggatggtgtgacctgct

SEQ ID NO: 3712468 - DNA, 25 bp, Homo sapien
aggacatcagtgctctcataccagt

SEQ ID NO: 3712469 - DNA, 25 bp, Homo sapien
gattactatggttacatctgcccca

SEQ ID NO: 3712470 - DNA, 25 bp, Homo sapien
tgctgtttagtaaggacatcagtgc

SEQ ID NO: 3712471 - DNA, 25 bp, Homo sapien
gtagcttggtggttggtttccacca

SEQ ID NO: 3712472 - DNA, 25 bp, Homo sapien
ctcgctgtacctgggacttggtctc

SEQ ID NO: 3712473 - DNA, 25 bp, Homo sapien
atcctcattcttacaacactcgctg

SEQ ID NO: 3712474 - DNA, 25 bp, Homo sapien
agctgccaggcgtttagggtagctt

SEQ ID NO: 3712475 - DNA, 25 bp, Homo sapien
gtttgggtgagagtaggagcacgca

SEQ ID NO: 3712476 - DNA, 25 bp, Homo sapien
tttgggtgagagtaggagcacgcat

SEQ ID NO: 3712477 - DNA, 25 bp, Homo sapien
agtttgggtgagagtaggagcacgc

SEQ ID NO: 3712478 - DNA, 25 bp, Homo sapien
cagtttgggtgagagtaggagcacg

SEQ ID NO: 3712479 - DNA, 25 bp, Homo sapien
tctaagaacaggtcacataggagtc

SEQ ID NO: 3712480 - DNA, 25 bp, Homo sapien
ctggaggagagagccgacttgcatc

SEQ ID NO: 3712481 - DNA, 25 bp, Homo sapien
tgcagctgattcgtgagcttctcct

SEQ ID NO: 3712482 - DNA, 25 bp, Homo sapien
gaaaatatccccaaccatgaacagg

SEQ ID NO: 3712483 - DNA, 25 bp, Homo sapien
ttggtacaagtacacacggcagggc

SEQ ID NO: 3712484 - DNA, 25 bp, Homo sapien
tgcgtggaatggatctggcattctc

SEQ ID NO: 3712485 - DNA, 25 bp, Homo sapien
cccctcagtcagcaaaagcgcagat

SEQ ID NO: 3712486 - DNA, 25 bp, Homo sapien
gataacatcaggaggaacggtgcgt

SEQ ID NO: 3712487 - DNA, 25 bp, Homo sapien
aagagctgcagcgatggcgtgaata

SEQ ID NO: 3712488 - DNA, 25 bp, Homo sapien
gcgtgaataaaaaactcccttctga

SEQ ID NO: 3712489 - DNA, 25 bp, Homo sapien
tgcagcgatggcgtgaataaaaaac

SEQ ID NO: 3712490 - DNA, 25 bp, Homo sapien
cgatggcgtgaataaaaaactccct

SEQ ID NO: 3712491 - DNA, 25 bp, Homo sapien
ctagaaggcttatccaaatatatgc

SEQ ID NO: 3712492 - DNA, 25 bp, Homo sapien
tagaaggcttatccaaatatatgcc

SEQ ID NO: 3712493 - DNA, 25 bp, Homo sapien
agaaggcttatccaaatatatgcca

SEQ ID NO: 3712494 - DNA, 25 bp, Homo sapien
atgttccataggaactcggagcatg

SEQ ID NO: 3712495 - DNA, 25 bp, Homo sapien
aactcggagcatggggcacgggcat

SEQ ID NO: 3712496 - DNA, 25 bp, Homo sapien
gttccataggaactcggagcatggg

SEQ ID NO: 3712497 - DNA, 25 bp, Homo sapien
tctgaaacctgaactgcttttagaa

SEQ ID NO: 3712498 - DNA, 25 bp, Homo sapien
gaatagaaaaaggtagcaattgctt

SEQ ID NO: 3712499 - DNA, 25 bp, Homo sapien
tagcaattgctttaaaggtaaagga

SEQ ID NO: 3712500 - DNA, 25 bp, Homo sapien
ctaatataaggaggaatagaaaaag

SEQ ID NO: 3712501 - DNA, 25 bp, Homo sapien
tgctttaaaggtaaaggaggccatg

SEQ ID NO: 3712502 - DNA, 25 bp, Homo sapien
aacacccttggctgataggtttggc

SEQ ID NO: 3712503 - DNA, 25 bp, Homo sapien
ttggcttgagtggtcattgaagact

SEQ ID NO: 3712504 - DNA, 25 bp, Homo sapien
aggtttggcttgagtggtcattgaa

SEQ ID NO: 3712505 - DNA, 25 bp, Homo sapien
tgagtggtcattgaagactgctaaa

SEQ ID NO: 3712506 - DNA, 25 bp, Homo sapien
gttttacaaaacgtggtgccagtca

SEQ ID NO: 3712507 - DNA, 25 bp, Homo sapien
caaatgtgaagtcagcgtgggacac

SEQ ID NO: 3712508 - DNA, 25 bp, Homo sapien
gagtaacacaggagtcttcagcaca

SEQ ID NO: 3712509 - DNA, 25 bp, Homo sapien
taaagctgagattatcggcaaaccc

SEQ ID NO: 3712510 - DNA, 25 bp, Homo sapien
taggactcagcgcttcatttgcaaa

SEQ ID NO: 3712511 - DNA, 25 bp, Homo sapien
gcaatgcggccactctttcaaaggg

SEQ ID NO: 3712512 - DNA, 25 bp, Homo sapien
taaggctgcccaaataccgggtgag

SEQ ID NO: 3712513 - DNA, 25 bp, Homo sapien
taaccaagcagggatagaacgtgca

SEQ ID NO: 3712514 - DNA, 25 bp, Homo sapien
tgaaaaatggcccaaggaccaggga

SEQ ID NO: 3712515 - DNA, 25 bp, Homo sapien
ctcatattccaagttgccagaagaa

SEQ ID NO: 3712516 - DNA, 25 bp, Homo sapien
ggcccaaggaccagggacttctcat

SEQ ID NO: 3712517 - DNA, 25 bp, Homo sapien
tctcatattccaagttgccagaaga

SEQ ID NO: 3712518 - DNA, 25 bp, Homo sapien
caaggtaagctaacacccaaaggct

SEQ ID NO: 3712519 - DNA, 25 bp, Homo sapien
tttcattgcattcagtataggcagc

SEQ ID NO: 3712520 - DNA, 25 bp, Homo sapien
tgcattcagtataggcagcatcagc

SEQ ID NO: 3712521 - DNA, 25 bp, Homo sapien
aaacaagaagactgctcagcttgac

SEQ ID NO: 3712522 - DNA, 25 bp, Homo sapien
cacagctttggcaattgtgtctctt

SEQ ID NO: 3712523 - DNA, 25 bp, Homo sapien
tcaaagctgtatgatttccatcaca

SEQ ID NO: 3712524 - DNA, 25 bp, Homo sapien
gctttggcaattgtgtctcttctca

SEQ ID NO: 3712525 - DNA, 25 bp, Homo sapien
tgtatgatttccatcacagctttgg

SEQ ID NO: 3712526 - DNA, 25 bp, Homo sapien
taatgtcatggatttgtacccaagt

SEQ ID NO: 3712527 - DNA, 25 bp, Homo sapien
taaactatcaatcctagagtggtgt

SEQ ID NO: 3712528 - DNA, 25 bp, Homo sapien
gccagtactaatgaacagtgacaca

SEQ ID NO: 3712529 - DNA, 25 bp, Homo sapien
tacccaagtaattcacgaggctctg

SEQ ID NO: 3712530 - DNA, 25 bp, Homo sapien
aatgagtgggagttgtatacagaaa

SEQ ID NO: 3712531 - DNA, 25 bp, Homo sapien
gcagataatctatgcagcatttttt

SEQ ID NO: 3712532 - DNA, 25 bp, Homo sapien
gacagattgtcaatcttggctgctt

SEQ ID NO: 3712533 - DNA, 25 bp, Homo sapien
gctacagtgttagttatgcagataa

SEQ ID NO: 3712534 - DNA, 25 bp, Homo sapien
tgatcacatcaaaggagttcgatgt

SEQ ID NO: 3712535 - DNA, 25 bp, Homo sapien
atcaaaggagttcgatgtgaataac

SEQ ID NO: 3712536 - DNA, 25 bp, Homo sapien
tcactgatcacatcaaaggagttcg

SEQ ID NO: 3712537 - DNA, 25 bp, Homo sapien
cacatcaaaggagttcgatgtgaat

SEQ ID NO: 3712538 - DNA, 25 bp, Homo sapien
atgactttagtccccggaaagtatg

SEQ ID NO: 3712539 - DNA, 25 bp, Homo sapien
ttgaaattgacttgatgttgttgtt

SEQ ID NO: 3712540 - DNA, 25 bp, Homo sapien
agtgacaaccgcgtggacacactgg

SEQ ID NO: 3712541 - DNA, 25 bp, Homo sapien
cactggaaatcaggctcagtccaag

SEQ ID NO: 3712542 - DNA, 25 bp, Homo sapien
tgtaaaatatatctggctattagct

SEQ ID NO: 3712543 - DNA, 25 bp, Homo sapien
tccctgctgcatcctagggcctaga

SEQ ID NO: 3712544 - DNA, 25 bp, Homo sapien
tgttagctaaagatacaagagacct

SEQ ID NO: 3712545 - DNA, 25 bp, Homo sapien
ggcaatgccgtatcagtcaacctaa

SEQ ID NO: 3712546 - DNA, 25 bp, Homo sapien
aaacagcctaacattggcaatgccg

SEQ ID NO: 3712547 - DNA, 25 bp, Homo sapien
taagatgaaccatatggcattgcca

SEQ ID NO: 3712548 - DNA, 25 bp, Homo sapien
ttctctctaaggcagaccagactgg

SEQ ID NO: 3712549 - DNA, 25 bp, Homo sapien
tgctgctaagaaagcatcgcccaca

SEQ ID NO: 3712550 - DNA, 25 bp, Homo sapien
tgtttcagtgccaccgggctctgct

SEQ ID NO: 3712551 - DNA, 25 bp, Homo sapien
gaaaacctccgattgtgactgtgga

SEQ ID NO: 3712552 - DNA, 25 bp, Homo sapien
catttcctgccctttggtgttttca

SEQ ID NO: 3712553 - DNA, 25 bp, Homo sapien
tttcctgccctttggtgttttcatc

SEQ ID NO: 3712554 - DNA, 25 bp, Homo sapien
gccctttggtgttttcatcatttac

SEQ ID NO: 3712555 - DNA, 25 bp, Homo sapien
ctgccctttggtgttttcatcattt

SEQ ID NO: 3712556 - DNA, 25 bp, Homo sapien
aaacaactgagatattgcgcagctg

SEQ ID NO: 3712557 - DNA, 25 bp, Homo sapien
caagtgttctcaaaggcagacggcc

SEQ ID NO: 3712558 - DNA, 25 bp, Homo sapien
tgcgcagctgaatgtctagttacct

SEQ ID NO: 3712559 - DNA, 25 bp, Homo sapien
gacggccattccttcttcacagaaa

SEQ ID NO: 3712560 - DNA, 25 bp, Homo sapien
agcttcacagagtaatgatataata

SEQ ID NO: 3712561 - DNA, 25 bp, Homo sapien
cagcttcacagagtaatgatataat

SEQ ID NO: 3712562 - DNA, 25 bp, Homo sapien
cagcggagggctgctgagggcaccg

SEQ ID NO: 3712563 - DNA, 25 bp, Homo sapien
gcggagggctgctgagggcaccggg

SEQ ID NO: 3712564 - DNA, 25 bp, Homo sapien
gcagcggagggctgctgagggcacc

SEQ ID NO: 3712565 - DNA, 25 bp, Homo sapien
ctgcagcggagggctgctgagggca

SEQ ID NO: 3712566 - DNA, 25 bp, Homo sapien
agccaccgctgtggttctttgcgcc

SEQ ID NO: 3712567 - DNA, 25 bp, Homo sapien
caccgctgtggttctttgcgccagc

SEQ ID NO: 3712568 - DNA, 25 bp, Homo sapien
ctgttgcctccacaaatcatcatgg

SEQ ID NO: 3712569 - DNA, 25 bp, Homo sapien
gttgcctccacaaatcatcatgggc

SEQ ID NO: 3712570 - DNA, 25 bp, Homo sapien
aaatcctctgtctgcgaaaaataca

SEQ ID NO: 3712571 - DNA, 25 bp, Homo sapien
gggcagagaacgacttaggaaagca

SEQ ID NO: 3712572 - DNA, 25 bp, Homo sapien
tggagttcagacagcttccctaagt

SEQ ID NO: 3712573 - DNA, 25 bp, Homo sapien
gcttccagacatccaaggctaggga

SEQ ID NO: 3712574 - DNA, 25 bp, Homo sapien
gaaaatatcttttgggagtgtctgg

SEQ ID NO: 3712575 - DNA, 25 bp, Homo sapien
ttgaaaatatcttttgggagtgtct

SEQ ID NO: 3712576 - DNA, 25 bp, Homo sapien
tgaaaatatcttttgggagtgtctg

SEQ ID NO: 3712577 - DNA, 25 bp, Homo sapien
gattgaccaacccaaggatgtaacc

SEQ ID NO: 3712578 - DNA, 25 bp, Homo sapien
tgcaaagatctttcactcggaggct

SEQ ID NO: 3712579 - DNA, 25 bp, Homo sapien
gaatgcctgggtgccatgtattcag

SEQ ID NO: 3712580 - DNA, 25 bp, Homo sapien
tcctggacctcatgagaaaaaaggg

SEQ ID NO: 3712581 - DNA, 25 bp, Homo sapien
tatatacccaaattattccaagcgt

SEQ ID NO: 3712582 - DNA, 25 bp, Homo sapien
cagttgtactaggagcacattttag

SEQ ID NO: 3712583 - DNA, 25 bp, Homo sapien
ttccaagcgtacttaacattttcca

SEQ ID NO: 3712584 - DNA, 25 bp, Homo sapien
cataaggtctggtggctaccctatt

SEQ ID NO: 3712585 - DNA, 25 bp, Homo sapien
ccacgcaggaaagagttctacatca

SEQ ID NO: 3712586 - DNA, 25 bp, Homo sapien
atgtgcagaatgaccttacccggcg

SEQ ID NO: 3712587 - DNA, 25 bp, Homo sapien
catgcacacttgaagactacccagt

SEQ ID NO: 3712588 - DNA, 25 bp, Homo sapien
cactttgggctcagagagttagcac

SEQ ID NO: 3712589 - DNA, 25 bp, Homo sapien
tagccatttcagtttacagtcacaa

SEQ ID NO: 3712590 - DNA, 25 bp, Homo sapien
acagtcacaattaaatgaattaccc

SEQ ID NO: 3712591 - DNA, 25 bp, Homo sapien
cacaattaaatgaattacccctcag

SEQ ID NO: 3712592 - DNA, 25 bp, Homo sapien
caattaaatgaattacccctcaggt

SEQ ID NO: 3712593 - DNA, 25 bp, Homo sapien
ttgattttgcgcttcttgtattctg

SEQ ID NO: 3712594 - DNA, 25 bp, Homo sapien
gggccttcgcagtagatgtcttcaa

SEQ ID NO: 3712595 - DNA, 25 bp, Homo sapien
caacagttgcattggtgtggccaag

SEQ ID NO: 3712596 - DNA, 25 bp, Homo sapien
gatgcaatcaaaatccttcgaggag

SEQ ID NO: 3712597 - DNA, 25 bp, Homo sapien
tgattgataaggcaggtcttgagac

SEQ ID NO: 3712598 - DNA, 25 bp, Homo sapien
aaggcaggtcttgagactttgcaaa

SEQ ID NO: 3712599 - DNA, 25 bp, Homo sapien
ctatggacaatgattgataaggcag

SEQ ID NO: 3712600 - DNA, 25 bp, Homo sapien
tatggacaatgattgataaggcagg

SEQ ID NO: 3712601 - DNA, 25 bp, Homo sapien
catggtcccattcaaggaaaatgca

SEQ ID NO: 3712602 - DNA, 25 bp, Homo sapien
aatgttgtcataattccggaaggtc

SEQ ID NO: 3712603 - DNA, 25 bp, Homo sapien
agtaaaaggctgagcgatgactaca

SEQ ID NO: 3712604 - DNA, 25 bp, Homo sapien
gatgactacatactcatcattcaaa

SEQ ID NO: 3712605 - DNA, 25 bp, Homo sapien
ttttggagcatgtaaacatgcgggc

SEQ ID NO: 3712606 - DNA, 25 bp, Homo sapien
tggttgattaggcaaggctggtctc

SEQ ID NO: 3712607 - DNA, 25 bp, Homo sapien
cgggctggggccatacaacttccac

SEQ ID NO: 3712608 - DNA, 25 bp, Homo sapien
gagagattagttgtgtggccatcct

SEQ ID NO: 3712609 - DNA, 25 bp, Homo sapien
tgtacacgtcccctttcactgagaa

SEQ ID NO: 3712610 - DNA, 25 bp, Homo sapien
tgggccacaataacatagagctgag

SEQ ID NO: 3712611 - DNA, 25 bp, Homo sapien
acaggacgctgggaactactagaca

SEQ ID NO: 3712612 - DNA, 25 bp, Homo sapien
agtgtccctgtaccacgcgtgtaag

SEQ ID NO: 3712613 - DNA, 25 bp, Homo sapien
gatcctcgcgatggcatcctctgaa

SEQ ID NO: 3712614 - DNA, 25 bp, Homo sapien
aagaggctggaacaccatggatcct

SEQ ID NO: 3712615 - DNA, 25 bp, Homo sapien
tgtgaatgatcttggtgcctgaaca

SEQ ID NO: 3712616 - DNA, 25 bp, Homo sapien
cgcttattaatggacacatgtgtga

SEQ ID NO: 3712617 - DNA, 25 bp, Homo sapien
ctatgacatgtttgtaaatctgtgt

SEQ ID NO: 3712618 - DNA, 25 bp, Homo sapien
ggagtaacagataccattaaacgct

SEQ ID NO: 3712619 - DNA, 25 bp, Homo sapien
tcatgcattgagttcatccgggtca

SEQ ID NO: 3712620 - DNA, 25 bp, Homo sapien
gatactggtagtgcttggttctagc

SEQ ID NO: 3712621 - DNA, 25 bp, Homo sapien
cacatcactggactggacagttaag

SEQ ID NO: 3712622 - DNA, 25 bp, Homo sapien
gaaagtcatcttgatactcccagga

SEQ ID NO: 3712623 - DNA, 25 bp, Homo sapien
ttagtcttctaaggcctcagagggc

SEQ ID NO: 3712624 - DNA, 25 bp, Homo sapien
tagaaggtacttggcactcactgct

SEQ ID NO: 3712625 - DNA, 25 bp, Homo sapien
tatattataacaggaggacacgtgc

SEQ ID NO: 3712626 - DNA, 25 bp, Homo sapien
tcttcactcacagaaccggtggctg

SEQ ID NO: 3712627 - DNA, 25 bp, Homo sapien
ggagttcaccctagtctgtacagag

SEQ ID NO: 3712628 - DNA, 25 bp, Homo sapien
tcatcacagaacagtggcctcaggc

SEQ ID NO: 3712629 - DNA, 25 bp, Homo sapien
taagacattcaaaggccagttcggg

SEQ ID NO: 3712630 - DNA, 25 bp, Homo sapien
cttttctgggatccacccttttgtg

SEQ ID NO: 3712631 - DNA, 25 bp, Homo sapien
tctgggatccacccttttgtggtcc

SEQ ID NO: 3712632 - DNA, 25 bp, Homo sapien
tagttataccttttctgggatccac

SEQ ID NO: 3712633 - DNA, 25 bp, Homo sapien
ttctgggatccacccttttgtggtc

SEQ ID NO: 3712634 - DNA, 25 bp, Homo sapien
tgctaggaggatcgagggcagaggt

SEQ ID NO: 3712635 - DNA, 25 bp, Homo sapien
agccagatcattggccttcctgcta

SEQ ID NO: 3712636 - DNA, 25 bp, Homo sapien
ctgagccagatcattggccttcctg

SEQ ID NO: 3712637 - DNA, 25 bp, Homo sapien
cttcctgctaggaggatcgagggca

SEQ ID NO: 3712638 - DNA, 25 bp, Homo sapien
ggcccccttggctcactagcaaggt

SEQ ID NO: 3712639 - DNA, 25 bp, Homo sapien
ggaactgccaagtttgatggccaac

SEQ ID NO: 3712640 - DNA, 25 bp, Homo sapien
tgggctgttaccagatgcactaaca

SEQ ID NO: 3712641 - DNA, 25 bp, Homo sapien
gatgcactaacatccctagctttgg

SEQ ID NO: 3712642 - DNA, 25 bp, Homo sapien
gaaggggacatggtctactatctaa

SEQ ID NO: 3712643 - DNA, 25 bp, Homo sapien
cttgggtatgaccaagggatctgca

SEQ ID NO: 3712644 - DNA, 25 bp, Homo sapien
ttcttccttaacttgggtatgacca

SEQ ID NO: 3712645 - DNA, 25 bp, Homo sapien
tagcctagtccggtgagaaacttga

SEQ ID NO: 3712646 - DNA, 25 bp, Homo sapien
ccgggcaccttcttaggagcctggg

SEQ ID NO: 3712647 - DNA, 25 bp, Homo sapien
cagacccacaggaactctatgaggt

SEQ ID NO: 3712648 - DNA, 25 bp, Homo sapien
gcaccttcttaggagcctgggattc

SEQ ID NO: 3712649 - DNA, 25 bp, Homo sapien
ttggtgctccacatcataccagacc

SEQ ID NO: 3712650 - DNA, 25 bp, Homo sapien
tatctctcttgctagtttcaacttc

SEQ ID NO: 3712651 - DNA, 25 bp, Homo sapien
catgcttaagcgcatcttttggtta

SEQ ID NO: 3712652 - DNA, 25 bp, Homo sapien
gcaccatcatgcttaagcgcatctt

SEQ ID NO: 3712653 - DNA, 25 bp, Homo sapien
catatgtatctctcttgctagtttc

SEQ ID NO: 3712654 - DNA, 25 bp, Homo sapien
tcgcggcacgcgctctaccagcggc

SEQ ID NO: 3712655 - DNA, 25 bp, Homo sapien
cgcgctctaccagcggccggtgccg

SEQ ID NO: 3712656 - DNA, 25 bp, Homo sapien
ggcgggcgatggcgcccatgcgcat

SEQ ID NO: 3712657 - DNA, 25 bp, Homo sapien
ccatgcgcatgcgcgcccggcccac

SEQ ID NO: 3712658 - DNA, 25 bp, Homo sapien
cggccgccggctcctcagtggcgcc

SEQ ID NO: 3712659 - DNA, 25 bp, Homo sapien
gctcctggagctccgcgaccccggt

SEQ ID NO: 3712660 - DNA, 25 bp, Homo sapien
gtgcatcgtccgttagcggcagccc

SEQ ID NO: 3712661 - DNA, 25 bp, Homo sapien
ccccggtgctgtcctgaggccgcat

SEQ ID NO: 3712662 - DNA, 25 bp, Homo sapien
ggctcggtgcgggagcaacacggcg

SEQ ID NO: 3712663 - DNA, 25 bp, Homo sapien
agcaacacggcgaggaaaggcagag

SEQ ID NO: 3712664 - DNA, 25 bp, Homo sapien
gtgcgggagcaacacggcgaggaaa

SEQ ID NO: 3712665 - DNA, 25 bp, Homo sapien
gcgggagcaacacggcgaggaaagg

SEQ ID NO: 3712666 - DNA, 25 bp, Homo sapien
agggtcagcttcctcgcaacgtcgc

SEQ ID NO: 3712667 - DNA, 25 bp, Homo sapien
ccaccgggatcacttttcagggtca

SEQ ID NO: 3712668 - DNA, 25 bp, Homo sapien
ctgcaggatggcctctctcgctgac

SEQ ID NO: 3712669 - DNA, 25 bp, Homo sapien
gatggcctctctcgctgacccccca

SEQ ID NO: 3712670 - DNA, 25 bp, Homo sapien
cagacaataatgtgtaaaacaagcc

SEQ ID NO: 3712671 - DNA, 25 bp, Homo sapien
gtaaaacaagccaagtccaggacag

SEQ ID NO: 3712672 - DNA, 25 bp, Homo sapien
tgtaaaacaagccaagtccaggaca

SEQ ID NO: 3712673 - DNA, 25 bp, Homo sapien
ggaaggcagacaataatgtgtaaaa

SEQ ID NO: 3712674 - DNA, 25 bp, Homo sapien
catggacgtcttgcacttttttaac

SEQ ID NO: 3712675 - DNA, 25 bp, Homo sapien
tttggaacacacatcgaaacgcact

SEQ ID NO: 3712676 - DNA, 25 bp, Homo sapien
gaaacgcactaatctctacagcatg

SEQ ID NO: 3712677 - DNA, 25 bp, Homo sapien
tattaagcaagggataacaactagc

SEQ ID NO: 3712678 - DNA, 25 bp, Homo sapien
tgtgccagggctagacttcattaga

SEQ ID NO: 3712679 - DNA, 25 bp, Homo sapien
tgcaacttgctgacgtgtgccaggg

SEQ ID NO: 3712680 - DNA, 25 bp, Homo sapien
gattatcatctaggctaccccgggt

SEQ ID NO: 3712681 - DNA, 25 bp, Homo sapien
gaaagcacggtcacatttggcccat

SEQ ID NO: 3712682 - DNA, 25 bp, Homo sapien
agaatgaggaaaattcgttgacctt

SEQ ID NO: 3712683 - DNA, 25 bp, Homo sapien
tgagaatgaggaaaattcgttgacc

SEQ ID NO: 3712684 - DNA, 25 bp, Homo sapien
atgaggaaaattcgttgaccttttg

SEQ ID NO: 3712685 - DNA, 25 bp, Homo sapien
gagaatgaggaaaattcgttgacct

SEQ ID NO: 3712686 - DNA, 25 bp, Homo sapien
catggcggtagaaccaaggactcct

SEQ ID NO: 3712687 - DNA, 25 bp, Homo sapien
tactggctactacgcagagagcacc

SEQ ID NO: 3712688 - DNA, 25 bp, Homo sapien
aatatggacgtaaacactggactgc

SEQ ID NO: 3712689 - DNA, 25 bp, Homo sapien
taactgtggcatcagcgagggacat

SEQ ID NO: 3712690 - DNA, 25 bp, Homo sapien
gactgctaaacgtgataactgtggc

SEQ ID NO: 3712691 - DNA, 25 bp, Homo sapien
aatacaaccaatgaagaaaatgcag

SEQ ID NO: 3712692 - DNA, 25 bp, Homo sapien
aaatatgtatttcagcaatgatgct

SEQ ID NO: 3712693 - DNA, 25 bp, Homo sapien
cgtatgctgtatgtgaattaggtga

SEQ ID NO: 3712694 - DNA, 25 bp, Homo sapien
agattttccagatgtgtgcgtatgc

SEQ ID NO: 3712695 - DNA, 25 bp, Homo sapien
gaaacgtgcacactggtcatgccaa

SEQ ID NO: 3712696 - DNA, 25 bp, Homo sapien
gcaggcacctattctaagcttcaac

SEQ ID NO: 3712697 - DNA, 25 bp, Homo sapien
tattaacaccattaagcaggcacct

SEQ ID NO: 3712698 - DNA, 25 bp, Homo sapien
tatgctagctgcagttgctaatgcc

SEQ ID NO: 3712699 - DNA, 25 bp, Homo sapien
catggaaattcaacttgggcaggtc

SEQ ID NO: 3712700 - DNA, 25 bp, Homo sapien
cactgtgcaaggtaaagaactggaa

SEQ ID NO: 3712701 - DNA, 25 bp, Homo sapien
aaaacatgtctctagtgtatgggcc

SEQ ID NO: 3712702 - DNA, 25 bp, Homo sapien
gatttaactttctaggtgccactga

SEQ ID NO: 3712703 - DNA, 25 bp, Homo sapien
catacacacctagatcagagaccag

SEQ ID NO: 3712704 - DNA, 25 bp, Homo sapien
caaagaggctaaaccgtggatccat

SEQ ID NO: 3712705 - DNA, 25 bp, Homo sapien
agcatgcttagggtagtgtccagga

SEQ ID NO: 3712706 - DNA, 25 bp, Homo sapien
gatctgatataaggcaccaaacggg

SEQ ID NO: 3712707 - DNA, 25 bp, Homo sapien
gctatcagctggtagtgcagatggg

SEQ ID NO: 3712708 - DNA, 25 bp, Homo sapien
atcagctggtagtgcagatggggcc

SEQ ID NO: 3712709 - DNA, 25 bp, Homo sapien
ctggctatcagctggtagtgcagat

SEQ ID NO: 3712710 - DNA, 25 bp, Homo sapien
gatggggccaagtgtcagggcctca

SEQ ID NO: 3712711 - DNA, 25 bp, Homo sapien
tgcaaacctggcttgatagataata

SEQ ID NO: 3712712 - DNA, 25 bp, Homo sapien
atttttgcaaacctggcttgataga

SEQ ID NO: 3712713 - DNA, 25 bp, Homo sapien
aacctggcttgatagataatagctg

SEQ ID NO: 3712714 - DNA, 25 bp, Homo sapien
gcattcaagctgttgcaatttcatg

SEQ ID NO: 3712715 - DNA, 25 bp, Homo sapien
aaatcaggctggaataaacttgtac

SEQ ID NO: 3712716 - DNA, 25 bp, Homo sapien
cacatgctgcaaagtaccaaagact

SEQ ID NO: 3712717 - DNA, 25 bp, Homo sapien
tgccaaattgcccttcctagaagtt

SEQ ID NO: 3712718 - DNA, 25 bp, Homo sapien
tagaagttgtaccaatgcacacatg

SEQ ID NO: 3712719 - DNA, 25 bp, Homo sapien
ctcctctcacctcgcccttcagctg

SEQ ID NO: 3712720 - DNA, 25 bp, Homo sapien
gaaagtctcctctcacctcgccctt

SEQ ID NO: 3712721 - DNA, 25 bp, Homo sapien
agtctcctctcacctcgcccttcag

SEQ ID NO: 3712722 - DNA, 25 bp, Homo sapien
aaggggattcagtggaaagtctcct

SEQ ID NO: 3712723 - DNA, 25 bp, Homo sapien
agcaaaaggaagtccgtaaggtgag

SEQ ID NO: 3712724 - DNA, 25 bp, Homo sapien
taaagcagtaaacatctctctatgc

SEQ ID NO: 3712725 - DNA, 25 bp, Homo sapien
taatgtatatatgtagctccctatg

SEQ ID NO: 3712726 - DNA, 25 bp, Homo sapien
aaaggaagtccgtaaggtgagtcag

SEQ ID NO: 3712727 - DNA, 25 bp, Homo sapien
tcagggccacacaacgctttctagg

SEQ ID NO: 3712728 - DNA, 25 bp, Homo sapien
tagcaggtaggtaaccccattcaac

SEQ ID NO: 3712729 - DNA, 25 bp, Homo sapien
aatcagtctatctcccaaggttggt

SEQ ID NO: 3712730 - DNA, 25 bp, Homo sapien
taccaccctcaattatggaggcagc

SEQ ID NO: 3712731 - DNA, 25 bp, Homo sapien
tattctttcgcttctagctcttgct

SEQ ID NO: 3712732 - DNA, 25 bp, Homo sapien
ctattctttcgcttctagctcttgc

SEQ ID NO: 3712733 - DNA, 25 bp, Homo sapien
gcacaggcttgtagttggacagacc

SEQ ID NO: 3712734 - DNA, 25 bp, Homo sapien
tccagttatgaccaatgtgagggct

SEQ ID NO: 3712735 - DNA, 25 bp, Homo sapien
tatgacacatctgcctagggtacca

SEQ ID NO: 3712736 - DNA, 25 bp, Homo sapien
tctacaatggagcaagcctgccaga

SEQ ID NO: 3712737 - DNA, 25 bp, Homo sapien
ctgtgctttgtttaggacctttcct

SEQ ID NO: 3712738 - DNA, 25 bp, Homo sapien
actggtgagattagtgccattcccc

SEQ ID NO: 3712739 - DNA, 25 bp, Homo sapien
ggtttggctacacaccttactggtg

SEQ ID NO: 3712740 - DNA, 25 bp, Homo sapien
gggaacagctggtttggctacacac

SEQ ID NO: 3712741 - DNA, 25 bp, Homo sapien
gccatcggctctatgtaccgcgact

SEQ ID NO: 3712742 - DNA, 25 bp, Homo sapien
gcgactccctctccgattctagtag

SEQ ID NO: 3712743 - DNA, 25 bp, Homo sapien
gttgagttgcttaaatccccacgtc

SEQ ID NO: 3712744 - DNA, 25 bp, Homo sapien
tcccttctcacgaatggactctggg

SEQ ID NO: 3712745 - DNA, 25 bp, Homo sapien
ctcccccactccaggatggaggaca

SEQ ID NO: 3712746 - DNA, 25 bp, Homo sapien
cccactccaggatggaggacagaac

SEQ ID NO: 3712747 - DNA, 25 bp, Homo sapien
actccaggatggaggacagaacaca

SEQ ID NO: 3712748 - DNA, 25 bp, Homo sapien
caggatggaggacagaacacatgac

SEQ ID NO: 3712749 - DNA, 25 bp, Homo sapien
ttctcctagtccaaaacggagtgcc

SEQ ID NO: 3712750 - DNA, 25 bp, Homo sapien
tccaaatgcccccatgtctactccc

SEQ ID NO: 3712751 - DNA, 25 bp, Homo sapien
ccttctcctagtccaaaacggagtg

SEQ ID NO: 3712752 - DNA, 25 bp, Homo sapien
ctccaaatgcccccatgtctactcc

SEQ ID NO: 3712753 - DNA, 25 bp, Homo sapien
ccaaaccctcctaagccgtatggag

SEQ ID NO: 3712754 - DNA, 25 bp, Homo sapien
ccctcctaagccgtatggagaaggc

SEQ ID NO: 3712755 - DNA, 25 bp, Homo sapien
cctaagccgtatggagaaggcagat

SEQ ID NO: 3712756 - DNA, 25 bp, Homo sapien
caaaccctcctaagccgtatggaga

SEQ ID NO: 3712757 - DNA, 25 bp, Homo sapien
tctggtttgttaatggccctctgct

SEQ ID NO: 3712758 - DNA, 25 bp, Homo sapien
tggtctgattttcgagccttgctcc

SEQ ID NO: 3712759 - DNA, 25 bp, Homo sapien
gttgtgacaggaagaatcgggttcc

SEQ ID NO: 3712760 - DNA, 25 bp, Homo sapien
ctccttggacgagcggtgggcattt

SEQ ID NO: 3712761 - DNA, 25 bp, Homo sapien
tggctggcatgtctatgagaagaat

SEQ ID NO: 3712762 - DNA, 25 bp, Homo sapien
aaattcctgctaggtaagtcacaag

SEQ ID NO: 3712763 - DNA, 25 bp, Homo sapien
taccccagtaggtggtctattccta

SEQ ID NO: 3712764 - DNA, 25 bp, Homo sapien
tctgtctgggttctaggtctggacc

SEQ ID NO: 3712765 - DNA, 25 bp, Homo sapien
cacactggcctgtcaatacatgaaa

SEQ ID NO: 3712766 - DNA, 25 bp, Homo sapien
taaataccttgtaatccatgccaag

SEQ ID NO: 3712767 - DNA, 25 bp, Homo sapien
catatgggctacttatgaaagttaa

SEQ ID NO: 3712768 - DNA, 25 bp, Homo sapien
tgagtgccataacatgtctaaatta

SEQ ID NO: 3712769 - DNA, 25 bp, Homo sapien
tccccccaacccacgacaggtcatg

SEQ ID NO: 3712770 - DNA, 25 bp, Homo sapien
ctccccccaacccacgacaggtcat

SEQ ID NO: 3712771 - DNA, 25 bp, Homo sapien
caacccacgacaggtcatggtgtgt

SEQ ID NO: 3712772 - DNA, 25 bp, Homo sapien
ccccaacccacgacaggtcatggtg

SEQ ID NO: 3712773 - DNA, 25 bp, Homo sapien
tgccagctacgaaacatcattggtt

SEQ ID NO: 3712774 - DNA, 25 bp, Homo sapien
cccttctgtgccagctacgaaacat

SEQ ID NO: 3712775 - DNA, 25 bp, Homo sapien
ctccccttctgtgccagctacgaaa

SEQ ID NO: 3712776 - DNA, 25 bp, Homo sapien
tctgtgccagctacgaaacatcatt

SEQ ID NO: 3712777 - DNA, 25 bp, Homo sapien
tattcaaaattttgctgacaataga

SEQ ID NO: 3712778 - DNA, 25 bp, Homo sapien
ttcaaaattttgctgacaatagaaa

SEQ ID NO: 3712779 - DNA, 25 bp, Homo sapien
tcaaaattttgctgacaatagaaac

SEQ ID NO: 3712780 - DNA, 25 bp, Homo sapien
ttattcaaaattttgctgacaatag

SEQ ID NO: 3712781 - DNA, 25 bp, Homo sapien
cttcttgtccatacctcctgaagga

SEQ ID NO: 3712782 - DNA, 25 bp, Homo sapien
ccttcttgtccatacctcctgaagg

SEQ ID NO: 3712783 - DNA, 25 bp, Homo sapien
cacccccatgtaagacaagactttg

SEQ ID NO: 3712784 - DNA, 25 bp, Homo sapien
gaaaaagtctcatggggtctgatga

SEQ ID NO: 3712785 - DNA, 25 bp, Homo sapien
aaagtctcatggggtctgatgattt

SEQ ID NO: 3712786 - DNA, 25 bp, Homo sapien
gccacccccatgtaagacaagactt

SEQ ID NO: 3712787 - DNA, 25 bp, Homo sapien
atataacactcatgcaggcttattt

SEQ ID NO: 3712788 - DNA, 25 bp, Homo sapien
gatataacactcatgcaggcttatt

SEQ ID NO: 3712789 - DNA, 25 bp, Homo sapien
tgatataacactcatgcaggcttat

SEQ ID NO: 3712790 - DNA, 25 bp, Homo sapien
gaagctggcaagtttatttagacac

SEQ ID NO: 3712791 - DNA, 25 bp, Homo sapien
ttctatgtagccctccaagttcacc

SEQ ID NO: 3712792 - DNA, 25 bp, Homo sapien
gcaagacctcaccagtccttagagt

SEQ ID NO: 3712793 - DNA, 25 bp, Homo sapien
gggttcattctacagccaagccaga

SEQ ID NO: 3712794 - DNA, 25 bp, Homo sapien
tggccttggtccttcgtgtatttat

SEQ ID NO: 3712795 - DNA, 25 bp, Homo sapien
ccttggtccttcgtgtatttatgga

SEQ ID NO: 3712796 - DNA, 25 bp, Homo sapien
gccttggtccttcgtgtatttatgg

SEQ ID NO: 3712797 - DNA, 25 bp, Homo sapien
ggccttggtccttcgtgtatttatg

SEQ ID NO: 3712798 - DNA, 25 bp, Homo sapien
ttagacttatggtatttaaaggcca

SEQ ID NO: 3712799 - DNA, 25 bp, Homo sapien
ggaattccaaagcatagacattaga

SEQ ID NO: 3712800 - DNA, 25 bp, Homo sapien
aagttttagcaacactggaattcca

SEQ ID NO: 3712801 - DNA, 25 bp, Homo sapien
tcagcaaaagttgggaccagctcaa

SEQ ID NO: 3712802 - DNA, 25 bp, Homo sapien
gatgcccaggaacgcgcaggagcca

SEQ ID NO: 3712803 - DNA, 25 bp, Homo sapien
cgggtgtccccgctactgtgtgtca

SEQ ID NO: 3712804 - DNA, 25 bp, Homo sapien
gtgtcagctgcagagccgatgccca

SEQ ID NO: 3712805 - DNA, 25 bp, Homo sapien
ttggctcctggcgagtctcgccggc

SEQ ID NO: 3712806 - DNA, 25 bp, Homo sapien
cattcgccacgacagaagacttctt

SEQ ID NO: 3712807 - DNA, 25 bp, Homo sapien
tacgctgtgcacctaacattcgcca

SEQ ID NO: 3712808 - DNA, 25 bp, Homo sapien
ttatcagttagagcgggacctggtc

SEQ ID NO: 3712809 - DNA, 25 bp, Homo sapien
tgcagagatctaaaagacctacggg

SEQ ID NO: 3712810 - DNA, 25 bp, Homo sapien
caaccgccttcattggaatctagct

SEQ ID NO: 3712811 - DNA, 25 bp, Homo sapien
tactaagaggactggaagaatgtcc

SEQ ID NO: 3712812 - DNA, 25 bp, Homo sapien
gtatacaacaaaagcccagagaaga

SEQ ID NO: 3712813 - DNA, 25 bp, Homo sapien
gaatctagcttctaacccactggag

SEQ ID NO: 3712814 - DNA, 25 bp, Homo sapien
gaagacttttactcgggattgcact

SEQ ID NO: 3712815 - DNA, 25 bp, Homo sapien
tcctccctggtgatcatgtcaaggt

SEQ ID NO: 3712816 - DNA, 25 bp, Homo sapien
tcattcaggagcattaagaggcaaa

SEQ ID NO: 3712817 - DNA, 25 bp, Homo sapien
gatacacaagtcctcccaaagaaca

SEQ ID NO: 3712818 - DNA, 25 bp, Homo sapien
tcacaggtatgagaacagaagctgt

SEQ ID NO: 3712819 - DNA, 25 bp, Homo sapien
tgactaacaaagtggatcgctcctt

SEQ ID NO: 3712820 - DNA, 25 bp, Homo sapien
gcttctgacagacgttggctcccat

SEQ ID NO: 3712821 - DNA, 25 bp, Homo sapien
tgtctctgaggaaggccatgctgat

SEQ ID NO: 3712822 - DNA, 25 bp, Homo sapien
cagggaagtcctcaaaatggctcaa

SEQ ID NO: 3712823 - DNA, 25 bp, Homo sapien
ccagctgctaattcccattatgtag

SEQ ID NO: 3712824 - DNA, 25 bp, Homo sapien
ctctccagctgctaattcccattat

SEQ ID NO: 3712825 - DNA, 25 bp, Homo sapien
tgctaattcccattatgtaggacat

SEQ ID NO: 3712826 - DNA, 25 bp, Homo sapien
gctgctaattcccattatgtaggac

SEQ ID NO: 3712827 - DNA, 25 bp, Homo sapien
tcaggaatgtatgcatcccaggaac

SEQ ID NO: 3712828 - DNA, 25 bp, Homo sapien
caacatcaacagagaacctactagg

SEQ ID NO: 3712829 - DNA, 25 bp, Homo sapien
tcccaggaactgtaaaggcattagg

SEQ ID NO: 3712830 - DNA, 25 bp, Homo sapien
taggtgacacagctatttgtatcag

SEQ ID NO: 3712831 - DNA, 25 bp, Homo sapien
tcaaaccactactaagtcacatggc

SEQ ID NO: 3712832 - DNA, 25 bp, Homo sapien
gtcacatggctttttggtaccccaa

SEQ ID NO: 3712833 - DNA, 25 bp, Homo sapien
cagatatcttgtcccattggtaaga

SEQ ID NO: 3712834 - DNA, 25 bp, Homo sapien
tgaggagatcttttcaagtttccat

SEQ ID NO: 3712835 - DNA, 25 bp, Homo sapien
cctgagctttgtctaagtgagaagg

SEQ ID NO: 3712836 - DNA, 25 bp, Homo sapien
ctgacatgcagagcatccagtgccc

SEQ ID NO: 3712837 - DNA, 25 bp, Homo sapien
gaagttttgtggaaagttctctctg

SEQ ID NO: 3712838 - DNA, 25 bp, Homo sapien
cttgaaacctgacatgcagagcatc

SEQ ID NO: 3712839 - DNA, 25 bp, Homo sapien
agggaagacaaaggtccagaatcca

SEQ ID NO: 3712840 - DNA, 25 bp, Homo sapien
ggaagacaaaggtccagaatccagg

SEQ ID NO: 3712841 - DNA, 25 bp, Homo sapien
tcaggttccagtgaccagggaagac

SEQ ID NO: 3712842 - DNA, 25 bp, Homo sapien
ttccagtgaccagggaagacaaagg

SEQ ID NO: 3712843 - DNA, 25 bp, Homo sapien
cgatctttgtaaggtgcctcagctt

SEQ ID NO: 3712844 - DNA, 25 bp, Homo sapien
tatgaagatctactccctatagctg

SEQ ID NO: 3712845 - DNA, 25 bp, Homo sapien
gcagttacttgttaattcctcagaa

SEQ ID NO: 3712846 - DNA, 25 bp, Homo sapien
gatgtgattatattacctgagtgaa

SEQ ID NO: 3712847 - DNA, 25 bp, Homo sapien
tgtgctgggctctgatatatgatga

SEQ ID NO: 3712848 - DNA, 25 bp, Homo sapien
gtagtcacatgaggtgcactcccac

SEQ ID NO: 3712849 - DNA, 25 bp, Homo sapien
tgatgaagaacacacccctcaagga

SEQ ID NO: 3712850 - DNA, 25 bp, Homo sapien
gaagatgctgtaagcgctgtccctg

SEQ ID NO: 3712851 - DNA, 25 bp, Homo sapien
ctttgcagaatctcacgtggagctg

SEQ ID NO: 3712852 - DNA, 25 bp, Homo sapien
cacgacccactgaatgaagcccaat

SEQ ID NO: 3712853 - DNA, 25 bp, Homo sapien
aagcctggtgccaaatcttaatccc

SEQ ID NO: 3712854 - DNA, 25 bp, Homo sapien
acagctgagagcgtgcaaagccaca

SEQ ID NO: 3712855 - DNA, 25 bp, Homo sapien
ggtcttctttaagcctccagcatcc

SEQ ID NO: 3712856 - DNA, 25 bp, Homo sapien
aggtaaaattgggtacctcagagag

SEQ ID NO: 3712857 - DNA, 25 bp, Homo sapien
aattgggtacctcagagagcgggaa

SEQ ID NO: 3712858 - DNA, 25 bp, Homo sapien
ctggtcttctttaagcctccagcat

SEQ ID NO: 3712859 - DNA, 25 bp, Homo sapien
tactttttgatctagtacctctgct

SEQ ID NO: 3712860 - DNA, 25 bp, Homo sapien
ttactactttttgatctagtacctc

SEQ ID NO: 3712861 - DNA, 25 bp, Homo sapien
actttttgatctagtacctctgctt

SEQ ID NO: 3712862 - DNA, 25 bp, Homo sapien
actactttttgatctagtacctctg

SEQ ID NO: 3712863 - DNA, 25 bp, Homo sapien
ttagtgcctctctctcctctcccat

SEQ ID NO: 3712864 - DNA, 25 bp, Homo sapien
tttagtgcctctctctcctctccca

SEQ ID NO: 3712865 - DNA, 25 bp, Homo sapien
ttttagtgcctctctctcctctccc

SEQ ID NO: 3712866 - DNA, 25 bp, Homo sapien
cttttagtgcctctctctcctctcc

SEQ ID NO: 3712867 - DNA, 25 bp, Homo sapien
atctttaacatcattccatactgcc

SEQ ID NO: 3712868 - DNA, 25 bp, Homo sapien
ttttctaaatcctggttctggaatc

SEQ ID NO: 3712869 - DNA, 25 bp, Homo sapien
cctggttctggaatctttaacatca

SEQ ID NO: 3712870 - DNA, 25 bp, Homo sapien
ctaaatcctggttctggaatcttta

SEQ ID NO: 3712871 - DNA, 25 bp, Homo sapien
accttcatccctctgctcagcaaac

SEQ ID NO: 3712872 - DNA, 25 bp, Homo sapien
cttatggagtcaccttcatccctct

SEQ ID NO: 3712873 - DNA, 25 bp, Homo sapien
ccttcatccctctgctcagcaaaca

SEQ ID NO: 3712874 - DNA, 25 bp, Homo sapien
cttcttatggagtcaccttcatccc

SEQ ID NO: 3712875 - DNA, 25 bp, Homo sapien
acatcccaaagaccaatgatttcat

SEQ ID NO: 3712876 - DNA, 25 bp, Homo sapien
ttccccagaagagactcagtcaaca

SEQ ID NO: 3712877 - DNA, 25 bp, Homo sapien
cagaagagactcagtcaacatccca

SEQ ID NO: 3712878 - DNA, 25 bp, Homo sapien
cagtcaacatcccaaagaccaatga

SEQ ID NO: 3712879 - DNA, 25 bp, Homo sapien
agagcagacacaattaactcacacc

SEQ ID NO: 3712880 - DNA, 25 bp, Homo sapien
catccatcttccatagtggtctgca

SEQ ID NO: 3712881 - DNA, 25 bp, Homo sapien
tcttccatagtggtctgcatacagt

SEQ ID NO: 3712882 - DNA, 25 bp, Homo sapien
cattcctgttgcatccatcttccat

SEQ ID NO: 3712883 - DNA, 25 bp, Homo sapien
gggtcatgggatacatgaacttcag

SEQ ID NO: 3712884 - DNA, 25 bp, Homo sapien
ataaacaggctctgactcatttccc

SEQ ID NO: 3712885 - DNA, 25 bp, Homo sapien
ttcccattgcttattgtagttaggt

SEQ ID NO: 3712886 - DNA, 25 bp, Homo sapien
ccccagggtcatgggatacatgaac

SEQ ID NO: 3712887 - DNA, 25 bp, Homo sapien
tgcaggtataatcaaggacagaaaa

SEQ ID NO: 3712888 - DNA, 25 bp, Homo sapien
ggcaagccatgggactggaaggcag

SEQ ID NO: 3712889 - DNA, 25 bp, Homo sapien
gtgtatgatgtattgtgctttgtga

SEQ ID NO: 3712890 - DNA, 25 bp, Homo sapien
ctcagaagcaggtatcatagcagaa

SEQ ID NO: 3712891 - DNA, 25 bp, Homo sapien
tcatcctgctcccagattcacaggg

SEQ ID NO: 3712892 - DNA, 25 bp, Homo sapien
ctcccagattcacagggaaacctac

SEQ ID NO: 3712893 - DNA, 25 bp, Homo sapien
tgctcccagattcacagggaaacct

SEQ ID NO: 3712894 - DNA, 25 bp, Homo sapien
cctgctcccagattcacagggaaac

SEQ ID NO: 3712895 - DNA, 25 bp, Homo sapien
cttctagtccaggtttgatgccaaa

SEQ ID NO: 3712896 - DNA, 25 bp, Homo sapien
ggtttgatgccaaatgttctgagca

SEQ ID NO: 3712897 - DNA, 25 bp, Homo sapien
tctagtccaggtttgatgccaaatg

SEQ ID NO: 3712898 - DNA, 25 bp, Homo sapien
tccaggtttgatgccaaatgttctg

SEQ ID NO: 3712899 - DNA, 25 bp, Homo sapien
catcatggccctataaagtgcttgc

SEQ ID NO: 3712900 - DNA, 25 bp, Homo sapien
catccctgttgcattgagtgtctct

SEQ ID NO: 3712901 - DNA, 25 bp, Homo sapien
gatgacgacagaatcaccgaaagac

SEQ ID NO: 3712902 - DNA, 25 bp, Homo sapien
aacagttatcgcctgcatcatggcc

SEQ ID NO: 3712903 - DNA, 25 bp, Homo sapien
tgttaaacatcattattatattcag

SEQ ID NO: 3712904 - DNA, 25 bp, Homo sapien
ggcagacttggcaaccttttcctac

SEQ ID NO: 3712905 - DNA, 25 bp, Homo sapien
ttggcaaccttttcctaccaatgcc

SEQ ID NO: 3712906 - DNA, 25 bp, Homo sapien
ccttttcctaccaatgccatggatc

SEQ ID NO: 3712907 - DNA, 25 bp, Homo sapien
ttcaacttcctcttagtccccatgg

SEQ ID NO: 3712908 - DNA, 25 bp, Homo sapien
tacagtgcagatcctctctctcatc

SEQ ID NO: 3712909 - DNA, 25 bp, Homo sapien
gggaggttatcaatcctcttggtca

SEQ ID NO: 3712910 - DNA, 25 bp, Homo sapien
gatttcttagccctcaccacttgca

SEQ ID NO: 3712911 - DNA, 25 bp, Homo sapien
agtgtggcctctatcttcatggctc

SEQ ID NO: 3712912 - DNA, 25 bp, Homo sapien
atgtccagtgtggcctctatcttca

SEQ ID NO: 3712913 - DNA, 25 bp, Homo sapien
gtgtggcctctatcttcatggctcc

SEQ ID NO: 3712914 - DNA, 25 bp, Homo sapien
aatgtccagtgtggcctctatcttc

SEQ ID NO: 3712915 - DNA, 25 bp, Homo sapien
caatagaaaggtgccaacaagtgcc

SEQ ID NO: 3712916 - DNA, 25 bp, Homo sapien
cctgtagacgtagtgctgtgccaaa

SEQ ID NO: 3712917 - DNA, 25 bp, Homo sapien
gcctaatgtagggaggtcacaaatc

SEQ ID NO: 3712918 - DNA, 25 bp, Homo sapien
gggccttcaggacagttataatgca

SEQ ID NO: 3712919 - DNA, 25 bp, Homo sapien
gcaataaggacagccagtggagttt

SEQ ID NO: 3712920 - DNA, 25 bp, Homo sapien
catgcaagcaataaggacagccagt

SEQ ID NO: 3712921 - DNA, 25 bp, Homo sapien
gggagtaagcataggaaataactgg

SEQ ID NO: 3712922 - DNA, 25 bp, Homo sapien
ggagtaagcataggaaataactggg

SEQ ID NO: 3712923 - DNA, 25 bp, Homo sapien
ctccttcggtgacactgacgaatgg

SEQ ID NO: 3712924 - DNA, 25 bp, Homo sapien
ccagggagtagaagactctcactgc

SEQ ID NO: 3712925 - DNA, 25 bp, Homo sapien
acactgacgaatggccagggagtag

SEQ ID NO: 3712926 - DNA, 25 bp, Homo sapien
cgaatggccagggagtagaagactc

SEQ ID NO: 3712927 - DNA, 25 bp, Homo sapien
cttccatgggctgtctcggaggctg

SEQ ID NO: 3712928 - DNA, 25 bp, Homo sapien
catacagtgtctcggacacattgct

SEQ ID NO: 3712929 - DNA, 25 bp, Homo sapien
cattgctttaagcatggaccaacgc

SEQ ID NO: 3712930 - DNA, 25 bp, Homo sapien
gggtggcgcgatactcacatacagt

SEQ ID NO: 3712931 - DNA, 25 bp, Homo sapien
tccaaaagtactgagaaggccactt

SEQ ID NO: 3712932 - DNA, 25 bp, Homo sapien
cttcttgctcccaaagacgtggttg

SEQ ID NO: 3712933 - DNA, 25 bp, Homo sapien
ttctaggagagaaccggtgatgtac

SEQ ID NO: 3712934 - DNA, 25 bp, Homo sapien
ccggtgatgtactgcgatattgaag

SEQ ID NO: 3712935 - DNA, 25 bp, Homo sapien
cccgccaccaccctcagctaacttt

SEQ ID NO: 3712936 - DNA, 25 bp, Homo sapien
cgcccgccaccaccctcagctaact

SEQ ID NO: 3712937 - DNA, 25 bp, Homo sapien
ggcgcccgccaccaccctcagctaa

SEQ ID NO: 3712938 - DNA, 25 bp, Homo sapien
gcgcccgccaccaccctcagctaac

SEQ ID NO: 3712939 - DNA, 25 bp, Homo sapien
caacccccaggcagtggaatgctgc

SEQ ID NO: 3712940 - DNA, 25 bp, Homo sapien
aaggaggaaggtcattggcctgctg

SEQ ID NO: 3712941 - DNA, 25 bp, Homo sapien
caaggaggaaggtcattggcctgct

SEQ ID NO: 3712942 - DNA, 25 bp, Homo sapien
tcaaggaggaaggtcattggcctgc

SEQ ID NO: 3712943 - DNA, 25 bp, Homo sapien
aggaggaaggtcattggcctgctgg

SEQ ID NO: 3712944 - DNA, 25 bp, Homo sapien
ctttgtgagggcaatagattttcat

SEQ ID NO: 3712945 - DNA, 25 bp, Homo sapien
ccaatgttgaatctctgtgcctgct

SEQ ID NO: 3712946 - DNA, 25 bp, Homo sapien
ctgacgaaactcaaagaggccatga

SEQ ID NO: 3712947 - DNA, 25 bp, Homo sapien
gcccacagacaactgacgaaactca

SEQ ID NO: 3712948 - DNA, 25 bp, Homo sapien
tgttatcaggatgaatggagtgcaa

SEQ ID NO: 3712949 - DNA, 25 bp, Homo sapien
tctgtctgccactcattaagtttca

SEQ ID NO: 3712950 - DNA, 25 bp, Homo sapien
ctttgcatggtgcagtctggttcat

SEQ ID NO: 3712951 - DNA, 25 bp, Homo sapien
ttgcatggtgcagtctggttcatgg

SEQ ID NO: 3712952 - DNA, 25 bp, Homo sapien
ggtgatgtctgtctgccactcatta

SEQ ID NO: 3712953 - DNA, 25 bp, Homo sapien
gacccaatgttgaagtcaaggctca

SEQ ID NO: 3712954 - DNA, 25 bp, Homo sapien
caatcacctgaataggatgacccaa

SEQ ID NO: 3712955 - DNA, 25 bp, Homo sapien
taaagcctagaggtacaatcacctg

SEQ ID NO: 3712956 - DNA, 25 bp, Homo sapien
ggtaaccacttctgcagagtctgca

SEQ ID NO: 3712957 - DNA, 25 bp, Homo sapien
tctgcctgtgtccaatcaatggctt

SEQ ID NO: 3712958 - DNA, 25 bp, Homo sapien
tgactgtgttatgaacatgtaacca

SEQ ID NO: 3712959 - DNA, 25 bp, Homo sapien
gaagactcccactaccctcataggt

SEQ ID NO: 3712960 - DNA, 25 bp, Homo sapien
aatgtgttttacttggcccatcagc

SEQ ID NO: 3712961 - DNA, 25 bp, Homo sapien
ggaaaatgtgaatgctacctggaac

SEQ ID NO: 3712962 - DNA, 25 bp, Homo sapien
gaatgctacctggaacctttccagc

SEQ ID NO: 3712963 - DNA, 25 bp, Homo sapien
ctttccagcccagttcctgaatctt

SEQ ID NO: 3712964 - DNA, 25 bp, Homo sapien
ctgaatcttttgtaacaaaaggtct

SEQ ID NO: 3712965 - DNA, 25 bp, Homo sapien
tgattgtggccgatacaccttggaa

SEQ ID NO: 3712966 - DNA, 25 bp, Homo sapien
ttcccaagatttgccctgacctagg

SEQ ID NO: 3712967 - DNA, 25 bp, Homo sapien
tatttgcccgtgcatgatccaactg

SEQ ID NO: 3712968 - DNA, 25 bp, Homo sapien
gatccaactgaactagggaggaaga

SEQ ID NO: 3712969 - DNA, 25 bp, Homo sapien
tgggcgccaaagagaatcaaacact

SEQ ID NO: 3712970 - DNA, 25 bp, Homo sapien
gaagaatcatcaaccagaacttcct

SEQ ID NO: 3712971 - DNA, 25 bp, Homo sapien
attgttgaatatggactctgggcgc

SEQ ID NO: 3712972 - DNA, 25 bp, Homo sapien
agaacttccttctggtcaatctgag

SEQ ID NO: 3712973 - DNA, 25 bp, Homo sapien
ctgatttggtataaaacaggacatg

SEQ ID NO: 3712974 - DNA, 25 bp, Homo sapien
gagtcctgggcaccttcactcactg

SEQ ID NO: 3712975 - DNA, 25 bp, Homo sapien
gaacctggtatctgtgaacccccat

SEQ ID NO: 3712976 - DNA, 25 bp, Homo sapien
actgagcagtacagacgaaggaggt

SEQ ID NO: 3712977 - DNA, 25 bp, Homo sapien
gtctttatgcctgtatcacaacatt

SEQ ID NO: 3712978 - DNA, 25 bp, Homo sapien
gacaggttgaattctatagagattg

SEQ ID NO: 3712979 - DNA, 25 bp, Homo sapien
caacagtatcttgcagttttcaata

SEQ ID NO: 3712980 - DNA, 25 bp, Homo sapien
gatattgccatttgaacaatgctaa

SEQ ID NO: 3712981 - DNA, 25 bp, Homo sapien
catgtaaccctgtatatgttggcca

SEQ ID NO: 3712982 - DNA, 25 bp, Homo sapien
gcgcaaggatgacatatacatttgt

SEQ ID NO: 3712983 - DNA, 25 bp, Homo sapien
tgtccctaaggatttgcccatgctg

SEQ ID NO: 3712984 - DNA, 25 bp, Homo sapien
cactagtctaccttctgtccctaag

SEQ ID NO: 3712985 - DNA, 25 bp, Homo sapien
aatgtctgtatcatcctgccacaca

SEQ ID NO: 3712986 - DNA, 25 bp, Homo sapien
tgctcccagttcctgacatagggct

SEQ ID NO: 3712987 - DNA, 25 bp, Homo sapien
cattcagccctcaatagtcagccat

SEQ ID NO: 3712988 - DNA, 25 bp, Homo sapien
ttcatcttagaagctcgacgaggag

SEQ ID NO: 3712989 - DNA, 25 bp, Homo sapien
aggtgcccgtagcttggtcataatc

SEQ ID NO: 3712990 - DNA, 25 bp, Homo sapien
ccaaggtgcccgtagcttggtcata

SEQ ID NO: 3712991 - DNA, 25 bp, Homo sapien
caaggtgcccgtagcttggtcataa

SEQ ID NO: 3712992 - DNA, 25 bp, Homo sapien
ctccaaggtgcccgtagcttggtca

SEQ ID NO: 3712993 - DNA, 25 bp, Homo sapien
taagaagcaaaggtagtcgactggc

SEQ ID NO: 3712994 - DNA, 25 bp, Homo sapien
tcgactggcaagaccctgcggtaaa

SEQ ID NO: 3712995 - DNA, 25 bp, Homo sapien
gagtgcccaagtcccgtgttaagaa

SEQ ID NO: 3712996 - DNA, 25 bp, Homo sapien
taagaatcgacgctgagatggatgc

SEQ ID NO: 3712997 - DNA, 25 bp, Homo sapien
aaataccaagacatcaaaaagtggc

SEQ ID NO: 3712998 - DNA, 25 bp, Homo sapien
gtgagtcaaataccaagacatcaaa

SEQ ID NO: 3712999 - DNA, 25 bp, Homo sapien
ataccaagacatcaaaaagtggctt

SEQ ID NO: 3713000 - DNA, 25 bp, Homo sapien
gggtgagtcaaataccaagacatca

SEQ ID NO: 3713001 - DNA, 25 bp, Homo sapien
gtgagaggaaggattgcaatgtgat

SEQ ID NO: 3713002 - DNA, 25 bp, Homo sapien
caagttggggtacagtgagaggaag

SEQ ID NO: 3713003 - DNA, 25 bp, Homo sapien
gaggaaggattgcaatgtgatgtct

SEQ ID NO: 3713004 - DNA, 25 bp, Homo sapien
aaggattgcaatgtgatgtctgtct

SEQ ID NO: 3713005 - DNA, 25 bp, Homo sapien
tttaagcccaagagtgcagtccgcc

SEQ ID NO: 3713006 - DNA, 25 bp, Homo sapien
tggcttctaatgtggtctcagaggc

SEQ ID NO: 3713007 - DNA, 25 bp, Homo sapien
ccagtactgcatggagactccctgc

SEQ ID NO: 3713008 - DNA, 25 bp, Homo sapien
cagccagtggctcttgatctcccag

SEQ ID NO: 3713009 - DNA, 25 bp, Homo sapien
ctgaatggatgcacgagtaaatgca

SEQ ID NO: 3713010 - DNA, 25 bp, Homo sapien
accccaagtgactagcaccggcaat

SEQ ID NO: 3713011 - DNA, 25 bp, Homo sapien
caccggcaatggagctaatattctc

SEQ ID NO: 3713012 - DNA, 25 bp, Homo sapien
cacgagtaaatgcattcacttcccc

SEQ ID NO: 3713013 - DNA, 25 bp, Homo sapien
gcatatctaccacagtacactgctt

SEQ ID NO: 3713014 - DNA, 25 bp, Homo sapien
gactgctatttactttccttagtgc

SEQ ID NO: 3713015 - DNA, 25 bp, Homo sapien
gatatttgtgtccatgtctcatagc

SEQ ID NO: 3713016 - DNA, 25 bp, Homo sapien
ctgccttttttggtagatatttgtg

SEQ ID NO: 3713017 - DNA, 25 bp, Homo sapien
ctgtactgctttgacctgcggctga

SEQ ID NO: 3713018 - DNA, 25 bp, Homo sapien
ggcccttgaggaatctgtggccaag

SEQ ID NO: 3713019 - DNA, 25 bp, Homo sapien
aggagggatccagactcatcaccca

SEQ ID NO: 3713020 - DNA, 25 bp, Homo sapien
agggatccagactcatcacccacag

SEQ ID NO: 3713021 - DNA, 25 bp, Homo sapien
caggctattgtgttggcggtctcca

SEQ ID NO: 3713022 - DNA, 25 bp, Homo sapien
cctgcaggctattgtgttggcggtc

SEQ ID NO: 3713023 - DNA, 25 bp, Homo sapien
gtgttggcggtctccaagtgatcca

SEQ ID NO: 3713024 - DNA, 25 bp, Homo sapien
cccatccctgcaggctattgtgttg

SEQ ID NO: 3713025 - DNA, 25 bp, Homo sapien
gagggtggatcagacaagaaatcat

SEQ ID NO: 3713026 - DNA, 25 bp, Homo sapien
ggtggatcagacaagaaatcattat

SEQ ID NO: 3713027 - DNA, 25 bp, Homo sapien
gggtggatcagacaagaaatcatta

SEQ ID NO: 3713028 - DNA, 25 bp, Homo sapien
ctgagggtggatcagacaagaaatc

SEQ ID NO: 3713029 - DNA, 25 bp, Homo sapien
tcttcccctcggagcttctcctggg

SEQ ID NO: 3713030 - DNA, 25 bp, Homo sapien
aaggctcttcccctcggagcttctc

SEQ ID NO: 3713031 - DNA, 25 bp, Homo sapien
tctgggggcactacccagctgtgac

SEQ ID NO: 3713032 - DNA, 25 bp, Homo sapien
gggctacagctgcttcttctctggg

SEQ ID NO: 3713033 - DNA, 25 bp, Homo sapien
tgaaaggtagcttatagatcctcct

SEQ ID NO: 3713034 - DNA, 25 bp, Homo sapien
gtcttgcacctgaaaggtagcttat

SEQ ID NO: 3713035 - DNA, 25 bp, Homo sapien
tctctaagtcttgcacctgaaaggt

SEQ ID NO: 3713036 - DNA, 25 bp, Homo sapien
cacctgaaaggtagcttatagatcc

SEQ ID NO: 3713037 - DNA, 25 bp, Homo sapien
agtgcttacggcatagatgatagaa

SEQ ID NO: 3713038 - DNA, 25 bp, Homo sapien
gaagtgcttacggcatagatgatag

SEQ ID NO: 3713039 - DNA, 25 bp, Homo sapien
tgggaagtgcttacggcatagatga

SEQ ID NO: 3713040 - DNA, 25 bp, Homo sapien
gggaagtgcttacggcatagatgat

SEQ ID NO: 3713041 - DNA, 25 bp, Homo sapien
tgaagaagtggtggataaggaggac

SEQ ID NO: 3713042 - DNA, 25 bp, Homo sapien
cagcaattgctagagcactaacctc

SEQ ID NO: 3713043 - DNA, 25 bp, Homo sapien
cactaacctcagatggcctaaaaga

SEQ ID NO: 3713044 - DNA, 25 bp, Homo sapien
tgctagagcactaacctcagatggc

SEQ ID NO: 3713045 - DNA, 25 bp, Homo sapien
tagcttacgcaagtaccctggatgg

SEQ ID NO: 3713046 - DNA, 25 bp, Homo sapien
gaggttctctgagtgaaggacaaga

SEQ ID NO: 3713047 - DNA, 25 bp, Homo sapien
tttggtccatgactggaagactcca

SEQ ID NO: 3713048 - DNA, 25 bp, Homo sapien
tctcatctgcactggaatgggctgg

SEQ ID NO: 3713049 - DNA, 25 bp, Homo sapien
tcagaaggctagtgttgctggggaa

SEQ ID NO: 3713050 - DNA, 25 bp, Homo sapien
gctgcctgcttgatcttcacccaag

SEQ ID NO: 3713051 - DNA, 25 bp, Homo sapien
tgcctgcttgatcttcacccaagag

SEQ ID NO: 3713052 - DNA, 25 bp, Homo sapien
agagctgcctgcttgatcttcaccc

SEQ ID NO: 3713053 - DNA, 25 bp, Homo sapien
cctgcttgatcttcacccaagaggc

SEQ ID NO: 3713054 - DNA, 25 bp, Homo sapien
gatcatttgtaatgggtatctggtc

SEQ ID NO: 3713055 - DNA, 25 bp, Homo sapien
tctaactgcaaaggttgaattcaaa

SEQ ID NO: 3713056 - DNA, 25 bp, Homo sapien
taatgaaagtctagacagagctact

SEQ ID NO: 3713057 - DNA, 25 bp, Homo sapien
gactttctgccgaaaagtttcttga

SEQ ID NO: 3713058 - DNA, 25 bp, Homo sapien
tgacatcataaccccctggaccatg

SEQ ID NO: 3713059 - DNA, 25 bp, Homo sapien
tcctcacatcaaataccttattggt

SEQ ID NO: 3713060 - DNA, 25 bp, Homo sapien
gggcttagccaaatagaacagttta

SEQ ID NO: 3713061 - DNA, 25 bp, Homo sapien
gtactcttgggcttagccaaataga

SEQ ID NO: 3713062 - DNA, 25 bp, Homo sapien
aggagaaaatactgagaagagtcca

SEQ ID NO: 3713063 - DNA, 25 bp, Homo sapien
ggtcctcctaagcactcagttttga

SEQ ID NO: 3713064 - DNA, 25 bp, Homo sapien
agctgcatatgtgaaggcagagcag

SEQ ID NO: 3713065 - DNA, 25 bp, Homo sapien
cagacttggctctgggtaggtcctc

SEQ ID NO: 3713066 - DNA, 25 bp, Homo sapien
tcaatttggtattaggaaatgaaag

SEQ ID NO: 3713067 - DNA, 25 bp, Homo sapien
ggaaatgaaagacctgtaggtcctg

SEQ ID NO: 3713068 - DNA, 25 bp, Homo sapien
aatatcaatttggtattaggaaatg

SEQ ID NO: 3713069 - DNA, 25 bp, Homo sapien
aaagacctgtaggtcctggctgggc

SEQ ID NO: 3713070 - DNA, 25 bp, Homo sapien
tggagcctgccgtgaggatcagcca

SEQ ID NO: 3713071 - DNA, 25 bp, Homo sapien
aatatgaaaagacttctcgcttctc

SEQ ID NO: 3713072 - DNA, 25 bp, Homo sapien
gaggccagccaagaactccatgaca

SEQ ID NO: 3713073 - DNA, 25 bp, Homo sapien
ccatgacagcgttgtagttgcccat

SEQ ID NO: 3713074 - DNA, 25 bp, Homo sapien
gtgaagtaggattgtgactggccca

SEQ ID NO: 3713075 - DNA, 25 bp, Homo sapien
ggaacactacataaggcaggcctga

SEQ ID NO: 3713076 - DNA, 25 bp, Homo sapien
ctatagcatatagccctggaacact

SEQ ID NO: 3713077 - DNA, 25 bp, Homo sapien
cgggttatgcaaccaagtaatttca

SEQ ID NO: 3713078 - DNA, 25 bp, Homo sapien
cagactggtccatgaactgccacat

SEQ ID NO: 3713079 - DNA, 25 bp, Homo sapien
tcagactggtccatgaactgccaca

SEQ ID NO: 3713080 - DNA, 25 bp, Homo sapien
tcttcttgggaattgtaccgcgggc

SEQ ID NO: 3713081 - DNA, 25 bp, Homo sapien
gcaaagcttcatgagaccggaggcg

SEQ ID NO: 3713082 - DNA, 25 bp, Homo sapien
gaaccaccttacagccagggatgtg

SEQ ID NO: 3713083 - DNA, 25 bp, Homo sapien
tctgtactcacaagaggactcatgc

SEQ ID NO: 3713084 - DNA, 25 bp, Homo sapien
aaagatgctgttgacagtggactcc

SEQ ID NO: 3713085 - DNA, 25 bp, Homo sapien
tgtctccagacttcgattgcagctc

SEQ ID NO: 3713086 - DNA, 25 bp, Homo sapien
gccattttgtcccactcgttgtaag

SEQ ID NO: 3713087 - DNA, 25 bp, Homo sapien
ttgcagctccggatgacctgaaaga

SEQ ID NO: 3713088 - DNA, 25 bp, Homo sapien
tctgctatttggtccacagacatca

SEQ ID NO: 3713089 - DNA, 25 bp, Homo sapien
cacagacatcaccagcaaagtggtg

SEQ ID NO: 3713090 - DNA, 25 bp, Homo sapien
tgttagtaagatcaaggtttctgct

SEQ ID NO: 3713091 - DNA, 25 bp, Homo sapien
ggtacataggctggtccacgcgtct

SEQ ID NO: 3713092 - DNA, 25 bp, Homo sapien
caggaactggtgcacatcggcttgg

SEQ ID NO: 3713093 - DNA, 25 bp, Homo sapien
tgtgtatatcaatgccagggtggcc

SEQ ID NO: 3713094 - DNA, 25 bp, Homo sapien
taaaggctgacgtactgtttccgca

SEQ ID NO: 3713095 - DNA, 25 bp, Homo sapien
tacccaggtcaaggtgctattgtcg

SEQ ID NO: 3713096 - DNA, 25 bp, Homo sapien
tctgctcataatcgtgacatgggtg

SEQ ID NO: 3713097 - DNA, 25 bp, Homo sapien
caagggatgctactctggttatgcc

SEQ ID NO: 3713098 - DNA, 25 bp, Homo sapien
catgtgccttgtctaacttcctggg

SEQ ID NO: 3713099 - DNA, 25 bp, Homo sapien
gaaaaactgcccactaagggctgcc

SEQ ID NO: 3713100 - DNA, 25 bp, Homo sapien
cagctggtgcctccttcagtaaaag

SEQ ID NO: 3713101 - DNA, 25 bp, Homo sapien
gtctcagctggtgcctccttcagta

SEQ ID NO: 3713102 - DNA, 25 bp, Homo sapien
ctgccgttcgtggtctcagctggtg

SEQ ID NO: 3713103 - DNA, 25 bp, Homo sapien
ctcagctggtgcctccttcagtaaa

SEQ ID NO: 3713104 - DNA, 25 bp, Homo sapien
tgagcagcaacaacacactcaaggg

SEQ ID NO: 3713105 - DNA, 25 bp, Homo sapien
gaaatctaaagatagggagcccatg

SEQ ID NO: 3713106 - DNA, 25 bp, Homo sapien
tcctaaaatagttgggctgccatcc

SEQ ID NO: 3713107 - DNA, 25 bp, Homo sapien
gacagtcggacttgaaatacagggt

SEQ ID NO: 3713108 - DNA, 25 bp, Homo sapien
tttgcaaattagggccttggacatc

SEQ ID NO: 3713109 - DNA, 25 bp, Homo sapien
taatgatctggccacccaagtgact

SEQ ID NO: 3713110 - DNA, 25 bp, Homo sapien
cacaataggaagcatcaagcaatgg

SEQ ID NO: 3713111 - DNA, 25 bp, Homo sapien
gacatgctttaatacatcaactggg

SEQ ID NO: 3713112 - DNA, 25 bp, Homo sapien
taaattgcagaactaccactgtagg

SEQ ID NO: 3713113 - DNA, 25 bp, Homo sapien
tatgcccagggtattgtttctctgc

SEQ ID NO: 3713114 - DNA, 25 bp, Homo sapien
ttttcttggtagtgcttatgcccag

SEQ ID NO: 3713115 - DNA, 25 bp, Homo sapien
caaacaactccacagcgtgagccaa

SEQ ID NO: 3713116 - DNA, 25 bp, Homo sapien
caaagttgggccttcataccgtcca

SEQ ID NO: 3713117 - DNA, 25 bp, Homo sapien
gactgtaagcttccggaggctgtca

SEQ ID NO: 3713118 - DNA, 25 bp, Homo sapien
acagcactttgtgggtgactcaacg

SEQ ID NO: 3713119 - DNA, 25 bp, Homo sapien
tctagccatccagaacagcatgtgc

SEQ ID NO: 3713120 - DNA, 25 bp, Homo sapien
tcctggcactagcatggcaccatgg

SEQ ID NO: 3713121 - DNA, 25 bp, Homo sapien
tgccatctcatcgtcagttacctct

SEQ ID NO: 3713122 - DNA, 25 bp, Homo sapien
tccggcttcgacactctttgtgcat

SEQ ID NO: 3713123 - DNA, 25 bp, Homo sapien
tttgtgcatcttggcctttcgggtt

SEQ ID NO: 3713124 - DNA, 25 bp, Homo sapien
gtcttgaggatcagaaccactccgg

SEQ ID NO: 3713125 - DNA, 25 bp, Homo sapien
gggtttggagggttagcgatggcat

SEQ ID NO: 3713126 - DNA, 25 bp, Homo sapien
atgacgtcccggcagccaagttggg

SEQ ID NO: 3713127 - DNA, 25 bp, Homo sapien
tggagggttagcgatggcattcacc

SEQ ID NO: 3713128 - DNA, 25 bp, Homo sapien
atgggagatgacgtcccggcagcca

SEQ ID NO: 3713129 - DNA, 25 bp, Homo sapien
gtctttccatagacaactgtaaaga

SEQ ID NO: 3713130 - DNA, 25 bp, Homo sapien
atcaaaatgtgaaatagtctttcca

SEQ ID NO: 3713131 - DNA, 25 bp, Homo sapien
gtgaagggtccttctgttttatcat

SEQ ID NO: 3713132 - DNA, 25 bp, Homo sapien
atgtgaagggtccttctgttttatc

SEQ ID NO: 3713133 - DNA, 25 bp, Homo sapien
gctcaagtgatactctcacacctca

SEQ ID NO: 3713134 - DNA, 25 bp, Homo sapien
gtgatcctccttccctgacctccta

SEQ ID NO: 3713135 - DNA, 25 bp, Homo sapien
gaccagaggtgagaaccaccacacc

SEQ ID NO: 3713136 - DNA, 25 bp, Homo sapien
tgggaccagaggtgagaaccaccac

SEQ ID NO: 3713137 - DNA, 25 bp, Homo sapien
cataggttgtaggttgtcgatcccc

SEQ ID NO: 3713138 - DNA, 25 bp, Homo sapien
gtttacccaggatactacacaggct

SEQ ID NO: 3713139 - DNA, 25 bp, Homo sapien
cagatccagctactgtctgtaggaa

SEQ ID NO: 3713140 - DNA, 25 bp, Homo sapien
gaagtgactctcaaccctgctaaca

SEQ ID NO: 3713141 - DNA, 25 bp, Homo sapien
caaggctgcatctattcaatgtaga

SEQ ID NO: 3713142 - DNA, 25 bp, Homo sapien
tgatttcctgacacaatggtatgag

SEQ ID NO: 3713143 - DNA, 25 bp, Homo sapien
caatgtagaaatatcagtcaactca

SEQ ID NO: 3713144 - DNA, 25 bp, Homo sapien
gattatatttgcaccttccaaggct

SEQ ID NO: 3713145 - DNA, 25 bp, Homo sapien
gatgtctattaaaaagagccccaaa

SEQ ID NO: 3713146 - DNA, 25 bp, Homo sapien
tctatgggaaataatgcacgttctt

SEQ ID NO: 3713147 - DNA, 25 bp, Homo sapien
tctttgaaattgcagatcaatgggc

SEQ ID NO: 3713148 - DNA, 25 bp, Homo sapien
ggcccagggctgaggttaatattcc

SEQ ID NO: 3713149 - DNA, 25 bp, Homo sapien
gcacaagggcaggccactgttgtga

SEQ ID NO: 3713150 - DNA, 25 bp, Homo sapien
caacaaagacaaggccttcatgggc

SEQ ID NO: 3713151 - DNA, 25 bp, Homo sapien
aaggatgagtgcaagttatttaaga

SEQ ID NO: 3713152 - DNA, 25 bp, Homo sapien
aaaaggatgagtgcaagttatttaa

SEQ ID NO: 3713153 - DNA, 25 bp, Homo sapien
tttgatccgcccgtgccagctacta

SEQ ID NO: 3713154 - DNA, 25 bp, Homo sapien
ctttgatccgcccgtgccagctact

SEQ ID NO: 3713155 - DNA, 25 bp, Homo sapien
gccgcctttgatccgcccgtgccag

SEQ ID NO: 3713156 - DNA, 25 bp, Homo sapien
gcctttgatccgcccgtgccagcta

SEQ ID NO: 3713157 - DNA, 25 bp, Homo sapien
ctgaatgatttgaacagctcaacaa

SEQ ID NO: 3713158 - DNA, 25 bp, Homo sapien
gaatgatttgaacagctcaacaaat

SEQ ID NO: 3713159 - DNA, 25 bp, Homo sapien
tgatttgaacagctcaacaaattca

SEQ ID NO: 3713160 - DNA, 25 bp, Homo sapien
atgatttgaacagctcaacaaattc

SEQ ID NO: 3713161 - DNA, 25 bp, Homo sapien
tgactcggagccagatcggttgcag

SEQ ID NO: 3713162 - DNA, 25 bp, Homo sapien
cagggcactgcatagacatcaaaca

SEQ ID NO: 3713163 - DNA, 25 bp, Homo sapien
aaacagatccttcaggtccttgcgg

SEQ ID NO: 3713164 - DNA, 25 bp, Homo sapien
gctgaagatcgctggtgttttcatc

SEQ ID NO: 3713165 - DNA, 25 bp, Homo sapien
cttaatgaacaaccccaaatccgag

SEQ ID NO: 3713166 - DNA, 25 bp, Homo sapien
ccttggcaattcacgaggaaatcgt

SEQ ID NO: 3713167 - DNA, 25 bp, Homo sapien
cataagtgcagtgttctccttggca

SEQ ID NO: 3713168 - DNA, 25 bp, Homo sapien
gcctctggttgtccgatagctgctg

SEQ ID NO: 3713169 - DNA, 25 bp, Homo sapien
gacacatactgatgctaggctcgaa

SEQ ID NO: 3713170 - DNA, 25 bp, Homo sapien
aaatgacattagtccctgatgacac

SEQ ID NO: 3713171 - DNA, 25 bp, Homo sapien
tggcaaacccttcaaatgacattag

SEQ ID NO: 3713172 - DNA, 25 bp, Homo sapien
cacatactgatgctaggctcgaact

SEQ ID NO: 3713173 - DNA, 25 bp, Homo sapien
ctttgagctgatggcccgtgaggta

SEQ ID NO: 3713174 - DNA, 25 bp, Homo sapien
gattcgatgtaatagtatgagaggg

SEQ ID NO: 3713175 - DNA, 25 bp, Homo sapien
ctggctgtagagttctaccgaggat

SEQ ID NO: 3713176 - DNA, 25 bp, Homo sapien
ggtaggtattgtgcgaagattcgat

SEQ ID NO: 3713177 - DNA, 25 bp, Homo sapien
aggtgagcacctggagataaagcct

SEQ ID NO: 3713178 - DNA, 25 bp, Homo sapien
gagcacctggagataaagcctcgaa

SEQ ID NO: 3713179 - DNA, 25 bp, Homo sapien
aatgagcgaatccaccccaggtgag

SEQ ID NO: 3713180 - DNA, 25 bp, Homo sapien
tgagcgaatccaccccaggtgagca

SEQ ID NO: 3713181 - DNA, 25 bp, Homo sapien
gtcccagcagtccaattctacactt

SEQ ID NO: 3713182 - DNA, 25 bp, Homo sapien
taaatgatgggcatcccatcgtctc

SEQ ID NO: 3713183 - DNA, 25 bp, Homo sapien
gatcttggttgtcagcgtatgtcca

SEQ ID NO: 3713184 - DNA, 25 bp, Homo sapien
tacacttcgacagccttgcaaaagg

SEQ ID NO: 3713185 - DNA, 25 bp, Homo sapien
ctcaatcgatatgatgattggcagg

SEQ ID NO: 3713186 - DNA, 25 bp, Homo sapien
gcactgcgatcaatggcttcaacca

SEQ ID NO: 3713187 - DNA, 25 bp, Homo sapien
gtggttctcaatcgatatgatgatt

SEQ ID NO: 3713188 - DNA, 25 bp, Homo sapien
ccatttttcgttgctgaggcaatga

SEQ ID NO: 3713189 - DNA, 25 bp, Homo sapien
gtctcaaataagaatttagtcacca

SEQ ID NO: 3713190 - DNA, 25 bp, Homo sapien
tctttctgagttggtcaggtgaagg

SEQ ID NO: 3713191 - DNA, 25 bp, Homo sapien
tgaaggaagcattggatcatctgag

SEQ ID NO: 3713192 - DNA, 25 bp, Homo sapien
tctgagaaatcagtctcaaataaga

SEQ ID NO: 3713193 - DNA, 25 bp, Homo sapien
ttgaaaagcagacagtctgaggctg

SEQ ID NO: 3713194 - DNA, 25 bp, Homo sapien
cacattttcagattgacgaattcaa

SEQ ID NO: 3713195 - DNA, 25 bp, Homo sapien
tggtaagtaaagagtcttagcaacc

SEQ ID NO: 3713196 - DNA, 25 bp, Homo sapien
cagcggctggccaagaatttttgaa

SEQ ID NO: 3713197 - DNA, 25 bp, Homo sapien
cagaaagggattcatagtcataatc

SEQ ID NO: 3713198 - DNA, 25 bp, Homo sapien
tggcattcccaccattataagcctg

SEQ ID NO: 3713199 - DNA, 25 bp, Homo sapien
gtcataatcatattcgtcctcctca

SEQ ID NO: 3713200 - DNA, 25 bp, Homo sapien
tcttcctcattattggcaggtcggg

SEQ ID NO: 3713201 - DNA, 25 bp, Homo sapien
ctccttcctcggtccttgctaagtg

SEQ ID NO: 3713202 - DNA, 25 bp, Homo sapien
tcttctttctgtaagtgttggctaa

SEQ ID NO: 3713203 - DNA, 25 bp, Homo sapien
ccttcctcggtccttgctaagtgac

SEQ ID NO: 3713204 - DNA, 25 bp, Homo sapien
tgttggctaacagaatcccctcctt

SEQ ID NO: 3713205 - DNA, 25 bp, Homo sapien
gaaacagtctactatcagcaaaggt

SEQ ID NO: 3713206 - DNA, 25 bp, Homo sapien
ggtttctggtctgggcatatctgca

SEQ ID NO: 3713207 - DNA, 25 bp, Homo sapien
caaaactgaactatgactggagaca

SEQ ID NO: 3713208 - DNA, 25 bp, Homo sapien
tgcagtataaccagtgatggaggct

SEQ ID NO: 3713209 - DNA, 25 bp, Homo sapien
gacccattattacgagaagctagga

SEQ ID NO: 3713210 - DNA, 25 bp, Homo sapien
gagatcacagagataaaccgggcac

SEQ ID NO: 3713211 - DNA, 25 bp, Homo sapien
aattctgtggctaggcattatctca

SEQ ID NO: 3713212 - DNA, 25 bp, Homo sapien
aaccgggcaccctgactttagagat

SEQ ID NO: 3713213 - DNA, 25 bp, Homo sapien
taggagcaggggaggcagtaaggac

SEQ ID NO: 3713214 - DNA, 25 bp, Homo sapien
gttaggagcaggggaggcagtaagg

SEQ ID NO: 3713215 - DNA, 25 bp, Homo sapien
ggagcaggggaggcagtaaggacat

SEQ ID NO: 3713216 - DNA, 25 bp, Homo sapien
cttcctgaccgttaggagcagggga

SEQ ID NO: 3713217 - DNA, 25 bp, Homo sapien
tttcctttgttgcaagcagagttat

SEQ ID NO: 3713218 - DNA, 25 bp, Homo sapien
ctttatcctctttgggatttcttca

SEQ ID NO: 3713219 - DNA, 25 bp, Homo sapien
tatcctctttgggatttcttcatta

SEQ ID NO: 3713220 - DNA, 25 bp, Homo sapien
gcaagcagagttatctgctttcttt

SEQ ID NO: 3713221 - DNA, 25 bp, Homo sapien
tacaccattagtaggtattggctgg

SEQ ID NO: 3713222 - DNA, 25 bp, Homo sapien
tattggctggatgaatcagtgacta

SEQ ID NO: 3713223 - DNA, 25 bp, Homo sapien
aatatcaccaagtgaactttggcag

SEQ ID NO: 3713224 - DNA, 25 bp, Homo sapien
tccacaaatggaaggtgggtgtctt

SEQ ID NO: 3713225 - DNA, 25 bp, Homo sapien
attcaacacagttgacatgtctgcc

SEQ ID NO: 3713226 - DNA, 25 bp, Homo sapien
ttcaacacagttgacatgtctgcct

SEQ ID NO: 3713227 - DNA, 25 bp, Homo sapien
tgtctgtttagccaaatcttccttc

SEQ ID NO: 3713228 - DNA, 25 bp, Homo sapien
tgccctcttggcccgaatgttctgt

SEQ ID NO: 3713229 - DNA, 25 bp, Homo sapien
gctgccctcttggcccgaatgttct

SEQ ID NO: 3713230 - DNA, 25 bp, Homo sapien
cctcttggcccgaatgttctgtttt

SEQ ID NO: 3713231 - DNA, 25 bp, Homo sapien
cttgacaatagattacaaggtcaga

SEQ ID NO: 3713232 - DNA, 25 bp, Homo sapien
ctgcttgacaatagattacaaggtc

SEQ ID NO: 3713233 - DNA, 25 bp, Homo sapien
ttttactgcttgacaatagattaca

SEQ ID NO: 3713234 - DNA, 25 bp, Homo sapien
tactgcttgacaatagattacaagg

SEQ ID NO: 3713235 - DNA, 25 bp, Homo sapien
tcattctgcccggattgttgccaaa

SEQ ID NO: 3713236 - DNA, 25 bp, Homo sapien
tctgctagagccagatgcatttaga

SEQ ID NO: 3713237 - DNA, 25 bp, Homo sapien
taaatgatgctgtctcccctgggct

SEQ ID NO: 3713238 - DNA, 25 bp, Homo sapien
ttctgcccggattgttgccaaaaat

SEQ ID NO: 3713239 - DNA, 25 bp, Homo sapien
ccaggtctgtcgaatgccttcacag

SEQ ID NO: 3713240 - DNA, 25 bp, Homo sapien
ggtctgtcgaatgccttcacaggaa

SEQ ID NO: 3713241 - DNA, 25 bp, Homo sapien
gaagattcctcccaggtctgtcgaa

SEQ ID NO: 3713242 - DNA, 25 bp, Homo sapien
tcctcccaggtctgtcgaatgcctt

SEQ ID NO: 3713243 - DNA, 25 bp, Homo sapien
gagtgccacaagctgtatcccatgg

SEQ ID NO: 3713244 - DNA, 25 bp, Homo sapien
catcagtctggtagttgagtgccac

SEQ ID NO: 3713245 - DNA, 25 bp, Homo sapien
gcggcattttcattcagcgacgaga

SEQ ID NO: 3713246 - DNA, 25 bp, Homo sapien
tctgagaatacctgcgacacagacg

SEQ ID NO: 3713247 - DNA, 25 bp, Homo sapien
gaactggaggtttcaatacataacc

SEQ ID NO: 3713248 - DNA, 25 bp, Homo sapien
tggggcagttcttgtcccacagaac

SEQ ID NO: 3713249 - DNA, 25 bp, Homo sapien
gagaaaacttctgatacatggggca

SEQ ID NO: 3713250 - DNA, 25 bp, Homo sapien
gcctcaaacattgcagcatttaaat

SEQ ID NO: 3713251 - DNA, 25 bp, Homo sapien
tacaagatcttcgaagtgaacgtgg

SEQ ID NO: 3713252 - DNA, 25 bp, Homo sapien
tgaacgtggaacagaaactgctcgt

SEQ ID NO: 3713253 - DNA, 25 bp, Homo sapien
gacttcaatgcacgggcttcccatg

SEQ ID NO: 3713254 - DNA, 25 bp, Homo sapien
gcatgcccaggacgtcgacttcaat

SEQ ID NO: 3713255 - DNA, 25 bp, Homo sapien
tttaaagctttcagtggaatgattc

SEQ ID NO: 3713256 - DNA, 25 bp, Homo sapien
ttaaagctttcagtggaatgattct

SEQ ID NO: 3713257 - DNA, 25 bp, Homo sapien
gtggaatgattctctgagcagttac

SEQ ID NO: 3713258 - DNA, 25 bp, Homo sapien
attgggaaaagcttgttaaccatgg

SEQ ID NO: 3713259 - DNA, 25 bp, Homo sapien
caagacttcattgtgaaggtttcgc

SEQ ID NO: 3713260 - DNA, 25 bp, Homo sapien
cattgtgaaggtttcgcagctgaag

SEQ ID NO: 3713261 - DNA, 25 bp, Homo sapien
cttcattgtgaaggtttcgcagctg

SEQ ID NO: 3713262 - DNA, 25 bp, Homo sapien
tctccaagacttcattgtgaaggtt

SEQ ID NO: 3713263 - DNA, 25 bp, Homo sapien
tgtagcaatccccataaatatgttg

SEQ ID NO: 3713264 - DNA, 25 bp, Homo sapien
agcaatccccataaatatgttgagt

SEQ ID NO: 3713265 - DNA, 25 bp, Homo sapien
cagtgtagcaatccccataaatatg

SEQ ID NO: 3713266 - DNA, 25 bp, Homo sapien
ttcagtgtagcaatccccataaata

SEQ ID NO: 3713267 - DNA, 25 bp, Homo sapien
taaactataccctgaaagcaatgga

SEQ ID NO: 3713268 - DNA, 25 bp, Homo sapien
gagatctgacgacatcacaaggcaa

SEQ ID NO: 3713269 - DNA, 25 bp, Homo sapien
ggaagactctaccacaagccaggtg

SEQ ID NO: 3713270 - DNA, 25 bp, Homo sapien
gagaactgatggagggttttccaca

SEQ ID NO: 3713271 - DNA, 25 bp, Homo sapien
tgggaccccatgcaccgtgactctg

SEQ ID NO: 3713272 - DNA, 25 bp, Homo sapien
tgcaccgtgactctgtgagtctgca

SEQ ID NO: 3713273 - DNA, 25 bp, Homo sapien
accccatgcaccgtgactctgtgag

SEQ ID NO: 3713274 - DNA, 25 bp, Homo sapien
atagtgaaaacggtaaagggctctg

SEQ ID NO: 3713275 - DNA, 25 bp, Homo sapien
tttatgttcactccgggcaacggca

SEQ ID NO: 3713276 - DNA, 25 bp, Homo sapien
tctggtctggattaagcaaacaccc

SEQ ID NO: 3713277 - DNA, 25 bp, Homo sapien
gagcgaacacatctcaccaggagga

SEQ ID NO: 3713278 - DNA, 25 bp, Homo sapien
taatcttgcaacacaggactgaggg

SEQ ID NO: 3713279 - DNA, 25 bp, Homo sapien
tttgatgtcttgttcatttgtcaga

SEQ ID NO: 3713280 - DNA, 25 bp, Homo sapien
tgatgtcttgttcatttgtcagaat

SEQ ID NO: 3713281 - DNA, 25 bp, Homo sapien
gtggtaacaggtttgatgtcttgtt

SEQ ID NO: 3713282 - DNA, 25 bp, Homo sapien
ctgtggtaacaggtttgatgtcttg

SEQ ID NO: 3713283 - DNA, 25 bp, Homo sapien
ctggaatggttgtttcctacattca

SEQ ID NO: 3713284 - DNA, 25 bp, Homo sapien
tttttaagacaatcctgcccatgta

SEQ ID NO: 3713285 - DNA, 25 bp, Homo sapien
ggaatggttgtttcctacattcatt

SEQ ID NO: 3713286 - DNA, 25 bp, Homo sapien
ggtttttaagacaatcctgcccatg

SEQ ID NO: 3713287 - DNA, 25 bp, Homo sapien
gaagtcagtcatccccagaatagaa

SEQ ID NO: 3713288 - DNA, 25 bp, Homo sapien
tactggacccatagctgatgacatg

SEQ ID NO: 3713289 - DNA, 25 bp, Homo sapien
tggaaagaacactgacctggaagcc

SEQ ID NO: 3713290 - DNA, 25 bp, Homo sapien
ttcactgtgccctagcaagcatggg

SEQ ID NO: 3713291 - DNA, 25 bp, Homo sapien
aggtggcgccaaaactgcaaccagg

SEQ ID NO: 3713292 - DNA, 25 bp, Homo sapien
gaagaatccatgagttgctgtcgct

SEQ ID NO: 3713293 - DNA, 25 bp, Homo sapien
tcagaatagataactgccaccaggt

SEQ ID NO: 3713294 - DNA, 25 bp, Homo sapien
tccagaccaggctactgaaatgggt

SEQ ID NO: 3713295 - DNA, 25 bp, Homo sapien
aatgacatcctgtgcagtgctgacg

SEQ ID NO: 3713296 - DNA, 25 bp, Homo sapien
gctttgatgactgttcgaggttgct

SEQ ID NO: 3713297 - DNA, 25 bp, Homo sapien
ttgatgactgttcgaggttgctctg

SEQ ID NO: 3713298 - DNA, 25 bp, Homo sapien
acatcctgtgcagtgctgacgcggg

SEQ ID NO: 3713299 - DNA, 25 bp, Homo sapien
aaggacccgctgagaggactttggt

SEQ ID NO: 3713300 - DNA, 25 bp, Homo sapien
tggtgtggtagtcttcttgttggta

SEQ ID NO: 3713301 - DNA, 25 bp, Homo sapien
cctgctcctttagcttaaggatgaa

SEQ ID NO: 3713302 - DNA, 25 bp, Homo sapien
aaagcacatagtcgcttggattggg

SEQ ID NO: 3713303 - DNA, 25 bp, Homo sapien
gctgagaaggtgatgtaagtcctcg

SEQ ID NO: 3713304 - DNA, 25 bp, Homo sapien
ttggatactttctgaggtcaagagc

SEQ ID NO: 3713305 - DNA, 25 bp, Homo sapien
gagcttcttgagttcacttgcgaaa

SEQ ID NO: 3713306 - DNA, 25 bp, Homo sapien
cactgtcggtaatccattgtgtcac

SEQ ID NO: 3713307 - DNA, 25 bp, Homo sapien
tatgccttccttacaaagtagttta

SEQ ID NO: 3713308 - DNA, 25 bp, Homo sapien
caggatggtgcaatgacttactata

SEQ ID NO: 3713309 - DNA, 25 bp, Homo sapien
tctttataggcggtgttcaatagca

SEQ ID NO: 3713310 - DNA, 25 bp, Homo sapien
gacattgtactaattatgccttcct

SEQ ID NO: 3713311 - DNA, 25 bp, Homo sapien
ccactgcagagtgtaatataggaca

SEQ ID NO: 3713312 - DNA, 25 bp, Homo sapien
taatcttgtagcacatatcgggctc

SEQ ID NO: 3713313 - DNA, 25 bp, Homo sapien
taccaagggttcagagttttccagc

SEQ ID NO: 3713314 - DNA, 25 bp, Homo sapien
ccaatgactataagagaagcctccc

SEQ ID NO: 3713315 - DNA, 25 bp, Homo sapien
ggaatacagccacgttcgttcatgt

SEQ ID NO: 3713316 - DNA, 25 bp, Homo sapien
cagtcccctgggcttcattcatcag

SEQ ID NO: 3713317 - DNA, 25 bp, Homo sapien
taaattggttggtggcaactagccc

SEQ ID NO: 3713318 - DNA, 25 bp, Homo sapien
gacccttgctctaagtcaattcgtg

SEQ ID NO: 3713319 - DNA, 25 bp, Homo sapien
gcttctaattctcggccataaaatg

SEQ ID NO: 3713320 - DNA, 25 bp, Homo sapien
tgtatggcccctgaattaagaatag

SEQ ID NO: 3713321 - DNA, 25 bp, Homo sapien
tagttgtgttggcaaattaaggtcc

SEQ ID NO: 3713322 - DNA, 25 bp, Homo sapien
aaaaatcctaaagaggagtgcactg

SEQ ID NO: 3713323 - DNA, 25 bp, Homo sapien
gatattaaattatacgtcattctaa

SEQ ID NO: 3713324 - DNA, 25 bp, Homo sapien
tatacgtcattctaaattcattttg

SEQ ID NO: 3713325 - DNA, 25 bp, Homo sapien
tttcttgttaagacattgcaattca

SEQ ID NO: 3713326 - DNA, 25 bp, Homo sapien
ccaaaaatgagtaatctaatctatg

SEQ ID NO: 3713327 - DNA, 25 bp, Homo sapien
tatgacttggatcaatagctcttca

SEQ ID NO: 3713328 - DNA, 25 bp, Homo sapien
cacttaatggttttgtacagcaaag

SEQ ID NO: 3713329 - DNA, 25 bp, Homo sapien
tacattaaatggcaagtatgacttg

SEQ ID NO: 3713330 - DNA, 25 bp, Homo sapien
gagaactaatgcttctaatccatgg

SEQ ID NO: 3713331 - DNA, 25 bp, Homo sapien
actgtgtgtttagcactatgctggc

SEQ ID NO: 3713332 - DNA, 25 bp, Homo sapien
gttatacatatggagaatcacagtg

SEQ ID NO: 3713333 - DNA, 25 bp, Homo sapien
cacagtgggactacaaaattataca

SEQ ID NO: 3713334 - DNA, 25 bp, Homo sapien
tcctgaggctatattaagctacagc

SEQ ID NO: 3713335 - DNA, 25 bp, Homo sapien
tattcccatattctaggagtggcct

SEQ ID NO: 3713336 - DNA, 25 bp, Homo sapien
tcccctcttggaacaggtaaaatgc

SEQ ID NO: 3713337 - DNA, 25 bp, Homo sapien
gagtggcctaagaaatgcgtgtttc

SEQ ID NO: 3713338 - DNA, 25 bp, Homo sapien
gtattttatgtaacagctattccca

SEQ ID NO: 3713339 - DNA, 25 bp, Homo sapien
taactcctacaagcttagtgttctg

SEQ ID NO: 3713340 - DNA, 25 bp, Homo sapien
ttccgtttgcaagcccattggtttc

SEQ ID NO: 3713341 - DNA, 25 bp, Homo sapien
gggacacattgaaactatagcacct

SEQ ID NO: 3713342 - DNA, 25 bp, Homo sapien
ggttgactgatgagggcgcctctct

SEQ ID NO: 3713343 - DNA, 25 bp, Homo sapien
catgctctgcgggtaagagtggccc

SEQ ID NO: 3713344 - DNA, 25 bp, Homo sapien
tcctgaactggatgagcctgagtac

SEQ ID NO: 3713345 - DNA, 25 bp, Homo sapien
actgcttgacagtgaatctcaggga

SEQ ID NO: 3713346 - DNA, 25 bp, Homo sapien
gctctgtgggaactgcatgctctgc

SEQ ID NO: 3713347 - DNA, 25 bp, Homo sapien
taaaggacctaagctatcaagaaag

SEQ ID NO: 3713348 - DNA, 25 bp, Homo sapien
tgaatgctataacatacctaattgg

SEQ ID NO: 3713349 - DNA, 25 bp, Homo sapien
cactgttcaaattacatgcaggtat

SEQ ID NO: 3713350 - DNA, 25 bp, Homo sapien
tatgacccatcattgtagacaaatg

SEQ ID NO: 3713351 - DNA, 25 bp, Homo sapien
taaatctgcctcatactaggttatc

SEQ ID NO: 3713352 - DNA, 25 bp, Homo sapien
ctatagtcaccctgtaaatctgcct

SEQ ID NO: 3713353 - DNA, 25 bp, Homo sapien
cagtcaccttaaatatgtgtcttta

SEQ ID NO: 3713354 - DNA, 25 bp, Homo sapien
tattttacttgggatatcagtcacc

SEQ ID NO: 3713355 - DNA, 25 bp, Homo sapien
tgtgttcggtccaactcgcttccag

SEQ ID NO: 3713356 - DNA, 25 bp, Homo sapien
cttggataagcgcacaaattatgtg

SEQ ID NO: 3713357 - DNA, 25 bp, Homo sapien
ctttagatgtttagcaaaaggcaac

SEQ ID NO: 3713358 - DNA, 25 bp, Homo sapien
cttccattagaagacagtgattact

SEQ ID NO: 3713359 - DNA, 25 bp, Homo sapien
tatagccttgcacataatctgcttt

SEQ ID NO: 3713360 - DNA, 25 bp, Homo sapien
atagccttgcacataatctgctttt

SEQ ID NO: 3713361 - DNA, 25 bp, Homo sapien
ccttatagccttgcacataatctgc

SEQ ID NO: 3713362 - DNA, 25 bp, Homo sapien
cttatagccttgcacataatctgct

SEQ ID NO: 3713363 - DNA, 25 bp, Homo sapien
gcgcaaaagtcggaccggtcaagcc

SEQ ID NO: 3713364 - DNA, 25 bp, Homo sapien
ggagattccccgaaccatagagacg

SEQ ID NO: 3713365 - DNA, 25 bp, Homo sapien
gtagctagagagacgcaggctgcca

SEQ ID NO: 3713366 - DNA, 25 bp, Homo sapien
caggctgccaatctaggatccgcca

SEQ ID NO: 3713367 - DNA, 25 bp, Homo sapien
ggaggcaaagaaggactacaggcgc

SEQ ID NO: 3713368 - DNA, 25 bp, Homo sapien
gaggcaaagaaggactacaggcgca

SEQ ID NO: 3713369 - DNA, 25 bp, Homo sapien
aggcaaagaaggactacaggcgcag

SEQ ID NO: 3713370 - DNA, 25 bp, Homo sapien
agcaggctccggcatcctccggacc

SEQ ID NO: 3713371 - DNA, 25 bp, Homo sapien
ctccggcatcctccggacccaccat

SEQ ID NO: 3713372 - DNA, 25 bp, Homo sapien
cgagcaggctccggcatcctccgga

SEQ ID NO: 3713373 - DNA, 25 bp, Homo sapien
aggctccggcatcctccggacccac

SEQ ID NO: 3713374 - DNA, 25 bp, Homo sapien
tcctggcccacggggtccggcgcag

SEQ ID NO: 3713375 - DNA, 25 bp, Homo sapien
ggcccacggggtccggcgcaggcac

SEQ ID NO: 3713376 - DNA, 25 bp, Homo sapien
tggcccacggggtccggcgcaggca

SEQ ID NO: 3713377 - DNA, 25 bp, Homo sapien
ctggcccacggggtccggcgcaggc

SEQ ID NO: 3713378 - DNA, 25 bp, Homo sapien
ccgacgcctccgccaaagccgcccg

SEQ ID NO: 3713379 - DNA, 25 bp, Homo sapien
cgacgcctccgccaaagccgcccgt

SEQ ID NO: 3713380 - DNA, 25 bp, Homo sapien
gggagcggacagtagcagagccccg

SEQ ID NO: 3713381 - DNA, 25 bp, Homo sapien
ccggccgccgcgaggtaacgctgaa

SEQ ID NO: 3713382 - DNA, 25 bp, Homo sapien
gacagtagcagagccccggctccag

SEQ ID NO: 3713383 - DNA, 25 bp, Homo sapien
aggcgtccgatcgtggggctgccga

SEQ ID NO: 3713384 - DNA, 25 bp, Homo sapien
gtgccgcggcgcgcggccatcagcc

SEQ ID NO: 3713385 - DNA, 25 bp, Homo sapien
cttcgtgccgcggcgcgcggccatc

SEQ ID NO: 3713386 - DNA, 25 bp, Homo sapien
tgccgcggcgcgcggccatcagcca

SEQ ID NO: 3713387 - DNA, 25 bp, Homo sapien
tcgtgccgcggcgcgcggccatcag

SEQ ID NO: 3713388 - DNA, 25 bp, Homo sapien
aaacccgagtcgccgttggtcatgc

SEQ ID NO: 3713389 - DNA, 25 bp, Homo sapien
tccaggcgaaggcggccgtaggggc

SEQ ID NO: 3713390 - DNA, 25 bp, Homo sapien
gcgcgcgccagcccgcgagcctctt

SEQ ID NO: 3713391 - DNA, 25 bp, Homo sapien
ttccagatcgcgacagtcccggccc

SEQ ID NO: 3713392 - DNA, 25 bp, Homo sapien
gcggctcacctggaacgtgttgcga

SEQ ID NO: 3713393 - DNA, 25 bp, Homo sapien
ctggtgaagaagtccgcgaagccgc

SEQ ID NO: 3713394 - DNA, 25 bp, Homo sapien
gtcctcaagcggagaggcccaatcg

SEQ ID NO: 3713395 - DNA, 25 bp, Homo sapien
tctgagtcctcgctactgctgcagc

SEQ ID NO: 3713396 - DNA, 25 bp, Homo sapien
acctcttgtggcagtggggatagca

SEQ ID NO: 3713397 - DNA, 25 bp, Homo sapien
accaggagcactatggacaactgat

SEQ ID NO: 3713398 - DNA, 25 bp, Homo sapien
ggagcactatggacaactgatttga

SEQ ID NO: 3713399 - DNA, 25 bp, Homo sapien
ctctctaggagggactttaccaaat

SEQ ID NO: 3713400 - DNA, 25 bp, Homo sapien
tctctaggagggactttaccaaata

SEQ ID NO: 3713401 - DNA, 25 bp, Homo sapien
taaaactgtaggtagcctggacaat

SEQ ID NO: 3713402 - DNA, 25 bp, Homo sapien
gccaagtatggttgtacgcgcatga

SEQ ID NO: 3713403 - DNA, 25 bp, Homo sapien
aagccctagtgttgcagtttctcga

SEQ ID NO: 3713404 - DNA, 25 bp, Homo sapien
gtcagtgccctatcacaaatcaaag

SEQ ID NO: 3713405 - DNA, 25 bp, Homo sapien
gttgtcagtagaccagcaatataat

SEQ ID NO: 3713406 - DNA, 25 bp, Homo sapien
taacttagaatcctataccagagga

SEQ ID NO: 3713407 - DNA, 25 bp, Homo sapien
aatggagagggaacatctattaact

SEQ ID NO: 3713408 - DNA, 25 bp, Homo sapien
tttcagacaagcaatagctaagaga

SEQ ID NO: 3713409 - DNA, 25 bp, Homo sapien
gatgagaaataagattagaaaggtg

SEQ ID NO: 3713410 - DNA, 25 bp, Homo sapien
agggcctttcactggctaaaatatt

SEQ ID NO: 3713411 - DNA, 25 bp, Homo sapien
actggagcaaaaatgatgggtactg

SEQ ID NO: 3713412 - DNA, 25 bp, Homo sapien
tgggtactgataggcagaaagaatt

SEQ ID NO: 3713413 - DNA, 25 bp, Homo sapien
tattatgctataatgagggatacat

SEQ ID NO: 3713414 - DNA, 25 bp, Homo sapien
aaaaatattatgctataatgaggga

SEQ ID NO: 3713415 - DNA, 25 bp, Homo sapien
aatattatgctataatgagggatac

SEQ ID NO: 3713416 - DNA, 25 bp, Homo sapien
agtttgtactattaaatctgtatca

SEQ ID NO: 3713417 - DNA, 25 bp, Homo sapien
tcaaaattcttgcgtcttgaagact

SEQ ID NO: 3713418 - DNA, 25 bp, Homo sapien
ggtcctccccgttcgtgcttcatat

SEQ ID NO: 3713419 - DNA, 25 bp, Homo sapien
ttcttgcgtcttgaagactgaggtg

SEQ ID NO: 3713420 - DNA, 25 bp, Homo sapien
caggtcctccccgttcgtgcttcat

SEQ ID NO: 3713421 - DNA, 25 bp, Homo sapien
ggtcgatcctcaagaatcaaggcag

SEQ ID NO: 3713422 - DNA, 25 bp, Homo sapien
gatcctcaagaatcaaggcagtggt

SEQ ID NO: 3713423 - DNA, 25 bp, Homo sapien
ctcaagaatcaaggcagtggtagaa

SEQ ID NO: 3713424 - DNA, 25 bp, Homo sapien
gatggtcgatcctcaagaatcaagg

SEQ ID NO: 3713425 - DNA, 25 bp, Homo sapien
cctgcgtcagcctcttaagtaactg

SEQ ID NO: 3713426 - DNA, 25 bp, Homo sapien
ctccacctcccagttggtttcaagc

SEQ ID NO: 3713427 - DNA, 25 bp, Homo sapien
ctcttaagtaactggggttacagat

SEQ ID NO: 3713428 - DNA, 25 bp, Homo sapien
tgcctggctacattttttggtaatt

SEQ ID NO: 3713429 - DNA, 25 bp, Homo sapien
tgtcggtgacgtaaagcttcttcca

SEQ ID NO: 3713430 - DNA, 25 bp, Homo sapien
catcgtattcttgtcggtgacgtaa

SEQ ID NO: 3713431 - DNA, 25 bp, Homo sapien
gccaccatctcatcgtattcttgtc

SEQ ID NO: 3713432 - DNA, 25 bp, Homo sapien
ttcttgtcggtgacgtaaagcttct

SEQ ID NO: 3713433 - DNA, 25 bp, Homo sapien
cagaaaattataccatttggagtta

SEQ ID NO: 3713434 - DNA, 25 bp, Homo sapien
gatgaattttaccatccatcttctt

SEQ ID NO: 3713435 - DNA, 25 bp, Homo sapien
aagacagacttgatgaattttacca

SEQ ID NO: 3713436 - DNA, 25 bp, Homo sapien
gacttgatgaattttaccatccatc

SEQ ID NO: 3713437 - DNA, 25 bp, Homo sapien
tacttcccaattgggcagtatttca

SEQ ID NO: 3713438 - DNA, 25 bp, Homo sapien
cctgcttaaatcgttctttcatgat

SEQ ID NO: 3713439 - DNA, 25 bp, Homo sapien
tcttcctgcttaaatcgttctttca

SEQ ID NO: 3713440 - DNA, 25 bp, Homo sapien
ttcattgatccaaattaccattgca

SEQ ID NO: 3713441 - DNA, 25 bp, Homo sapien
caccacaattctcgaactcttcttg

SEQ ID NO: 3713442 - DNA, 25 bp, Homo sapien
ttctcgaactcttcttgtactacgc

SEQ ID NO: 3713443 - DNA, 25 bp, Homo sapien
tcctacagctagactccaaactttc

SEQ ID NO: 3713444 - DNA, 25 bp, Homo sapien
gacactagggggcaatccctgccac

SEQ ID NO: 3713445 - DNA, 25 bp, Homo sapien
gaataactgaacgtagaatacaaac

SEQ ID NO: 3713446 - DNA, 25 bp, Homo sapien
ttgtacatgtgggaataactgaacg

SEQ ID NO: 3713447 - DNA, 25 bp, Homo sapien
tgggaataactgaacgtagaataca

SEQ ID NO: 3713448 - DNA, 25 bp, Homo sapien
catgtgggaataactgaacgtagaa

SEQ ID NO: 3713449 - DNA, 25 bp, Homo sapien
cctaatatattatggtggaaccaag

SEQ ID NO: 3713450 - DNA, 25 bp, Homo sapien
atttgactgactttagagcccttac

SEQ ID NO: 3713451 - DNA, 25 bp, Homo sapien
gcccaaggtcacaaacctaatatat

SEQ ID NO: 3713452 - DNA, 25 bp, Homo sapien
caagtcaaattactaaagccattca

SEQ ID NO: 3713453 - DNA, 25 bp, Homo sapien
gaagcaggcttaaagatgatacttt

SEQ ID NO: 3713454 - DNA, 25 bp, Homo sapien
gcaggcttaaagatgatactttgga

SEQ ID NO: 3713455 - DNA, 25 bp, Homo sapien
gagagtttgaagcaggcttaaagat

SEQ ID NO: 3713456 - DNA, 25 bp, Homo sapien
tttgaagcaggcttaaagatgatac

SEQ ID NO: 3713457 - DNA, 25 bp, Homo sapien
accacaccaggcaaaattcctatta

SEQ ID NO: 3713458 - DNA, 25 bp, Homo sapien
cctattatttatgcctggctccatc

SEQ ID NO: 3713459 - DNA, 25 bp, Homo sapien
catagaagagatgaatataaggtta

SEQ ID NO: 3713460 - DNA, 25 bp, Homo sapien
agaagagatgaatataaggttaaaa

SEQ ID NO: 3713461 - DNA, 25 bp, Homo sapien
ccgttcttttgctcttgagaggaag

SEQ ID NO: 3713462 - DNA, 25 bp, Homo sapien
accgttcttttgctcttgagaggaa

SEQ ID NO: 3713463 - DNA, 25 bp, Homo sapien
caccgttcttttgctcttgagagga

SEQ ID NO: 3713464 - DNA, 25 bp, Homo sapien
ccaccgttcttttgctcttgagagg

SEQ ID NO: 3713465 - DNA, 25 bp, Homo sapien
cacaaggtcttgagagggcatatca

SEQ ID NO: 3713466 - DNA, 25 bp, Homo sapien
gacaaagtcaccctagttggaggaa

SEQ ID NO: 3713467 - DNA, 25 bp, Homo sapien
tatgggcttaggatcgagctcgccg

SEQ ID NO: 3713468 - DNA, 25 bp, Homo sapien
tttttacagaagatatgggcagacc

SEQ ID NO: 3713469 - DNA, 25 bp, Homo sapien
cttctgaaagatgtagagagatgga

SEQ ID NO: 3713470 - DNA, 25 bp, Homo sapien
tggcctctcgatcagcaacagatac

SEQ ID NO: 3713471 - DNA, 25 bp, Homo sapien
ggaaatgtacgggatatgtccaact

SEQ ID NO: 3713472 - DNA, 25 bp, Homo sapien
tatgtccaacttaattaattccaga

SEQ ID NO: 3713473 - DNA, 25 bp, Homo sapien
gcaacttcataatagcctatgtaca

SEQ ID NO: 3713474 - DNA, 25 bp, Homo sapien
catcaagtgcctactacataaaagg

SEQ ID NO: 3713475 - DNA, 25 bp, Homo sapien
tctcttttcataaggtataagcaac

SEQ ID NO: 3713476 - DNA, 25 bp, Homo sapien
ctataatgtatttcggtcagtggaa

SEQ ID NO: 3713477 - DNA, 25 bp, Homo sapien
tgtatgcccctaaaatactatgcaa

SEQ ID NO: 3713478 - DNA, 25 bp, Homo sapien
taaccaacatcaggcctgtagcatg

SEQ ID NO: 3713479 - DNA, 25 bp, Homo sapien
tatgcaagacatcatgatatggacc

SEQ ID NO: 3713480 - DNA, 25 bp, Homo sapien
tactatgcaagacatcatgatatgg

SEQ ID NO: 3713481 - DNA, 25 bp, Homo sapien
aactgagttctgtacatttcacagt

SEQ ID NO: 3713482 - DNA, 25 bp, Homo sapien
atggcaaatacaactaataactgag

SEQ ID NO: 3713483 - DNA, 25 bp, Homo sapien
tggcaaatacaactaataactgagt

SEQ ID NO: 3713484 - DNA, 25 bp, Homo sapien
ataactgagttctgtacatttcaca

SEQ ID NO: 3713485 - DNA, 25 bp, Homo sapien
gccatctcggttataagatcaactg

SEQ ID NO: 3713486 - DNA, 25 bp, Homo sapien
cagtttcctacggtcaacagtggtc

SEQ ID NO: 3713487 - DNA, 25 bp, Homo sapien
catgctgttctaaatagggtggtaa

SEQ ID NO: 3713488 - DNA, 25 bp, Homo sapien
atgtatatgctacccacctgcctag

SEQ ID NO: 3713489 - DNA, 25 bp, Homo sapien
aattcaagttgagggtcgttccgca

SEQ ID NO: 3713490 - DNA, 25 bp, Homo sapien
aaagtgacattgttacgacacatac

SEQ ID NO: 3713491 - DNA, 25 bp, Homo sapien
gacaaaactgtctaacctgaatcta

SEQ ID NO: 3713492 - DNA, 25 bp, Homo sapien
tcgttccgcaaacagctagacttaa

SEQ ID NO: 3713493 - DNA, 25 bp, Homo sapien
catggcttattcaggagattggcaa

SEQ ID NO: 3713494 - DNA, 25 bp, Homo sapien
caaatgcgataaaggcatctgcctc

SEQ ID NO: 3713495 - DNA, 25 bp, Homo sapien
gctgtgatccacacgaaaaaaggcc

SEQ ID NO: 3713496 - DNA, 25 bp, Homo sapien
tccaaattgagaatgagtactgctg

SEQ ID NO: 3713497 - DNA, 25 bp, Homo sapien
tatctggtgtaagactgtaagattt

SEQ ID NO: 3713498 - DNA, 25 bp, Homo sapien
cagtctatcaagtatatatctggtg

SEQ ID NO: 3713499 - DNA, 25 bp, Homo sapien
tggtgtaagactgtaagatttgaag

SEQ ID NO: 3713500 - DNA, 25 bp, Homo sapien
tgtaagactgtaagatttgaagtga

SEQ ID NO: 3713501 - DNA, 25 bp, Homo sapien
aaatggggtcttgctgtggtgccca

SEQ ID NO: 3713502 - DNA, 25 bp, Homo sapien
gaaatggggtcttgctgtggtgccc

SEQ ID NO: 3713503 - DNA, 25 bp, Homo sapien
gacaggaaattaataggcaaaatct

SEQ ID NO: 3713504 - DNA, 25 bp, Homo sapien
tgcagagaatgactccgtcacacac

SEQ ID NO: 3713505 - DNA, 25 bp, Homo sapien
caatcaatccagctaaaaaatgggc

SEQ ID NO: 3713506 - DNA, 25 bp, Homo sapien
aaaaacaaacgccaggcaccatggc

SEQ ID NO: 3713507 - DNA, 25 bp, Homo sapien
aaatacatcccagactcgacaggcc

SEQ ID NO: 3713508 - DNA, 25 bp, Homo sapien
tgatttgctatatagtgtgaagatc

SEQ ID NO: 3713509 - DNA, 25 bp, Homo sapien
ccagactcgacaggccagatcaagt

SEQ ID NO: 3713510 - DNA, 25 bp, Homo sapien
caggccagatcaagtggtagtgatt

SEQ ID NO: 3713511 - DNA, 25 bp, Homo sapien
gaatggctgcaatacaactgaacag

SEQ ID NO: 3713512 - DNA, 25 bp, Homo sapien
tatcttcatataatcggaggattcc

SEQ ID NO: 3713513 - DNA, 25 bp, Homo sapien
gctatatgaataaagtccatctgca

SEQ ID NO: 3713514 - DNA, 25 bp, Homo sapien
ggaggattcctaatccagtcctaaa

SEQ ID NO: 3713515 - DNA, 25 bp, Homo sapien
aaagcaggactactgttcttgtctc

SEQ ID NO: 3713516 - DNA, 25 bp, Homo sapien
aagcaggactactgttcttgtctcc

SEQ ID NO: 3713517 - DNA, 25 bp, Homo sapien
agcaggactactgttcttgtctcct

SEQ ID NO: 3713518 - DNA, 25 bp, Homo sapien
caaagcaggactactgttcttgtct

SEQ ID NO: 3713519 - DNA, 25 bp, Homo sapien
tatgtcagttagtctgtcaattttg

SEQ ID NO: 3713520 - DNA, 25 bp, Homo sapien
tttcttccacgccttttacatagga

SEQ ID NO: 3713521 - DNA, 25 bp, Homo sapien
cactttttctatgtcagttagtctg

SEQ ID NO: 3713522 - DNA, 25 bp, Homo sapien
tccacgccttttacataggaaacaa

SEQ ID NO: 3713523 - DNA, 25 bp, Homo sapien
tactccaaattgtggaatataaact

SEQ ID NO: 3713524 - DNA, 25 bp, Homo sapien
tccaaattgtggaatataaactcac

SEQ ID NO: 3713525 - DNA, 25 bp, Homo sapien
tttgtttactccaaattgtggaata

SEQ ID NO: 3713526 - DNA, 25 bp, Homo sapien
gcattttgtttactccaaattgtgg

SEQ ID NO: 3713527 - DNA, 25 bp, Homo sapien
gcacctgactgggaaaagactgtta

SEQ ID NO: 3713528 - DNA, 25 bp, Homo sapien
tctctagtagcagttccgaaagcca

SEQ ID NO: 3713529 - DNA, 25 bp, Homo sapien
tagacgagggcagtatcaagacctt

SEQ ID NO: 3713530 - DNA, 25 bp, Homo sapien
aagttcccgaacctatgcaaagtgg

SEQ ID NO: 3713531 - DNA, 25 bp, Homo sapien
gagatgcagttaaataaaacagata

SEQ ID NO: 3713532 - DNA, 25 bp, Homo sapien
tgtcagtctaaaaagactgaaggct

SEQ ID NO: 3713533 - DNA, 25 bp, Homo sapien
ctgaccatgtgaattatcacatatt

SEQ ID NO: 3713534 - DNA, 25 bp, Homo sapien
cagtactgtcagtctaaaaagactg

SEQ ID NO: 3713535 - DNA, 25 bp, Homo sapien
aatgaaacaccatattaaatttcac

SEQ ID NO: 3713536 - DNA, 25 bp, Homo sapien
agacctggactaaaggaacattaag

SEQ ID NO: 3713537 - DNA, 25 bp, Homo sapien
tatatatattgagtagacaaacaaa

SEQ ID NO: 3713538 - DNA, 25 bp, Homo sapien
atatatattgagtagacaaacaaat

SEQ ID NO: 3713539 - DNA, 25 bp, Homo sapien
tttagacaatgcttgtcaaacagca

SEQ ID NO: 3713540 - DNA, 25 bp, Homo sapien
tgtttgcaattacactcttaccaag

SEQ ID NO: 3713541 - DNA, 25 bp, Homo sapien
cagtgcttggcaataatcagggctt

SEQ ID NO: 3713542 - DNA, 25 bp, Homo sapien
tctggagtggttagtttccctgaaa

SEQ ID NO: 3713543 - DNA, 25 bp, Homo sapien
caatttcttaagatgtatggcatta

SEQ ID NO: 3713544 - DNA, 25 bp, Homo sapien
tcattcattcgagtgggcagtgaag

SEQ ID NO: 3713545 - DNA, 25 bp, Homo sapien
cacctccaatttcttaagatgtatg

SEQ ID NO: 3713546 - DNA, 25 bp, Homo sapien
aatatacctaccatgtaaccacccg

SEQ ID NO: 3713547 - DNA, 25 bp, Homo sapien
tgccggcccagccttctagccaaat

SEQ ID NO: 3713548 - DNA, 25 bp, Homo sapien
aatgccgcgagctaactcctcacaa

SEQ ID NO: 3713549 - DNA, 25 bp, Homo sapien
tctccttcgcgggaaaatcctgtca

SEQ ID NO: 3713550 - DNA, 25 bp, Homo sapien
ccgccagggaaaaaagcgcgcttct

SEQ ID NO: 3713551 - DNA, 25 bp, Homo sapien
tgcccgcgggccgttccgctggcat

SEQ ID NO: 3713552 - DNA, 25 bp, Homo sapien
tagtccagcagcttcaagctgttct

SEQ ID NO: 3713553 - DNA, 25 bp, Homo sapien
ggtaatcacagcagtgtccagttgt

SEQ ID NO: 3713554 - DNA, 25 bp, Homo sapien
tcctcttctagcatggccggggtaa

SEQ ID NO: 3713555 - DNA, 25 bp, Homo sapien
ttccgctctctctctagtccagcag

SEQ ID NO: 3713556 - DNA, 25 bp, Homo sapien
gcataaagtttaataaaaatggcta

SEQ ID NO: 3713557 - DNA, 25 bp, Homo sapien
tggcataaagtttaataaaaatggc

SEQ ID NO: 3713558 - DNA, 25 bp, Homo sapien
tgaagtctacggtaccgaatttctg

SEQ ID NO: 3713559 - DNA, 25 bp, Homo sapien
tgctgttccattttcgtcaataaaa

SEQ ID NO: 3713560 - DNA, 25 bp, Homo sapien
ttttcaagcaaatgttgaagtctac

SEQ ID NO: 3713561 - DNA, 25 bp, Homo sapien
gactctctatcccaagacatgcgag

SEQ ID NO: 3713562 - DNA, 25 bp, Homo sapien
gtattctctcaatttgcacaagttt

SEQ ID NO: 3713563 - DNA, 25 bp, Homo sapien
tgtattctctcaatttgcacaagtt

SEQ ID NO: 3713564 - DNA, 25 bp, Homo sapien
ctccaatttttctttcttcttctgt

SEQ ID NO: 3713565 - DNA, 25 bp, Homo sapien
ctctccaatttttctttcttcttct

SEQ ID NO: 3713566 - DNA, 25 bp, Homo sapien
tctccaatttttctttcttcttctg

SEQ ID NO: 3713567 - DNA, 25 bp, Homo sapien
tctctccaatttttctttcttcttc

SEQ ID NO: 3713568 - DNA, 25 bp, Homo sapien
ggcttctcttcacttgcatcaattg

SEQ ID NO: 3713569 - DNA, 25 bp, Homo sapien
tcacttgcatcaattgaatttttac

SEQ ID NO: 3713570 - DNA, 25 bp, Homo sapien
tcttcacttgcatcaattgaatttt

SEQ ID NO: 3713571 - DNA, 25 bp, Homo sapien
ttctcttcacttgcatcaattgaat

SEQ ID NO: 3713572 - DNA, 25 bp, Homo sapien
tgacatgacctctgaaatattgtat

SEQ ID NO: 3713573 - DNA, 25 bp, Homo sapien
ttgacatgacctctgaaatattgta

SEQ ID NO: 3713574 - DNA, 25 bp, Homo sapien
caggcgctggactactcagggagct

SEQ ID NO: 3713575 - DNA, 25 bp, Homo sapien
taactggtatgggaccaggcatggt

SEQ ID NO: 3713576 - DNA, 25 bp, Homo sapien
gggttatacccctccaaatgcattc

SEQ ID NO: 3713577 - DNA, 25 bp, Homo sapien
ggtccacagtggcagaacactcaat

SEQ ID NO: 3713578 - DNA, 25 bp, Homo sapien
agatactggttctgatattaacacc

SEQ ID NO: 3713579 - DNA, 25 bp, Homo sapien
tgaaatgactcacagaaatcgataa

SEQ ID NO: 3713580 - DNA, 25 bp, Homo sapien
taagggcataaacaccagagtagca

SEQ ID NO: 3713581 - DNA, 25 bp, Homo sapien
ctataaatagggcacagtaagggca

SEQ ID NO: 3713582 - DNA, 25 bp, Homo sapien
tactagatgctgctggtagggagac

SEQ ID NO: 3713583 - DNA, 25 bp, Homo sapien
taacaggacatgtaagtggctgaca

SEQ ID NO: 3713584 - DNA, 25 bp, Homo sapien
taagcagatcacagcggtaagtgcc

SEQ ID NO: 3713585 - DNA, 25 bp, Homo sapien
tatagtccctgcactactactcggg

SEQ ID NO: 3713586 - DNA, 25 bp, Homo sapien
tacagggttgagtagttgcccacaa

SEQ ID NO: 3713587 - DNA, 25 bp, Homo sapien
atggcaacaaacctctagtcctggg

SEQ ID NO: 3713588 - DNA, 25 bp, Homo sapien
gataaaactagtagccttcaggcag

SEQ ID NO: 3713589 - DNA, 25 bp, Homo sapien
tgtagaccaactccagctaagcgaa

SEQ ID NO: 3713590 - DNA, 25 bp, Homo sapien
tgcctaaccgtttcagacaatctat

SEQ ID NO: 3713591 - DNA, 25 bp, Homo sapien
tacttggtaccatcgcatcactcct

SEQ ID NO: 3713592 - DNA, 25 bp, Homo sapien
tactggctgaccattacacttccgg

SEQ ID NO: 3713593 - DNA, 25 bp, Homo sapien
tccacacagagattagtagaggagg

SEQ ID NO: 3713594 - DNA, 25 bp, Homo sapien
cactggaaagtcctttatcaaagcc

SEQ ID NO: 3713595 - DNA, 25 bp, Homo sapien
tggtacctcaaatcattaggctact

SEQ ID NO: 3713596 - DNA, 25 bp, Homo sapien
tcaaagccataaaagtgctggaagc

SEQ ID NO: 3713597 - DNA, 25 bp, Homo sapien
gaaatgactcaagttgtggtacctc

SEQ ID NO: 3713598 - DNA, 25 bp, Homo sapien
tggacaaaataatagatactgtatt

SEQ ID NO: 3713599 - DNA, 25 bp, Homo sapien
tagatactgtatttaaacttggata

SEQ ID NO: 3713600 - DNA, 25 bp, Homo sapien
ataatagatactgtatttaaacttg

SEQ ID NO: 3713601 - DNA, 25 bp, Homo sapien
ctggacaaaataatagatactgtat

SEQ ID NO: 3713602 - DNA, 25 bp, Homo sapien
cagacaagaaaaggtcctggtactc

SEQ ID NO: 3713603 - DNA, 25 bp, Homo sapien
tcaatgcaatagtagcaatgcactg

SEQ ID NO: 3713604 - DNA, 25 bp, Homo sapien
gaattcagccatccagttaggaagt

SEQ ID NO: 3713605 - DNA, 25 bp, Homo sapien
ttaggaagtgtagacaaagggccac

SEQ ID NO: 3713606 - DNA, 25 bp, Homo sapien
ggttccatgatataacattgtaggg

SEQ ID NO: 3713607 - DNA, 25 bp, Homo sapien
gttccatgatataacattgtaggga

SEQ ID NO: 3713608 - DNA, 25 bp, Homo sapien
ccacaggatgaatctgcaaagtccc

SEQ ID NO: 3713609 - DNA, 25 bp, Homo sapien
tgtaacgcatttcggtctctcatgg

SEQ ID NO: 3713610 - DNA, 25 bp, Homo sapien
caaatgacgtgattaccacaggatg

SEQ ID NO: 3713611 - DNA, 25 bp, Homo sapien
ttcggtctctcatggctatttcaaa

SEQ ID NO: 3713612 - DNA, 25 bp, Homo sapien
taaactcctgaactgagatttctgc

SEQ ID NO: 3713613 - DNA, 25 bp, Homo sapien
tccaaagttttaccagcagacacat

SEQ ID NO: 3713614 - DNA, 25 bp, Homo sapien
taccagcagacacataaaacctgac

SEQ ID NO: 3713615 - DNA, 25 bp, Homo sapien
tactggtcataattatgcaagtcat

SEQ ID NO: 3713616 - DNA, 25 bp, Homo sapien
cttgtgccattaaacatgtgcacca

SEQ ID NO: 3713617 - DNA, 25 bp, Homo sapien
ccttgtgccattaaacatgtgcacc

SEQ ID NO: 3713618 - DNA, 25 bp, Homo sapien
gattagacggcacttcatattctta

SEQ ID NO: 3713619 - DNA, 25 bp, Homo sapien
gcattgaatcgttttaactccctga

SEQ ID NO: 3713620 - DNA, 25 bp, Homo sapien
caagtcatcaaatacatctggcaac

SEQ ID NO: 3713621 - DNA, 25 bp, Homo sapien
aagtttagcaatgaccaaagttctg

SEQ ID NO: 3713622 - DNA, 25 bp, Homo sapien
ctggtgcagcatatgcaatacattc

SEQ ID NO: 3713623 - DNA, 25 bp, Homo sapien
gcagcatatgcaatacattctgttc

SEQ ID NO: 3713624 - DNA, 25 bp, Homo sapien
aataatatcttcagcagtttcagaa

SEQ ID NO: 3713625 - DNA, 25 bp, Homo sapien
ttagcaataatatcttcagcagttt

SEQ ID NO: 3713626 - DNA, 25 bp, Homo sapien
ctcaaaattggtatgaagcttgagt

SEQ ID NO: 3713627 - DNA, 25 bp, Homo sapien
gtattttcatatggacgtatatcat

SEQ ID NO: 3713628 - DNA, 25 bp, Homo sapien
ttggtatgaagcttgagtaaataag

SEQ ID NO: 3713629 - DNA, 25 bp, Homo sapien
tgccttcaaagaagccctcatctgt

SEQ ID NO: 3713630 - DNA, 25 bp, Homo sapien
gtaaaacaattccagtgagccctct

SEQ ID NO: 3713631 - DNA, 25 bp, Homo sapien
gatgtatacactactgatgaggatg

SEQ ID NO: 3713632 - DNA, 25 bp, Homo sapien
tgagccctcttatggaattatcaac

SEQ ID NO: 3713633 - DNA, 25 bp, Homo sapien
tacctgtatacactgtgaggtaacg

SEQ ID NO: 3713634 - DNA, 25 bp, Homo sapien
atataaagaagagtataactagagg

SEQ ID NO: 3713635 - DNA, 25 bp, Homo sapien
tcagcaccatacaaaaggggaaata

SEQ ID NO: 3713636 - DNA, 25 bp, Homo sapien
atcagcaccatacaaaaggggaaat

SEQ ID NO: 3713637 - DNA, 25 bp, Homo sapien
aagtgtataactggatcatttgtaa

SEQ ID NO: 3713638 - DNA, 25 bp, Homo sapien
ggaacttcaagagcaacatcagact

SEQ ID NO: 3713639 - DNA, 25 bp, Homo sapien
gtggagcataaacgactacttctcg

SEQ ID NO: 3713640 - DNA, 25 bp, Homo sapien
ctttgaaagtggagcataaacgact

SEQ ID NO: 3713641 - DNA, 25 bp, Homo sapien
tgtacggttcacaatggctgtataa

SEQ ID NO: 3713642 - DNA, 25 bp, Homo sapien
gctatgtccttaggttctaaatgta

SEQ ID NO: 3713643 - DNA, 25 bp, Homo sapien
tcagtttataaagctatgtccttag

SEQ ID NO: 3713644 - DNA, 25 bp, Homo sapien
cagtttataaagctatgtccttagg

SEQ ID NO: 3713645 - DNA, 25 bp, Homo sapien
tataaagctatgtccttaggttcta

SEQ ID NO: 3713646 - DNA, 25 bp, Homo sapien
tcggtccacctctggctgtatttga

SEQ ID NO: 3713647 - DNA, 25 bp, Homo sapien
acctctggctgtatttgactgatca

SEQ ID NO: 3713648 - DNA, 25 bp, Homo sapien
tctagttcgtcgttttggtcgacca

SEQ ID NO: 3713649 - DNA, 25 bp, Homo sapien
gaccagtaggacttaactcaattgt

SEQ ID NO: 3713650 - DNA, 25 bp, Homo sapien
taaattcttgtgtaacagggtctat

SEQ ID NO: 3713651 - DNA, 25 bp, Homo sapien
cagggtctataggatattcaatcaa

SEQ ID NO: 3713652 - DNA, 25 bp, Homo sapien
caacatttacgaagtagcatcatta

SEQ ID NO: 3713653 - DNA, 25 bp, Homo sapien
tattctgcagcttcagattaacttc

SEQ ID NO: 3713654 - DNA, 25 bp, Homo sapien
tttagttctggcagcattcgatcca

SEQ ID NO: 3713655 - DNA, 25 bp, Homo sapien
gcagcattcgatccaaaatcaagaa

SEQ ID NO: 3713656 - DNA, 25 bp, Homo sapien
ttcgatccaaaatcaagaacttccc

SEQ ID NO: 3713657 - DNA, 25 bp, Homo sapien
tctggcagcattcgatccaaaatca

SEQ ID NO: 3713658 - DNA, 25 bp, Homo sapien
tgaacaatccaaaattccaatcaaa

SEQ ID NO: 3713659 - DNA, 25 bp, Homo sapien
cctgctgaagttgaaatctctgaga

SEQ ID NO: 3713660 - DNA, 25 bp, Homo sapien
aagacatggacccatcaagcctgct

SEQ ID NO: 3713661 - DNA, 25 bp, Homo sapien
tctctctctgagtaagacatggacc

SEQ ID NO: 3713662 - DNA, 25 bp, Homo sapien
tctctgagatggcagtaatccatca

SEQ ID NO: 3713663 - DNA, 25 bp, Homo sapien
tgataactgtatctgctgcagtcag

SEQ ID NO: 3713664 - DNA, 25 bp, Homo sapien
ggccaccagctcgtgtactcactaa

SEQ ID NO: 3713665 - DNA, 25 bp, Homo sapien
gaagataaacacctctggatccgtg

SEQ ID NO: 3713666 - DNA, 25 bp, Homo sapien
tgcagtcagattaatgcccaggcca

SEQ ID NO: 3713667 - DNA, 25 bp, Homo sapien
caacaactggctttgtctgaccaat

SEQ ID NO: 3713668 - DNA, 25 bp, Homo sapien
taacaaggcgataaacaacaactgg

SEQ ID NO: 3713669 - DNA, 25 bp, Homo sapien
tctatgacatctatcctgggcctga

SEQ ID NO: 3713670 - DNA, 25 bp, Homo sapien
gctctttccacaattttctgatcga

SEQ ID NO: 3713671 - DNA, 25 bp, Homo sapien
aattcttagacagatttaatccaga

SEQ ID NO: 3713672 - DNA, 25 bp, Homo sapien
ctaagaaattcttagacagatttaa

SEQ ID NO: 3713673 - DNA, 25 bp, Homo sapien
taatctctagattttaataattcca

SEQ ID NO: 3713674 - DNA, 25 bp, Homo sapien
agaaattcttagacagatttaatcc

SEQ ID NO: 3713675 - DNA, 25 bp, Homo sapien
attcaagtctatgtgaataattcaa

SEQ ID NO: 3713676 - DNA, 25 bp, Homo sapien
taacaacaactctagatctttatca

SEQ ID NO: 3713677 - DNA, 25 bp, Homo sapien
caacaactctagatctttatcacta

SEQ ID NO: 3713678 - DNA, 25 bp, Homo sapien
caataagatcacttcgatctaacaa

SEQ ID NO: 3713679 - DNA, 25 bp, Homo sapien
cacttcgatctaacaacaactctag

SEQ ID NO: 3713680 - DNA, 25 bp, Homo sapien
ttctctttaattggtcctgaagcat

SEQ ID NO: 3713681 - DNA, 25 bp, Homo sapien
tctctttaattggtcctgaagcatt

SEQ ID NO: 3713682 - DNA, 25 bp, Homo sapien
tctttaattggtcctgaagcattca

SEQ ID NO: 3713683 - DNA, 25 bp, Homo sapien
ctctttaattggtcctgaagcattc

SEQ ID NO: 3713684 - DNA, 25 bp, Homo sapien
gcctgtatccaagaatactactcag

SEQ ID NO: 3713685 - DNA, 25 bp, Homo sapien
tcagtatttcaaacccaatacaggg

SEQ ID NO: 3713686 - DNA, 25 bp, Homo sapien
taaaaaaggtgaagtggacaatcag

SEQ ID NO: 3713687 - DNA, 25 bp, Homo sapien
ggaagtggttaagtacacatcagcc

SEQ ID NO: 3713688 - DNA, 25 bp, Homo sapien
taactgaagtacctaaagcccatga

SEQ ID NO: 3713689 - DNA, 25 bp, Homo sapien
gtacctaaagcccatgaactgcatt

SEQ ID NO: 3713690 - DNA, 25 bp, Homo sapien
ttaaacaacagagagcataatccca

SEQ ID NO: 3713691 - DNA, 25 bp, Homo sapien
gaaaagcctacttcataactgaagt

SEQ ID NO: 3713692 - DNA, 25 bp, Homo sapien
taaactatctcatagaaatagactc

SEQ ID NO: 3713693 - DNA, 25 bp, Homo sapien
actatctcatagaaatagactctaa

SEQ ID NO: 3713694 - DNA, 25 bp, Homo sapien
ctatctcatagaaatagactctaaa

SEQ ID NO: 3713695 - DNA, 25 bp, Homo sapien
aactatctcatagaaatagactcta

SEQ ID NO: 3713696 - DNA, 25 bp, Homo sapien
gacattgcaattggctcaagctacg

SEQ ID NO: 3713697 - DNA, 25 bp, Homo sapien
taggtttacagatgcaacggtgaca

SEQ ID NO: 3713698 - DNA, 25 bp, Homo sapien
gagtttcaagcaagcctaggtcagc

SEQ ID NO: 3713699 - DNA, 25 bp, Homo sapien
ggaaagactgggtcactaaggacaa

SEQ ID NO: 3713700 - DNA, 25 bp, Homo sapien
tcaaagcagcattcgggccaggtgc

SEQ ID NO: 3713701 - DNA, 25 bp, Homo sapien
aaaaagttagatccagccaggcgca

SEQ ID NO: 3713702 - DNA, 25 bp, Homo sapien
gaaacagccaacaggaatacccagg

SEQ ID NO: 3713703 - DNA, 25 bp, Homo sapien
catatactgacaattgggtgaccct

SEQ ID NO: 3713704 - DNA, 25 bp, Homo sapien
agatcagttcgggaccagtcaggcc

SEQ ID NO: 3713705 - DNA, 25 bp, Homo sapien
gaataattttagtgttcagtggcac

SEQ ID NO: 3713706 - DNA, 25 bp, Homo sapien
taactgatctggtctcacgagggat

SEQ ID NO: 3713707 - DNA, 25 bp, Homo sapien
aagtggtggatatatactgggcgca

SEQ ID NO: 3713708 - DNA, 25 bp, Homo sapien
cacgagggattctcttacgatgtat

SEQ ID NO: 3713709 - DNA, 25 bp, Homo sapien
gcaaagcttcttgccacgccatgct

SEQ ID NO: 3713710 - DNA, 25 bp, Homo sapien
agcaaagcttcttgccacgccatgc

SEQ ID NO: 3713711 - DNA, 25 bp, Homo sapien
gtttgagtacaataggaacaggaaa

SEQ ID NO: 3713712 - DNA, 25 bp, Homo sapien
gaaacaagtttgagtacaataggaa

SEQ ID NO: 3713713 - DNA, 25 bp, Homo sapien
tcatgcacgtatctgagtgaggaac

SEQ ID NO: 3713714 - DNA, 25 bp, Homo sapien
tgaggaacacagctaaacgtcaatt

SEQ ID NO: 3713715 - DNA, 25 bp, Homo sapien
caacatgctgttatatagtggtgac

SEQ ID NO: 3713716 - DNA, 25 bp, Homo sapien
ggcagacagattagcaacagtggga

SEQ ID NO: 3713717 - DNA, 25 bp, Homo sapien
aacactggtttggatggagccttca

SEQ ID NO: 3713718 - DNA, 25 bp, Homo sapien
gaaagtcccttcagtacagccagaa

SEQ ID NO: 3713719 - DNA, 25 bp, Homo sapien
tatgttgccttacccaagttgggac

SEQ ID NO: 3713720 - DNA, 25 bp, Homo sapien
ccttatttgataggcaagagaccca

SEQ ID NO: 3713721 - DNA, 25 bp, Homo sapien
gataggcagcagctacgactatgag

SEQ ID NO: 3713722 - DNA, 25 bp, Homo sapien
gaacagatagtcaattccacttcca

SEQ ID NO: 3713723 - DNA, 25 bp, Homo sapien
caagctcaggatcgctgtgtgcagc

SEQ ID NO: 3713724 - DNA, 25 bp, Homo sapien
gcagcatcctgtccatagcagtgga

SEQ ID NO: 3713725 - DNA, 25 bp, Homo sapien
gctggcgccccacacgtctgcaggg

SEQ ID NO: 3713726 - DNA, 25 bp, Homo sapien
cagcagggcctcacaccagcgaggt

SEQ ID NO: 3713727 - DNA, 25 bp, Homo sapien
agggcctcacaccagcgaggtcgct

SEQ ID NO: 3713728 - DNA, 25 bp, Homo sapien
ggcctcacaccagcgaggtcgctgg

SEQ ID NO: 3713729 - DNA, 25 bp, Homo sapien
ctttgggcttcacctgctaatgtta

SEQ ID NO: 3713730 - DNA, 25 bp, Homo sapien
cacctgctaatgttatcattggcat

SEQ ID NO: 3713731 - DNA, 25 bp, Homo sapien
ccttgccaaaatgctgtctttgggc

SEQ ID NO: 3713732 - DNA, 25 bp, Homo sapien
cttcacctgctaatgttatcattgg

SEQ ID NO: 3713733 - DNA, 25 bp, Homo sapien
actagatgttttgtgcagataaggg

SEQ ID NO: 3713734 - DNA, 25 bp, Homo sapien
agatgttttgtgcagataagggaac

SEQ ID NO: 3713735 - DNA, 25 bp, Homo sapien
gatgttttgtgcagataagggaact

SEQ ID NO: 3713736 - DNA, 25 bp, Homo sapien
ctagatgttttgtgcagataaggga

SEQ ID NO: 3713737 - DNA, 25 bp, Homo sapien
gcctggctaggcctaggttttttca

SEQ ID NO: 3713738 - DNA, 25 bp, Homo sapien
gatttttagattgatgagcagttgg

SEQ ID NO: 3713739 - DNA, 25 bp, Homo sapien
ttcctggattcgaacgattctgcct

SEQ ID NO: 3713740 - DNA, 25 bp, Homo sapien
cacttcctggattcgaacgattctg

SEQ ID NO: 3713741 - DNA, 25 bp, Homo sapien
tccacctgtgattctgactctgact

SEQ ID NO: 3713742 - DNA, 25 bp, Homo sapien
gactctgactgtgactagtcagcaa

SEQ ID NO: 3713743 - DNA, 25 bp, Homo sapien
caactgcgggctttcacttcaaggc

SEQ ID NO: 3713744 - DNA, 25 bp, Homo sapien
aaggcttctcttcttagtaagacaa

SEQ ID NO: 3713745 - DNA, 25 bp, Homo sapien
caggatatttccaataatcgggaga

SEQ ID NO: 3713746 - DNA, 25 bp, Homo sapien
aggatatttccaataatcgggagag

SEQ ID NO: 3713747 - DNA, 25 bp, Homo sapien
tgcaggatatttccaataatcggga

SEQ ID NO: 3713748 - DNA, 25 bp, Homo sapien
gcaggatatttccaataatcgggag

SEQ ID NO: 3713749 - DNA, 25 bp, Homo sapien
cattactggaggaacataaagcata

SEQ ID NO: 3713750 - DNA, 25 bp, Homo sapien
tacattactggaggaacataaagca

SEQ ID NO: 3713751 - DNA, 25 bp, Homo sapien
tactggaggaacataaagcatactt

SEQ ID NO: 3713752 - DNA, 25 bp, Homo sapien
cttgtacattactggaggaacataa

SEQ ID NO: 3713753 - DNA, 25 bp, Homo sapien
agtgaacacagggccatagactttt

SEQ ID NO: 3713754 - DNA, 25 bp, Homo sapien
tgaacacagggccatagacttttga

SEQ ID NO: 3713755 - DNA, 25 bp, Homo sapien
aacacagggccatagacttttgaga

SEQ ID NO: 3713756 - DNA, 25 bp, Homo sapien
cttcaggccaaaatacacagtgaac

SEQ ID NO: 3713757 - DNA, 25 bp, Homo sapien
ttcatatccatgcaacaccacaatg

SEQ ID NO: 3713758 - DNA, 25 bp, Homo sapien
tccagaaaactcctctccatgatca

SEQ ID NO: 3713759 - DNA, 25 bp, Homo sapien
ccatgatcaatcagggcctccttca

SEQ ID NO: 3713760 - DNA, 25 bp, Homo sapien
tcactgcttcatatccatgcaacac

SEQ ID NO: 3713761 - DNA, 25 bp, Homo sapien
gtcatgaggcagaaacgccggatct

SEQ ID NO: 3713762 - DNA, 25 bp, Homo sapien
caaaattccgcagagtcatgaggca

SEQ ID NO: 3713763 - DNA, 25 bp, Homo sapien
ctctttccattgctgaaaaggattc

SEQ ID NO: 3713764 - DNA, 25 bp, Homo sapien
cccaaaattccgcagagtcatgagg

SEQ ID NO: 3713765 - DNA, 25 bp, Homo sapien
tcctcttgaacacggtcctcgatgc

SEQ ID NO: 3713766 - DNA, 25 bp, Homo sapien
tcttgaacacggtcctcgatgctcc

SEQ ID NO: 3713767 - DNA, 25 bp, Homo sapien
cttcctcttgaacacggtcctcgat

SEQ ID NO: 3713768 - DNA, 25 bp, Homo sapien
aactcctccacaaggcagcgggctt

SEQ ID NO: 3713769 - DNA, 25 bp, Homo sapien
tccatggagagctcagaatcctgag

SEQ ID NO: 3713770 - DNA, 25 bp, Homo sapien
aagttaagaaacctctgatctttat

SEQ ID NO: 3713771 - DNA, 25 bp, Homo sapien
ttataatcaaatcgatcatggaaaa

SEQ ID NO: 3713772 - DNA, 25 bp, Homo sapien
tcaaatcgatcatggaaaataacag

SEQ ID NO: 3713773 - DNA, 25 bp, Homo sapien
caggaagagaagctcttgatctcac

SEQ ID NO: 3713774 - DNA, 25 bp, Homo sapien
aaaataatatctcaggaagagaagc

SEQ ID NO: 3713775 - DNA, 25 bp, Homo sapien
tctcaggaagagaagctcttgatct

SEQ ID NO: 3713776 - DNA, 25 bp, Homo sapien
aaaaataatatctcaggaagagaag

SEQ ID NO: 3713777 - DNA, 25 bp, Homo sapien
tgatgaagaggtctctaggtgtgaa

SEQ ID NO: 3713778 - DNA, 25 bp, Homo sapien
gcctgtgagtaatgccagcttttca

SEQ ID NO: 3713779 - DNA, 25 bp, Homo sapien
tttcaacaagggacttggatttcca

SEQ ID NO: 3713780 - DNA, 25 bp, Homo sapien
gcaaacacccctatcctattcagaa

SEQ ID NO: 3713781 - DNA, 25 bp, Homo sapien
ctgggagataatcgatgagagcagg

SEQ ID NO: 3713782 - DNA, 25 bp, Homo sapien
tcgatgagagcagggaaattattgc

SEQ ID NO: 3713783 - DNA, 25 bp, Homo sapien
taatcgatgagagcagggaaattat

SEQ ID NO: 3713784 - DNA, 25 bp, Homo sapien
gagataatcgatgagagcagggaaa

SEQ ID NO: 3713785 - DNA, 25 bp, Homo sapien
ttttcagctattttattatgacttc

SEQ ID NO: 3713786 - DNA, 25 bp, Homo sapien
taatgtaagcaaaattttcagctat

SEQ ID NO: 3713787 - DNA, 25 bp, Homo sapien
tttaatgtaagcaaaattttcagct

SEQ ID NO: 3713788 - DNA, 25 bp, Homo sapien
gcaaaattttcagctattttattat

SEQ ID NO: 3713789 - DNA, 25 bp, Homo sapien
ataaagtcccgagcactgttcatgt

SEQ ID NO: 3713790 - DNA, 25 bp, Homo sapien
gaaacaatcaataaagtcccgagca

SEQ ID NO: 3713791 - DNA, 25 bp, Homo sapien
ccagggattcttgatgttcttttat

SEQ ID NO: 3713792 - DNA, 25 bp, Homo sapien
caatcaataaagtcccgagcactgt

SEQ ID NO: 3713793 - DNA, 25 bp, Homo sapien
aagatgcaggcaaacaaataacatt

SEQ ID NO: 3713794 - DNA, 25 bp, Homo sapien
acaagatgcaggcaaacaaataaca

SEQ ID NO: 3713795 - DNA, 25 bp, Homo sapien
ctaatcaatgaaccacaagatgcag

SEQ ID NO: 3713796 - DNA, 25 bp, Homo sapien
ccacaagatgcaggcaaacaaataa

SEQ ID NO: 3713797 - DNA, 25 bp, Homo sapien
aacagtaaattcagactgttgattg

SEQ ID NO: 3713798 - DNA, 25 bp, Homo sapien
tatcaagctttcaacagtaaattca

SEQ ID NO: 3713799 - DNA, 25 bp, Homo sapien
acagtaaattcagactgttgattgt

SEQ ID NO: 3713800 - DNA, 25 bp, Homo sapien
cagtaaattcagactgttgattgtg

SEQ ID NO: 3713801 - DNA, 25 bp, Homo sapien
caggagcaggagtccatatctcaga

SEQ ID NO: 3713802 - DNA, 25 bp, Homo sapien
ggagcaggagtccatatctcagagt

SEQ ID NO: 3713803 - DNA, 25 bp, Homo sapien
gcaggagtccatatctcagagtggt

SEQ ID NO: 3713804 - DNA, 25 bp, Homo sapien
gagcaggagtccatatctcagagtg

SEQ ID NO: 3713805 - DNA, 25 bp, Homo sapien
catccaactctcctacaagctaagt

SEQ ID NO: 3713806 - DNA, 25 bp, Homo sapien
gggtcccaacatcattataaactta

SEQ ID NO: 3713807 - DNA, 25 bp, Homo sapien
tgtagcaattcaggttacaagaagc

SEQ ID NO: 3713808 - DNA, 25 bp, Homo sapien
gactgaaagtacacctagacttagg

SEQ ID NO: 3713809 - DNA, 25 bp, Homo sapien
gggcatgtgactcctgtcctgcata

SEQ ID NO: 3713810 - DNA, 25 bp, Homo sapien
ttgaatttaacatcacaggtcactg

SEQ ID NO: 3713811 - DNA, 25 bp, Homo sapien
gaggaggtcaatgtatctctggatc

SEQ ID NO: 3713812 - DNA, 25 bp, Homo sapien
ggctccggtttctgccaactacaca

SEQ ID NO: 3713813 - DNA, 25 bp, Homo sapien
tcgcttcaagtggaatggagcagct

SEQ ID NO: 3713814 - DNA, 25 bp, Homo sapien
aatggcaatatgtactcgcttcaag

SEQ ID NO: 3713815 - DNA, 25 bp, Homo sapien
caataggtacctgtggctagtggat

SEQ ID NO: 3713816 - DNA, 25 bp, Homo sapien
cacagaaaccatgtgttagaaggca

SEQ ID NO: 3713817 - DNA, 25 bp, Homo sapien
ccacagccttgccatcatgcattgt

SEQ ID NO: 3713818 - DNA, 25 bp, Homo sapien
ccaccaagagcctataagtgttccc

SEQ ID NO: 3713819 - DNA, 25 bp, Homo sapien
tgccatcatgcattgttttttgact

SEQ ID NO: 3713820 - DNA, 25 bp, Homo sapien
ttgttaatagttacttttgttatgc

SEQ ID NO: 3713821 - DNA, 25 bp, Homo sapien
attgtgcagcacagaagtcagggat

SEQ ID NO: 3713822 - DNA, 25 bp, Homo sapien
tgtcattgtgcagcacagaagtcag

SEQ ID NO: 3713823 - DNA, 25 bp, Homo sapien
gtcattgtgcagcacagaagtcagg

SEQ ID NO: 3713824 - DNA, 25 bp, Homo sapien
tgtgcagcacagaagtcagggatgt

SEQ ID NO: 3713825 - DNA, 25 bp, Homo sapien
gacagatggaaatgaatatctatta

SEQ ID NO: 3713826 - DNA, 25 bp, Homo sapien
aggacagatggaaatgaatatctat

SEQ ID NO: 3713827 - DNA, 25 bp, Homo sapien
tcatgtgccctgaaggacagatgga

SEQ ID NO: 3713828 - DNA, 25 bp, Homo sapien
atgtgccctgaaggacagatggaaa

SEQ ID NO: 3713829 - DNA, 25 bp, Homo sapien
aaatcgcatgggcatagggaatggt

SEQ ID NO: 3713830 - DNA, 25 bp, Homo sapien
tgttcatcagcagggaaatcgcatg

SEQ ID NO: 3713831 - DNA, 25 bp, Homo sapien
catgggcatagggaatggtgctaat

SEQ ID NO: 3713832 - DNA, 25 bp, Homo sapien
cccaataatggggatgttcatcagc

SEQ ID NO: 3713833 - DNA, 25 bp, Homo sapien
ctctaggtttcctcatcatattcat

SEQ ID NO: 3713834 - DNA, 25 bp, Homo sapien
cctctctaggtttcctcatcatatt

SEQ ID NO: 3713835 - DNA, 25 bp, Homo sapien
tctctaggtttcctcatcatattca

SEQ ID NO: 3713836 - DNA, 25 bp, Homo sapien
ctctctaggtttcctcatcatattc

SEQ ID NO: 3713837 - DNA, 25 bp, Homo sapien
aataagagacataggggatttgttc

SEQ ID NO: 3713838 - DNA, 25 bp, Homo sapien
gaaaataagagacataggggatttg

SEQ ID NO: 3713839 - DNA, 25 bp, Homo sapien
tgaaaataagagacataggggattt

SEQ ID NO: 3713840 - DNA, 25 bp, Homo sapien
aaataagagacataggggatttgtt

SEQ ID NO: 3713841 - DNA, 25 bp, Homo sapien
cctttgggtcaacctgagatttcag

SEQ ID NO: 3713842 - DNA, 25 bp, Homo sapien
gggtgatgtcaatatcctttgggtc

SEQ ID NO: 3713843 - DNA, 25 bp, Homo sapien
gcaaaatggtggtcaggaataaaaa

SEQ ID NO: 3713844 - DNA, 25 bp, Homo sapien
gagatttcaggttaaagttctgcaa

SEQ ID NO: 3713845 - DNA, 25 bp, Homo sapien
gcagagctggtacaagggtggcaca

SEQ ID NO: 3713846 - DNA, 25 bp, Homo sapien
agcagagctggtacaagggtggcac

SEQ ID NO: 3713847 - DNA, 25 bp, Homo sapien
cagagctggtacaagggtggcacac

SEQ ID NO: 3713848 - DNA, 25 bp, Homo sapien
aagcagagctggtacaagggtggca

SEQ ID NO: 3713849 - DNA, 25 bp, Homo sapien
taagggagaattgcaggtgacagca

SEQ ID NO: 3713850 - DNA, 25 bp, Homo sapien
caataactctaggtggcatttagct

SEQ ID NO: 3713851 - DNA, 25 bp, Homo sapien
gcttaacactatgagggccagcaca

SEQ ID NO: 3713852 - DNA, 25 bp, Homo sapien
tatttccctacaggttacagctgct

SEQ ID NO: 3713853 - DNA, 25 bp, Homo sapien
gagcacaaggaccacaaaaggatcc

SEQ ID NO: 3713854 - DNA, 25 bp, Homo sapien
agagacagagcacaaggaccacaaa

SEQ ID NO: 3713855 - DNA, 25 bp, Homo sapien
cccagagctctgtctccagattgaa

SEQ ID NO: 3713856 - DNA, 25 bp, Homo sapien
acatgagagacagagcacaaggacc

SEQ ID NO: 3713857 - DNA, 25 bp, Homo sapien
aaggatttgctgacatccttaatat

SEQ ID NO: 3713858 - DNA, 25 bp, Homo sapien
gacatccttaatatctatctgtagg

SEQ ID NO: 3713859 - DNA, 25 bp, Homo sapien
accaccatgcgttccaggccaaaat

SEQ ID NO: 3713860 - DNA, 25 bp, Homo sapien
caccatgcgttccaggccaaaatac

SEQ ID NO: 3713861 - DNA, 25 bp, Homo sapien
gcagcaccaccatgcgttccaggcc

SEQ ID NO: 3713862 - DNA, 25 bp, Homo sapien
ccatgcgttccaggccaaaatacag

SEQ ID NO: 3713863 - DNA, 25 bp, Homo sapien
caagctctgcccgagaagctctgct

SEQ ID NO: 3713864 - DNA, 25 bp, Homo sapien
ggatgggccaagctctgcccgagaa

SEQ ID NO: 3713865 - DNA, 25 bp, Homo sapien
gggccaagctctgcccgagaagctc

SEQ ID NO: 3713866 - DNA, 25 bp, Homo sapien
caagacagatgctgaaacaggcact

SEQ ID NO: 3713867 - DNA, 25 bp, Homo sapien
agggagatcccaggcaagaaagagg

SEQ ID NO: 3713868 - DNA, 25 bp, Homo sapien
ggagggagatcccaggcaagaaaga

SEQ ID NO: 3713869 - DNA, 25 bp, Homo sapien
taggagggagatcccaggcaagaaa

SEQ ID NO: 3713870 - DNA, 25 bp, Homo sapien
ctaggagggagatcccaggcaagaa

SEQ ID NO: 3713871 - DNA, 25 bp, Homo sapien
ccaaaattccgcagcgtcatgaggg

SEQ ID NO: 3713872 - DNA, 25 bp, Homo sapien
attccgcagcgtcatgagggagaaa

SEQ ID NO: 3713873 - DNA, 25 bp, Homo sapien
tccgcagcgtcatgagggagaaacg

SEQ ID NO: 3713874 - DNA, 25 bp, Homo sapien
tcccaaaattccgcagcgtcatgag

SEQ ID NO: 3713875 - DNA, 25 bp, Homo sapien
tatgagtaaacattagatataaaac

SEQ ID NO: 3713876 - DNA, 25 bp, Homo sapien
aaaatatgagtaaacattagatata

SEQ ID NO: 3713877 - DNA, 25 bp, Homo sapien
ttttaaaatatgagtaaacattaga

SEQ ID NO: 3713878 - DNA, 25 bp, Homo sapien
tgagtaaacattagatataaaacac

SEQ ID NO: 3713879 - DNA, 25 bp, Homo sapien
aagaaattgctgatctttataatcg

SEQ ID NO: 3713880 - DNA, 25 bp, Homo sapien
tgctgatctttataatcgaaacgtt

SEQ ID NO: 3713881 - DNA, 25 bp, Homo sapien
tggatccagggggtgcttacaatcc

SEQ ID NO: 3713882 - DNA, 25 bp, Homo sapien
cagggggtgcttacaatcctgatgt

SEQ ID NO: 3713883 - DNA, 25 bp, Homo sapien
aaaaagactgtaagtggtttctcag

SEQ ID NO: 3713884 - DNA, 25 bp, Homo sapien
aatatcactttccataaaagcaagg

SEQ ID NO: 3713885 - DNA, 25 bp, Homo sapien
gaaataatcaatgatagtgggaaaa

SEQ ID NO: 3713886 - DNA, 25 bp, Homo sapien
atgggttcccgggaaataatcaatg

SEQ ID NO: 3713887 - DNA, 25 bp, Homo sapien
tatcactttccataaaagcaaggtt

SEQ ID NO: 3713888 - DNA, 25 bp, Homo sapien
caatagtgaattcagactgttggtt

SEQ ID NO: 3713889 - DNA, 25 bp, Homo sapien
agtcagctgcagtgattaccaagtt

SEQ ID NO: 3713890 - DNA, 25 bp, Homo sapien
aagtaagtcagctgcagtgattacc

SEQ ID NO: 3713891 - DNA, 25 bp, Homo sapien
ttttcaatagtgaattcagactgtt

SEQ ID NO: 3713892 - DNA, 25 bp, Homo sapien
ctggtggggatgaggtcgatgtatc

SEQ ID NO: 3713893 - DNA, 25 bp, Homo sapien
ggatgaggtcgatgtatctctggac

SEQ ID NO: 3713894 - DNA, 25 bp, Homo sapien
gatgaggtcgatgtatctctggacc

SEQ ID NO: 3713895 - DNA, 25 bp, Homo sapien
gctggtggggatgaggtcgatgtat

SEQ ID NO: 3713896 - DNA, 25 bp, Homo sapien
ccagtgatggtagagggtaagaatc

SEQ ID NO: 3713897 - DNA, 25 bp, Homo sapien
gaatcatactgtgaatttgaggaat

SEQ ID NO: 3713898 - DNA, 25 bp, Homo sapien
aacatggagttgcagtgtaggagaa

SEQ ID NO: 3713899 - DNA, 25 bp, Homo sapien
tttgaggaataaaagaacatggagt

SEQ ID NO: 3713900 - DNA, 25 bp, Homo sapien
ttgtcatgtagcacagaagtgaggg

SEQ ID NO: 3713901 - DNA, 25 bp, Homo sapien
tatcaccagcggagaaaacacaggc

SEQ ID NO: 3713902 - DNA, 25 bp, Homo sapien
gtacaaagagtaactgtaccactgc

SEQ ID NO: 3713903 - DNA, 25 bp, Homo sapien
taatctggccgaataatgaggatgt

SEQ ID NO: 3713904 - DNA, 25 bp, Homo sapien
gagaaggcacatgtaagttccaact

SEQ ID NO: 3713905 - DNA, 25 bp, Homo sapien
caggagttgtgtcaaggtcctttgg

SEQ ID NO: 3713906 - DNA, 25 bp, Homo sapien
ggaatgaagcacagctgatagaagg

SEQ ID NO: 3713907 - DNA, 25 bp, Homo sapien
tgtgtcaaggtcctttgggtcaatc

SEQ ID NO: 3713908 - DNA, 25 bp, Homo sapien
atagaagggcgggacagaagcaaat

SEQ ID NO: 3713909 - DNA, 25 bp, Homo sapien
ttttaatggaggctgaatgttcact

SEQ ID NO: 3713910 - DNA, 25 bp, Homo sapien
gagcagccagaccatctgtgcttct

SEQ ID NO: 3713911 - DNA, 25 bp, Homo sapien
gatgacgggtcagaagaagcatcac

SEQ ID NO: 3713912 - DNA, 25 bp, Homo sapien
caatgtaactattatagagtatggg

SEQ ID NO: 3713913 - DNA, 25 bp, Homo sapien
attagcaggcagtgttatagatgtc

SEQ ID NO: 3713914 - DNA, 25 bp, Homo sapien
tgtcttgaagtacaagctcatagtt

SEQ ID NO: 3713915 - DNA, 25 bp, Homo sapien
gctcatagttgccttagtaagaaga

SEQ ID NO: 3713916 - DNA, 25 bp, Homo sapien
tagcaggcagtgttatagatgtctt

SEQ ID NO: 3713917 - DNA, 25 bp, Homo sapien
ctgtttcgtgacagcaaggactggg

SEQ ID NO: 3713918 - DNA, 25 bp, Homo sapien
acagaggattcaacaccgtcttggc

SEQ ID NO: 3713919 - DNA, 25 bp, Homo sapien
gactggggctacattatcctccttg

SEQ ID NO: 3713920 - DNA, 25 bp, Homo sapien
tatagtggggtcattcccaaagtgg

SEQ ID NO: 3713921 - DNA, 25 bp, Homo sapien
gcttccaccagcttaaccagagatc

SEQ ID NO: 3713922 - DNA, 25 bp, Homo sapien
ccagctgaggtatattctctgtgaa

SEQ ID NO: 3713923 - DNA, 25 bp, Homo sapien
ggtgacattggtgcaagtctttcta

SEQ ID NO: 3713924 - DNA, 25 bp, Homo sapien
gcaggaaaacaaccagcttgattga

SEQ ID NO: 3713925 - DNA, 25 bp, Homo sapien
caggagaggagtagggccaaatagg

SEQ ID NO: 3713926 - DNA, 25 bp, Homo sapien
tcaggagaggagtagggccaaatag

SEQ ID NO: 3713927 - DNA, 25 bp, Homo sapien
aggagtagggccaaataggagcctc

SEQ ID NO: 3713928 - DNA, 25 bp, Homo sapien
agtttaatgacatcccacatcgcat

SEQ ID NO: 3713929 - DNA, 25 bp, Homo sapien
ttttcaactcccagtttaatgacat

SEQ ID NO: 3713930 - DNA, 25 bp, Homo sapien
gtttaatgacatcccacatcgcatc

SEQ ID NO: 3713931 - DNA, 25 bp, Homo sapien
cagtttaatgacatcccacatcgca

SEQ ID NO: 3713932 - DNA, 25 bp, Homo sapien
tgttaagacaaccatgagcttgcac

SEQ ID NO: 3713933 - DNA, 25 bp, Homo sapien
tctcttcttgttaagacaaccatga

SEQ ID NO: 3713934 - DNA, 25 bp, Homo sapien
taagacaaccatgagcttgcactcc

SEQ ID NO: 3713935 - DNA, 25 bp, Homo sapien
tcttgttaagacaaccatgagcttg

SEQ ID NO: 3713936 - DNA, 25 bp, Homo sapien
gagacagagcacaaggaccacaaga

SEQ ID NO: 3713937 - DNA, 25 bp, Homo sapien
agacagagcacaaggaccacaagag

SEQ ID NO: 3713938 - DNA, 25 bp, Homo sapien
agagacagagcacaaggaccacaag

SEQ ID NO: 3713939 - DNA, 25 bp, Homo sapien
tgatgtccttaatacctatctgtag

SEQ ID NO: 3713940 - DNA, 25 bp, Homo sapien
tgctgatgtccttaatacctatctg

SEQ ID NO: 3713941 - DNA, 25 bp, Homo sapien
gatgtccttaatacctatctgtagg

SEQ ID NO: 3713942 - DNA, 25 bp, Homo sapien
gctgatgtccttaatacctatctgt

SEQ ID NO: 3713943 - DNA, 25 bp, Homo sapien
tacttaccttttgcaagccactgaa

SEQ ID NO: 3713944 - DNA, 25 bp, Homo sapien
aaaatacatggtttcattccactat

SEQ ID NO: 3713945 - DNA, 25 bp, Homo sapien
tacctcttgtaacatgtacctctag

SEQ ID NO: 3713946 - DNA, 25 bp, Homo sapien
tctaacatgcaaagacccaaatctt

SEQ ID NO: 3713947 - DNA, 25 bp, Homo sapien
catcaatctagtaggagtagtcttc

SEQ ID NO: 3713948 - DNA, 25 bp, Homo sapien
atcaatctagtaggagtagtcttca

SEQ ID NO: 3713949 - DNA, 25 bp, Homo sapien
aggaaagtagacagagataacagca

SEQ ID NO: 3713950 - DNA, 25 bp, Homo sapien
gattatacttgccactcagatggcc

SEQ ID NO: 3713951 - DNA, 25 bp, Homo sapien
caacatattcagcaggtctatttac

SEQ ID NO: 3713952 - DNA, 25 bp, Homo sapien
tattcagccacacaggcttcaaata

SEQ ID NO: 3713953 - DNA, 25 bp, Homo sapien
gcaccactatgggtttcaggccaaa

SEQ ID NO: 3713954 - DNA, 25 bp, Homo sapien
catgcagcaccactatgggtttcag

SEQ ID NO: 3713955 - DNA, 25 bp, Homo sapien
tgcagcaccactatgggtttcaggc

SEQ ID NO: 3713956 - DNA, 25 bp, Homo sapien
cagcaccactatgggtttcaggcca

SEQ ID NO: 3713957 - DNA, 25 bp, Homo sapien
ctgcccgaggagctctgtaagtctc

SEQ ID NO: 3713958 - DNA, 25 bp, Homo sapien
caagacagatgctgaaacaggcaca

SEQ ID NO: 3713959 - DNA, 25 bp, Homo sapien
acagatgctgaaacaggcacatgca

SEQ ID NO: 3713960 - DNA, 25 bp, Homo sapien
gctctgtaagtctctgttttccatc

SEQ ID NO: 3713961 - DNA, 25 bp, Homo sapien
attccgcagcgtcatgagggagaaa

SEQ ID NO: 3713962 - DNA, 25 bp, Homo sapien
ccaaaattccgcagcgtcatgaggg

SEQ ID NO: 3713963 - DNA, 25 bp, Homo sapien
tccgcagcgtcatgagggagaaacg

SEQ ID NO: 3713964 - DNA, 25 bp, Homo sapien
tcccaaaattccgcagcgtcatgag

SEQ ID NO: 3713965 - DNA, 25 bp, Homo sapien
gaaagatatggccacccctgaaatg

SEQ ID NO: 3713966 - DNA, 25 bp, Homo sapien
tactggccagaatggcaagcacggg

SEQ ID NO: 3713967 - DNA, 25 bp, Homo sapien
gtgaggctgaccatacaaacacagt

SEQ ID NO: 3713968 - DNA, 25 bp, Homo sapien
cttcatagatgagtagagttggcca

SEQ ID NO: 3713969 - DNA, 25 bp, Homo sapien
cctaagctgaggacgaatgtcacct

SEQ ID NO: 3713970 - DNA, 25 bp, Homo sapien
catctatatgtttcaggaagtcagg

SEQ ID NO: 3713971 - DNA, 25 bp, Homo sapien
accatcatcttcctaagctgaggac

SEQ ID NO: 3713972 - DNA, 25 bp, Homo sapien
acatctatatgtttcaggaagtcag

SEQ ID NO: 3713973 - DNA, 25 bp, Homo sapien
tttcctgacttagtaaggatcacca

SEQ ID NO: 3713974 - DNA, 25 bp, Homo sapien
gacttagtaaggatcaccattctaa

SEQ ID NO: 3713975 - DNA, 25 bp, Homo sapien
ctgacttagtaaggatcaccattct

SEQ ID NO: 3713976 - DNA, 25 bp, Homo sapien
tcctgacttagtaaggatcaccatt

SEQ ID NO: 3713977 - DNA, 25 bp, Homo sapien
tcccatttatgagtgcaaacatgtg

SEQ ID NO: 3713978 - DNA, 25 bp, Homo sapien
tgcaaacatgtggagtttggttttc

SEQ ID NO: 3713979 - DNA, 25 bp, Homo sapien
cgtgccccaacaggtcccatgtgtg

SEQ ID NO: 3713980 - DNA, 25 bp, Homo sapien
gttagttgctgaggatgatgatttc

SEQ ID NO: 3713981 - DNA, 25 bp, Homo sapien
caggggctgctcaaaatcttgatgt

SEQ ID NO: 3713982 - DNA, 25 bp, Homo sapien
ccaggggctgctcaaaatcttgatg

SEQ ID NO: 3713983 - DNA, 25 bp, Homo sapien
caggaagcaaaaatcttggccttac

SEQ ID NO: 3713984 - DNA, 25 bp, Homo sapien
gaataagtggtttctcaggaagcaa

SEQ ID NO: 3713985 - DNA, 25 bp, Homo sapien
aaaaagagaataagtggtttctcag

SEQ ID NO: 3713986 - DNA, 25 bp, Homo sapien
ttctcaggaagcaaaaatcttggcc

SEQ ID NO: 3713987 - DNA, 25 bp, Homo sapien
gaagcaatcaataaagtcctgaggg

SEQ ID NO: 3713988 - DNA, 25 bp, Homo sapien
agcaatcaataaagtcctgagggtt

SEQ ID NO: 3713989 - DNA, 25 bp, Homo sapien
agtaatcaatgataggagaaaaatt

SEQ ID NO: 3713990 - DNA, 25 bp, Homo sapien
tgttgtgagttcccgggaagtaatc

SEQ ID NO: 3713991 - DNA, 25 bp, Homo sapien
tcacaagcagtcacataactaagct

SEQ ID NO: 3713992 - DNA, 25 bp, Homo sapien
taaacacagaactagtcaacaaatc

SEQ ID NO: 3713993 - DNA, 25 bp, Homo sapien
tctcaagcattactgattgaccagt

SEQ ID NO: 3713994 - DNA, 25 bp, Homo sapien
cagttaaacatccttagtaaacaca

SEQ ID NO: 3713995 - DNA, 25 bp, Homo sapien
ttctttcgttccatataaaatgtaa

SEQ ID NO: 3713996 - DNA, 25 bp, Homo sapien
atggtacctcattgggactttgatt

SEQ ID NO: 3713997 - DNA, 25 bp, Homo sapien
gatggtacctcattgggactttgat

SEQ ID NO: 3713998 - DNA, 25 bp, Homo sapien
ttcaacaatggtgcgatgacaacgg

SEQ ID NO: 3713999 - DNA, 25 bp, Homo sapien
tgacaacggcattgatgtttacgcc

SEQ ID NO: 3714000 - DNA, 25 bp, Homo sapien
tgcactatagggattacgacagaca

SEQ ID NO: 3714001 - DNA, 25 bp, Homo sapien
tttgcaggaatgcaggaaacccacc

SEQ ID NO: 3714002 - DNA, 25 bp, Homo sapien
attcagatggttggttgtgcttttc

SEQ ID NO: 3714003 - DNA, 25 bp, Homo sapien
agtaaattcagatggttggttgtgc

SEQ ID NO: 3714004 - DNA, 25 bp, Homo sapien
aaattcagatggttggttgtgcttt

SEQ ID NO: 3714005 - DNA, 25 bp, Homo sapien
taaattcagatggttggttgtgctt

SEQ ID NO: 3714006 - DNA, 25 bp, Homo sapien
cagctccaaacaagtcaactgcagt

SEQ ID NO: 3714007 - DNA, 25 bp, Homo sapien
cccagctccaaacaagtcaactgca

SEQ ID NO: 3714008 - DNA, 25 bp, Homo sapien
gtcccagctccaaacaagtcaactg

SEQ ID NO: 3714009 - DNA, 25 bp, Homo sapien
ctgtcccagctccaaacaagtcaac

SEQ ID NO: 3714010 - DNA, 25 bp, Homo sapien
aaggagagcatatctcagggttgtg

SEQ ID NO: 3714011 - DNA, 25 bp, Homo sapien
aggagagcatatctcagggttgtgc

SEQ ID NO: 3714012 - DNA, 25 bp, Homo sapien
caggccaagatatcccattgtaatc

SEQ ID NO: 3714013 - DNA, 25 bp, Homo sapien
gtaatcaccattagtttgaaacaga

SEQ ID NO: 3714014 - DNA, 25 bp, Homo sapien
gatatcccattgtaatcaccattag

SEQ ID NO: 3714015 - DNA, 25 bp, Homo sapien
ccatgccaggccaagatatcccatt

SEQ ID NO: 3714016 - DNA, 25 bp, Homo sapien
ggacctcgtgcaccacagcatctgt

SEQ ID NO: 3714017 - DNA, 25 bp, Homo sapien
tggacctcgtgcaccacagcatctg

SEQ ID NO: 3714018 - DNA, 25 bp, Homo sapien
ctggacctcgtgcaccacagcatct

SEQ ID NO: 3714019 - DNA, 25 bp, Homo sapien
tcttaaaattgccaccttcatccag

SEQ ID NO: 3714020 - DNA, 25 bp, Homo sapien
tgatgagggtcaaacatctctgggt

SEQ ID NO: 3714021 - DNA, 25 bp, Homo sapien
gttgtcatgtagcacagaagtcagg

SEQ ID NO: 3714022 - DNA, 25 bp, Homo sapien
ccttcatccagaaagtgatgagggt

SEQ ID NO: 3714023 - DNA, 25 bp, Homo sapien
ttatcttgtaccctgaaacacaaat

SEQ ID NO: 3714024 - DNA, 25 bp, Homo sapien
atcttgtaccctgaaacacaaatgg

SEQ ID NO: 3714025 - DNA, 25 bp, Homo sapien
tatcttgtaccctgaaacacaaatg

SEQ ID NO: 3714026 - DNA, 25 bp, Homo sapien
gtagaagggcggcacagaggcaaat

SEQ ID NO: 3714027 - DNA, 25 bp, Homo sapien
caactggagtggtgtcaaggttctt

SEQ ID NO: 3714028 - DNA, 25 bp, Homo sapien
actggagtggtgtcaaggttctttg

SEQ ID NO: 3714029 - DNA, 25 bp, Homo sapien
tgacaactggagtggtgtcaaggtt

SEQ ID NO: 3714030 - DNA, 25 bp, Homo sapien
cataggaaactctccgtaatggagg

SEQ ID NO: 3714031 - DNA, 25 bp, Homo sapien
gaaactctccgtaatggaggtcgaa

SEQ ID NO: 3714032 - DNA, 25 bp, Homo sapien
tgaaacataggaaactctccgtaat

SEQ ID NO: 3714033 - DNA, 25 bp, Homo sapien
ccgtaatggaggtcgaatgttcact

SEQ ID NO: 3714034 - DNA, 25 bp, Homo sapien
tagataagtatgagcattatgtgac

SEQ ID NO: 3714035 - DNA, 25 bp, Homo sapien
caatgcaactgttacagagtatgga

SEQ ID NO: 3714036 - DNA, 25 bp, Homo sapien
cattatgtgacagtcaatgcaactg

SEQ ID NO: 3714037 - DNA, 25 bp, Homo sapien
taataactcaacattagataagtat

SEQ ID NO: 3714038 - DNA, 25 bp, Homo sapien
gaaatgcctttgaattataatacac

SEQ ID NO: 3714039 - DNA, 25 bp, Homo sapien
gctttttatttagaacatgcagaaa

SEQ ID NO: 3714040 - DNA, 25 bp, Homo sapien
tagaacatgcagaaaagaaatgcct

SEQ ID NO: 3714041 - DNA, 25 bp, Homo sapien
gcctttgaattataatacacaaatc

SEQ ID NO: 3714042 - DNA, 25 bp, Homo sapien
caccctttgactgatcctctgaata

SEQ ID NO: 3714043 - DNA, 25 bp, Homo sapien
aatgacacttcaaagtaacaccagg

SEQ ID NO: 3714044 - DNA, 25 bp, Homo sapien
tgtccttatcattttgagaaccagc

SEQ ID NO: 3714045 - DNA, 25 bp, Homo sapien
ctagaggttagagctgcccctggac

SEQ ID NO: 3714046 - DNA, 25 bp, Homo sapien
gatcaggtacattgcccaccaagtt

SEQ ID NO: 3714047 - DNA, 25 bp, Homo sapien
tagatcaggtacattgcccaccaag

SEQ ID NO: 3714048 - DNA, 25 bp, Homo sapien
aacaaatagatcaggtacattgccc

SEQ ID NO: 3714049 - DNA, 25 bp, Homo sapien
ggtacattgcccaccaagttttcaa

SEQ ID NO: 3714050 - DNA, 25 bp, Homo sapien
ggagcaggagtccatatctcagagt

SEQ ID NO: 3714051 - DNA, 25 bp, Homo sapien
caggagcaggagtccatatctcaga

SEQ ID NO: 3714052 - DNA, 25 bp, Homo sapien
gcaggagtccatatctcagagtggt

SEQ ID NO: 3714053 - DNA, 25 bp, Homo sapien
gagcaggagtccatatctcagagtg

SEQ ID NO: 3714054 - DNA, 25 bp, Homo sapien
tttttactcatctcagtcatcctcc

SEQ ID NO: 3714055 - DNA, 25 bp, Homo sapien
aatttagacagattacagctgatga

SEQ ID NO: 3714056 - DNA, 25 bp, Homo sapien
gtttttactcatctcagtcatcctc

SEQ ID NO: 3714057 - DNA, 25 bp, Homo sapien
cctccattgtgcaaagatgtccttt

SEQ ID NO: 3714058 - DNA, 25 bp, Homo sapien
taccaaagggattgtttctctgcca

SEQ ID NO: 3714059 - DNA, 25 bp, Homo sapien
tctgaagaatgctagcccatctggc

SEQ ID NO: 3714060 - DNA, 25 bp, Homo sapien
taaggagagttgttcaggtcactgc

SEQ ID NO: 3714061 - DNA, 25 bp, Homo sapien
gacttgcccgcatggagctattttt

SEQ ID NO: 3714062 - DNA, 25 bp, Homo sapien
tctagataagaatggcaactttaag

SEQ ID NO: 3714063 - DNA, 25 bp, Homo sapien
tccaaatatctttgaccctggccac

SEQ ID NO: 3714064 - DNA, 25 bp, Homo sapien
agataagaatggcaactttaagaaa

SEQ ID NO: 3714065 - DNA, 25 bp, Homo sapien
tatctttgaccctggccactttcta

SEQ ID NO: 3714066 - DNA, 25 bp, Homo sapien
tttagcaagcttccaccactggcct

SEQ ID NO: 3714067 - DNA, 25 bp, Homo sapien
tgattggaaagctctttagcaagct

SEQ ID NO: 3714068 - DNA, 25 bp, Homo sapien
gaaagctctttagcaagcttccacc

SEQ ID NO: 3714069 - DNA, 25 bp, Homo sapien
aaatgtgattggaaagctctttagc

SEQ ID NO: 3714070 - DNA, 25 bp, Homo sapien
tgatgaaatagagcggcaaatgagg

SEQ ID NO: 3714071 - DNA, 25 bp, Homo sapien
gaagtgatgaaatagagcggcaaat

SEQ ID NO: 3714072 - DNA, 25 bp, Homo sapien
aaatagagcggcaaatgaggccaga

SEQ ID NO: 3714073 - DNA, 25 bp, Homo sapien
ttgaagtgatgaaatagagcggcaa

SEQ ID NO: 3714074 - DNA, 25 bp, Homo sapien
gttttctggaagaggcaattcccca

SEQ ID NO: 3714075 - DNA, 25 bp, Homo sapien
ttactaaaggacttggtaggtgcac

SEQ ID NO: 3714076 - DNA, 25 bp, Homo sapien
gcaattccccaatatctcaaagaat

SEQ ID NO: 3714077 - DNA, 25 bp, Homo sapien
ctaaaggacttggtaggtgcacata

SEQ ID NO: 3714078 - DNA, 25 bp, Homo sapien
catattacctgtgggactctgagaa

SEQ ID NO: 3714079 - DNA, 25 bp, Homo sapien
gggtcattgcgtggcacatcacagg

SEQ ID NO: 3714080 - DNA, 25 bp, Homo sapien
taagtggcagctataacaatcacca

SEQ ID NO: 3714081 - DNA, 25 bp, Homo sapien
gatttgtgtaccaattgcctgggtc

SEQ ID NO: 3714082 - DNA, 25 bp, Homo sapien
tccatgtgggaatctcaagtcaaaa

SEQ ID NO: 3714083 - DNA, 25 bp, Homo sapien
gaaactaaactgtatcaacagagaa

SEQ ID NO: 3714084 - DNA, 25 bp, Homo sapien
taaactactcttatcttatgtagaa

SEQ ID NO: 3714085 - DNA, 25 bp, Homo sapien
tttcaagaaataggcagtgctgtaa

SEQ ID NO: 3714086 - DNA, 25 bp, Homo sapien
gctatcagtgcagcaagtcagggca

SEQ ID NO: 3714087 - DNA, 25 bp, Homo sapien
gagggtggccaccattgtcttttat

SEQ ID NO: 3714088 - DNA, 25 bp, Homo sapien
cagaggcaggttataggaccagata

SEQ ID NO: 3714089 - DNA, 25 bp, Homo sapien
gaatccctgaggtgcatccattagt

SEQ ID NO: 3714090 - DNA, 25 bp, Homo sapien
taagggagcctgggcaatggtgggc

SEQ ID NO: 3714091 - DNA, 25 bp, Homo sapien
agggagcctgggcaatggtgggcac

SEQ ID NO: 3714092 - DNA, 25 bp, Homo sapien
cctaagggagcctgggcaatggtgg

SEQ ID NO: 3714093 - DNA, 25 bp, Homo sapien
acctaagggagcctgggcaatggtg

SEQ ID NO: 3714094 - DNA, 25 bp, Homo sapien
cgtagctaggactaatttgatcatc

SEQ ID NO: 3714095 - DNA, 25 bp, Homo sapien
tcctcccgtagctaggactaatttg

SEQ ID NO: 3714096 - DNA, 25 bp, Homo sapien
cccgtagctaggactaatttgatca

SEQ ID NO: 3714097 - DNA, 25 bp, Homo sapien
atctgaagccttattctctcagctc

SEQ ID NO: 3714098 - DNA, 25 bp, Homo sapien
caggacatgcgggtccagtggctgc

SEQ ID NO: 3714099 - DNA, 25 bp, Homo sapien
aggacatgcgggtccagtggctgct

SEQ ID NO: 3714100 - DNA, 25 bp, Homo sapien
gacatgcgggtccagtggctgctgt

SEQ ID NO: 3714101 - DNA, 25 bp, Homo sapien
tcagggggccctgagaaaaccagga

SEQ ID NO: 3714102 - DNA, 25 bp, Homo sapien
catcatgactgcctttagcatctga

SEQ ID NO: 3714103 - DNA, 25 bp, Homo sapien
atctgagaactttccagggtgccag

SEQ ID NO: 3714104 - DNA, 25 bp, Homo sapien
ctgttatcatcatgactgcctttag

SEQ ID NO: 3714105 - DNA, 25 bp, Homo sapien
ctgagaactttccagggtgccagct

SEQ ID NO: 3714106 - DNA, 25 bp, Homo sapien
gggtcacaagctggcactgtagcct

SEQ ID NO: 3714107 - DNA, 25 bp, Homo sapien
gcactgtagccttgtgtgtggctct

SEQ ID NO: 3714108 - DNA, 25 bp, Homo sapien
tagggtcacaagctggcactgtagc

SEQ ID NO: 3714109 - DNA, 25 bp, Homo sapien
gtcacaagctggcactgtagccttg

SEQ ID NO: 3714110 - DNA, 25 bp, Homo sapien
ctgtgttgggcaacctggaccccat

SEQ ID NO: 3714111 - DNA, 25 bp, Homo sapien
agctgtgttgggcaacctggacccc

SEQ ID NO: 3714112 - DNA, 25 bp, Homo sapien
ccagctgtgttgggcaacctggacc

SEQ ID NO: 3714113 - DNA, 25 bp, Homo sapien
acccagctgtgttgggcaacctgga

SEQ ID NO: 3714114 - DNA, 25 bp, Homo sapien
tgtgaccctccaaagcaagaaactt

SEQ ID NO: 3714115 - DNA, 25 bp, Homo sapien
tgagggtatgtgtcaccccagccct

SEQ ID NO: 3714116 - DNA, 25 bp, Homo sapien
tgagaaggaaggaacagtgatcctt

SEQ ID NO: 3714117 - DNA, 25 bp, Homo sapien
caagaaacttgagggtatgtgtcac

SEQ ID NO: 3714118 - DNA, 25 bp, Homo sapien
tggtagccggtggttgtttcattcc

SEQ ID NO: 3714119 - DNA, 25 bp, Homo sapien
cgggttccgctctgcggcgtgtttt

SEQ ID NO: 3714120 - DNA, 25 bp, Homo sapien
tgggcttcctgtctgcgtcgctgct

SEQ ID NO: 3714121 - DNA, 25 bp, Homo sapien
cggaggccgttgttgctctggtagc

SEQ ID NO: 3714122 - DNA, 25 bp, Homo sapien
tggcactggagcccgagctctgagc

SEQ ID NO: 3714123 - DNA, 25 bp, Homo sapien
agtcatctaagatccgccagcggat

SEQ ID NO: 3714124 - DNA, 25 bp, Homo sapien
gatgctgacccagcccgtggagcgc

SEQ ID NO: 3714125 - DNA, 25 bp, Homo sapien
cattgggttccgttgtgtcattgca

SEQ ID NO: 3714126 - DNA, 25 bp, Homo sapien
cataactgcatgagcgggatacttg

SEQ ID NO: 3714127 - DNA, 25 bp, Homo sapien
cactgggccgtgaaatccttacttt

SEQ ID NO: 3714128 - DNA, 25 bp, Homo sapien
ggaggaccaaatccccatagatgat

SEQ ID NO: 3714129 - DNA, 25 bp, Homo sapien
tatttgggccaagcagggcatgcag

SEQ ID NO: 3714130 - DNA, 25 bp, Homo sapien
tttcttgtaggcatatacccagcag

SEQ ID NO: 3714131 - DNA, 25 bp, Homo sapien
tcttagggctctcatcaaactggct

SEQ ID NO: 3714132 - DNA, 25 bp, Homo sapien
aactggctgaacagggaatccctag

SEQ ID NO: 3714133 - DNA, 25 bp, Homo sapien
tacgaagagtgtttgagcgctccca

SEQ ID NO: 3714134 - DNA, 25 bp, Homo sapien
tacctagattagatccaacagggcc

SEQ ID NO: 3714135 - DNA, 25 bp, Homo sapien
aaggccattttgtcactacttggga

SEQ ID NO: 3714136 - DNA, 25 bp, Homo sapien
tacagcagagcgaagatacacaaac

SEQ ID NO: 3714137 - DNA, 25 bp, Homo sapien
gaaagcattcccagtcatggtcact

SEQ ID NO: 3714138 - DNA, 25 bp, Homo sapien
gacagcatggcttttgtagcccacc

SEQ ID NO: 3714139 - DNA, 25 bp, Homo sapien
tcttgtttgtgatcctctttggcca

SEQ ID NO: 3714140 - DNA, 25 bp, Homo sapien
tctttggccatatctgaagtggcac

SEQ ID NO: 3714141 - DNA, 25 bp, Homo sapien
tatgcccttcttgaggacagcatgg

SEQ ID NO: 3714142 - DNA, 25 bp, Homo sapien
tctgctttctgggaggcaatctcac

SEQ ID NO: 3714143 - DNA, 25 bp, Homo sapien
ttggcaagtactaattctgctttct

SEQ ID NO: 3714144 - DNA, 25 bp, Homo sapien
ggcaagtactaattctgctttctgg

SEQ ID NO: 3714145 - DNA, 25 bp, Homo sapien
caagtactaattctgctttctggga

SEQ ID NO: 3714146 - DNA, 25 bp, Homo sapien
ggaggatggtagagctgttgccttc

SEQ ID NO: 3714147 - DNA, 25 bp, Homo sapien
gggcttcagatgtttggaggatggt

SEQ ID NO: 3714148 - DNA, 25 bp, Homo sapien
aggagtttctatggggggcttcaga

SEQ ID NO: 3714149 - DNA, 25 bp, Homo sapien
attccaagaggagtttctatggggg

SEQ ID NO: 3714150 - DNA, 25 bp, Homo sapien
ctagcatttgggtcagacagggaac

SEQ ID NO: 3714151 - DNA, 25 bp, Homo sapien
gcatttgggtcagacagggaaccac

SEQ ID NO: 3714152 - DNA, 25 bp, Homo sapien
agcatttgggtcagacagggaacca

SEQ ID NO: 3714153 - DNA, 25 bp, Homo sapien
tagcatttgggtcagacagggaacc

SEQ ID NO: 3714154 - DNA, 25 bp, Homo sapien
ctgaaactccggaccaaggagaagg

SEQ ID NO: 3714155 - DNA, 25 bp, Homo sapien
caaaattaaagttctgagaaactgc

SEQ ID NO: 3714156 - DNA, 25 bp, Homo sapien
cctttgcaaaattaaagttctgaga

SEQ ID NO: 3714157 - DNA, 25 bp, Homo sapien
gaaactgcttggactaggcacctgg

SEQ ID NO: 3714158 - DNA, 25 bp, Homo sapien
gggaccactgatccaacacatcctt

SEQ ID NO: 3714159 - DNA, 25 bp, Homo sapien
tcctcccaaagcgggtgatgaaggt

SEQ ID NO: 3714160 - DNA, 25 bp, Homo sapien
cctcccaaagcgggtgatgaaggtg

SEQ ID NO: 3714161 - DNA, 25 bp, Homo sapien
aaagcgggtgatgaaggtggggagg

SEQ ID NO: 3714162 - DNA, 25 bp, Homo sapien
aagcgggtgatgaaggtggggaggg

SEQ ID NO: 3714163 - DNA, 25 bp, Homo sapien
gcagatccagtaggcttcaggtgtt

SEQ ID NO: 3714164 - DNA, 25 bp, Homo sapien
atgctggcggccttcttggagagtt

SEQ ID NO: 3714165 - DNA, 25 bp, Homo sapien
acaggccaggcagatccagtaggct

SEQ ID NO: 3714166 - DNA, 25 bp, Homo sapien
tatcatcagccggtctccatggcta

SEQ ID NO: 3714167 - DNA, 25 bp, Homo sapien
cggtgtgggcctttcccacatactg

SEQ ID NO: 3714168 - DNA, 25 bp, Homo sapien
tgggcctttcccacatactgcacct

SEQ ID NO: 3714169 - DNA, 25 bp, Homo sapien
gggcctttcccacatactgcacctt

SEQ ID NO: 3714170 - DNA, 25 bp, Homo sapien
cctttcccacatactgcaccttcat

SEQ ID NO: 3714171 - DNA, 25 bp, Homo sapien
ttgatagcgaattttcttggcagtc

SEQ ID NO: 3714172 - DNA, 25 bp, Homo sapien
aattgatagcgaattttcttggcag

SEQ ID NO: 3714173 - DNA, 25 bp, Homo sapien
gtaattgatagcgaattttcttggc

SEQ ID NO: 3714174 - DNA, 25 bp, Homo sapien
gcgtaattgatagcgaattttcttg

SEQ ID NO: 3714175 - DNA, 25 bp, Homo sapien
ggcagtcggacacggcagagtttac

SEQ ID NO: 3714176 - DNA, 25 bp, Homo sapien
ccacaatgcactgggccttagacat

SEQ ID NO: 3714177 - DNA, 25 bp, Homo sapien
gggccatagcttcattagccacaat

SEQ ID NO: 3714178 - DNA, 25 bp, Homo sapien
ggacacggcagagtttacaactggg

SEQ ID NO: 3714179 - DNA, 25 bp, Homo sapien
tccaaccacccatcatagctcttat

SEQ ID NO: 3714180 - DNA, 25 bp, Homo sapien
aaccacccatcatagctcttatctg

SEQ ID NO: 3714181 - DNA, 25 bp, Homo sapien
aacttcttgaaatccaaccacccat

SEQ ID NO: 3714182 - DNA, 25 bp, Homo sapien
acccatcatagctcttatctgacac

SEQ ID NO: 3714183 - DNA, 25 bp, Homo sapien
aatactcgaccattttgggagctcc

SEQ ID NO: 3714184 - DNA, 25 bp, Homo sapien
gagctcctgttgtacccttggtgaa

SEQ ID NO: 3714185 - DNA, 25 bp, Homo sapien
aagaatatggccattggatcttggc

SEQ ID NO: 3714186 - DNA, 25 bp, Homo sapien
tcttggcttttggtcctcatgtagg

SEQ ID NO: 3714187 - DNA, 25 bp, Homo sapien
aggcctgtacaggctgtgcgagaac

SEQ ID NO: 3714188 - DNA, 25 bp, Homo sapien
ctttcaggcctgtacaggctgtgcg

SEQ ID NO: 3714189 - DNA, 25 bp, Homo sapien
tcaggcctgtacaggctgtgcgaga

SEQ ID NO: 3714190 - DNA, 25 bp, Homo sapien
tttcaggcctgtacaggctgtgcga

SEQ ID NO: 3714191 - DNA, 25 bp, Homo sapien
actccacaagacatctgttggctgg

SEQ ID NO: 3714192 - DNA, 25 bp, Homo sapien
tctcagggcagaaggttggcatgtg

SEQ ID NO: 3714193 - DNA, 25 bp, Homo sapien
cccaagacagcgctcagggataaag

SEQ ID NO: 3714194 - DNA, 25 bp, Homo sapien
gcgctcagggataaagatccaccaa

SEQ ID NO: 3714195 - DNA, 25 bp, Homo sapien
cactgggtcattgctaatgcctctc

SEQ ID NO: 3714196 - DNA, 25 bp, Homo sapien
actgggtcattgctaatgcctctct

SEQ ID NO: 3714197 - DNA, 25 bp, Homo sapien
attccacactaggaattgatcttac

SEQ ID NO: 3714198 - DNA, 25 bp, Homo sapien
gtcactgggtcattgctaatgcctc

SEQ ID NO: 3714199 - DNA, 25 bp, Homo sapien
ggagagcatcttcaagtcaagatca

SEQ ID NO: 3714200 - DNA, 25 bp, Homo sapien
agagcatcttcaagtcaagatcaca

SEQ ID NO: 3714201 - DNA, 25 bp, Homo sapien
gggagagcatcttcaagtcaagatc

SEQ ID NO: 3714202 - DNA, 25 bp, Homo sapien
gagagcatcttcaagtcaagatcac

SEQ ID NO: 3714203 - DNA, 25 bp, Homo sapien
gtgctgaagcagttcctggtacatc

SEQ ID NO: 3714204 - DNA, 25 bp, Homo sapien
tttccgtctgcccatagccttcata

SEQ ID NO: 3714205 - DNA, 25 bp, Homo sapien
ccaacttagtgatgcgtttccagtc

SEQ ID NO: 3714206 - DNA, 25 bp, Homo sapien
atgtccaacttagtgatgcgtttcc

SEQ ID NO: 3714207 - DNA, 25 bp, Homo sapien
agtttccgtctgcccatagccttca

SEQ ID NO: 3714208 - DNA, 25 bp, Homo sapien
tccctgtctgtgagaacaccatgag

SEQ ID NO: 3714209 - DNA, 25 bp, Homo sapien
tgtcatcttggatatgctgggttgc

SEQ ID NO: 3714210 - DNA, 25 bp, Homo sapien
tgagaagttggtagtctgcaaccta

SEQ ID NO: 3714211 - DNA, 25 bp, Homo sapien
aactgaaagacactaaagagcttgg

SEQ ID NO: 3714212 - DNA, 25 bp, Homo sapien
ttttggaagtggcacagagtagacc

SEQ ID NO: 3714213 - DNA, 25 bp, Homo sapien
ttattgttttggaagtggcacagag

SEQ ID NO: 3714214 - DNA, 25 bp, Homo sapien
tgttttggaagtggcacagagtaga

SEQ ID NO: 3714215 - DNA, 25 bp, Homo sapien
tattgttttggaagtggcacagagt

SEQ ID NO: 3714216 - DNA, 25 bp, Homo sapien
tggcttccccagagagcttggcttc

SEQ ID NO: 3714217 - DNA, 25 bp, Homo sapien
gacaatataaggtggcaatggcttc

SEQ ID NO: 3714218 - DNA, 25 bp, Homo sapien
ctggacaatataaggtggcaatggc

SEQ ID NO: 3714219 - DNA, 25 bp, Homo sapien
gcttccccagagagcttggcttcaa

SEQ ID NO: 3714220 - DNA, 25 bp, Homo sapien
gttttatgcggattgcaatatttcc

SEQ ID NO: 3714221 - DNA, 25 bp, Homo sapien
gttggtttagttttatgcggattgc

SEQ ID NO: 3714222 - DNA, 25 bp, Homo sapien
tgcggattgcaatatttccttcttc

SEQ ID NO: 3714223 - DNA, 25 bp, Homo sapien
tggtttagttttatgcggattgcaa

SEQ ID NO: 3714224 - DNA, 25 bp, Homo sapien
gagtctcaaattgttacacggcaga

SEQ ID NO: 3714225 - DNA, 25 bp, Homo sapien
tgtccacgtcacgaaaaacatggtg

SEQ ID NO: 3714226 - DNA, 25 bp, Homo sapien
caataatggcactacgattagtagc

SEQ ID NO: 3714227 - DNA, 25 bp, Homo sapien
tggaaatggcactcacctccttaat

SEQ ID NO: 3714228 - DNA, 25 bp, Homo sapien
ccatgatccctctgtcacctgtgag

SEQ ID NO: 3714229 - DNA, 25 bp, Homo sapien
tctaccagaccaccagaagtagccg

SEQ ID NO: 3714230 - DNA, 25 bp, Homo sapien
aagtagccgtcttcatccatgatcc

SEQ ID NO: 3714231 - DNA, 25 bp, Homo sapien
ttcctacgtattggaagcagtccag

SEQ ID NO: 3714232 - DNA, 25 bp, Homo sapien
tcccatcccgcgtctcccatatttg

SEQ ID NO: 3714233 - DNA, 25 bp, Homo sapien
tccaagaatcctcatagcgtcctct

SEQ ID NO: 3714234 - DNA, 25 bp, Homo sapien
gtctcccatatttgccccagcttgg

SEQ ID NO: 3714235 - DNA, 25 bp, Homo sapien
tctgcactcttcagccggcggcgcc

SEQ ID NO: 3714236 - DNA, 25 bp, Homo sapien
aacttcctggttgcggggacatttg

SEQ ID NO: 3714237 - DNA, 25 bp, Homo sapien
aacttcaacccgatgaacttcctgg

SEQ ID NO: 3714238 - DNA, 25 bp, Homo sapien
gacggcagaggaaacttcaacccga

SEQ ID NO: 3714239 - DNA, 25 bp, Homo sapien
ctggcgagcaggaggcgacggcaga

SEQ ID NO: 3714240 - DNA, 25 bp, Homo sapien
gaagacgttgtcctcgcaatatttt

SEQ ID NO: 3714241 - DNA, 25 bp, Homo sapien
tcttccccaggctcgcagagaagac

SEQ ID NO: 3714242 - DNA, 25 bp, Homo sapien
taactggatacatctcaactcttcc

SEQ ID NO: 3714243 - DNA, 25 bp, Homo sapien
gatacatctcaactcttcccgtggt

SEQ ID NO: 3714244 - DNA, 25 bp, Homo sapien
cacctgagggttatgaagtggtcac

SEQ ID NO: 3714245 - DNA, 25 bp, Homo sapien
gcttgtaaaacattgagtcccctcc

SEQ ID NO: 3714246 - DNA, 25 bp, Homo sapien
ttccccaagtgagccagcagatctg

SEQ ID NO: 3714247 - DNA, 25 bp, Homo sapien
taattgactcacaccagctgtgcga

SEQ ID NO: 3714248 - DNA, 25 bp, Homo sapien
acaattgcttttcgggttttcatca

SEQ ID NO: 3714249 - DNA, 25 bp, Homo sapien
tacaattgcttttcgggttttcatc

SEQ ID NO: 3714250 - DNA, 25 bp, Homo sapien
ctttggccaggtgttaatctcctat

SEQ ID NO: 3714251 - DNA, 25 bp, Homo sapien
tttggccaggtgttaatctcctatt

SEQ ID NO: 3714252 - DNA, 25 bp, Homo sapien
tatgcttgttaatcatttttggcta

SEQ ID NO: 3714253 - DNA, 25 bp, Homo sapien
caaccttaccaacatttgttttatg

SEQ ID NO: 3714254 - DNA, 25 bp, Homo sapien
acattcccatcatcaatacgcaagg

SEQ ID NO: 3714255 - DNA, 25 bp, Homo sapien
aatacgcaagggctccattttctcc

SEQ ID NO: 3714256 - DNA, 25 bp, Homo sapien
cagcactttgccgtttctgacactg

SEQ ID NO: 3714257 - DNA, 25 bp, Homo sapien
gcctggggataagacccttcactgt

SEQ ID NO: 3714258 - DNA, 25 bp, Homo sapien
cactttgccgtttctgacactgctc

SEQ ID NO: 3714259 - DNA, 25 bp, Homo sapien
tggaggcctggggataagacccttc

SEQ ID NO: 3714260 - DNA, 25 bp, Homo sapien
ggatcccgagagtcaagggccttct

SEQ ID NO: 3714261 - DNA, 25 bp, Homo sapien
caggaaggtcttgtaatgtggaaaa

SEQ ID NO: 3714262 - DNA, 25 bp, Homo sapien
ttgatcctgcggacttggaattccc

SEQ ID NO: 3714263 - DNA, 25 bp, Homo sapien
gggtgttactgccaccttgatcctg

SEQ ID NO: 3714264 - DNA, 25 bp, Homo sapien
cagacctcaattactcaggcttggg

SEQ ID NO: 3714265 - DNA, 25 bp, Homo sapien
tactgaaagataggatgaccagacc

SEQ ID NO: 3714266 - DNA, 25 bp, Homo sapien
ggtcctatgtagaaggccactgcag

SEQ ID NO: 3714267 - DNA, 25 bp, Homo sapien
gacctgttgggatatacttagcaga

SEQ ID NO: 3714268 - DNA, 25 bp, Homo sapien
cccaacagttctcctagttaaatag

SEQ ID NO: 3714269 - DNA, 25 bp, Homo sapien
gaaacgattcacatgtctaacagca

SEQ ID NO: 3714270 - DNA, 25 bp, Homo sapien
ttgatgcagcaaatagtttgcaccc

SEQ ID NO: 3714271 - DNA, 25 bp, Homo sapien
aaactgggtccacatgagtgctaaa

SEQ ID NO: 3714272 - DNA, 25 bp, Homo sapien
gggattcacaacttcaggcggtcag

SEQ ID NO: 3714273 - DNA, 25 bp, Homo sapien
gaacagtgtatagccaatggaaagc

SEQ ID NO: 3714274 - DNA, 25 bp, Homo sapien
caggcctacattacccagcagtgat

SEQ ID NO: 3714275 - DNA, 25 bp, Homo sapien
gccccagcctggtatatgccctaat

SEQ ID NO: 3714276 - DNA, 25 bp, Homo sapien
attgccatttaaattacacactgag

SEQ ID NO: 3714277 - DNA, 25 bp, Homo sapien
tgcagtggattgatttgataaatag

SEQ ID NO: 3714278 - DNA, 25 bp, Homo sapien
gtattgccatttaaattacacactg

SEQ ID NO: 3714279 - DNA, 25 bp, Homo sapien
agagcatgtcctatgcagacataga

SEQ ID NO: 3714280 - DNA, 25 bp, Homo sapien
aatttgcacggcagcatttcaccga

SEQ ID NO: 3714281 - DNA, 25 bp, Homo sapien
ggtatgcctcaccaatttgcccgtc

SEQ ID NO: 3714282 - DNA, 25 bp, Homo sapien
tgttaaaatttgcatcacgtcgcct

SEQ ID NO: 3714283 - DNA, 25 bp, Homo sapien
caccgattgtggactgtattggcta

SEQ ID NO: 3714284 - DNA, 25 bp, Homo sapien
agactgacacaggaaaatgaactta

SEQ ID NO: 3714285 - DNA, 25 bp, Homo sapien
ggaaaatgaacttaatcaagagaga

SEQ ID NO: 3714286 - DNA, 25 bp, Homo sapien
gagactgtgatatgtgctaagaagg

SEQ ID NO: 3714287 - DNA, 25 bp, Homo sapien
agactgtgatatgtgctaagaaggg

SEQ ID NO: 3714288 - DNA, 25 bp, Homo sapien
gacagtttagaattgggaggcctat

SEQ ID NO: 3714289 - DNA, 25 bp, Homo sapien
tgcagctgcatttatcagagcacta

SEQ ID NO: 3714290 - DNA, 25 bp, Homo sapien
ggaggcctattctcatagaacacca

SEQ ID NO: 3714291 - DNA, 25 bp, Homo sapien
aacatacaccaatgtactctggctg

SEQ ID NO: 3714292 - DNA, 25 bp, Homo sapien
gagatattgacccactctgcctcag

SEQ ID NO: 3714293 - DNA, 25 bp, Homo sapien
cagcaagacctcaacatgaatgaga

SEQ ID NO: 3714294 - DNA, 25 bp, Homo sapien
gaccactctggtgcagtgcaatcca

SEQ ID NO: 3714295 - DNA, 25 bp, Homo sapien
tgtacaagtggctttaccttcacct

SEQ ID NO: 3714296 - DNA, 25 bp, Homo sapien
tgttgctaatgttgaacctgaaacc

SEQ ID NO: 3714297 - DNA, 25 bp, Homo sapien
tctgggccaccagtctgtgttgcta

SEQ ID NO: 3714298 - DNA, 25 bp, Homo sapien
aatgttgaacctgaaaccaaatctg

SEQ ID NO: 3714299 - DNA, 25 bp, Homo sapien
tgtggatgttgctaatgttgaacct

SEQ ID NO: 3714300 - DNA, 25 bp, Homo sapien
caatacatttggataaatatggaaa

SEQ ID NO: 3714301 - DNA, 25 bp, Homo sapien
tccatcctccaaattatcaatacat

SEQ ID NO: 3714302 - DNA, 25 bp, Homo sapien
gatctgcatctcttaattcctcatt

SEQ ID NO: 3714303 - DNA, 25 bp, Homo sapien
tgagaccttccttctggcaaccaga

SEQ ID NO: 3714304 - DNA, 25 bp, Homo sapien
tgagtgaattacacccaggttctct

SEQ ID NO: 3714305 - DNA, 25 bp, Homo sapien
aaggccatgttctgcatcagccaag

SEQ ID NO: 3714306 - DNA, 25 bp, Homo sapien
cttagaaagtgggtcgctggctgaa

SEQ ID NO: 3714307 - DNA, 25 bp, Homo sapien
tcagccaaggtgaaaacaggtggca

SEQ ID NO: 3714308 - DNA, 25 bp, Homo sapien
cattgtagaagaagcatgacgtggc

SEQ ID NO: 3714309 - DNA, 25 bp, Homo sapien
cagggcttgctaacggttgaggaca

SEQ ID NO: 3714310 - DNA, 25 bp, Homo sapien
ttgaggaggcttcccaaaaggacag

SEQ ID NO: 3714311 - DNA, 25 bp, Homo sapien
tgatgcctgcaacggaagttagtcc

SEQ ID NO: 3714312 - DNA, 25 bp, Homo sapien
tgcaatctatttgggcccacaaggc

SEQ ID NO: 3714313 - DNA, 25 bp, Homo sapien
gatccagagggattaacagctccag

SEQ ID NO: 3714314 - DNA, 25 bp, Homo sapien
tagcgccaggtgttctgtggatcca

SEQ ID NO: 3714315 - DNA, 25 bp, Homo sapien
tgcttagtaactccacagtagcgcc

SEQ ID NO: 3714316 - DNA, 25 bp, Homo sapien
cttcccctggtgactcctcaggcct

SEQ ID NO: 3714317 - DNA, 25 bp, Homo sapien
caccaccccagacaaccttcccctg

SEQ ID NO: 3714318 - DNA, 25 bp, Homo sapien
tccggctgaaaaagcccctccacca

SEQ ID NO: 3714319 - DNA, 25 bp, Homo sapien
agaagccagacctccccagtcagcc

SEQ ID NO: 3714320 - DNA, 25 bp, Homo sapien
accatccggaagcatgagcagcagc

SEQ ID NO: 3714321 - DNA, 25 bp, Homo sapien
tagacagcctgagtggcgcctggat

SEQ ID NO: 3714322 - DNA, 25 bp, Homo sapien
ccaccatccggaagcatgagcagca

SEQ ID NO: 3714323 - DNA, 25 bp, Homo sapien
gcagcagacctctagacagcctgag

SEQ ID NO: 3714324 - DNA, 25 bp, Homo sapien
aggtggtgacatccctcttcagggc

SEQ ID NO: 3714325 - DNA, 25 bp, Homo sapien
gtaattaactgggtgaagcctgcag

SEQ ID NO: 3714326 - DNA, 25 bp, Homo sapien
ctccattcactgagcgtcggccgtg

SEQ ID NO: 3714327 - DNA, 25 bp, Homo sapien
ccatgcagtgaagagggaatcagac

SEQ ID NO: 3714328 - DNA, 25 bp, Homo sapien
gcagtgctttgggtaccctttctgt

SEQ ID NO: 3714329 - DNA, 25 bp, Homo sapien
gtttcaaaaactcagcagcagtgct

SEQ ID NO: 3714330 - DNA, 25 bp, Homo sapien
tcaaagatcagtttcaaaaactcag

SEQ ID NO: 3714331 - DNA, 25 bp, Homo sapien
gtgctttgggtaccctttctgtgca

SEQ ID NO: 3714332 - DNA, 25 bp, Homo sapien
ctctgaattttcagggagccatttt

SEQ ID NO: 3714333 - DNA, 25 bp, Homo sapien
ttgcttggttttcttttgagcttgg

SEQ ID NO: 3714334 - DNA, 25 bp, Homo sapien
gcttggttttcttttgagcttggca

SEQ ID NO: 3714335 - DNA, 25 bp, Homo sapien
ttggttttcttttgagcttggcatc

SEQ ID NO: 3714336 - DNA, 25 bp, Homo sapien
tggttttcttttgagcttggcatct

SEQ ID NO: 3714337 - DNA, 25 bp, Homo sapien
catgccatcagttccttttcaagct

SEQ ID NO: 3714338 - DNA, 25 bp, Homo sapien
tcagttccttttcaagctgtgcttt

SEQ ID NO: 3714339 - DNA, 25 bp, Homo sapien
tcatgccatcagttccttttcaagc

SEQ ID NO: 3714340 - DNA, 25 bp, Homo sapien
ccttttcaagctgtgctttgttttc

SEQ ID NO: 3714341 - DNA, 25 bp, Homo sapien
gcaattacgtattcttctgacatat

SEQ ID NO: 3714342 - DNA, 25 bp, Homo sapien
agttctccgtagcaagtagaatagc

SEQ ID NO: 3714343 - DNA, 25 bp, Homo sapien
gacatatagtatttgtcactgtcac

SEQ ID NO: 3714344 - DNA, 25 bp, Homo sapien
taagacatatactaatgtttagagg

SEQ ID NO: 3714345 - DNA, 25 bp, Homo sapien
gacactgtctcccgatagcagctga

SEQ ID NO: 3714346 - DNA, 25 bp, Homo sapien
ttctggtccctcctagacactgtct

SEQ ID NO: 3714347 - DNA, 25 bp, Homo sapien
ttaagagcaccagacttgcaaacag

SEQ ID NO: 3714348 - DNA, 25 bp, Homo sapien
gagctgtcctggatgaacagcgcca

SEQ ID NO: 3714349 - DNA, 25 bp, Homo sapien
ttaggaattgctctttgatttggca

SEQ ID NO: 3714350 - DNA, 25 bp, Homo sapien
ggaattgctctttgatttggcagtg

SEQ ID NO: 3714351 - DNA, 25 bp, Homo sapien
taggaattgctctttgatttggcag

SEQ ID NO: 3714352 - DNA, 25 bp, Homo sapien
gaattgctctttgatttggcagtgc

SEQ ID NO: 3714353 - DNA, 25 bp, Homo sapien
tcatgtctcagtcaatgagggttaa

SEQ ID NO: 3714354 - DNA, 25 bp, Homo sapien
agactgctgtctacgggatggaaga

SEQ ID NO: 3714355 - DNA, 25 bp, Homo sapien
gatcctcctcaatagtaagggactg

SEQ ID NO: 3714356 - DNA, 25 bp, Homo sapien
gtaataaacctatcaaagcctagcc

SEQ ID NO: 3714357 - DNA, 25 bp, Homo sapien
gcctcccaggttgtatgacgatcag

SEQ ID NO: 3714358 - DNA, 25 bp, Homo sapien
tcaagtgaggaaagctgtagtgcct

SEQ ID NO: 3714359 - DNA, 25 bp, Homo sapien
ccttgagctgctaatagtgtggcgc

SEQ ID NO: 3714360 - DNA, 25 bp, Homo sapien
gatgtgcattcctgttaccaggcgg

SEQ ID NO: 3714361 - DNA, 25 bp, Homo sapien
ccaggatatgaattgaggcccagct

SEQ ID NO: 3714362 - DNA, 25 bp, Homo sapien
gacccctgggttagatcaaggacag

SEQ ID NO: 3714363 - DNA, 25 bp, Homo sapien
cccttaggtggtagacccaggatat

SEQ ID NO: 3714364 - DNA, 25 bp, Homo sapien
tgtcctacaatagcagagccaagta

SEQ ID NO: 3714365 - DNA, 25 bp, Homo sapien
ttgtcattgtcacgtactatcgtca

SEQ ID NO: 3714366 - DNA, 25 bp, Homo sapien
tgtcattgtcacgtactatcgtcat

SEQ ID NO: 3714367 - DNA, 25 bp, Homo sapien
cattgtcattgtcacgtactatcgt

SEQ ID NO: 3714368 - DNA, 25 bp, Homo sapien
attgtcattgtcacgtactatcgtc

SEQ ID NO: 3714369 - DNA, 25 bp, Homo sapien
gtctggataggacgttgctgctgtt

SEQ ID NO: 3714370 - DNA, 25 bp, Homo sapien
caggccctggaatagtctggatagg

SEQ ID NO: 3714371 - DNA, 25 bp, Homo sapien
ccacaacaggggaggactggatgca

SEQ ID NO: 3714372 - DNA, 25 bp, Homo sapien
cactgctgccgttgctgcagttcct

SEQ ID NO: 3714373 - DNA, 25 bp, Homo sapien
tacacagtacttcttcatctcgttt

SEQ ID NO: 3714374 - DNA, 25 bp, Homo sapien
gactatggccctaccttgattctcc

SEQ ID NO: 3714375 - DNA, 25 bp, Homo sapien
catctcgtttacctatattgtggac

SEQ ID NO: 3714376 - DNA, 25 bp, Homo sapien
ttacctatattgtggactatggccc

SEQ ID NO: 3714377 - DNA, 25 bp, Homo sapien
ctgcatttgagcttgctggttagtt

SEQ ID NO: 3714378 - DNA, 25 bp, Homo sapien
gcatttgagcttgctggttagttgt

SEQ ID NO: 3714379 - DNA, 25 bp, Homo sapien
ttagagctgcgatattagcagaggg

SEQ ID NO: 3714380 - DNA, 25 bp, Homo sapien
ctggttagttgttagagctgcgata

SEQ ID NO: 3714381 - DNA, 25 bp, Homo sapien
tagagccatggctgggtcacccttt

SEQ ID NO: 3714382 - DNA, 25 bp, Homo sapien
ttcccccgttgaaaggactctgctg

SEQ ID NO: 3714383 - DNA, 25 bp, Homo sapien
tgaacttaatgaggttgcagagctg

SEQ ID NO: 3714384 - DNA, 25 bp, Homo sapien
ttctttgctaggaattgctagagcc

SEQ ID NO: 3714385 - DNA, 25 bp, Homo sapien
tgtttccaggcaggatcagaagtac

SEQ ID NO: 3714386 - DNA, 25 bp, Homo sapien
tttcccctgctgaaacaatgtttgg

SEQ ID NO: 3714387 - DNA, 25 bp, Homo sapien
tcagaagtacttgactaggcagcat

SEQ ID NO: 3714388 - DNA, 25 bp, Homo sapien
ggattagagagaagcaatcactttg

SEQ ID NO: 3714389 - DNA, 25 bp, Homo sapien
gcagaattagaaccatatttcaaag

SEQ ID NO: 3714390 - DNA, 25 bp, Homo sapien
tcagcaggatatgagtggtcgttgt

SEQ ID NO: 3714391 - DNA, 25 bp, Homo sapien
gttcagcaggatatgagtggtcgtt

SEQ ID NO: 3714392 - DNA, 25 bp, Homo sapien
gatatgagtggtcgttgtggaaatg

SEQ ID NO: 3714393 - DNA, 25 bp, Homo sapien
tatgagtggtcgttgtggaaatgta

SEQ ID NO: 3714394 - DNA, 25 bp, Homo sapien
cacagccggcccttcacggaaatat

SEQ ID NO: 3714395 - DNA, 25 bp, Homo sapien
atggacccccgcctcttggttagtg

SEQ ID NO: 3714396 - DNA, 25 bp, Homo sapien
gcccttcacggaaatatttcacatg

SEQ ID NO: 3714397 - DNA, 25 bp, Homo sapien
gccggcccttcacggaaatatttca

SEQ ID NO: 3714398 - DNA, 25 bp, Homo sapien
taacacctttgttagaagatggtaa

SEQ ID NO: 3714399 - DNA, 25 bp, Homo sapien
gccgtgctgttccagtgaagtctct

SEQ ID NO: 3714400 - DNA, 25 bp, Homo sapien
gctgaactaccagtttttatatctg

SEQ ID NO: 3714401 - DNA, 25 bp, Homo sapien
agtctctttagcctaacacctttgt

SEQ ID NO: 3714402 - DNA, 25 bp, Homo sapien
gcgttgcactgagcaatcagtagac

SEQ ID NO: 3714403 - DNA, 25 bp, Homo sapien
catatttggagctagatgcgttgca

SEQ ID NO: 3714404 - DNA, 25 bp, Homo sapien
taataataaaagagtgcaggttcca

SEQ ID NO: 3714405 - DNA, 25 bp, Homo sapien
tcagtagacaagagaaaatagcacc

SEQ ID NO: 3714406 - DNA, 25 bp, Homo sapien
tgctcttcccgtggaaagcattcat

SEQ ID NO: 3714407 - DNA, 25 bp, Homo sapien
ataggaaccattgtttccacttgga

SEQ ID NO: 3714408 - DNA, 25 bp, Homo sapien
gaaccattgtttccacttggaatgc

SEQ ID NO: 3714409 - DNA, 25 bp, Homo sapien
aatgctcttcccgtggaaagcattc

SEQ ID NO: 3714410 - DNA, 25 bp, Homo sapien
ggcacttgcatgagaactattttga

SEQ ID NO: 3714411 - DNA, 25 bp, Homo sapien
catcgaagctctattagaaaggcac

SEQ ID NO: 3714412 - DNA, 25 bp, Homo sapien
tactttgctccccactttccaagga

SEQ ID NO: 3714413 - DNA, 25 bp, Homo sapien
caaggaaagcatgaactgttgactt

SEQ ID NO: 3714414 - DNA, 25 bp, Homo sapien
aacagacatgatgtggcttcatgtt

SEQ ID NO: 3714415 - DNA, 25 bp, Homo sapien
ctgtcctccaaatttcagtgtttga

SEQ ID NO: 3714416 - DNA, 25 bp, Homo sapien
tgaattgggtgttacaggaaacttg

SEQ ID NO: 3714417 - DNA, 25 bp, Homo sapien
tctgtcctccaaatttcagtgtttg

SEQ ID NO: 3714418 - DNA, 25 bp, Homo sapien
gagctgaggtacaagaccgaggctg

SEQ ID NO: 3714419 - DNA, 25 bp, Homo sapien
ccctgagctgaggtacaagaccgag

SEQ ID NO: 3714420 - DNA, 25 bp, Homo sapien
tgagctgaggtacaagaccgaggct

SEQ ID NO: 3714421 - DNA, 25 bp, Homo sapien
ctgagctgaggtacaagaccgaggc

SEQ ID NO: 3714422 - DNA, 25 bp, Homo sapien
ttagtgactcagatcaggattcagc

SEQ ID NO: 3714423 - DNA, 25 bp, Homo sapien
actcctactccccaagagaccagct

SEQ ID NO: 3714424 - DNA, 25 bp, Homo sapien
tgaccacccagaacttattcccact

SEQ ID NO: 3714425 - DNA, 25 bp, Homo sapien
aagagaccagctcttcaggactccc

SEQ ID NO: 3714426 - DNA, 25 bp, Homo sapien
ctaagaaggagttccaaccaggcgt

SEQ ID NO: 3714427 - DNA, 25 bp, Homo sapien
cattcagggatcttggcttggcagt

SEQ ID NO: 3714428 - DNA, 25 bp, Homo sapien
tcagggatcttggcttggcagtcac

SEQ ID NO: 3714429 - DNA, 25 bp, Homo sapien
aggagttccaaccaggcgtttccat

SEQ ID NO: 3714430 - DNA, 25 bp, Homo sapien
tttcttctcatgtcgtcgtttcctt

SEQ ID NO: 3714431 - DNA, 25 bp, Homo sapien
gaaaaggaatttcacaccaccacca

SEQ ID NO: 3714432 - DNA, 25 bp, Homo sapien
ctaaagcatctgtagattttagaaa

SEQ ID NO: 3714433 - DNA, 25 bp, Homo sapien
catctgtagattttagaaaaggaat

SEQ ID NO: 3714434 - DNA, 25 bp, Homo sapien
caccaccaccaagaaagcccaacca

SEQ ID NO: 3714435 - DNA, 25 bp, Homo sapien
tcctatgatgtggatcaggtgctcc

SEQ ID NO: 3714436 - DNA, 25 bp, Homo sapien
gtagagaaaagctggcctgtttaac

SEQ ID NO: 3714437 - DNA, 25 bp, Homo sapien
atggccactggtgagtttgcaggat

SEQ ID NO: 3714438 - DNA, 25 bp, Homo sapien
cactacctggtcagctcctatgatg

SEQ ID NO: 3714439 - DNA, 25 bp, Homo sapien
gaagctcttccgattcttcaggtga

SEQ ID NO: 3714440 - DNA, 25 bp, Homo sapien
tggacatcgcaatcacctgtgagga

SEQ ID NO: 3714441 - DNA, 25 bp, Homo sapien
gagacctctgggtgaaatacactct

SEQ ID NO: 3714442 - DNA, 25 bp, Homo sapien
tctggacagtgcttggacctctaaa

SEQ ID NO: 3714443 - DNA, 25 bp, Homo sapien
ttgtcaatggctctttctagcctgg

SEQ ID NO: 3714444 - DNA, 25 bp, Homo sapien
tcatggcttgctgcatttcgttagc

SEQ ID NO: 3714445 - DNA, 25 bp, Homo sapien
gatctatccaacaagattgccactt

SEQ ID NO: 3714446 - DNA, 25 bp, Homo sapien
tgtgtggtagcatgccagatctatc

SEQ ID NO: 3714447 - DNA, 25 bp, Homo sapien
gaaatcggctcttgtgtgtccccta

SEQ ID NO: 3714448 - DNA, 25 bp, Homo sapien
tactgttcgattgttagtgccagcc

SEQ ID NO: 3714449 - DNA, 25 bp, Homo sapien
tgtcccctaagtggccatgcagaaa

SEQ ID NO: 3714450 - DNA, 25 bp, Homo sapien
gcaccagcttaatgcctgacctata

SEQ ID NO: 3714451 - DNA, 25 bp, Homo sapien
cggccagtcatgtggccgtgagcct

SEQ ID NO: 3714452 - DNA, 25 bp, Homo sapien
tctgtccaggataagagatagccag

SEQ ID NO: 3714453 - DNA, 25 bp, Homo sapien
tggccgtgagcctgtttgctgtgct

SEQ ID NO: 3714454 - DNA, 25 bp, Homo sapien
tcttcttctaataaatccagcttcc

SEQ ID NO: 3714455 - DNA, 25 bp, Homo sapien
ggtgttgttcctctcaggtcagtgg

SEQ ID NO: 3714456 - DNA, 25 bp, Homo sapien
tagttgttagcaaactctcttcaga

SEQ ID NO: 3714457 - DNA, 25 bp, Homo sapien
tcccttccagcatcagggtggaatg

SEQ ID NO: 3714458 - DNA, 25 bp, Homo sapien
gaatgagagtcatagttgtgggacc

SEQ ID NO: 3714459 - DNA, 25 bp, Homo sapien
gaatgataagaggtcatttgactca

SEQ ID NO: 3714460 - DNA, 25 bp, Homo sapien
tcagtctgggcccaaatccaatctt

SEQ ID NO: 3714461 - DNA, 25 bp, Homo sapien
aaatccaatcttggaagaacagtga

SEQ ID NO: 3714462 - DNA, 25 bp, Homo sapien
aaagagtatggcgagataaggtgta

SEQ ID NO: 3714463 - DNA, 25 bp, Homo sapien
taccagcctgtagggttatgacaac

SEQ ID NO: 3714464 - DNA, 25 bp, Homo sapien
tatgttttgggttcggtagagatcc

SEQ ID NO: 3714465 - DNA, 25 bp, Homo sapien
tcttgtcaccagtatgtccccagta

SEQ ID NO: 3714466 - DNA, 25 bp, Homo sapien
tacaacgagaatgaaacacccctgc

SEQ ID NO: 3714467 - DNA, 25 bp, Homo sapien
gaagattgacgtctttcagtttggg

SEQ ID NO: 3714468 - DNA, 25 bp, Homo sapien
atctgaagattgacgtctttcagtt

SEQ ID NO: 3714469 - DNA, 25 bp, Homo sapien
aagattgacgtctttcagtttgggg

SEQ ID NO: 3714470 - DNA, 25 bp, Homo sapien
ctgaagattgacgtctttcagtttg

SEQ ID NO: 3714471 - DNA, 25 bp, Homo sapien
tgagatagtgtttcgaatactccct

SEQ ID NO: 3714472 - DNA, 25 bp, Homo sapien
ccttttcagaggagatacttggaga

SEQ ID NO: 3714473 - DNA, 25 bp, Homo sapien
ccttggattttcatcggtgctttga

SEQ ID NO: 3714474 - DNA, 25 bp, Homo sapien
tgaggcctttagatccacgggagca

SEQ ID NO: 3714475 - DNA, 25 bp, Homo sapien
ctggccccatagacttctcttgatc

SEQ ID NO: 3714476 - DNA, 25 bp, Homo sapien
tgatcaacctccaccatttcaccaa

SEQ ID NO: 3714477 - DNA, 25 bp, Homo sapien
ttccctaaagcattgtccaccagca

SEQ ID NO: 3714478 - DNA, 25 bp, Homo sapien
catttcaccaaacttccctaaagca

SEQ ID NO: 3714479 - DNA, 25 bp, Homo sapien
ttgttggtcttttcactcaattgtg

SEQ ID NO: 3714480 - DNA, 25 bp, Homo sapien
tgactgtatatttgttggtcttttc

SEQ ID NO: 3714481 - DNA, 25 bp, Homo sapien
acattgtcttgtgattgactgtata

SEQ ID NO: 3714482 - DNA, 25 bp, Homo sapien
cactcaattgtgtcttcaggatagg

SEQ ID NO: 3714483 - DNA, 25 bp, Homo sapien
tatgaatctgggaccaccaagttcg

SEQ ID NO: 3714484 - DNA, 25 bp, Homo sapien
gtgacgtgtgacctggaccagacat

SEQ ID NO: 3714485 - DNA, 25 bp, Homo sapien
tgtccatttcccaccgtgacgtgtg

SEQ ID NO: 3714486 - DNA, 25 bp, Homo sapien
gaggatagggccaacacccaaagaa

SEQ ID NO: 3714487 - DNA, 25 bp, Homo sapien
ccacagtttaccatctggttgcagc

SEQ ID NO: 3714488 - DNA, 25 bp, Homo sapien
cagtttaccatctggttgcagcaca

SEQ ID NO: 3714489 - DNA, 25 bp, Homo sapien
agtttaccatctggttgcagcacac

SEQ ID NO: 3714490 - DNA, 25 bp, Homo sapien
cacagtttaccatctggttgcagca

SEQ ID NO: 3714491 - DNA, 25 bp, Homo sapien
caattgagttaccccactacctttg

SEQ ID NO: 3714492 - DNA, 25 bp, Homo sapien
tggacctccttgggacaccctggac

SEQ ID NO: 3714493 - DNA, 25 bp, Homo sapien
tcctggcaactagcgtctttccaat

SEQ ID NO: 3714494 - DNA, 25 bp, Homo sapien
ttgggtcctggcaactagcgtcttt

SEQ ID NO: 3714495 - DNA, 25 bp, Homo sapien
cctggcaactagcgtctttccaata

SEQ ID NO: 3714496 - DNA, 25 bp, Homo sapien
ccttgggtcctggcaactagcgtct

SEQ ID NO: 3714497 - DNA, 25 bp, Homo sapien
tttgtcacgaataagatccatgcca

SEQ ID NO: 3714498 - DNA, 25 bp, Homo sapien
tccatgccatggaagttaggcagtt

SEQ ID NO: 3714499 - DNA, 25 bp, Homo sapien
taatcattctgcaaatcaacaagac

SEQ ID NO: 3714500 - DNA, 25 bp, Homo sapien
cttaatcattctgcaaatcaacaag

SEQ ID NO: 3714501 - DNA, 25 bp, Homo sapien
tgccattttttgaccatggaacaca

SEQ ID NO: 3714502 - DNA, 25 bp, Homo sapien
gccattttttgaccatggaacacat

SEQ ID NO: 3714503 - DNA, 25 bp, Homo sapien
ctgccattttttgaccatggaacac

SEQ ID NO: 3714504 - DNA, 25 bp, Homo sapien
caagtaaccatgagtagtcttaaca

SEQ ID NO: 3714505 - DNA, 25 bp, Homo sapien
aagtaaccatgagtagtcttaacat

SEQ ID NO: 3714506 - DNA, 25 bp, Homo sapien
gtaaccatgagtagtcttaacatca

SEQ ID NO: 3714507 - DNA, 25 bp, Homo sapien
agtaaccatgagtagtcttaacatc

SEQ ID NO: 3714508 - DNA, 25 bp, Homo sapien
tttctaacaaagacatcgtggagaa

SEQ ID NO: 3714509 - DNA, 25 bp, Homo sapien
cgtggagaaggtaaatagattggca

SEQ ID NO: 3714510 - DNA, 25 bp, Homo sapien
caaagacatcgtggagaaggtaaat

SEQ ID NO: 3714511 - DNA, 25 bp, Homo sapien
catcgtggagaaggtaaatagattg

SEQ ID NO: 3714512 - DNA, 25 bp, Homo sapien
aaaaggatatctgcaaacttgcatg

SEQ ID NO: 3714513 - DNA, 25 bp, Homo sapien
caaaaggatatctgcaaacttgcat

SEQ ID NO: 3714514 - DNA, 25 bp, Homo sapien
agctaagatacggaatcagcctaag

SEQ ID NO: 3714515 - DNA, 25 bp, Homo sapien
aaggatatctgcaaacttgcatgtt

SEQ ID NO: 3714516 - DNA, 25 bp, Homo sapien
tagttggtactagagccagtcatcc

SEQ ID NO: 3714517 - DNA, 25 bp, Homo sapien
tgtgttccccgtgatgcagctggaa

SEQ ID NO: 3714518 - DNA, 25 bp, Homo sapien
gaaaatagttgctaccgatagggac

SEQ ID NO: 3714519 - DNA, 25 bp, Homo sapien
tcttatctcaggagagagcccgctc

SEQ ID NO: 3714520 - DNA, 25 bp, Homo sapien
cttgtgaaatgcattaatgacagta

SEQ ID NO: 3714521 - DNA, 25 bp, Homo sapien
tatcacatcacttgcattgatcttt

SEQ ID NO: 3714522 - DNA, 25 bp, Homo sapien
gatctttatactctccatgtacttg

SEQ ID NO: 3714523 - DNA, 25 bp, Homo sapien
gcattaatgacagtaacagatttta

SEQ ID NO: 3714524 - DNA, 25 bp, Homo sapien
ttttatctgccttttttattatagc

SEQ ID NO: 3714525 - DNA, 25 bp, Homo sapien
ttgaggcagagccttatcctgtcac

SEQ ID NO: 3714526 - DNA, 25 bp, Homo sapien
ccaggcaggagtgtagtggcacaat

SEQ ID NO: 3714527 - DNA, 25 bp, Homo sapien
cgcgcccggcctattcagttgtttt

SEQ ID NO: 3714528 - DNA, 25 bp, Homo sapien
tccgttcattgtgaggaaaaataaa

SEQ ID NO: 3714529 - DNA, 25 bp, Homo sapien
cctctggactgtagaggagctaact

SEQ ID NO: 3714530 - DNA, 25 bp, Homo sapien
acaccctttgcccagacacgagtgg

SEQ ID NO: 3714531 - DNA, 25 bp, Homo sapien
acagaaaactgctggctgttgattt

SEQ ID NO: 3714532 - DNA, 25 bp, Homo sapien
tttgttgactatcacccatggtaag

SEQ ID NO: 3714533 - DNA, 25 bp, Homo sapien
tatcatgaccgagtttgcaacacac

SEQ ID NO: 3714534 - DNA, 25 bp, Homo sapien
tatacccagtgcacccacaatttgt

SEQ ID NO: 3714535 - DNA, 25 bp, Homo sapien
tatagaagtagcgtatcaagaagtt

SEQ ID NO: 3714536 - DNA, 25 bp, Homo sapien
tcagtctgtcgattgaggcctcaac

SEQ ID NO: 3714537 - DNA, 25 bp, Homo sapien
gaccaatgggacttttggaatccag

SEQ ID NO: 3714538 - DNA, 25 bp, Homo sapien
aaaccaacctgactgttgagccagg

SEQ ID NO: 3714539 - DNA, 25 bp, Homo sapien
tgagccaggcgcttccttacagcaa

SEQ ID NO: 3714540 - DNA, 25 bp, Homo sapien
ggttgcaatccttggtaaaagtagc

SEQ ID NO: 3714541 - DNA, 25 bp, Homo sapien
aattgcctgcaacttgtatccccag

SEQ ID NO: 3714542 - DNA, 25 bp, Homo sapien
tctgttgcccacttgcagtctgtta

SEQ ID NO: 3714543 - DNA, 25 bp, Homo sapien
gattcttactgactgaccacatttt

SEQ ID NO: 3714544 - DNA, 25 bp, Homo sapien
tgtgtagacaactctgttatcttca

SEQ ID NO: 3714545 - DNA, 25 bp, Homo sapien
caagctgggtttgtgtagacaactc

SEQ ID NO: 3714546 - DNA, 25 bp, Homo sapien
aggtcttcaagctgggtttgtgtag

SEQ ID NO: 3714547 - DNA, 25 bp, Homo sapien
tgttatcttcaggagtaattccccg

SEQ ID NO: 3714548 - DNA, 25 bp, Homo sapien
ctgtgtctgtgacttgactcctgga

SEQ ID NO: 3714549 - DNA, 25 bp, Homo sapien
cctggagcctgcgatataaattgct

SEQ ID NO: 3714550 - DNA, 25 bp, Homo sapien
gctgcgacagggactgctatcttct

SEQ ID NO: 3714551 - DNA, 25 bp, Homo sapien
ttccaggcagcgtaaggtgagcttc

SEQ ID NO: 3714552 - DNA, 25 bp, Homo sapien
tccttgcaccggaggccgggctcag

SEQ ID NO: 3714553 - DNA, 25 bp, Homo sapien
ctcagtcctctgggccgcgaagtgg

SEQ ID NO: 3714554 - DNA, 25 bp, Homo sapien
tgcaattctagttccggcctctggg

SEQ ID NO: 3714555 - DNA, 25 bp, Homo sapien
tctggggtttccttgcaccggaggc

SEQ ID NO: 3714556 - DNA, 25 bp, Homo sapien
cttggttccaattttctgtcttcgt

SEQ ID NO: 3714557 - DNA, 25 bp, Homo sapien
tctgtcttcgttcattctctgttgc

SEQ ID NO: 3714558 - DNA, 25 bp, Homo sapien
ttcaggtatttgtcatcagcaaaat

SEQ ID NO: 3714559 - DNA, 25 bp, Homo sapien
tcagcaaaatcccacttcttggttc

SEQ ID NO: 3714560 - DNA, 25 bp, Homo sapien
aagatccagggcagttctgcttcag

SEQ ID NO: 3714561 - DNA, 25 bp, Homo sapien
gctaccattttctgggatcctggaa

SEQ ID NO: 3714562 - DNA, 25 bp, Homo sapien
tgctggcttctatgacccacctggg

SEQ ID NO: 3714563 - DNA, 25 bp, Homo sapien
tagccacagctatctgcgaaagagg

SEQ ID NO: 3714564 - DNA, 25 bp, Homo sapien
cagctttggtatcctgttcacagca

SEQ ID NO: 3714565 - DNA, 25 bp, Homo sapien
gacaatcgctgacaaaaaaggcagg

SEQ ID NO: 3714566 - DNA, 25 bp, Homo sapien
tttgatcataattttacacgtacac

SEQ ID NO: 3714567 - DNA, 25 bp, Homo sapien
tcctgttcacagcaccaaaactgga

SEQ ID NO: 3714568 - DNA, 25 bp, Homo sapien
cagcggcgcaatctctgctcgctgc

SEQ ID NO: 3714569 - DNA, 25 bp, Homo sapien
agtgcagcggcgcaatctctgctcg

SEQ ID NO: 3714570 - DNA, 25 bp, Homo sapien
tgcagcggcgcaatctctgctcgct

SEQ ID NO: 3714571 - DNA, 25 bp, Homo sapien
cggcgcaatctctgctcgctgcaag

SEQ ID NO: 3714572 - DNA, 25 bp, Homo sapien
ggctgtaatgagctgtaatcgtgtc

SEQ ID NO: 3714573 - DNA, 25 bp, Homo sapien
taatgagctgtaatcgtgtcactgc

SEQ ID NO: 3714574 - DNA, 25 bp, Homo sapien
gctgtaatgagctgtaatcgtgtca

SEQ ID NO: 3714575 - DNA, 25 bp, Homo sapien
tgtaatgagctgtaatcgtgtcact

SEQ ID NO: 3714576 - DNA, 25 bp, Homo sapien
tcttctacttctggaccttgctggg

SEQ ID NO: 3714577 - DNA, 25 bp, Homo sapien
aacacatggcccttagactaatgcc

SEQ ID NO: 3714578 - DNA, 25 bp, Homo sapien
cttctacttctggaccttgctgggc

SEQ ID NO: 3714579 - DNA, 25 bp, Homo sapien
ggtcccatgaccagcaatcctttct

SEQ ID NO: 3714580 - DNA, 25 bp, Homo sapien
gaaagtcaagaacagttcttccctc

SEQ ID NO: 3714581 - DNA, 25 bp, Homo sapien
ataaagcctctggtcccatgaccag

SEQ ID NO: 3714582 - DNA, 25 bp, Homo sapien
aactgaaagtcaagaacagttcttc

SEQ ID NO: 3714583 - DNA, 25 bp, Homo sapien
gaggtcctcaaggaaacagagatat

SEQ ID NO: 3714584 - DNA, 25 bp, Homo sapien
ttgactagaaaggacagattgactg

SEQ ID NO: 3714585 - DNA, 25 bp, Homo sapien
cagagatataacagacccttgggct

SEQ ID NO: 3714586 - DNA, 25 bp, Homo sapien
tgcttgctgtggtccgtctccgtga

SEQ ID NO: 3714587 - DNA, 25 bp, Homo sapien
gaccataataacaatacctgcttct

SEQ ID NO: 3714588 - DNA, 25 bp, Homo sapien
ctcctttttgcaaaagaccataata

SEQ ID NO: 3714589 - DNA, 25 bp, Homo sapien
ttttgacaactagctgtgactggtg

SEQ ID NO: 3714590 - DNA, 25 bp, Homo sapien
aaaatgtatgtgaacttgagtgcaa

SEQ ID NO: 3714591 - DNA, 25 bp, Homo sapien
tctctgagaggaacaccaaattcaa

SEQ ID NO: 3714592 - DNA, 25 bp, Homo sapien
taagtacgtcagaggacctcacaga

SEQ ID NO: 3714593 - DNA, 25 bp, Homo sapien
ttttggacttgcacaagagcctggt

SEQ ID NO: 3714594 - DNA, 25 bp, Homo sapien
tggctgacaaggaccttttggactt

SEQ ID NO: 3714595 - DNA, 25 bp, Homo sapien
cagagcgtagacaatgcctcaggca

SEQ ID NO: 3714596 - DNA, 25 bp, Homo sapien
ccaagcagtggttatggaaggaaac

SEQ ID NO: 3714597 - DNA, 25 bp, Homo sapien
gaaacacctctttgtgtaacagggc

SEQ ID NO: 3714598 - DNA, 25 bp, Homo sapien
gaaattccatcggttctctctgcac

SEQ ID NO: 3714599 - DNA, 25 bp, Homo sapien
taggcatcggaacattaacacaccc

SEQ ID NO: 3714600 - DNA, 25 bp, Homo sapien
catccttctagtttcttggaaggcc

SEQ ID NO: 3714601 - DNA, 25 bp, Homo sapien
gctactacctggaaatggacaccat

SEQ ID NO: 3714602 - DNA, 25 bp, Homo sapien
taacacacccaaaaccgagatcctg

SEQ ID NO: 3714603 - DNA, 25 bp, Homo sapien
gatcaaagcccttgaatacagtcat

SEQ ID NO: 3714604 - DNA, 25 bp, Homo sapien
ggatcaaagcccttgaatacagtca

SEQ ID NO: 3714605 - DNA, 25 bp, Homo sapien
ctaggatcaaagcccttgaatacag

SEQ ID NO: 3714606 - DNA, 25 bp, Homo sapien
aggatcaaagcccttgaatacagtc

SEQ ID NO: 3714607 - DNA, 25 bp, Homo sapien
gcatgcagtattatcttcagctcag

SEQ ID NO: 3714608 - DNA, 25 bp, Homo sapien
gaaaggagtttctactcacagaact

SEQ ID NO: 3714609 - DNA, 25 bp, Homo sapien
catggcactctatctgcatgcagta

SEQ ID NO: 3714610 - DNA, 25 bp, Homo sapien
ggaagtggcattaacaaactggagg

SEQ ID NO: 3714611 - DNA, 25 bp, Homo sapien
tagagacctccatttgaagctgaaa

SEQ ID NO: 3714612 - DNA, 25 bp, Homo sapien
tcagcaaatagaacagcgacaatgg

SEQ ID NO: 3714613 - DNA, 25 bp, Homo sapien
cactgtgaattagggagcttccaaa

SEQ ID NO: 3714614 - DNA, 25 bp, Homo sapien
tagagctcctacagagtgatgaccc

SEQ ID NO: 3714615 - DNA, 25 bp, Homo sapien
tgcaggaaggcaggatatagtaatc

SEQ ID NO: 3714616 - DNA, 25 bp, Homo sapien
tcctgacttcagtgtccctgggttt

SEQ ID NO: 3714617 - DNA, 25 bp, Homo sapien
caaacagttagagagtggctgctgg

SEQ ID NO: 3714618 - DNA, 25 bp, Homo sapien
tctgagcttggctagggcaaacagt

SEQ ID NO: 3714619 - DNA, 25 bp, Homo sapien
ccaaaaggctctgggtgcactggat

SEQ ID NO: 3714620 - DNA, 25 bp, Homo sapien
actgaggccgataggtgttttccaa

SEQ ID NO: 3714621 - DNA, 25 bp, Homo sapien
gcactggatgtacaccagatgtttc

SEQ ID NO: 3714622 - DNA, 25 bp, Homo sapien
tcctcctccaatgggtagctctctc

SEQ ID NO: 3714623 - DNA, 25 bp, Homo sapien
ctctggtggccttaaagtcaaagga

SEQ ID NO: 3714624 - DNA, 25 bp, Homo sapien
aagtcaaaggaagctgtgtggtcct

SEQ ID NO: 3714625 - DNA, 25 bp, Homo sapien
tgtggtccttctcaccaaaacctgg

SEQ ID NO: 3714626 - DNA, 25 bp, Homo sapien
caaaggaagctgtgtggtccttctc

SEQ ID NO: 3714627 - DNA, 25 bp, Homo sapien
ggaagatgcaaagaccatggcccag

SEQ ID NO: 3714628 - DNA, 25 bp, Homo sapien
tctgtaccaattagtaggcccatcc

SEQ ID NO: 3714629 - DNA, 25 bp, Homo sapien
aaacctcgaggttactagctctggg

SEQ ID NO: 3714630 - DNA, 25 bp, Homo sapien
caagccctcttgtaatatgtggagc

SEQ ID NO: 3714631 - DNA, 25 bp, Homo sapien
tccctcttttaggactattaatgcc

SEQ ID NO: 3714632 - DNA, 25 bp, Homo sapien
aatttgatcatgagaattcgtctac

SEQ ID NO: 3714633 - DNA, 25 bp, Homo sapien
tgtctggttgccttacagttccctc

SEQ ID NO: 3714634 - DNA, 25 bp, Homo sapien
tagatgaactagtcagtcatttctc

SEQ ID NO: 3714635 - DNA, 25 bp, Homo sapien
tgactcagaaagtcgtgtcctactg

SEQ ID NO: 3714636 - DNA, 25 bp, Homo sapien
aagtcgtgtcctactgaattttgta

SEQ ID NO: 3714637 - DNA, 25 bp, Homo sapien
atccagcatatgactcagaaagtcg

SEQ ID NO: 3714638 - DNA, 25 bp, Homo sapien
catatgactcagaaagtcgtgtcct

SEQ ID NO: 3714639 - DNA, 25 bp, Homo sapien
cttcctctgagagcaaaactagtaa

SEQ ID NO: 3714640 - DNA, 25 bp, Homo sapien
aatatataatagatgagagtagctt

SEQ ID NO: 3714641 - DNA, 25 bp, Homo sapien
gaacttcctctgagagcaaaactag

SEQ ID NO: 3714642 - DNA, 25 bp, Homo sapien
cctctgagagcaaaactagtaagat

SEQ ID NO: 3714643 - DNA, 25 bp, Homo sapien
cagaacagggatttgatccaagtgt

SEQ ID NO: 3714644 - DNA, 25 bp, Homo sapien
cacttcaatgccttaaatcattgtc

SEQ ID NO: 3714645 - DNA, 25 bp, Homo sapien
gcagaacagggatttgatccaagtg

SEQ ID NO: 3714646 - DNA, 25 bp, Homo sapien
cagttccacttcaatgccttaaatc

SEQ ID NO: 3714647 - DNA, 25 bp, Homo sapien
catataatctatgcttagcaactta

SEQ ID NO: 3714648 - DNA, 25 bp, Homo sapien
tgcttagcaacttaggggtgaacaa

SEQ ID NO: 3714649 - DNA, 25 bp, Homo sapien
ataatctatgcttagcaacttaggg

SEQ ID NO: 3714650 - DNA, 25 bp, Homo sapien
ttcatataatctatgcttagcaact

SEQ ID NO: 3714651 - DNA, 25 bp, Homo sapien
agaagccaaggatggctaggatatt

SEQ ID NO: 3714652 - DNA, 25 bp, Homo sapien
gccaaggatggctaggatattcttg

SEQ ID NO: 3714653 - DNA, 25 bp, Homo sapien
ggatggctaggatattcttggagca

SEQ ID NO: 3714654 - DNA, 25 bp, Homo sapien
gatggctaggatattcttggagcaa

SEQ ID NO: 3714655 - DNA, 25 bp, Homo sapien
tgctttgttctgggtcaaccccaca

SEQ ID NO: 3714656 - DNA, 25 bp, Homo sapien
gctttgttctgggtcaaccccacag

SEQ ID NO: 3714657 - DNA, 25 bp, Homo sapien
atgctttgttctgggtcaaccccac

SEQ ID NO: 3714658 - DNA, 25 bp, Homo sapien
tcaccctttaaatcagtggtctcca

SEQ ID NO: 3714659 - DNA, 25 bp, Homo sapien
tattcaccctttaaatcagtggtct

SEQ ID NO: 3714660 - DNA, 25 bp, Homo sapien
cctattcaccctttaaatcagtggt

SEQ ID NO: 3714661 - DNA, 25 bp, Homo sapien
tccctattcaccctttaaatcagtg

SEQ ID NO: 3714662 - DNA, 25 bp, Homo sapien
gatgagatgcccacttttaagccaa

SEQ ID NO: 3714663 - DNA, 25 bp, Homo sapien
ctttgtctggaacatgtcctatccc

SEQ ID NO: 3714664 - DNA, 25 bp, Homo sapien
gattccccagggattgcatatgatt

SEQ ID NO: 3714665 - DNA, 25 bp, Homo sapien
cctcaggtgcttctaacatggatcc

SEQ ID NO: 3714666 - DNA, 25 bp, Homo sapien
tattttccaagagtattcgaggttg

SEQ ID NO: 3714667 - DNA, 25 bp, Homo sapien
cagttttgtggtattaaggatattc

SEQ ID NO: 3714668 - DNA, 25 bp, Homo sapien
tgttgtgcaacaccatctatctgca

SEQ ID NO: 3714669 - DNA, 25 bp, Homo sapien
tctatctgcagatgttgttttctaa

SEQ ID NO: 3714670 - DNA, 25 bp, Homo sapien
tcacattctgttacagccacacaaa

SEQ ID NO: 3714671 - DNA, 25 bp, Homo sapien
catctggtaacacaggcaagtatga

SEQ ID NO: 3714672 - DNA, 25 bp, Homo sapien
tggtaacacaggcaagtatgatcat

SEQ ID NO: 3714673 - DNA, 25 bp, Homo sapien
aacagactaagacatctggtaacac

SEQ ID NO: 3714674 - DNA, 25 bp, Homo sapien
gtagctgagacactatggaaggaat

SEQ ID NO: 3714675 - DNA, 25 bp, Homo sapien
agcagtattgtttagaagcttctta

SEQ ID NO: 3714676 - DNA, 25 bp, Homo sapien
agattcagaaccacatgctgaagta

SEQ ID NO: 3714677 - DNA, 25 bp, Homo sapien
cccaagaagcagtattgtttagaag

SEQ ID NO: 3714678 - DNA, 25 bp, Homo sapien
tggagtcactccgatcacaagatct

SEQ ID NO: 3714679 - DNA, 25 bp, Homo sapien
ttaggcttgcaaaagaaaggactgg

SEQ ID NO: 3714680 - DNA, 25 bp, Homo sapien
aggacaacaaccctgctagaacggg

SEQ ID NO: 3714681 - DNA, 25 bp, Homo sapien
gggctcttcatgctgtttgcatgtt

SEQ ID NO: 3714682 - DNA, 25 bp, Homo sapien
aacccgcatccagcacaatcccata

SEQ ID NO: 3714683 - DNA, 25 bp, Homo sapien
tgctggccacttatagatgtataaa

SEQ ID NO: 3714684 - DNA, 25 bp, Homo sapien
tacttgatgcaccacgcctgtgtca

SEQ ID NO: 3714685 - DNA, 25 bp, Homo sapien
tagatgtataaacttgtgtgagaag

SEQ ID NO: 3714686 - DNA, 25 bp, Homo sapien
catgcaatcagtcaggtaaatgcct

SEQ ID NO: 3714687 - DNA, 25 bp, Homo sapien
tctgaacaaattttgagattccagg

SEQ ID NO: 3714688 - DNA, 25 bp, Homo sapien
caggtaaacgggtgtctcttggtgc

SEQ ID NO: 3714689 - DNA, 25 bp, Homo sapien
gagcaaccgcatgcctgccgtggct

SEQ ID NO: 3714690 - DNA, 25 bp, Homo sapien
ctttgcacatccggtagaacacaag

SEQ ID NO: 3714691 - DNA, 25 bp, Homo sapien
tgcacatccggtagaacacaagctc

SEQ ID NO: 3714692 - DNA, 25 bp, Homo sapien
cagagactttgtcctgttcactgtt

SEQ ID NO: 3714693 - DNA, 25 bp, Homo sapien
ctgttgtatcctcagtacttagaac

SEQ ID NO: 3714694 - DNA, 25 bp, Homo sapien
gtcaaaggggtagttgctgaggctc

SEQ ID NO: 3714695 - DNA, 25 bp, Homo sapien
gaagtcaaaggggtagttgctgagg

SEQ ID NO: 3714696 - DNA, 25 bp, Homo sapien
ctccaccacatccagaaccctgtct

SEQ ID NO: 3714697 - DNA, 25 bp, Homo sapien
ggggtagttgctgaggctcctctcc

SEQ ID NO: 3714698 - DNA, 25 bp, Homo sapien
ctcttggccagtaatgatcctggca

SEQ ID NO: 3714699 - DNA, 25 bp, Homo sapien
gtaatccagccataggcaccttcct

SEQ ID NO: 3714700 - DNA, 25 bp, Homo sapien
cttggccagtaatgatcctggcacc

SEQ ID NO: 3714701 - DNA, 25 bp, Homo sapien
atagttgatagtaatccagccatag

SEQ ID NO: 3714702 - DNA, 25 bp, Homo sapien
gagagccacctccatggatgctgtg

SEQ ID NO: 3714703 - DNA, 25 bp, Homo sapien
gacccaagtactgcctgagatagca

SEQ ID NO: 3714704 - DNA, 25 bp, Homo sapien
cattcattctggctagcgacccaag

SEQ ID NO: 3714705 - DNA, 25 bp, Homo sapien
tctggtgacccttacaaatgtgaga

SEQ ID NO: 3714706 - DNA, 25 bp, Homo sapien
tagaggctcctgatctacaacagat

SEQ ID NO: 3714707 - DNA, 25 bp, Homo sapien
tgccggacatagaagcagtgtaact

SEQ ID NO: 3714708 - DNA, 25 bp, Homo sapien
cagtcgcttgttagctgtacagcca

SEQ ID NO: 3714709 - DNA, 25 bp, Homo sapien
gaggccagacacattcaagttcaaa

SEQ ID NO: 3714710 - DNA, 25 bp, Homo sapien
gcttttcatagtatctattggagtc

SEQ ID NO: 3714711 - DNA, 25 bp, Homo sapien
tttcatagtatctattggagtcagg

SEQ ID NO: 3714712 - DNA, 25 bp, Homo sapien
tctctggacaccctgcttttcatag

SEQ ID NO: 3714713 - DNA, 25 bp, Homo sapien
agaagtctctggacaccctgctttt

SEQ ID NO: 3714714 - DNA, 25 bp, Homo sapien
tgggactatgctgaaccaccttgtt

SEQ ID NO: 3714715 - DNA, 25 bp, Homo sapien
gggactatgctgaaccaccttgttt

SEQ ID NO: 3714716 - DNA, 25 bp, Homo sapien
atgggactatgctgaaccaccttgt

SEQ ID NO: 3714717 - DNA, 25 bp, Homo sapien
ggactatgctgaaccaccttgtttt

SEQ ID NO: 3714718 - DNA, 25 bp, Homo sapien
tgcctgatccttcccatagcacaag

SEQ ID NO: 3714719 - DNA, 25 bp, Homo sapien
cattgtagtccttgccatagaggcg

SEQ ID NO: 3714720 - DNA, 25 bp, Homo sapien
cagtttctgccagagtgcctgatcc

SEQ ID NO: 3714721 - DNA, 25 bp, Homo sapien
catagaggcgaaattgcagagcatt

SEQ ID NO: 3714722 - DNA, 25 bp, Homo sapien
gggtcaaccagatgtagttcaatat

SEQ ID NO: 3714723 - DNA, 25 bp, Homo sapien
caatatcctgcctaaaaaggtttgg

SEQ ID NO: 3714724 - DNA, 25 bp, Homo sapien
attttcattatcaaccccacgaggg

SEQ ID NO: 3714725 - DNA, 25 bp, Homo sapien
ggaaagtacaataaccaagttcaga

SEQ ID NO: 3714726 - DNA, 25 bp, Homo sapien
cctcagcctcccaaagtgtgtttaa

SEQ ID NO: 3714727 - DNA, 25 bp, Homo sapien
gtgtgtttaacttttcttgtcttca

SEQ ID NO: 3714728 - DNA, 25 bp, Homo sapien
cagcctcccaaagtgtgtttaactt

SEQ ID NO: 3714729 - DNA, 25 bp, Homo sapien
cttgtcttcaaaatgcagaaggcat

SEQ ID NO: 3714730 - DNA, 25 bp, Homo sapien
ttgcttgtcagggtgtgcctggtac

SEQ ID NO: 3714731 - DNA, 25 bp, Homo sapien
gaacttgttatcctttcagtggaga

SEQ ID NO: 3714732 - DNA, 25 bp, Homo sapien
tgcctggtactcacatgatgttgag

SEQ ID NO: 3714733 - DNA, 25 bp, Homo sapien
gagacagggaacagctggatatgac

SEQ ID NO: 3714734 - DNA, 25 bp, Homo sapien
ctgtggataagaaggttagtggagc

SEQ ID NO: 3714735 - DNA, 25 bp, Homo sapien
gagctttgaggctcagtggatgtct

SEQ ID NO: 3714736 - DNA, 25 bp, Homo sapien
gctcagtggatgtctctcagcgccc

SEQ ID NO: 3714737 - DNA, 25 bp, Homo sapien
gaggctgctgtggataagaaggtta

SEQ ID NO: 3714738 - DNA, 25 bp, Homo sapien
gaaatgtccctgagtgcttagtcct

SEQ ID NO: 3714739 - DNA, 25 bp, Homo sapien
gctgatgtagttaaaactgggccca

SEQ ID NO: 3714740 - DNA, 25 bp, Homo sapien
tgtgtaacaggcaccagaagtggta

SEQ ID NO: 3714741 - DNA, 25 bp, Homo sapien
ttggaatcaatatgtcctgccctgc

SEQ ID NO: 3714742 - DNA, 25 bp, Homo sapien
tcatctcaaatctcttggtgcaggg

SEQ ID NO: 3714743 - DNA, 25 bp, Homo sapien
gcatgggtccctgagaatttcatta

SEQ ID NO: 3714744 - DNA, 25 bp, Homo sapien
cttgtaaaggtcacttacgttcact

SEQ ID NO: 3714745 - DNA, 25 bp, Homo sapien
tcactaccttcttatatccaggatg

SEQ ID NO: 3714746 - DNA, 25 bp, Homo sapien
gaaaatcccattgaaggcacactgg

SEQ ID NO: 3714747 - DNA, 25 bp, Homo sapien
gttgatagtttccaataccctggat

SEQ ID NO: 3714748 - DNA, 25 bp, Homo sapien
ggagtggtggcaagaaaatcccatt

SEQ ID NO: 3714749 - DNA, 25 bp, Homo sapien
taagggcagtaactggtgttgaaga

SEQ ID NO: 3714750 - DNA, 25 bp, Homo sapien
ttcttttcagcgccacaccacactt

SEQ ID NO: 3714751 - DNA, 25 bp, Homo sapien
cttttcagcgccacaccacacttat

SEQ ID NO: 3714752 - DNA, 25 bp, Homo sapien
caccaagtggacctaatagatagac

SEQ ID NO: 3714753 - DNA, 25 bp, Homo sapien
agtggacctaatagatagacatcta

SEQ ID NO: 3714754 - DNA, 25 bp, Homo sapien
caacttgctctcctaaaggccgcat

SEQ ID NO: 3714755 - DNA, 25 bp, Homo sapien
ccacacagagggatgccaacttgct

SEQ ID NO: 3714756 - DNA, 25 bp, Homo sapien
tatctctgagtagcgaaattggttt

SEQ ID NO: 3714757 - DNA, 25 bp, Homo sapien
cacaaagtgatattgcaggcccaag

SEQ ID NO: 3714758 - DNA, 25 bp, Homo sapien
aaacttcatcacaaagtaaaaagct

SEQ ID NO: 3714759 - DNA, 25 bp, Homo sapien
aacttcatcacaaagtaaaaagctg

SEQ ID NO: 3714760 - DNA, 25 bp, Homo sapien
ctttctctgatgtcaagtttaaaaa

SEQ ID NO: 3714761 - DNA, 25 bp, Homo sapien
gagcagactcacatcctctgcatca

SEQ ID NO: 3714762 - DNA, 25 bp, Homo sapien
tcagagcagactcacatcctctgca

SEQ ID NO: 3714763 - DNA, 25 bp, Homo sapien
cacagggcactcatgctgttagagc

SEQ ID NO: 3714764 - DNA, 25 bp, Homo sapien
ctgcatcagcaacgacacagggcac

SEQ ID NO: 3714765 - DNA, 25 bp, Homo sapien
aaagcagtattcactcaggtacttc

SEQ ID NO: 3714766 - DNA, 25 bp, Homo sapien
gggagagaatgtaggtaccagaaaa

SEQ ID NO: 3714767 - DNA, 25 bp, Homo sapien
gaaatgatagccttgcagaaggagg

SEQ ID NO: 3714768 - DNA, 25 bp, Homo sapien
gaatgtaggtaccagaaaagcagta

SEQ ID NO: 3714769 - DNA, 25 bp, Homo sapien
taagcaagcctatgatggccactgt

SEQ ID NO: 3714770 - DNA, 25 bp, Homo sapien
gacaatggttgctcagctgggatca

SEQ ID NO: 3714771 - DNA, 25 bp, Homo sapien
cttgtgaaagataagcaagcctatg

SEQ ID NO: 3714772 - DNA, 25 bp, Homo sapien
atgtagcccaaagtccagccggcgt

SEQ ID NO: 3714773 - DNA, 25 bp, Homo sapien
tatggtttctgcctacccaggatag

SEQ ID NO: 3714774 - DNA, 25 bp, Homo sapien
ggaaggatggccttgaacactgcga

SEQ ID NO: 3714775 - DNA, 25 bp, Homo sapien
gaagcttcacactcgtcaagactgg

SEQ ID NO: 3714776 - DNA, 25 bp, Homo sapien
acagtatctgccgaagtccttgagg

SEQ ID NO: 3714777 - DNA, 25 bp, Homo sapien
cacattctgatgtgtaaattccacg

SEQ ID NO: 3714778 - DNA, 25 bp, Homo sapien
caaagcccatgttgtgtgacgggtg

SEQ ID NO: 3714779 - DNA, 25 bp, Homo sapien
ccatggtaaggtctatagctgctgc

SEQ ID NO: 3714780 - DNA, 25 bp, Homo sapien
tgacgggtggcaacactttcagact

SEQ ID NO: 3714781 - DNA, 25 bp, Homo sapien
agctcaacagtcagtccccagatct

SEQ ID NO: 3714782 - DNA, 25 bp, Homo sapien
gacatttggcttccggtttgtgtga

SEQ ID NO: 3714783 - DNA, 25 bp, Homo sapien
tcaccagtcaatcctgctcaacagg

SEQ ID NO: 3714784 - DNA, 25 bp, Homo sapien
tctagagatggagagcttgggacaa

SEQ ID NO: 3714785 - DNA, 25 bp, Homo sapien
gacagcctggtatgttcgggaaaga

SEQ ID NO: 3714786 - DNA, 25 bp, Homo sapien
ttacaagcctatcaggaacagacca

SEQ ID NO: 3714787 - DNA, 25 bp, Homo sapien
tgccagatgtgcttccatccaaagc

SEQ ID NO: 3714788 - DNA, 25 bp, Homo sapien
cttggaagttatgaggagacagcct

SEQ ID NO: 3714789 - DNA, 25 bp, Homo sapien
tcctcataaaggaacagggttagca

SEQ ID NO: 3714790 - DNA, 25 bp, Homo sapien
taacaagttgagtttggctcccaaa

SEQ ID NO: 3714791 - DNA, 25 bp, Homo sapien
catgagttggagtatctgctctgcc

SEQ ID NO: 3714792 - DNA, 25 bp, Homo sapien
gacagtgctttgtatacgcagacag

SEQ ID NO: 3714793 - DNA, 25 bp, Homo sapien
caaagctagttatgagcagctgtca

SEQ ID NO: 3714794 - DNA, 25 bp, Homo sapien
ctcccaagggaaagacaatgagggc

SEQ ID NO: 3714795 - DNA, 25 bp, Homo sapien
cacctgtagccttgcttgagcttgg

SEQ ID NO: 3714796 - DNA, 25 bp, Homo sapien
catgcatcttggactgaataacagg

SEQ ID NO: 3714797 - DNA, 25 bp, Homo sapien
tgaaactttgaggctgttataaaaa

SEQ ID NO: 3714798 - DNA, 25 bp, Homo sapien
ctgcagcaattcatgaaactttgag

SEQ ID NO: 3714799 - DNA, 25 bp, Homo sapien
tgtaaataccacgttagctggcctg

SEQ ID NO: 3714800 - DNA, 25 bp, Homo sapien
gagaacatatccctagaaaccactg

SEQ ID NO: 3714801 - DNA, 25 bp, Homo sapien
tgaagcagaactagtggtgcggacc

SEQ ID NO: 3714802 - DNA, 25 bp, Homo sapien
tacgcaaagtgtgattcctggacag

SEQ ID NO: 3714803 - DNA, 25 bp, Homo sapien
cctagagactgtgaatggcattgac

SEQ ID NO: 3714804 - DNA, 25 bp, Homo sapien
tctaatacactgaagaccagggcaa

SEQ ID NO: 3714805 - DNA, 25 bp, Homo sapien
cgtgtgagctggcataacctaccta

SEQ ID NO: 3714806 - DNA, 25 bp, Homo sapien
tagaggccccaagcattggcagctt

SEQ ID NO: 3714807 - DNA, 25 bp, Homo sapien
tattagaatggcctgtccagaagac

SEQ ID NO: 3714808 - DNA, 25 bp, Homo sapien
tcctctggatgcactgtctgtatac

SEQ ID NO: 3714809 - DNA, 25 bp, Homo sapien
taggcaaatagagctgctgtggttc

SEQ ID NO: 3714810 - DNA, 25 bp, Homo sapien
cattctagtcattcagcaaggtgcc

SEQ ID NO: 3714811 - DNA, 25 bp, Homo sapien
gagtccttggaagacccctctctgt

SEQ ID NO: 3714812 - DNA, 25 bp, Homo sapien
tgtcaccccagacaacgaggctgct

SEQ ID NO: 3714813 - DNA, 25 bp, Homo sapien
aagtgacctggttatgacacattcc

SEQ ID NO: 3714814 - DNA, 25 bp, Homo sapien
catccttgatctctgtggccgtcag

SEQ ID NO: 3714815 - DNA, 25 bp, Homo sapien
taataagtcttaacagcgagacctg

SEQ ID NO: 3714816 - DNA, 25 bp, Homo sapien
cagaagggccttgtctcaatagtgg

SEQ ID NO: 3714817 - DNA, 25 bp, Homo sapien
cataatagtaaggaataatgagctc

SEQ ID NO: 3714818 - DNA, 25 bp, Homo sapien
gactaaacactactctgatcttacc

SEQ ID NO: 3714819 - DNA, 25 bp, Homo sapien
caagtaccgggcctagtagagaatg

SEQ ID NO: 3714820 - DNA, 25 bp, Homo sapien
caggatgatcagacaacacctcggg

SEQ ID NO: 3714821 - DNA, 25 bp, Homo sapien
aatgggctcaaaggaacctgactaa

SEQ ID NO: 3714822 - DNA, 25 bp, Homo sapien
gggattcataccaaggaacagagtg

SEQ ID NO: 3714823 - DNA, 25 bp, Homo sapien
gatatcgtggcagattaaatacata

SEQ ID NO: 3714824 - DNA, 25 bp, Homo sapien
aataagactatcctggattcctttc

SEQ ID NO: 3714825 - DNA, 25 bp, Homo sapien
aacactacagatagcagatatcgtg

SEQ ID NO: 3714826 - DNA, 25 bp, Homo sapien
agactatcctggattcctttcaatg

SEQ ID NO: 3714827 - DNA, 25 bp, Homo sapien
tctacccacagagttctggcttccg

SEQ ID NO: 3714828 - DNA, 25 bp, Homo sapien
cttgttaactcttctacccacagag

SEQ ID NO: 3714829 - DNA, 25 bp, Homo sapien
taatcatgccaccaaggactttgtg

SEQ ID NO: 3714830 - DNA, 25 bp, Homo sapien
tggcttccgccacctaatcatgcca

SEQ ID NO: 3714831 - DNA, 25 bp, Homo sapien
cggagtctctgtcagcccagtttgg

SEQ ID NO: 3714832 - DNA, 25 bp, Homo sapien
acggagtctctgtcagcccagtttg

SEQ ID NO: 3714833 - DNA, 25 bp, Homo sapien
cgccagccggcaagttgcacgggtt

SEQ ID NO: 3714834 - DNA, 25 bp, Homo sapien
catccctctcgtcctggtgaagaag

SEQ ID NO: 3714835 - DNA, 25 bp, Homo sapien
gccgttgtggcaagagcggtcgccc

SEQ ID NO: 3714836 - DNA, 25 bp, Homo sapien
tatacccagcgggtgagtaccggcc

SEQ ID NO: 3714837 - DNA, 25 bp, Homo sapien
gcaagtagcggcgacccaggagcat

SEQ ID NO: 3714838 - DNA, 25 bp, Homo sapien
gcgcccgcgggctgcaagtagcggc

SEQ ID NO: 3714839 - DNA, 25 bp, Homo sapien
gcccgcgggctgcaagtagcggcga

SEQ ID NO: 3714840 - DNA, 25 bp, Homo sapien
gggctgcaagtagcggcgacccagg

SEQ ID NO: 3714841 - DNA, 25 bp, Homo sapien
tctctttgagattttttcatgatgg

SEQ ID NO: 3714842 - DNA, 25 bp, Homo sapien
cactcccatgtttgttgcagcactg

SEQ ID NO: 3714843 - DNA, 25 bp, Homo sapien
actgttcacaagagccaagatttgg

SEQ ID NO: 3714844 - DNA, 25 bp, Homo sapien
ctcccatgtttgttgcagcactgtt

SEQ ID NO: 3714845 - DNA, 25 bp, Homo sapien
cagcactgttcacaagagccaagat

SEQ ID NO: 3714846 - DNA, 25 bp, Homo sapien
tcccgtgatccaattccctccatct

SEQ ID NO: 3714847 - DNA, 25 bp, Homo sapien
aaccactcccgtgatccaattccct

SEQ ID NO: 3714848 - DNA, 25 bp, Homo sapien
ccactgacttcaaattgtgctacag

SEQ ID NO: 3714849 - DNA, 25 bp, Homo sapien
tactacaaagctatactaaaagcca

SEQ ID NO: 3714850 - DNA, 25 bp, Homo sapien
ttcttcagctgtaatattatccatc

SEQ ID NO: 3714851 - DNA, 25 bp, Homo sapien
gctgtaatattatccatctcttctg

SEQ ID NO: 3714852 - DNA, 25 bp, Homo sapien
cttcagctgtaatattatccatctc

SEQ ID NO: 3714853 - DNA, 25 bp, Homo sapien
cagctgtaatattatccatctcttc

SEQ ID NO: 3714854 - DNA, 25 bp, Homo sapien
ctctcaatgtctttgctacattttg

SEQ ID NO: 3714855 - DNA, 25 bp, Homo sapien
ctcaatgtctttgctacattttgat

SEQ ID NO: 3714856 - DNA, 25 bp, Homo sapien
gcctctcaatgtctttgctacattt

SEQ ID NO: 3714857 - DNA, 25 bp, Homo sapien
tgcctctcaatgtctttgctacatt

SEQ ID NO: 3714858 - DNA, 25 bp, Homo sapien
tgtatttcgctatcaatgagctgct

SEQ ID NO: 3714859 - DNA, 25 bp, Homo sapien
tatttcgctatcaatgagctgctca

SEQ ID NO: 3714860 - DNA, 25 bp, Homo sapien
tgatgtatttcgctatcaatgagct

SEQ ID NO: 3714861 - DNA, 25 bp, Homo sapien
cctttgatgtatttcgctatcaatg

SEQ ID NO: 3714862 - DNA, 25 bp, Homo sapien
gaaccttcttcaccactcagaatga

SEQ ID NO: 3714863 - DNA, 25 bp, Homo sapien
agactttcatccaatgagacttcag

SEQ ID NO: 3714864 - DNA, 25 bp, Homo sapien
gaagacttgcccaaagctgaacctt

SEQ ID NO: 3714865 - DNA, 25 bp, Homo sapien
tccaatgagacttcagtctgtggag

SEQ ID NO: 3714866 - DNA, 25 bp, Homo sapien
cagcaagactaacgcagaaggccgg

SEQ ID NO: 3714867 - DNA, 25 bp, Homo sapien
catttgggataactacggtttactg

SEQ ID NO: 3714868 - DNA, 25 bp, Homo sapien
ttaacaccaagtgaaaagcatttgg

SEQ ID NO: 3714869 - DNA, 25 bp, Homo sapien
attaacaccaagtgaaaagcatttg

SEQ ID NO: 3714870 - DNA, 25 bp, Homo sapien
aattaacaccaagtgaaaagcattt

SEQ ID NO: 3714871 - DNA, 25 bp, Homo sapien
tgagtatatctgtcaaaatgaattc

SEQ ID NO: 3714872 - DNA, 25 bp, Homo sapien
gcatacaataaagctattatcccat

SEQ ID NO: 3714873 - DNA, 25 bp, Homo sapien
taacataattcgttaatgacttgaa

SEQ ID NO: 3714874 - DNA, 25 bp, Homo sapien
gctattatcccataacataattcgt

SEQ ID NO: 3714875 - DNA, 25 bp, Homo sapien
ttatccagcatacaataaagctatt

SEQ ID NO: 3714876 - DNA, 25 bp, Homo sapien
atacgtggcatcatatcttttggca

SEQ ID NO: 3714877 - DNA, 25 bp, Homo sapien
tctagtttaagcaggcgattttcca

SEQ ID NO: 3714878 - DNA, 25 bp, Homo sapien
tggctttctctgaatatagaatcct

SEQ ID NO: 3714879 - DNA, 25 bp, Homo sapien
catcttctagaatacgtggcatcat

SEQ ID NO: 3714880 - DNA, 25 bp, Homo sapien
ataagtcacatagtagccagtgttt

SEQ ID NO: 3714881 - DNA, 25 bp, Homo sapien
gctaaataagtcacatagtagccag

SEQ ID NO: 3714882 - DNA, 25 bp, Homo sapien
ctaaataagtcacatagtagccagt

SEQ ID NO: 3714883 - DNA, 25 bp, Homo sapien
agtcacatagtagccagtgttttaa

SEQ ID NO: 3714884 - DNA, 25 bp, Homo sapien
gtttaataggtgtaggtaatgacat

SEQ ID NO: 3714885 - DNA, 25 bp, Homo sapien
cctgtatatggtcttaagtaatgga

SEQ ID NO: 3714886 - DNA, 25 bp, Homo sapien
attccatgactgtttaataggtgta

SEQ ID NO: 3714887 - DNA, 25 bp, Homo sapien
tccttacatttagtctgaaattcca

SEQ ID NO: 3714888 - DNA, 25 bp, Homo sapien
tcagaaggtctgaatagcattggcg

SEQ ID NO: 3714889 - DNA, 25 bp, Homo sapien
agagaagcaatggaacatctgatag

SEQ ID NO: 3714890 - DNA, 25 bp, Homo sapien
tctgaatagcattggcgattgtgtg

SEQ ID NO: 3714891 - DNA, 25 bp, Homo sapien
tggcgattgtgtgggagatagcaga

SEQ ID NO: 3714892 - DNA, 25 bp, Homo sapien
ttctggtgagagaccgtaaatcagc

SEQ ID NO: 3714893 - DNA, 25 bp, Homo sapien
gagagaccgtaaatcagcttttcct

SEQ ID NO: 3714894 - DNA, 25 bp, Homo sapien
tggtgagagaccgtaaatcagcttt

SEQ ID NO: 3714895 - DNA, 25 bp, Homo sapien
ttattctggtgagagaccgtaaatc

SEQ ID NO: 3714896 - DNA, 25 bp, Homo sapien
aacttcccaggtcatattttactgc

SEQ ID NO: 3714897 - DNA, 25 bp, Homo sapien
aaatgaacttcccaggtcatatttt

SEQ ID NO: 3714898 - DNA, 25 bp, Homo sapien
atgaacttcccaggtcatattttac

SEQ ID NO: 3714899 - DNA, 25 bp, Homo sapien
tttgttcataaatgaacttcccagg

SEQ ID NO: 3714900 - DNA, 25 bp, Homo sapien
tggagaagccttgcgcataatactt

SEQ ID NO: 3714901 - DNA, 25 bp, Homo sapien
cataatacttgctcttgattgaaga

SEQ ID NO: 3714902 - DNA, 25 bp, Homo sapien
tggtatatttcccttgaaccttcca

SEQ ID NO: 3714903 - DNA, 25 bp, Homo sapien
gaattgcaaacccacaatgttgagg

SEQ ID NO: 3714904 - DNA, 25 bp, Homo sapien
ggtgatgaacgaagtagggctttca

SEQ ID NO: 3714905 - DNA, 25 bp, Homo sapien
tacaattaatcttttccagggagaa

SEQ ID NO: 3714906 - DNA, 25 bp, Homo sapien
cgtattccggtattacttgtacaat

SEQ ID NO: 3714907 - DNA, 25 bp, Homo sapien
ttcacatcttgacacttctacaatt

SEQ ID NO: 3714908 - DNA, 25 bp, Homo sapien
tgtaaagattttctggtcagctggt

SEQ ID NO: 3714909 - DNA, 25 bp, Homo sapien
tcttgtaaagattttctggtcagct

SEQ ID NO: 3714910 - DNA, 25 bp, Homo sapien
tggtagcatctgtcagtgctttcag

SEQ ID NO: 3714911 - DNA, 25 bp, Homo sapien
caatttggtagcatctgtcagtgct

SEQ ID NO: 3714912 - DNA, 25 bp, Homo sapien
ttttcactattcaaaagtgccctgc

SEQ ID NO: 3714913 - DNA, 25 bp, Homo sapien
aaagccttcaaaagtggcatggaag

SEQ ID NO: 3714914 - DNA, 25 bp, Homo sapien
caaaaatttgtcagtggattagaac

SEQ ID NO: 3714915 - DNA, 25 bp, Homo sapien
tcattttatacacatctgaacgcca

SEQ ID NO: 3714916 - DNA, 25 bp, Homo sapien
ccctttctaagtcatacatctgttt

SEQ ID NO: 3714917 - DNA, 25 bp, Homo sapien
tatactgtgtagtagggagaggtcc

SEQ ID NO: 3714918 - DNA, 25 bp, Homo sapien
taaacccttgcccatgtcgaagaga

SEQ ID NO: 3714919 - DNA, 25 bp, Homo sapien
gtttccaagttcgtaatatactgtg

SEQ ID NO: 3714920 - DNA, 25 bp, Homo sapien
gctcttgttcatcacatttattcat

SEQ ID NO: 3714921 - DNA, 25 bp, Homo sapien
ttcagacatttctgagatttgctct

SEQ ID NO: 3714922 - DNA, 25 bp, Homo sapien
gatttgctcttgttcatcacattta

SEQ ID NO: 3714923 - DNA, 25 bp, Homo sapien
gtttcagacatttctgagatttgct

SEQ ID NO: 3714924 - DNA, 25 bp, Homo sapien
ttttatggctcctgtattcttcccc

SEQ ID NO: 3714925 - DNA, 25 bp, Homo sapien
tcggatggcaatggctttgcaaaga

SEQ ID NO: 3714926 - DNA, 25 bp, Homo sapien
caaagatataaaacaccatacatcc

SEQ ID NO: 3714927 - DNA, 25 bp, Homo sapien
tgccttgacttccactaagttttag

SEQ ID NO: 3714928 - DNA, 25 bp, Homo sapien
atcacttcaggccaatacattaact

SEQ ID NO: 3714929 - DNA, 25 bp, Homo sapien
cacttcaggccaatacattaactga

SEQ ID NO: 3714930 - DNA, 25 bp, Homo sapien
tcacttcaggccaatacattaactg

SEQ ID NO: 3714931 - DNA, 25 bp, Homo sapien
tttgagcttctgaattttggctctt

SEQ ID NO: 3714932 - DNA, 25 bp, Homo sapien
gagtggaaacctgaatacatgaata

SEQ ID NO: 3714933 - DNA, 25 bp, Homo sapien
tacagtgggatctttgcacagagac

SEQ ID NO: 3714934 - DNA, 25 bp, Homo sapien
ggaatttcaacagagggacattgta

SEQ ID NO: 3714935 - DNA, 25 bp, Homo sapien
acaaatacagcaagagactgaagcc

SEQ ID NO: 3714936 - DNA, 25 bp, Homo sapien
tagttttgccagtaagcttgtcctt

SEQ ID NO: 3714937 - DNA, 25 bp, Homo sapien
ttctccatcggcaggcatgaccagc

SEQ ID NO: 3714938 - DNA, 25 bp, Homo sapien
cagcttatcagagctaaactctaca

SEQ ID NO: 3714939 - DNA, 25 bp, Homo sapien
ctctacatattgcaaagcggttttg

SEQ ID NO: 3714940 - DNA, 25 bp, Homo sapien
tcaccaaataggcccaagtagtttc

SEQ ID NO: 3714941 - DNA, 25 bp, Homo sapien
cagttccatttccctcaagaagaaa

SEQ ID NO: 3714942 - DNA, 25 bp, Homo sapien
gaagatcttaatgattgtggcatag

SEQ ID NO: 3714943 - DNA, 25 bp, Homo sapien
gtggcataggtatcagaggaagacc

SEQ ID NO: 3714944 - DNA, 25 bp, Homo sapien
gaccattttcatctaagctccatga

SEQ ID NO: 3714945 - DNA, 25 bp, Homo sapien
gctccatgatagagaatagctaagt

SEQ ID NO: 3714946 - DNA, 25 bp, Homo sapien
ggaattccaggaacacttcttgcat

SEQ ID NO: 3714947 - DNA, 25 bp, Homo sapien
caggaacacttcttgcatctacatt

SEQ ID NO: 3714948 - DNA, 25 bp, Homo sapien
gagccatggaattccaggaacactt

SEQ ID NO: 3714949 - DNA, 25 bp, Homo sapien
cacttcttgcatctacattccttaa

SEQ ID NO: 3714950 - DNA, 25 bp, Homo sapien
ggattatttggatcaattctgactt

SEQ ID NO: 3714951 - DNA, 25 bp, Homo sapien
gattatttggatcaattctgacttc

SEQ ID NO: 3714952 - DNA, 25 bp, Homo sapien
ttggaatatcctgccccttaagtct

SEQ ID NO: 3714953 - DNA, 25 bp, Homo sapien
tgcaactgttcaagacgaaaatact

SEQ ID NO: 3714954 - DNA, 25 bp, Homo sapien
tctggaatctctgtatcatggaggg

SEQ ID NO: 3714955 - DNA, 25 bp, Homo sapien
ttgcaatagctggaaacgtttactc

SEQ ID NO: 3714956 - DNA, 25 bp, Homo sapien
gcaaaacgttaactttatcatacaa

SEQ ID NO: 3714957 - DNA, 25 bp, Homo sapien
caataagccatattcaaatagaaac

SEQ ID NO: 3714958 - DNA, 25 bp, Homo sapien
ggaaatctgtctacagattattagc

SEQ ID NO: 3714959 - DNA, 25 bp, Homo sapien
taaattaagatagggttaaagcagc

SEQ ID NO: 3714960 - DNA, 25 bp, Homo sapien
gcctcagctccccagagtgccaaga

SEQ ID NO: 3714961 - DNA, 25 bp, Homo sapien
ctcagctccccagagtgccaagatt

SEQ ID NO: 3714962 - DNA, 25 bp, Homo sapien
tcagctccccagagtgccaagatta

SEQ ID NO: 3714963 - DNA, 25 bp, Homo sapien
agctccccagagtgccaagattaca

SEQ ID NO: 3714964 - DNA, 25 bp, Homo sapien
tctgaaacggatacctccttctctt

SEQ ID NO: 3714965 - DNA, 25 bp, Homo sapien
tcagaaaattggcagaattaatcct

SEQ ID NO: 3714966 - DNA, 25 bp, Homo sapien
atttacatctgaaacggatacctcc

SEQ ID NO: 3714967 - DNA, 25 bp, Homo sapien
gcagaattaatcctttgtgctgtaa

SEQ ID NO: 3714968 - DNA, 25 bp, Homo sapien
taatcattcacaatatctgacaagt

SEQ ID NO: 3714969 - DNA, 25 bp, Homo sapien
cataatcattcacaatatctgacaa

SEQ ID NO: 3714970 - DNA, 25 bp, Homo sapien
aatcattcacaatatctgacaagtt

SEQ ID NO: 3714971 - DNA, 25 bp, Homo sapien
tcattcacaatatctgacaagttac

SEQ ID NO: 3714972 - DNA, 25 bp, Homo sapien
ctgtggatctcagtacctttgtaca

SEQ ID NO: 3714973 - DNA, 25 bp, Homo sapien
gatctcagtacctttgtacagctga

SEQ ID NO: 3714974 - DNA, 25 bp, Homo sapien
tctcagtacctttgtacagctgagg

SEQ ID NO: 3714975 - DNA, 25 bp, Homo sapien
ttacttcagcaaacgctcccccaac

SEQ ID NO: 3714976 - DNA, 25 bp, Homo sapien
tcgcctgcgctgtgacttttttcct

SEQ ID NO: 3714977 - DNA, 25 bp, Homo sapien
tatctccgtcagagatcgcctgcgc

SEQ ID NO: 3714978 - DNA, 25 bp, Homo sapien
taggccctcactattcggacaagaa

SEQ ID NO: 3714979 - DNA, 25 bp, Homo sapien
tctggtaggaatattataggccctc

SEQ ID NO: 3714980 - DNA, 25 bp, Homo sapien
gagtcagtggcatggaatagggcag

SEQ ID NO: 3714981 - DNA, 25 bp, Homo sapien
gagagtcagtggcatggaatagggc

SEQ ID NO: 3714982 - DNA, 25 bp, Homo sapien
tggcatggaatagggcagttggcag

SEQ ID NO: 3714983 - DNA, 25 bp, Homo sapien
tcagtggcatggaatagggcagttg

SEQ ID NO: 3714984 - DNA, 25 bp, Homo sapien
cattccacatttgcttcgcagcttt

SEQ ID NO: 3714985 - DNA, 25 bp, Homo sapien
attccacatttgcttcgcagctttc

SEQ ID NO: 3714986 - DNA, 25 bp, Homo sapien
catttgcttcgcagctttcctgggg

SEQ ID NO: 3714987 - DNA, 25 bp, Homo sapien
ttccacatttgcttcgcagctttcc

SEQ ID NO: 3714988 - DNA, 25 bp, Homo sapien
aggcaagatatagatgatttcaaac

SEQ ID NO: 3714989 - DNA, 25 bp, Homo sapien
ggcaagatatagatgatttcaaaca

SEQ ID NO: 3714990 - DNA, 25 bp, Homo sapien
gctactgatttgattgtttctctat

SEQ ID NO: 3714991 - DNA, 25 bp, Homo sapien
ggctactgatttgattgtttctcta

SEQ ID NO: 3714992 - DNA, 25 bp, Homo sapien
ctgaggctactgatttgattgtttc

SEQ ID NO: 3714993 - DNA, 25 bp, Homo sapien
gaggctactgatttgattgtttctc

SEQ ID NO: 3714994 - DNA, 25 bp, Homo sapien
gaaacttccacgaatggatgtacag

SEQ ID NO: 3714995 - DNA, 25 bp, Homo sapien
ttttgtatacagtgtgctggaaaga

SEQ ID NO: 3714996 - DNA, 25 bp, Homo sapien
tgagatccacttgctgtattggttt

SEQ ID NO: 3714997 - DNA, 25 bp, Homo sapien
ccagcatggatgagatccacttgct

SEQ ID NO: 3714998 - DNA, 25 bp, Homo sapien
acatcaagagaatggatattgttta

SEQ ID NO: 3714999 - DNA, 25 bp, Homo sapien
agagaaaagtatcctttcggctgga

SEQ ID NO: 3715000 - DNA, 25 bp, Homo sapien
tagagaaaagtatcctttcggctgg

SEQ ID NO: 3715001 - DNA, 25 bp, Homo sapien
attttagataagcttgagaagctat

SEQ ID NO: 3715002 - DNA, 25 bp, Homo sapien
gaagctataatcatgtcctggtgag

SEQ ID NO: 3715003 - DNA, 25 bp, Homo sapien
gataagcttgagaagctataatcat

SEQ ID NO: 3715004 - DNA, 25 bp, Homo sapien
tagataagcttgagaagctataatc

SEQ ID NO: 3715005 - DNA, 25 bp, Homo sapien
tttcttatatatgagtgaccactac

SEQ ID NO: 3715006 - DNA, 25 bp, Homo sapien
agggaagacaatgcatccaagccaa

SEQ ID NO: 3715007 - DNA, 25 bp, Homo sapien
ctcagattgttgcagaagagcagaa

SEQ ID NO: 3715008 - DNA, 25 bp, Homo sapien
tgaccactacagctcttgagacagt

SEQ ID NO: 3715009 - DNA, 25 bp, Homo sapien
acttccttaccaatagcttcagttg

SEQ ID NO: 3715010 - DNA, 25 bp, Homo sapien
tccttaccaatagcttcagttggta

SEQ ID NO: 3715011 - DNA, 25 bp, Homo sapien
ccacttccttaccaatagcttcagt

SEQ ID NO: 3715012 - DNA, 25 bp, Homo sapien
cttccttaccaatagcttcagttgg

SEQ ID NO: 3715013 - DNA, 25 bp, Homo sapien
agtatacccgagcaaaactggtgga

SEQ ID NO: 3715014 - DNA, 25 bp, Homo sapien
gatatttgaggttcaatggtagcaa

SEQ ID NO: 3715015 - DNA, 25 bp, Homo sapien
ggtggaatagttacttgaaatgttc

SEQ ID NO: 3715016 - DNA, 25 bp, Homo sapien
gttggattacaggtgacatatgata

SEQ ID NO: 3715017 - DNA, 25 bp, Homo sapien
tgtgactaagaactgtatcccttca

SEQ ID NO: 3715018 - DNA, 25 bp, Homo sapien
cagtagttacgattcttcggttggg

SEQ ID NO: 3715019 - DNA, 25 bp, Homo sapien
tgctctctgcaagacctctgtttga

SEQ ID NO: 3715020 - DNA, 25 bp, Homo sapien
gctgaggtggatttaatgccttgat

SEQ ID NO: 3715021 - DNA, 25 bp, Homo sapien
ttttcatctggtgtattaggcacaa

SEQ ID NO: 3715022 - DNA, 25 bp, Homo sapien
catccatatatcagagccatcattt

SEQ ID NO: 3715023 - DNA, 25 bp, Homo sapien
tctgatgtcatccatatatcagagc

SEQ ID NO: 3715024 - DNA, 25 bp, Homo sapien
aagatacaaatcgagcaatgaggtc

SEQ ID NO: 3715025 - DNA, 25 bp, Homo sapien
taacactgacgttcccaagaggacc

SEQ ID NO: 3715026 - DNA, 25 bp, Homo sapien
gctcctccttatttccgatagctaa

SEQ ID NO: 3715027 - DNA, 25 bp, Homo sapien
ttctaacactgacgttcccaagagg

SEQ ID NO: 3715028 - DNA, 25 bp, Homo sapien
gagaaggatggcatgctcctcctta

SEQ ID NO: 3715029 - DNA, 25 bp, Homo sapien
gccagttgatggattccaaagcaaa

SEQ ID NO: 3715030 - DNA, 25 bp, Homo sapien
tcaaactgcttataacattggccag

SEQ ID NO: 3715031 - DNA, 25 bp, Homo sapien
ttctatcatcaaacaaacaatctac

SEQ ID NO: 3715032 - DNA, 25 bp, Homo sapien
tgagttactacataagccacatgcc

SEQ ID NO: 3715033 - DNA, 25 bp, Homo sapien
cgttttttggaagcaactgcttcca

SEQ ID NO: 3715034 - DNA, 25 bp, Homo sapien
ctattccttagatcttctaccatgc

SEQ ID NO: 3715035 - DNA, 25 bp, Homo sapien
tattccttagatcttctaccatgct

SEQ ID NO: 3715036 - DNA, 25 bp, Homo sapien
attccttagatcttctaccatgctt

SEQ ID NO: 3715037 - DNA, 25 bp, Homo sapien
agttacccgtatgtaggcagctgcc

SEQ ID NO: 3715038 - DNA, 25 bp, Homo sapien
catccgattactgggttgacattcc

SEQ ID NO: 3715039 - DNA, 25 bp, Homo sapien
tgaaaatccacgcatctggtctggg

SEQ ID NO: 3715040 - DNA, 25 bp, Homo sapien
ggcaggctcttacttggcttgggaa

SEQ ID NO: 3715041 - DNA, 25 bp, Homo sapien
agcttaggaaggatttgtcgcaaaa

SEQ ID NO: 3715042 - DNA, 25 bp, Homo sapien
caaagcttcctatgccaaattccag

SEQ ID NO: 3715043 - DNA, 25 bp, Homo sapien
tatctccttcagatgaaacaaagct

SEQ ID NO: 3715044 - DNA, 25 bp, Homo sapien
aaattgtagtattctttcaaattca

SEQ ID NO: 3715045 - DNA, 25 bp, Homo sapien
ctgtacatcaatgtatggcatctgg

SEQ ID NO: 3715046 - DNA, 25 bp, Homo sapien
cattgatgttgaactaaggaagcca

SEQ ID NO: 3715047 - DNA, 25 bp, Homo sapien
gaagccaaatagacccacacagata

SEQ ID NO: 3715048 - DNA, 25 bp, Homo sapien
ttccagtttgataaacagcatcaat

SEQ ID NO: 3715049 - DNA, 25 bp, Homo sapien
gacagtgacccaagaaagccagact

SEQ ID NO: 3715050 - DNA, 25 bp, Homo sapien
tgggctctccctcataacagtgcat

SEQ ID NO: 3715051 - DNA, 25 bp, Homo sapien
tagttttccactcgagcagcttcca

SEQ ID NO: 3715052 - DNA, 25 bp, Homo sapien
catagtgcccagctctgtaagtgaa

SEQ ID NO: 3715053 - DNA, 25 bp, Homo sapien
ccaatctcgtctcgcgatacagcgg

SEQ ID NO: 3715054 - DNA, 25 bp, Homo sapien
tcgccccgagccgtccaattggcgg

SEQ ID NO: 3715055 - DNA, 25 bp, Homo sapien
ggctcccgcctgggtacggtcagca

SEQ ID NO: 3715056 - DNA, 25 bp, Homo sapien
agccgtccaattggcggccgggccg

SEQ ID NO: 3715057 - DNA, 25 bp, Homo sapien
agcgcctggacgctcgcgccgccca

SEQ ID NO: 3715058 - DNA, 25 bp, Homo sapien
tggacgctcgcgccgcccattgtta

SEQ ID NO: 3715059 - DNA, 25 bp, Homo sapien
ctcgcgccgcccattgttaaaggac

SEQ ID NO: 3715060 - DNA, 25 bp, Homo sapien
acgctcgcgccgcccattgttaaag

SEQ ID NO: 3715061 - DNA, 25 bp, Homo sapien
catgctgcggacagtgggccgctaa

SEQ ID NO: 3715062 - DNA, 25 bp, Homo sapien
cagccccgccgtcgtgcggcggacg

SEQ ID NO: 3715063 - DNA, 25 bp, Homo sapien
ggacgccggccccgctcatgctgcg

SEQ ID NO: 3715064 - DNA, 25 bp, Homo sapien
tcatgctgcggacagtgggccgcta

SEQ ID NO: 3715065 - DNA, 25 bp, Homo sapien
tgctcgactatgtgtcgggcaaaag

SEQ ID NO: 3715066 - DNA, 25 bp, Homo sapien
agccaggtgcgagctcgggaagagc

SEQ ID NO: 3715067 - DNA, 25 bp, Homo sapien
gggatccactcgggccctgagttgc

SEQ ID NO: 3715068 - DNA, 25 bp, Homo sapien
ctgagttgccaaagcgcggagccag

SEQ ID NO: 3715069 - DNA, 25 bp, Homo sapien
cccagcccgacgcggcaactcgagt

SEQ ID NO: 3715070 - DNA, 25 bp, Homo sapien
cgcgcccagcccgacgcggcaactc

SEQ ID NO: 3715071 - DNA, 25 bp, Homo sapien
ggcgcgcccagcccgacgcggcaac

SEQ ID NO: 3715072 - DNA, 25 bp, Homo sapien
cgcccagcccgacgcggcaactcga

SEQ ID NO: 3715073 - DNA, 25 bp, Homo sapien
cttgtagcgaagcgcttggtgaata

SEQ ID NO: 3715074 - DNA, 25 bp, Homo sapien
aagcgcttggtgaatatcggcggcc

SEQ ID NO: 3715075 - DNA, 25 bp, Homo sapien
ttgtagcgaagcgcttggtgaatat

SEQ ID NO: 3715076 - DNA, 25 bp, Homo sapien
cttggtgaatatcggcggccagctg

SEQ ID NO: 3715077 - DNA, 25 bp, Homo sapien
cagaagggcagagtgtgaagcgatt

SEQ ID NO: 3715078 - DNA, 25 bp, Homo sapien
tgaagcgattgctcacaatggcaat

SEQ ID NO: 3715079 - DNA, 25 bp, Homo sapien
gcagagtgtgaagcgattgctcaca

SEQ ID NO: 3715080 - DNA, 25 bp, Homo sapien
attgctcacaatggcaatcaagtca

SEQ ID NO: 3715081 - DNA, 25 bp, Homo sapien
ttacgtgccctatcttcagtgagag

SEQ ID NO: 3715082 - DNA, 25 bp, Homo sapien
ggaaactgtcctgtacactaccgga

SEQ ID NO: 3715083 - DNA, 25 bp, Homo sapien
tcttggagcctactacacagttggt

SEQ ID NO: 3715084 - DNA, 25 bp, Homo sapien
tcagtgagagtaccaacgagcaatg

SEQ ID NO: 3715085 - DNA, 25 bp, Homo sapien
aaagctttgctaacccagtgttggt

SEQ ID NO: 3715086 - DNA, 25 bp, Homo sapien
gaatagggcacggatcagatgtcac

SEQ ID NO: 3715087 - DNA, 25 bp, Homo sapien
cagatgtcaccgagtgctctgccaa

SEQ ID NO: 3715088 - DNA, 25 bp, Homo sapien
tatgttcatatcagccatggaaacc

SEQ ID NO: 3715089 - DNA, 25 bp, Homo sapien
ctagattcatattagtcatacaacc

SEQ ID NO: 3715090 - DNA, 25 bp, Homo sapien
tcatacaacccaggctgttgagctg

SEQ ID NO: 3715091 - DNA, 25 bp, Homo sapien
tattagtcatacaacccaggctgtt

SEQ ID NO: 3715092 - DNA, 25 bp, Homo sapien
aataataatagttccatatgtagca

SEQ ID NO: 3715093 - DNA, 25 bp, Homo sapien
ccgtcatgaagatctgtttcgtgta

SEQ ID NO: 3715094 - DNA, 25 bp, Homo sapien
tcatgaagatctgtttcgtgtactg

SEQ ID NO: 3715095 - DNA, 25 bp, Homo sapien
atgaagatctgtttcgtgtactgct

SEQ ID NO: 3715096 - DNA, 25 bp, Homo sapien
cgtcatgaagatctgtttcgtgtac

SEQ ID NO: 3715097 - DNA, 25 bp, Homo sapien
agaaggtgcataatttagaaaggca

SEQ ID NO: 3715098 - DNA, 25 bp, Homo sapien
ggtgcataatttagaaaggcataat

SEQ ID NO: 3715099 - DNA, 25 bp, Homo sapien
ctaaagaaggtgcataatttagaaa

SEQ ID NO: 3715100 - DNA, 25 bp, Homo sapien
aaagaaggtgcataatttagaaagg

SEQ ID NO: 3715101 - DNA, 25 bp, Homo sapien
atcaacagtcgttcaatacactgca

SEQ ID NO: 3715102 - DNA, 25 bp, Homo sapien
tcagggcacctcatacatgaagaaa

SEQ ID NO: 3715103 - DNA, 25 bp, Homo sapien
cagggcacctcatacatgaagaaaa

SEQ ID NO: 3715104 - DNA, 25 bp, Homo sapien
tgacatcccaacaccagtctgcatg

SEQ ID NO: 3715105 - DNA, 25 bp, Homo sapien
tgaaagtgaactggccgtgatggct

SEQ ID NO: 3715106 - DNA, 25 bp, Homo sapien
ggctgtctggaatacacttagttgc

SEQ ID NO: 3715107 - DNA, 25 bp, Homo sapien
gacagcttggttgttctgacgtagg

SEQ ID NO: 3715108 - DNA, 25 bp, Homo sapien
tatttggaccatcagccaggacttg

SEQ ID NO: 3715109 - DNA, 25 bp, Homo sapien
tgaaaacacaccctagcaagcgtat

SEQ ID NO: 3715110 - DNA, 25 bp, Homo sapien
tcatgtcacaaagcagtctgggtcg

SEQ ID NO: 3715111 - DNA, 25 bp, Homo sapien
tagcacaacctgagaactaccctgg

SEQ ID NO: 3715112 - DNA, 25 bp, Homo sapien
ccttcctgacaaaggccattggctt

SEQ ID NO: 3715113 - DNA, 25 bp, Homo sapien
gcttgattactgagactcctgctgc

SEQ ID NO: 3715114 - DNA, 25 bp, Homo sapien
gacattaagttaccacaggcactgg

SEQ ID NO: 3715115 - DNA, 25 bp, Homo sapien
ccgggagccatctggatcagtccat

SEQ ID NO: 3715116 - DNA, 25 bp, Homo sapien
aattccattggtgtagactttagca

SEQ ID NO: 3715117 - DNA, 25 bp, Homo sapien
cagtacacatttaatgatggtccag

SEQ ID NO: 3715118 - DNA, 25 bp, Homo sapien
ccccaaagctagcagttgtgagttg

SEQ ID NO: 3715119 - DNA, 25 bp, Homo sapien
ggactttggtaaagcccttcataca

SEQ ID NO: 3715120 - DNA, 25 bp, Homo sapien
gacagaggtgaaaaggttatctgcc

SEQ ID NO: 3715121 - DNA, 25 bp, Homo sapien
aggttatctgccagacaaatttttc

SEQ ID NO: 3715122 - DNA, 25 bp, Homo sapien
gatgctgagtgtgactcgtaattca

SEQ ID NO: 3715123 - DNA, 25 bp, Homo sapien
ttcatgcagccgtgagagatcctca

SEQ ID NO: 3715124 - DNA, 25 bp, Homo sapien
agagtcatcccgaggctccctgcag

SEQ ID NO: 3715125 - DNA, 25 bp, Homo sapien
cctgtctgtgccagagtcatcccga

SEQ ID NO: 3715126 - DNA, 25 bp, Homo sapien
tcatcccgaggctccctgcagatat

SEQ ID NO: 3715127 - DNA, 25 bp, Homo sapien
tctgtgccagagtcatcccgaggct

SEQ ID NO: 3715128 - DNA, 25 bp, Homo sapien
caaatttccttgtctccaggggcac

SEQ ID NO: 3715129 - DNA, 25 bp, Homo sapien
aaatttccttgtctccaggggcaca

SEQ ID NO: 3715130 - DNA, 25 bp, Homo sapien
aatttccttgtctccaggggcacac

SEQ ID NO: 3715131 - DNA, 25 bp, Homo sapien
tcaaatttccttgtctccaggggca

SEQ ID NO: 3715132 - DNA, 25 bp, Homo sapien
tgatcttcgtctgccttattcccat

SEQ ID NO: 3715133 - DNA, 25 bp, Homo sapien
ctgtgcattgatctgacttttctcc

SEQ ID NO: 3715134 - DNA, 25 bp, Homo sapien
agctgatactttgatcttcgtctgc

SEQ ID NO: 3715135 - DNA, 25 bp, Homo sapien
gatactttgatcttcgtctgcctta

SEQ ID NO: 3715136 - DNA, 25 bp, Homo sapien
ctccaggcatgtacacattgtgggt

SEQ ID NO: 3715137 - DNA, 25 bp, Homo sapien
gcgttgcttgcagggctcctcacag

SEQ ID NO: 3715138 - DNA, 25 bp, Homo sapien
gggctccaggcatgtacacattgtg

SEQ ID NO: 3715139 - DNA, 25 bp, Homo sapien
tagagccagggtagcgttgcttgca

SEQ ID NO: 3715140 - DNA, 25 bp, Homo sapien
tctgtatcgttccaagttttaggat

SEQ ID NO: 3715141 - DNA, 25 bp, Homo sapien
ctgtatcgttccaagttttaggata

SEQ ID NO: 3715142 - DNA, 25 bp, Homo sapien
aggatatgtgctgccaaagcgagcg

SEQ ID NO: 3715143 - DNA, 25 bp, Homo sapien
tatcgttccaagttttaggatatgt

SEQ ID NO: 3715144 - DNA, 25 bp, Homo sapien
catgctttcctaatatcttgcaact

SEQ ID NO: 3715145 - DNA, 25 bp, Homo sapien
tcagatttacttctacatgctttcc

SEQ ID NO: 3715146 - DNA, 25 bp, Homo sapien
ttactgctttacatagacataattg

SEQ ID NO: 3715147 - DNA, 25 bp, Homo sapien
tgctttacatagacataattgcata

SEQ ID NO: 3715148 - DNA, 25 bp, Homo sapien
gcttctggcacgcaggttttagcaa

SEQ ID NO: 3715149 - DNA, 25 bp, Homo sapien
ctggcacgcaggttttagcaaccat

SEQ ID NO: 3715150 - DNA, 25 bp, Homo sapien
tctggcttctggcacgcaggtttta

SEQ ID NO: 3715151 - DNA, 25 bp, Homo sapien
ttctggcacgcaggttttagcaacc

SEQ ID NO: 3715152 - DNA, 25 bp, Homo sapien
atggagctgggttcgccgctgacct

SEQ ID NO: 3715153 - DNA, 25 bp, Homo sapien
tctgacgagactaggccatggagct

SEQ ID NO: 3715154 - DNA, 25 bp, Homo sapien
caaacgtctactctgtgctcttcag

SEQ ID NO: 3715155 - DNA, 25 bp, Homo sapien
ccggtgaaatggcagacaaacgtct

SEQ ID NO: 3715156 - DNA, 25 bp, Homo sapien
tggcggccattacacttccatccgg

SEQ ID NO: 3715157 - DNA, 25 bp, Homo sapien
tgatcgcagcgctaccgggagcgca

SEQ ID NO: 3715158 - DNA, 25 bp, Homo sapien
tccatccgggtattgccgaaaagct

SEQ ID NO: 3715159 - DNA, 25 bp, Homo sapien
tgtcgtagtacccattgcctgcgag

SEQ ID NO: 3715160 - DNA, 25 bp, Homo sapien
catcctaaaaggtctgggcagtccc

SEQ ID NO: 3715161 - DNA, 25 bp, Homo sapien
ttctgacatcctaaaaggtctgggc

SEQ ID NO: 3715162 - DNA, 25 bp, Homo sapien
tgacatcctaaaaggtctgggcagt

SEQ ID NO: 3715163 - DNA, 25 bp, Homo sapien
tctgacatcctaaaaggtctgggca

SEQ ID NO: 3715164 - DNA, 25 bp, Homo sapien
aatgaccatacgctgggccagcaat

SEQ ID NO: 3715165 - DNA, 25 bp, Homo sapien
ggcctgcgaacctatagctcgaggg

SEQ ID NO: 3715166 - DNA, 25 bp, Homo sapien
ccagcaatagggacgccgtcgagtc

SEQ ID NO: 3715167 - DNA, 25 bp, Homo sapien
aaacccgccgagtgagtgcttcgag

SEQ ID NO: 3715168 - DNA, 25 bp, Homo sapien
ctggaaatgaagaccaagattttaa

SEQ ID NO: 3715169 - DNA, 25 bp, Homo sapien
tggaaatgaagaccaagattttaaa

SEQ ID NO: 3715170 - DNA, 25 bp, Homo sapien
ttgcacaatgtcacaatcaggaaca

SEQ ID NO: 3715171 - DNA, 25 bp, Homo sapien
aatcaggaacagtgatcaaaagaag

SEQ ID NO: 3715172 - DNA, 25 bp, Homo sapien
caggaacagtgatcaaaagaagaga

SEQ ID NO: 3715173 - DNA, 25 bp, Homo sapien
cacacaatttaacacttgcacaatg

SEQ ID NO: 3715174 - DNA, 25 bp, Homo sapien
aacataccaacttactacttaatag

SEQ ID NO: 3715175 - DNA, 25 bp, Homo sapien
ctatccaacacaaagagtaggagac

SEQ ID NO: 3715176 - DNA, 25 bp, Homo sapien
atccaacacaaagagtaggagacat

SEQ ID NO: 3715177 - DNA, 25 bp, Homo sapien
tatccaacacaaagagtaggagaca

SEQ ID NO: 3715178 - DNA, 25 bp, Homo sapien
gaattttatgatactgtggtatcca

SEQ ID NO: 3715179 - DNA, 25 bp, Homo sapien
ttttatgatactgtggtatccaaga

SEQ ID NO: 3715180 - DNA, 25 bp, Homo sapien
caagaatcttagcatttcaaagatc

SEQ ID NO: 3715181 - DNA, 25 bp, Homo sapien
cttagcatttcaaagatcccaggac

SEQ ID NO: 3715182 - DNA, 25 bp, Homo sapien
agccacattaaaacgcctttaaatg

SEQ ID NO: 3715183 - DNA, 25 bp, Homo sapien
attcctagttctggagcccaaaatg

SEQ ID NO: 3715184 - DNA, 25 bp, Homo sapien
atgagcaatcaatcatcactttaag

SEQ ID NO: 3715185 - DNA, 25 bp, Homo sapien
caaaatgaacgttctatgagcaatc

SEQ ID NO: 3715186 - DNA, 25 bp, Homo sapien
cttcaggttagaacggacggaatct

SEQ ID NO: 3715187 - DNA, 25 bp, Homo sapien
taaagatgctagcaggtgcgcagat

SEQ ID NO: 3715188 - DNA, 25 bp, Homo sapien
gaaatgcagcagtgaagtccttcag

SEQ ID NO: 3715189 - DNA, 25 bp, Homo sapien
gacggaatctagtgaacgagctgaa

SEQ ID NO: 3715190 - DNA, 25 bp, Homo sapien
cacatctacgttctaagcattggga

SEQ ID NO: 3715191 - DNA, 25 bp, Homo sapien
tgccagacttgtagctagcaccaca

SEQ ID NO: 3715192 - DNA, 25 bp, Homo sapien
tctaccaccggaatataagttgcgt

SEQ ID NO: 3715193 - DNA, 25 bp, Homo sapien
tacatattaagtcagggagccctcg

SEQ ID NO: 3715194 - DNA, 25 bp, Homo sapien
tccccacattaatccataagcaagc

SEQ ID NO: 3715195 - DNA, 25 bp, Homo sapien
ttactccccacattaatccataagc

SEQ ID NO: 3715196 - DNA, 25 bp, Homo sapien
atccataagcaagcctggtcaattc

SEQ ID NO: 3715197 - DNA, 25 bp, Homo sapien
cattaatccataagcaagcctggtc

SEQ ID NO: 3715198 - DNA, 25 bp, Homo sapien
tcatgtgatccattcttactcagct

SEQ ID NO: 3715199 - DNA, 25 bp, Homo sapien
tactgctatttgctgggagaacatg

SEQ ID NO: 3715200 - DNA, 25 bp, Homo sapien
gctgcgacagtgatttagaataggc

SEQ ID NO: 3715201 - DNA, 25 bp, Homo sapien
agtgacataagagccattgaattca

SEQ ID NO: 3715202 - DNA, 25 bp, Homo sapien
tgttcatatagttttcggtcaccag

SEQ ID NO: 3715203 - DNA, 25 bp, Homo sapien
tgttctgttcatatagttttcggtc

SEQ ID NO: 3715204 - DNA, 25 bp, Homo sapien
tcatatagttttcggtcaccaggca

SEQ ID NO: 3715205 - DNA, 25 bp, Homo sapien
tctgttcatatagttttcggtcacc

SEQ ID NO: 3715206 - DNA, 25 bp, Homo sapien
tgagagactaaagcctatcacattt

SEQ ID NO: 3715207 - DNA, 25 bp, Homo sapien
caagaaatggttgtatacagtttac

SEQ ID NO: 3715208 - DNA, 25 bp, Homo sapien
gcagaatctattttagtgccctcaa

SEQ ID NO: 3715209 - DNA, 25 bp, Homo sapien
tctattcatgacttgaaacaaacat

SEQ ID NO: 3715210 - DNA, 25 bp, Homo sapien
gaggagccaaggaactggtaatgtt

SEQ ID NO: 3715211 - DNA, 25 bp, Homo sapien
cataggtcagaaatcacggctggga

SEQ ID NO: 3715212 - DNA, 25 bp, Homo sapien
gactatagaggacagatctgaactg

SEQ ID NO: 3715213 - DNA, 25 bp, Homo sapien
tattagaagggtactagacagcaag

SEQ ID NO: 3715214 - DNA, 25 bp, Homo sapien
gaggaccctttaaagagtagcagga

SEQ ID NO: 3715215 - DNA, 25 bp, Homo sapien
tctactgcttgtaatcaaaggcttc

SEQ ID NO: 3715216 - DNA, 25 bp, Homo sapien
cataagctagctcacattggtttct

SEQ ID NO: 3715217 - DNA, 25 bp, Homo sapien
ggcaatctaaaccacaagaacagaa

SEQ ID NO: 3715218 - DNA, 25 bp, Homo sapien
tatcagtatcacttaaatgcccaga

SEQ ID NO: 3715219 - DNA, 25 bp, Homo sapien
gactgcaccaagaacaccatatgga

SEQ ID NO: 3715220 - DNA, 25 bp, Homo sapien
catatggacctagtaacacttcaga

SEQ ID NO: 3715221 - DNA, 25 bp, Homo sapien
tatgtgtactgaattgacttggaac

SEQ ID NO: 3715222 - DNA, 25 bp, Homo sapien
tccagaaaagctcccatatgtgagg

SEQ ID NO: 3715223 - DNA, 25 bp, Homo sapien
acacgagaagacaatggagtaacat

SEQ ID NO: 3715224 - DNA, 25 bp, Homo sapien
ttatatagagttctgaggtaaccca

SEQ ID NO: 3715225 - DNA, 25 bp, Homo sapien
tattcacaactctaaacacgagaag

SEQ ID NO: 3715226 - DNA, 25 bp, Homo sapien
agatccagaggccagacagagtagg

SEQ ID NO: 3715227 - DNA, 25 bp, Homo sapien
gctagatccagaggccagacagagt

SEQ ID NO: 3715228 - DNA, 25 bp, Homo sapien
cctttgggtgacagaaggctcaggc

SEQ ID NO: 3715229 - DNA, 25 bp, Homo sapien
tggaagataaagtgaggcctgagtg

SEQ ID NO: 3715230 - DNA, 25 bp, Homo sapien
taactggaactgtcaggaaaccagg

SEQ ID NO: 3715231 - DNA, 25 bp, Homo sapien
tttcagaatgactagccaagcagag

SEQ ID NO: 3715232 - DNA, 25 bp, Homo sapien
caagatgaaggcctcatgaagggtt

SEQ ID NO: 3715233 - DNA, 25 bp, Homo sapien
gaaggctctacaatccaacagtcag

SEQ ID NO: 3715234 - DNA, 25 bp, Homo sapien
actattactctatgtgattaccacg

SEQ ID NO: 3715235 - DNA, 25 bp, Homo sapien
ccctatgtctttcacaaggttgttg

SEQ ID NO: 3715236 - DNA, 25 bp, Homo sapien
gattaccacgtatgggacataacaa

SEQ ID NO: 3715237 - DNA, 25 bp, Homo sapien
caatatattgttgagacaggaatct

SEQ ID NO: 3715238 - DNA, 25 bp, Homo sapien
ctggtcatgttactttagacaagtc

SEQ ID NO: 3715239 - DNA, 25 bp, Homo sapien
catgttactttagacaagtctcaac

SEQ ID NO: 3715240 - DNA, 25 bp, Homo sapien
attcaagcacttactggtcatgtta

SEQ ID NO: 3715241 - DNA, 25 bp, Homo sapien
tcaagcacttactggtcatgttact

SEQ ID NO: 3715242 - DNA, 25 bp, Homo sapien
gaactcaagccagatgacagcaagg

SEQ ID NO: 3715243 - DNA, 25 bp, Homo sapien
ggaaaagcccttggcagattagaac

SEQ ID NO: 3715244 - DNA, 25 bp, Homo sapien
gaaacaaccaaagacggtatctgct

SEQ ID NO: 3715245 - DNA, 25 bp, Homo sapien
aaccacagttgggtaagtacgctca

SEQ ID NO: 3715246 - DNA, 25 bp, Homo sapien
aaaataacactaatctggaagtcag

SEQ ID NO: 3715247 - DNA, 25 bp, Homo sapien
aaataacactaatctggaagtcagg

SEQ ID NO: 3715248 - DNA, 25 bp, Homo sapien
aatttaaacaggaaacgatactgtg

SEQ ID NO: 3715249 - DNA, 25 bp, Homo sapien
caggatttttcccacaataactcac

SEQ ID NO: 3715250 - DNA, 25 bp, Homo sapien
cgatactgtgtagagacatcttcaa

SEQ ID NO: 3715251 - DNA, 25 bp, Homo sapien
catcttcaatatacaggatttttcc

SEQ ID NO: 3715252 - DNA, 25 bp, Homo sapien
aagcaatgtacactcctctacacag

SEQ ID NO: 3715253 - DNA, 25 bp, Homo sapien
cagcttacagtctttatactgatag

SEQ ID NO: 3715254 - DNA, 25 bp, Homo sapien
ggtgccgacctatcaactatctcat

SEQ ID NO: 3715255 - DNA, 25 bp, Homo sapien
cagacttatgaagcaatgtacactc

SEQ ID NO: 3715256 - DNA, 25 bp, Homo sapien
gttgtctcggcattttaaacagctg

SEQ ID NO: 3715257 - DNA, 25 bp, Homo sapien
gctatatcgagtgttgtctcggcat

SEQ ID NO: 3715258 - DNA, 25 bp, Homo sapien
catttgggctatatcgagtgttgtc

SEQ ID NO: 3715259 - DNA, 25 bp, Homo sapien
tgcaaatcatttgggctatatcgag

SEQ ID NO: 3715260 - DNA, 25 bp, Homo sapien
caaggatatgaaggtaattcgccat

SEQ ID NO: 3715261 - DNA, 25 bp, Homo sapien
tgcacatttcacaaggatatgaagg

SEQ ID NO: 3715262 - DNA, 25 bp, Homo sapien
taaagtgcttctatgggttcgtctg

SEQ ID NO: 3715263 - DNA, 25 bp, Homo sapien
tggtggcaccatagctacaatattg

SEQ ID NO: 3715264 - DNA, 25 bp, Homo sapien
tgtcttacaaggtgttctctcctgg

SEQ ID NO: 3715265 - DNA, 25 bp, Homo sapien
catcctgggtggagaacttacactt

SEQ ID NO: 3715266 - DNA, 25 bp, Homo sapien
aacgtcttccttgatgcacctattt

SEQ ID NO: 3715267 - DNA, 25 bp, Homo sapien
tcttccttgatgcacctattttata

SEQ ID NO: 3715268 - DNA, 25 bp, Homo sapien
cctgcagaagtctttgccattcttt

SEQ ID NO: 3715269 - DNA, 25 bp, Homo sapien
tcagtattagcttaagtcctgcaga

SEQ ID NO: 3715270 - DNA, 25 bp, Homo sapien
gtcacttccactgttaattttctta

SEQ ID NO: 3715271 - DNA, 25 bp, Homo sapien
tcacttccactgttaattttcttac

SEQ ID NO: 3715272 - DNA, 25 bp, Homo sapien
cttagtcacagttccacgagctggg

SEQ ID NO: 3715273 - DNA, 25 bp, Homo sapien
caattggtttacttcaggtggcaga

SEQ ID NO: 3715274 - DNA, 25 bp, Homo sapien
gcagggataccttgtgaattaacca

SEQ ID NO: 3715275 - DNA, 25 bp, Homo sapien
ggcaccctcggttttgacagcggaa

SEQ ID NO: 3715276 - DNA, 25 bp, Homo sapien
ggaaaagccgcaaagttctgatgga

SEQ ID NO: 3715277 - DNA, 25 bp, Homo sapien
aaagcctaggtctgctaaatccaaa

SEQ ID NO: 3715278 - DNA, 25 bp, Homo sapien
ttctgatggaatcttttgaaagcct

SEQ ID NO: 3715279 - DNA, 25 bp, Homo sapien
gaggttcttggtaactatccctaca

SEQ ID NO: 3715280 - DNA, 25 bp, Homo sapien
tctggtgcatctgcgtcaggatgat

SEQ ID NO: 3715281 - DNA, 25 bp, Homo sapien
acatgttccaatcccgagtagcttc

SEQ ID NO: 3715282 - DNA, 25 bp, Homo sapien
gaggtagtcttcacaatctggtaat

SEQ ID NO: 3715283 - DNA, 25 bp, Homo sapien
tctgcattatggtaactgaacccgt

SEQ ID NO: 3715284 - DNA, 25 bp, Homo sapien
taaaactctgttgggcatgtccctt

SEQ ID NO: 3715285 - DNA, 25 bp, Homo sapien
cagttctacgatgaaagagctctcc

SEQ ID NO: 3715286 - DNA, 25 bp, Homo sapien
taaggttttatgcactgcctctggg

SEQ ID NO: 3715287 - DNA, 25 bp, Homo sapien
tgcatgcactgaactaaactgaaag

SEQ ID NO: 3715288 - DNA, 25 bp, Homo sapien
ggcccatttgggacctactgttaca

SEQ ID NO: 3715289 - DNA, 25 bp, Homo sapien
tgctaacaatagtgttcaatccctg

SEQ ID NO: 3715290 - DNA, 25 bp, Homo sapien
caatccctgaagaacgaatttacct

SEQ ID NO: 3715291 - DNA, 25 bp, Homo sapien
cactaagaaagtagacaaactgcac

SEQ ID NO: 3715292 - DNA, 25 bp, Homo sapien
gaaggcctacgaagcttatttatct

SEQ ID NO: 3715293 - DNA, 25 bp, Homo sapien
taagaacctcgaactactgaaaatc

SEQ ID NO: 3715294 - DNA, 25 bp, Homo sapien
tctgcaatggcaataatgaaactct

SEQ ID NO: 3715295 - DNA, 25 bp, Homo sapien
gctatttacagcaggtgatgtctca

SEQ ID NO: 3715296 - DNA, 25 bp, Homo sapien
tgtaatcccactacaggagcggtac

SEQ ID NO: 3715297 - DNA, 25 bp, Homo sapien
cccactacaggagcggtacttgaac

SEQ ID NO: 3715298 - DNA, 25 bp, Homo sapien
ctacaggagcggtacttgaacccgg

SEQ ID NO: 3715299 - DNA, 25 bp, Homo sapien
taatcccactacaggagcggtactt

SEQ ID NO: 3715300 - DNA, 25 bp, Homo sapien
tatctattggaatgacctggcaact

SEQ ID NO: 3715301 - DNA, 25 bp, Homo sapien
tggattcgaggacttacacccgtgg

SEQ ID NO: 3715302 - DNA, 25 bp, Homo sapien
caatccaaacagctaggagcctgga

SEQ ID NO: 3715303 - DNA, 25 bp, Homo sapien
gaacctctgtacctttatgctatgg

SEQ ID NO: 3715304 - DNA, 25 bp, Homo sapien
cactggccaagtggttgaaccctgc

SEQ ID NO: 3715305 - DNA, 25 bp, Homo sapien
caattcccgtgtggtgagcaaaaaa

SEQ ID NO: 3715306 - DNA, 25 bp, Homo sapien
taaaggagcagatcgtagcacacca

SEQ ID NO: 3715307 - DNA, 25 bp, Homo sapien
tatttaagggtgcatcacaattccc

SEQ ID NO: 3715308 - DNA, 25 bp, Homo sapien
aatatcagcatatggccaaacacag

SEQ ID NO: 3715309 - DNA, 25 bp, Homo sapien
tatccctaaggcactgtacattttg

SEQ ID NO: 3715310 - DNA, 25 bp, Homo sapien
catgcagagcaaagtatgacccata

SEQ ID NO: 3715311 - DNA, 25 bp, Homo sapien
gcctgaaagacgtgtatgataccat

SEQ ID NO: 3715312 - DNA, 25 bp, Homo sapien
cagttcagaaaagtcactagacaac

SEQ ID NO: 3715313 - DNA, 25 bp, Homo sapien
gaaaagtcactagacaacaagtaca

SEQ ID NO: 3715314 - DNA, 25 bp, Homo sapien
gtcactagacaacaagtacaaaaca

SEQ ID NO: 3715315 - DNA, 25 bp, Homo sapien
cagaaaagtcactagacaacaagta

SEQ ID NO: 3715316 - DNA, 25 bp, Homo sapien
tttttagtggtatctcacatggttt

SEQ ID NO: 3715317 - DNA, 25 bp, Homo sapien
tatgagggttccaaactcttcctgg

SEQ ID NO: 3715318 - DNA, 25 bp, Homo sapien
gtatgagggttccaaactcttcctg

SEQ ID NO: 3715319 - DNA, 25 bp, Homo sapien
caatggtttcttagtgaattcccag

SEQ ID NO: 3715320 - DNA, 25 bp, Homo sapien
gtcccacattatacatgtgtctatg

SEQ ID NO: 3715321 - DNA, 25 bp, Homo sapien
tgtcctttagcagtcccctctgtat

SEQ ID NO: 3715322 - DNA, 25 bp, Homo sapien
tacacatatgttgcccttaatggtg

SEQ ID NO: 3715323 - DNA, 25 bp, Homo sapien
cccgcttgggcttcatgtagcttct

SEQ ID NO: 3715324 - DNA, 25 bp, Homo sapien
tttcccgcttgggcttcatgtagct

SEQ ID NO: 3715325 - DNA, 25 bp, Homo sapien
cttcatgcttttcccgcttgggctt

SEQ ID NO: 3715326 - DNA, 25 bp, Homo sapien
gcttcttggacctttaggtttatca

SEQ ID NO: 3715327 - DNA, 25 bp, Homo sapien
taagggcactaatcaagaccaatct

SEQ ID NO: 3715328 - DNA, 25 bp, Homo sapien
gattatgtcccctatacactgaaca

SEQ ID NO: 3715329 - DNA, 25 bp, Homo sapien
gcagtctagcttttctataagaggc

SEQ ID NO: 3715330 - DNA, 25 bp, Homo sapien
aagaagctgtcctatttcgaggtcc

SEQ ID NO: 3715331 - DNA, 25 bp, Homo sapien
aaaattaaacaggatggatcatttc

SEQ ID NO: 3715332 - DNA, 25 bp, Homo sapien
tgattttttgaacctgtagaaatat

SEQ ID NO: 3715333 - DNA, 25 bp, Homo sapien
taatataggtgttcttcacaaaatg

SEQ ID NO: 3715334 - DNA, 25 bp, Homo sapien
taagtaatactaaccataattatgt

SEQ ID NO: 3715335 - DNA, 25 bp, Homo sapien
caagcattgatctcactcaggattt

SEQ ID NO: 3715336 - DNA, 25 bp, Homo sapien
ggcaagcattgatctcactcaggat

SEQ ID NO: 3715337 - DNA, 25 bp, Homo sapien
aaggcaagcattgatctcactcagg

SEQ ID NO: 3715338 - DNA, 25 bp, Homo sapien
cattgatctcactcaggattttcta

SEQ ID NO: 3715339 - DNA, 25 bp, Homo sapien
ttttttcatagacaactggtggcta

SEQ ID NO: 3715340 - DNA, 25 bp, Homo sapien
ccaagattttagtccaggggcaaat

SEQ ID NO: 3715341 - DNA, 25 bp, Homo sapien
ggttcccagttcaagagagtcctct

SEQ ID NO: 3715342 - DNA, 25 bp, Homo sapien
tcttcttatagtacttatgaatgga

SEQ ID NO: 3715343 - DNA, 25 bp, Homo sapien
tatatgaatcggataagtcaggctc

SEQ ID NO: 3715344 - DNA, 25 bp, Homo sapien
gatacggcaaatatctggataattt

SEQ ID NO: 3715345 - DNA, 25 bp, Homo sapien
caggctcacagaacgtaactgccca

SEQ ID NO: 3715346 - DNA, 25 bp, Homo sapien
cttaaaaagaagatacggcaaatat

SEQ ID NO: 3715347 - DNA, 25 bp, Homo sapien
aatattttactgatcatgcatcctt

SEQ ID NO: 3715348 - DNA, 25 bp, Homo sapien
taaaacaacatatgggaagcaccag

SEQ ID NO: 3715349 - DNA, 25 bp, Homo sapien
ccagctatagtgtttggttctaaac

SEQ ID NO: 3715350 - DNA, 25 bp, Homo sapien
aataataagatcaagtaaaacaaca

SEQ ID NO: 3715351 - DNA, 25 bp, Homo sapien
cgaggctggatcctagagtctgata

SEQ ID NO: 3715352 - DNA, 25 bp, Homo sapien
caacgaagccatgtagtgtatcagg

SEQ ID NO: 3715353 - DNA, 25 bp, Homo sapien
tgggttctaacacagcactgtcgct

SEQ ID NO: 3715354 - DNA, 25 bp, Homo sapien
tacctctgccaagtaagtacaacga

SEQ ID NO: 3715355 - DNA, 25 bp, Homo sapien
ggcccgtgggttcagtctctatgta

SEQ ID NO: 3715356 - DNA, 25 bp, Homo sapien
tcaacagactggcaagtgcacagat

SEQ ID NO: 3715357 - DNA, 25 bp, Homo sapien
tatgactaatcaagacccaccaggg

SEQ ID NO: 3715358 - DNA, 25 bp, Homo sapien
cagtagagttcactatgggcttcaa

SEQ ID NO: 3715359 - DNA, 25 bp, Homo sapien
gagtggcctctactagcctaggaag

SEQ ID NO: 3715360 - DNA, 25 bp, Homo sapien
gaagtaagtacaacctgtgcagact

SEQ ID NO: 3715361 - DNA, 25 bp, Homo sapien
gacttcatggctacaagagcctcca

SEQ ID NO: 3715362 - DNA, 25 bp, Homo sapien
taggctatttctgaggcatcacccc

SEQ ID NO: 3715363 - DNA, 25 bp, Homo sapien
aagcacctgggtagttctcttcagc

SEQ ID NO: 3715364 - DNA, 25 bp, Homo sapien
ttcagctgccctcgcttcaaatgga

SEQ ID NO: 3715365 - DNA, 25 bp, Homo sapien
catattcaggtttcagtccgccatc

SEQ ID NO: 3715366 - DNA, 25 bp, Homo sapien
agagtgaaatatgccctgagtcctg

SEQ ID NO: 3715367 - DNA, 25 bp, Homo sapien
ctgcctcggcccagcgaatagctgg

SEQ ID NO: 3715368 - DNA, 25 bp, Homo sapien
gtgccctcttggccctggaagagct

SEQ ID NO: 3715369 - DNA, 25 bp, Homo sapien
tggtgatctggccgaaatatctgca

SEQ ID NO: 3715370 - DNA, 25 bp, Homo sapien
ctctggtgatctggccgaaatatct

SEQ ID NO: 3715371 - DNA, 25 bp, Homo sapien
tgatctggccgaaatatctgcatgc

SEQ ID NO: 3715372 - DNA, 25 bp, Homo sapien
ggcaggacttcagatttcacatcat

SEQ ID NO: 3715373 - DNA, 25 bp, Homo sapien
tcagatttcacatcatcttcatact

SEQ ID NO: 3715374 - DNA, 25 bp, Homo sapien
caggacttcagatttcacatcatct

SEQ ID NO: 3715375 - DNA, 25 bp, Homo sapien
ggacttcagatttcacatcatcttc

SEQ ID NO: 3715376 - DNA, 25 bp, Homo sapien
tgtgatgctggctgccgtcctctag

SEQ ID NO: 3715377 - DNA, 25 bp, Homo sapien
gagaaccctgaagtgtgatgctggc

SEQ ID NO: 3715378 - DNA, 25 bp, Homo sapien
agtccctgctccagatcaagggagc

SEQ ID NO: 3715379 - DNA, 25 bp, Homo sapien
ccctgaagtgtgatgctggctgccg

SEQ ID NO: 3715380 - DNA, 25 bp, Homo sapien
ccatcttgcggcacaccaatggatg

SEQ ID NO: 3715381 - DNA, 25 bp, Homo sapien
gatggactacccagagcagctgaga

SEQ ID NO: 3715382 - DNA, 25 bp, Homo sapien
gagcagctgagaagggttctttctc

SEQ ID NO: 3715383 - DNA, 25 bp, Homo sapien
gcacaccaatggatggactacccag

SEQ ID NO: 3715384 - DNA, 25 bp, Homo sapien
ttccctcttcacctcagctgacacc

SEQ ID NO: 3715385 - DNA, 25 bp, Homo sapien
tccctcttcacctcagctgacaccc

SEQ ID NO: 3715386 - DNA, 25 bp, Homo sapien
ccctcttcacctcagctgacaccca

SEQ ID NO: 3715387 - DNA, 25 bp, Homo sapien
cagaaaagtgtgtccaggtacaaaa

SEQ ID NO: 3715388 - DNA, 25 bp, Homo sapien
aagtgtgtccaggtacaaaaggtca

SEQ ID NO: 3715389 - DNA, 25 bp, Homo sapien
tgtccaggtacaaaaggtcacttcc

SEQ ID NO: 3715390 - DNA, 25 bp, Homo sapien
tgtgtccaggtacaaaaggtcactt

SEQ ID NO: 3715391 - DNA, 25 bp, Homo sapien
ccaacttcctgtggcagtttgccta

SEQ ID NO: 3715392 - DNA, 25 bp, Homo sapien
ctgtggcagtttgcctaaactggcc

SEQ ID NO: 3715393 - DNA, 25 bp, Homo sapien
aacttcctgtggcagtttgcctaaa

SEQ ID NO: 3715394 - DNA, 25 bp, Homo sapien
cttgccaacttcctgtggcagtttg

SEQ ID NO: 3715395 - DNA, 25 bp, Homo sapien
tctgactagcggctgggccatgtga

SEQ ID NO: 3715396 - DNA, 25 bp, Homo sapien
tcctgatttcctaaggccttgtgta

SEQ ID NO: 3715397 - DNA, 25 bp, Homo sapien
cttcacttctgggtggtggttctga

SEQ ID NO: 3715398 - DNA, 25 bp, Homo sapien
aaggccttgtgtatctgcttcttca

SEQ ID NO: 3715399 - DNA, 25 bp, Homo sapien
gagagtccagggatccgtttggaaa

SEQ ID NO: 3715400 - DNA, 25 bp, Homo sapien
gggataccatcgtccaatggagact

SEQ ID NO: 3715401 - DNA, 25 bp, Homo sapien
ctttgaagccgagggaatctgggtc

SEQ ID NO: 3715402 - DNA, 25 bp, Homo sapien
caaattatgactgaatgctgagcat

SEQ ID NO: 3715403 - DNA, 25 bp, Homo sapien
tattctttgccaggaagtgaaagtc

SEQ ID NO: 3715404 - DNA, 25 bp, Homo sapien
tttgccaggaagtgaaagtctttca

SEQ ID NO: 3715405 - DNA, 25 bp, Homo sapien
ggaagtgaaagtctttcatcaccac

SEQ ID NO: 3715406 - DNA, 25 bp, Homo sapien
tgccaggaagtgaaagtctttcatc

SEQ ID NO: 3715407 - DNA, 25 bp, Homo sapien
cgtttcaaggtgtagatctgggacc

SEQ ID NO: 3715408 - DNA, 25 bp, Homo sapien
ggtttttcaccgagcaccagcttcc

SEQ ID NO: 3715409 - DNA, 25 bp, Homo sapien
catcctcaaatgtgcgggcagggtt

SEQ ID NO: 3715410 - DNA, 25 bp, Homo sapien
tccatggttcagtggagaagtagcc

SEQ ID NO: 3715411 - DNA, 25 bp, Homo sapien
gcttcctgccaaagtgtgatgggga

SEQ ID NO: 3715412 - DNA, 25 bp, Homo sapien
tttatctctgttcagttcatttgtc

SEQ ID NO: 3715413 - DNA, 25 bp, Homo sapien
gtgctgccctggcaacagcttcctg

SEQ ID NO: 3715414 - DNA, 25 bp, Homo sapien
gggaatttttatctctgttcagttc

SEQ ID NO: 3715415 - DNA, 25 bp, Homo sapien
ctacacgaagggttttgatgtcatc

SEQ ID NO: 3715416 - DNA, 25 bp, Homo sapien
cacgaagggttttgatgtcatctca

SEQ ID NO: 3715417 - DNA, 25 bp, Homo sapien
ttttgatgtcatctcaccagcagac

SEQ ID NO: 3715418 - DNA, 25 bp, Homo sapien
gaagggttttgatgtcatctcacca

SEQ ID NO: 3715419 - DNA, 25 bp, Homo sapien
gcccatctggtggtgtctccagaag

SEQ ID NO: 3715420 - DNA, 25 bp, Homo sapien
tggctggcccatctggtggtgtctc

SEQ ID NO: 3715421 - DNA, 25 bp, Homo sapien
tggcccatctggtggtgtctccaga

SEQ ID NO: 3715422 - DNA, 25 bp, Homo sapien
gctggcccatctggtggtgtctcca

SEQ ID NO: 3715423 - DNA, 25 bp, Homo sapien
cgtctgccggggtctcttcttccga

SEQ ID NO: 3715424 - DNA, 25 bp, Homo sapien
gctcaagtgggacgctcgtggtgga

SEQ ID NO: 3715425 - DNA, 25 bp, Homo sapien
ttccgagggctcaagtgggacgctc

SEQ ID NO: 3715426 - DNA, 25 bp, Homo sapien
ctcttcttccgagggctcaagtggg

SEQ ID NO: 3715427 - DNA, 25 bp, Homo sapien
ggaacgctctgcgggtggttcccat

SEQ ID NO: 3715428 - DNA, 25 bp, Homo sapien
ctgaaccctttcctgcgggccagct

SEQ ID NO: 3715429 - DNA, 25 bp, Homo sapien
agctcattttcaaccctgaaccctt

SEQ ID NO: 3715430 - DNA, 25 bp, Homo sapien
ccatgaggaacgctctgcgggtggt

SEQ ID NO: 3715431 - DNA, 25 bp, Homo sapien
ttacaaagcaagatcgatgctgtcc

SEQ ID NO: 3715432 - DNA, 25 bp, Homo sapien
atttacaaagcaagatcgatgctgt

SEQ ID NO: 3715433 - DNA, 25 bp, Homo sapien
tttacaaagcaagatcgatgctgtc

SEQ ID NO: 3715434 - DNA, 25 bp, Homo sapien
attgtattcagtccccacttatctc

SEQ ID NO: 3715435 - DNA, 25 bp, Homo sapien
ggtgtcaactagtttcaatataatt

SEQ ID NO: 3715436 - DNA, 25 bp, Homo sapien
tcttttggtgtcaactagtttcaat

SEQ ID NO: 3715437 - DNA, 25 bp, Homo sapien
ttcagtccccacttatctcgttttc

SEQ ID NO: 3715438 - DNA, 25 bp, Homo sapien
cgagcagtattactaaggagaccca

SEQ ID NO: 3715439 - DNA, 25 bp, Homo sapien
gagcagtattactaaggagacccat

SEQ ID NO: 3715440 - DNA, 25 bp, Homo sapien
tgttctctgctacgatgtgggtgac

SEQ ID NO: 3715441 - DNA, 25 bp, Homo sapien
tcttatgcattcgatcagccaggag

SEQ ID NO: 3715442 - DNA, 25 bp, Homo sapien
tccagaacatccgaacccgagttgt

SEQ ID NO: 3715443 - DNA, 25 bp, Homo sapien
tgtactttctgtgcttgaagccact

SEQ ID NO: 3715444 - DNA, 25 bp, Homo sapien
gcaattggtggagtcttcggggggc

SEQ ID NO: 3715445 - DNA, 25 bp, Homo sapien
ggcctgggttggtgctatctgaata

SEQ ID NO: 3715446 - DNA, 25 bp, Homo sapien
tgctatctgaatagtctcttctcac

SEQ ID NO: 3715447 - DNA, 25 bp, Homo sapien
tgggttggtgctatctgaatagtct

SEQ ID NO: 3715448 - DNA, 25 bp, Homo sapien
ttcttctctgacacgcatactggga

SEQ ID NO: 3715449 - DNA, 25 bp, Homo sapien
tcttctctgacacgcatactgggag

SEQ ID NO: 3715450 - DNA, 25 bp, Homo sapien
gttcttctctgacacgcatactggg

SEQ ID NO: 3715451 - DNA, 25 bp, Homo sapien
ttctctgacacgcatactgggagat

SEQ ID NO: 3715452 - DNA, 25 bp, Homo sapien
tactgatgattgtgaatggcagaga

SEQ ID NO: 3715453 - DNA, 25 bp, Homo sapien
cagttttcagccagtatatcaaagg

SEQ ID NO: 3715454 - DNA, 25 bp, Homo sapien
ccccaggcagggaattccttctgtg

SEQ ID NO: 3715455 - DNA, 25 bp, Homo sapien
tcataaatgtcacacaggagtcttc

SEQ ID NO: 3715456 - DNA, 25 bp, Homo sapien
aggattgatatcgttcatcatttaa

SEQ ID NO: 3715457 - DNA, 25 bp, Homo sapien
gaaggattgatatcgttcatcattt

SEQ ID NO: 3715458 - DNA, 25 bp, Homo sapien
tttgaaggattgatatcgttcatca

SEQ ID NO: 3715459 - DNA, 25 bp, Homo sapien
gattgatatcgttcatcatttaaca

SEQ ID NO: 3715460 - DNA, 25 bp, Homo sapien
tttctgcattcgtgtaaatttcagg

SEQ ID NO: 3715461 - DNA, 25 bp, Homo sapien
acttctcagaagtcttcagccccac

SEQ ID NO: 3715462 - DNA, 25 bp, Homo sapien
tactttactcagagttctgaaaccc

SEQ ID NO: 3715463 - DNA, 25 bp, Homo sapien
ttgtccgaccttactttactcagag

SEQ ID NO: 3715464 - DNA, 25 bp, Homo sapien
cgaaagcatccggaagaaatgccca

SEQ ID NO: 3715465 - DNA, 25 bp, Homo sapien
gaaatgcccagacagcctctttaac

SEQ ID NO: 3715466 - DNA, 25 bp, Homo sapien
tctttaaccagcacactgacggcct

SEQ ID NO: 3715467 - DNA, 25 bp, Homo sapien
ctccggaaccctcctgtcatggtga

SEQ ID NO: 3715468 - DNA, 25 bp, Homo sapien
tcagccaagcgacaatttgaggaat

SEQ ID NO: 3715469 - DNA, 25 bp, Homo sapien
gctttgcaggtactcagggagcatg

SEQ ID NO: 3715470 - DNA, 25 bp, Homo sapien
cactgtaactatgtggatcaagggc

SEQ ID NO: 3715471 - DNA, 25 bp, Homo sapien
gctgtagaaagaagctggcaccaga

SEQ ID NO: 3715472 - DNA, 25 bp, Homo sapien
aaaaatctacatcatgccccatctt

SEQ ID NO: 3715473 - DNA, 25 bp, Homo sapien
tcatcactttctgtaaaagttgctc

SEQ ID NO: 3715474 - DNA, 25 bp, Homo sapien
cactttctgtaaaagttgctcttca

SEQ ID NO: 3715475 - DNA, 25 bp, Homo sapien
tttctgtaaaagttgctcttcatcc

SEQ ID NO: 3715476 - DNA, 25 bp, Homo sapien
ctgtaaaagttgctcttcatcctct

SEQ ID NO: 3715477 - DNA, 25 bp, Homo sapien
taaatccacacggatggccttccag

SEQ ID NO: 3715478 - DNA, 25 bp, Homo sapien
cactgtccactctttgacgaggcaa

SEQ ID NO: 3715479 - DNA, 25 bp, Homo sapien
aaagcatcaaccttcctgctaggca

SEQ ID NO: 3715480 - DNA, 25 bp, Homo sapien
tttcaaatgttgactccacaaggtc

SEQ ID NO: 3715481 - DNA, 25 bp, Homo sapien
cttggtcttgtcatataaagcatgg

SEQ ID NO: 3715482 - DNA, 25 bp, Homo sapien
taaagcatggttatccagaatcatc

SEQ ID NO: 3715483 - DNA, 25 bp, Homo sapien
tccgctcatgtgtggcatagcgccg

SEQ ID NO: 3715484 - DNA, 25 bp, Homo sapien
catagcgccggaggtctctctcaaa

SEQ ID NO: 3715485 - DNA, 25 bp, Homo sapien
gaaactgcgagtctgtggaaatctt

SEQ ID NO: 3715486 - DNA, 25 bp, Homo sapien
gacttgttctggaagcccaattagc

SEQ ID NO: 3715487 - DNA, 25 bp, Homo sapien
aaatctctcgaattgcattctgggc

SEQ ID NO: 3715488 - DNA, 25 bp, Homo sapien
tcttgctgccctcaactatgatgaa

SEQ ID NO: 3715489 - DNA, 25 bp, Homo sapien
tcccagatgcgcaaaaatttcttct

SEQ ID NO: 3715490 - DNA, 25 bp, Homo sapien
atataatccaatcccagatgcgcaa

SEQ ID NO: 3715491 - DNA, 25 bp, Homo sapien
tttcccacggttcaatataatccaa

SEQ ID NO: 3715492 - DNA, 25 bp, Homo sapien
catttctttcccacggttcaatata

SEQ ID NO: 3715493 - DNA, 25 bp, Homo sapien
tacactgcgaacaaagtgggctttg

SEQ ID NO: 3715494 - DNA, 25 bp, Homo sapien
aataaccccaaactctcctatggca

SEQ ID NO: 3715495 - DNA, 25 bp, Homo sapien
cagtcataaacatggcctattagaa

SEQ ID NO: 3715496 - DNA, 25 bp, Homo sapien
cctgaatgagccaccagtgacaaca

SEQ ID NO: 3715497 - DNA, 25 bp, Homo sapien
ggcccatcacatcaagagaatgcag

SEQ ID NO: 3715498 - DNA, 25 bp, Homo sapien
agcaggtccatagacactccaggtt

SEQ ID NO: 3715499 - DNA, 25 bp, Homo sapien
gttatcttggcccatcacatcaaga

SEQ ID NO: 3715500 - DNA, 25 bp, Homo sapien
gctgttggaacccagcaggtccata

SEQ ID NO: 3715501 - DNA, 25 bp, Homo sapien
tcattaggaataactttgtgataca

SEQ ID NO: 3715502 - DNA, 25 bp, Homo sapien
gatacatggcattttagagaatcct

SEQ ID NO: 3715503 - DNA, 25 bp, Homo sapien
tcagcagaaaactggtgtaaccctt

SEQ ID NO: 3715504 - DNA, 25 bp, Homo sapien
cctgtcctgtttggcgttacataaa

SEQ ID NO: 3715505 - DNA, 25 bp, Homo sapien
ctgcagctttgtcagttaactgttc

SEQ ID NO: 3715506 - DNA, 25 bp, Homo sapien
ctctgcagctttgtcagttaactgt

SEQ ID NO: 3715507 - DNA, 25 bp, Homo sapien
tctgcagctttgtcagttaactgtt

SEQ ID NO: 3715508 - DNA, 25 bp, Homo sapien
gatggaggtatagccaagaaagcag

SEQ ID NO: 3715509 - DNA, 25 bp, Homo sapien
tctttgctgagatggaggtatagcc

SEQ ID NO: 3715510 - DNA, 25 bp, Homo sapien
ctgtggcttctttgctgagatggag

SEQ ID NO: 3715511 - DNA, 25 bp, Homo sapien
ttgctgagatggaggtatagccaag

SEQ ID NO: 3715512 - DNA, 25 bp, Homo sapien
gattacatgtgacctaaaggcccag

SEQ ID NO: 3715513 - DNA, 25 bp, Homo sapien
cagacgggccctctttgaaatgcac

SEQ ID NO: 3715514 - DNA, 25 bp, Homo sapien
gtcagaaaggtaagagtcaagggcc

SEQ ID NO: 3715515 - DNA, 25 bp, Homo sapien
gacagttcctatcttgctcgccagc

SEQ ID NO: 3715516 - DNA, 25 bp, Homo sapien
cagcttctctgtggactcaggcctc

SEQ ID NO: 3715517 - DNA, 25 bp, Homo sapien
gcttctctgtggactcaggcctcat

SEQ ID NO: 3715518 - DNA, 25 bp, Homo sapien
gggacagcttctctgtggactcagg

SEQ ID NO: 3715519 - DNA, 25 bp, Homo sapien
cagggacagcttctctgtggactca

SEQ ID NO: 3715520 - DNA, 25 bp, Homo sapien
aatgttccaacaatcgattacgacg

SEQ ID NO: 3715521 - DNA, 25 bp, Homo sapien
cgtcgtaatcgattgttggaacatt

SEQ ID NO: 3715522 - DNA, 25 bp, Homo sapien
attactctgaaatgaacgttgggtc

SEQ ID NO: 3715523 - DNA, 25 bp, Homo sapien
ctgatgggccaggaccggccccttt

SEQ ID NO: 3715524 - DNA, 25 bp, Homo sapien
acgttgggtcttgagagctggcttc

SEQ ID NO: 3715525 - DNA, 25 bp, Homo sapien
ttgctgcgttcgtttgctttcctgc

SEQ ID NO: 3715526 - DNA, 25 bp, Homo sapien
tttctgccggagctgtttataccaa

SEQ ID NO: 3715527 - DNA, 25 bp, Homo sapien
tctgccggagctgtttataccaagg

SEQ ID NO: 3715528 - DNA, 25 bp, Homo sapien
ccggagctgtttataccaaggtctg

SEQ ID NO: 3715529 - DNA, 25 bp, Homo sapien
tgatgatggtagtggagttgccatt

SEQ ID NO: 3715530 - DNA, 25 bp, Homo sapien
tacactctttggttcgtataggcca

SEQ ID NO: 3715531 - DNA, 25 bp, Homo sapien
tatgagcatttcctaaaagccatct

SEQ ID NO: 3715532 - DNA, 25 bp, Homo sapien
gaaacaattattgcctgatgaccac

SEQ ID NO: 3715533 - DNA, 25 bp, Homo sapien
cagtgtgaggaataactctagttct

SEQ ID NO: 3715534 - DNA, 25 bp, Homo sapien
caggaaaagctacataccgaagggc

SEQ ID NO: 3715535 - DNA, 25 bp, Homo sapien
gtgtcttagtgcttcattctattgg

SEQ ID NO: 3715536 - DNA, 25 bp, Homo sapien
taagtttagatttcaccgtgtctta

SEQ ID NO: 3715537 - DNA, 25 bp, Homo sapien
tggaacatgtaataaataggagtag

SEQ ID NO: 3715538 - DNA, 25 bp, Homo sapien
caaatagtttagctccctagcgctc

SEQ ID NO: 3715539 - DNA, 25 bp, Homo sapien
cctagcgctcagttgtagaatagaa

SEQ ID NO: 3715540 - DNA, 25 bp, Homo sapien
ggtgatatccgaacctagtgaatgg

SEQ ID NO: 3715541 - DNA, 25 bp, Homo sapien
tgttgggctcctagattgtactggg

SEQ ID NO: 3715542 - DNA, 25 bp, Homo sapien
tggacagtaaggttttgtcttaata

SEQ ID NO: 3715543 - DNA, 25 bp, Homo sapien
gaatcttgcaggtaagatgtagggt

SEQ ID NO: 3715544 - DNA, 25 bp, Homo sapien
ccaatacatagtctgtctgatggga

SEQ ID NO: 3715545 - DNA, 25 bp, Homo sapien
tctttctactaaattgagctctatt

SEQ ID NO: 3715546 - DNA, 25 bp, Homo sapien
taacgtaggtgtagattcccaaatg

SEQ ID NO: 3715547 - DNA, 25 bp, Homo sapien
gtccagaaggcaaaattaccgaatg

SEQ ID NO: 3715548 - DNA, 25 bp, Homo sapien
gcatttggatgtacagatcgactac

SEQ ID NO: 3715549 - DNA, 25 bp, Homo sapien
tgccattgtcgacctattgtgggac

SEQ ID NO: 3715550 - DNA, 25 bp, Homo sapien
ttattgttgtagataagggaggccc

SEQ ID NO: 3715551 - DNA, 25 bp, Homo sapien
gggaggccctcaacatggagtaaat

SEQ ID NO: 3715552 - DNA, 25 bp, Homo sapien
ctctgaacagtgactagaggaatag

SEQ ID NO: 3715553 - DNA, 25 bp, Homo sapien
taagcaccaataggcagtacttgat

SEQ ID NO: 3715554 - DNA, 25 bp, Homo sapien
gggcacctgggatttttcttcacca

SEQ ID NO: 3715555 - DNA, 25 bp, Homo sapien
tcttcaccagtgacttcatgggcat

SEQ ID NO: 3715556 - DNA, 25 bp, Homo sapien
tctggttgaagcaggggtaagggca

SEQ ID NO: 3715557 - DNA, 25 bp, Homo sapien
gaaactccaatgtgtaactgttgaa

SEQ ID NO: 3715558 - DNA, 25 bp, Homo sapien
tccaggaccttagccagagacttca

SEQ ID NO: 3715559 - DNA, 25 bp, Homo sapien
cagatacttgggttactggttgtac

SEQ ID NO: 3715560 - DNA, 25 bp, Homo sapien
atctagtttgaagccagtggtatcc

SEQ ID NO: 3715561 - DNA, 25 bp, Homo sapien
tgtcctcagtgcactataatgctgt

SEQ ID NO: 3715562 - DNA, 25 bp, Homo sapien
tgatcatctttgttggcctttagtt

SEQ ID NO: 3715563 - DNA, 25 bp, Homo sapien
tggcctttagttcacaactgaaaag

SEQ ID NO: 3715564 - DNA, 25 bp, Homo sapien
cgttcttaaagataattggtgctca

SEQ ID NO: 3715565 - DNA, 25 bp, Homo sapien
ctcatgtccatgtccatcgaatctt

SEQ ID NO: 3715566 - DNA, 25 bp, Homo sapien
gcttcaacaatatgcaattcatcct

SEQ ID NO: 3715567 - DNA, 25 bp, Homo sapien
tggactgccttcataattcattgcc

SEQ ID NO: 3715568 - DNA, 25 bp, Homo sapien
gccttcataattcattgcctctgct

SEQ ID NO: 3715569 - DNA, 25 bp, Homo sapien
atgcaattcatcctttgcaccagcc

SEQ ID NO: 3715570 - DNA, 25 bp, Homo sapien
gagagactgtgtttgtactaaatca

SEQ ID NO: 3715571 - DNA, 25 bp, Homo sapien
aaacttttcgctggatccttggcta

SEQ ID NO: 3715572 - DNA, 25 bp, Homo sapien
gaaatgaagcagtcgtccttaccta

SEQ ID NO: 3715573 - DNA, 25 bp, Homo sapien
taccttcggtcacagccagaaactt

SEQ ID NO: 3715574 - DNA, 25 bp, Homo sapien
gatggatgcatcgtgattacccggc

SEQ ID NO: 3715575 - DNA, 25 bp, Homo sapien
cgcttctgcccagaccggattaaaa

SEQ ID NO: 3715576 - DNA, 25 bp, Homo sapien
ccggcagccactaaccaggaaatat

SEQ ID NO: 3715577 - DNA, 25 bp, Homo sapien
gaagggttgaggttcatccaccgcg

SEQ ID NO: 3715578 - DNA, 25 bp, Homo sapien
cctggcggagcaggaaccttgggag

SEQ ID NO: 3715579 - DNA, 25 bp, Homo sapien
ctggagtgcccggcggcccggtggt

SEQ ID NO: 3715580 - DNA, 25 bp, Homo sapien
ctccttccggttgggcctggcggag

SEQ ID NO: 3715581 - DNA, 25 bp, Homo sapien
gtggtgccccactgcggcccgagga

SEQ ID NO: 3715582 - DNA, 25 bp, Homo sapien
ccccagttgcccactgaggcaggcc

SEQ ID NO: 3715583 - DNA, 25 bp, Homo sapien
cagttgcccactgaggcaggcccca

SEQ ID NO: 3715584 - DNA, 25 bp, Homo sapien
cccagttgcccactgaggcaggccc

SEQ ID NO: 3715585 - DNA, 25 bp, Homo sapien
agttgcccactgaggcaggccccac

SEQ ID NO: 3715586 - DNA, 25 bp, Homo sapien
aggcagcaggtcagacgatcggccc

SEQ ID NO: 3715587 - DNA, 25 bp, Homo sapien
ggcttcggccttgcggtccaggcta

SEQ ID NO: 3715588 - DNA, 25 bp, Homo sapien
acgatcggccccatttggcagccag

SEQ ID NO: 3715589 - DNA, 25 bp, Homo sapien
tgatctgatccctcaagttccggag

SEQ ID NO: 3715590 - DNA, 25 bp, Homo sapien
ggagcccgtgattcattcacagcgg

SEQ ID NO: 3715591 - DNA, 25 bp, Homo sapien
tcctaacggtgattacaggagcccg

SEQ ID NO: 3715592 - DNA, 25 bp, Homo sapien
catccaaccctgtacgagtttaaca

SEQ ID NO: 3715593 - DNA, 25 bp, Homo sapien
acagcggcagacgagcgccaggaaa

SEQ ID NO: 3715594 - DNA, 25 bp, Homo sapien
ggcctgtgtaaatggtggtgccaca

SEQ ID NO: 3715595 - DNA, 25 bp, Homo sapien
atttatgactgggaagaggagaccc

SEQ ID NO: 3715596 - DNA, 25 bp, Homo sapien
taaacgggaggaagatcagtcagtg

SEQ ID NO: 3715597 - DNA, 25 bp, Homo sapien
gaaacaggatctctgctccgaggag

SEQ ID NO: 3715598 - DNA, 25 bp, Homo sapien
tgccatcctttttggtgtcagggaa

SEQ ID NO: 3715599 - DNA, 25 bp, Homo sapien
gaaaagaggctgtatagccactggg

SEQ ID NO: 3715600 - DNA, 25 bp, Homo sapien
tcaggcacctaggatctttgaagcc

SEQ ID NO: 3715601 - DNA, 25 bp, Homo sapien
tgagccctgttttgtcctgttgagg

SEQ ID NO: 3715602 - DNA, 25 bp, Homo sapien
gttggccactcgtccatgcagacaa

SEQ ID NO: 3715603 - DNA, 25 bp, Homo sapien
aattttgatgttggtatgcttgccc

SEQ ID NO: 3715604 - DNA, 25 bp, Homo sapien
aattaattaccttgtacaggacctg

SEQ ID NO: 3715605 - DNA, 25 bp, Homo sapien
tattggccatgtccatcacgagagt

SEQ ID NO: 3715606 - DNA, 25 bp, Homo sapien
taaagcctattaccagccaatgttg

SEQ ID NO: 3715607 - DNA, 25 bp, Homo sapien
gaatttgctgcatgccaagaagtat

SEQ ID NO: 3715608 - DNA, 25 bp, Homo sapien
gccaagaagtatgttgaattcatgt

SEQ ID NO: 3715609 - DNA, 25 bp, Homo sapien
cccatggataccaaagtacgactgt

SEQ ID NO: 3715610 - DNA, 25 bp, Homo sapien
taccaccatgctcagtaagtccatt

SEQ ID NO: 3715611 - DNA, 25 bp, Homo sapien
cagcctgatttctagaagaggttat

SEQ ID NO: 3715612 - DNA, 25 bp, Homo sapien
tgtatttgctagttcagcctgattt

SEQ ID NO: 3715613 - DNA, 25 bp, Homo sapien
agtctttatgtatttgctagttcag

SEQ ID NO: 3715614 - DNA, 25 bp, Homo sapien
ttatgtatttgctagttcagcctga

SEQ ID NO: 3715615 - DNA, 25 bp, Homo sapien
tgccaaaaggatgaagacttaatcg

SEQ ID NO: 3715616 - DNA, 25 bp, Homo sapien
tgggcttgcctcgaagattttatta

SEQ ID NO: 3715617 - DNA, 25 bp, Homo sapien
cattctcattgctgataatgctgca

SEQ ID NO: 3715618 - DNA, 25 bp, Homo sapien
gcatgactgttgaccttaagatcca

SEQ ID NO: 3715619 - DNA, 25 bp, Homo sapien
tggagatacccctcctcagataagg

SEQ ID NO: 3715620 - DNA, 25 bp, Homo sapien
tattacagtcaaggatggagatacc

SEQ ID NO: 3715621 - DNA, 25 bp, Homo sapien
agaactctgcttggtgcatagggca

SEQ ID NO: 3715622 - DNA, 25 bp, Homo sapien
tccagacttggagatcacggtccca

SEQ ID NO: 3715623 - DNA, 25 bp, Homo sapien
ccctgcttaccctcagagatcagat

SEQ ID NO: 3715624 - DNA, 25 bp, Homo sapien
cttaccctcagagatcagatgggat

SEQ ID NO: 3715625 - DNA, 25 bp, Homo sapien
cgaccctgcttaccctcagagatca

SEQ ID NO: 3715626 - DNA, 25 bp, Homo sapien
tgcttaccctcagagatcagatggg

SEQ ID NO: 3715627 - DNA, 25 bp, Homo sapien
agtggtagacaaaccacagcctggc

SEQ ID NO: 3715628 - DNA, 25 bp, Homo sapien
aaagcagtggtagacaaaccacagc

SEQ ID NO: 3715629 - DNA, 25 bp, Homo sapien
ttcatgtcacaagagcagttgagta

SEQ ID NO: 3715630 - DNA, 25 bp, Homo sapien
gttgagtacctgcaacagactttat

SEQ ID NO: 3715631 - DNA, 25 bp, Homo sapien
attattattatcagcttcaacagac

SEQ ID NO: 3715632 - DNA, 25 bp, Homo sapien
gttattattattatcagcttcaaca

SEQ ID NO: 3715633 - DNA, 25 bp, Homo sapien
tattattattatcagcttcaacaga

SEQ ID NO: 3715634 - DNA, 25 bp, Homo sapien
ttgttattattattatcagcttcaa

SEQ ID NO: 3715635 - DNA, 25 bp, Homo sapien
catcctttcagctggtcggaatgcg

SEQ ID NO: 3715636 - DNA, 25 bp, Homo sapien
cagatgcagcctttcacggtgaggg

SEQ ID NO: 3715637 - DNA, 25 bp, Homo sapien
tcggaatgcgaagggtcagcctaag

SEQ ID NO: 3715638 - DNA, 25 bp, Homo sapien
tttatgtggcctgccccagacaaag

SEQ ID NO: 3715639 - DNA, 25 bp, Homo sapien
tttcatcaacttcaaaaaatttctc

SEQ ID NO: 3715640 - DNA, 25 bp, Homo sapien
ctcttttgcaaaatctagaattacc

SEQ ID NO: 3715641 - DNA, 25 bp, Homo sapien
tccaacatcactttcatcaacttca

SEQ ID NO: 3715642 - DNA, 25 bp, Homo sapien
acttgtgatacagttttccaacatc

SEQ ID NO: 3715643 - DNA, 25 bp, Homo sapien
tccattagggctaggatcagggtga

SEQ ID NO: 3715644 - DNA, 25 bp, Homo sapien
ggagggacctgacatctgtgttacc

SEQ ID NO: 3715645 - DNA, 25 bp, Homo sapien
tgtgcagcttccctataaggcagat

SEQ ID NO: 3715646 - DNA, 25 bp, Homo sapien
gagggcctcctgtcttgtagtccaa

SEQ ID NO: 3715647 - DNA, 25 bp, Homo sapien
aagcttacacttggccttgcttctc

SEQ ID NO: 3715648 - DNA, 25 bp, Homo sapien
gaaagcttacacttggccttgcttc

SEQ ID NO: 3715649 - DNA, 25 bp, Homo sapien
tagaaagcttacacttggccttgct

SEQ ID NO: 3715650 - DNA, 25 bp, Homo sapien
gcctagaaagcttacacttggcctt

SEQ ID NO: 3715651 - DNA, 25 bp, Homo sapien
tgcttggttcagtctgtcgtttaca

SEQ ID NO: 3715652 - DNA, 25 bp, Homo sapien
tgaatggtttttatgacagttaccc

SEQ ID NO: 3715653 - DNA, 25 bp, Homo sapien
tagtcgtatggagaatgtgtaccct

SEQ ID NO: 3715654 - DNA, 25 bp, Homo sapien
tggtttcagcgccattttgcagatg

SEQ ID NO: 3715655 - DNA, 25 bp, Homo sapien
cccccgccttctcgctgcccctgag

SEQ ID NO: 3715656 - DNA, 25 bp, Homo sapien
gcccccgccttctcgctgcccctga

SEQ ID NO: 3715657 - DNA, 25 bp, Homo sapien
cactgctccaccttcacattttgtc

SEQ ID NO: 3715658 - DNA, 25 bp, Homo sapien
gacacactgctccaccttcacattt

SEQ ID NO: 3715659 - DNA, 25 bp, Homo sapien
acactgctccaccttcacattttgt

SEQ ID NO: 3715660 - DNA, 25 bp, Homo sapien
ggtgacacactgctccaccttcaca

SEQ ID NO: 3715661 - DNA, 25 bp, Homo sapien
ctttggatggatcatgagcatccat

SEQ ID NO: 3715662 - DNA, 25 bp, Homo sapien
tatgaaggtactccactttggatgg

SEQ ID NO: 3715663 - DNA, 25 bp, Homo sapien
ctctatgaaggtactccactttgga

SEQ ID NO: 3715664 - DNA, 25 bp, Homo sapien
cactttggatggatcatgagcatcc

SEQ ID NO: 3715665 - DNA, 25 bp, Homo sapien
ctaaggaaaccaagcaccttcttca

SEQ ID NO: 3715666 - DNA, 25 bp, Homo sapien
cccatgagaatctgggcctacccat

SEQ ID NO: 3715667 - DNA, 25 bp, Homo sapien
gagaatctgggcctacccatatggc

SEQ ID NO: 3715668 - DNA, 25 bp, Homo sapien
gcctacccatatggccagctcttgg

SEQ ID NO: 3715669 - DNA, 25 bp, Homo sapien
atgcgtaggaggacccccatgagaa

SEQ ID NO: 3715670 - DNA, 25 bp, Homo sapien
tagtatatgggctgccgcagtgagc

SEQ ID NO: 3715671 - DNA, 25 bp, Homo sapien
tatatgggctgccgcagtgagcact

SEQ ID NO: 3715672 - DNA, 25 bp, Homo sapien
caattttagtatatgggctgccgca

SEQ ID NO: 3715673 - DNA, 25 bp, Homo sapien
attttagtatatgggctgccgcagt

SEQ ID NO: 3715674 - DNA, 25 bp, Homo sapien
agagcagacagccctttactgccat

SEQ ID NO: 3715675 - DNA, 25 bp, Homo sapien
ctgggtcttcagcagttagacaagt

SEQ ID NO: 3715676 - DNA, 25 bp, Homo sapien
gagagcagacagccctttactgcca

SEQ ID NO: 3715677 - DNA, 25 bp, Homo sapien
cctgggtcttcagcagttagacaag

SEQ ID NO: 3715678 - DNA, 25 bp, Homo sapien
ttccaggcgaatctttgcttttcta

SEQ ID NO: 3715679 - DNA, 25 bp, Homo sapien
tgcttttctatgaatgagtgggtgc

SEQ ID NO: 3715680 - DNA, 25 bp, Homo sapien
ctatgttttccaggcgaatctttgc

SEQ ID NO: 3715681 - DNA, 25 bp, Homo sapien
ctatgaatgagtgggtgcctaagtt

SEQ ID NO: 3715682 - DNA, 25 bp, Homo sapien
gcagtacctgtttagccacgatggc

SEQ ID NO: 3715683 - DNA, 25 bp, Homo sapien
tccggcccagcagtacctgtttagc

SEQ ID NO: 3715684 - DNA, 25 bp, Homo sapien
gagatggcctcgaccatcaagcacc

SEQ ID NO: 3715685 - DNA, 25 bp, Homo sapien
gcccagcagtacctgtttagccacg

SEQ ID NO: 3715686 - DNA, 25 bp, Homo sapien
tgatgccttcacagcgtacaaccac

SEQ ID NO: 3715687 - DNA, 25 bp, Homo sapien
aatgttgatgccttcacagcgtaca

SEQ ID NO: 3715688 - DNA, 25 bp, Homo sapien
ttgatgccttcacagcgtacaacca

SEQ ID NO: 3715689 - DNA, 25 bp, Homo sapien
tgttgatgccttcacagcgtacaac

SEQ ID NO: 3715690 - DNA, 25 bp, Homo sapien
tggggcagcatacctcgcacggtcc

SEQ ID NO: 3715691 - DNA, 25 bp, Homo sapien
aacaccttgagacggtccagagcgg

SEQ ID NO: 3715692 - DNA, 25 bp, Homo sapien
tacctcgcacggtccgccagaagat

SEQ ID NO: 3715693 - DNA, 25 bp, Homo sapien
agcatacctcgcacggtccgccaga

SEQ ID NO: 3715694 - DNA, 25 bp, Homo sapien
ccacgttcttctcggcctgtttccg

SEQ ID NO: 3715695 - DNA, 25 bp, Homo sapien
ttctccacgttcttctcggcctgtt

SEQ ID NO: 3715696 - DNA, 25 bp, Homo sapien
cttcttccggtagtggatcttggct

SEQ ID NO: 3715697 - DNA, 25 bp, Homo sapien
tcttctcggcctgtttccgtagcct

SEQ ID NO: 3715698 - DNA, 25 bp, Homo sapien
tgttcccaggatgcacatatgtacc

SEQ ID NO: 3715699 - DNA, 25 bp, Homo sapien
cacagagatgtgtaatcgtcaccac

SEQ ID NO: 3715700 - DNA, 25 bp, Homo sapien
cacaggattgcataaagtaagagtc

SEQ ID NO: 3715701 - DNA, 25 bp, Homo sapien
aagaacctttgcaccctttagccat

SEQ ID NO: 3715702 - DNA, 25 bp, Homo sapien
tcctgctgtgcgtgacattactcct

SEQ ID NO: 3715703 - DNA, 25 bp, Homo sapien
gaagacaagcctggtacaaggaact

SEQ ID NO: 3715704 - DNA, 25 bp, Homo sapien
catttatcactagtccggctgaggc

SEQ ID NO: 3715705 - DNA, 25 bp, Homo sapien
catgctgtcttattcccctgggaag

SEQ ID NO: 3715706 - DNA, 25 bp, Homo sapien
gtggttccagcaacctagtttctca

SEQ ID NO: 3715707 - DNA, 25 bp, Homo sapien
cttcttttagaatgtagcctccact

SEQ ID NO: 3715708 - DNA, 25 bp, Homo sapien
tcttttgtccctggataaaacagaa

SEQ ID NO: 3715709 - DNA, 25 bp, Homo sapien
tgtggcatgtaccacattgataaac

SEQ ID NO: 3715710 - DNA, 25 bp, Homo sapien
ttggccttgcccagaagatgtctga

SEQ ID NO: 3715711 - DNA, 25 bp, Homo sapien
gccttgcccagaagatgtctgaacc

SEQ ID NO: 3715712 - DNA, 25 bp, Homo sapien
ttttggccttgcccagaagatgtct

SEQ ID NO: 3715713 - DNA, 25 bp, Homo sapien
cccttttggccttgcccagaagatg

SEQ ID NO: 3715714 - DNA, 25 bp, Homo sapien
aggttttcagattgggtattcagtc

SEQ ID NO: 3715715 - DNA, 25 bp, Homo sapien
tcagattgggtattcagtctcctac

SEQ ID NO: 3715716 - DNA, 25 bp, Homo sapien
ttttcagattgggtattcagtctcc

SEQ ID NO: 3715717 - DNA, 25 bp, Homo sapien
aaaggttttcagattgggtattcag

SEQ ID NO: 3715718 - DNA, 25 bp, Homo sapien
gctgctatgaacttctccgtcgaaa

SEQ ID NO: 3715719 - DNA, 25 bp, Homo sapien
taaattcccggatgccggtggatgc

SEQ ID NO: 3715720 - DNA, 25 bp, Homo sapien
taagtcattgggagacatcgccaac

SEQ ID NO: 3715721 - DNA, 25 bp, Homo sapien
cggtggatgcactgacctctaagat

SEQ ID NO: 3715722 - DNA, 25 bp, Homo sapien
tgtggcgccacgaatccagttcttg

SEQ ID NO: 3715723 - DNA, 25 bp, Homo sapien
cgtctctcaacggagcattgctgcc

SEQ ID NO: 3715724 - DNA, 25 bp, Homo sapien
cacagtgaatgagcttgtggcgcca

SEQ ID NO: 3715725 - DNA, 25 bp, Homo sapien
gaatccagttcttgccgaaagccgc

SEQ ID NO: 3715726 - DNA, 25 bp, Homo sapien
gcgcgtgcacgcagacccgggggcg

SEQ ID NO: 3715727 - DNA, 25 bp, Homo sapien
gcccgccgcgcgtgcacgcagaccc

SEQ ID NO: 3715728 - DNA, 25 bp, Homo sapien
cgccgcgcgtgcacgcagacccggg

SEQ ID NO: 3715729 - DNA, 25 bp, Homo sapien
gtgggggccgagcacgcccgcgccc

SEQ ID NO: 3715730 - DNA, 25 bp, Homo sapien
ctcacgcttcgcacacgcccgagcg

SEQ ID NO: 3715731 - DNA, 25 bp, Homo sapien
accgccgcccgctgaggaagtgcag

SEQ ID NO: 3715732 - DNA, 25 bp, Homo sapien
caccccacttggctcggtcaggcgc

SEQ ID NO: 3715733 - DNA, 25 bp, Homo sapien
acttggctcggtcaggcgcacccgg

SEQ ID NO: 3715734 - DNA, 25 bp, Homo sapien
acccggggactgtgacagctccagc

SEQ ID NO: 3715735 - DNA, 25 bp, Homo sapien
aaatatatgagttaagcccttatgg

SEQ ID NO: 3715736 - DNA, 25 bp, Homo sapien
gttaaatatatgagttaagccctta

SEQ ID NO: 3715737 - DNA, 25 bp, Homo sapien
tatatgagttaagcccttatggtcc

SEQ ID NO: 3715738 - DNA, 25 bp, Homo sapien
atgagttaagcccttatggtcccgc

SEQ ID NO: 3715739 - DNA, 25 bp, Homo sapien
gcaccgaagcaaagacggggaagta

SEQ ID NO: 3715740 - DNA, 25 bp, Homo sapien
acacaccagcagcaccgaagcaaag

SEQ ID NO: 3715741 - DNA, 25 bp, Homo sapien
ggcgtgggggacagcggacgacgag

SEQ ID NO: 3715742 - DNA, 25 bp, Homo sapien
acagcggacgacgagagggcatctc

SEQ ID NO: 3715743 - DNA, 25 bp, Homo sapien
gattctgccgggaaagacctggttc

SEQ ID NO: 3715744 - DNA, 25 bp, Homo sapien
gggcccaagcgaacggatagactct

SEQ ID NO: 3715745 - DNA, 25 bp, Homo sapien
aacggatagactctcctagattctg

SEQ ID NO: 3715746 - DNA, 25 bp, Homo sapien
tctcctagattctgccgggaaagac

SEQ ID NO: 3715747 - DNA, 25 bp, Homo sapien
atgaaattgccgctgaatggacacc

SEQ ID NO: 3715748 - DNA, 25 bp, Homo sapien
cagaaagcaggatttgcataattcc

SEQ ID NO: 3715749 - DNA, 25 bp, Homo sapien
aaagcaggatttgcataattccttc

SEQ ID NO: 3715750 - DNA, 25 bp, Homo sapien
cgctgaatggacaccagaaagcagg

SEQ ID NO: 3715751 - DNA, 25 bp, Homo sapien
tcgcacaacaaagagaacttctcac

SEQ ID NO: 3715752 - DNA, 25 bp, Homo sapien
gctaaccaagtgctgtaattcttcc

SEQ ID NO: 3715753 - DNA, 25 bp, Homo sapien
ccccaacagatatgtctattaaatc

SEQ ID NO: 3715754 - DNA, 25 bp, Homo sapien
actgagctaaccaagtgctgtaatt

SEQ ID NO: 3715755 - DNA, 25 bp, Homo sapien
cgcaataccgcatgtgactaatttt

SEQ ID NO: 3715756 - DNA, 25 bp, Homo sapien
tagcttctggtaactccttcctaaa

SEQ ID NO: 3715757 - DNA, 25 bp, Homo sapien
ctgggaccaacaggctcgcaatacc

SEQ ID NO: 3715758 - DNA, 25 bp, Homo sapien
tctttactccatttatccacttaca

SEQ ID NO: 3715759 - DNA, 25 bp, Homo sapien
ttaactatcaccaccaccattgctt

SEQ ID NO: 3715760 - DNA, 25 bp, Homo sapien
tctccttctagttaatttcactccc

SEQ ID NO: 3715761 - DNA, 25 bp, Homo sapien
tcatggagctctatctccatgggct

SEQ ID NO: 3715762 - DNA, 25 bp, Homo sapien
tccatgggcttctgaagaagcctgt

SEQ ID NO: 3715763 - DNA, 25 bp, Homo sapien
tacttaatccatttgctggtgcttc

SEQ ID NO: 3715764 - DNA, 25 bp, Homo sapien
tctgtcgaaaatccccagaccttta

SEQ ID NO: 3715765 - DNA, 25 bp, Homo sapien
caacttttaccaatttgtctgtcga

SEQ ID NO: 3715766 - DNA, 25 bp, Homo sapien
gtgcttcagaaacctcagagtaaca

SEQ ID NO: 3715767 - DNA, 25 bp, Homo sapien
tgccaccacacccgactaatttttg

SEQ ID NO: 3715768 - DNA, 25 bp, Homo sapien
ctcaacttcccaagtggctaggatt

SEQ ID NO: 3715769 - DNA, 25 bp, Homo sapien
acaggcacctgccaccacacccgac

SEQ ID NO: 3715770 - DNA, 25 bp, Homo sapien
tgcctcaacttcccaagtggctagg

SEQ ID NO: 3715771 - DNA, 25 bp, Homo sapien
cgactgatatagtaccagttgcaaa

SEQ ID NO: 3715772 - DNA, 25 bp, Homo sapien
tgatatagtaccagttgcaaagatt

SEQ ID NO: 3715773 - DNA, 25 bp, Homo sapien
cagttgcaaagatttgtcttccgtc

SEQ ID NO: 3715774 - DNA, 25 bp, Homo sapien
tagtaccagttgcaaagatttgtct

SEQ ID NO: 3715775 - DNA, 25 bp, Homo sapien
tcattgccttgtccgtattttctaa

SEQ ID NO: 3715776 - DNA, 25 bp, Homo sapien
gtaattaggattaagtaaggtcatc

SEQ ID NO: 3715777 - DNA, 25 bp, Homo sapien
catatgtttatggtatttggaagta

SEQ ID NO: 3715778 - DNA, 25 bp, Homo sapien
ttttaattctttgtgaactgcctat

SEQ ID NO: 3715779 - DNA, 25 bp, Homo sapien
tacttcttgtaacatgccagacatg

SEQ ID NO: 3715780 - DNA, 25 bp, Homo sapien
aaagatacagtatcggccgggcacg

SEQ ID NO: 3715781 - DNA, 25 bp, Homo sapien
caaaagaccagccagatccttaagg

SEQ ID NO: 3715782 - DNA, 25 bp, Homo sapien
tgtagtctcactatgccctccaggg

SEQ ID NO: 3715783 - DNA, 25 bp, Homo sapien
ggaaatgcctcacgtaccagaaatg

SEQ ID NO: 3715784 - DNA, 25 bp, Homo sapien
gagactctcgcataaaggctaagac

SEQ ID NO: 3715785 - DNA, 25 bp, Homo sapien
tgctggacaaagtgaaccccttgct

SEQ ID NO: 3715786 - DNA, 25 bp, Homo sapien
tgcaatatcagcatcgggcagcttg

SEQ ID NO: 3715787 - DNA, 25 bp, Homo sapien
taaatagatttacaggaaacttcca

SEQ ID NO: 3715788 - DNA, 25 bp, Homo sapien
aatagatttacaggaaacttccagt

SEQ ID NO: 3715789 - DNA, 25 bp, Homo sapien
caaaaggtctataaatagatttaca

SEQ ID NO: 3715790 - DNA, 25 bp, Homo sapien
aaaggtctataaatagatttacagg

SEQ ID NO: 3715791 - DNA, 25 bp, Homo sapien
taagagtcaatcaagaacatttaag

SEQ ID NO: 3715792 - DNA, 25 bp, Homo sapien
ctaagaaaggcattaagacaaaact

SEQ ID NO: 3715793 - DNA, 25 bp, Homo sapien
gaagaaatggctcaacaataatagc

SEQ ID NO: 3715794 - DNA, 25 bp, Homo sapien
acatatatgcccctaacaacacagc

SEQ ID NO: 3715795 - DNA, 25 bp, Homo sapien
tttccagagttagccccaacctaga

SEQ ID NO: 3715796 - DNA, 25 bp, Homo sapien
aacctagacctagcatgcttgcggg

SEQ ID NO: 3715797 - DNA, 25 bp, Homo sapien
gaatgatttccttcactttaggtaa

SEQ ID NO: 3715798 - DNA, 25 bp, Homo sapien
ggagattcatttactatcttcagtg

SEQ ID NO: 3715799 - DNA, 25 bp, Homo sapien
gatataaaatgtactgaaaaggcaa

SEQ ID NO: 3715800 - DNA, 25 bp, Homo sapien
aaaataattgcaaatgggcaacaca

SEQ ID NO: 3715801 - DNA, 25 bp, Homo sapien
aaaggacagaaacaaaagaccacat

SEQ ID NO: 3715802 - DNA, 25 bp, Homo sapien
gcatttttgtctaactcgtaagaga

SEQ ID NO: 3715803 - DNA, 25 bp, Homo sapien
ttaacttaagaaatgtcctactatc

SEQ ID NO: 3715804 - DNA, 25 bp, Homo sapien
cattgaaagaaggtggaccgatgga

SEQ ID NO: 3715805 - DNA, 25 bp, Homo sapien
ccgatggacagatggaggaacggat

SEQ ID NO: 3715806 - DNA, 25 bp, Homo sapien
gaaatgtcctactatcagtatggac

SEQ ID NO: 3715807 - DNA, 25 bp, Homo sapien
ataaactgagatcttttaataatgc

SEQ ID NO: 3715808 - DNA, 25 bp, Homo sapien
cagcccttcaagaatactttcaaac

SEQ ID NO: 3715809 - DNA, 25 bp, Homo sapien
aaacagcccttcaagaatactttca

SEQ ID NO: 3715810 - DNA, 25 bp, Homo sapien
caaacagcccttcaagaatactttc

SEQ ID NO: 3715811 - DNA, 25 bp, Homo sapien
tcaagcaacagaataaacagttttc

SEQ ID NO: 3715812 - DNA, 25 bp, Homo sapien
atcaaaagtccaatcagaaatgctt

SEQ ID NO: 3715813 - DNA, 25 bp, Homo sapien
gaataaacagttttcatcaaaagtc

SEQ ID NO: 3715814 - DNA, 25 bp, Homo sapien
gttttcatcaaaagtccaatcagaa

SEQ ID NO: 3715815 - DNA, 25 bp, Homo sapien
aaatgcatggtaggatataggtttc

SEQ ID NO: 3715816 - DNA, 25 bp, Homo sapien
ggtttcttaataggctaatcaacag

SEQ ID NO: 3715817 - DNA, 25 bp, Homo sapien
gcaaaacccaggattactatcaaac

SEQ ID NO: 3715818 - DNA, 25 bp, Homo sapien
aatcctccaacaaagtaacacaatg

SEQ ID NO: 3715819 - DNA, 25 bp, Homo sapien
catgccaatctcaaactcaagatcc

SEQ ID NO: 3715820 - DNA, 25 bp, Homo sapien
aagccagagcccaagcttcaaaagg

SEQ ID NO: 3715821 - DNA, 25 bp, Homo sapien
caaagccagagcccaagcttcaaaa

SEQ ID NO: 3715822 - DNA, 25 bp, Homo sapien
agccagagcccaagcttcaaaaggg

SEQ ID NO: 3715823 - DNA, 25 bp, Homo sapien
tccaaagccagagcccaagcttcaa

SEQ ID NO: 3715824 - DNA, 25 bp, Homo sapien
ttttgttgctgatgtaactagaaaa

SEQ ID NO: 3715825 - DNA, 25 bp, Homo sapien
tgatgtaactagaaaactttgagca

SEQ ID NO: 3715826 - DNA, 25 bp, Homo sapien
gatgtaactagaaaactttgagcag

SEQ ID NO: 3715827 - DNA, 25 bp, Homo sapien
gttgctgatgtaactagaaaacttt

SEQ ID NO: 3715828 - DNA, 25 bp, Homo sapien
gagaggacccattcaaagcacagca

SEQ ID NO: 3715829 - DNA, 25 bp, Homo sapien
tagatcaatggcatacaacacaggc

SEQ ID NO: 3715830 - DNA, 25 bp, Homo sapien
gggcaagtaagctagcctaacccta

SEQ ID NO: 3715831 - DNA, 25 bp, Homo sapien
tggcaacagcattcggtgtctggtg

SEQ ID NO: 3715832 - DNA, 25 bp, Homo sapien
gattttctgtttcgccttacatcag

SEQ ID NO: 3715833 - DNA, 25 bp, Homo sapien
tacacattgtgttcactgtattccc

SEQ ID NO: 3715834 - DNA, 25 bp, Homo sapien
catcagtattggtaagtttgtaact

SEQ ID NO: 3715835 - DNA, 25 bp, Homo sapien
gagtttggtacgatctgtagtttca

SEQ ID NO: 3715836 - DNA, 25 bp, Homo sapien
gtgatatctttggttttcgtataaa

SEQ ID NO: 3715837 - DNA, 25 bp, Homo sapien
tcccagaataaggacgtcttctctc

SEQ ID NO: 3715838 - DNA, 25 bp, Homo sapien
cagaataaggacgtcttctctcttc

SEQ ID NO: 3715839 - DNA, 25 bp, Homo sapien
tggcctcccagaataaggacgtctt

SEQ ID NO: 3715840 - DNA, 25 bp, Homo sapien
tgatatttgcaaccagctttctatg

SEQ ID NO: 3715841 - DNA, 25 bp, Homo sapien
tatgaagaactcactggcatattca

SEQ ID NO: 3715842 - DNA, 25 bp, Homo sapien
tgttataatgcacaaatgattccct

SEQ ID NO: 3715843 - DNA, 25 bp, Homo sapien
gaaaatgggacatatcttggcacaa

SEQ ID NO: 3715844 - DNA, 25 bp, Homo sapien
tataaacagtgaatctgaccaggcg

SEQ ID NO: 3715845 - DNA, 25 bp, Homo sapien
aagtggtcaaaagtagcattagcaa

SEQ ID NO: 3715846 - DNA, 25 bp, Homo sapien
catttgaggatcatgtttgctttcc

SEQ ID NO: 3715847 - DNA, 25 bp, Homo sapien
gcactgcatgttctaagcataagca

SEQ ID NO: 3715848 - DNA, 25 bp, Homo sapien
tggttcatccagaccgactaagtgt

SEQ ID NO: 3715849 - DNA, 25 bp, Homo sapien
aaaagactgcattgaggaattcttc

SEQ ID NO: 3715850 - DNA, 25 bp, Homo sapien
tctgcttgtctctcgaatcgaatga

SEQ ID NO: 3715851 - DNA, 25 bp, Homo sapien
tctcgaatcgaatgatttttgcttg

SEQ ID NO: 3715852 - DNA, 25 bp, Homo sapien
attggggtcggagacccagggactg

SEQ ID NO: 3715853 - DNA, 25 bp, Homo sapien
tcttggtcagccatgagaagtttgc

SEQ ID NO: 3715854 - DNA, 25 bp, Homo sapien
taaggtccagaggtgagtcttggtc

SEQ ID NO: 3715855 - DNA, 25 bp, Homo sapien
tgactggagatgctttcggcaggct

SEQ ID NO: 3715856 - DNA, 25 bp, Homo sapien
cttgttcgctaggttctgactgaga

SEQ ID NO: 3715857 - DNA, 25 bp, Homo sapien
cctggagagtggctcagggaagtgc

SEQ ID NO: 3715858 - DNA, 25 bp, Homo sapien
cttttcttagtggacagatcaagta

SEQ ID NO: 3715859 - DNA, 25 bp, Homo sapien
gccagcacatggacttttcttagtg

SEQ ID NO: 3715860 - DNA, 25 bp, Homo sapien
ttagtggacagatcaagtacaccgt

SEQ ID NO: 3715861 - DNA, 25 bp, Homo sapien
cccactagagataccaagtattgga

SEQ ID NO: 3715862 - DNA, 25 bp, Homo sapien
tatcagatacacatagggagaagac

SEQ ID NO: 3715863 - DNA, 25 bp, Homo sapien
taaaagggagactggcatcaacctt

SEQ ID NO: 3715864 - DNA, 25 bp, Homo sapien
cttggtagcctaagatggttatgca

SEQ ID NO: 3715865 - DNA, 25 bp, Homo sapien
tattcaactaaaagatgggcaatcc

SEQ ID NO: 3715866 - DNA, 25 bp, Homo sapien
tgcacatggacttctacaggtgtcc

SEQ ID NO: 3715867 - DNA, 25 bp, Homo sapien
caatattaagactgacatgtggcaa

SEQ ID NO: 3715868 - DNA, 25 bp, Homo sapien
tcaaatggacggctttcaaacaatg

SEQ ID NO: 3715869 - DNA, 25 bp, Homo sapien
taatctgcagggatcgagccagtgg

SEQ ID NO: 3715870 - DNA, 25 bp, Homo sapien
gaactcgtaatgtggttttgcccaa

SEQ ID NO: 3715871 - DNA, 25 bp, Homo sapien
tgctgagtgcaccatttcccctgaa

SEQ ID NO: 3715872 - DNA, 25 bp, Homo sapien
gcccaagaggcttccctggataata

SEQ ID NO: 3715873 - DNA, 25 bp, Homo sapien
tgtgaacccattaccaaagagctat

SEQ ID NO: 3715874 - DNA, 25 bp, Homo sapien
tatagctgtactgatcaccagtgcg

SEQ ID NO: 3715875 - DNA, 25 bp, Homo sapien
taagcgcgctctccgtttgtgaacc

SEQ ID NO: 3715876 - DNA, 25 bp, Homo sapien
caagaatcgggtccagcatctaaca

SEQ ID NO: 3715877 - DNA, 25 bp, Homo sapien
attaatttcatctttttctttggag

SEQ ID NO: 3715878 - DNA, 25 bp, Homo sapien
ctcattaatttcatctttttctttg

SEQ ID NO: 3715879 - DNA, 25 bp, Homo sapien
tcaaagtgcccagcctctcctttac

SEQ ID NO: 3715880 - DNA, 25 bp, Homo sapien
tggagggtttttcaaagtgcccagc

SEQ ID NO: 3715881 - DNA, 25 bp, Homo sapien
ttcatttgcactttgtgctgcctct

SEQ ID NO: 3715882 - DNA, 25 bp, Homo sapien
gggatctaattcaatctttacagaa

SEQ ID NO: 3715883 - DNA, 25 bp, Homo sapien
tctccctggggatctaattcaatct

SEQ ID NO: 3715884 - DNA, 25 bp, Homo sapien
tcatttgcactttgtgctgcctctc

SEQ ID NO: 3715885 - DNA, 25 bp, Homo sapien
gctctacaggcaaggagtccacttc

SEQ ID NO: 3715886 - DNA, 25 bp, Homo sapien
catttctgaaggtagtgtgtgcaca

SEQ ID NO: 3715887 - DNA, 25 bp, Homo sapien
tcctgagtaaatacggagctcgtcc

SEQ ID NO: 3715888 - DNA, 25 bp, Homo sapien
gataaagctcccagtatgacagacg

SEQ ID NO: 3715889 - DNA, 25 bp, Homo sapien
ggaccactagctaatttcaaccatg

SEQ ID NO: 3715890 - DNA, 25 bp, Homo sapien
catgaaattcaaaagggaccactag

SEQ ID NO: 3715891 - DNA, 25 bp, Homo sapien
taaactgcagcattaaagggtaggc

SEQ ID NO: 3715892 - DNA, 25 bp, Homo sapien
caatcttcaggtctcaggactttta

SEQ ID NO: 3715893 - DNA, 25 bp, Homo sapien
tctgattagcagaaattaagcatgc

SEQ ID NO: 3715894 - DNA, 25 bp, Homo sapien
aatattaaggaatcactgcggcacc

SEQ ID NO: 3715895 - DNA, 25 bp, Homo sapien
cagaatagtggcaaatcaagagaga

SEQ ID NO: 3715896 - DNA, 25 bp, Homo sapien
ggtcaactgttgtttgggccatgca

SEQ ID NO: 3715897 - DNA, 25 bp, Homo sapien
tatctgcctactggaaaatgtgagg

SEQ ID NO: 3715898 - DNA, 25 bp, Homo sapien
atctgcctactggaaaatgtgagga

SEQ ID NO: 3715899 - DNA, 25 bp, Homo sapien
aaaacggctttcgtgacaaagacag

SEQ ID NO: 3715900 - DNA, 25 bp, Homo sapien
gttatctgcctactggaaaatgtga

SEQ ID NO: 3715901 - DNA, 25 bp, Homo sapien
aaggtttatcaagcaacatctaaac

SEQ ID NO: 3715902 - DNA, 25 bp, Homo sapien
atctaaacttcagaacaacaaactt

SEQ ID NO: 3715903 - DNA, 25 bp, Homo sapien
tagctcatcacaaacataattcaga

SEQ ID NO: 3715904 - DNA, 25 bp, Homo sapien
tccttcatggtatttggggaacaga

SEQ ID NO: 3715905 - DNA, 25 bp, Homo sapien
cacacaaagccttactcatattcat

SEQ ID NO: 3715906 - DNA, 25 bp, Homo sapien
taaggacccctattatcacacaaag

SEQ ID NO: 3715907 - DNA, 25 bp, Homo sapien
gacccctattatcacacaaagcctt

SEQ ID NO: 3715908 - DNA, 25 bp, Homo sapien
attaacttcacataaggacccctat

SEQ ID NO: 3715909 - DNA, 25 bp, Homo sapien
agttttaccatctgatcccacatag

SEQ ID NO: 3715910 - DNA, 25 bp, Homo sapien
gaaatgccaattggttgaggtaatg

SEQ ID NO: 3715911 - DNA, 25 bp, Homo sapien
taaccagagttctaaaagcacttcg

SEQ ID NO: 3715912 - DNA, 25 bp, Homo sapien
tgggaactaaacttctcattgtgcc

SEQ ID NO: 3715913 - DNA, 25 bp, Homo sapien
gcttaatagtctcctaaacgggctg

SEQ ID NO: 3715914 - DNA, 25 bp, Homo sapien
tgtactgcctaacgacagaaggtag

SEQ ID NO: 3715915 - DNA, 25 bp, Homo sapien
gcaattatgcagaacaaggaaccca

SEQ ID NO: 3715916 - DNA, 25 bp, Homo sapien
aagacttttaggagtgtagcaccgg

SEQ ID NO: 3715917 - DNA, 25 bp, Homo sapien
gcttgaaatgcttaacaagagaaaa

SEQ ID NO: 3715918 - DNA, 25 bp, Homo sapien
cttgaaatgcttaacaagagaaaat

SEQ ID NO: 3715919 - DNA, 25 bp, Homo sapien
cctacctattttcctagtgatttat

SEQ ID NO: 3715920 - DNA, 25 bp, Homo sapien
gaatccctacctattttcctagtga

SEQ ID NO: 3715921 - DNA, 25 bp, Homo sapien
gagagaatccctacctattttccta

SEQ ID NO: 3715922 - DNA, 25 bp, Homo sapien
atccctacctattttcctagtgatt

SEQ ID NO: 3715923 - DNA, 25 bp, Homo sapien
tcagccaaagattctaaatactgct

SEQ ID NO: 3715924 - DNA, 25 bp, Homo sapien
gtaaaaaggcttgaatttcagccaa

SEQ ID NO: 3715925 - DNA, 25 bp, Homo sapien
caaagattctaaatactgctcattc

SEQ ID NO: 3715926 - DNA, 25 bp, Homo sapien
ctaaatactgctcattccctgaaga

SEQ ID NO: 3715927 - DNA, 25 bp, Homo sapien
caagcaacatgtgggagtcagataa

SEQ ID NO: 3715928 - DNA, 25 bp, Homo sapien
gtcctctggtgtaaaaagcatgtca

SEQ ID NO: 3715929 - DNA, 25 bp, Homo sapien
taagctgctgtaaagtatacatccc

SEQ ID NO: 3715930 - DNA, 25 bp, Homo sapien
agtgtgtacaagctggattcctaag

SEQ ID NO: 3715931 - DNA, 25 bp, Homo sapien
cactgttaggtttaagaatagcatc

SEQ ID NO: 3715932 - DNA, 25 bp, Homo sapien
ctaccagcacgttgaaataaaagca

SEQ ID NO: 3715933 - DNA, 25 bp, Homo sapien
gaatagcatcaaagtacctgaattg

SEQ ID NO: 3715934 - DNA, 25 bp, Homo sapien
cctgaattgagtgagaagagtgtgt

SEQ ID NO: 3715935 - DNA, 25 bp, Homo sapien
tgctgatatgcagacctagacctct

SEQ ID NO: 3715936 - DNA, 25 bp, Homo sapien
tacacatgcacgaaagaacaagcgc

SEQ ID NO: 3715937 - DNA, 25 bp, Homo sapien
tagttatcgtgaagaagcaagagcc

SEQ ID NO: 3715938 - DNA, 25 bp, Homo sapien
caatggttccatcacagtggccagt

SEQ ID NO: 3715939 - DNA, 25 bp, Homo sapien
gattgttagaatctactgcttttgc

SEQ ID NO: 3715940 - DNA, 25 bp, Homo sapien
cttcgactgattgttagaatctact

SEQ ID NO: 3715941 - DNA, 25 bp, Homo sapien
gactgattgttagaatctactgctt

SEQ ID NO: 3715942 - DNA, 25 bp, Homo sapien
tactgcttttgcctctgttgagttc

SEQ ID NO: 3715943 - DNA, 25 bp, Homo sapien
tcctcagtgcctggttgagattcag

SEQ ID NO: 3715944 - DNA, 25 bp, Homo sapien
tcagtgtacaggtcgttcagaacac

SEQ ID NO: 3715945 - DNA, 25 bp, Homo sapien
ccagcattgcaagtggatacatcca

SEQ ID NO: 3715946 - DNA, 25 bp, Homo sapien
cattgctcccgaatcagaaggctgc

SEQ ID NO: 3715947 - DNA, 25 bp, Homo sapien
gaagacttcatatcgagacacagag

SEQ ID NO: 3715948 - DNA, 25 bp, Homo sapien
tggtctgcccctccaagattttagg

SEQ ID NO: 3715949 - DNA, 25 bp, Homo sapien
tagatgcagtgaggtatcccggagt

SEQ ID NO: 3715950 - DNA, 25 bp, Homo sapien
ggacaacagtcaaggcattctctct

SEQ ID NO: 3715951 - DNA, 25 bp, Homo sapien
cgcaaaggtgtttttggacactgta

SEQ ID NO: 3715952 - DNA, 25 bp, Homo sapien
gatgagttccccataaaccctgagt

SEQ ID NO: 3715953 - DNA, 25 bp, Homo sapien
gcctcttctgataaagctttgaaca

SEQ ID NO: 3715954 - DNA, 25 bp, Homo sapien
gcctctaaatcctggcgcaaaggtg

SEQ ID NO: 3715955 - DNA, 25 bp, Homo sapien
ttcctgggagtgtaaatttctggcc

SEQ ID NO: 3715956 - DNA, 25 bp, Homo sapien
ttctggccagtgtacgaacagttgg

SEQ ID NO: 3715957 - DNA, 25 bp, Homo sapien
ctttgtgtacagctggcatagggcc

SEQ ID NO: 3715958 - DNA, 25 bp, Homo sapien
tcaccattgaaaaagtatcctcgag

SEQ ID NO: 3715959 - DNA, 25 bp, Homo sapien
cgtgagaggtgatttccttgctagg

SEQ ID NO: 3715960 - DNA, 25 bp, Homo sapien
tcctcgtgagaggtgatttccttgc

SEQ ID NO: 3715961 - DNA, 25 bp, Homo sapien
cttcctcgtgagaggtgatttcctt

SEQ ID NO: 3715962 - DNA, 25 bp, Homo sapien
cctcgtgagaggtgatttccttgct

SEQ ID NO: 3715963 - DNA, 25 bp, Homo sapien
gatttcttaggcatctgtcagcaga

SEQ ID NO: 3715964 - DNA, 25 bp, Homo sapien
tgtgttcaggagaagacatcccact

SEQ ID NO: 3715965 - DNA, 25 bp, Homo sapien
agtgggtcgacatttagctcctggg

SEQ ID NO: 3715966 - DNA, 25 bp, Homo sapien
tagaaggcccttaggtgttgtccca

SEQ ID NO: 3715967 - DNA, 25 bp, Homo sapien
aaggagcccagagaatgagcgtgtc

SEQ ID NO: 3715968 - DNA, 25 bp, Homo sapien
gtcaatcttttaggccttggcaccg

SEQ ID NO: 3715969 - DNA, 25 bp, Homo sapien
tgtgtgggaatatgccctggctctt

SEQ ID NO: 3715970 - DNA, 25 bp, Homo sapien
gattttggtgccctagcagcatcac

SEQ ID NO: 3715971 - DNA, 25 bp, Homo sapien
ccagcggactttttagggatcttca

SEQ ID NO: 3715972 - DNA, 25 bp, Homo sapien
gtgtcaacatcgtcctcatctaggg

SEQ ID NO: 3715973 - DNA, 25 bp, Homo sapien
tccgaggcaatagactgggaaggcc

SEQ ID NO: 3715974 - DNA, 25 bp, Homo sapien
cattcttgattaaacgttgctgggc

SEQ ID NO: 3715975 - DNA, 25 bp, Homo sapien
tgcaggagtgctagcaagaccagaa

SEQ ID NO: 3715976 - DNA, 25 bp, Homo sapien
tggtggtcttctcggctacagtaca

SEQ ID NO: 3715977 - DNA, 25 bp, Homo sapien
tcccgaagtaggatggaagccttgc

SEQ ID NO: 3715978 - DNA, 25 bp, Homo sapien
gggacacccaagcacactgcatagg

SEQ ID NO: 3715979 - DNA, 25 bp, Homo sapien
ggttgaagccaatgcgcctgtctca

SEQ ID NO: 3715980 - DNA, 25 bp, Homo sapien
tgtagagcggcccaatggaaaagtc

SEQ ID NO: 3715981 - DNA, 25 bp, Homo sapien
caaataaaaaggacagggcagcagc

SEQ ID NO: 3715982 - DNA, 25 bp, Homo sapien
tctgagacacggaatagagcctgac

SEQ ID NO: 3715983 - DNA, 25 bp, Homo sapien
agaaggctattatctttaactgagc

SEQ ID NO: 3715984 - DNA, 25 bp, Homo sapien
gatccattgcattgttaggtatata

SEQ ID NO: 3715985 - DNA, 25 bp, Homo sapien
acattaacaccttttctcacacaca

SEQ ID NO: 3715986 - DNA, 25 bp, Homo sapien
gactcttggtctatttaaatgtcct

SEQ ID NO: 3715987 - DNA, 25 bp, Homo sapien
cctcaggagcagaataaaggttcac

SEQ ID NO: 3715988 - DNA, 25 bp, Homo sapien
ccatctatagcagggagtctcgtag

SEQ ID NO: 3715989 - DNA, 25 bp, Homo sapien
tcctctacgggagctatggcagagc

SEQ ID NO: 3715990 - DNA, 25 bp, Homo sapien
taaatgtgaatgacagctcccaccc

SEQ ID NO: 3715991 - DNA, 25 bp, Homo sapien
tctatgttttatttgttggcttacc

SEQ ID NO: 3715992 - DNA, 25 bp, Homo sapien
gaaaaggaggaagactataatagct

SEQ ID NO: 3715993 - DNA, 25 bp, Homo sapien
agcttttcagtcatactctggttat

SEQ ID NO: 3715994 - DNA, 25 bp, Homo sapien
taaagcacttcaaaagcctctatgt

SEQ ID NO: 3715995 - DNA, 25 bp, Homo sapien
acagcacagcaaagccctgagagct

SEQ ID NO: 3715996 - DNA, 25 bp, Homo sapien
gagtttctgcctgagtctaattatc

SEQ ID NO: 3715997 - DNA, 25 bp, Homo sapien
tgagcaaggacacactccacaaagt

SEQ ID NO: 3715998 - DNA, 25 bp, Homo sapien
gcttcggttcaatcccaaggcaaaa

SEQ ID NO: 3715999 - DNA, 25 bp, Homo sapien
aaaggacatctcctgagcactgagc

SEQ ID NO: 3716000 - DNA, 25 bp, Homo sapien
aactacacaactgcccctctgaagg

SEQ ID NO: 3716001 - DNA, 25 bp, Homo sapien
cacaactgcccctctgaaggatgga

SEQ ID NO: 3716002 - DNA, 25 bp, Homo sapien
gcaaaggacatctcctgagcactga

SEQ ID NO: 3716003 - DNA, 25 bp, Homo sapien
caacccctggcatattgtaatacca

SEQ ID NO: 3716004 - DNA, 25 bp, Homo sapien
taaatggacagtctatgctttcatg

SEQ ID NO: 3716005 - DNA, 25 bp, Homo sapien
ttcatgaggcatgcatattgagcac

SEQ ID NO: 3716006 - DNA, 25 bp, Homo sapien
tgagcaccccgtgtgggatggtccc

SEQ ID NO: 3716007 - DNA, 25 bp, Homo sapien
tgttctgtctaaagctgccggtgtc

SEQ ID NO: 3716008 - DNA, 25 bp, Homo sapien
catcgcatactttcagggagaggca

SEQ ID NO: 3716009 - DNA, 25 bp, Homo sapien
tatcacgaccagagcttgaagagtg

SEQ ID NO: 3716010 - DNA, 25 bp, Homo sapien
gacaactatgaggtgcagatcacag

SEQ ID NO: 3716011 - DNA, 25 bp, Homo sapien
tgccatgcctggcacagccataccc

SEQ ID NO: 3716012 - DNA, 25 bp, Homo sapien
ccatgcctggcacagccatacccat

SEQ ID NO: 3716013 - DNA, 25 bp, Homo sapien
ccgatgccatgcctggcacagccat

SEQ ID NO: 3716014 - DNA, 25 bp, Homo sapien
gatgccatgcctggcacagccatac

SEQ ID NO: 3716015 - DNA, 25 bp, Homo sapien
tgcatgcaagaagtaggctgcatgg

SEQ ID NO: 3716016 - DNA, 25 bp, Homo sapien
tgtgcatgcaagaagtaggctgcat

SEQ ID NO: 3716017 - DNA, 25 bp, Homo sapien
actgtgcatgcaagaagtaggctgc

SEQ ID NO: 3716018 - DNA, 25 bp, Homo sapien
gcaagaagtaggctgcatggggcac

SEQ ID NO: 3716019 - DNA, 25 bp, Homo sapien
taggacggtcaaaaagagaggctgc

SEQ ID NO: 3716020 - DNA, 25 bp, Homo sapien
gaaatctgctgaactggacacgctg

SEQ ID NO: 3716021 - DNA, 25 bp, Homo sapien
agaagtagtcgcctccccaatgata

SEQ ID NO: 3716022 - DNA, 25 bp, Homo sapien
tacagactgatcttccgggtggcca

SEQ ID NO: 3716023 - DNA, 25 bp, Homo sapien
ctacacacgtaggatgtctgtccct

SEQ ID NO: 3716024 - DNA, 25 bp, Homo sapien
ctgctggcattctctcctagggctt

SEQ ID NO: 3716025 - DNA, 25 bp, Homo sapien
gcttctgggctgatcgcatatgggc

SEQ ID NO: 3716026 - DNA, 25 bp, Homo sapien
ctccaaggggctacacacgtaggat

SEQ ID NO: 3716027 - DNA, 25 bp, Homo sapien
gctggtagcctaaccgcaaaagtat

SEQ ID NO: 3716028 - DNA, 25 bp, Homo sapien
tggtttagaacaggcccatgaggga

SEQ ID NO: 3716029 - DNA, 25 bp, Homo sapien
ttgcaacaccactggcaacagggcc

SEQ ID NO: 3716030 - DNA, 25 bp, Homo sapien
tagtcgtcttgtttggatcaactcc

SEQ ID NO: 3716031 - DNA, 25 bp, Homo sapien
tggaaaagcccaccaagtgtggctg

SEQ ID NO: 3716032 - DNA, 25 bp, Homo sapien
gagtgcagcgatgggacctcttttg

SEQ ID NO: 3716033 - DNA, 25 bp, Homo sapien
tcggctgaagcggaggaagttcacc

SEQ ID NO: 3716034 - DNA, 25 bp, Homo sapien
tgccctctgcgcatagcgctgggcg

SEQ ID NO: 3716035 - DNA, 25 bp, Homo sapien
gaaccggtattgctgtactagagac

SEQ ID NO: 3716036 - DNA, 25 bp, Homo sapien
tattgctgtactagagactctggaa

SEQ ID NO: 3716037 - DNA, 25 bp, Homo sapien
gaacctgaaccggtattgctgtact

SEQ ID NO: 3716038 - DNA, 25 bp, Homo sapien
acacagaacctgaaccggtattgct

SEQ ID NO: 3716039 - DNA, 25 bp, Homo sapien
gacagaagcagaccaatttgccaaa

SEQ ID NO: 3716040 - DNA, 25 bp, Homo sapien
ctgtgaaatgcattgctgtgacaga

SEQ ID NO: 3716041 - DNA, 25 bp, Homo sapien
gtgacagaagcagaccaatttgcca

SEQ ID NO: 3716042 - DNA, 25 bp, Homo sapien
tgaaatgcattgctgtgacagaagc

SEQ ID NO: 3716043 - DNA, 25 bp, Homo sapien
caaagagcagcgtagtaggtggtgg

SEQ ID NO: 3716044 - DNA, 25 bp, Homo sapien
ctggcttgagccagtccagcaaaga

SEQ ID NO: 3716045 - DNA, 25 bp, Homo sapien
gaccctgcagaacgacttctcctga

SEQ ID NO: 3716046 - DNA, 25 bp, Homo sapien
ttctcctgagatcaggtaccaggcc

SEQ ID NO: 3716047 - DNA, 25 bp, Homo sapien
ctgttaacagtcagggctctgtgtt

SEQ ID NO: 3716048 - DNA, 25 bp, Homo sapien
gatggattcaggaccacggacagct

SEQ ID NO: 3716049 - DNA, 25 bp, Homo sapien
cttgtggttcctcgtagctcctctg

SEQ ID NO: 3716050 - DNA, 25 bp, Homo sapien
tccccagacagcgactccttgtggt

SEQ ID NO: 3716051 - DNA, 25 bp, Homo sapien
aagagccgccggatggattcaggac

SEQ ID NO: 3716052 - DNA, 25 bp, Homo sapien
gtctgggtccctaagctcgggccgc

SEQ ID NO: 3716053 - DNA, 25 bp, Homo sapien
tgctgggctgaaattctaacggtgc

SEQ ID NO: 3716054 - DNA, 25 bp, Homo sapien
ggtgcctgaaatcagagtgcctggc

SEQ ID NO: 3716055 - DNA, 25 bp, Homo sapien
cgcagctggctgttttgtttgctgg

SEQ ID NO: 3716056 - DNA, 25 bp, Homo sapien
gttccagaaaactgaccgcacttgg

SEQ ID NO: 3716057 - DNA, 25 bp, Homo sapien
cagtggagatatggaaacgagttcc

SEQ ID NO: 3716058 - DNA, 25 bp, Homo sapien
ctaatgaagagtgggcatacagacc

SEQ ID NO: 3716059 - DNA, 25 bp, Homo sapien
taaaccctggtcacctggcctagat

SEQ ID NO: 3716060 - DNA, 25 bp, Homo sapien
gccttggaagtcgttactaaggaga

SEQ ID NO: 3716061 - DNA, 25 bp, Homo sapien
caactccagcatggctttgtcctga

SEQ ID NO: 3716062 - DNA, 25 bp, Homo sapien
agcagatgtgtggccccaactccag

SEQ ID NO: 3716063 - DNA, 25 bp, Homo sapien
gagaccaatggtgggttcctttctg

SEQ ID NO: 3716064 - DNA, 25 bp, Homo sapien
gaaatcacactgtgcgcttttcaga

SEQ ID NO: 3716065 - DNA, 25 bp, Homo sapien
tagaaggtacttcattcccagaggg

SEQ ID NO: 3716066 - DNA, 25 bp, Homo sapien
cactttgaagaaatcgctgtctaac

SEQ ID NO: 3716067 - DNA, 25 bp, Homo sapien
ggttcattaattgagggcgttgcac

SEQ ID NO: 3716068 - DNA, 25 bp, Homo sapien
ctactgcctgggtgtggtatatgag

SEQ ID NO: 3716069 - DNA, 25 bp, Homo sapien
tatgagtaaactgagctgaatacag

SEQ ID NO: 3716070 - DNA, 25 bp, Homo sapien
cagggactgagaggtttgtcggcga

SEQ ID NO: 3716071 - DNA, 25 bp, Homo sapien
gtttgtcggcgatgtttctctttaa

SEQ ID NO: 3716072 - DNA, 25 bp, Homo sapien
caaataatgcttggaacatcctggc

SEQ ID NO: 3716073 - DNA, 25 bp, Homo sapien
gaggctctgtcatcggaactgtttt

SEQ ID NO: 3716074 - DNA, 25 bp, Homo sapien
gaattgctaggtcatgggcacgtgc

SEQ ID NO: 3716075 - DNA, 25 bp, Homo sapien
gagcgtcttcggtgaatacctggga

SEQ ID NO: 3716076 - DNA, 25 bp, Homo sapien
tgagcgcagacagaagtgtgtgttc

SEQ ID NO: 3716077 - DNA, 25 bp, Homo sapien
tcatggaaacgagtgaacgctccca

SEQ ID NO: 3716078 - DNA, 25 bp, Homo sapien
caggcgcttcagagaataggcatta

SEQ ID NO: 3716079 - DNA, 25 bp, Homo sapien
aaaagccctgtttgtctgacgccag

SEQ ID NO: 3716080 - DNA, 25 bp, Homo sapien
ttttctaagtctctgctcgtagaaa

SEQ ID NO: 3716081 - DNA, 25 bp, Homo sapien
ttctaagtctctgctcgtagaaaca

SEQ ID NO: 3716082 - DNA, 25 bp, Homo sapien
aagtctctgctcgtagaaacacaga

SEQ ID NO: 3716083 - DNA, 25 bp, Homo sapien
ctaagtctctgctcgtagaaacaca

SEQ ID NO: 3716084 - DNA, 25 bp, Homo sapien
gatctttcagggttgggctccttga

SEQ ID NO: 3716085 - DNA, 25 bp, Homo sapien
tcagaactcatgtccctggaacttc

SEQ ID NO: 3716086 - DNA, 25 bp, Homo sapien
ttctcagatctttcagggttgggct

SEQ ID NO: 3716087 - DNA, 25 bp, Homo sapien
cttgatgtcagaactcatgtccctg

SEQ ID NO: 3716088 - DNA, 25 bp, Homo sapien
cctgactgcgctcggatttgagcca

SEQ ID NO: 3716089 - DNA, 25 bp, Homo sapien
gctcggatttgagccattgtgaatt

SEQ ID NO: 3716090 - DNA, 25 bp, Homo sapien
gctttctccctgactgcgctcggat

SEQ ID NO: 3716091 - DNA, 25 bp, Homo sapien
tggctttctccctgactgcgctcgg

SEQ ID NO: 3716092 - DNA, 25 bp, Homo sapien
cagtctctggtcttgaagttggttc

SEQ ID NO: 3716093 - DNA, 25 bp, Homo sapien
atgtatcagtgaagaagtctggttc

SEQ ID NO: 3716094 - DNA, 25 bp, Homo sapien
ggttcatcaggtaaaatgtatcagt

SEQ ID NO: 3716095 - DNA, 25 bp, Homo sapien
cttgaagttggttcatcaggtaaaa

SEQ ID NO: 3716096 - DNA, 25 bp, Homo sapien
ctgagcctgcagaggggccagactg

SEQ ID NO: 3716097 - DNA, 25 bp, Homo sapien
ctgcagaggggccagactgaagcct

SEQ ID NO: 3716098 - DNA, 25 bp, Homo sapien
cagaggggccagactgaagcctgca

SEQ ID NO: 3716099 - DNA, 25 bp, Homo sapien
gagcctgcagaggggccagactgaa

SEQ ID NO: 3716100 - DNA, 25 bp, Homo sapien
gtgccttcgactctgcaggcacggg

SEQ ID NO: 3716101 - DNA, 25 bp, Homo sapien
ctgctgggtcccgttcgtgaagccc

SEQ ID NO: 3716102 - DNA, 25 bp, Homo sapien
gctccccagcctgcttggctgtgcc

SEQ ID NO: 3716103 - DNA, 25 bp, Homo sapien
tcgtgaagcccgtgccttcgactct

SEQ ID NO: 3716104 - DNA, 25 bp, Homo sapien
gccatttagcagtttggatttggac

SEQ ID NO: 3716105 - DNA, 25 bp, Homo sapien
ggaggaagccatttagcagtttgga

SEQ ID NO: 3716106 - DNA, 25 bp, Homo sapien
ggatttggacgtttacagcttccat

SEQ ID NO: 3716107 - DNA, 25 bp, Homo sapien
cagtttggatttggacgtttacagc

SEQ ID NO: 3716108 - DNA, 25 bp, Homo sapien
cataaattctggtggcgagacaccc

SEQ ID NO: 3716109 - DNA, 25 bp, Homo sapien
aaaagctggtacgaggaacgctggc

SEQ ID NO: 3716110 - DNA, 25 bp, Homo sapien
cacaattcgaagttgaagcttagcc

SEQ ID NO: 3716111 - DNA, 25 bp, Homo sapien
gaagttgaagcttagccccttgttg

SEQ ID NO: 3716112 - DNA, 25 bp, Homo sapien
tcaggtcctttactctcagcaggaa

SEQ ID NO: 3716113 - DNA, 25 bp, Homo sapien
atcaggtcctttactctcagcagga

SEQ ID NO: 3716114 - DNA, 25 bp, Homo sapien
acctggatcccccctggaatggaag

SEQ ID NO: 3716115 - DNA, 25 bp, Homo sapien
aaaatgacaacttggctgcctcctt

SEQ ID NO: 3716116 - DNA, 25 bp, Homo sapien
gatcccccctggaatggaaggtggc

SEQ ID NO: 3716117 - DNA, 25 bp, Homo sapien
tggatcccccctggaatggaaggtg

SEQ ID NO: 3716118 - DNA, 25 bp, Homo sapien
gagggtgtgcataatgcccagttcc

SEQ ID NO: 3716119 - DNA, 25 bp, Homo sapien
tagtggaagcaaccctagaacatcc

SEQ ID NO: 3716120 - DNA, 25 bp, Homo sapien
tatgtgttgctgatcttagtggaag

SEQ ID NO: 3716121 - DNA, 25 bp, Homo sapien
tctataagatgagcacagttactac

SEQ ID NO: 3716122 - DNA, 25 bp, Homo sapien
cagccttggccagggtaagatttca

SEQ ID NO: 3716123 - DNA, 25 bp, Homo sapien
tcttattcggtgacagcatgcgtgg

SEQ ID NO: 3716124 - DNA, 25 bp, Homo sapien
ttcccgagtaggcttgtcttattcg

SEQ ID NO: 3716125 - DNA, 25 bp, Homo sapien
ctttactgctgtctgcgcagtggct

SEQ ID NO: 3716126 - DNA, 25 bp, Homo sapien
gtcaaggccccgactgctggacact

SEQ ID NO: 3716127 - DNA, 25 bp, Homo sapien
tcaaggccccgactgctggacactg

SEQ ID NO: 3716128 - DNA, 25 bp, Homo sapien
acagctgtccttggcgttgaggaga

SEQ ID NO: 3716129 - DNA, 25 bp, Homo sapien
tccttggcgttgaggagatctttcg

SEQ ID NO: 3716130 - DNA, 25 bp, Homo sapien
gattaattagcgacatctgccgcgg

SEQ ID NO: 3716131 - DNA, 25 bp, Homo sapien
cagaggcccaaaatgtccccttgtg

SEQ ID NO: 3716132 - DNA, 25 bp, Homo sapien
tatgcacttgtcatcctggccgaaa

SEQ ID NO: 3716133 - DNA, 25 bp, Homo sapien
gatggttctgaagccgagctcaaag

SEQ ID NO: 3716134 - DNA, 25 bp, Homo sapien
tgtcactctcccgcatccaaatgtg

SEQ ID NO: 3716135 - DNA, 25 bp, Homo sapien
tccatagtgagagtcaggcttcctc

SEQ ID NO: 3716136 - DNA, 25 bp, Homo sapien
tccaaatgtgctcttcagaagccac

SEQ ID NO: 3716137 - DNA, 25 bp, Homo sapien
gctgcgttaatctgccagccctctg

SEQ ID NO: 3716138 - DNA, 25 bp, Homo sapien
tgtagcggagagttccaatgggcat

SEQ ID NO: 3716139 - DNA, 25 bp, Homo sapien
cttgcacttgtagcggagagttcca

SEQ ID NO: 3716140 - DNA, 25 bp, Homo sapien
cttccttgcacttgtagcggagagt

SEQ ID NO: 3716141 - DNA, 25 bp, Homo sapien
gcttgggctggcctagttccccttc

SEQ ID NO: 3716142 - DNA, 25 bp, Homo sapien
gctgtctgtcccctaggaagcttgt

SEQ ID NO: 3716143 - DNA, 25 bp, Homo sapien
tgtaccgctgctgtcccaacgcatg

SEQ ID NO: 3716144 - DNA, 25 bp, Homo sapien
catgtgccacacttgctgtctgtcc

SEQ ID NO: 3716145 - DNA, 25 bp, Homo sapien
cctaggaagcttgtaattggctgca

SEQ ID NO: 3716146 - DNA, 25 bp, Homo sapien
cgggaacggagccagtgtttgtggc

SEQ ID NO: 3716147 - DNA, 25 bp, Homo sapien
gtgatccgatgtggcagcttcttgg

SEQ ID NO: 3716148 - DNA, 25 bp, Homo sapien
ggagccagtgtttgtggcagtgatc

SEQ ID NO: 3716149 - DNA, 25 bp, Homo sapien
tttgtggcagtgatccgatgtggca

SEQ ID NO: 3716150 - DNA, 25 bp, Homo sapien
caccccctagccttggtccaccatt

SEQ ID NO: 3716151 - DNA, 25 bp, Homo sapien
ttggtccaccattggtcctcgccat

SEQ ID NO: 3716152 - DNA, 25 bp, Homo sapien
cttggtccaccattggtcctcgcca

SEQ ID NO: 3716153 - DNA, 25 bp, Homo sapien
atcaccccctagccttggtccacca

SEQ ID NO: 3716154 - DNA, 25 bp, Homo sapien
tcacagggagtcgtcagggatgtca

SEQ ID NO: 3716155 - DNA, 25 bp, Homo sapien
ggagtcgtcagggatgtcagagtct

SEQ ID NO: 3716156 - DNA, 25 bp, Homo sapien
acagggagtcgtcagggatgtcaga

SEQ ID NO: 3716157 - DNA, 25 bp, Homo sapien
aaggtagggctgtcaagagtcgggg

SEQ ID NO: 3716158 - DNA, 25 bp, Homo sapien
ccagtagtgggattgatgtattata

SEQ ID NO: 3716159 - DNA, 25 bp, Homo sapien
tggttaatttcacttaatagcctcc

SEQ ID NO: 3716160 - DNA, 25 bp, Homo sapien
gagatccactttttaggtcctacat

SEQ ID NO: 3716161 - DNA, 25 bp, Homo sapien
ttccctttgaatacatacccagtag

SEQ ID NO: 3716162 - DNA, 25 bp, Homo sapien
cagcatggggtttttgatatactct

SEQ ID NO: 3716163 - DNA, 25 bp, Homo sapien
tagtgcattgtaatacagaactcct

SEQ ID NO: 3716164 - DNA, 25 bp, Homo sapien
gcttccaacctaggctgtatcaccc

SEQ ID NO: 3716165 - DNA, 25 bp, Homo sapien
caccccataggcatagtgcattgta

SEQ ID NO: 3716166 - DNA, 25 bp, Homo sapien
ctactgatcagcatacggtttttgt

SEQ ID NO: 3716167 - DNA, 25 bp, Homo sapien
atccacaggcacaattgtgctactg

SEQ ID NO: 3716168 - DNA, 25 bp, Homo sapien
cagtctgcaagcctcctgagcgtag

SEQ ID NO: 3716169 - DNA, 25 bp, Homo sapien
ggcccagatggcatagcacccttgc

SEQ ID NO: 3716170 - DNA, 25 bp, Homo sapien
agcctcctgagcgtaggatccacga

SEQ ID NO: 3716171 - DNA, 25 bp, Homo sapien
gtaggatccacgactccttctccat

SEQ ID NO: 3716172 - DNA, 25 bp, Homo sapien
gcgtttgcgcttttgaggtccggca

SEQ ID NO: 3716173 - DNA, 25 bp, Homo sapien
tagcgtttgcgcttttgaggtccgg

SEQ ID NO: 3716174 - DNA, 25 bp, Homo sapien
ttttagcgtttgcgcttttgaggtc

SEQ ID NO: 3716175 - DNA, 25 bp, Homo sapien
cgtttgcgcttttgaggtccggcat

SEQ ID NO: 3716176 - DNA, 25 bp, Homo sapien
ggctcccgcagtcgggcgcgattgg

SEQ ID NO: 3716177 - DNA, 25 bp, Homo sapien
tggctcccgcagtcgggcgcgattg

SEQ ID NO: 3716178 - DNA, 25 bp, Homo sapien
ctcccgcagtcgggcgcgattggca

SEQ ID NO: 3716179 - DNA, 25 bp, Homo sapien
tcccgcagtcgggcgcgattggcat

SEQ ID NO: 3716180 - DNA, 25 bp, Homo sapien
cgggcgcggagctgaagactaagtc

SEQ ID NO: 3716181 - DNA, 25 bp, Homo sapien
ggagcgggcgcggagctgaagacta

SEQ ID NO: 3716182 - DNA, 25 bp, Homo sapien
tgcgggcgtcgctgggggctcggct

SEQ ID NO: 3716183 - DNA, 25 bp, Homo sapien
gcgcggagctgaagactaagtctgg

SEQ ID NO: 3716184 - DNA, 25 bp, Homo sapien
gctgcccagcgccactgactgctgc

SEQ ID NO: 3716185 - DNA, 25 bp, Homo sapien
gcccagcgccactgactgctgcagt

SEQ ID NO: 3716186 - DNA, 25 bp, Homo sapien
tgctgcagtaggaggaagctgtcct

SEQ ID NO: 3716187 - DNA, 25 bp, Homo sapien
agcgccactgactgctgcagtagga

SEQ ID NO: 3716188 - DNA, 25 bp, Homo sapien
cagctgcagcgtctcgccgatctgg

SEQ ID NO: 3716189 - DNA, 25 bp, Homo sapien
agctgcagcgtctcgccgatctggg

SEQ ID NO: 3716190 - DNA, 25 bp, Homo sapien
gctgcagcgtctcgccgatctgggc

SEQ ID NO: 3716191 - DNA, 25 bp, Homo sapien
gtttccagagagcactagctgctgc

SEQ ID NO: 3716192 - DNA, 25 bp, Homo sapien
tttctggttgggacccgcgtcgctg

SEQ ID NO: 3716193 - DNA, 25 bp, Homo sapien
gaacgccgtcgccagttctgagctg

SEQ ID NO: 3716194 - DNA, 25 bp, Homo sapien
gtaactgcagccgtcgcgaatgaag

SEQ ID NO: 3716195 - DNA, 25 bp, Homo sapien
tcgggtcacgccaaataaggagtcc

SEQ ID NO: 3716196 - DNA, 25 bp, Homo sapien
cagtgaccttgaaccgaggagaggc

SEQ ID NO: 3716197 - DNA, 25 bp, Homo sapien
ggtgcgctctgtaaaatctgcctta

SEQ ID NO: 3716198 - DNA, 25 bp, Homo sapien
actgacttgtacgtttgaggtgcgc

SEQ ID NO: 3716199 - DNA, 25 bp, Homo sapien
gaaatcaactcgtctatccagggaa

SEQ ID NO: 3716200 - DNA, 25 bp, Homo sapien
agccacccgcttgagtaggactgca

SEQ ID NO: 3716201 - DNA, 25 bp, Homo sapien
agctgttattgcaaatggccccgga

SEQ ID NO: 3716202 - DNA, 25 bp, Homo sapien
ggtttcctgcacttacaaaggccag

SEQ ID NO: 3716203 - DNA, 25 bp, Homo sapien
gatagccacaattccagacactccg

SEQ ID NO: 3716204 - DNA, 25 bp, Homo sapien
agcaggcatttcagttaagttaaaa

SEQ ID NO: 3716205 - DNA, 25 bp, Homo sapien
gtagatatgtcagtagccacatctg

SEQ ID NO: 3716206 - DNA, 25 bp, Homo sapien
tccggtgcgaagtgtagatatgtca

SEQ ID NO: 3716207 - DNA, 25 bp, Homo sapien
tttttcactgatggcaagtataaaa

SEQ ID NO: 3716208 - DNA, 25 bp, Homo sapien
ttcatgtttatggagatcagagaaa

SEQ ID NO: 3716209 - DNA, 25 bp, Homo sapien
tgttttcatgtttatggagatcaga

SEQ ID NO: 3716210 - DNA, 25 bp, Homo sapien
ttttcatgtttatggagatcagaga

SEQ ID NO: 3716211 - DNA, 25 bp, Homo sapien
aaatgtatgcgccagggtgcttccg

SEQ ID NO: 3716212 - DNA, 25 bp, Homo sapien
tcaaccagagaagttaccagccgcg

SEQ ID NO: 3716213 - DNA, 25 bp, Homo sapien
tgcgtagacccaacagcgtccagtt

SEQ ID NO: 3716214 - DNA, 25 bp, Homo sapien
tactaactctgagctgaagccgacg

SEQ ID NO: 3716215 - DNA, 25 bp, Homo sapien
taatagccttctagtgggtgtacac

SEQ ID NO: 3716216 - DNA, 25 bp, Homo sapien
tgcatttccaaatgggcaggcaggt

SEQ ID NO: 3716217 - DNA, 25 bp, Homo sapien
taagaatgaacttagcgtcctccag

SEQ ID NO: 3716218 - DNA, 25 bp, Homo sapien
gatccctctgtggatgagatcagcg

SEQ ID NO: 3716219 - DNA, 25 bp, Homo sapien
cttcagagacatccctggtgcctgg

SEQ ID NO: 3716220 - DNA, 25 bp, Homo sapien
cagctgcctgtagccacgtggcatc

SEQ ID NO: 3716221 - DNA, 25 bp, Homo sapien
agatgatctccatttccgccagctg

SEQ ID NO: 3716222 - DNA, 25 bp, Homo sapien
ccaaatggaatcacccttcagagac

SEQ ID NO: 3716223 - DNA, 25 bp, Homo sapien
tgacgtggtcaagtctgcactgggc

SEQ ID NO: 3716224 - DNA, 25 bp, Homo sapien
ccgtgacgtggtcaagtctgcactg

SEQ ID NO: 3716225 - DNA, 25 bp, Homo sapien
acgtggtcaagtctgcactgggctt

SEQ ID NO: 3716226 - DNA, 25 bp, Homo sapien
gtggtcaagtctgcactgggcttca

SEQ ID NO: 3716227 - DNA, 25 bp, Homo sapien
tatttggaaactgggcatggctgca

SEQ ID NO: 3716228 - DNA, 25 bp, Homo sapien
agttttgctcttgttgcacagctgg

SEQ ID NO: 3716229 - DNA, 25 bp, Homo sapien
ttttgctcttgttgcacagctggag

SEQ ID NO: 3716230 - DNA, 25 bp, Homo sapien
gagttttgctcttgttgcacagctg

SEQ ID NO: 3716231 - DNA, 25 bp, Homo sapien
gttttgctcttgttgcacagctgga

SEQ ID NO: 3716232 - DNA, 25 bp, Homo sapien
tacataatgagctgcagtcagggtc

SEQ ID NO: 3716233 - DNA, 25 bp, Homo sapien
tcttgtgtaaggtaccgcgggtgtc

SEQ ID NO: 3716234 - DNA, 25 bp, Homo sapien
tgtgttcagaattcagcctctcggg

SEQ ID NO: 3716235 - DNA, 25 bp, Homo sapien
caaagtacagcgcttctgggagtcc

SEQ ID NO: 3716236 - DNA, 25 bp, Homo sapien
ggctacagggtatccacgtgggttc

SEQ ID NO: 3716237 - DNA, 25 bp, Homo sapien
gagcgtgtttctacgtccctggaag

SEQ ID NO: 3716238 - DNA, 25 bp, Homo sapien
cacggcttagtcaacatgggtcgct

SEQ ID NO: 3716239 - DNA, 25 bp, Homo sapien
catagtaatgcacacgaatccggaa

SEQ ID NO: 3716240 - DNA, 25 bp, Homo sapien
gcacagcatctgaatgctaggaggg

SEQ ID NO: 3716241 - DNA, 25 bp, Homo sapien
taagtcatgactggatgcagcccat

SEQ ID NO: 3716242 - DNA, 25 bp, Homo sapien
cttcacatccttgatacagggatgc

SEQ ID NO: 3716243 - DNA, 25 bp, Homo sapien
ggtggcagcgtcgtcttagattgca

SEQ ID NO: 3716244 - DNA, 25 bp, Homo sapien
aaggcaggcagatcacgaggtcagg

SEQ ID NO: 3716245 - DNA, 25 bp, Homo sapien
aagtacccagggacaggccaggcac

SEQ ID NO: 3716246 - DNA, 25 bp, Homo sapien
ggtggctcacgcctgtaatcccagc

SEQ ID NO: 3716247 - DNA, 25 bp, Homo sapien
agatcaagaccatcctggcaaacac

SEQ ID NO: 3716248 - DNA, 25 bp, Homo sapien
tgctgttcagcccacaggattcctg

SEQ ID NO: 3716249 - DNA, 25 bp, Homo sapien
tgaaggcccagatttagagtgagcg

SEQ ID NO: 3716250 - DNA, 25 bp, Homo sapien
tgatgttcagatctcccggctcagc

SEQ ID NO: 3716251 - DNA, 25 bp, Homo sapien
caggatttatgtttcagagagggca

SEQ ID NO: 3716252 - DNA, 25 bp, Homo sapien
catgcaggcgagcattacagatcct

SEQ ID NO: 3716253 - DNA, 25 bp, Homo sapien
catttgtcagggttgattcttgggc

SEQ ID NO: 3716254 - DNA, 25 bp, Homo sapien
cctaagaataaatcagctgggaggg

SEQ ID NO: 3716255 - DNA, 25 bp, Homo sapien
actgccgtcttttcctaccctgtag

SEQ ID NO: 3716256 - DNA, 25 bp, Homo sapien
cgcgcaagttctcgcccaaatcttt

SEQ ID NO: 3716257 - DNA, 25 bp, Homo sapien
gctcagtccggctcccgcgcaagtt

SEQ ID NO: 3716258 - DNA, 25 bp, Homo sapien
actgggattagcagattccggagta

SEQ ID NO: 3716259 - DNA, 25 bp, Homo sapien
tagcagattccggagtagcagcccg

SEQ ID NO: 3716260 - DNA, 25 bp, Homo sapien
ctccaggttccatgcgctctcgccg

SEQ ID NO: 3716261 - DNA, 25 bp, Homo sapien
aggttccatgcgctctcgccgtgcc

SEQ ID NO: 3716262 - DNA, 25 bp, Homo sapien
tccatgcgctctcgccgtgccggat

SEQ ID NO: 3716263 - DNA, 25 bp, Homo sapien
tcgccgtgccggatcagcaccagtt

SEQ ID NO: 3716264 - DNA, 25 bp, Homo sapien
cccgccgcgcttcgcctcctcgtgg

SEQ ID NO: 3716265 - DNA, 25 bp, Homo sapien
ccgcgcttcgcctcctcgtggcccg

SEQ ID NO: 3716266 - DNA, 25 bp, Homo sapien
gccgcgcttcgcctcctcgtggccc

SEQ ID NO: 3716267 - DNA, 25 bp, Homo sapien
aagtagactctaccctctgcactca

SEQ ID NO: 3716268 - DNA, 25 bp, Homo sapien
tcttctcaactacacactaaactgt

SEQ ID NO: 3716269 - DNA, 25 bp, Homo sapien
atgctccacggcgtgaccttgaaca

SEQ ID NO: 3716270 - DNA, 25 bp, Homo sapien
ggcctgtccccgacatattaaatgt

SEQ ID NO: 3716271 - DNA, 25 bp, Homo sapien
gctaggatccgtagccgcctcttga

SEQ ID NO: 3716272 - DNA, 25 bp, Homo sapien
tattgggtagaaggagcaactcgaa

SEQ ID NO: 3716273 - DNA, 25 bp, Homo sapien
tctacagatgcgttttggacacact

SEQ ID NO: 3716274 - DNA, 25 bp, Homo sapien
gcttctggcgctaagggaacctgaa

SEQ ID NO: 3716275 - DNA, 25 bp, Homo sapien
aaatacctgtgcctcatcaatgacc

SEQ ID NO: 3716276 - DNA, 25 bp, Homo sapien
aaggatggtacagtgaaggcaagaa

SEQ ID NO: 3716277 - DNA, 25 bp, Homo sapien
tcatttgagaaggatggtacagtga

SEQ ID NO: 3716278 - DNA, 25 bp, Homo sapien
aggccaaatacctgtgcctcatcaa

SEQ ID NO: 3716279 - DNA, 25 bp, Homo sapien
ttcaaagtgataagctaaccaggtc

SEQ ID NO: 3716280 - DNA, 25 bp, Homo sapien
aacctagattaaaacccatgctgtg

SEQ ID NO: 3716281 - DNA, 25 bp, Homo sapien
tatcaatctcctgtacaagtagtcc

SEQ ID NO: 3716282 - DNA, 25 bp, Homo sapien
aattcccaaggatcctgatgtttgc

SEQ ID NO: 3716283 - DNA, 25 bp, Homo sapien
ccagagggtccggatcgctctcttc

SEQ ID NO: 3716284 - DNA, 25 bp, Homo sapien
ctgtccagagggtccggatcgctct

SEQ ID NO: 3716285 - DNA, 25 bp, Homo sapien
ggtgaagcagatgtcaaactcatag

SEQ ID NO: 3716286 - DNA, 25 bp, Homo sapien
agagggtccggatcgctctcttctg

SEQ ID NO: 3716287 - DNA, 25 bp, Homo sapien
ttctgctttattgagaccggttaga

SEQ ID NO: 3716288 - DNA, 25 bp, Homo sapien
ttagacccccatagtgccgctcatt

SEQ ID NO: 3716289 - DNA, 25 bp, Homo sapien
tgagaccggttagacccccatagtg

SEQ ID NO: 3716290 - DNA, 25 bp, Homo sapien
cgccaagtcctcaccactggcagcc

SEQ ID NO: 3716291 - DNA, 25 bp, Homo sapien
tgggcggagtgaccaaacctctgtt

SEQ ID NO: 3716292 - DNA, 25 bp, Homo sapien
tcatgatgtatcgattttggcccat

SEQ ID NO: 3716293 - DNA, 25 bp, Homo sapien
gtgaaggtcattcactggagaagga

SEQ ID NO: 3716294 - DNA, 25 bp, Homo sapien
gacactactaaaagcccctgatcct

SEQ ID NO: 3716295 - DNA, 25 bp, Homo sapien
ctctggcaatagtatccttcagact

SEQ ID NO: 3716296 - DNA, 25 bp, Homo sapien
gcagagctctggcaatagtatcctt

SEQ ID NO: 3716297 - DNA, 25 bp, Homo sapien
ggcaatagtatccttcagactctca

SEQ ID NO: 3716298 - DNA, 25 bp, Homo sapien
gaagggcagagctctggcaatagta

SEQ ID NO: 3716299 - DNA, 25 bp, Homo sapien
gatgcttgacaatgccccggaggct

SEQ ID NO: 3716300 - DNA, 25 bp, Homo sapien
cctccagatgcttgacaatgccccg

SEQ ID NO: 3716301 - DNA, 25 bp, Homo sapien
ccagatgcttgacaatgccccggag

SEQ ID NO: 3716302 - DNA, 25 bp, Homo sapien
agatgcttgacaatgccccggaggc

SEQ ID NO: 3716303 - DNA, 25 bp, Homo sapien
tgacaataccaatctagaggtgagc

SEQ ID NO: 3716304 - DNA, 25 bp, Homo sapien
ttggcaagctaaggaggattttcac

SEQ ID NO: 3716305 - DNA, 25 bp, Homo sapien
gaatagatgccgattctgaaacagg

SEQ ID NO: 3716306 - DNA, 25 bp, Homo sapien
gaggttctgcatgtataacaagctc

SEQ ID NO: 3716307 - DNA, 25 bp, Homo sapien
ttccatggctttgcgcaccgtctct

SEQ ID NO: 3716308 - DNA, 25 bp, Homo sapien
gcttccatggctttgcgcaccgtct

SEQ ID NO: 3716309 - DNA, 25 bp, Homo sapien
cagaaactgcatgggcttgataggc

SEQ ID NO: 3716310 - DNA, 25 bp, Homo sapien
tggctttgcgcaccgtctcttcatc

SEQ ID NO: 3716311 - DNA, 25 bp, Homo sapien
caggcagtaggcagtgacctgactg

SEQ ID NO: 3716312 - DNA, 25 bp, Homo sapien
gcagtaggcagtgacctgactgcag

SEQ ID NO: 3716313 - DNA, 25 bp, Homo sapien
agcagaggacagactccgctcatgg

SEQ ID NO: 3716314 - DNA, 25 bp, Homo sapien
catcaccacgcaggttacattcgtc

SEQ ID NO: 3716315 - DNA, 25 bp, Homo sapien
gtacagttatgctcagatgaacact

SEQ ID NO: 3716316 - DNA, 25 bp, Homo sapien
gatcctatattggtatgaggaatgg

SEQ ID NO: 3716317 - DNA, 25 bp, Homo sapien
acagttatgctcagatgaacactgg

SEQ ID NO: 3716318 - DNA, 25 bp, Homo sapien
cctcagaggtcaaggagctgatcct

SEQ ID NO: 3716319 - DNA, 25 bp, Homo sapien
caacccgaattcttgcagacctaag

SEQ ID NO: 3716320 - DNA, 25 bp, Homo sapien
tcatacccagcataaaagaggagtc

SEQ ID NO: 3716321 - DNA, 25 bp, Homo sapien
tccaggtatccagatggttcccatc

SEQ ID NO: 3716322 - DNA, 25 bp, Homo sapien
ggtggcacttcagcttcatacccag

SEQ ID NO: 3716323 - DNA, 25 bp, Homo sapien
aaaccgagccccgtagcctctgccg

SEQ ID NO: 3716324 - DNA, 25 bp, Homo sapien
ccggctcaatccaaaccaccatggc

SEQ ID NO: 3716325 - DNA, 25 bp, Homo sapien
tgccgcctgccgactccccagtcag

SEQ ID NO: 3716326 - DNA, 25 bp, Homo sapien
actccccagtcagccaaaccgagcc

SEQ ID NO: 3716327 - DNA, 25 bp, Homo sapien
tcccttctgggctaacacgctgaga

SEQ ID NO: 3716328 - DNA, 25 bp, Homo sapien
gacagccgcgaggtgaaactgcgat

SEQ ID NO: 3716329 - DNA, 25 bp, Homo sapien
aacgattgctcggaaggtgcgctcg

SEQ ID NO: 3716330 - DNA, 25 bp, Homo sapien
ttatcttttgatgacgggcccacac

SEQ ID NO: 3716331 - DNA, 25 bp, Homo sapien
ggaaagcctggccagatgtctatct

SEQ ID NO: 3716332 - DNA, 25 bp, Homo sapien
gggatgcagaagtggaaagcctggc

SEQ ID NO: 3716333 - DNA, 25 bp, Homo sapien
tgttgaatgaatgacctggagggat

SEQ ID NO: 3716334 - DNA, 25 bp, Homo sapien
tctgtcctacaaataccagcaagga

SEQ ID NO: 3716335 - DNA, 25 bp, Homo sapien
tcaaatgtaagagtgggacaaaaca

SEQ ID NO: 3716336 - DNA, 25 bp, Homo sapien
tagtagacacccacaatcaaatgta

SEQ ID NO: 3716337 - DNA, 25 bp, Homo sapien
aatctaggtggcttttggactgtcc

SEQ ID NO: 3716338 - DNA, 25 bp, Homo sapien
cattccctttctataggtcatggag

SEQ ID NO: 3716339 - DNA, 25 bp, Homo sapien
aattcagtagggacctacgctcagc

SEQ ID NO: 3716340 - DNA, 25 bp, Homo sapien
tcagcagacaaggtccacagagaag

SEQ ID NO: 3716341 - DNA, 25 bp, Homo sapien
gcacaagccctgtaagccctaaggt

SEQ ID NO: 3716342 - DNA, 25 bp, Homo sapien
tgccacctcctaggaagctaaaaga

SEQ ID NO: 3716343 - DNA, 25 bp, Homo sapien
gagggctttgtccttgacaatccca

SEQ ID NO: 3716344 - DNA, 25 bp, Homo sapien
actgcagggatggtttcaattcggt

SEQ ID NO: 3716345 - DNA, 25 bp, Homo sapien
taacaggtagctcaaaacccaacag

SEQ ID NO: 3716346 - DNA, 25 bp, Homo sapien
tcccactgacttatttaacaggtag

SEQ ID NO: 3716347 - DNA, 25 bp, Homo sapien
gctaacagattccttcgatgacagt

SEQ ID NO: 3716348 - DNA, 25 bp, Homo sapien
aagatacccaaccagacttcccagt

SEQ ID NO: 3716349 - DNA, 25 bp, Homo sapien
ttctacctcatgcaacagccatggg

SEQ ID NO: 3716350 - DNA, 25 bp, Homo sapien
aagagatcggctgcctgggcaatga

SEQ ID NO: 3716351 - DNA, 25 bp, Homo sapien
cagccaatggaagaatgagtacaca

SEQ ID NO: 3716352 - DNA, 25 bp, Homo sapien
ggtagccaagacaactccaggtatt

SEQ ID NO: 3716353 - DNA, 25 bp, Homo sapien
cagaatgtggatcctgtaccgaggt

SEQ ID NO: 3716354 - DNA, 25 bp, Homo sapien
gctgatgtcacaggctagccaactc

SEQ ID NO: 3716355 - DNA, 25 bp, Homo sapien
gcgctgtactagaccccggagtaga

SEQ ID NO: 3716356 - DNA, 25 bp, Homo sapien
cggatcacgttgtctaccagccagt

SEQ ID NO: 3716357 - DNA, 25 bp, Homo sapien
caggcagaccttgccgtagcgccag

SEQ ID NO: 3716358 - DNA, 25 bp, Homo sapien
cagccagtagacaggctcaaaggca

SEQ ID NO: 3716359 - DNA, 25 bp, Homo sapien
gagcctgtcagcacgatcaccagga

SEQ ID NO: 3716360 - DNA, 25 bp, Homo sapien
gacaatcaggatcagattccagtgg

SEQ ID NO: 3716361 - DNA, 25 bp, Homo sapien
caggacacacaggtaggcgatagct

SEQ ID NO: 3716362 - DNA, 25 bp, Homo sapien
ggcgatagctacaatggagcctgtc

SEQ ID NO: 3716363 - DNA, 25 bp, Homo sapien
gatggagacggtggcgatatcattc

SEQ ID NO: 3716364 - DNA, 25 bp, Homo sapien
aatgcacttcttacagatggagacg

SEQ ID NO: 3716365 - DNA, 25 bp, Homo sapien
tgcagtggtgtgttcgggctggctt

SEQ ID NO: 3716366 - DNA, 25 bp, Homo sapien
gctggcttggggtaaatgcacttct

SEQ ID NO: 3716367 - DNA, 25 bp, Homo sapien
gcagtttaatggctataagatattg

SEQ ID NO: 3716368 - DNA, 25 bp, Homo sapien
ggaaagggcacagactttgaagaca

SEQ ID NO: 3716369 - DNA, 25 bp, Homo sapien
tattggacaaggtaactcatctctc

SEQ ID NO: 3716370 - DNA, 25 bp, Homo sapien
ctcatctctccaaacctcggttttc

SEQ ID NO: 3716371 - DNA, 25 bp, Homo sapien
tcagtgccaatccttccctacaagg

SEQ ID NO: 3716372 - DNA, 25 bp, Homo sapien
caggctctgttacggtggccaaagt

SEQ ID NO: 3716373 - DNA, 25 bp, Homo sapien
tacggtggccaaagttcttgagatg

SEQ ID NO: 3716374 - DNA, 25 bp, Homo sapien
gttcttgagatgtcagtgccaatcc

SEQ ID NO: 3716375 - DNA, 25 bp, Homo sapien
ggcagtggtgatccatcttcagcac

SEQ ID NO: 3716376 - DNA, 25 bp, Homo sapien
cagtggtgatccatcttcagcacac

SEQ ID NO: 3716377 - DNA, 25 bp, Homo sapien
gtggtgatccatcttcagcacacac

SEQ ID NO: 3716378 - DNA, 25 bp, Homo sapien
gcagtggtgatccatcttcagcaca

SEQ ID NO: 3716379 - DNA, 25 bp, Homo sapien
tctctgcacggtgatgctaaaatgg

SEQ ID NO: 3716380 - DNA, 25 bp, Homo sapien
taaaatggtggccattaaccctgta

SEQ ID NO: 3716381 - DNA, 25 bp, Homo sapien
tacagtgctctggagctaaagaagg

SEQ ID NO: 3716382 - DNA, 25 bp, Homo sapien
cattaaccctgtacagtgctctgga

SEQ ID NO: 3716383 - DNA, 25 bp, Homo sapien
ctttccatccaatagctgttagcat

SEQ ID NO: 3716384 - DNA, 25 bp, Homo sapien
agatccgtcctagagtgtgagcttc

SEQ ID NO: 3716385 - DNA, 25 bp, Homo sapien
tccaatagctgttagcatgagagtc

SEQ ID NO: 3716386 - DNA, 25 bp, Homo sapien
ctgctccaagaagatccgtcctaga

SEQ ID NO: 3716387 - DNA, 25 bp, Homo sapien
ccgatggttatagtggcccacacaa

SEQ ID NO: 3716388 - DNA, 25 bp, Homo sapien
gaagtaccgatggttatagtggccc

SEQ ID NO: 3716389 - DNA, 25 bp, Homo sapien
gaagaagtaccgatggttatagtgg

SEQ ID NO: 3716390 - DNA, 25 bp, Homo sapien
gaaagagaagaagtaccgatggtta

SEQ ID NO: 3716391 - DNA, 25 bp, Homo sapien
atggcagcataagcctcccggaaaa

SEQ ID NO: 3716392 - DNA, 25 bp, Homo sapien
gcagcataagcctcccggaaaaggt

SEQ ID NO: 3716393 - DNA, 25 bp, Homo sapien
cagcataagcctcccggaaaaggtc

SEQ ID NO: 3716394 - DNA, 25 bp, Homo sapien
ggcagcataagcctcccggaaaagg

SEQ ID NO: 3716395 - DNA, 25 bp, Homo sapien
gttggcaaccgcctgtagtttgttc

SEQ ID NO: 3716396 - DNA, 25 bp, Homo sapien
ctggttggcaaccgcctgtagtttg

SEQ ID NO: 3716397 - DNA, 25 bp, Homo sapien
tagtttgttcttgtcgagctgtttc

SEQ ID NO: 3716398 - DNA, 25 bp, Homo sapien
tgtagtttgttcttgtcgagctgtt

SEQ ID NO: 3716399 - DNA, 25 bp, Homo sapien
ctagaaaaagaaaacagcaaagctg

SEQ ID NO: 3716400 - DNA, 25 bp, Homo sapien
gacaagactcttgtgagtcatcctt

SEQ ID NO: 3716401 - DNA, 25 bp, Homo sapien
aggaaccagaggtagacaagactct

SEQ ID NO: 3716402 - DNA, 25 bp, Homo sapien
gagtcatcctttctcgaaaggagaa

SEQ ID NO: 3716403 - DNA, 25 bp, Homo sapien
gtgagtcatcctttctcgaaaggag

SEQ ID NO: 3716404 - DNA, 25 bp, Homo sapien
cctactagctgtgtatcatagaaca

SEQ ID NO: 3716405 - DNA, 25 bp, Homo sapien
tacagtcacccagcctttagacagg

SEQ ID NO: 3716406 - DNA, 25 bp, Homo sapien
acttaggaatgggtttctgcctgcg

SEQ ID NO: 3716407 - DNA, 25 bp, Homo sapien
ggctctctgccaacctaagttagac

SEQ ID NO: 3716408 - DNA, 25 bp, Homo sapien
gataaacttttacttcactatgtct

SEQ ID NO: 3716409 - DNA, 25 bp, Homo sapien
ctcccaccatatatcctagataaac

SEQ ID NO: 3716410 - DNA, 25 bp, Homo sapien
tgtctataaagagcatcaatgaaaa

SEQ ID NO: 3716411 - DNA, 25 bp, Homo sapien
taacaactggtttggaacctctcta

SEQ ID NO: 3716412 - DNA, 25 bp, Homo sapien
gtgggtagtttagagagggctggag

SEQ ID NO: 3716413 - DNA, 25 bp, Homo sapien
gcatgccatacagttagggcaccca

SEQ ID NO: 3716414 - DNA, 25 bp, Homo sapien
agttagggcacccagggcaagtgcc

SEQ ID NO: 3716415 - DNA, 25 bp, Homo sapien
tgccatacagttagggcacccaggg

SEQ ID NO: 3716416 - DNA, 25 bp, Homo sapien
atacagttagggcacccagggcaag

SEQ ID NO: 3716417 - DNA, 25 bp, Homo sapien
ctctccttcttgttgatgtgccttt

SEQ ID NO: 3716418 - DNA, 25 bp, Homo sapien
gcctttcgatgctagtctcacctcg

SEQ ID NO: 3716419 - DNA, 25 bp, Homo sapien
tcttgttgatgtgcctttcgatgct

SEQ ID NO: 3716420 - DNA, 25 bp, Homo sapien
gatgtgcctttcgatgctagtctca

SEQ ID NO: 3716421 - DNA, 25 bp, Homo sapien
cagttgtccaagcagccgtagttgt

SEQ ID NO: 3716422 - DNA, 25 bp, Homo sapien
aagcagccgtagttgtaaggattcc

SEQ ID NO: 3716423 - DNA, 25 bp, Homo sapien
gtccaagcagccgtagttgtaagga

SEQ ID NO: 3716424 - DNA, 25 bp, Homo sapien
cagccgtagttgtaaggattcctaa

SEQ ID NO: 3716425 - DNA, 25 bp, Homo sapien
cttcctgtatccacacccaggaata

SEQ ID NO: 3716426 - DNA, 25 bp, Homo sapien
ttcctgtatccacacccaggaatac

SEQ ID NO: 3716427 - DNA, 25 bp, Homo sapien
tgtagtcacgttgaagcctcatctg

SEQ ID NO: 3716428 - DNA, 25 bp, Homo sapien
gagcacagctttcctaggattccac

SEQ ID NO: 3716429 - DNA, 25 bp, Homo sapien
cagtattggcctcaagcctttctgg

SEQ ID NO: 3716430 - DNA, 25 bp, Homo sapien
tcctagagtctagaactgtgctaac

SEQ ID NO: 3716431 - DNA, 25 bp, Homo sapien
ttcgagctaaacttctaaaggtcca

SEQ ID NO: 3716432 - DNA, 25 bp, Homo sapien
ctagaaggtaagagcacccgagtaa

SEQ ID NO: 3716433 - DNA, 25 bp, Homo sapien
gtaagagcacccgagtaagccagtg

SEQ ID NO: 3716434 - DNA, 25 bp, Homo sapien
gaaggtaagagcacccgagtaagcc

SEQ ID NO: 3716435 - DNA, 25 bp, Homo sapien
taagagcacccgagtaagccagtgc

SEQ ID NO: 3716436 - DNA, 25 bp, Homo sapien
gggctcccagctcattccattccca

SEQ ID NO: 3716437 - DNA, 25 bp, Homo sapien
ccatcacagaggctgagtgagcagt

SEQ ID NO: 3716438 - DNA, 25 bp, Homo sapien
cagaggctgagtgagcagtcaccca

SEQ ID NO: 3716439 - DNA, 25 bp, Homo sapien
tcattccattcccatggggcaagtg

SEQ ID NO: 3716440 - DNA, 25 bp, Homo sapien
caaggtaggtagctagctgcctgac

SEQ ID NO: 3716441 - DNA, 25 bp, Homo sapien
ctgcagtggtaaaaaggctggtcct

SEQ ID NO: 3716442 - DNA, 25 bp, Homo sapien
gaattgtcctgcatggtaccctaag

SEQ ID NO: 3716443 - DNA, 25 bp, Homo sapien
tcgagtcgtggctgacacagtccag

SEQ ID NO: 3716444 - DNA, 25 bp, Homo sapien
gatctcagctgtactagtcaggtgt

SEQ ID NO: 3716445 - DNA, 25 bp, Homo sapien
tagtcaggtgttttttcagacagca

SEQ ID NO: 3716446 - DNA, 25 bp, Homo sapien
ccctgttgagaagccaagatctcag

SEQ ID NO: 3716447 - DNA, 25 bp, Homo sapien
tgttttttcagacagcaagtagaag

SEQ ID NO: 3716448 - DNA, 25 bp, Homo sapien
tcgaatacctttatttgtgctccct

SEQ ID NO: 3716449 - DNA, 25 bp, Homo sapien
tgtgctcccttaagcagcatgtgag

SEQ ID NO: 3716450 - DNA, 25 bp, Homo sapien
agcatgtgagaagtggcagtgacct

SEQ ID NO: 3716451 - DNA, 25 bp, Homo sapien
agaagtggcagtgacctcagcagca

SEQ ID NO: 3716452 - DNA, 25 bp, Homo sapien
gactagccctggcagtatagcaaga

SEQ ID NO: 3716453 - DNA, 25 bp, Homo sapien
gaacacctactcactaggtcttgac

SEQ ID NO: 3716454 - DNA, 25 bp, Homo sapien
ggaagcatgaccagaacacctactc

SEQ ID NO: 3716455 - DNA, 25 bp, Homo sapien
ggtcatgacatcgagacctcctggc

SEQ ID NO: 3716456 - DNA, 25 bp, Homo sapien
gctgctgccgtacaaaccacaggtg

SEQ ID NO: 3716457 - DNA, 25 bp, Homo sapien
cagatcttgtaattctgggcccaag

SEQ ID NO: 3716458 - DNA, 25 bp, Homo sapien
cagaaggtaacagaaaggccatcct

SEQ ID NO: 3716459 - DNA, 25 bp, Homo sapien
caccctggtgtgtaattgagatctg

SEQ ID NO: 3716460 - DNA, 25 bp, Homo sapien
taatgtgcctgctttggtccagggc

SEQ ID NO: 3716461 - DNA, 25 bp, Homo sapien
actgatgtgctgactcgtgctggcc

SEQ ID NO: 3716462 - DNA, 25 bp, Homo sapien
caaaggccctagtgctcagatacca

SEQ ID NO: 3716463 - DNA, 25 bp, Homo sapien
taagataatttagggcccgcttgct

SEQ ID NO: 3716464 - DNA, 25 bp, Homo sapien
gagtcaagccccagagtcagtgatg

SEQ ID NO: 3716465 - DNA, 25 bp, Homo sapien
gattctcaggactatagcactacca

SEQ ID NO: 3716466 - DNA, 25 bp, Homo sapien
taccagagaccagattaagaactgc

SEQ ID NO: 3716467 - DNA, 25 bp, Homo sapien
taaagactgtgcagagttctcagga

SEQ ID NO: 3716468 - DNA, 25 bp, Homo sapien
taatgatccccatggtatccagaga

SEQ ID NO: 3716469 - DNA, 25 bp, Homo sapien
caggtgttccagacggcaagtgagc

SEQ ID NO: 3716470 - DNA, 25 bp, Homo sapien
tgatagcagcggtttccttggcaga

SEQ ID NO: 3716471 - DNA, 25 bp, Homo sapien
gatttgggcctttgtgtcgacctga

SEQ ID NO: 3716472 - DNA, 25 bp, Homo sapien
gcacaagacatatgatattagattt

SEQ ID NO: 3716473 - DNA, 25 bp, Homo sapien
gacatatgatattagatttatacac

SEQ ID NO: 3716474 - DNA, 25 bp, Homo sapien
atgcacaagacatatgatattagat

SEQ ID NO: 3716475 - DNA, 25 bp, Homo sapien
caagacatatgatattagatttata

SEQ ID NO: 3716476 - DNA, 25 bp, Homo sapien
cacttcagtctgaggatcgctctta

SEQ ID NO: 3716477 - DNA, 25 bp, Homo sapien
aaaccctgtgggtagctgctaagct

SEQ ID NO: 3716478 - DNA, 25 bp, Homo sapien
cacgtgtgcctctaaatgatgccac

SEQ ID NO: 3716479 - DNA, 25 bp, Homo sapien
tgtaatgccgttacctcaggaacac

SEQ ID NO: 3716480 - DNA, 25 bp, Homo sapien
ctgcaagctctgcctcctgggatca

SEQ ID NO: 3716481 - DNA, 25 bp, Homo sapien
cgcccggcctcatttttctctaatt

SEQ ID NO: 3716482 - DNA, 25 bp, Homo sapien
ccgcgcccggcctcatttttctcta

SEQ ID NO: 3716483 - DNA, 25 bp, Homo sapien
agtgcagtggctccgtctccactca

SEQ ID NO: 3716484 - DNA, 25 bp, Homo sapien
ccggcatcgggcgctccccgatctc

SEQ ID NO: 3716485 - DNA, 25 bp, Homo sapien
ggtggtcggctgctcagcggacggc

SEQ ID NO: 3716486 - DNA, 25 bp, Homo sapien
cggacggcggcgtcccgggtcaatg

SEQ ID NO: 3716487 - DNA, 25 bp, Homo sapien
ccagcgatggctccgccaaaacttt

SEQ ID NO: 3716488 - DNA, 25 bp, Homo sapien
tgctcgcttgcgggggtgtcccggg

SEQ ID NO: 3716489 - DNA, 25 bp, Homo sapien
gctgtctccccacgcagttgcccat

SEQ ID NO: 3716490 - DNA, 25 bp, Homo sapien
ctgctcgcttgcgggggtgtcccgg

SEQ ID NO: 3716491 - DNA, 25 bp, Homo sapien
ggcgctgtctccccacgcagttgcc

SEQ ID NO: 3716492 - DNA, 25 bp, Homo sapien
ccaccccgagcttgagattccagaa

SEQ ID NO: 3716493 - DNA, 25 bp, Homo sapien
gaacgtaagtggatatgcctggcac

SEQ ID NO: 3716494 - DNA, 25 bp, Homo sapien
tcaggttcgggacatatttaaggca

SEQ ID NO: 3716495 - DNA, 25 bp, Homo sapien
gagtcagatatttgggtttcagccc

SEQ ID NO: 3716496 - DNA, 25 bp, Homo sapien
tacagtttagagtatcacgctggct

SEQ ID NO: 3716497 - DNA, 25 bp, Homo sapien
cacgctggctagtgggatggaaata

SEQ ID NO: 3716498 - DNA, 25 bp, Homo sapien
tgtagaccaacacaagaagtcttga

SEQ ID NO: 3716499 - DNA, 25 bp, Homo sapien
agagagggacccattcagatatcgg

SEQ ID NO: 3716500 - DNA, 25 bp, Homo sapien
gacgtgttcacttatgcttttctat

SEQ ID NO: 3716501 - DNA, 25 bp, Homo sapien
gaggtacataatgccgagagcaggt

SEQ ID NO: 3716502 - DNA, 25 bp, Homo sapien
tgctcttggtatcacagagtgaaca

SEQ ID NO: 3716503 - DNA, 25 bp, Homo sapien
cagaggatgacataagcaatggaac

SEQ ID NO: 3716504 - DNA, 25 bp, Homo sapien
ttaggaccccaatagtgagcttcac

SEQ ID NO: 3716505 - DNA, 25 bp, Homo sapien
cacaggagtcatatatatcccaggt

SEQ ID NO: 3716506 - DNA, 25 bp, Homo sapien
atctaagaacttacgcaagcctggg

SEQ ID NO: 3716507 - DNA, 25 bp, Homo sapien
aagaaggtgctactgcctggttagg

SEQ ID NO: 3716508 - DNA, 25 bp, Homo sapien
tatccctgccctgcgagttaaggac

SEQ ID NO: 3716509 - DNA, 25 bp, Homo sapien
ttctaaaaattctccagcaagttga

SEQ ID NO: 3716510 - DNA, 25 bp, Homo sapien
tcccttgtagtctattaggccaccc

SEQ ID NO: 3716511 - DNA, 25 bp, Homo sapien
tgggtaagagatgcctggaatccac

SEQ ID NO: 3716512 - DNA, 25 bp, Homo sapien
taccaaccatcatttgcattgagtt

SEQ ID NO: 3716513 - DNA, 25 bp, Homo sapien
tttgcattgagttcatcacccctac

SEQ ID NO: 3716514 - DNA, 25 bp, Homo sapien
atcatttgcattgagttcatcaccc

SEQ ID NO: 3716515 - DNA, 25 bp, Homo sapien
cttaccaaccatcatttgcattgag

SEQ ID NO: 3716516 - DNA, 25 bp, Homo sapien
tgaggtttacggaagggctcccatc

SEQ ID NO: 3716517 - DNA, 25 bp, Homo sapien
gagagacaggccaacgcattcagtg

SEQ ID NO: 3716518 - DNA, 25 bp, Homo sapien
caagttcacactgatcggagggagc

SEQ ID NO: 3716519 - DNA, 25 bp, Homo sapien
cattcagtgcgttcaaaagctagcc

SEQ ID NO: 3716520 - DNA, 25 bp, Homo sapien
ggtctccccacactcatcctgctgg

SEQ ID NO: 3716521 - DNA, 25 bp, Homo sapien
acactcatcctgctggctgtcacgg

SEQ ID NO: 3716522 - DNA, 25 bp, Homo sapien
gggtctccccacactcatcctgctg

SEQ ID NO: 3716523 - DNA, 25 bp, Homo sapien
cctgctggctgtcacggaggcagaa

SEQ ID NO: 3716524 - DNA, 25 bp, Homo sapien
aaatggcacatcagtctgcagggta

SEQ ID NO: 3716525 - DNA, 25 bp, Homo sapien
tgcgaataggcttccagactacaca

SEQ ID NO: 3716526 - DNA, 25 bp, Homo sapien
ggatgaagccctgccagagatcgaa

SEQ ID NO: 3716527 - DNA, 25 bp, Homo sapien
gagtgcttgttagacccttagggat

SEQ ID NO: 3716528 - DNA, 25 bp, Homo sapien
tcagattttattgtgtcgatcatgg

SEQ ID NO: 3716529 - DNA, 25 bp, Homo sapien
attagaagaggagcgaaaaaacagg

SEQ ID NO: 3716530 - DNA, 25 bp, Homo sapien
caggaagatcagttaagaggctgct

SEQ ID NO: 3716531 - DNA, 25 bp, Homo sapien
cccaaatgatatgtaaggcaggcat

SEQ ID NO: 3716532 - DNA, 25 bp, Homo sapien
aactggcttgccagactggttggga

SEQ ID NO: 3716533 - DNA, 25 bp, Homo sapien
tgccaccataactcggggctgtggg

SEQ ID NO: 3716534 - DNA, 25 bp, Homo sapien
aaactggcttgccagactggttggg

SEQ ID NO: 3716535 - DNA, 25 bp, Homo sapien
tgctgctgccaccataactcggggc

SEQ ID NO: 3716536 - DNA, 25 bp, Homo sapien
agctgtcagaccagcatcctccctg

SEQ ID NO: 3716537 - DNA, 25 bp, Homo sapien
cagagctgtcagaccagcatcctcc

SEQ ID NO: 3716538 - DNA, 25 bp, Homo sapien
agagctgtcagaccagcatcctccc

SEQ ID NO: 3716539 - DNA, 25 bp, Homo sapien
gagctgtcagaccagcatcctccct

SEQ ID NO: 3716540 - DNA, 25 bp, Homo sapien
gcaaatctgcccacaactgttcggg

SEQ ID NO: 3716541 - DNA, 25 bp, Homo sapien
acagcaaatctgcccacaactgttc

SEQ ID NO: 3716542 - DNA, 25 bp, Homo sapien
cgggctcctgcatactccatctgag

SEQ ID NO: 3716543 - DNA, 25 bp, Homo sapien
ggctcctgcatactccatctgagca

SEQ ID NO: 3716544 - DNA, 25 bp, Homo sapien
acagtccagatgtggcccatccagc

SEQ ID NO: 3716545 - DNA, 25 bp, Homo sapien
ttaacagtccagatgtggcccatcc

SEQ ID NO: 3716546 - DNA, 25 bp, Homo sapien
gtggcccatccagcaccaggcccca

SEQ ID NO: 3716547 - DNA, 25 bp, Homo sapien
tggcccatccagcaccaggccccac

SEQ ID NO: 3716548 - DNA, 25 bp, Homo sapien
tctcacccatccttgtttcaactaa

SEQ ID NO: 3716549 - DNA, 25 bp, Homo sapien
tctttaccgtctcacccatccttgt

SEQ ID NO: 3716550 - DNA, 25 bp, Homo sapien
tccagattctttaccgtctcaccca

SEQ ID NO: 3716551 - DNA, 25 bp, Homo sapien
taccgtctcacccatccttgtttca

SEQ ID NO: 3716552 - DNA, 25 bp, Homo sapien
tgtgcgggcagccacagatacggac

SEQ ID NO: 3716553 - DNA, 25 bp, Homo sapien
aaggcctcagtgtgcgggcagccac

SEQ ID NO: 3716554 - DNA, 25 bp, Homo sapien
ggcacacatgcgtgagacagggtgt

SEQ ID NO: 3716555 - DNA, 25 bp, Homo sapien
cagatacggacaagggggcacacat

SEQ ID NO: 3716556 - DNA, 25 bp, Homo sapien
ctctagaggtacagtgggtcccagg

SEQ ID NO: 3716557 - DNA, 25 bp, Homo sapien
ggccctctggccaggatacagactc

SEQ ID NO: 3716558 - DNA, 25 bp, Homo sapien
tggccaggatacagactcgaatctc

SEQ ID NO: 3716559 - DNA, 25 bp, Homo sapien
tctggccaggatacagactcgaatc

SEQ ID NO: 3716560 - DNA, 25 bp, Homo sapien
caggatacagactcgaatctcttgt

SEQ ID NO: 3716561 - DNA, 25 bp, Homo sapien
cgcaattgtgctgggcagaggacac

SEQ ID NO: 3716562 - DNA, 25 bp, Homo sapien
cgtttccgcaattgtgctgggcaga

SEQ ID NO: 3716563 - DNA, 25 bp, Homo sapien
tccgcaattgtgctgggcagaggac

SEQ ID NO: 3716564 - DNA, 25 bp, Homo sapien
catgcgtttccgcaattgtgctggg

SEQ ID NO: 3716565 - DNA, 25 bp, Homo sapien
gtaatcccagctattatggaggtga

SEQ ID NO: 3716566 - DNA, 25 bp, Homo sapien
aaataaataaatggtcaggcacagt

SEQ ID NO: 3716567 - DNA, 25 bp, Homo sapien
gtcaacatggaaaaacaccatatct

SEQ ID NO: 3716568 - DNA, 25 bp, Homo sapien
ccagctattatggaggtgaggcagg

SEQ ID NO: 3716569 - DNA, 25 bp, Homo sapien
tgttttgtctcaaagaagcatgggc

SEQ ID NO: 3716570 - DNA, 25 bp, Homo sapien
ttttgtctcaaagaagcatgggcca

SEQ ID NO: 3716571 - DNA, 25 bp, Homo sapien
gttttgtctcaaagaagcatgggcc

SEQ ID NO: 3716572 - DNA, 25 bp, Homo sapien
cttcagcagcataggcggcagcctt

SEQ ID NO: 3716573 - DNA, 25 bp, Homo sapien
ggtgatgctggctccatccaggatg

SEQ ID NO: 3716574 - DNA, 25 bp, Homo sapien
agaactcatcccgtttgctccgcag

SEQ ID NO: 3716575 - DNA, 25 bp, Homo sapien
ccagctcgtggtcgttggcttcagc

SEQ ID NO: 3716576 - DNA, 25 bp, Homo sapien
tctcctggagccgtgtgcggtctgt

SEQ ID NO: 3716577 - DNA, 25 bp, Homo sapien
tagcgattgcccagctcatcgtagc

SEQ ID NO: 3716578 - DNA, 25 bp, Homo sapien
ttcaccggcggtgacaggcagtaga

SEQ ID NO: 3716579 - DNA, 25 bp, Homo sapien
tcatcgtagcattcacagagggtgc

SEQ ID NO: 3716580 - DNA, 25 bp, Homo sapien
aactggtggcgcgtagtgccctgaa

SEQ ID NO: 3716581 - DNA, 25 bp, Homo sapien
tctgacaaggttgcaaggcccgtgt

SEQ ID NO: 3716582 - DNA, 25 bp, Homo sapien
tgcagatatgtctgtccacagggac

SEQ ID NO: 3716583 - DNA, 25 bp, Homo sapien
cccttccaagggagtggcactgtgc

SEQ ID NO: 3716584 - DNA, 25 bp, Homo sapien
attagagccggagggcactgtgtcc

SEQ ID NO: 3716585 - DNA, 25 bp, Homo sapien
ggcaactgagttgcaaaagggaact

SEQ ID NO: 3716586 - DNA, 25 bp, Homo sapien
cctggcctattagagccggagggca

SEQ ID NO: 3716587 - DNA, 25 bp, Homo sapien
gccaaggcaactgagttgcaaaagg

SEQ ID NO: 3716588 - DNA, 25 bp, Homo sapien
gccacagggcctcgggggctttata

SEQ ID NO: 3716589 - DNA, 25 bp, Homo sapien
gggggctttataggccagagcaccc

SEQ ID NO: 3716590 - DNA, 25 bp, Homo sapien
cctcgggggctttataggccagagc

SEQ ID NO: 3716591 - DNA, 25 bp, Homo sapien
tcgggggctttataggccagagcac

SEQ ID NO: 3716592 - DNA, 25 bp, Homo sapien
gccagccgctgctcgatgagcgctg

SEQ ID NO: 3716593 - DNA, 25 bp, Homo sapien
tcgatgagcgctgtggccctctgca

SEQ ID NO: 3716594 - DNA, 25 bp, Homo sapien
gctgctcgatgagcgctgtggccct

SEQ ID NO: 3716595 - DNA, 25 bp, Homo sapien
ctctgcaccgcctcggagtcctcca

SEQ ID NO: 3716596 - DNA, 25 bp, Homo sapien
tcagagcccttctggctgatcctgg

SEQ ID NO: 3716597 - DNA, 25 bp, Homo sapien
ctcagagcccttctggctgatcctg

SEQ ID NO: 3716598 - DNA, 25 bp, Homo sapien
cccgaggagacaggcagcctctccc

SEQ ID NO: 3716599 - DNA, 25 bp, Homo sapien
aggacccgaggagacaggcagcctc

SEQ ID NO: 3716600 - DNA, 25 bp, Homo sapien
gggcagcttctggcgtgcgtctcct

SEQ ID NO: 3716601 - DNA, 25 bp, Homo sapien
tctggcgtgcgtctcctcggagttt

SEQ ID NO: 3716602 - DNA, 25 bp, Homo sapien
cttctggcgtgcgtctcctcggagt

SEQ ID NO: 3716603 - DNA, 25 bp, Homo sapien
agcttctggcgtgcgtctcctcgga

SEQ ID NO: 3716604 - DNA, 25 bp, Homo sapien
ccccgtggtgcttctcatcctccag

SEQ ID NO: 3716605 - DNA, 25 bp, Homo sapien
tgagccccgtggtgcttctcatcct

SEQ ID NO: 3716606 - DNA, 25 bp, Homo sapien
tctgagccccgtggtgcttctcatc

SEQ ID NO: 3716607 - DNA, 25 bp, Homo sapien
agccccgtggtgcttctcatcctcc

SEQ ID NO: 3716608 - DNA, 25 bp, Homo sapien
cgtttcttccgcagctcgatgaggt

SEQ ID NO: 3716609 - DNA, 25 bp, Homo sapien
tggatcccgcccacatcgatgatct

SEQ ID NO: 3716610 - DNA, 25 bp, Homo sapien
gaggcggccagagcgtcccgcttct

SEQ ID NO: 3716611 - DNA, 25 bp, Homo sapien
gcaggtccagggacgtcttgcgcac

SEQ ID NO: 3716612 - DNA, 25 bp, Homo sapien
cccctccaccgcagctttcaggaag

SEQ ID NO: 3716613 - DNA, 25 bp, Homo sapien
tttcaggaaggtctcctcatccaca

SEQ ID NO: 3716614 - DNA, 25 bp, Homo sapien
ctgaccccccgtcagccaggaactt

SEQ ID NO: 3716615 - DNA, 25 bp, Homo sapien
ctggtcgcacgtgtcggctgacccc

SEQ ID NO: 3716616 - DNA, 25 bp, Homo sapien
aagtccacagtggccccattatcta

SEQ ID NO: 3716617 - DNA, 25 bp, Homo sapien
ggccccattatctagaagcttctcc

SEQ ID NO: 3716618 - DNA, 25 bp, Homo sapien
ctcggtgcagtgctgtccgacggaa

SEQ ID NO: 3716619 - DNA, 25 bp, Homo sapien
gccttccagggaagctcggtgcagt

SEQ ID NO: 3716620 - DNA, 25 bp, Homo sapien
ctttgcagaagtttcaccacctcta

SEQ ID NO: 3716621 - DNA, 25 bp, Homo sapien
cccaatgcatggctgtgcagtccag

SEQ ID NO: 3716622 - DNA, 25 bp, Homo sapien
ttgcagaagtttcaccacctctaag

SEQ ID NO: 3716623 - DNA, 25 bp, Homo sapien
ccgcggcaggcccaatgcatggctg

SEQ ID NO: 3716624 - DNA, 25 bp, Homo sapien
ccaggcccagggatagaaagtgctc

SEQ ID NO: 3716625 - DNA, 25 bp, Homo sapien
ggatagaaagtgctccacaatctcc

SEQ ID NO: 3716626 - DNA, 25 bp, Homo sapien
tgtccggactgccacgtgcagcggg

SEQ ID NO: 3716627 - DNA, 25 bp, Homo sapien
tgtctctggcattgatttccaggcc

SEQ ID NO: 3716628 - DNA, 25 bp, Homo sapien
ggagcagcagtttgatgattttgta

SEQ ID NO: 3716629 - DNA, 25 bp, Homo sapien
ttgatgattttgtagcggttgagcc

SEQ ID NO: 3716630 - DNA, 25 bp, Homo sapien
ggttgagcctcacagcgtcatgcag

SEQ ID NO: 3716631 - DNA, 25 bp, Homo sapien
cagcgtcatgcagggcagtatcccc

SEQ ID NO: 3716632 - DNA, 25 bp, Homo sapien
ggtaccctcattgacaccaccagtg

SEQ ID NO: 3716633 - DNA, 25 bp, Homo sapien
aaggctttcacagaaggtaccctca

SEQ ID NO: 3716634 - DNA, 25 bp, Homo sapien
gcaactggcattgtgtgaagatact

SEQ ID NO: 3716635 - DNA, 25 bp, Homo sapien
gagaaaatctgttaactgtcctgaa

SEQ ID NO: 3716636 - DNA, 25 bp, Homo sapien
tgccagagctgcaccaggtccgtcg

SEQ ID NO: 3716637 - DNA, 25 bp, Homo sapien
tgccgggtatcagcctgccagagct

SEQ ID NO: 3716638 - DNA, 25 bp, Homo sapien
ccagagctgcaccaggtccgtcggg

SEQ ID NO: 3716639 - DNA, 25 bp, Homo sapien
cccggctcaggatgctccagggcgt

SEQ ID NO: 3716640 - DNA, 25 bp, Homo sapien
acaggctgaggggtctctcgcccac

SEQ ID NO: 3716641 - DNA, 25 bp, Homo sapien
tagtttgtggtatgtgctcctggat

SEQ ID NO: 3716642 - DNA, 25 bp, Homo sapien
attcttaggaccctccggctgcaca

SEQ ID NO: 3716643 - DNA, 25 bp, Homo sapien
tgctcctggatcatgcagaaaaaag

SEQ ID NO: 3716644 - DNA, 25 bp, Homo sapien
ccctcagttagctccgggagccatt

SEQ ID NO: 3716645 - DNA, 25 bp, Homo sapien
aagcacaattggtctatgtcccaga

SEQ ID NO: 3716646 - DNA, 25 bp, Homo sapien
tagcagctagagagatgccacaacc

SEQ ID NO: 3716647 - DNA, 25 bp, Homo sapien
tctgggatcccaatactaaagagta

SEQ ID NO: 3716648 - DNA, 25 bp, Homo sapien
aatttgcggcctccctgacttgtgg

SEQ ID NO: 3716649 - DNA, 25 bp, Homo sapien
aagctcctgcttagcccctgcctca

SEQ ID NO: 3716650 - DNA, 25 bp, Homo sapien
tgcctcacagaagaccagacttggg

SEQ ID NO: 3716651 - DNA, 25 bp, Homo sapien
aggcccagacccccacattcctgga

SEQ ID NO: 3716652 - DNA, 25 bp, Homo sapien
cacattcctggacaagctcctgctt

SEQ ID NO: 3716653 - DNA, 25 bp, Homo sapien
gggtagatacccgcaatgtccacct

SEQ ID NO: 3716654 - DNA, 25 bp, Homo sapien
agatacccgcaatgtccaccttctt

SEQ ID NO: 3716655 - DNA, 25 bp, Homo sapien
gtagatacccgcaatgtccaccttc

SEQ ID NO: 3716656 - DNA, 25 bp, Homo sapien
cacaggggggtagatacccgcaatg

SEQ ID NO: 3716657 - DNA, 25 bp, Homo sapien
ccagtttgtgcagattctcctccag

SEQ ID NO: 3716658 - DNA, 25 bp, Homo sapien
gtgcccagtttgtgcagattctcct

SEQ ID NO: 3716659 - DNA, 25 bp, Homo sapien
gaaggtgcccagtttgtgcagattc

SEQ ID NO: 3716660 - DNA, 25 bp, Homo sapien
ggaaggtgcccagtttgtgcagatt

SEQ ID NO: 3716661 - DNA, 25 bp, Homo sapien
ctgccagcctggcatattccatcct

SEQ ID NO: 3716662 - DNA, 25 bp, Homo sapien
atcctcatttgcagcccctcgcctc

SEQ ID NO: 3716663 - DNA, 25 bp, Homo sapien
agcctggcatattccatcctcattt

SEQ ID NO: 3716664 - DNA, 25 bp, Homo sapien
gccagcctggcatattccatcctca

SEQ ID NO: 3716665 - DNA, 25 bp, Homo sapien
tgaaccccattgtgaggaaggcagt

SEQ ID NO: 3716666 - DNA, 25 bp, Homo sapien
ggtatccattcctagccatctgaga

SEQ ID NO: 3716667 - DNA, 25 bp, Homo sapien
tgacagaatgatccccttgactggg

SEQ ID NO: 3716668 - DNA, 25 bp, Homo sapien
cagagctaagagcacgctgggtgat

SEQ ID NO: 3716669 - DNA, 25 bp, Homo sapien
gagctccaagaaggtctccaggacc

SEQ ID NO: 3716670 - DNA, 25 bp, Homo sapien
ctagcaagagggcagtccccagcac

SEQ ID NO: 3716671 - DNA, 25 bp, Homo sapien
gcaccaccttgcatgatggctgctg

SEQ ID NO: 3716672 - DNA, 25 bp, Homo sapien
ccagcaccaccttgcatgatggctg

SEQ ID NO: 3716673 - DNA, 25 bp, Homo sapien
tgggattctggtgacttgtccttgt

SEQ ID NO: 3716674 - DNA, 25 bp, Homo sapien
tttgctttatgggattctggtgact

SEQ ID NO: 3716675 - DNA, 25 bp, Homo sapien
ggcggctaaagtgggatttaatcca

SEQ ID NO: 3716676 - DNA, 25 bp, Homo sapien
tgtctgatggacactcagaggtttc

SEQ ID NO: 3716677 - DNA, 25 bp, Homo sapien
tatgtgaaccgtggagctgacctct

SEQ ID NO: 3716678 - DNA, 25 bp, Homo sapien
gcattgttgtcgagggccagcttct

SEQ ID NO: 3716679 - DNA, 25 bp, Homo sapien
tctgggtagcattgccactagcgct

SEQ ID NO: 3716680 - DNA, 25 bp, Homo sapien
tcactcccactctcagtctgggtag

SEQ ID NO: 3716681 - DNA, 25 bp, Homo sapien
gtccttggactctaggtgacctgag

SEQ ID NO: 3716682 - DNA, 25 bp, Homo sapien
ggtgtcaatctccttggtgcaggca

SEQ ID NO: 3716683 - DNA, 25 bp, Homo sapien
tgagtgctggtaagctatggcccgc

SEQ ID NO: 3716684 - DNA, 25 bp, Homo sapien
aggtgccgcccctgggtgtcaatct

SEQ ID NO: 3716685 - DNA, 25 bp, Homo sapien
gctatggtgttttcccgctgggtga

SEQ ID NO: 3716686 - DNA, 25 bp, Homo sapien
cagctatggtgttttcccgctgggt

SEQ ID NO: 3716687 - DNA, 25 bp, Homo sapien
tggtgttttcccgctgggtgaggaa

SEQ ID NO: 3716688 - DNA, 25 bp, Homo sapien
ctatggtgttttcccgctgggtgag

SEQ ID NO: 3716689 - DNA, 25 bp, Homo sapien
tgtctgcgattaggcaggctgtggc

SEQ ID NO: 3716690 - DNA, 25 bp, Homo sapien
ctagtgtctgcgattaggcaggctg

SEQ ID NO: 3716691 - DNA, 25 bp, Homo sapien
agtgtctgcgattaggcaggctgtg

SEQ ID NO: 3716692 - DNA, 25 bp, Homo sapien
gctctggtggcttgggtggccatgg

SEQ ID NO: 3716693 - DNA, 25 bp, Homo sapien
ttaaagagcccataatccccgtgag

SEQ ID NO: 3716694 - DNA, 25 bp, Homo sapien
gctttattggctccgttccaggcaa

SEQ ID NO: 3716695 - DNA, 25 bp, Homo sapien
agacgtgtgtgtgagccagccttgc

SEQ ID NO: 3716696 - DNA, 25 bp, Homo sapien
tccccgtgaggagcctaagaaagta

SEQ ID NO: 3716697 - DNA, 25 bp, Homo sapien
tcctccaagcccaatacctggctgc

SEQ ID NO: 3716698 - DNA, 25 bp, Homo sapien
tccaagcccaatacctggctgctcc

SEQ ID NO: 3716699 - DNA, 25 bp, Homo sapien
cctccaagcccaatacctggctgct

SEQ ID NO: 3716700 - DNA, 25 bp, Homo sapien
ctcctccaagcccaatacctggctg

SEQ ID NO: 3716701 - DNA, 25 bp, Homo sapien
tcgaggcgctcactgctggtcagga

SEQ ID NO: 3716702 - DNA, 25 bp, Homo sapien
gcatccggagccagctagcaggagc

SEQ ID NO: 3716703 - DNA, 25 bp, Homo sapien
gccattggagccctggaccacgaag

SEQ ID NO: 3716704 - DNA, 25 bp, Homo sapien
caggagcctgttcttgggcatggcc

SEQ ID NO: 3716705 - DNA, 25 bp, Homo sapien
catgcggccacgatagtagcaaggg

SEQ ID NO: 3716706 - DNA, 25 bp, Homo sapien
gctgacggtcatctccactgtggct

SEQ ID NO: 3716707 - DNA, 25 bp, Homo sapien
cttggtgtagtggtgaatgagggcc

SEQ ID NO: 3716708 - DNA, 25 bp, Homo sapien
tggtgaatgagggccgcactgctca

SEQ ID NO: 3716709 - DNA, 25 bp, Homo sapien
tatagctgccgttcatgtgaagcac

SEQ ID NO: 3716710 - DNA, 25 bp, Homo sapien
cacgcacagttctaaggcctttatg

SEQ ID NO: 3716711 - DNA, 25 bp, Homo sapien
tcaggtaagcctcccaatgtcgtgc

SEQ ID NO: 3716712 - DNA, 25 bp, Homo sapien
gccccgagtgtaagcaatcacagtg

SEQ ID NO: 3716713 - DNA, 25 bp, Homo sapien
caatattcgggtgctgggaaagcgt

SEQ ID NO: 3716714 - DNA, 25 bp, Homo sapien
ccttcatgcccacaatattcgggtg

SEQ ID NO: 3716715 - DNA, 25 bp, Homo sapien
tgttggctgggacactgtacagcac

SEQ ID NO: 3716716 - DNA, 25 bp, Homo sapien
ggctgggacactgtacagcaccaca

SEQ ID NO: 3716717 - DNA, 25 bp, Homo sapien
agagagcccgcacgacagagagaat

SEQ ID NO: 3716718 - DNA, 25 bp, Homo sapien
gccaaggttggaaacagatctcaga

SEQ ID NO: 3716719 - DNA, 25 bp, Homo sapien
atgccctcaagaaagtcccagagag

SEQ ID NO: 3716720 - DNA, 25 bp, Homo sapien
ctcaggagcaaaagtgctaggaccc

SEQ ID NO: 3716721 - DNA, 25 bp, Homo sapien
tggtgtgagagctgtgcccagagcc

SEQ ID NO: 3716722 - DNA, 25 bp, Homo sapien
tgagagctgtgcccagagcctcatc

SEQ ID NO: 3716723 - DNA, 25 bp, Homo sapien
gtgtgagagctgtgcccagagcctc

SEQ ID NO: 3716724 - DNA, 25 bp, Homo sapien
ctgcaacagcaaatgtggtgtgaga

SEQ ID NO: 3716725 - DNA, 25 bp, Homo sapien
gaacaatcagcccaatcctggtcac

SEQ ID NO: 3716726 - DNA, 25 bp, Homo sapien
cttcctggtcttgtgaacaatcagc

SEQ ID NO: 3716727 - DNA, 25 bp, Homo sapien
tagctggccatcagaaagccagccg

SEQ ID NO: 3716728 - DNA, 25 bp, Homo sapien
ccaaggcatagctggccatcagaaa

SEQ ID NO: 3716729 - DNA, 25 bp, Homo sapien
ctgggtatctcttggtcacccatga

SEQ ID NO: 3716730 - DNA, 25 bp, Homo sapien
aatttgagagcagtgggcggcctac

SEQ ID NO: 3716731 - DNA, 25 bp, Homo sapien
ggtcacccatgacaatttgagagca

SEQ ID NO: 3716732 - DNA, 25 bp, Homo sapien
catgacaatttgagagcagtgggcg

SEQ ID NO: 3716733 - DNA, 25 bp, Homo sapien
gaagatccctggctcaactctgtag

SEQ ID NO: 3716734 - DNA, 25 bp, Homo sapien
tactacaggccagggattgtacacg

SEQ ID NO: 3716735 - DNA, 25 bp, Homo sapien
aattcagacaggtaagcggcgtggc

SEQ ID NO: 3716736 - DNA, 25 bp, Homo sapien
tcctgaactacagaggagggcccca

SEQ ID NO: 3716737 - DNA, 25 bp, Homo sapien
cattgccccgtgcagcacagtcgct

SEQ ID NO: 3716738 - DNA, 25 bp, Homo sapien
ccgtgcagcacagtcgctccagctg

SEQ ID NO: 3716739 - DNA, 25 bp, Homo sapien
caatgaggcggtgctgcagtttctg

SEQ ID NO: 3716740 - DNA, 25 bp, Homo sapien
cgcagcgtttggctcaatgaggcgg

SEQ ID NO: 3716741 - DNA, 25 bp, Homo sapien
gaagagactgagtggggcctggtgc

SEQ ID NO: 3716742 - DNA, 25 bp, Homo sapien
cgcgcccccgctgccactggctcac

SEQ ID NO: 3716743 - DNA, 25 bp, Homo sapien
aagagactgagtggggcctggtgcc

SEQ ID NO: 3716744 - DNA, 25 bp, Homo sapien
tttaatgcacacttaagtttgacaa

SEQ ID NO: 3716745 - DNA, 25 bp, Homo sapien
aatcagtggtgctcgactttgtccg

SEQ ID NO: 3716746 - DNA, 25 bp, Homo sapien
aggattttctgggagtcacaaggag

SEQ ID NO: 3716747 - DNA, 25 bp, Homo sapien
gtcacaaggagttcccacactggga

SEQ ID NO: 3716748 - DNA, 25 bp, Homo sapien
cactgcacccgtaataatttattta

SEQ ID NO: 3716749 - DNA, 25 bp, Homo sapien
tcagagccagccgttgctggtgaaa

SEQ ID NO: 3716750 - DNA, 25 bp, Homo sapien
gggcctccatagtagccaaaccagt

SEQ ID NO: 3716751 - DNA, 25 bp, Homo sapien
ctgggatcccaaagcgccgggtcac

SEQ ID NO: 3716752 - DNA, 25 bp, Homo sapien
ctggtgaaatccatgcgcagtgcct

SEQ ID NO: 3716753 - DNA, 25 bp, Homo sapien
tatttaccaatctgacaagccactg

SEQ ID NO: 3716754 - DNA, 25 bp, Homo sapien
cactgggctgtctccgtgcattcaa

SEQ ID NO: 3716755 - DNA, 25 bp, Homo sapien
tgaagccccaaatctaagtagtccc

SEQ ID NO: 3716756 - DNA, 25 bp, Homo sapien
aataggagatatgcatgggcgtgcc

SEQ ID NO: 3716757 - DNA, 25 bp, Homo sapien
taggcaagtggatggccctatctca

SEQ ID NO: 3716758 - DNA, 25 bp, Homo sapien
caggccaagtctccttagtgtttca

SEQ ID NO: 3716759 - DNA, 25 bp, Homo sapien
ggctgaccagaatagtcttctagaa

SEQ ID NO: 3716760 - DNA, 25 bp, Homo sapien
tccttagtgtttcagacctaggctg

SEQ ID NO: 3716761 - DNA, 25 bp, Homo sapien
tggaccaataaatcagactcacccg

SEQ ID NO: 3716762 - DNA, 25 bp, Homo sapien
tgcagtttattacgtaggcctcccg

SEQ ID NO: 3716763 - DNA, 25 bp, Homo sapien
tctatcatgagccttgaccgtcagg

SEQ ID NO: 3716764 - DNA, 25 bp, Homo sapien
ggtggaagttatagccgtgtgcctc

SEQ ID NO: 3716765 - DNA, 25 bp, Homo sapien
tatgtgactggtagaatcggcttgc

SEQ ID NO: 3716766 - DNA, 25 bp, Homo sapien
cacctacctgggtcattttgagaat

SEQ ID NO: 3716767 - DNA, 25 bp, Homo sapien
ttccttgagatcagggcttcatgtc

SEQ ID NO: 3716768 - DNA, 25 bp, Homo sapien
ttcaaggtgggtatgaggtcattcc

SEQ ID NO: 3716769 - DNA, 25 bp, Homo sapien
gactcggtgtcctcaaaatctaact

SEQ ID NO: 3716770 - DNA, 25 bp, Homo sapien
cagcaggcagcctgactcggtgtcc

SEQ ID NO: 3716771 - DNA, 25 bp, Homo sapien
gatcacagaactctaagtggtagaa

SEQ ID NO: 3716772 - DNA, 25 bp, Homo sapien
gtggtagaacaagaaggcaaacaca

SEQ ID NO: 3716773 - DNA, 25 bp, Homo sapien
taatgggaggatctgccttgtcaca

SEQ ID NO: 3716774 - DNA, 25 bp, Homo sapien
tgaacggagggagaataactctgcc

SEQ ID NO: 3716775 - DNA, 25 bp, Homo sapien
tgtgaagccatatctagccagtccc

SEQ ID NO: 3716776 - DNA, 25 bp, Homo sapien
ctggttcacaaacccgcagaggtcg

SEQ ID NO: 3716777 - DNA, 25 bp, Homo sapien
gagtgcctactctgaaccggctgtg

SEQ ID NO: 3716778 - DNA, 25 bp, Homo sapien
agaacctgctcctacgcaatcgctg

SEQ ID NO: 3716779 - DNA, 25 bp, Homo sapien
aattggcttactggacttgggcgct

SEQ ID NO: 3716780 - DNA, 25 bp, Homo sapien
ccttctgtgaagactgcgcatgctc

SEQ ID NO: 3716781 - DNA, 25 bp, Homo sapien
gcgctcgcggccgcgaccaatccgt

SEQ ID NO: 3716782 - DNA, 25 bp, Homo sapien
cgcggccgcgaccaatccgtgacat

SEQ ID NO: 3716783 - DNA, 25 bp, Homo sapien
ctgcgctcgcggccgcgaccaatcc

SEQ ID NO: 3716784 - DNA, 25 bp, Homo sapien
gctcgcggccgcgaccaatccgtga

SEQ ID NO: 3716785 - DNA, 25 bp, Homo sapien
ccctcagacagccggctccgggacc

SEQ ID NO: 3716786 - DNA, 25 bp, Homo sapien
tcagacagccggctccgggacccgg

SEQ ID NO: 3716787 - DNA, 25 bp, Homo sapien
ctccgggacccggcgcgctccacac

SEQ ID NO: 3716788 - DNA, 25 bp, Homo sapien
gctccgggacccggcgcgctccaca

SEQ ID NO: 3716789 - DNA, 25 bp, Homo sapien
tgggcccgctcgggggacactagtg

SEQ ID NO: 3716790 - DNA, 25 bp, Homo sapien
gcccgctcgggggacactagtgggc

SEQ ID NO: 3716791 - DNA, 25 bp, Homo sapien
ctgcggaaagtgagcgcccgagccc

SEQ ID NO: 3716792 - DNA, 25 bp, Homo sapien
cggaaagtgagcgcccgagcccgac

SEQ ID NO: 3716793 - DNA, 25 bp, Homo sapien
cgcgccccgggcccgatccaacagt

SEQ ID NO: 3716794 - DNA, 25 bp, Homo sapien
gccccgggcccgatccaacagtggc

SEQ ID NO: 3716795 - DNA, 25 bp, Homo sapien
cgcggtcgtggcccggcgagcccgg

SEQ ID NO: 3716796 - DNA, 25 bp, Homo sapien
cccgggcccgatccaacagtggctg

SEQ ID NO: 3716797 - DNA, 25 bp, Homo sapien
cgccgcggcctgagcggccagagcc

SEQ ID NO: 3716798 - DNA, 25 bp, Homo sapien
gccgccgcggcctgagcggccagag

SEQ ID NO: 3716799 - DNA, 25 bp, Homo sapien
ctgccgccgcggcctgagcggccag

SEQ ID NO: 3716800 - DNA, 25 bp, Homo sapien
gccgcggcctgagcggccagagcct

SEQ ID NO: 3716801 - DNA, 25 bp, Homo sapien
tgcgctcgggaaagatgcagcgctc

SEQ ID NO: 3716802 - DNA, 25 bp, Homo sapien
tgacgaagtagcttccgctggagcc

SEQ ID NO: 3716803 - DNA, 25 bp, Homo sapien
tcgaactcaggatcctccgggaact

SEQ ID NO: 3716804 - DNA, 25 bp, Homo sapien
aactcgttccgctcgcggtgggcct

SEQ ID NO: 3716805 - DNA, 25 bp, Homo sapien
cagaagcaggccaggtacaagggtt

SEQ ID NO: 3716806 - DNA, 25 bp, Homo sapien
gctacatttctaggagcaagacaca

SEQ ID NO: 3716807 - DNA, 25 bp, Homo sapien
caattcagtggtagatcgtgagtca

SEQ ID NO: 3716808 - DNA, 25 bp, Homo sapien
gccaatatggtactgcttcctgccc

SEQ ID NO: 3716809 - DNA, 25 bp, Homo sapien
taaggacaaggcagtcacggccaaa

SEQ ID NO: 3716810 - DNA, 25 bp, Homo sapien
tcttcattcttgggtttgaagacag

SEQ ID NO: 3716811 - DNA, 25 bp, Homo sapien
tgcttctgagagatagccctggtta

SEQ ID NO: 3716812 - DNA, 25 bp, Homo sapien
tgtacggggaacaatgttgagttcc

SEQ ID NO: 3716813 - DNA, 25 bp, Homo sapien
atgtagcagggcttaggccccagga

SEQ ID NO: 3716814 - DNA, 25 bp, Homo sapien
cttgtttctataatgacagatgctc

SEQ ID NO: 3716815 - DNA, 25 bp, Homo sapien
accttgtttctataatgacagatgc

SEQ ID NO: 3716816 - DNA, 25 bp, Homo sapien
ccttgtttctataatgacagatgct

SEQ ID NO: 3716817 - DNA, 25 bp, Homo sapien
ttgtttctataatgacagatgctct

SEQ ID NO: 3716818 - DNA, 25 bp, Homo sapien
tggtagcccgatgcggttaaaccgc

SEQ ID NO: 3716819 - DNA, 25 bp, Homo sapien
ttaaaccgctgtccaacttttggca

SEQ ID NO: 3716820 - DNA, 25 bp, Homo sapien
actttctctagtgcaagccgcttgc

SEQ ID NO: 3716821 - DNA, 25 bp, Homo sapien
tatagttgaaggtctcactggccag

SEQ ID NO: 3716822 - DNA, 25 bp, Homo sapien
tgccggttagtgttctcaggaagag

SEQ ID NO: 3716823 - DNA, 25 bp, Homo sapien
caccaaccgctcaaactggagcagt

SEQ ID NO: 3716824 - DNA, 25 bp, Homo sapien
tgcatctttgtagccttcaacaaag

SEQ ID NO: 3716825 - DNA, 25 bp, Homo sapien
aaacgccgcagccaatagtctgcat

SEQ ID NO: 3716826 - DNA, 25 bp, Homo sapien
gtcatatttaatcagccagttgtca

SEQ ID NO: 3716827 - DNA, 25 bp, Homo sapien
cattggacagtcatatttaatcagc

SEQ ID NO: 3716828 - DNA, 25 bp, Homo sapien
gagctagaactatccattggacagt

SEQ ID NO: 3716829 - DNA, 25 bp, Homo sapien
ccgagagctagaactatccattgga

SEQ ID NO: 3716830 - DNA, 25 bp, Homo sapien
tcaggatgcttcagtgggaaggcca

SEQ ID NO: 3716831 - DNA, 25 bp, Homo sapien
aggagtcaggatgcttcagtgggaa

SEQ ID NO: 3716832 - DNA, 25 bp, Homo sapien
gtcaggatgcttcagtgggaaggcc

SEQ ID NO: 3716833 - DNA, 25 bp, Homo sapien
gagtcaggatgcttcagtgggaagg

SEQ ID NO: 3716834 - DNA, 25 bp, Homo sapien
tccttgacgaagttagggtccgata

SEQ ID NO: 3716835 - DNA, 25 bp, Homo sapien
ctttgatctcctgagaaaatgggac

SEQ ID NO: 3716836 - DNA, 25 bp, Homo sapien
gaaaatgggactttcgcctggggca

SEQ ID NO: 3716837 - DNA, 25 bp, Homo sapien
ttggaaggatcagatctttgatctc

SEQ ID NO: 3716838 - DNA, 25 bp, Homo sapien
tggaactggcccctgtcgaaaccag

SEQ ID NO: 3716839 - DNA, 25 bp, Homo sapien
aatctgcttatggaactggcccctg

SEQ ID NO: 3716840 - DNA, 25 bp, Homo sapien
tgacagcaatctgcttatggaactg

SEQ ID NO: 3716841 - DNA, 25 bp, Homo sapien
tggcccctgtcgaaaccaggatctt

SEQ ID NO: 3716842 - DNA, 25 bp, Homo sapien
cacagaacatggaggggtaagctag

SEQ ID NO: 3716843 - DNA, 25 bp, Homo sapien
agatttcatggccaggtcacagaac

SEQ ID NO: 3716844 - DNA, 25 bp, Homo sapien
gtatttcagttatgtgtccatgagg

SEQ ID NO: 3716845 - DNA, 25 bp, Homo sapien
tatgtgtccatgaggacacagtttc

SEQ ID NO: 3716846 - DNA, 25 bp, Homo sapien
gggactcttgttgtctttcaaggcc

SEQ ID NO: 3716847 - DNA, 25 bp, Homo sapien
tgggaacgggccgtctcgacaatca

SEQ ID NO: 3716848 - DNA, 25 bp, Homo sapien
tgtaggactcgctagaagaccgctg

SEQ ID NO: 3716849 - DNA, 25 bp, Homo sapien
tctcgacaatcacaggtggcatctg

SEQ ID NO: 3716850 - DNA, 25 bp, Homo sapien
gaaatcggcctaggacaagtcagag

SEQ ID NO: 3716851 - DNA, 25 bp, Homo sapien
cacttatgaggcagaatccacgtcc

SEQ ID NO: 3716852 - DNA, 25 bp, Homo sapien
gaactgtttcgaggcttgcagccag

SEQ ID NO: 3716853 - DNA, 25 bp, Homo sapien
catctggactacgtgcatggagctc

SEQ ID NO: 3716854 - DNA, 25 bp, Homo sapien
aggtccacatttcttatcccaagcc

SEQ ID NO: 3716855 - DNA, 25 bp, Homo sapien
ccagcctgtaggtccacatttctta

SEQ ID NO: 3716856 - DNA, 25 bp, Homo sapien
tgtaggtccacatttcttatcccaa

SEQ ID NO: 3716857 - DNA, 25 bp, Homo sapien
gcctgtaggtccacatttcttatcc

SEQ ID NO: 3716858 - DNA, 25 bp, Homo sapien
aatcactatgggtgatgctctgggc

SEQ ID NO: 3716859 - DNA, 25 bp, Homo sapien
tgacatctgccatgagtacaggatg

SEQ ID NO: 3716860 - DNA, 25 bp, Homo sapien
tatagcctaggaatgtactgtcgag

SEQ ID NO: 3716861 - DNA, 25 bp, Homo sapien
tcagacctaaacaggcctttggagg

SEQ ID NO: 3716862 - DNA, 25 bp, Homo sapien
tgatcaccgactggcccttgtaagc

SEQ ID NO: 3716863 - DNA, 25 bp, Homo sapien
caagcaaccaggtacgtaggtcggc

SEQ ID NO: 3716864 - DNA, 25 bp, Homo sapien
ttgtaagcaccttcgcagagctgcg

SEQ ID NO: 3716865 - DNA, 25 bp, Homo sapien
tgcagatgtcgccttaggacctcgg

SEQ ID NO: 3716866 - DNA, 25 bp, Homo sapien
tctgaggatctgcagagggccacgc

SEQ ID NO: 3716867 - DNA, 25 bp, Homo sapien
gacccaatatttgaacccacgacat

SEQ ID NO: 3716868 - DNA, 25 bp, Homo sapien
acttgagcggcagagtctgaggatc

SEQ ID NO: 3716869 - DNA, 25 bp, Homo sapien
caaagccggagccaaacggtgggct

SEQ ID NO: 3716870 - DNA, 25 bp, Homo sapien
tttccactggagacgaacatcgctg

SEQ ID NO: 3716871 - DNA, 25 bp, Homo sapien
gacgaacatcgctgatttctttgtt

SEQ ID NO: 3716872 - DNA, 25 bp, Homo sapien
tcagcctttggtttaggagcctgca

SEQ ID NO: 3716873 - DNA, 25 bp, Homo sapien
tcccctccttagcaaagtagttggc

SEQ ID NO: 3716874 - DNA, 25 bp, Homo sapien
cagaggctactggagtagtcagtga

SEQ ID NO: 3716875 - DNA, 25 bp, Homo sapien
ttgagcttgttgatccagcccccag

SEQ ID NO: 3716876 - DNA, 25 bp, Homo sapien
ggctgggactctgggtggctcttga

SEQ ID NO: 3716877 - DNA, 25 bp, Homo sapien
cgggctgtcggaacagaggctactg

SEQ ID NO: 3716878 - DNA, 25 bp, Homo sapien
cctgtccaaagctgtccgagttacc

SEQ ID NO: 3716879 - DNA, 25 bp, Homo sapien
ctcgtcctgtccaaagctgtccgag

SEQ ID NO: 3716880 - DNA, 25 bp, Homo sapien
gtccaaagctgtccgagttacccat

SEQ ID NO: 3716881 - DNA, 25 bp, Homo sapien
gtcctgtccaaagctgtccgagtta

SEQ ID NO: 3716882 - DNA, 25 bp, Homo sapien
gctcccctcttagtcctctcttcct

SEQ ID NO: 3716883 - DNA, 25 bp, Homo sapien
cacggcccaggtgcccgctgcgccc

SEQ ID NO: 3716884 - DNA, 25 bp, Homo sapien
ccttgctcccctcttagtcctctct

SEQ ID NO: 3716885 - DNA, 25 bp, Homo sapien
ctcctcgccttgctcccctcttagt

SEQ ID NO: 3716886 - DNA, 25 bp, Homo sapien
cgccccgagcagcggaatggcggcg

SEQ ID NO: 3716887 - DNA, 25 bp, Homo sapien
cgagcagcggaatggcggcgccttg

SEQ ID NO: 3716888 - DNA, 25 bp, Homo sapien
gccccgagcagcggaatggcggcgc

SEQ ID NO: 3716889 - DNA, 25 bp, Homo sapien
cccgagcagcggaatggcggcgcct

SEQ ID NO: 3716890 - DNA, 25 bp, Homo sapien
cgcgggccgcacgcgcctggggcgg

SEQ ID NO: 3716891 - DNA, 25 bp, Homo sapien
gcacgcgcctggggcggcggctggc

SEQ ID NO: 3716892 - DNA, 25 bp, Homo sapien
ctgcaggcgcaccgcgccgcgggcc

SEQ ID NO: 3716893 - DNA, 25 bp, Homo sapien
aggcgcaccgcgccgcgggccgcac

SEQ ID NO: 3716894 - DNA, 25 bp, Homo sapien
tctggtcgctcatgatgccggtggc

SEQ ID NO: 3716895 - DNA, 25 bp, Homo sapien
tagctgtggcgctgcatctggtcgc

SEQ ID NO: 3716896 - DNA, 25 bp, Homo sapien
ccatagagcgccgaaagcaggtaga

SEQ ID NO: 3716897 - DNA, 25 bp, Homo sapien
atcgtgcgccacgttgaccatgagc

SEQ ID NO: 3716898 - DNA, 25 bp, Homo sapien
taaggtgggaatactgctccaggcc

SEQ ID NO: 3716899 - DNA, 25 bp, Homo sapien
ccttttaatgcaaacagcgctggac

SEQ ID NO: 3716900 - DNA, 25 bp, Homo sapien
ggcactggcctgcaaaaaccttaag

SEQ ID NO: 3716901 - DNA, 25 bp, Homo sapien
tgtccacgtcttagtctcagcaggg

SEQ ID NO: 3716902 - DNA, 25 bp, Homo sapien
gggcttccaaagcaccccaagtgtc

SEQ ID NO: 3716903 - DNA, 25 bp, Homo sapien
gagccactgcgactagctgtgaatg

SEQ ID NO: 3716904 - DNA, 25 bp, Homo sapien
tatatagagtatagcctggtcatga

SEQ ID NO: 3716905 - DNA, 25 bp, Homo sapien
ctggtcatgaagaggccaggctgcc

SEQ ID NO: 3716906 - DNA, 25 bp, Homo sapien
aatggtgttgccagcccagggcagc

SEQ ID NO: 3716907 - DNA, 25 bp, Homo sapien
caggagtacacagctaagttccagg

SEQ ID NO: 3716908 - DNA, 25 bp, Homo sapien
tgtgtccaaatcatagcacaaggag

SEQ ID NO: 3716909 - DNA, 25 bp, Homo sapien
caaatccactgtttagggtacagga

SEQ ID NO: 3716910 - DNA, 25 bp, Homo sapien
ctaaagatgtaacttagatggtgat

SEQ ID NO: 3716911 - DNA, 25 bp, Homo sapien
tgctcctgagtaaggtcacctgacc

SEQ ID NO: 3716912 - DNA, 25 bp, Homo sapien
tcttgagaaggatggacctgagcta

SEQ ID NO: 3716913 - DNA, 25 bp, Homo sapien
caggcacgtgtggatggatgaggct

SEQ ID NO: 3716914 - DNA, 25 bp, Homo sapien
tggaagccaagcgggaaggcacatc

SEQ ID NO: 3716915 - DNA, 25 bp, Homo sapien
gcacatctagaagggcagtgagctc

SEQ ID NO: 3716916 - DNA, 25 bp, Homo sapien
aggcacatctagaagggcagtgagc

SEQ ID NO: 3716917 - DNA, 25 bp, Homo sapien
gaagccaagcgggaaggcacatcta

SEQ ID NO: 3716918 - DNA, 25 bp, Homo sapien
catacctggcagacagagtgagcac

SEQ ID NO: 3716919 - DNA, 25 bp, Homo sapien
tcttctcatacctggcagacagagt

SEQ ID NO: 3716920 - DNA, 25 bp, Homo sapien
tggcagacagagtgagcacaagccg

SEQ ID NO: 3716921 - DNA, 25 bp, Homo sapien
gtgttcttctcatacctggcagaca

SEQ ID NO: 3716922 - DNA, 25 bp, Homo sapien
ccctatggcacagggccttgaggga

SEQ ID NO: 3716923 - DNA, 25 bp, Homo sapien
gcaactgcctccagtatccaaaagt

SEQ ID NO: 3716924 - DNA, 25 bp, Homo sapien
aaacaatgaggcacatcggtcccct

SEQ ID NO: 3716925 - DNA, 25 bp, Homo sapien
gagagggagacctatgcaactgcct

SEQ ID NO: 3716926 - DNA, 25 bp, Homo sapien
acaaacatatactgctgagggctga

SEQ ID NO: 3716927 - DNA, 25 bp, Homo sapien
cactaactatgactgtgggtcaggc

SEQ ID NO: 3716928 - DNA, 25 bp, Homo sapien
cattccttaggtgcagggagaccca

SEQ ID NO: 3716929 - DNA, 25 bp, Homo sapien
ggcgttgagcccagcattttatgta

SEQ ID NO: 3716930 - DNA, 25 bp, Homo sapien
gaaagaagagggagtacaaagagca

SEQ ID NO: 3716931 - DNA, 25 bp, Homo sapien
cctccatagtggcagtaagctgaga

SEQ ID NO: 3716932 - DNA, 25 bp, Homo sapien
cagatcaatggttccctggtgtggg

SEQ ID NO: 3716933 - DNA, 25 bp, Homo sapien
tcccaaaaggagcacatactataca

SEQ ID NO: 3716934 - DNA, 25 bp, Homo sapien
gaaatactaggtggaaatgctgagg

SEQ ID NO: 3716935 - DNA, 25 bp, Homo sapien
gaagggaatgtctaagcatgcctcc

SEQ ID NO: 3716936 - DNA, 25 bp, Homo sapien
aataagcaagtgtgtttatggccca

SEQ ID NO: 3716937 - DNA, 25 bp, Homo sapien
cccactcttatggagaaacatggca

SEQ ID NO: 3716938 - DNA, 25 bp, Homo sapien
tggtagcagacaggtagaagagact

SEQ ID NO: 3716939 - DNA, 25 bp, Homo sapien
cagacaggtagaagagactaaggga

SEQ ID NO: 3716940 - DNA, 25 bp, Homo sapien
acaggtagaagagactaagggagaa

SEQ ID NO: 3716941 - DNA, 25 bp, Homo sapien
gtagcagacaggtagaagagactaa

SEQ ID NO: 3716942 - DNA, 25 bp, Homo sapien
tgggccccggagcgtttcttcaggc

SEQ ID NO: 3716943 - DNA, 25 bp, Homo sapien
cgctggctccgtgagggaggcggca

SEQ ID NO: 3716944 - DNA, 25 bp, Homo sapien
gtcgcaggtccgaaaatctcctccg

SEQ ID NO: 3716945 - DNA, 25 bp, Homo sapien
cttccgggacgcgaatcgctctgcg

SEQ ID NO: 3716946 - DNA, 25 bp, Homo sapien
caagttgaaaaggtcaaacgctggg

SEQ ID NO: 3716947 - DNA, 25 bp, Homo sapien
tcccctcacgttctgatgtctgcat

SEQ ID NO: 3716948 - DNA, 25 bp, Homo sapien
gggttccaggtagatctccagcctc

SEQ ID NO: 3716949 - DNA, 25 bp, Homo sapien
gcctcgggcatcacgctggggctca

SEQ ID NO: 3716950 - DNA, 25 bp, Homo sapien
ctgagcaagtatcgaacaccatcac

SEQ ID NO: 3716951 - DNA, 25 bp, Homo sapien
ttcaaggttgtccagcagtccagag

SEQ ID NO: 3716952 - DNA, 25 bp, Homo sapien
tagttactacagagcaggacggcag

SEQ ID NO: 3716953 - DNA, 25 bp, Homo sapien
taagcctgctctaagctgtagaagg

SEQ ID NO: 3716954 - DNA, 25 bp, Homo sapien
tagataaacccagaggccgaacaga

SEQ ID NO: 3716955 - DNA, 25 bp, Homo sapien
attcaaagtgaggaacaagacgttg

SEQ ID NO: 3716956 - DNA, 25 bp, Homo sapien
caaagtgaggaacaagacgttgagg

SEQ ID NO: 3716957 - DNA, 25 bp, Homo sapien
tgaggaacaagacgttgaggcccag

SEQ ID NO: 3716958 - DNA, 25 bp, Homo sapien
agtgaggaacaagacgttgaggccc

SEQ ID NO: 3716959 - DNA, 25 bp, Homo sapien
cagcgccaaccacggatagggtagg

SEQ ID NO: 3716960 - DNA, 25 bp, Homo sapien
gccaaccacggatagggtagggtca

SEQ ID NO: 3716961 - DNA, 25 bp, Homo sapien
atctgccagcgccaaccacggatag

SEQ ID NO: 3716962 - DNA, 25 bp, Homo sapien
caaccacggatagggtagggtcacg

SEQ ID NO: 3716963 - DNA, 25 bp, Homo sapien
gcctttcgttcagcttttaggacac

SEQ ID NO: 3716964 - DNA, 25 bp, Homo sapien
cactcggacctctgggccactaagg

SEQ ID NO: 3716965 - DNA, 25 bp, Homo sapien
tttaggacactgcagacgattgtgc

SEQ ID NO: 3716966 - DNA, 25 bp, Homo sapien
taaggaagctagaagcctttcgttc

SEQ ID NO: 3716967 - DNA, 25 bp, Homo sapien
catcagctcggaatcaggcagccgt

SEQ ID NO: 3716968 - DNA, 25 bp, Homo sapien
gcagggcgggcactgaaatcatcag

SEQ ID NO: 3716969 - DNA, 25 bp, Homo sapien
gacaggcgacctctctgcaggtcct

SEQ ID NO: 3716970 - DNA, 25 bp, Homo sapien
tgcccggcaaacctcctgaaggtag

SEQ ID NO: 3716971 - DNA, 25 bp, Homo sapien
caaacagctagatcgagattctcat

SEQ ID NO: 3716972 - DNA, 25 bp, Homo sapien
tgcttcctcagaagtaccagctctg

SEQ ID NO: 3716973 - DNA, 25 bp, Homo sapien
gaggtgtaaacgtccactgctactg

SEQ ID NO: 3716974 - DNA, 25 bp, Homo sapien
tacatgcacatgcttagtcaagacc

SEQ ID NO: 3716975 - DNA, 25 bp, Homo sapien
tgtgaggacacgacggggttctccc

SEQ ID NO: 3716976 - DNA, 25 bp, Homo sapien
atgtgcagcacaggcggctcaggaa

SEQ ID NO: 3716977 - DNA, 25 bp, Homo sapien
tgcagcacgcggtaggcggcttcac

SEQ ID NO: 3716978 - DNA, 25 bp, Homo sapien
acgacggggttctcccagtgcagca

SEQ ID NO: 3716979 - DNA, 25 bp, Homo sapien
gcgtgctgtttaaaagggtgagaac

SEQ ID NO: 3716980 - DNA, 25 bp, Homo sapien
agcgtgctgtttaaaagggtgagaa

SEQ ID NO: 3716981 - DNA, 25 bp, Homo sapien
gagcgtgctgtttaaaagggtgaga

SEQ ID NO: 3716982 - DNA, 25 bp, Homo sapien
caaaaatgagacaccgtgagtggca

SEQ ID NO: 3716983 - DNA, 25 bp, Homo sapien
tgagcgagtcacctaacttaagcct

SEQ ID NO: 3716984 - DNA, 25 bp, Homo sapien
gccccagacagctacagagattaaa

SEQ ID NO: 3716985 - DNA, 25 bp, Homo sapien
ctacccagggaatggagaacaaggt

SEQ ID NO: 3716986 - DNA, 25 bp, Homo sapien
ggcgtgctgtccatcagaccatcct

SEQ ID NO: 3716987 - DNA, 25 bp, Homo sapien
ggtgtgagggcaggcgtgctgtcca

SEQ ID NO: 3716988 - DNA, 25 bp, Homo sapien
ggtggtggaggactctcaaaggcat

SEQ ID NO: 3716989 - DNA, 25 bp, Homo sapien
ctccgtgggtgtgagggcaggcgtg

SEQ ID NO: 3716990 - DNA, 25 bp, Homo sapien
ctcaatcgcatctttaaactcttca

SEQ ID NO: 3716991 - DNA, 25 bp, Homo sapien
tcgcatctttaaactcttcatctgg

SEQ ID NO: 3716992 - DNA, 25 bp, Homo sapien
atctttaaactcttcatctggctca

SEQ ID NO: 3716993 - DNA, 25 bp, Homo sapien
caatcgcatctttaaactcttcatc

SEQ ID NO: 3716994 - DNA, 25 bp, Homo sapien
gcaaagggacatcttacggaactca

SEQ ID NO: 3716995 - DNA, 25 bp, Homo sapien
gagctctgcgcacttcccaaatggt

SEQ ID NO: 3716996 - DNA, 25 bp, Homo sapien
tgacctgggtcaagatgcaaaatgt

SEQ ID NO: 3716997 - DNA, 25 bp, Homo sapien
tagcagggcattacccggagacttc

SEQ ID NO: 3716998 - DNA, 25 bp, Homo sapien
tcttgcaaggctgcaggacccgtgt

SEQ ID NO: 3716999 - DNA, 25 bp, Homo sapien
caaggctgcaggacccgtgtgcaga

SEQ ID NO: 3717000 - DNA, 25 bp, Homo sapien
cttgcaaggctgcaggacccgtgtg

SEQ ID NO: 3717001 - DNA, 25 bp, Homo sapien
tgcaaggctgcaggacccgtgtgca

SEQ ID NO: 3717002 - DNA, 25 bp, Homo sapien
gctcaggaacccgttgtcctgcagg

SEQ ID NO: 3717003 - DNA, 25 bp, Homo sapien
cggagccgctccgtgagccgagaca

SEQ ID NO: 3717004 - DNA, 25 bp, Homo sapien
tgcgcagcacctcattcttgctcag

SEQ ID NO: 3717005 - DNA, 25 bp, Homo sapien
agccgagacaccttgctgcgcagca

SEQ ID NO: 3717006 - DNA, 25 bp, Homo sapien
gcccagccctgtcccctggccgcac

SEQ ID NO: 3717007 - DNA, 25 bp, Homo sapien
cagcccagccctgtcccctggccgc

SEQ ID NO: 3717008 - DNA, 25 bp, Homo sapien
agcccagccctgtcccctggccgca

SEQ ID NO: 3717009 - DNA, 25 bp, Homo sapien
tgtatgtggctcagctctcagcgct

SEQ ID NO: 3717010 - DNA, 25 bp, Homo sapien
aactcagggctctatcacgtccaga

SEQ ID NO: 3717011 - DNA, 25 bp, Homo sapien
gattatggttctctacagtcctggg

SEQ ID NO: 3717012 - DNA, 25 bp, Homo sapien
cctatgaggtaagaatgatgatccc

SEQ ID NO: 3717013 - DNA, 25 bp, Homo sapien
ttgctggaccagagtaatacttctt

SEQ ID NO: 3717014 - DNA, 25 bp, Homo sapien
tacttagaagttgtagaaatagaca

SEQ ID NO: 3717015 - DNA, 25 bp, Homo sapien
gctctgaacccttaagaactgcctg

SEQ ID NO: 3717016 - DNA, 25 bp, Homo sapien
tgtgtagtgttaccgggcactgctg

SEQ ID NO: 3717017 - DNA, 25 bp, Homo sapien
ggcgcttctaaatgggacactcagg

SEQ ID NO: 3717018 - DNA, 25 bp, Homo sapien
aagggacttcacacgcaagggcaaa

SEQ ID NO: 3717019 - DNA, 25 bp, Homo sapien
tatgacgacggaaatggacctcacc

SEQ ID NO: 3717020 - DNA, 25 bp, Homo sapien
taagaagactgatagcccctgagga

SEQ ID NO: 3717021 - DNA, 25 bp, Homo sapien
cctcttcttcagcactgagaaggtg

SEQ ID NO: 3717022 - DNA, 25 bp, Homo sapien
tcttcttcagcactgagaaggtggc

SEQ ID NO: 3717023 - DNA, 25 bp, Homo sapien
tcagcactgagaaggtggccgagca

SEQ ID NO: 3717024 - DNA, 25 bp, Homo sapien
cttcagcactgagaaggtggccgag

SEQ ID NO: 3717025 - DNA, 25 bp, Homo sapien
gaagctgtttccacaattactgcag

SEQ ID NO: 3717026 - DNA, 25 bp, Homo sapien
ccatggaggacttgggcaccttgaa

SEQ ID NO: 3717027 - DNA, 25 bp, Homo sapien
caccttgaaggagcagcatcgagag

SEQ ID NO: 3717028 - DNA, 25 bp, Homo sapien
tgtttccacaattactgcagctccg

SEQ ID NO: 3717029 - DNA, 25 bp, Homo sapien
tagttttgttcaaagtgccaaggaa

SEQ ID NO: 3717030 - DNA, 25 bp, Homo sapien
aaattgcggctggtgattgactcca

SEQ ID NO: 3717031 - DNA, 25 bp, Homo sapien
gttattacccttcacaattcacagg

SEQ ID NO: 3717032 - DNA, 25 bp, Homo sapien
ggtacatcatatctattcttcggca

SEQ ID NO: 3717033 - DNA, 25 bp, Homo sapien
actacaaaacggtacatgaaatgtg

SEQ ID NO: 3717034 - DNA, 25 bp, Homo sapien
taacattatactacaaaacggtaca

SEQ ID NO: 3717035 - DNA, 25 bp, Homo sapien
ggtccatgcccgattgttctctcag

SEQ ID NO: 3717036 - DNA, 25 bp, Homo sapien
catgcaagctaatgagcagcagggt

SEQ ID NO: 3717037 - DNA, 25 bp, Homo sapien
gcttgctagcctgcccgcagagatt

SEQ ID NO: 3717038 - DNA, 25 bp, Homo sapien
gtgatgatgccaacagcaggccact

SEQ ID NO: 3717039 - DNA, 25 bp, Homo sapien
tattgtggcaccaacagaacacctt

SEQ ID NO: 3717040 - DNA, 25 bp, Homo sapien
ggccactcctgtgctatgaattaga

SEQ ID NO: 3717041 - DNA, 25 bp, Homo sapien
ttgctcaaggtctggttacacgagg

SEQ ID NO: 3717042 - DNA, 25 bp, Homo sapien
cacttgctcaaggtctggttacacg

SEQ ID NO: 3717043 - DNA, 25 bp, Homo sapien
aaggtctggttacacgaggcacaca

SEQ ID NO: 3717044 - DNA, 25 bp, Homo sapien
tcaaggtctggttacacgaggcaca

SEQ ID NO: 3717045 - DNA, 25 bp, Homo sapien
gaagcctacctagcattcaggccac

SEQ ID NO: 3717046 - DNA, 25 bp, Homo sapien
ccatggtcttgttaggcctggccac

SEQ ID NO: 3717047 - DNA, 25 bp, Homo sapien
tggagggacattcaatcagcagaga

SEQ ID NO: 3717048 - DNA, 25 bp, Homo sapien
gaaggactcagccaaaccctcctat

SEQ ID NO: 3717049 - DNA, 25 bp, Homo sapien
agggcttcaggacctctgctccact

SEQ ID NO: 3717050 - DNA, 25 bp, Homo sapien
ccagctcatggctaagggagagata

SEQ ID NO: 3717051 - DNA, 25 bp, Homo sapien
gggccttatcccataactgagactg

SEQ ID NO: 3717052 - DNA, 25 bp, Homo sapien
cccgtaagagtccagtagtgaacat

SEQ ID NO: 3717053 - DNA, 25 bp, Homo sapien
cctcgagtgtagaaacctctcagcc

SEQ ID NO: 3717054 - DNA, 25 bp, Homo sapien
cagccccctcatgggtcctgggtcc

SEQ ID NO: 3717055 - DNA, 25 bp, Homo sapien
tcgagtgtagaaacctctcagcccc

SEQ ID NO: 3717056 - DNA, 25 bp, Homo sapien
ctcatcccattacttgtgccacatg

SEQ ID NO: 3717057 - DNA, 25 bp, Homo sapien
gatacgataccaaagcctgtctggc

SEQ ID NO: 3717058 - DNA, 25 bp, Homo sapien
gggtactgaactctcctctcttaaa

SEQ ID NO: 3717059 - DNA, 25 bp, Homo sapien
tggcctgggtaagcccctggctgca

SEQ ID NO: 3717060 - DNA, 25 bp, Homo sapien
taagctgcttggctcggcaagaaag

SEQ ID NO: 3717061 - DNA, 25 bp, Homo sapien
cactgacttctgccagatgctggca

SEQ ID NO: 3717062 - DNA, 25 bp, Homo sapien
tctgttttatctgtcgagttcccac

SEQ ID NO: 3717063 - DNA, 25 bp, Homo sapien
gttttatctgtcgagttcccacaag

SEQ ID NO: 3717064 - DNA, 25 bp, Homo sapien
ttatctgtcgagttcccacaagcca

SEQ ID NO: 3717065 - DNA, 25 bp, Homo sapien
ctaaccatacttgcccctttcatct

SEQ ID NO: 3717066 - DNA, 25 bp, Homo sapien
aaagatttatggtgatgccttgaga

SEQ ID NO: 3717067 - DNA, 25 bp, Homo sapien
ttatggtgatgccttgagagagatc

SEQ ID NO: 3717068 - DNA, 25 bp, Homo sapien
gatttatggtgatgccttgagagag

SEQ ID NO: 3717069 - DNA, 25 bp, Homo sapien
tatggtgatgccttgagagagatct

SEQ ID NO: 3717070 - DNA, 25 bp, Homo sapien
ctgtctgcaatcccggcacctcagg

SEQ ID NO: 3717071 - DNA, 25 bp, Homo sapien
tctgtctgcaatcccggcacctcag

SEQ ID NO: 3717072 - DNA, 25 bp, Homo sapien
tgtctgcaatcccggcacctcagga

SEQ ID NO: 3717073 - DNA, 25 bp, Homo sapien
ctctgtctgcaatcccggcacctca

SEQ ID NO: 3717074 - DNA, 25 bp, Homo sapien
ggaaggggtgtgggcggagacgctc

SEQ ID NO: 3717075 - DNA, 25 bp, Homo sapien
tccccataaaggaccacagccggaa

SEQ ID NO: 3717076 - DNA, 25 bp, Homo sapien
tcagtgttatcatcctccaatctgc

SEQ ID NO: 3717077 - DNA, 25 bp, Homo sapien
gaaagcctccccataaaggaccaca

SEQ ID NO: 3717078 - DNA, 25 bp, Homo sapien
caatctgcggctgcattggaaagcc

SEQ ID NO: 3717079 - DNA, 25 bp, Homo sapien
gctcctgcaggcaacggccgggttt

SEQ ID NO: 3717080 - DNA, 25 bp, Homo sapien
gaggccgcgcccgaggctcctcacg

SEQ ID NO: 3717081 - DNA, 25 bp, Homo sapien
gtctccgcggtgctgaccccgggag

SEQ ID NO: 3717082 - DNA, 25 bp, Homo sapien
atccgggggcgctcggaggctgtcg

SEQ ID NO: 3717083 - DNA, 25 bp, Homo sapien
ccggatttaaggcaaggcagggtct

SEQ ID NO: 3717084 - DNA, 25 bp, Homo sapien
tagagtacatatattacagactcat

SEQ ID NO: 3717085 - DNA, 25 bp, Homo sapien
attacagactcatctgaagttggtg

SEQ ID NO: 3717086 - DNA, 25 bp, Homo sapien
agttggtgaagagccggatttaagg

SEQ ID NO: 3717087 - DNA, 25 bp, Homo sapien
cccatcgctgtagtctctctggata

SEQ ID NO: 3717088 - DNA, 25 bp, Homo sapien
ctctctggataaagaccttggtggc

SEQ ID NO: 3717089 - DNA, 25 bp, Homo sapien
gaactgacagatggtcccatcgctg

SEQ ID NO: 3717090 - DNA, 25 bp, Homo sapien
gataaagaccttggtggccagtgag

SEQ ID NO: 3717091 - DNA, 25 bp, Homo sapien
gaagatgaagtaggccgtggcgcag

SEQ ID NO: 3717092 - DNA, 25 bp, Homo sapien
taaaatccgttgagggtcttcacag

SEQ ID NO: 3717093 - DNA, 25 bp, Homo sapien
ctcagcctctgcgtaaaatccgttg

SEQ ID NO: 3717094 - DNA, 25 bp, Homo sapien
aggcagccctcgaggtaggagctgc

SEQ ID NO: 3717095 - DNA, 25 bp, Homo sapien
gatgtagcgggaaatcttcttgaga

SEQ ID NO: 3717096 - DNA, 25 bp, Homo sapien
tggatgtagcgggaaatcttcttga

SEQ ID NO: 3717097 - DNA, 25 bp, Homo sapien
ggcctcgaggtgcaaagatcttctc

SEQ ID NO: 3717098 - DNA, 25 bp, Homo sapien
gggtctgtaagtaggaggcctcgag

SEQ ID NO: 3717099 - DNA, 25 bp, Homo sapien
tcaacacagaatagcccagaaggat

SEQ ID NO: 3717100 - DNA, 25 bp, Homo sapien
caacacagaatagcccagaaggata

SEQ ID NO: 3717101 - DNA, 25 bp, Homo sapien
aacacagaatagcccagaaggatac

SEQ ID NO: 3717102 - DNA, 25 bp, Homo sapien
ggggtcggtggttaaggagagctgc

SEQ ID NO: 3717103 - DNA, 25 bp, Homo sapien
ctggggtcggtggttaaggagagct

SEQ ID NO: 3717104 - DNA, 25 bp, Homo sapien
ggacatgaaccagcggatggagtcc

SEQ ID NO: 3717105 - DNA, 25 bp, Homo sapien
tgggacatgaaccagcggatggagt

SEQ ID NO: 3717106 - DNA, 25 bp, Homo sapien
cggtcctcgtagatggagatctcaa

SEQ ID NO: 3717107 - DNA, 25 bp, Homo sapien
ggtcctcgtagatggagatctcaat

SEQ ID NO: 3717108 - DNA, 25 bp, Homo sapien
tgccgctgctggagctgccactgct

SEQ ID NO: 3717109 - DNA, 25 bp, Homo sapien
cacccccaccgctgctgctgccact

SEQ ID NO: 3717110 - DNA, 25 bp, Homo sapien
gctgccgctgctggagctgccactg

SEQ ID NO: 3717111 - DNA, 25 bp, Homo sapien
cccaccacccccaccgctgctgctg

SEQ ID NO: 3717112 - DNA, 25 bp, Homo sapien
ctgcaaggccctcactccggccata

SEQ ID NO: 3717113 - DNA, 25 bp, Homo sapien
ggccctcactccggccatacacctc

SEQ ID NO: 3717114 - DNA, 25 bp, Homo sapien
aaggccctcactccggccatacacc

SEQ ID NO: 3717115 - DNA, 25 bp, Homo sapien
gcaaggccctcactccggccataca

SEQ ID NO: 3717116 - DNA, 25 bp, Homo sapien
gcctctagctctgaatgcaggacag

SEQ ID NO: 3717117 - DNA, 25 bp, Homo sapien
cacaggaaatatgaggcccgtcacc

SEQ ID NO: 3717118 - DNA, 25 bp, Homo sapien
ggtcatgcagtgtgggagtcctcta

SEQ ID NO: 3717119 - DNA, 25 bp, Homo sapien
caaagttggatgcttctcgcaaggc

SEQ ID NO: 3717120 - DNA, 25 bp, Homo sapien
gtagttcaggagattcaggccccgc

SEQ ID NO: 3717121 - DNA, 25 bp, Homo sapien
gagtatgttccctggtagccctagg

SEQ ID NO: 3717122 - DNA, 25 bp, Homo sapien
gctgcaaggactaggctgactctct

SEQ ID NO: 3717123 - DNA, 25 bp, Homo sapien
cagagagctacctccagtggctggt

SEQ ID NO: 3717124 - DNA, 25 bp, Homo sapien
gattagagatgctgaggtgtctgcc

SEQ ID NO: 3717125 - DNA, 25 bp, Homo sapien
gagtatcccctcatgtggtcctgga

SEQ ID NO: 3717126 - DNA, 25 bp, Homo sapien
caagaagacagagttcatcctgctc

SEQ ID NO: 3717127 - DNA, 25 bp, Homo sapien
agaactgaccctccatcgtcacggg

SEQ ID NO: 3717128 - DNA, 25 bp, Homo sapien
gagacctgggttccaagcttgggcc

SEQ ID NO: 3717129 - DNA, 25 bp, Homo sapien
cagtcagataagcacccagatttgg

SEQ ID NO: 3717130 - DNA, 25 bp, Homo sapien
taatatgcacctgaatgcagtcggg

SEQ ID NO: 3717131 - DNA, 25 bp, Homo sapien
tagatgctctcctcagataacggca

SEQ ID NO: 3717132 - DNA, 25 bp, Homo sapien
tcatgcggaaacctccgaaggctgg

SEQ ID NO: 3717133 - DNA, 25 bp, Homo sapien
tattcgggaatcagtgaacccttgg

SEQ ID NO: 3717134 - DNA, 25 bp, Homo sapien
aagtcgcccgagaaggctcatgcgg

SEQ ID NO: 3717135 - DNA, 25 bp, Homo sapien
aataaatcctcctagaagtcgcccg

SEQ ID NO: 3717136 - DNA, 25 bp, Homo sapien
ctgcagaggaatgggccaactggtc

SEQ ID NO: 3717137 - DNA, 25 bp, Homo sapien
agagctgcagaggaatgggccaact

SEQ ID NO: 3717138 - DNA, 25 bp, Homo sapien
agaggaatgggccaactggtccttg

SEQ ID NO: 3717139 - DNA, 25 bp, Homo sapien
gcagagctgcagaggaatgggccaa

SEQ ID NO: 3717140 - DNA, 25 bp, Homo sapien
tggtgttcaacctttgcaagtttag

SEQ ID NO: 3717141 - DNA, 25 bp, Homo sapien
ccctgtggtgttcaacctttgcaag

SEQ ID NO: 3717142 - DNA, 25 bp, Homo sapien
tcaaagatatcaagaaagccccaca

SEQ ID NO: 3717143 - DNA, 25 bp, Homo sapien
attatcaaagatatcaagaaagccc

SEQ ID NO: 3717144 - DNA, 25 bp, Homo sapien
tgagaataaaccaccgagcagatgg

SEQ ID NO: 3717145 - DNA, 25 bp, Homo sapien
gggatgagaataaaccaccgagcag

SEQ ID NO: 3717146 - DNA, 25 bp, Homo sapien
gatgagaataaaccaccgagcagat

SEQ ID NO: 3717147 - DNA, 25 bp, Homo sapien
ggatgagaataaaccaccgagcaga

SEQ ID NO: 3717148 - DNA, 25 bp, Homo sapien
aacgggtagcgctcagatttccaga

SEQ ID NO: 3717149 - DNA, 25 bp, Homo sapien
tgaacccaggtctaactgcaaaggc

SEQ ID NO: 3717150 - DNA, 25 bp, Homo sapien
ataatggccggcagctctttcacag

SEQ ID NO: 3717151 - DNA, 25 bp, Homo sapien
gatttccagagtgcccatgtcttgt

SEQ ID NO: 3717152 - DNA, 25 bp, Homo sapien
ctgttaaaattagacgctagcctga

SEQ ID NO: 3717153 - DNA, 25 bp, Homo sapien
ttactgttaaaattagacgctagcc

SEQ ID NO: 3717154 - DNA, 25 bp, Homo sapien
taaaattagacgctagcctgaagta

SEQ ID NO: 3717155 - DNA, 25 bp, Homo sapien
aattagacgctagcctgaagtaggt

SEQ ID NO: 3717156 - DNA, 25 bp, Homo sapien
gaaaaccgcgagcatagaggctgca

SEQ ID NO: 3717157 - DNA, 25 bp, Homo sapien
taaagtcttattcagcaaggctgct

SEQ ID NO: 3717158 - DNA, 25 bp, Homo sapien
tgagaacagggatttgctgggctcc

SEQ ID NO: 3717159 - DNA, 25 bp, Homo sapien
tgacctgagacctatgcacagacag

SEQ ID NO: 3717160 - DNA, 25 bp, Homo sapien
aggctgtgtgtgcactaaacggtga

SEQ ID NO: 3717161 - DNA, 25 bp, Homo sapien
taaacggtgatctgcattaattcct

SEQ ID NO: 3717162 - DNA, 25 bp, Homo sapien
tgtgtgcactaaacggtgatctgca

SEQ ID NO: 3717163 - DNA, 25 bp, Homo sapien
cggtgatctgcattaattcctttac

SEQ ID NO: 3717164 - DNA, 25 bp, Homo sapien
gccaagagatgttgagtcttccagc

SEQ ID NO: 3717165 - DNA, 25 bp, Homo sapien
tgccgacagggtaatcctctttctg

SEQ ID NO: 3717166 - DNA, 25 bp, Homo sapien
gaaaaggtgactccattccgactgg

SEQ ID NO: 3717167 - DNA, 25 bp, Homo sapien
tccgactgggccaaaatgccgacag

SEQ ID NO: 3717168 - DNA, 25 bp, Homo sapien
aggagaagaacgaagctggctgctg

SEQ ID NO: 3717169 - DNA, 25 bp, Homo sapien
agcacctgctctcttcattaggaca

SEQ ID NO: 3717170 - DNA, 25 bp, Homo sapien
gatacaagaatatgatcccctcctt

SEQ ID NO: 3717171 - DNA, 25 bp, Homo sapien
tgttggctgagtagtcccaagggac

SEQ ID NO: 3717172 - DNA, 25 bp, Homo sapien
gccaaggtccttatgctaatttccc

SEQ ID NO: 3717173 - DNA, 25 bp, Homo sapien
tgctacagcgaagacactcattcca

SEQ ID NO: 3717174 - DNA, 25 bp, Homo sapien
agggactgggccggctcagatcctc

SEQ ID NO: 3717175 - DNA, 25 bp, Homo sapien
ggactgggccggctcagatcctctg

SEQ ID NO: 3717176 - DNA, 25 bp, Homo sapien
gggccggctcagatcctctgcacat

SEQ ID NO: 3717177 - DNA, 25 bp, Homo sapien
actgggccggctcagatcctctgca

SEQ ID NO: 3717178 - DNA, 25 bp, Homo sapien
tgtcctcgttctgggtattgacagc

SEQ ID NO: 3717179 - DNA, 25 bp, Homo sapien
tggaaggcgtgtgcatgtctctgac

SEQ ID NO: 3717180 - DNA, 25 bp, Homo sapien
ttataaagcgctccgtacttgaact

SEQ ID NO: 3717181 - DNA, 25 bp, Homo sapien
gaccttgtagtatgtctgactggag

SEQ ID NO: 3717182 - DNA, 25 bp, Homo sapien
gctgccccacataagactgtgtctc

SEQ ID NO: 3717183 - DNA, 25 bp, Homo sapien
gctgctgccccacataagactgtgt

SEQ ID NO: 3717184 - DNA, 25 bp, Homo sapien
cgtggcatagcaggctctccaggcc

SEQ ID NO: 3717185 - DNA, 25 bp, Homo sapien
agctgctgccccacataagactgtg

SEQ ID NO: 3717186 - DNA, 25 bp, Homo sapien
tggctgtcgacatctgagctgggct

SEQ ID NO: 3717187 - DNA, 25 bp, Homo sapien
tggacttcttcggtgacctgcaaga

SEQ ID NO: 3717188 - DNA, 25 bp, Homo sapien
ttcttctgttccgagagcctggctg

SEQ ID NO: 3717189 - DNA, 25 bp, Homo sapien
ttcggtgacctgcaagatactacca

SEQ ID NO: 3717190 - DNA, 25 bp, Homo sapien
ttgtataaagcgagcgcgcggcgtc

SEQ ID NO: 3717191 - DNA, 25 bp, Homo sapien
gcgcgctcgagtggagttgtataaa

SEQ ID NO: 3717192 - DNA, 25 bp, Homo sapien
ccgccagcctttacataagaccggg

SEQ ID NO: 3717193 - DNA, 25 bp, Homo sapien
gcctttacataagaccgggcgcgct

SEQ ID NO: 3717194 - DNA, 25 bp, Homo sapien
tttgtgtcaatgtctgactctatgg

SEQ ID NO: 3717195 - DNA, 25 bp, Homo sapien
tctgactctatggatgacaagctct

SEQ ID NO: 3717196 - DNA, 25 bp, Homo sapien
caatgtctgactctatggatgacaa

SEQ ID NO: 3717197 - DNA, 25 bp, Homo sapien
cttcttttgtgtcaatgtctgactc

SEQ ID NO: 3717198 - DNA, 25 bp, Homo sapien
gtaaagtgccattaggcagattggc

SEQ ID NO: 3717199 - DNA, 25 bp, Homo sapien
gctgtgaccacaggctgccctggct

SEQ ID NO: 3717200 - DNA, 25 bp, Homo sapien
aaagtgccattaggcagattggctg

SEQ ID NO: 3717201 - DNA, 25 bp, Homo sapien
tgccctggctttggttgaggtggct

SEQ ID NO: 3717202 - DNA, 25 bp, Homo sapien
cgggcagtttataatcctgagatgc

SEQ ID NO: 3717203 - DNA, 25 bp, Homo sapien
tttctggagcacatccaagtgtggg

SEQ ID NO: 3717204 - DNA, 25 bp, Homo sapien
aatctaccttgccaggttctgaatg

SEQ ID NO: 3717205 - DNA, 25 bp, Homo sapien
tgagatgctaatctaccttgccagg

SEQ ID NO: 3717206 - DNA, 25 bp, Homo sapien
cggtggtcaccctggcaccactctg

SEQ ID NO: 3717207 - DNA, 25 bp, Homo sapien
ccggtggtcaccctggcaccactct

SEQ ID NO: 3717208 - DNA, 25 bp, Homo sapien
cactctgccaccacatcacagtcat

SEQ ID NO: 3717209 - DNA, 25 bp, Homo sapien
gcaccactctgccaccacatcacag

SEQ ID NO: 3717210 - DNA, 25 bp, Homo sapien
atcaagggcagctttcacccccgag

SEQ ID NO: 3717211 - DNA, 25 bp, Homo sapien
aagggcagctttcacccccgagctg

SEQ ID NO: 3717212 - DNA, 25 bp, Homo sapien
cagctttcacccccgagctgcctaa

SEQ ID NO: 3717213 - DNA, 25 bp, Homo sapien
ggcagctttcacccccgagctgcct

SEQ ID NO: 3717214 - DNA, 25 bp, Homo sapien
tgaatggatttacctcggagggtga

SEQ ID NO: 3717215 - DNA, 25 bp, Homo sapien
gctctgaactgtgacaccctctgaa

SEQ ID NO: 3717216 - DNA, 25 bp, Homo sapien
aagagctgatgaatggatttacctc

SEQ ID NO: 3717217 - DNA, 25 bp, Homo sapien
tttgctccttaaatgaagccgccag

SEQ ID NO: 3717218 - DNA, 25 bp, Homo sapien
gttggttgtctgaaccactctgtct

SEQ ID NO: 3717219 - DNA, 25 bp, Homo sapien
agttggttgtctgaaccactctgtc

SEQ ID NO: 3717220 - DNA, 25 bp, Homo sapien
gagttggttgtctgaaccactctgt

SEQ ID NO: 3717221 - DNA, 25 bp, Homo sapien
ctttccaactgcccaattttaggag

SEQ ID NO: 3717222 - DNA, 25 bp, Homo sapien
tccaactgcccaattttaggaggca

SEQ ID NO: 3717223 - DNA, 25 bp, Homo sapien
ttccaactgcccaattttaggaggc

SEQ ID NO: 3717224 - DNA, 25 bp, Homo sapien
gaggcctcgctgttgagtacccaga

SEQ ID NO: 3717225 - DNA, 25 bp, Homo sapien
cagagggaagctgactgtccttgag

SEQ ID NO: 3717226 - DNA, 25 bp, Homo sapien
gcctcgctgttgagtacccagacca

SEQ ID NO: 3717227 - DNA, 25 bp, Homo sapien
ttgagtacccagaccaccagactct

SEQ ID NO: 3717228 - DNA, 25 bp, Homo sapien
caaacatcagctccaatcgatagca

SEQ ID NO: 3717229 - DNA, 25 bp, Homo sapien
tgaagtcaagtaagtcatttccggc

SEQ ID NO: 3717230 - DNA, 25 bp, Homo sapien
agtcatttccggctgttctgcaaac

SEQ ID NO: 3717231 - DNA, 25 bp, Homo sapien
tagcatcggaatcgtttctttgccc

SEQ ID NO: 3717232 - DNA, 25 bp, Homo sapien
tcagaaaagatgcatagctcttcag

SEQ ID NO: 3717233 - DNA, 25 bp, Homo sapien
tctcttccatatagtccaccctgat

SEQ ID NO: 3717234 - DNA, 25 bp, Homo sapien
gccaagccctttgcacaatggctca

SEQ ID NO: 3717235 - DNA, 25 bp, Homo sapien
cactctttgttgataatcattgtgg

SEQ ID NO: 3717236 - DNA, 25 bp, Homo sapien
ggatttggaatcacgaaaggcaaca

SEQ ID NO: 3717237 - DNA, 25 bp, Homo sapien
attaagattgatttccctgcaaagt

SEQ ID NO: 3717238 - DNA, 25 bp, Homo sapien
ttttcgtaaatgctatctttgggtg

SEQ ID NO: 3717239 - DNA, 25 bp, Homo sapien
tcacgaaaggcaacattaagattga

SEQ ID NO: 3717240 - DNA, 25 bp, Homo sapien
gagttttagagggtactgcttctgg

SEQ ID NO: 3717241 - DNA, 25 bp, Homo sapien
ccttgacatacatccatggacagag

SEQ ID NO: 3717242 - DNA, 25 bp, Homo sapien
tggacagagaagacttggaagtgaa

SEQ ID NO: 3717243 - DNA, 25 bp, Homo sapien
tggcaattgatgaatgcccatgggt

SEQ ID NO: 3717244 - DNA, 25 bp, Homo sapien
ggggacaccaacttgcttggatcag

SEQ ID NO: 3717245 - DNA, 25 bp, Homo sapien
atcaggataggagcttcgactcctg

SEQ ID NO: 3717246 - DNA, 25 bp, Homo sapien
agatgccccggggacaccaacttgc

SEQ ID NO: 3717247 - DNA, 25 bp, Homo sapien
cccggggacaccaacttgcttggat

SEQ ID NO: 3717248 - DNA, 25 bp, Homo sapien
ggcctgggagatagccacatcctct

SEQ ID NO: 3717249 - DNA, 25 bp, Homo sapien
ggctggaacccagatatctgctggg

SEQ ID NO: 3717250 - DNA, 25 bp, Homo sapien
tttttgacgattgcctcactgaagc

SEQ ID NO: 3717251 - DNA, 25 bp, Homo sapien
gggtctccttcacgggatctaatgt

SEQ ID NO: 3717252 - DNA, 25 bp, Homo sapien
aaaagtgtgaggtcatggtagctga

SEQ ID NO: 3717253 - DNA, 25 bp, Homo sapien
gaggcaaaagtgtgaggtcatggta

SEQ ID NO: 3717254 - DNA, 25 bp, Homo sapien
catggtagctgactggttgaggggc

SEQ ID NO: 3717255 - DNA, 25 bp, Homo sapien
caggatgcagccagaggcaaaagtg

SEQ ID NO: 3717256 - DNA, 25 bp, Homo sapien
tgttgtattctgcaaaatcagcatg

SEQ ID NO: 3717257 - DNA, 25 bp, Homo sapien
tgtctcccaaacaggtacacattgt

SEQ ID NO: 3717258 - DNA, 25 bp, Homo sapien
cagtcgttggtatgaaattcaataa

SEQ ID NO: 3717259 - DNA, 25 bp, Homo sapien
tcaggtgcagtcgttggtatgaaat

SEQ ID NO: 3717260 - DNA, 25 bp, Homo sapien
cgtctccgcgaagctctatctcttc

SEQ ID NO: 3717261 - DNA, 25 bp, Homo sapien
ccgtctccgcgaagctctatctctt

SEQ ID NO: 3717262 - DNA, 25 bp, Homo sapien
gtctccgcgaagctctatctcttcc

SEQ ID NO: 3717263 - DNA, 25 bp, Homo sapien
tctccgcgaagctctatctcttccg

SEQ ID NO: 3717264 - DNA, 25 bp, Homo sapien
ttaaaaatcctagcttgaggtacag

SEQ ID NO: 3717265 - DNA, 25 bp, Homo sapien
gcgagcgcccaaagcgagcacgagc

SEQ ID NO: 3717266 - DNA, 25 bp, Homo sapien
ggcccctcgcgtcacatgaggaaaa

SEQ ID NO: 3717267 - DNA, 25 bp, Homo sapien
caaacgacggaatggaagtcttgtc

SEQ ID NO: 3717268 - DNA, 25 bp, Homo sapien
agcacgtcctttccgccaggatcat

SEQ ID NO: 3717269 - DNA, 25 bp, Homo sapien
agaaaaagcacgtcctttccgccag

SEQ ID NO: 3717270 - DNA, 25 bp, Homo sapien
cagaaaaagcacgtcctttccgcca

SEQ ID NO: 3717271 - DNA, 25 bp, Homo sapien
aaaagcacgtcctttccgccaggat

SEQ ID NO: 3717272 - DNA, 25 bp, Homo sapien
gctcgaagcgaagcccggaaaccgc

SEQ ID NO: 3717273 - DNA, 25 bp, Homo sapien
aaaggcgaggctcgaagcgaagccc

SEQ ID NO: 3717274 - DNA, 25 bp, Homo sapien
aggaggctcaaaggcgaggctcgaa

SEQ ID NO: 3717275 - DNA, 25 bp, Homo sapien
gctcaaaggcgaggctcgaagcgaa

SEQ ID NO: 3717276 - DNA, 25 bp, Homo sapien
tccttcccgtacacaactgagaggg

SEQ ID NO: 3717277 - DNA, 25 bp, Homo sapien
gaggctgcgctaaacagactactgt

SEQ ID NO: 3717278 - DNA, 25 bp, Homo sapien
ttcagacaacgaaaccgaggctgcg

SEQ ID NO: 3717279 - DNA, 25 bp, Homo sapien
gccaagtggcggactgagacttccc

SEQ ID NO: 3717280 - DNA, 25 bp, Homo sapien
caatccaaacttagtgttatgccca

SEQ ID NO: 3717281 - DNA, 25 bp, Homo sapien
gttatgcccaacagagtctcaatct

SEQ ID NO: 3717282 - DNA, 25 bp, Homo sapien
ggcaccgcgtctggacacaaattat

SEQ ID NO: 3717283 - DNA, 25 bp, Homo sapien
tccaacctgtagtaagacacagcac

SEQ ID NO: 3717284 - DNA, 25 bp, Homo sapien
gactctttaacgagtctgctgcctt

SEQ ID NO: 3717285 - DNA, 25 bp, Homo sapien
actctttaacgagtctgctgccttc

SEQ ID NO: 3717286 - DNA, 25 bp, Homo sapien
gatgactctttaacgagtctgctgc

SEQ ID NO: 3717287 - DNA, 25 bp, Homo sapien
gtgatgactctttaacgagtctgct

SEQ ID NO: 3717288 - DNA, 25 bp, Homo sapien
ggttgaaagtatcaaaaaggcctgc

SEQ ID NO: 3717289 - DNA, 25 bp, Homo sapien
ggcaaaccacgtgagtcctaaactg

SEQ ID NO: 3717290 - DNA, 25 bp, Homo sapien
gaaaccgttctctggatctaagcat

SEQ ID NO: 3717291 - DNA, 25 bp, Homo sapien
aaaggcctgcatgatatccacagag

SEQ ID NO: 3717292 - DNA, 25 bp, Homo sapien
tacactgggattattctcactgttc

SEQ ID NO: 3717293 - DNA, 25 bp, Homo sapien
ctgtattcttcatctagctacactg

SEQ ID NO: 3717294 - DNA, 25 bp, Homo sapien
cactgggattattctcactgttcct

SEQ ID NO: 3717295 - DNA, 25 bp, Homo sapien
tcttcatctagctacactgggatta

SEQ ID NO: 3717296 - DNA, 25 bp, Homo sapien
caggcttcaatagtaggacactgga

SEQ ID NO: 3717297 - DNA, 25 bp, Homo sapien
ttcaatagtaggacactggaagtct

SEQ ID NO: 3717298 - DNA, 25 bp, Homo sapien
caggtgcaggcttcaatagtaggac

SEQ ID NO: 3717299 - DNA, 25 bp, Homo sapien
tgcaggcttcaatagtaggacactg

SEQ ID NO: 3717300 - DNA, 25 bp, Homo sapien
gtgaaatgccgggagggcactgggt

SEQ ID NO: 3717301 - DNA, 25 bp, Homo sapien
ggcactgggtgaaaggagcgatcct

SEQ ID NO: 3717302 - DNA, 25 bp, Homo sapien
gggactggccataccaactctggaa

SEQ ID NO: 3717303 - DNA, 25 bp, Homo sapien
ctggaactggaagtgaaatgccggg

SEQ ID NO: 3717304 - DNA, 25 bp, Homo sapien
gacctttgatgaggcaattctcctt

SEQ ID NO: 3717305 - DNA, 25 bp, Homo sapien
tgtccaccaatatcagccaggttaa

SEQ ID NO: 3717306 - DNA, 25 bp, Homo sapien
gacagaaaagctgatactaaagttc

SEQ ID NO: 3717307 - DNA, 25 bp, Homo sapien
ttatggtacatccacactgtagaaa

SEQ ID NO: 3717308 - DNA, 25 bp, Homo sapien
aggcagaccacttgagctcaggatt

SEQ ID NO: 3717309 - DNA, 25 bp, Homo sapien
cagaccacttgagctcaggatttcg

SEQ ID NO: 3717310 - DNA, 25 bp, Homo sapien
ccacttgagctcaggatttcgacac

SEQ ID NO: 3717311 - DNA, 25 bp, Homo sapien
cagcctggacaacatggcaaaactc

SEQ ID NO: 3717312 - DNA, 25 bp, Homo sapien
taaaactctacaacatgccgataga

SEQ ID NO: 3717313 - DNA, 25 bp, Homo sapien
caacatgccgatagactgtctctga

SEQ ID NO: 3717314 - DNA, 25 bp, Homo sapien
ctctgaaggcaaactgtgtaaaagt

SEQ ID NO: 3717315 - DNA, 25 bp, Homo sapien
gtaaaagttcctttctgacagcagc

SEQ ID NO: 3717316 - DNA, 25 bp, Homo sapien
gattgtctatcaactaaactagcag

SEQ ID NO: 3717317 - DNA, 25 bp, Homo sapien
gttttccaccgagtatatgctcaca

SEQ ID NO: 3717318 - DNA, 25 bp, Homo sapien
tggacaagacttctactgtgactat

SEQ ID NO: 3717319 - DNA, 25 bp, Homo sapien
tggtagtaactaagaccagaaccca

SEQ ID NO: 3717320 - DNA, 25 bp, Homo sapien
gaaagcagcattatcagccagcttc

SEQ ID NO: 3717321 - DNA, 25 bp, Homo sapien
gcagcattatcagccagcttctatg

SEQ ID NO: 3717322 - DNA, 25 bp, Homo sapien
cattatcagccagcttctatggagc

SEQ ID NO: 3717323 - DNA, 25 bp, Homo sapien
ttatcagccagcttctatggagcct

SEQ ID NO: 3717324 - DNA, 25 bp, Homo sapien
agattatgaatgtcaggatgcataa

SEQ ID NO: 3717325 - DNA, 25 bp, Homo sapien
cataaactgccggtggatcaatagg

SEQ ID NO: 3717326 - DNA, 25 bp, Homo sapien
tatgaatgtcaggatgcataaactg

SEQ ID NO: 3717327 - DNA, 25 bp, Homo sapien
cggtggatcaataggcccaggaatt

SEQ ID NO: 3717328 - DNA, 25 bp, Homo sapien
ctaatgtaagttctaaaggtttatg

SEQ ID NO: 3717329 - DNA, 25 bp, Homo sapien
ggtttatgtaagatccaccacacca

SEQ ID NO: 3717330 - DNA, 25 bp, Homo sapien
aagacttgaacactctaatgtaagt

SEQ ID NO: 3717331 - DNA, 25 bp, Homo sapien
tgtaagatccaccacaccaaatgct

SEQ ID NO: 3717332 - DNA, 25 bp, Homo sapien
ttcaggttagccaatatgttggcgt

SEQ ID NO: 3717333 - DNA, 25 bp, Homo sapien
agaattggtatcaattctcctttaa

SEQ ID NO: 3717334 - DNA, 25 bp, Homo sapien
caatatgttggcgtataattgttta

SEQ ID NO: 3717335 - DNA, 25 bp, Homo sapien
tccttactgcttatgggtctgctca

SEQ ID NO: 3717336 - DNA, 25 bp, Homo sapien
tccttaattgttagtgcacagaaac

SEQ ID NO: 3717337 - DNA, 25 bp, Homo sapien
tgtacacgtaaaaccaagtcatctg

SEQ ID NO: 3717338 - DNA, 25 bp, Homo sapien
ttctcgtctaactgctctagctagg

SEQ ID NO: 3717339 - DNA, 25 bp, Homo sapien
gattagggataatcttacttcctcc

SEQ ID NO: 3717340 - DNA, 25 bp, Homo sapien
tatattcaaatgagactggtctacg

SEQ ID NO: 3717341 - DNA, 25 bp, Homo sapien
taccaaggttactgcaagacacact

SEQ ID NO: 3717342 - DNA, 25 bp, Homo sapien
taaacgtggcactccaaatcaatgg

SEQ ID NO: 3717343 - DNA, 25 bp, Homo sapien
tgttggtagaattccttggcagcac

SEQ ID NO: 3717344 - DNA, 25 bp, Homo sapien
ccttgatgaaaaagctctattctca

SEQ ID NO: 3717345 - DNA, 25 bp, Homo sapien
ctggtccagaatacttccttgatga

SEQ ID NO: 3717346 - DNA, 25 bp, Homo sapien
ccagaatacttccttgatgaaaaag

SEQ ID NO: 3717347 - DNA, 25 bp, Homo sapien
gaatacttccttgatgaaaaagctc

SEQ ID NO: 3717348 - DNA, 25 bp, Homo sapien
cttctggctctaactctgcatctct

SEQ ID NO: 3717349 - DNA, 25 bp, Homo sapien
ctgtcttaaggagtactgcacccct

SEQ ID NO: 3717350 - DNA, 25 bp, Homo sapien
tactgcacccctacgagctttaggt

SEQ ID NO: 3717351 - DNA, 25 bp, Homo sapien
ttaaggagtactgcacccctacgag

SEQ ID NO: 3717352 - DNA, 25 bp, Homo sapien
cgagctttaggtacataaagtgcca

SEQ ID NO: 3717353 - DNA, 25 bp, Homo sapien
ggtgcattagttataaccccagcat

SEQ ID NO: 3717354 - DNA, 25 bp, Homo sapien
gaaggcatgtgtccattcttaattt

SEQ ID NO: 3717355 - DNA, 25 bp, Homo sapien
gatatttagtcttcgagcctccggt

SEQ ID NO: 3717356 - DNA, 25 bp, Homo sapien
gcttttctttcaccacagagttagg

SEQ ID NO: 3717357 - DNA, 25 bp, Homo sapien
tgtcctgtcacatccgtagtttcaa

SEQ ID NO: 3717358 - DNA, 25 bp, Homo sapien
cacatccgtagtttcaacttccaaa

SEQ ID NO: 3717359 - DNA, 25 bp, Homo sapien
agaagtatcctctcatgtcctgtca

SEQ ID NO: 3717360 - DNA, 25 bp, Homo sapien
ctgtgaaagaagtatcctctcatgt

SEQ ID NO: 3717361 - DNA, 25 bp, Homo sapien
ccacattttggaatggtttgcttgg

SEQ ID NO: 3717362 - DNA, 25 bp, Homo sapien
ggtttgcttggaacttgagcctcgc

SEQ ID NO: 3717363 - DNA, 25 bp, Homo sapien
gaatggtttgcttggaacttgagcc

SEQ ID NO: 3717364 - DNA, 25 bp, Homo sapien
tggaacttgagcctcgctgatttct

SEQ ID NO: 3717365 - DNA, 25 bp, Homo sapien
taagatgaaacctgtactattggct

SEQ ID NO: 3717366 - DNA, 25 bp, Homo sapien
tacgcaagtttgatcaaagacacca

SEQ ID NO: 3717367 - DNA, 25 bp, Homo sapien
gcctccgctgctgggattcaatatt

SEQ ID NO: 3717368 - DNA, 25 bp, Homo sapien
ctgacagagagatgtgacccatagt

SEQ ID NO: 3717369 - DNA, 25 bp, Homo sapien
caggaggttcgtgctttacatgtaa

SEQ ID NO: 3717370 - DNA, 25 bp, Homo sapien
gctttattggtaatgtcacctacat

SEQ ID NO: 3717371 - DNA, 25 bp, Homo sapien
tctctaatcattactggactaacag

SEQ ID NO: 3717372 - DNA, 25 bp, Homo sapien
ggactaacagtgtcatttgtgctct

SEQ ID NO: 3717373 - DNA, 25 bp, Homo sapien
ggttgcatctgcactcattcctaca

SEQ ID NO: 3717374 - DNA, 25 bp, Homo sapien
gcaagcagaagggttgctgaaatct

SEQ ID NO: 3717375 - DNA, 25 bp, Homo sapien
gaggtctcatcagctattctaactg

SEQ ID NO: 3717376 - DNA, 25 bp, Homo sapien
tacataagggctatcaacagttaca

SEQ ID NO: 3717377 - DNA, 25 bp, Homo sapien
aaaagtgttataattactaccagca

SEQ ID NO: 3717378 - DNA, 25 bp, Homo sapien
gcccacggcactgtctgaaagaact

SEQ ID NO: 3717379 - DNA, 25 bp, Homo sapien
gtcccatttaacatactgagttcag

SEQ ID NO: 3717380 - DNA, 25 bp, Homo sapien
tgttgtatcaccagtactacccagg

SEQ ID NO: 3717381 - DNA, 25 bp, Homo sapien
catagatgatgattccctatcagga

SEQ ID NO: 3717382 - DNA, 25 bp, Homo sapien
aggcagtcaccatcatcgttaaaca

SEQ ID NO: 3717383 - DNA, 25 bp, Homo sapien
tcttcggcagttcttagttcgtgca

SEQ ID NO: 3717384 - DNA, 25 bp, Homo sapien
tcttgtagaagacgtggatccaggc

SEQ ID NO: 3717385 - DNA, 25 bp, Homo sapien
ggttctcgggctttatgtgcatcag

SEQ ID NO: 3717386 - DNA, 25 bp, Homo sapien
tctcgggctttatgtgcatcagaat

SEQ ID NO: 3717387 - DNA, 25 bp, Homo sapien
gtggttctcgggctttatgtgcatc

SEQ ID NO: 3717388 - DNA, 25 bp, Homo sapien
cagtggttctcgggctttatgtgca

SEQ ID NO: 3717389 - DNA, 25 bp, Homo sapien
gcaatagcagactaggtcaagcaga

SEQ ID NO: 3717390 - DNA, 25 bp, Homo sapien
tctccaaggcacactagtcaagttg

SEQ ID NO: 3717391 - DNA, 25 bp, Homo sapien
taacagctgaaaatgtcccaagtct

SEQ ID NO: 3717392 - DNA, 25 bp, Homo sapien
gaaatgagggacatcacaaagtgac

SEQ ID NO: 3717393 - DNA, 25 bp, Homo sapien
caggaccagacggattcacagctga

SEQ ID NO: 3717394 - DNA, 25 bp, Homo sapien
tacaaggaggagctgataccattcc

SEQ ID NO: 3717395 - DNA, 25 bp, Homo sapien
cagaggtacaaggaggagctgatac

SEQ ID NO: 3717396 - DNA, 25 bp, Homo sapien
ccaggaccagacggattcacagctg

SEQ ID NO: 3717397 - DNA, 25 bp, Homo sapien
tagtaatcagatctaggttcctgga

SEQ ID NO: 3717398 - DNA, 25 bp, Homo sapien
tgcagaaaacccgtagaaggtcttc

SEQ ID NO: 3717399 - DNA, 25 bp, Homo sapien
aacccgtagaaggtcttcagtatga

SEQ ID NO: 3717400 - DNA, 25 bp, Homo sapien
caatcactgaggtcaatatcaggaa

SEQ ID NO: 3717401 - DNA, 25 bp, Homo sapien
ggatttaatgcaaatgtaaactctg

SEQ ID NO: 3717402 - DNA, 25 bp, Homo sapien
atttaatgcaaatgtaaactctgtc

SEQ ID NO: 3717403 - DNA, 25 bp, Homo sapien
gatttaatgcaaatgtaaactctgt

SEQ ID NO: 3717404 - DNA, 25 bp, Homo sapien
ctggatttaatgcaaatgtaaactc

SEQ ID NO: 3717405 - DNA, 25 bp, Homo sapien
tagggcatgtgtatcatccacccat

SEQ ID NO: 3717406 - DNA, 25 bp, Homo sapien
aattggactggagaatactcctagg

SEQ ID NO: 3717407 - DNA, 25 bp, Homo sapien
tactcctagggcatgtgtatcatcc

SEQ ID NO: 3717408 - DNA, 25 bp, Homo sapien
ggagaatactcctagggcatgtgta

SEQ ID NO: 3717409 - DNA, 25 bp, Homo sapien
gtgtgtttaatacccaacgcatcac

SEQ ID NO: 3717410 - DNA, 25 bp, Homo sapien
gtgtttaatacccaacgcatcacga

SEQ ID NO: 3717411 - DNA, 25 bp, Homo sapien
ggtgtgtttaatacccaacgcatca

SEQ ID NO: 3717412 - DNA, 25 bp, Homo sapien
tgtttaatacccaacgcatcacgag

SEQ ID NO: 3717413 - DNA, 25 bp, Homo sapien
ggcctgtgacaagggacgaatcttc

SEQ ID NO: 3717414 - DNA, 25 bp, Homo sapien
ctgtgacaagggacgaatcttcacc

SEQ ID NO: 3717415 - DNA, 25 bp, Homo sapien
tgtggcctgtgacaagggacgaatc

SEQ ID NO: 3717416 - DNA, 25 bp, Homo sapien
tgctcttgtggcctgtgacaaggga

SEQ ID NO: 3717417 - DNA, 25 bp, Homo sapien
tctcgttcggttttgctctgcttac

SEQ ID NO: 3717418 - DNA, 25 bp, Homo sapien
gagctctgcttctcgttcggttttg

SEQ ID NO: 3717419 - DNA, 25 bp, Homo sapien
gactaaccttctggctagggctgct

SEQ ID NO: 3717420 - DNA, 25 bp, Homo sapien
tctgcttacttcgaaccccaagggc

SEQ ID NO: 3717421 - DNA, 25 bp, Homo sapien
tcaagtggagctgcatgctgatgca

SEQ ID NO: 3717422 - DNA, 25 bp, Homo sapien
caagtggagctgcatgctgatgcac

SEQ ID NO: 3717423 - DNA, 25 bp, Homo sapien
tgactgtactttaagggcaaagaag

SEQ ID NO: 3717424 - DNA, 25 bp, Homo sapien
attcctatactgtatttgactgtac

SEQ ID NO: 3717425 - DNA, 25 bp, Homo sapien
gaagttagttatgaagctgactggc

SEQ ID NO: 3717426 - DNA, 25 bp, Homo sapien
gcagaatcccttacaacattcctat

SEQ ID NO: 3717427 - DNA, 25 bp, Homo sapien
tgtcttcccgttgcttggcttccaa

SEQ ID NO: 3717428 - DNA, 25 bp, Homo sapien
tgcttggcttccaaccgctttctct

SEQ ID NO: 3717429 - DNA, 25 bp, Homo sapien
tgccttcccagatgtcttcccgttg

SEQ ID NO: 3717430 - DNA, 25 bp, Homo sapien
ttcccagatgtcttcccgttgcttg

SEQ ID NO: 3717431 - DNA, 25 bp, Homo sapien
catttaggagtgaagacaggagtct

SEQ ID NO: 3717432 - DNA, 25 bp, Homo sapien
tggcacacagctcccaaggttggtt

SEQ ID NO: 3717433 - DNA, 25 bp, Homo sapien
tctgaggaatgaagctggtatcccc

SEQ ID NO: 3717434 - DNA, 25 bp, Homo sapien
ggaagtgtgacccacgctaacatga

SEQ ID NO: 3717435 - DNA, 25 bp, Homo sapien
gaagactggtggctggcatgactta

SEQ ID NO: 3717436 - DNA, 25 bp, Homo sapien
gcagccagttctaattcttggaaaa

SEQ ID NO: 3717437 - DNA, 25 bp, Homo sapien
aaaaggccatacaagggttgtgctg

SEQ ID NO: 3717438 - DNA, 25 bp, Homo sapien
gaaggacatgggaagactggtggct

SEQ ID NO: 3717439 - DNA, 25 bp, Homo sapien
ttcctctgaattccccacgcattgt

SEQ ID NO: 3717440 - DNA, 25 bp, Homo sapien
tggagaagagttgcagacctgtcct

SEQ ID NO: 3717441 - DNA, 25 bp, Homo sapien
cttctgaaatcttacgcaggaggtt

SEQ ID NO: 3717442 - DNA, 25 bp, Homo sapien
tctccgagggcaagcattgcctgct

SEQ ID NO: 3717443 - DNA, 25 bp, Homo sapien
caagaggacttaggcatgaccgcaa

SEQ ID NO: 3717444 - DNA, 25 bp, Homo sapien
tgagcacaactgacgatctgggccg

SEQ ID NO: 3717445 - DNA, 25 bp, Homo sapien
gaattcgggttctcatcactgaaga

SEQ ID NO: 3717446 - DNA, 25 bp, Homo sapien
tccaaaggcacgctgactgggtgac

SEQ ID NO: 3717447 - DNA, 25 bp, Homo sapien
ttcatcatggggaatgttttgggcc

SEQ ID NO: 3717448 - DNA, 25 bp, Homo sapien
gattcatcatggggaatgttttggg

SEQ ID NO: 3717449 - DNA, 25 bp, Homo sapien
catcatggggaatgttttgggccca

SEQ ID NO: 3717450 - DNA, 25 bp, Homo sapien
atcatggggaatgttttgggcccag

SEQ ID NO: 3717451 - DNA, 25 bp, Homo sapien
gatgttgaaattcccgtcatgcagg

SEQ ID NO: 3717452 - DNA, 25 bp, Homo sapien
tttttggccacaaagacgtatccag

SEQ ID NO: 3717453 - DNA, 25 bp, Homo sapien
gcgtttgtaacaggctccgggtctc

SEQ ID NO: 3717454 - DNA, 25 bp, Homo sapien
tgatatatccagaatggcccaagac

SEQ ID NO: 3717455 - DNA, 25 bp, Homo sapien
tgatgactatggtgggtgaggtggc

SEQ ID NO: 3717456 - DNA, 25 bp, Homo sapien
tctcctctgagagggcgtctggagc

SEQ ID NO: 3717457 - DNA, 25 bp, Homo sapien
ggtcacagccaatccgtagtccgtg

SEQ ID NO: 3717458 - DNA, 25 bp, Homo sapien
gttatcgtccttacagagggtcaca

SEQ ID NO: 3717459 - DNA, 25 bp, Homo sapien
gcccttcctctcctttccacgctgc

SEQ ID NO: 3717460 - DNA, 25 bp, Homo sapien
ccttcctctcctttccacgctgctt

SEQ ID NO: 3717461 - DNA, 25 bp, Homo sapien
ttcctctcctttccacgctgcttgg

SEQ ID NO: 3717462 - DNA, 25 bp, Homo sapien
cctctcctttccacgctgcttggac

SEQ ID NO: 3717463 - DNA, 25 bp, Homo sapien
tgtaaagcagcccatattttcccat

SEQ ID NO: 3717464 - DNA, 25 bp, Homo sapien
tcccatagccacagggttgtaattg

SEQ ID NO: 3717465 - DNA, 25 bp, Homo sapien
tggtgattactagcctgatcagtgg

SEQ ID NO: 3717466 - DNA, 25 bp, Homo sapien
tgatcagtggtaactcgacagcaaa

SEQ ID NO: 3717467 - DNA, 25 bp, Homo sapien
cttgtaaatgtgcaaatggactcac

SEQ ID NO: 3717468 - DNA, 25 bp, Homo sapien
cacatgtacaattttgcactggccc

SEQ ID NO: 3717469 - DNA, 25 bp, Homo sapien
tgtacaattttgcactggcccgttt

SEQ ID NO: 3717470 - DNA, 25 bp, Homo sapien
catgtacaattttgcactggcccgt

SEQ ID NO: 3717471 - DNA, 25 bp, Homo sapien
caattttgcactggcccgttttctc

SEQ ID NO: 3717472 - DNA, 25 bp, Homo sapien
gggcacattgaggtaacagagtaaa

SEQ ID NO: 3717473 - DNA, 25 bp, Homo sapien
tcagtcagtgtctggtcaggaaaac

SEQ ID NO: 3717474 - DNA, 25 bp, Homo sapien
tggtaaattacagcttcctcatgca

SEQ ID NO: 3717475 - DNA, 25 bp, Homo sapien
taaacctgtactggatggctgaaaa

SEQ ID NO: 3717476 - DNA, 25 bp, Homo sapien
ggtaatgggaaagtgagagcccaac

SEQ ID NO: 3717477 - DNA, 25 bp, Homo sapien
caggactgactactaaggtccattg

SEQ ID NO: 3717478 - DNA, 25 bp, Homo sapien
caacaggcaggactgactactaagg

SEQ ID NO: 3717479 - DNA, 25 bp, Homo sapien
tggtaatgggaaagtgagagcccaa

SEQ ID NO: 3717480 - DNA, 25 bp, Homo sapien
gttaaagaaatatcgttgctcttgg

SEQ ID NO: 3717481 - DNA, 25 bp, Homo sapien
tgtagagggcgttgccagaaaagct

SEQ ID NO: 3717482 - DNA, 25 bp, Homo sapien
ccccaaatgcatatagttaaagaaa

SEQ ID NO: 3717483 - DNA, 25 bp, Homo sapien
tcgttgctcttggtcgatgtagagg

SEQ ID NO: 3717484 - DNA, 25 bp, Homo sapien
tcctcttccccaccccatcatcttt

SEQ ID NO: 3717485 - DNA, 25 bp, Homo sapien
ctcttccccaccccatcatcttttt

SEQ ID NO: 3717486 - DNA, 25 bp, Homo sapien
ctcctcttccccaccccatcatctt

SEQ ID NO: 3717487 - DNA, 25 bp, Homo sapien
cttccccaccccatcatctttttca

SEQ ID NO: 3717488 - DNA, 25 bp, Homo sapien
ggttttccaactgagcctagaggag

SEQ ID NO: 3717489 - DNA, 25 bp, Homo sapien
ctacaggttttccaactgagcctag

SEQ ID NO: 3717490 - DNA, 25 bp, Homo sapien
ttccaactgagcctagaggagatgc

SEQ ID NO: 3717491 - DNA, 25 bp, Homo sapien
caactgagcctagaggagatgccgg

SEQ ID NO: 3717492 - DNA, 25 bp, Homo sapien
ccttctgtgctgctacgatgcatga

SEQ ID NO: 3717493 - DNA, 25 bp, Homo sapien
tctgtgctgctacgatgcatgaaga

SEQ ID NO: 3717494 - DNA, 25 bp, Homo sapien
tgtgctgctacgatgcatgaagagc

SEQ ID NO: 3717495 - DNA, 25 bp, Homo sapien
tgctacgatgcatgaagagcatgag

SEQ ID NO: 3717496 - DNA, 25 bp, Homo sapien
tccttgtaaccacggcaagccagtg

SEQ ID NO: 3717497 - DNA, 25 bp, Homo sapien
caagattcgaagagagaggcgccat

SEQ ID NO: 3717498 - DNA, 25 bp, Homo sapien
cagtgggcataatgggaaggatgga

SEQ ID NO: 3717499 - DNA, 25 bp, Homo sapien
gggccatctgcgcaagattcgaaga

SEQ ID NO: 3717500 - DNA, 25 bp, Homo sapien
tccttgtaaattgcgttgccctctg

SEQ ID NO: 3717501 - DNA, 25 bp, Homo sapien
gcgaatccctctagcaacagctctg

SEQ ID NO: 3717502 - DNA, 25 bp, Homo sapien
tgctgtcccggcacttgctatgtgc

SEQ ID NO: 3717503 - DNA, 25 bp, Homo sapien
atttgtccaggctcaatgtggaagc

SEQ ID NO: 3717504 - DNA, 25 bp, Homo sapien
ctccctggcaacagtcagagaagca

SEQ ID NO: 3717505 - DNA, 25 bp, Homo sapien
tccctggcaacagtcagagaagcag

SEQ ID NO: 3717506 - DNA, 25 bp, Homo sapien
ttctccctggcaacagtcagagaag

SEQ ID NO: 3717507 - DNA, 25 bp, Homo sapien
tctccctggcaacagtcagagaagc

SEQ ID NO: 3717508 - DNA, 25 bp, Homo sapien
tttccaagtagcctggtcccagtag

SEQ ID NO: 3717509 - DNA, 25 bp, Homo sapien
aagtagcctggtcccagtagcagat

SEQ ID NO: 3717510 - DNA, 25 bp, Homo sapien
ccagtagcagattcaaggctctgag

SEQ ID NO: 3717511 - DNA, 25 bp, Homo sapien
cccagtagcagattcaaggctctga

SEQ ID NO: 3717512 - DNA, 25 bp, Homo sapien
aagacaggactttcgcctgagctca

SEQ ID NO: 3717513 - DNA, 25 bp, Homo sapien
ctggttcttatcactgagcctctgg

SEQ ID NO: 3717514 - DNA, 25 bp, Homo sapien
gaacagaattccgtagctcgagcca

SEQ ID NO: 3717515 - DNA, 25 bp, Homo sapien
tagctcgagccatcacatctttcaa

SEQ ID NO: 3717516 - DNA, 25 bp, Homo sapien
ccatggtctaactcagacacgaaca

SEQ ID NO: 3717517 - DNA, 25 bp, Homo sapien
ggctcagacatttcccttgattgcc

SEQ ID NO: 3717518 - DNA, 25 bp, Homo sapien
ctatcaggttcacacggaggtctct

SEQ ID NO: 3717519 - DNA, 25 bp, Homo sapien
ttggtaaccgggtcctgccattcac

SEQ ID NO: 3717520 - DNA, 25 bp, Homo sapien
ggatctcctccgtttcctgaacctg

SEQ ID NO: 3717521 - DNA, 25 bp, Homo sapien
tctgtccagagctcacgtctatgcg

SEQ ID NO: 3717522 - DNA, 25 bp, Homo sapien
cacgtctatgcgtattttcacaatg

SEQ ID NO: 3717523 - DNA, 25 bp, Homo sapien
tcctccgtttcctgaacctgttctg

SEQ ID NO: 3717524 - DNA, 25 bp, Homo sapien
tgccgttcaaacaccagccctggtg

SEQ ID NO: 3717525 - DNA, 25 bp, Homo sapien
ggtgtccaattaaagtccttgcaga

SEQ ID NO: 3717526 - DNA, 25 bp, Homo sapien
tccttgcagatataagatggtatgg

SEQ ID NO: 3717527 - DNA, 25 bp, Homo sapien
cagatataagatggtatggacaggg

SEQ ID NO: 3717528 - DNA, 25 bp, Homo sapien
acatgtggggactctatccttgacc

SEQ ID NO: 3717529 - DNA, 25 bp, Homo sapien
gaagtggaatctctggttggtgact

SEQ ID NO: 3717530 - DNA, 25 bp, Homo sapien
atgaggagtctgtgccctggaagtt

SEQ ID NO: 3717531 - DNA, 25 bp, Homo sapien
tggttggtgactgacacagcctcac

SEQ ID NO: 3717532 - DNA, 25 bp, Homo sapien
aggaagcagagccaacgcgatacag

SEQ ID NO: 3717533 - DNA, 25 bp, Homo sapien
gagccaacgcgatacagcaggcgct

SEQ ID NO: 3717534 - DNA, 25 bp, Homo sapien
caaatggggccgtttcatcaggttc

SEQ ID NO: 3717535 - DNA, 25 bp, Homo sapien
cagcaggcgctcaaatggggccgtt

SEQ ID NO: 3717536 - DNA, 25 bp, Homo sapien
cagaaactggcgtgctaggcaaacg

SEQ ID NO: 3717537 - DNA, 25 bp, Homo sapien
gtggatgtcacaagtcaagcctcct

SEQ ID NO: 3717538 - DNA, 25 bp, Homo sapien
tgctgactcgctctctccagagact

SEQ ID NO: 3717539 - DNA, 25 bp, Homo sapien
gccaaagttcctcagccgtgaagag

SEQ ID NO: 3717540 - DNA, 25 bp, Homo sapien
agcaatcccatgagtagatatttac

SEQ ID NO: 3717541 - DNA, 25 bp, Homo sapien
tggtggtatctaaatccacaggacc

SEQ ID NO: 3717542 - DNA, 25 bp, Homo sapien
tgcacactccatagtaacctaagct

SEQ ID NO: 3717543 - DNA, 25 bp, Homo sapien
tgtgttgctccactgccatccaatg

SEQ ID NO: 3717544 - DNA, 25 bp, Homo sapien
gcctctcctagtacttggctgattt

SEQ ID NO: 3717545 - DNA, 25 bp, Homo sapien
ccagagaatgggtcaatgctgttag

SEQ ID NO: 3717546 - DNA, 25 bp, Homo sapien
atgctgttagatccctctggctgat

SEQ ID NO: 3717547 - DNA, 25 bp, Homo sapien
ctgtgtttcatggaaaaggagcaca

SEQ ID NO: 3717548 - DNA, 25 bp, Homo sapien
aaactatgatggatgctagaagacc

SEQ ID NO: 3717549 - DNA, 25 bp, Homo sapien
cccatctggatgctagaggaaatgc

SEQ ID NO: 3717550 - DNA, 25 bp, Homo sapien
gtgttctgttccatcgacgtgccca

SEQ ID NO: 3717551 - DNA, 25 bp, Homo sapien
tgcagtccttatctgggcaggtacc

SEQ ID NO: 3717552 - DNA, 25 bp, Homo sapien
tattggccagcagtcatttggtccc

SEQ ID NO: 3717553 - DNA, 25 bp, Homo sapien
tggagagcagtttattaggcacaac

SEQ ID NO: 3717554 - DNA, 25 bp, Homo sapien
acaatattcattgagtggagagcag

SEQ ID NO: 3717555 - DNA, 25 bp, Homo sapien
gagcagtttattaggcacaacaaaa

SEQ ID NO: 3717556 - DNA, 25 bp, Homo sapien
gagttgtaatgggagtcaagtaaca

SEQ ID NO: 3717557 - DNA, 25 bp, Homo sapien
gatccaagaagtactgggtcctgtg

SEQ ID NO: 3717558 - DNA, 25 bp, Homo sapien
gagtaagacacatgggcttccaatc

SEQ ID NO: 3717559 - DNA, 25 bp, Homo sapien
acaagcagtcagctcagcggtcaca

SEQ ID NO: 3717560 - DNA, 25 bp, Homo sapien
caatctagtggagagactgacaagc

SEQ ID NO: 3717561 - DNA, 25 bp, Homo sapien
catggcagtgttatttgaagcacca

SEQ ID NO: 3717562 - DNA, 25 bp, Homo sapien
ttatgtctaaccctatttctgtcac

SEQ ID NO: 3717563 - DNA, 25 bp, Homo sapien
ttccttgtaggataaaacagatagt

SEQ ID NO: 3717564 - DNA, 25 bp, Homo sapien
tatccaaatggttatgagtcatggc

SEQ ID NO: 3717565 - DNA, 25 bp, Homo sapien
aaatacatatgtcttgaccatttct

SEQ ID NO: 3717566 - DNA, 25 bp, Homo sapien
aatacatatgtcttgaccatttctc

SEQ ID NO: 3717567 - DNA, 25 bp, Homo sapien
catttaatacctgtgcaaaccccac

SEQ ID NO: 3717568 - DNA, 25 bp, Homo sapien
caaaacatttaatacctgtgcaaac

SEQ ID NO: 3717569 - DNA, 25 bp, Homo sapien
agaaatcccggtgacaggatagagc

SEQ ID NO: 3717570 - DNA, 25 bp, Homo sapien
ctccaggccagcttagaaatcccgg

SEQ ID NO: 3717571 - DNA, 25 bp, Homo sapien
atctggtgggtctattttatgtgaa

SEQ ID NO: 3717572 - DNA, 25 bp, Homo sapien
ctgtggtctcatctggtgggtctat

SEQ ID NO: 3717573 - DNA, 25 bp, Homo sapien
tgtagaaaatggctgcttctgtggt

SEQ ID NO: 3717574 - DNA, 25 bp, Homo sapien
aatggctgcttctgtggtctcatct

SEQ ID NO: 3717575 - DNA, 25 bp, Homo sapien
tttggtctcaactccactgacagca

SEQ ID NO: 3717576 - DNA, 25 bp, Homo sapien
cacccagcaatgtgccctttgagtt

SEQ ID NO: 3717577 - DNA, 25 bp, Homo sapien
aatgtgccctttgagttcagttctc

SEQ ID NO: 3717578 - DNA, 25 bp, Homo sapien
tctccaaggggcataaattgcttcc

SEQ ID NO: 3717579 - DNA, 25 bp, Homo sapien
tctcttctagcacagggagaatcat

SEQ ID NO: 3717580 - DNA, 25 bp, Homo sapien
tctctcttctagcacagggagaatc

SEQ ID NO: 3717581 - DNA, 25 bp, Homo sapien
ttccaaagtactccaagtttctctc

SEQ ID NO: 3717582 - DNA, 25 bp, Homo sapien
tttctctcttctagcacagggagaa

SEQ ID NO: 3717583 - DNA, 25 bp, Homo sapien
tcagggtacctgaaagcccccttga

SEQ ID NO: 3717584 - DNA, 25 bp, Homo sapien
ttactgagcaattttcagggtacct

SEQ ID NO: 3717585 - DNA, 25 bp, Homo sapien
cctttactgagcaattttcagggta

SEQ ID NO: 3717586 - DNA, 25 bp, Homo sapien
ctggccctttactgagcaattttca

SEQ ID NO: 3717587 - DNA, 25 bp, Homo sapien
cattgggagatgagtcaaaggaaag

SEQ ID NO: 3717588 - DNA, 25 bp, Homo sapien
tgatgatgatcatgtgtacattggg

SEQ ID NO: 3717589 - DNA, 25 bp, Homo sapien
ctttggatgatccacacactctttc

SEQ ID NO: 3717590 - DNA, 25 bp, Homo sapien
tgatcatgtgtacattgggagatga

SEQ ID NO: 3717591 - DNA, 25 bp, Homo sapien
ccaagttctacagcggatagcatgc

SEQ ID NO: 3717592 - DNA, 25 bp, Homo sapien
gttctacagcggatagcatgctctc

SEQ ID NO: 3717593 - DNA, 25 bp, Homo sapien
actccaagttctacagcggatagca

SEQ ID NO: 3717594 - DNA, 25 bp, Homo sapien
tcctcactccaagttctacagcgga

SEQ ID NO: 3717595 - DNA, 25 bp, Homo sapien
gggaagcccgcactaatgcaattac

SEQ ID NO: 3717596 - DNA, 25 bp, Homo sapien
gagcactgggaagcccgcactaatg

SEQ ID NO: 3717597 - DNA, 25 bp, Homo sapien
aataagtccggaaattcctgagcac

SEQ ID NO: 3717598 - DNA, 25 bp, Homo sapien
tcctccttgaaactagcagggagca

SEQ ID NO: 3717599 - DNA, 25 bp, Homo sapien
ggatcagggagtttcctaaacagaa

SEQ ID NO: 3717600 - DNA, 25 bp, Homo sapien
gttagatggcagcataactgtggtt

SEQ ID NO: 3717601 - DNA, 25 bp, Homo sapien
gttttctgctcgtattttggtatga

SEQ ID NO: 3717602 - DNA, 25 bp, Homo sapien
tatgaaggtggatagctgtttcctg

SEQ ID NO: 3717603 - DNA, 25 bp, Homo sapien
ggaagtacagtagatgcagttacct

SEQ ID NO: 3717604 - DNA, 25 bp, Homo sapien
aagtacagtagatgcagttacctgg

SEQ ID NO: 3717605 - DNA, 25 bp, Homo sapien
gaagtacagtagatgcagttacctg

SEQ ID NO: 3717606 - DNA, 25 bp, Homo sapien
cctggcaacagtaggtattcaccat

SEQ ID NO: 3717607 - DNA, 25 bp, Homo sapien
tctctatatagattttgggttttct

SEQ ID NO: 3717608 - DNA, 25 bp, Homo sapien
ctatatagattttgggttttctgat

SEQ ID NO: 3717609 - DNA, 25 bp, Homo sapien
tatagattttgggttttctgatctt

SEQ ID NO: 3717610 - DNA, 25 bp, Homo sapien
attctctatatagattttgggtttt

SEQ ID NO: 3717611 - DNA, 25 bp, Homo sapien
gccattgtctcaggtcctgggcgct

SEQ ID NO: 3717612 - DNA, 25 bp, Homo sapien
gtcctgggcgctctcactcatttca

SEQ ID NO: 3717613 - DNA, 25 bp, Homo sapien
ttcctgccattgtctcaggtcctgg

SEQ ID NO: 3717614 - DNA, 25 bp, Homo sapien
aggtcctgggcgctctcactcattt

SEQ ID NO: 3717615 - DNA, 25 bp, Homo sapien
ggtgtgacagggcttcttttatctg

SEQ ID NO: 3717616 - DNA, 25 bp, Homo sapien
gtgacagggcttcttttatctgcat

SEQ ID NO: 3717617 - DNA, 25 bp, Homo sapien
tgtgacagggcttcttttatctgca

SEQ ID NO: 3717618 - DNA, 25 bp, Homo sapien
gtgtgacagggcttcttttatctgc

SEQ ID NO: 3717619 - DNA, 25 bp, Homo sapien
ctgagatcttgggctttaaactcat

SEQ ID NO: 3717620 - DNA, 25 bp, Homo sapien
gggcccgttctcaggcctgcactga

SEQ ID NO: 3717621 - DNA, 25 bp, Homo sapien
ggcccgttctcaggcctgcactgag

SEQ ID NO: 3717622 - DNA, 25 bp, Homo sapien
gggtagacattgtctgtgtaacaaa

SEQ ID NO: 3717623 - DNA, 25 bp, Homo sapien
ctctcttgtaccagtatttcatgcc

SEQ ID NO: 3717624 - DNA, 25 bp, Homo sapien
tgctctcttgtaccagtatttcatg

SEQ ID NO: 3717625 - DNA, 25 bp, Homo sapien
tgtgtaacaaattgctctcttgtac

SEQ ID NO: 3717626 - DNA, 25 bp, Homo sapien
tgtctacccctaattcagaaagagg

SEQ ID NO: 3717627 - DNA, 25 bp, Homo sapien
aaggctgagccttaatgtgtggcca

SEQ ID NO: 3717628 - DNA, 25 bp, Homo sapien
tctggtaatccctcttttggccctc

SEQ ID NO: 3717629 - DNA, 25 bp, Homo sapien
tgtgtggccacgtacatagcttctc

SEQ ID NO: 3717630 - DNA, 25 bp, Homo sapien
cagctggagccttttatggaacatc

SEQ ID NO: 3717631 - DNA, 25 bp, Homo sapien
caggtttaccctgctaccagaagga

SEQ ID NO: 3717632 - DNA, 25 bp, Homo sapien
agctctcacggaaatcttacagctg

SEQ ID NO: 3717633 - DNA, 25 bp, Homo sapien
tcttgtttaagacatattccccttg

SEQ ID NO: 3717634 - DNA, 25 bp, Homo sapien
gaggtttatgttgaagacttcatag

SEQ ID NO: 3717635 - DNA, 25 bp, Homo sapien
gacttcatagagtaggtaggttttg

SEQ ID NO: 3717636 - DNA, 25 bp, Homo sapien
ttagatgaggtttatgttgaagact

SEQ ID NO: 3717637 - DNA, 25 bp, Homo sapien
gtgtaggtgtagaggagaggcacaa

SEQ ID NO: 3717638 - DNA, 25 bp, Homo sapien
ttggtgcttatatttcatatatgcc

SEQ ID NO: 3717639 - DNA, 25 bp, Homo sapien
ggtgcttatatttcatatatgccat

SEQ ID NO: 3717640 - DNA, 25 bp, Homo sapien
tagtttcccataagccaagatgaaa

SEQ ID NO: 3717641 - DNA, 25 bp, Homo sapien
gtagtttcccataagccaagatgaa

SEQ ID NO: 3717642 - DNA, 25 bp, Homo sapien
tgtgcttttcattacgacagatgtg

SEQ ID NO: 3717643 - DNA, 25 bp, Homo sapien
caaccttcctcgtcttcactttggt

SEQ ID NO: 3717644 - DNA, 25 bp, Homo sapien
accacatcgtgctggtcatgctcca

SEQ ID NO: 3717645 - DNA, 25 bp, Homo sapien
gatgaggctctgaccactaatgaca

SEQ ID NO: 3717646 - DNA, 25 bp, Homo sapien
gaaatccgtggtcttcttaatctct

SEQ ID NO: 3717647 - DNA, 25 bp, Homo sapien
tgaagaaatccgtggtcttcttaat

SEQ ID NO: 3717648 - DNA, 25 bp, Homo sapien
cacatgaagaaatccgtggtcttct

SEQ ID NO: 3717649 - DNA, 25 bp, Homo sapien
agaaatccgtggtcttcttaatctc

SEQ ID NO: 3717650 - DNA, 25 bp, Homo sapien
gtgttctctaagctatatgctgtga

SEQ ID NO: 3717651 - DNA, 25 bp, Homo sapien
agtgttctctaagctatatgctgtg

SEQ ID NO: 3717652 - DNA, 25 bp, Homo sapien
taagtgttctctaagctatatgctg

SEQ ID NO: 3717653 - DNA, 25 bp, Homo sapien
ttaagtgttctctaagctatatgct

SEQ ID NO: 3717654 - DNA, 25 bp, Homo sapien
aatggagggatcagataatttcgag

SEQ ID NO: 3717655 - DNA, 25 bp, Homo sapien
taatttcgagttctttactgctgtg

SEQ ID NO: 3717656 - DNA, 25 bp, Homo sapien
ctgtaaagcttttaatggagggatc

SEQ ID NO: 3717657 - DNA, 25 bp, Homo sapien
ggttgagtgttaaagacagcatgct

SEQ ID NO: 3717658 - DNA, 25 bp, Homo sapien
tgaaggcaaagaaacggaaacatct

SEQ ID NO: 3717659 - DNA, 25 bp, Homo sapien
caatatatggttctatagtccacag

SEQ ID NO: 3717660 - DNA, 25 bp, Homo sapien
gcttcgcaaaggtttcattgaagac

SEQ ID NO: 3717661 - DNA, 25 bp, Homo sapien
gtccacagcatattaattgcagcct

SEQ ID NO: 3717662 - DNA, 25 bp, Homo sapien
tgcttctccaattgcagccttctgg

SEQ ID NO: 3717663 - DNA, 25 bp, Homo sapien
gaatctctcccagtcaggcaatctg

SEQ ID NO: 3717664 - DNA, 25 bp, Homo sapien
tgccggaaccctctaaaactgtgct

SEQ ID NO: 3717665 - DNA, 25 bp, Homo sapien
attccagatggtgtgtgtgatgctc

SEQ ID NO: 3717666 - DNA, 25 bp, Homo sapien
tgccagcatataattaattaccttg

SEQ ID NO: 3717667 - DNA, 25 bp, Homo sapien
taccttgaattctttattgttgtct

SEQ ID NO: 3717668 - DNA, 25 bp, Homo sapien
ctgccagcatataattaattacctt

SEQ ID NO: 3717669 - DNA, 25 bp, Homo sapien
ctttattgttgtctccctcacccat

SEQ ID NO: 3717670 - DNA, 25 bp, Homo sapien
tagtcatatgcagtcactgtcccat

SEQ ID NO: 3717671 - DNA, 25 bp, Homo sapien
actatagtcatatgcagtcactgtc

SEQ ID NO: 3717672 - DNA, 25 bp, Homo sapien
caccaccatgaccttactatagtca

SEQ ID NO: 3717673 - DNA, 25 bp, Homo sapien
tcatatgcagtcactgtcccattcc

SEQ ID NO: 3717674 - DNA, 25 bp, Homo sapien
tcaagccagtcttaacaaacagaat

SEQ ID NO: 3717675 - DNA, 25 bp, Homo sapien
agccagtcttaacaaacagaatttc

SEQ ID NO: 3717676 - DNA, 25 bp, Homo sapien
atcaagccagtcttaacaaacagaa

SEQ ID NO: 3717677 - DNA, 25 bp, Homo sapien
aatcaagccagtcttaacaaacaga

SEQ ID NO: 3717678 - DNA, 25 bp, Homo sapien
agccttcatgcatcatttctggtat

SEQ ID NO: 3717679 - DNA, 25 bp, Homo sapien
ttttcacttgatcgcagccttcatg

SEQ ID NO: 3717680 - DNA, 25 bp, Homo sapien
catcatttctggtattgtgtgcaca

SEQ ID NO: 3717681 - DNA, 25 bp, Homo sapien
ccggttacgcatgtagcttttcact

SEQ ID NO: 3717682 - DNA, 25 bp, Homo sapien
tctttcctcaggggtatgcggaaac

SEQ ID NO: 3717683 - DNA, 25 bp, Homo sapien
ctcaggggtatgcggaaacctttgg

SEQ ID NO: 3717684 - DNA, 25 bp, Homo sapien
cctcaggggtatgcggaaacctttg

SEQ ID NO: 3717685 - DNA, 25 bp, Homo sapien
attctttcctcaggggtatgcggaa

SEQ ID NO: 3717686 - DNA, 25 bp, Homo sapien
ctgttcttgaaagctctgctcaaat

SEQ ID NO: 3717687 - DNA, 25 bp, Homo sapien
tgttcttgaaagctctgctcaaatt

SEQ ID NO: 3717688 - DNA, 25 bp, Homo sapien
ttcttgaaagctctgctcaaattcc

SEQ ID NO: 3717689 - DNA, 25 bp, Homo sapien
cttgaaagctctgctcaaattccat

SEQ ID NO: 3717690 - DNA, 25 bp, Homo sapien
gggtagccacgtctcttctcaaaaa

SEQ ID NO: 3717691 - DNA, 25 bp, Homo sapien
cattcgcattggctgtgcaggcttc

SEQ ID NO: 3717692 - DNA, 25 bp, Homo sapien
gcggacgtctcctttgccacagtag

SEQ ID NO: 3717693 - DNA, 25 bp, Homo sapien
gaccattctggttacaagaccctgg

SEQ ID NO: 3717694 - DNA, 25 bp, Homo sapien
taattgggctcacactcttcccggg

SEQ ID NO: 3717695 - DNA, 25 bp, Homo sapien
tctttcgtgcagcagagcgcgtcta

SEQ ID NO: 3717696 - DNA, 25 bp, Homo sapien
gagctcgtccgaatgtagggtgcaa

SEQ ID NO: 3717697 - DNA, 25 bp, Homo sapien
agttttgcttcttgaggtgcgcccg

SEQ ID NO: 3717698 - DNA, 25 bp, Homo sapien
gaacccagtcaggacagtcaatgag

SEQ ID NO: 3717699 - DNA, 25 bp, Homo sapien
tgtgagcaccaagaacccagtcagg

SEQ ID NO: 3717700 - DNA, 25 bp, Homo sapien
gcagctggatccgtccatcattcat

SEQ ID NO: 3717701 - DNA, 25 bp, Homo sapien
cattcatgatggctggctcgatttc

SEQ ID NO: 3717702 - DNA, 25 bp, Homo sapien
cagggaacttcagttgaaggtcatc

SEQ ID NO: 3717703 - DNA, 25 bp, Homo sapien
gatttcctgggtgcttaggttggta

SEQ ID NO: 3717704 - DNA, 25 bp, Homo sapien
tatttctagaaggtcgtcatggcgc

SEQ ID NO: 3717705 - DNA, 25 bp, Homo sapien
gttgctattacagcgtttgctgggc

SEQ ID NO: 3717706 - DNA, 25 bp, Homo sapien
gaacacaaacctaggctttagagtc

SEQ ID NO: 3717707 - DNA, 25 bp, Homo sapien
gacttaaacctagagcctccaactc

SEQ ID NO: 3717708 - DNA, 25 bp, Homo sapien
gactagatctggtaaagtcaggact

SEQ ID NO: 3717709 - DNA, 25 bp, Homo sapien
tagccacttgtgttgactaagaaca

SEQ ID NO: 3717710 - DNA, 25 bp, Homo sapien
gccaaaggatcatggcttctttttg

SEQ ID NO: 3717711 - DNA, 25 bp, Homo sapien
ccaaaggatcatggcttctttttgt

SEQ ID NO: 3717712 - DNA, 25 bp, Homo sapien
ggccaaaggatcatggcttcttttt

SEQ ID NO: 3717713 - DNA, 25 bp, Homo sapien
gggtactaagacgtacgagtcaaga

SEQ ID NO: 3717714 - DNA, 25 bp, Homo sapien
ctgcttcatgccatctgcatgagca

SEQ ID NO: 3717715 - DNA, 25 bp, Homo sapien
aggacttcctgcttcatgccatctg

SEQ ID NO: 3717716 - DNA, 25 bp, Homo sapien
ctaagacgtacgagtcaagaaggac

SEQ ID NO: 3717717 - DNA, 25 bp, Homo sapien
tggagaagacccaagacggatgtta

SEQ ID NO: 3717718 - DNA, 25 bp, Homo sapien
tctggcctgaaggagcctgctctga

SEQ ID NO: 3717719 - DNA, 25 bp, Homo sapien
agctggtaccagagatgatgttgcc

SEQ ID NO: 3717720 - DNA, 25 bp, Homo sapien
caatcattttgttgggggcaagggt

SEQ ID NO: 3717721 - DNA, 25 bp, Homo sapien
atttcccagcttttcgcttctcctg

SEQ ID NO: 3717722 - DNA, 25 bp, Homo sapien
ccggcagtaattccctgccggctcc

SEQ ID NO: 3717723 - DNA, 25 bp, Homo sapien
cattggcccgggaaatttcccagct

SEQ ID NO: 3717724 - DNA, 25 bp, Homo sapien
tcccagcttttcgcttctcctgcca

SEQ ID NO: 3717725 - DNA, 25 bp, Homo sapien
tagcgggtacacacttcggtatatc

SEQ ID NO: 3717726 - DNA, 25 bp, Homo sapien
cggtatatctgagatgcagcctgaa

SEQ ID NO: 3717727 - DNA, 25 bp, Homo sapien
cacacttcggtatatctgagatgca

SEQ ID NO: 3717728 - DNA, 25 bp, Homo sapien
tgtgcgtagcgggtacacacttcgg

SEQ ID NO: 3717729 - DNA, 25 bp, Homo sapien
cagcgcagctgcacgtgatactgca

SEQ ID NO: 3717730 - DNA, 25 bp, Homo sapien
agctgcacgtgatactgcaggaagc

SEQ ID NO: 3717731 - DNA, 25 bp, Homo sapien
ctgcacgtgatactgcaggaagccg

SEQ ID NO: 3717732 - DNA, 25 bp, Homo sapien
cgcagctgcacgtgatactgcagga

SEQ ID NO: 3717733 - DNA, 25 bp, Homo sapien
gagcctgacacccaccgctgctgcc

SEQ ID NO: 3717734 - DNA, 25 bp, Homo sapien
gtcccggagcctgacacccaccgct

SEQ ID NO: 3717735 - DNA, 25 bp, Homo sapien
gcagcagtcccggagcctgacaccc

SEQ ID NO: 3717736 - DNA, 25 bp, Homo sapien
agcagtcccggagcctgacacccac

SEQ ID NO: 3717737 - DNA, 25 bp, Homo sapien
ctggaaatagacacgcaggaggaag

SEQ ID NO: 3717738 - DNA, 25 bp, Homo sapien
ggaaatagacacgcaggaggaagct

SEQ ID NO: 3717739 - DNA, 25 bp, Homo sapien
gaagctggtgccttcggcggcgcgc

SEQ ID NO: 3717740 - DNA, 25 bp, Homo sapien
agggacacgcggcctccagcagtgt

SEQ ID NO: 3717741 - DNA, 25 bp, Homo sapien
cgtgccgcgaacacactgagtaggg

SEQ ID NO: 3717742 - DNA, 25 bp, Homo sapien
tcaggcacacgctgtgcgaggcgat

SEQ ID NO: 3717743 - DNA, 25 bp, Homo sapien
ctgaacagggccgacaaggctagca

SEQ ID NO: 3717744 - DNA, 25 bp, Homo sapien
agtggatcccctcttcgctgtagtc

SEQ ID NO: 3717745 - DNA, 25 bp, Homo sapien
tgtccagtcgggtgtcattgaaaac

SEQ ID NO: 3717746 - DNA, 25 bp, Homo sapien
cagggcaccctgtatgatgttgagc

SEQ ID NO: 3717747 - DNA, 25 bp, Homo sapien
aaggtgcttatctcctggcgcagcg

SEQ ID NO: 3717748 - DNA, 25 bp, Homo sapien
cgtctgagcgcagcatgaagcagtc

SEQ ID NO: 3717749 - DNA, 25 bp, Homo sapien
cctcctgtctcagcaattctcctgt

SEQ ID NO: 3717750 - DNA, 25 bp, Homo sapien
ctcctgtctcagcaattctcctgtc

SEQ ID NO: 3717751 - DNA, 25 bp, Homo sapien
caacctccgcctcctgtctcagcaa

SEQ ID NO: 3717752 - DNA, 25 bp, Homo sapien
tccgcctcctgtctcagcaattctc

SEQ ID NO: 3717753 - DNA, 25 bp, Homo sapien
tgcagaaactggaggtgaatcagcc

SEQ ID NO: 3717754 - DNA, 25 bp, Homo sapien
ctgcagaaactggaggtgaatcagc

SEQ ID NO: 3717755 - DNA, 25 bp, Homo sapien
gcagaaactggaggtgaatcagcca

SEQ ID NO: 3717756 - DNA, 25 bp, Homo sapien
cagaaactggaggtgaatcagccat

SEQ ID NO: 3717757 - DNA, 25 bp, Homo sapien
tcacctcatagaaagggtccccttc

SEQ ID NO: 3717758 - DNA, 25 bp, Homo sapien
cctcattattcacccgctggacaat

SEQ ID NO: 3717759 - DNA, 25 bp, Homo sapien
cgtgacaatgcccatcacctcatag

SEQ ID NO: 3717760 - DNA, 25 bp, Homo sapien
tctcctctatgatatcctccagcgt

SEQ ID NO: 3717761 - DNA, 25 bp, Homo sapien
ctggagaacagccaaggccgtgcac

SEQ ID NO: 3717762 - DNA, 25 bp, Homo sapien
agaacagccaaggccgtgcacttac

SEQ ID NO: 3717763 - DNA, 25 bp, Homo sapien
gagaacagccaaggccgtgcactta

SEQ ID NO: 3717764 - DNA, 25 bp, Homo sapien
ggagaacagccaaggccgtgcactt

SEQ ID NO: 3717765 - DNA, 25 bp, Homo sapien
ctgagagtcttggaggaaaataaga

SEQ ID NO: 3717766 - DNA, 25 bp, Homo sapien
gagtcttggaggaaaataagatgac

SEQ ID NO: 3717767 - DNA, 25 bp, Homo sapien
gagagtcttggaggaaaataagatg

SEQ ID NO: 3717768 - DNA, 25 bp, Homo sapien
agtcttggaggaaaataagatgacc

SEQ ID NO: 3717769 - DNA, 25 bp, Homo sapien
ttctgatgtgagtggaacccctgtt

SEQ ID NO: 3717770 - DNA, 25 bp, Homo sapien
tgatgtgagtggaacccctgttggg

SEQ ID NO: 3717771 - DNA, 25 bp, Homo sapien
tgttctgatgtgagtggaacccctg

SEQ ID NO: 3717772 - DNA, 25 bp, Homo sapien
tctgatgtgagtggaacccctgttg

SEQ ID NO: 3717773 - DNA, 25 bp, Homo sapien
gcagtgagaatgaaagggaatgaac

SEQ ID NO: 3717774 - DNA, 25 bp, Homo sapien
ctgagtggatgcagtgagaatgaaa

SEQ ID NO: 3717775 - DNA, 25 bp, Homo sapien
gatgcagtgagaatgaaagggaatg

SEQ ID NO: 3717776 - DNA, 25 bp, Homo sapien
agtgagaatgaaagggaatgaaccc

SEQ ID NO: 3717777 - DNA, 25 bp, Homo sapien
ttctccaaacttcgcctaaagagaa

SEQ ID NO: 3717778 - DNA, 25 bp, Homo sapien
tttctccaaacttcgcctaaagaga

SEQ ID NO: 3717779 - DNA, 25 bp, Homo sapien
tgtggtgagatcttcacccgcatct

SEQ ID NO: 3717780 - DNA, 25 bp, Homo sapien
gaccctctgctttttccgattgtca

SEQ ID NO: 3717781 - DNA, 25 bp, Homo sapien
caaggagaagtcatgccgcttccgc

SEQ ID NO: 3717782 - DNA, 25 bp, Homo sapien
cgcatctccgtgtccgaaagcttaa

SEQ ID NO: 3717783 - DNA, 25 bp, Homo sapien
gagcaggatcttctccgaaaggtac

SEQ ID NO: 3717784 - DNA, 25 bp, Homo sapien
tcagctcctggatcacgttgggatg

SEQ ID NO: 3717785 - DNA, 25 bp, Homo sapien
tgttcttctcatcaaacttcagctc

SEQ ID NO: 3717786 - DNA, 25 bp, Homo sapien
tcacgttgggatgtttcaggagccg

SEQ ID NO: 3717787 - DNA, 25 bp, Homo sapien
gccatagtaagtaaaggctccattt

SEQ ID NO: 3717788 - DNA, 25 bp, Homo sapien
ctccattttcaaagcgaaggccttc

SEQ ID NO: 3717789 - DNA, 25 bp, Homo sapien
gctgggacgccatagtaagtaaagg

SEQ ID NO: 3717790 - DNA, 25 bp, Homo sapien
catgatggctgggacgccatagtaa

SEQ ID NO: 3717791 - DNA, 25 bp, Homo sapien
gacttccaaccttccgcacgtcatt

SEQ ID NO: 3717792 - DNA, 25 bp, Homo sapien
cagacttccaaccttccgcacgtca

SEQ ID NO: 3717793 - DNA, 25 bp, Homo sapien
gccagacttccaaccttccgcacgt

SEQ ID NO: 3717794 - DNA, 25 bp, Homo sapien
acttccaaccttccgcacgtcatta

SEQ ID NO: 3717795 - DNA, 25 bp, Homo sapien
gcacagccagctggcagatacctct

SEQ ID NO: 3717796 - DNA, 25 bp, Homo sapien
gagaggcagataagcaacgtattgc

SEQ ID NO: 3717797 - DNA, 25 bp, Homo sapien
cacaaaggtggaacttacatcccca

SEQ ID NO: 3717798 - DNA, 25 bp, Homo sapien
catgccctttaagcacaagtgcaat

SEQ ID NO: 3717799 - DNA, 25 bp, Homo sapien
gaagtggtcactgtaaacactaaca

SEQ ID NO: 3717800 - DNA, 25 bp, Homo sapien
tgaagtggtcactgtaaacactaac

SEQ ID NO: 3717801 - DNA, 25 bp, Homo sapien
ttgaagtggtcactgtaaacactaa

SEQ ID NO: 3717802 - DNA, 25 bp, Homo sapien
aagtggtcactgtaaacactaacag

SEQ ID NO: 3717803 - DNA, 25 bp, Homo sapien
caaagtgggtgagacagtctgttcc

SEQ ID NO: 3717804 - DNA, 25 bp, Homo sapien
tgtgagttgcgaaagggaagatata

SEQ ID NO: 3717805 - DNA, 25 bp, Homo sapien
cctggatcttcacaacatcacattt

SEQ ID NO: 3717806 - DNA, 25 bp, Homo sapien
ggaatcacatcctcttacaaagtca

SEQ ID NO: 3717807 - DNA, 25 bp, Homo sapien
gagcctgccagagagtcccctctgc

SEQ ID NO: 3717808 - DNA, 25 bp, Homo sapien
gacagcgaaggtacgagacacagag

SEQ ID NO: 3717809 - DNA, 25 bp, Homo sapien
ctctgctgacagcgaaggtacgaga

SEQ ID NO: 3717810 - DNA, 25 bp, Homo sapien
cctgccagagagtcccctctgctga

SEQ ID NO: 3717811 - DNA, 25 bp, Homo sapien
cctccaggctagttgttgcagaaaa

SEQ ID NO: 3717812 - DNA, 25 bp, Homo sapien
gagagtcctgcccaaaagtagcttc

SEQ ID NO: 3717813 - DNA, 25 bp, Homo sapien
ggaaaaccataccttgatctggtgg

SEQ ID NO: 3717814 - DNA, 25 bp, Homo sapien
ggttttgacctcaactcagtttgga

SEQ ID NO: 3717815 - DNA, 25 bp, Homo sapien
ctgcagcgagaaggggaccggttta

SEQ ID NO: 3717816 - DNA, 25 bp, Homo sapien
cccaaagtcactgcgctctcggttt

SEQ ID NO: 3717817 - DNA, 25 bp, Homo sapien
tctcggtttggagactcagagcgat

SEQ ID NO: 3717818 - DNA, 25 bp, Homo sapien
tcacaaactgcacatcgctgaggat

SEQ ID NO: 3717819 - DNA, 25 bp, Homo sapien
tcaggcatgtagaggttgttgctgc

SEQ ID NO: 3717820 - DNA, 25 bp, Homo sapien
gtcttcttgtcccgctcagccagcc

SEQ ID NO: 3717821 - DNA, 25 bp, Homo sapien
taggaatgggggtagtcttcttgtc

SEQ ID NO: 3717822 - DNA, 25 bp, Homo sapien
tcagccagccaacactgcccactgg

SEQ ID NO: 3717823 - DNA, 25 bp, Homo sapien
cctaggaatgggggtagtcttcttg

SEQ ID NO: 3717824 - DNA, 25 bp, Homo sapien
tcaaggttacttttataggctgatg

SEQ ID NO: 3717825 - DNA, 25 bp, Homo sapien
ttcaaggttacttttataggctgat

SEQ ID NO: 3717826 - DNA, 25 bp, Homo sapien
ctcagctgcactgattgcagcaaag

SEQ ID NO: 3717827 - DNA, 25 bp, Homo sapien
tcagctgcactgattgcagcaaagt

SEQ ID NO: 3717828 - DNA, 25 bp, Homo sapien
cagctgcactgattgcagcaaagtc

SEQ ID NO: 3717829 - DNA, 25 bp, Homo sapien
gctcagctgcactgattgcagcaaa

SEQ ID NO: 3717830 - DNA, 25 bp, Homo sapien
gcagccaaggtgtccagaagttaac

SEQ ID NO: 3717831 - DNA, 25 bp, Homo sapien
caatgctgcaatctagggtgatgag

SEQ ID NO: 3717832 - DNA, 25 bp, Homo sapien
gcacctggcctcctatcatggtatg

SEQ ID NO: 3717833 - DNA, 25 bp, Homo sapien
acctttaggctaatgtgatgtctcc

SEQ ID NO: 3717834 - DNA, 25 bp, Homo sapien
atacatttcaaagacagctgtcaag

SEQ ID NO: 3717835 - DNA, 25 bp, Homo sapien
acatttcaaagacagctgtcaagct

SEQ ID NO: 3717836 - DNA, 25 bp, Homo sapien
tacatttcaaagacagctgtcaagc

SEQ ID NO: 3717837 - DNA, 25 bp, Homo sapien
catacatttcaaagacagctgtcaa

SEQ ID NO: 3717838 - DNA, 25 bp, Homo sapien
gagatccacgaatgggggccttacc

SEQ ID NO: 3717839 - DNA, 25 bp, Homo sapien
gggtgcttggaaccctcggcctctg

SEQ ID NO: 3717840 - DNA, 25 bp, Homo sapien
acgctgtagcagtccagcagggaca

SEQ ID NO: 3717841 - DNA, 25 bp, Homo sapien
aggcggccctttgctggtctgccac

SEQ ID NO: 3717842 - DNA, 25 bp, Homo sapien
ctgttcctgttgttgaggagcgtga

SEQ ID NO: 3717843 - DNA, 25 bp, Homo sapien
gcaggcagtgagtgcgttctgatat

SEQ ID NO: 3717844 - DNA, 25 bp, Homo sapien
tgagtgcgttctgatattgctgccg

SEQ ID NO: 3717845 - DNA, 25 bp, Homo sapien
cgttctgatattgctgccgtgtgat

SEQ ID NO: 3717846 - DNA, 25 bp, Homo sapien
tgctctcgtgggaacggctgcagga

SEQ ID NO: 3717847 - DNA, 25 bp, Homo sapien
tgtgctcctcgaagtcagtcatttc

SEQ ID NO: 3717848 - DNA, 25 bp, Homo sapien
tcctcaggtacactacctcgctggg

SEQ ID NO: 3717849 - DNA, 25 bp, Homo sapien
gtgtgctgtgctcctcgaagtcagt

SEQ ID NO: 3717850 - DNA, 25 bp, Homo sapien
tttcctcaaaatcgctactgcaggg

SEQ ID NO: 3717851 - DNA, 25 bp, Homo sapien
gcttcttgcccacgttttcctcaaa

SEQ ID NO: 3717852 - DNA, 25 bp, Homo sapien
ggtctctgtatccaggttgatgtta

SEQ ID NO: 3717853 - DNA, 25 bp, Homo sapien
tatccaggttgatgttacaacattc

SEQ ID NO: 3717854 - DNA, 25 bp, Homo sapien
aaattggagttgtcctcagaggttc

SEQ ID NO: 3717855 - DNA, 25 bp, Homo sapien
aattggagttgtcctcagaggttct

SEQ ID NO: 3717856 - DNA, 25 bp, Homo sapien
ttggagttgtcctcagaggttctct

SEQ ID NO: 3717857 - DNA, 25 bp, Homo sapien
ttaaattggagttgtcctcagaggt

SEQ ID NO: 3717858 - DNA, 25 bp, Homo sapien
acacacccagtgaatgctggctttg

SEQ ID NO: 3717859 - DNA, 25 bp, Homo sapien
cacacccagtgaatgctggctttgc

SEQ ID NO: 3717860 - DNA, 25 bp, Homo sapien
gcaagttccaagacgataggtctcc

SEQ ID NO: 3717861 - DNA, 25 bp, Homo sapien
ccagactatgctgtggaaaagacca

SEQ ID NO: 3717862 - DNA, 25 bp, Homo sapien
tatggccatgtcaaggttctgagtc

SEQ ID NO: 3717863 - DNA, 25 bp, Homo sapien
tctagcatgttctatcagaggcacc

SEQ ID NO: 3717864 - DNA, 25 bp, Homo sapien
taaaaacctgtctcgaactgcccag

SEQ ID NO: 3717865 - DNA, 25 bp, Homo sapien
gaaacgctgggctgaaagttccact

SEQ ID NO: 3717866 - DNA, 25 bp, Homo sapien
tatgcttggaattgcacctgcccca

SEQ ID NO: 3717867 - DNA, 25 bp, Homo sapien
tacaatactctagggtgtgccgaga

SEQ ID NO: 3717868 - DNA, 25 bp, Homo sapien
caggaaaggcattttcattttattt

SEQ ID NO: 3717869 - DNA, 25 bp, Homo sapien
ccaggaaaggcattttcattttatt

SEQ ID NO: 3717870 - DNA, 25 bp, Homo sapien
ttccaggaaaggcattttcatttta

SEQ ID NO: 3717871 - DNA, 25 bp, Homo sapien
tccaggaaaggcattttcattttat

SEQ ID NO: 3717872 - DNA, 25 bp, Homo sapien
aaagcccatctcaatgggaatctgg

SEQ ID NO: 3717873 - DNA, 25 bp, Homo sapien
gccttcttctattccgacagatatg

SEQ ID NO: 3717874 - DNA, 25 bp, Homo sapien
tctattccgacagatatgttggttg

SEQ ID NO: 3717875 - DNA, 25 bp, Homo sapien
tcccactgcgttcacctgaaaaagg

SEQ ID NO: 3717876 - DNA, 25 bp, Homo sapien
aaatctagattacgtggccacctcc

SEQ ID NO: 3717877 - DNA, 25 bp, Homo sapien
cataccatggattagagacacttgc

SEQ ID NO: 3717878 - DNA, 25 bp, Homo sapien
taatcatgacatgcacggacacgta

SEQ ID NO: 3717879 - DNA, 25 bp, Homo sapien
ttaaaccggccccacatgaagagaa

SEQ ID NO: 3717880 - DNA, 25 bp, Homo sapien
tctctggcatagtgctgtttcagct

SEQ ID NO: 3717881 - DNA, 25 bp, Homo sapien
tcttaggatccagacagaaatgtcg

SEQ ID NO: 3717882 - DNA, 25 bp, Homo sapien
cactctcgctttgattgcctctagg

SEQ ID NO: 3717883 - DNA, 25 bp, Homo sapien
gaaggagggctcatgggtcataact

SEQ ID NO: 3717884 - DNA, 25 bp, Homo sapien
caggtcatttgaccactgggtggta

SEQ ID NO: 3717885 - DNA, 25 bp, Homo sapien
ttactgtttagaggcaaggaagccg

SEQ ID NO: 3717886 - DNA, 25 bp, Homo sapien
gagtcattgactcagacggccacct

SEQ ID NO: 3717887 - DNA, 25 bp, Homo sapien
caggccagaagcaatggactcagaa

SEQ ID NO: 3717888 - DNA, 25 bp, Homo sapien
gcaaaaaggaattcgtgcgcacccc

SEQ ID NO: 3717889 - DNA, 25 bp, Homo sapien
ggaactttgggtaccagccagctga

SEQ ID NO: 3717890 - DNA, 25 bp, Homo sapien
cctcgaaggtcgaaaggtggcctct

SEQ ID NO: 3717891 - DNA, 25 bp, Homo sapien
tgcgcacccctctctgttggaagga

SEQ ID NO: 3717892 - DNA, 25 bp, Homo sapien
taagtgaactaatgcggaagagaaa

SEQ ID NO: 3717893 - DNA, 25 bp, Homo sapien
gtacaacaaacccacatgacaagca

SEQ ID NO: 3717894 - DNA, 25 bp, Homo sapien
caaacctgtgcatgtatcccgaacc

SEQ ID NO: 3717895 - DNA, 25 bp, Homo sapien
tagactgaagaaaatacggtacata

SEQ ID NO: 3717896 - DNA, 25 bp, Homo sapien
tatctggctgcctacctgtctgggc

SEQ ID NO: 3717897 - DNA, 25 bp, Homo sapien
gatgctgttgctatatgggttccca

SEQ ID NO: 3717898 - DNA, 25 bp, Homo sapien
tacttacaggttcatgcagtgctca

SEQ ID NO: 3717899 - DNA, 25 bp, Homo sapien
cactccctaggaaagcagtttgaga

SEQ ID NO: 3717900 - DNA, 25 bp, Homo sapien
gcaatctagttccagaggccatgct

SEQ ID NO: 3717901 - DNA, 25 bp, Homo sapien
tataacagatctcatacggctttgg

SEQ ID NO: 3717902 - DNA, 25 bp, Homo sapien
gcatatgtgggtactcagttcagga

SEQ ID NO: 3717903 - DNA, 25 bp, Homo sapien
agtgggagaacagcaacacctcagg

SEQ ID NO: 3717904 - DNA, 25 bp, Homo sapien
tctacaaagacttcttggagggctc

SEQ ID NO: 3717905 - DNA, 25 bp, Homo sapien
tagatctctacaaagacttcttgga

SEQ ID NO: 3717906 - DNA, 25 bp, Homo sapien
tttatagatctctacaaagacttct

SEQ ID NO: 3717907 - DNA, 25 bp, Homo sapien
aaattgccttgagattttatagatc

SEQ ID NO: 3717908 - DNA, 25 bp, Homo sapien
ccccaggatgtggagagaatagtgt

SEQ ID NO: 3717909 - DNA, 25 bp, Homo sapien
caggatgtggagagaatagtgtttc

SEQ ID NO: 3717910 - DNA, 25 bp, Homo sapien
ggatgtggagagaatagtgtttcta

SEQ ID NO: 3717911 - DNA, 25 bp, Homo sapien
cccaggatgtggagagaatagtgtt

SEQ ID NO: 3717912 - DNA, 25 bp, Homo sapien
agtaagagactgtactggtgatcca

SEQ ID NO: 3717913 - DNA, 25 bp, Homo sapien
gagtaggattttaggacacgacaca

SEQ ID NO: 3717914 - DNA, 25 bp, Homo sapien
cgaggttcctactagctttgtgtac

SEQ ID NO: 3717915 - DNA, 25 bp, Homo sapien
ttgcaaaagaaggatagtgctgccc

SEQ ID NO: 3717916 - DNA, 25 bp, Homo sapien
tggtgcaccacttccaggtaatgca

SEQ ID NO: 3717917 - DNA, 25 bp, Homo sapien
ggtgcaccacttccaggtaatgcag

SEQ ID NO: 3717918 - DNA, 25 bp, Homo sapien
tgcaccacttccaggtaatgcaggc

SEQ ID NO: 3717919 - DNA, 25 bp, Homo sapien
gtgcaccacttccaggtaatgcagg

SEQ ID NO: 3717920 - DNA, 25 bp, Homo sapien
gaaagcattttatagcggcaccttc

SEQ ID NO: 3717921 - DNA, 25 bp, Homo sapien
gttctaggccagtcttggccaacat

SEQ ID NO: 3717922 - DNA, 25 bp, Homo sapien
taattaacaaaagtcagatatcctg

SEQ ID NO: 3717923 - DNA, 25 bp, Homo sapien
agttaattatgtcttgtggtttatg

SEQ ID NO: 3717924 - DNA, 25 bp, Homo sapien
gggatcctaaaacgcgcgcgctctt

SEQ ID NO: 3717925 - DNA, 25 bp, Homo sapien
gcgctcttccgcctgcagtcctcct

SEQ ID NO: 3717926 - DNA, 25 bp, Homo sapien
cttgaggctcgccacatcctgaggc

SEQ ID NO: 3717927 - DNA, 25 bp, Homo sapien
gagtcggggatcctaaaacgcgcgc

SEQ ID NO: 3717928 - DNA, 25 bp, Homo sapien
gattcttcgtgtctcttccagcgct

SEQ ID NO: 3717929 - DNA, 25 bp, Homo sapien
gaaccaaagcggctgcctgctctgt

SEQ ID NO: 3717930 - DNA, 25 bp, Homo sapien
tgtctgctctcaaccgtaaaccggc

SEQ ID NO: 3717931 - DNA, 25 bp, Homo sapien
gaaatgtggttatcgcgttccaaga

SEQ ID NO: 3717932 - DNA, 25 bp, Homo sapien
ctggaaggggcaggtgaaaggtgca

SEQ ID NO: 3717933 - DNA, 25 bp, Homo sapien
gggcaggtgaaaggtgcagggacgg

SEQ ID NO: 3717934 - DNA, 25 bp, Homo sapien
gaaggggcaggtgaaaggtgcaggg

SEQ ID NO: 3717935 - DNA, 25 bp, Homo sapien
ggcaggtgaaaggtgcagggacggt

SEQ ID NO: 3717936 - DNA, 25 bp, Homo sapien
cagtccaaataataaatcccggcgg

SEQ ID NO: 3717937 - DNA, 25 bp, Homo sapien
cagggccacttaattgtccagtcca

SEQ ID NO: 3717938 - DNA, 25 bp, Homo sapien
gggcttttgacagacgcggtcccac

SEQ ID NO: 3717939 - DNA, 25 bp, Homo sapien
tctaaatcgcctccattggccggga

SEQ ID NO: 3717940 - DNA, 25 bp, Homo sapien
aagtgcgcaccatggaagtgctggt

SEQ ID NO: 3717941 - DNA, 25 bp, Homo sapien
gctccagattcaaaatgtctttgac

SEQ ID NO: 3717942 - DNA, 25 bp, Homo sapien
gtggaggtgaccgggcttggtaaca

SEQ ID NO: 3717943 - DNA, 25 bp, Homo sapien
tggaggtgaccgggcttggtaacat

SEQ ID NO: 3717944 - DNA, 25 bp, Homo sapien
cgtctgctgcggctagtgagttcaa

SEQ ID NO: 3717945 - DNA, 25 bp, Homo sapien
atgttccttgggctcgctgcacgag

SEQ ID NO: 3717946 - DNA, 25 bp, Homo sapien
cgtcagaaaattgcgtcccctcagc

SEQ ID NO: 3717947 - DNA, 25 bp, Homo sapien
tctcgcaggaccgtgtggacatagc

SEQ ID NO: 3717948 - DNA, 25 bp, Homo sapien
cgtgcggtagtaaatggctggactt

SEQ ID NO: 3717949 - DNA, 25 bp, Homo sapien
cctttttggtggctgcgcagagcgt

SEQ ID NO: 3717950 - DNA, 25 bp, Homo sapien
tgtcctggagcaccgtgaccctttt

SEQ ID NO: 3717951 - DNA, 25 bp, Homo sapien
aaagaacgcccttagcaggcggagg

SEQ ID NO: 3717952 - DNA, 25 bp, Homo sapien
tgaacctgcgttccagctcgaagac

SEQ ID NO: 3717953 - DNA, 25 bp, Homo sapien
tctctagagacttcttcagctggca

SEQ ID NO: 3717954 - DNA, 25 bp, Homo sapien
acctgggcttgcgagaagaggaccc

SEQ ID NO: 3717955 - DNA, 25 bp, Homo sapien
cgctgctgcttgaacctgcgttcca

SEQ ID NO: 3717956 - DNA, 25 bp, Homo sapien
ctgcgattctggaaccagattttca

SEQ ID NO: 3717957 - DNA, 25 bp, Homo sapien
tgcgattctggaaccagattttcac

SEQ ID NO: 3717958 - DNA, 25 bp, Homo sapien
agtaggcgctggcgcccacgctgta

SEQ ID NO: 3717959 - DNA, 25 bp, Homo sapien
tcccatagccgtaggcggggaagct

SEQ ID NO: 3717960 - DNA, 25 bp, Homo sapien
tgggcgtgacgcacggcttgccgtc

SEQ ID NO: 3717961 - DNA, 25 bp, Homo sapien
gtagggcgcgccgtaggcctgcgcg

SEQ ID NO: 3717962 - DNA, 25 bp, Homo sapien
tgtaggccgccgctgctgcggcggc

SEQ ID NO: 3717963 - DNA, 25 bp, Homo sapien
gctgtaggccgccgctgctgcggcg

SEQ ID NO: 3717964 - DNA, 25 bp, Homo sapien
tgctgtaggccgccgctgctgcggc

SEQ ID NO: 3717965 - DNA, 25 bp, Homo sapien
ctgtaggccgccgctgctgcggcgg

SEQ ID NO: 3717966 - DNA, 25 bp, Homo sapien
ccgcccgccgggtacgcacagccat

SEQ ID NO: 3717967 - DNA, 25 bp, Homo sapien
gcccgccgggtacgcacagccatag

SEQ ID NO: 3717968 - DNA, 25 bp, Homo sapien
cgcccgccgggtacgcacagccata

SEQ ID NO: 3717969 - DNA, 25 bp, Homo sapien
ctgcatggcagtggtcgccgcggag

SEQ ID NO: 3717970 - DNA, 25 bp, Homo sapien
gcatggcagtggtcgccgcggaggt

SEQ ID NO: 3717971 - DNA, 25 bp, Homo sapien
catggcagtggtcgccgcggaggtc

SEQ ID NO: 3717972 - DNA, 25 bp, Homo sapien
tggcagtggtcgccgcggaggtccc

SEQ ID NO: 3717973 - DNA, 25 bp, Homo sapien
tcacaaaggggccgcctccggccgc

SEQ ID NO: 3717974 - DNA, 25 bp, Homo sapien
cacaaaggggccgcctccggccgcg

SEQ ID NO: 3717975 - DNA, 25 bp, Homo sapien
gccgaagcctcctaggttgctcacg

SEQ ID NO: 3717976 - DNA, 25 bp, Homo sapien
caggcccggatgccctgcaaggtgc

SEQ ID NO: 3717977 - DNA, 25 bp, Homo sapien
accctggtgcaacggctgtgcgctg

SEQ ID NO: 3717978 - DNA, 25 bp, Homo sapien
ccggctgcagtaccctggtgcaacg

SEQ ID NO: 3717979 - DNA, 25 bp, Homo sapien
gagaagcccttctcgctttggaaga

SEQ ID NO: 3717980 - DNA, 25 bp, Homo sapien
aaatcgactgtgctatggcgctcca

SEQ ID NO: 3717981 - DNA, 25 bp, Homo sapien
cgatccgaagccctgaggagctaga

SEQ ID NO: 3717982 - DNA, 25 bp, Homo sapien
gacctttaggtcaggcccttctcga

SEQ ID NO: 3717983 - DNA, 25 bp, Homo sapien
acttttgatctcattcggctggttt

SEQ ID NO: 3717984 - DNA, 25 bp, Homo sapien
tccggagatctggaccgaggtatct

SEQ ID NO: 3717985 - DNA, 25 bp, Homo sapien
ttttcctcgaagagtcctgcgtccc

SEQ ID NO: 3717986 - DNA, 25 bp, Homo sapien
cccgacaatccggagatctggaccg

SEQ ID NO: 3717987 - DNA, 25 bp, Homo sapien
gatagatagataacatgtgctgaat

SEQ ID NO: 3717988 - DNA, 25 bp, Homo sapien
ttgactcctgtagtgtgtggcagcg

SEQ ID NO: 3717989 - DNA, 25 bp, Homo sapien
tattgcaccttgtttattgactcct

SEQ ID NO: 3717990 - DNA, 25 bp, Homo sapien
tgtctacacggcgtgtggttatagt

SEQ ID NO: 3717991 - DNA, 25 bp, Homo sapien
ctcggccgcagtggggcgcagcgca

SEQ ID NO: 3717992 - DNA, 25 bp, Homo sapien
cagcgcccccgggcgcgttggtagc

SEQ ID NO: 3717993 - DNA, 25 bp, Homo sapien
gcagcgcccccgggcgcgttggtag

SEQ ID NO: 3717994 - DNA, 25 bp, Homo sapien
ctccgcaagtgacaaggagccgcat

SEQ ID NO: 3717995 - DNA, 25 bp, Homo sapien
cttggcacgctcacaatcggccgtg

SEQ ID NO: 3717996 - DNA, 25 bp, Homo sapien
ggagccgcctttcagcgaggcccgg

SEQ ID NO: 3717997 - DNA, 25 bp, Homo sapien
aatcggccgtgtggcagcacaggcc

SEQ ID NO: 3717998 - DNA, 25 bp, Homo sapien
cacaccttttgttcgggactccaat

SEQ ID NO: 3717999 - DNA, 25 bp, Homo sapien
tgttcgggactccaataaaaagcca

SEQ ID NO: 3718000 - DNA, 25 bp, Homo sapien
tttgttcgcgcaggggacctcgcct

SEQ ID NO: 3718001 - DNA, 25 bp, Homo sapien
tcaatccgacgcgctggggtttttg

SEQ ID NO: 3718002 - DNA, 25 bp, Homo sapien
acgcgctggggtttttgttcgcgca

SEQ ID NO: 3718003 - DNA, 25 bp, Homo sapien
tttttgttcgcgcaggggacctcgc

SEQ ID NO: 3718004 - DNA, 25 bp, Homo sapien
ctggtctaggctggcttcaagtatc

SEQ ID NO: 3718005 - DNA, 25 bp, Homo sapien
tgcggaagccaatccacagaaccag

SEQ ID NO: 3718006 - DNA, 25 bp, Homo sapien
tatctcaagacacgcaaacttgcgg

SEQ ID NO: 3718007 - DNA, 25 bp, Homo sapien
ggcttcaagtatctcaagacacgca

SEQ ID NO: 3718008 - DNA, 25 bp, Homo sapien
tacccgcaatggctctgccggatct

SEQ ID NO: 3718009 - DNA, 25 bp, Homo sapien
acctgtcccaggtttacccgcaatg

SEQ ID NO: 3718010 - DNA, 25 bp, Homo sapien
ttctgtcgaatgtcccagatgcagc

SEQ ID NO: 3718011 - DNA, 25 bp, Homo sapien
gatgcagccgaaatcaaagccctgc

SEQ ID NO: 3718012 - DNA, 25 bp, Homo sapien
agtcggctaggctctcccggggctc

SEQ ID NO: 3718013 - DNA, 25 bp, Homo sapien
ggctcgccggggcactcccggccca

SEQ ID NO: 3718014 - DNA, 25 bp, Homo sapien
cacctgcagagtcggctaggctctc

SEQ ID NO: 3718015 - DNA, 25 bp, Homo sapien
ccagctggctctgaccgccccgggc

SEQ ID NO: 3718016 - DNA, 25 bp, Homo sapien
aaaggcaacttccaaccaggcatca

SEQ ID NO: 3718017 - DNA, 25 bp, Homo sapien
gaccacaaaggcaacttccaaccag

SEQ ID NO: 3718018 - DNA, 25 bp, Homo sapien
cagaggaccacaaaggcaacttcca

SEQ ID NO: 3718019 - DNA, 25 bp, Homo sapien
ggaagaactgagccagaggaccaca

SEQ ID NO: 3718020 - DNA, 25 bp, Homo sapien
cattgtcaggaatgtgtgggtcttc

SEQ ID NO: 3718021 - DNA, 25 bp, Homo sapien
gggctatcaccaagtccctctctta

SEQ ID NO: 3718022 - DNA, 25 bp, Homo sapien
gctttcgctgactccttgaaaagga

SEQ ID NO: 3718023 - DNA, 25 bp, Homo sapien
ccaggcataggtgtgtatcaatgaa

SEQ ID NO: 3718024 - DNA, 25 bp, Homo sapien
ccgttgtatttagggcttgctttgt

SEQ ID NO: 3718025 - DNA, 25 bp, Homo sapien
tatttagggcttgctttgtttctgc

SEQ ID NO: 3718026 - DNA, 25 bp, Homo sapien
tgccagttggccgttgtatttaggg

SEQ ID NO: 3718027 - DNA, 25 bp, Homo sapien
ctcatcacttgccagttggccgttg

SEQ ID NO: 3718028 - DNA, 25 bp, Homo sapien
taatttcatgctttcgattgactgc

SEQ ID NO: 3718029 - DNA, 25 bp, Homo sapien
ttgcggtccggctgaggatctccag

SEQ ID NO: 3718030 - DNA, 25 bp, Homo sapien
gtattctcttttcttgcggtccggc

SEQ ID NO: 3718031 - DNA, 25 bp, Homo sapien
gctttcgattgactgcagagaagta

SEQ ID NO: 3718032 - DNA, 25 bp, Homo sapien
gatgaagccggcatagctgtcagca

SEQ ID NO: 3718033 - DNA, 25 bp, Homo sapien
cggcatagctgtcagcagagctaga

SEQ ID NO: 3718034 - DNA, 25 bp, Homo sapien
gccggcatagctgtcagcagagcta

SEQ ID NO: 3718035 - DNA, 25 bp, Homo sapien
tcagatgaagccggcatagctgtca

SEQ ID NO: 3718036 - DNA, 25 bp, Homo sapien
agcacaggtggacttcgctcagagt

SEQ ID NO: 3718037 - DNA, 25 bp, Homo sapien
cagagcacaggtggacttcgctcag

SEQ ID NO: 3718038 - DNA, 25 bp, Homo sapien
acaggtggacttcgctcagagtggt

SEQ ID NO: 3718039 - DNA, 25 bp, Homo sapien
tggacttcgctcagagtggtaactg

SEQ ID NO: 3718040 - DNA, 25 bp, Homo sapien
tatacagctttgagcagggttgtaa

SEQ ID NO: 3718041 - DNA, 25 bp, Homo sapien
ctttgagcagggttgtaaactggta

SEQ ID NO: 3718042 - DNA, 25 bp, Homo sapien
gagcagggttgtaaactggtacttg

SEQ ID NO: 3718043 - DNA, 25 bp, Homo sapien
ttatacagctttgagcagggttgta

SEQ ID NO: 3718044 - DNA, 25 bp, Homo sapien
agcacgtgcagcaaagcacaccaca

SEQ ID NO: 3718045 - DNA, 25 bp, Homo sapien
agcacctttgataacctctctccat

SEQ ID NO: 3718046 - DNA, 25 bp, Homo sapien
tctagactgttatagagggataagc

SEQ ID NO: 3718047 - DNA, 25 bp, Homo sapien
catcctgggcctgatgacctgctct

SEQ ID NO: 3718048 - DNA, 25 bp, Homo sapien
tactagtggtcaagcagaggatgca

SEQ ID NO: 3718049 - DNA, 25 bp, Homo sapien
ttacaggacatatcacaggcatggc

SEQ ID NO: 3718050 - DNA, 25 bp, Homo sapien
gggtgcaggccagagtaatttacca

SEQ ID NO: 3718051 - DNA, 25 bp, Homo sapien
gatactctccatcaccggttggctg

SEQ ID NO: 3718052 - DNA, 25 bp, Homo sapien
ccgggtgtgtggcaacattacttca

SEQ ID NO: 3718053 - DNA, 25 bp, Homo sapien
ggtgtgtggcaacattacttcatga

SEQ ID NO: 3718054 - DNA, 25 bp, Homo sapien
cgggtgtgtggcaacattacttcat

SEQ ID NO: 3718055 - DNA, 25 bp, Homo sapien
gggtgtgtggcaacattacttcatg

SEQ ID NO: 3718056 - DNA, 25 bp, Homo sapien
ctgaggcggacactacggggccggg

SEQ ID NO: 3718057 - DNA, 25 bp, Homo sapien
ggccgcgcctgaggcggacactacg

SEQ ID NO: 3718058 - DNA, 25 bp, Homo sapien
ggcggggtgctggcggtgtggcggg

SEQ ID NO: 3718059 - DNA, 25 bp, Homo sapien
gcggggccaagcgggagccggaggc

SEQ ID NO: 3718060 - DNA, 25 bp, Homo sapien
aaatggaagaagacgcccgtgctcc

SEQ ID NO: 3718061 - DNA, 25 bp, Homo sapien
tccctagagcaggaggtcctaaggc

SEQ ID NO: 3718062 - DNA, 25 bp, Homo sapien
ggccgtcatctgtgaatcatcccgc

SEQ ID NO: 3718063 - DNA, 25 bp, Homo sapien
ggaaaccgcgggcagcttgtgccaa

SEQ ID NO: 3718064 - DNA, 25 bp, Homo sapien
cagggtgttcgcgaccgaagcgcat

SEQ ID NO: 3718065 - DNA, 25 bp, Homo sapien
agggtggccaatcccctagagcgct

SEQ ID NO: 3718066 - DNA, 25 bp, Homo sapien
ggcgcgaactctcggctggttgctt

SEQ ID NO: 3718067 - DNA, 25 bp, Homo sapien
tcggaaaggcgtcgtaccgaggctc

SEQ ID NO: 3718068 - DNA, 25 bp, Homo sapien
ccgccggttccttcggcacctctcg

SEQ ID NO: 3718069 - DNA, 25 bp, Homo sapien
gatcaagcggcccgccggttccttc

SEQ ID NO: 3718070 - DNA, 25 bp, Homo sapien
cgccggttccttcggcacctctcgg

SEQ ID NO: 3718071 - DNA, 25 bp, Homo sapien
cacctctcggttcagtcccgagctg

SEQ ID NO: 3718072 - DNA, 25 bp, Homo sapien
tcccttcggtggtctcaacgcctgt

SEQ ID NO: 3718073 - DNA, 25 bp, Homo sapien
cttcggtggtctcaacgcctgtcac

SEQ ID NO: 3718074 - DNA, 25 bp, Homo sapien
tcggtggtctcaacgcctgtcacct

SEQ ID NO: 3718075 - DNA, 25 bp, Homo sapien
ttcccttcggtggtctcaacgcctg

SEQ ID NO: 3718076 - DNA, 25 bp, Homo sapien
tgtgggcacagtgaagtaccaggag

SEQ ID NO: 3718077 - DNA, 25 bp, Homo sapien
ctgtgggcacagtgaagtaccagga

SEQ ID NO: 3718078 - DNA, 25 bp, Homo sapien
ctatgattaacataagtaaaaggag

SEQ ID NO: 3718079 - DNA, 25 bp, Homo sapien
gccacccgctgacggagaaatggac

SEQ ID NO: 3718080 - DNA, 25 bp, Homo sapien
ccaggaatgccacccgctgacggag

SEQ ID NO: 3718081 - DNA, 25 bp, Homo sapien
agagtcccaggaatgccacccgctg

SEQ ID NO: 3718082 - DNA, 25 bp, Homo sapien
cgtattgcctatctcgtggtaatga

SEQ ID NO: 3718083 - DNA, 25 bp, Homo sapien
gcctatctcgtggtaatgaagcact

SEQ ID NO: 3718084 - DNA, 25 bp, Homo sapien
ctttcgtattgcctatctcgtggta

SEQ ID NO: 3718085 - DNA, 25 bp, Homo sapien
tcgtggtaatgaagcactccaatgt

SEQ ID NO: 3718086 - DNA, 25 bp, Homo sapien
ttcagtgtcagtagcttcaagctcc

SEQ ID NO: 3718087 - DNA, 25 bp, Homo sapien
ccactggttggctgttgcggtctct

SEQ ID NO: 3718088 - DNA, 25 bp, Homo sapien
tgtttgatgtccagcaagtcatggg

SEQ ID NO: 3718089 - DNA, 25 bp, Homo sapien
aaaaatccgggaaccactgctgcca

SEQ ID NO: 3718090 - DNA, 25 bp, Homo sapien
aagctcagcagaggacgaaggtaat

SEQ ID NO: 3718091 - DNA, 25 bp, Homo sapien
cagaggacgaaggtaatcactggca

SEQ ID NO: 3718092 - DNA, 25 bp, Homo sapien
tcagcagaggacgaaggtaatcact

SEQ ID NO: 3718093 - DNA, 25 bp, Homo sapien
gctcagcagaggacgaaggtaatca

SEQ ID NO: 3718094 - DNA, 25 bp, Homo sapien
agaggaagtcaaactccagtggtaa

SEQ ID NO: 3718095 - DNA, 25 bp, Homo sapien
tggtaaatctttcactaggtcagcc

SEQ ID NO: 3718096 - DNA, 25 bp, Homo sapien
ctccagtggtaaatctttcactagg

SEQ ID NO: 3718097 - DNA, 25 bp, Homo sapien
taaatctttcactaggtcagccaag

SEQ ID NO: 3718098 - DNA, 25 bp, Homo sapien
ctcgtggtcgaatcttcccaaaaca

SEQ ID NO: 3718099 - DNA, 25 bp, Homo sapien
tcctcgtggtcgaatcttcccaaaa

SEQ ID NO: 3718100 - DNA, 25 bp, Homo sapien
catcctcgtggtcgaatcttcccaa

SEQ ID NO: 3718101 - DNA, 25 bp, Homo sapien
tcgtggtcgaatcttcccaaaacaa

SEQ ID NO: 3718102 - DNA, 25 bp, Homo sapien
gaggctcctcccatatccagtatcc

SEQ ID NO: 3718103 - DNA, 25 bp, Homo sapien
cctactgtccttctccgtcctgctg

SEQ ID NO: 3718104 - DNA, 25 bp, Homo sapien
gctgccaattcctgggtagcctcag

SEQ ID NO: 3718105 - DNA, 25 bp, Homo sapien
acagaggttgaggtaggaacttcat

SEQ ID NO: 3718106 - DNA, 25 bp, Homo sapien
cagtgtgttgcacatcacagcccag

SEQ ID NO: 3718107 - DNA, 25 bp, Homo sapien
gctgccgggcaaagttgcctccgaa

SEQ ID NO: 3718108 - DNA, 25 bp, Homo sapien
tgacataaaccctgtacacgtgttc

SEQ ID NO: 3718109 - DNA, 25 bp, Homo sapien
ccagaaaagttgtgacataaaccct

SEQ ID NO: 3718110 - DNA, 25 bp, Homo sapien
ttttgttaagagtttcattcagaac

SEQ ID NO: 3718111 - DNA, 25 bp, Homo sapien
tgtttttgttaagagtttcattcag

SEQ ID NO: 3718112 - DNA, 25 bp, Homo sapien
gtttttgttaagagtttcattcaga

SEQ ID NO: 3718113 - DNA, 25 bp, Homo sapien
ctgtttttgttaagagtttcattca

SEQ ID NO: 3718114 - DNA, 25 bp, Homo sapien
tgcagaaggaactgctagcagctac

SEQ ID NO: 3718115 - DNA, 25 bp, Homo sapien
taagagatgctaccccattggcagg

SEQ ID NO: 3718116 - DNA, 25 bp, Homo sapien
cagggacttatctgtcttaggagga

SEQ ID NO: 3718117 - DNA, 25 bp, Homo sapien
cagagtgggactgctaatagaggtc

SEQ ID NO: 3718118 - DNA, 25 bp, Homo sapien
gggggctcagcattgccccacaaga

SEQ ID NO: 3718119 - DNA, 25 bp, Homo sapien
tcctcggacatgtaagacttggctg

SEQ ID NO: 3718120 - DNA, 25 bp, Homo sapien
ggatccagaaatggattgtcgggac

SEQ ID NO: 3718121 - DNA, 25 bp, Homo sapien
atggattgtcgggactcagacctgt

SEQ ID NO: 3718122 - DNA, 25 bp, Homo sapien
aaaaactcagagaagccgtagaact

SEQ ID NO: 3718123 - DNA, 25 bp, Homo sapien
atggtagcggccaccaatgcgcaac

SEQ ID NO: 3718124 - DNA, 25 bp, Homo sapien
cgctgttgttgaagtcaataggcga

SEQ ID NO: 3718125 - DNA, 25 bp, Homo sapien
aatgcgcaacacatcctctgtacaa

SEQ ID NO: 3718126 - DNA, 25 bp, Homo sapien
aatagtgcaacatgaatttggaggc

SEQ ID NO: 3718127 - DNA, 25 bp, Homo sapien
gaaatagtgcaacatgaatttggag

SEQ ID NO: 3718128 - DNA, 25 bp, Homo sapien
atagtgcaacatgaatttggaggca

SEQ ID NO: 3718129 - DNA, 25 bp, Homo sapien
agaaatagtgcaacatgaatttgga

SEQ ID NO: 3718130 - DNA, 25 bp, Homo sapien
aatctctgagttagtaccgaccaag

SEQ ID NO: 3718131 - DNA, 25 bp, Homo sapien
atgctcatctgcatgtgatgaaaag

SEQ ID NO: 3718132 - DNA, 25 bp, Homo sapien
cgatgctcatctgcatgtgatgaaa

SEQ ID NO: 3718133 - DNA, 25 bp, Homo sapien
gaatctctgagttagtaccgaccaa

SEQ ID NO: 3718134 - DNA, 25 bp, Homo sapien
tctcggtcatacaccagctgggctg

SEQ ID NO: 3718135 - DNA, 25 bp, Homo sapien
tatatagaatggctcccagcgtcca

SEQ ID NO: 3718136 - DNA, 25 bp, Homo sapien
taagacttggtacatccaagccgat

SEQ ID NO: 3718137 - DNA, 25 bp, Homo sapien
gctgtccgcaggtttgggtagtcat

SEQ ID NO: 3718138 - DNA, 25 bp, Homo sapien
tgaattcggcgtagccgcagaaggt

SEQ ID NO: 3718139 - DNA, 25 bp, Homo sapien
cgcagaaggtataggaagatggcca

SEQ ID NO: 3718140 - DNA, 25 bp, Homo sapien
gagacggaaccagctaccatgggct

SEQ ID NO: 3718141 - DNA, 25 bp, Homo sapien
cagtagcaccaccaggatacaggca

SEQ ID NO: 3718142 - DNA, 25 bp, Homo sapien
aagaaagtggaggaattcaatgagc

SEQ ID NO: 3718143 - DNA, 25 bp, Homo sapien
tcacagcatctgaggctatataaga

SEQ ID NO: 3718144 - DNA, 25 bp, Homo sapien
gcaactcgggggtgctcaagcttct

SEQ ID NO: 3718145 - DNA, 25 bp, Homo sapien
tcaatgagcagcaactcgggggtgc

SEQ ID NO: 3718146 - DNA, 25 bp, Homo sapien
tccaagggcaaatatccacaaggtc

SEQ ID NO: 3718147 - DNA, 25 bp, Homo sapien
ccaagggcaaatatccacaaggtca

SEQ ID NO: 3718148 - DNA, 25 bp, Homo sapien
caagggcaaatatccacaaggtcag

SEQ ID NO: 3718149 - DNA, 25 bp, Homo sapien
tctcagaaggagtcgaagcctgctt

SEQ ID NO: 3718150 - DNA, 25 bp, Homo sapien
taacatcatcaacactacgacaggg

SEQ ID NO: 3718151 - DNA, 25 bp, Homo sapien
tatatcttcctgtgtaagggctcac

SEQ ID NO: 3718152 - DNA, 25 bp, Homo sapien
ggatcttggatcacacccatgatgg

SEQ ID NO: 3718153 - DNA, 25 bp, Homo sapien
ctaatcccaaaaatcaaaggtgacg

SEQ ID NO: 3718154 - DNA, 25 bp, Homo sapien
gaaagattccatgcggaccctgatg

SEQ ID NO: 3718155 - DNA, 25 bp, Homo sapien
cagccgtgggagcatattcgtggaa

SEQ ID NO: 3718156 - DNA, 25 bp, Homo sapien
tgactcagcagtctcttaatagagg

SEQ ID NO: 3718157 - DNA, 25 bp, Homo sapien
gaacagagtctttgcatgcttaatc

SEQ ID NO: 3718158 - DNA, 25 bp, Homo sapien
taccaaccaagggtcagtatactta

SEQ ID NO: 3718159 - DNA, 25 bp, Homo sapien
gagtctttgcatgcttaatccatgt

SEQ ID NO: 3718160 - DNA, 25 bp, Homo sapien
ggtcatctttttatctaccaaccaa

SEQ ID NO: 3718161 - DNA, 25 bp, Homo sapien
tagatgagaaccgaaccagagatgg

SEQ ID NO: 3718162 - DNA, 25 bp, Homo sapien
gcaatgcaagccgactaacacaggt

SEQ ID NO: 3718163 - DNA, 25 bp, Homo sapien
gcattcataaggttcacggagcaca

SEQ ID NO: 3718164 - DNA, 25 bp, Homo sapien
tggaatctggagctagcgtccctaa

SEQ ID NO: 3718165 - DNA, 25 bp, Homo sapien
gttgaagccgtctcatgcagaagag

SEQ ID NO: 3718166 - DNA, 25 bp, Homo sapien
tgttgctgccactctacaggtccag

SEQ ID NO: 3718167 - DNA, 25 bp, Homo sapien
caagctcttggttctacgtggatga

SEQ ID NO: 3718168 - DNA, 25 bp, Homo sapien
agcacgctgctgatgtatgtcccaa

SEQ ID NO: 3718169 - DNA, 25 bp, Homo sapien
ctacttgggaggctgaggcaggaga

SEQ ID NO: 3718170 - DNA, 25 bp, Homo sapien
tacttgggaggctgaggcaggagaa

SEQ ID NO: 3718171 - DNA, 25 bp, Homo sapien
agaattgcttgagccctggaagtgg

SEQ ID NO: 3718172 - DNA, 25 bp, Homo sapien
tgcttgagccctggaagtggaggtt

SEQ ID NO: 3718173 - DNA, 25 bp, Homo sapien
gctggctttggcgtatacacaggta

SEQ ID NO: 3718174 - DNA, 25 bp, Homo sapien
ggagcctgggtgataccgacgttta

SEQ ID NO: 3718175 - DNA, 25 bp, Homo sapien
gaaacctggcacttctatctaatgt

SEQ ID NO: 3718176 - DNA, 25 bp, Homo sapien
ccgacgtttaagtggcaagcagaag

SEQ ID NO: 3718177 - DNA, 25 bp, Homo sapien
ggaaggagaccattattgccagtcc

SEQ ID NO: 3718178 - DNA, 25 bp, Homo sapien
gagtccccacctgcgcacagtattt

SEQ ID NO: 3718179 - DNA, 25 bp, Homo sapien
cctggttgaaattgtcattgtggac

SEQ ID NO: 3718180 - DNA, 25 bp, Homo sapien
aaaacattctccctgataccgtgga

SEQ ID NO: 3718181 - DNA, 25 bp, Homo sapien
gcaggaactatatttcctgctctct

SEQ ID NO: 3718182 - DNA, 25 bp, Homo sapien
gatcaccggattctggtaagtgtag

SEQ ID NO: 3718183 - DNA, 25 bp, Homo sapien
ctttggggtgtcagtgaagcactga

SEQ ID NO: 3718184 - DNA, 25 bp, Homo sapien
taagtgtagttggtggttacctgcc

SEQ ID NO: 3718185 - DNA, 25 bp, Homo sapien
gagcacaggagcctatcataggctt

SEQ ID NO: 3718186 - DNA, 25 bp, Homo sapien
gaaagtgggctaggatcatcaagcg

SEQ ID NO: 3718187 - DNA, 25 bp, Homo sapien
cccaaaatgggagaatcctggatcc

SEQ ID NO: 3718188 - DNA, 25 bp, Homo sapien
ggagggcatcaaaatcactaaggga

SEQ ID NO: 3718189 - DNA, 25 bp, Homo sapien
taagggagtcagtcatgcagacatc

SEQ ID NO: 3718190 - DNA, 25 bp, Homo sapien
taaggactggacgtgttgtcttggc

SEQ ID NO: 3718191 - DNA, 25 bp, Homo sapien
gctagtagctagatcccagtaagga

SEQ ID NO: 3718192 - DNA, 25 bp, Homo sapien
cattaggtacttggagctagtagct

SEQ ID NO: 3718193 - DNA, 25 bp, Homo sapien
tgtcttggcagtcattcccacagag

SEQ ID NO: 3718194 - DNA, 25 bp, Homo sapien
gatatttgcaaagcgatctgcatgc

SEQ ID NO: 3718195 - DNA, 25 bp, Homo sapien
gacctgattctactggcaagtggga

SEQ ID NO: 3718196 - DNA, 25 bp, Homo sapien
ttgactatgcgtccccagattggca

SEQ ID NO: 3718197 - DNA, 25 bp, Homo sapien
taaccagagaaaggcatgtagaaca

SEQ ID NO: 3718198 - DNA, 25 bp, Homo sapien
gagtgacctattgcagaccttgaag

SEQ ID NO: 3718199 - DNA, 25 bp, Homo sapien
tgacttaacaagacatggctgtggg

SEQ ID NO: 3718200 - DNA, 25 bp, Homo sapien
tattaagggctttccagtgtgctgt

SEQ ID NO: 3718201 - DNA, 25 bp, Homo sapien
ggtgacatgtaagcggagatctgca

SEQ ID NO: 3718202 - DNA, 25 bp, Homo sapien
tcaggggtgtagtaggcgataccat

SEQ ID NO: 3718203 - DNA, 25 bp, Homo sapien
catctagatttctgtaagtactttt

SEQ ID NO: 3718204 - DNA, 25 bp, Homo sapien
ctcaggggtgtagtaggcgatacca

SEQ ID NO: 3718205 - DNA, 25 bp, Homo sapien
atctagatttctgtaagtacttttt

SEQ ID NO: 3718206 - DNA, 25 bp, Homo sapien
cagtttccacttggaatttgggctc

SEQ ID NO: 3718207 - DNA, 25 bp, Homo sapien
ccgcgaaagcggagtcgcaacgcag

SEQ ID NO: 3718208 - DNA, 25 bp, Homo sapien
taagaagcgcgtcaacagctgcgcg

SEQ ID NO: 3718209 - DNA, 25 bp, Homo sapien
caggcgcacttctgttcgctccggt

SEQ ID NO: 3718210 - DNA, 25 bp, Homo sapien
gctccacgcgttcctccctcgtgcg

SEQ ID NO: 3718211 - DNA, 25 bp, Homo sapien
ctccacgcgttcctccctcgtgcgc

SEQ ID NO: 3718212 - DNA, 25 bp, Homo sapien
cttcccggacggtatccgcgctcgt

SEQ ID NO: 3718213 - DNA, 25 bp, Homo sapien
acggtatccgcgctcgttttcgctc

SEQ ID NO: 3718214 - DNA, 25 bp, Homo sapien
tatccgcgctcgttttcgctcagag

SEQ ID NO: 3718215 - DNA, 25 bp, Homo sapien
gctcgttttcgctcagaggaggccc

SEQ ID NO: 3718216 - DNA, 25 bp, Homo sapien
gactccagaagaaatcaccactgac

SEQ ID NO: 3718217 - DNA, 25 bp, Homo sapien
aaagatagaaggtgccgcccaaggg

SEQ ID NO: 3718218 - DNA, 25 bp, Homo sapien
gaggaaacgactccagaagaaatca

SEQ ID NO: 3718219 - DNA, 25 bp, Homo sapien
ggagctgaggaaacgactccagaag

SEQ ID NO: 3718220 - DNA, 25 bp, Homo sapien
acagctgattccactgaatcaacac

SEQ ID NO: 3718221 - DNA, 25 bp, Homo sapien
tctttctgcattcacagctgattcc

SEQ ID NO: 3718222 - DNA, 25 bp, Homo sapien
attcacagctgattccactgaatca

SEQ ID NO: 3718223 - DNA, 25 bp, Homo sapien
tcacagctgattccactgaatcaac

SEQ ID NO: 3718224 - DNA, 25 bp, Homo sapien
tgtagttcccccctctgataaacca

SEQ ID NO: 3718225 - DNA, 25 bp, Homo sapien
tagttcccccctctgataaaccaga

SEQ ID NO: 3718226 - DNA, 25 bp, Homo sapien
ctgggtgtagttcccccctctgata

SEQ ID NO: 3718227 - DNA, 25 bp, Homo sapien
cagaacataattcaatccgatcagc

SEQ ID NO: 3718228 - DNA, 25 bp, Homo sapien
tccccgtggccgaatcatcacaaaa

SEQ ID NO: 3718229 - DNA, 25 bp, Homo sapien
acactctgcttcactacttgaagga

SEQ ID NO: 3718230 - DNA, 25 bp, Homo sapien
ctctgcttcactacttgaaggacac

SEQ ID NO: 3718231 - DNA, 25 bp, Homo sapien
tgggatctgaacactctgcttcact

SEQ ID NO: 3718232 - DNA, 25 bp, Homo sapien
tcttcagtcaatgccccaaaaacca

SEQ ID NO: 3718233 - DNA, 25 bp, Homo sapien
ccataagggacatacacagctcttt

SEQ ID NO: 3718234 - DNA, 25 bp, Homo sapien
gtgtccatcttcagtcaatgcccca

SEQ ID NO: 3718235 - DNA, 25 bp, Homo sapien
gggacatacacagctctttgtcaat

SEQ ID NO: 3718236 - DNA, 25 bp, Homo sapien
gtgactggcagagggcggcaaatag

SEQ ID NO: 3718237 - DNA, 25 bp, Homo sapien
agtgactggcagagggcggcaaata

SEQ ID NO: 3718238 - DNA, 25 bp, Homo sapien
tgtcacatccactggtcaacacgcg

SEQ ID NO: 3718239 - DNA, 25 bp, Homo sapien
cacgcgttcaaatcccaaggttaag

SEQ ID NO: 3718240 - DNA, 25 bp, Homo sapien
gctgccattggatcatgaaccatgt

SEQ ID NO: 3718241 - DNA, 25 bp, Homo sapien
tagcccttctaatgctgaactgtca

SEQ ID NO: 3718242 - DNA, 25 bp, Homo sapien
gcattaccacaatcctgccttttgc

SEQ ID NO: 3718243 - DNA, 25 bp, Homo sapien
ctggcattaccacaatcctgccttt

SEQ ID NO: 3718244 - DNA, 25 bp, Homo sapien
tggcattaccacaatcctgcctttt

SEQ ID NO: 3718245 - DNA, 25 bp, Homo sapien
ggcattaccacaatcctgccttttg

SEQ ID NO: 3718246 - DNA, 25 bp, Homo sapien
agagactgaataccttctgatgtga

SEQ ID NO: 3718247 - DNA, 25 bp, Homo sapien
tcactattttgaacgctggtcagtc

SEQ ID NO: 3718248 - DNA, 25 bp, Homo sapien
cactagtagtgagatgaccagagac

SEQ ID NO: 3718249 - DNA, 25 bp, Homo sapien
tataggatatacagaggcacgagga

SEQ ID NO: 3718250 - DNA, 25 bp, Homo sapien
gataatactggctacctcacaagct

SEQ ID NO: 3718251 - DNA, 25 bp, Homo sapien
gactacactgacttcattggaaaca

SEQ ID NO: 3718252 - DNA, 25 bp, Homo sapien
tatctcaagccattaaagatgctga

SEQ ID NO: 3718253 - DNA, 25 bp, Homo sapien
gatagaatcttatctgtccattggc

SEQ ID NO: 3718254 - DNA, 25 bp, Homo sapien
cgaaacttcattcccgagtctctag

SEQ ID NO: 3718255 - DNA, 25 bp, Homo sapien
tctagtagaccgagcagaacagtgg

SEQ ID NO: 3718256 - DNA, 25 bp, Homo sapien
tctgtagcacctgaaccctcaagga

SEQ ID NO: 3718257 - DNA, 25 bp, Homo sapien
cagaacagtggaattctgtagcacc

SEQ ID NO: 3718258 - DNA, 25 bp, Homo sapien
tatgttattaaatgggccctcctac

SEQ ID NO: 3718259 - DNA, 25 bp, Homo sapien
tacaggaaatcataggcgaatgggc

SEQ ID NO: 3718260 - DNA, 25 bp, Homo sapien
tacaagggtaggtcaagtatgctgg

SEQ ID NO: 3718261 - DNA, 25 bp, Homo sapien
gcctttacaaggcaaggttcaccta

SEQ ID NO: 3718262 - DNA, 25 bp, Homo sapien
ggctcccatggcaacagatgaattt

SEQ ID NO: 3718263 - DNA, 25 bp, Homo sapien
gatgttctttgcgatagcattcaaa

SEQ ID NO: 3718264 - DNA, 25 bp, Homo sapien
caccaggatgttctttgcgatagca

SEQ ID NO: 3718265 - DNA, 25 bp, Homo sapien
tctttgcgatagcattcaaagtcct

SEQ ID NO: 3718266 - DNA, 25 bp, Homo sapien
caggatgttctttgcgatagcattc

SEQ ID NO: 3718267 - DNA, 25 bp, Homo sapien
cagaccagctttaaccatgatgaca

SEQ ID NO: 3718268 - DNA, 25 bp, Homo sapien
aacaaagattgcgactgtcctggcc

SEQ ID NO: 3718269 - DNA, 25 bp, Homo sapien
gatgacaatcactggtaagactaag

SEQ ID NO: 3718270 - DNA, 25 bp, Homo sapien
cagactaagcttctgtctatggaag

SEQ ID NO: 3718271 - DNA, 25 bp, Homo sapien
gctgtatttagtgcaagaataagag

SEQ ID NO: 3718272 - DNA, 25 bp, Homo sapien
ttattagactgtgtgagcggttgtg

SEQ ID NO: 3718273 - DNA, 25 bp, Homo sapien
ccaaggagagggtggttgctataaa

SEQ ID NO: 3718274 - DNA, 25 bp, Homo sapien
tttcaagttacaaagcctcaggcat

SEQ ID NO: 3718275 - DNA, 25 bp, Homo sapien
cacaaatgaactaaggaagacaact

SEQ ID NO: 3718276 - DNA, 25 bp, Homo sapien
tggtctgttgcctgagctagagtgc

SEQ ID NO: 3718277 - DNA, 25 bp, Homo sapien
cagtgttgccatcatgattcattgc

SEQ ID NO: 3718278 - DNA, 25 bp, Homo sapien
tgttttctgtagggacggggtctca

SEQ ID NO: 3718279 - DNA, 25 bp, Homo sapien
actccaggcttcaacaatccttctg

SEQ ID NO: 3718280 - DNA, 25 bp, Homo sapien
gaacaggaattatctaccattctga

SEQ ID NO: 3718281 - DNA, 25 bp, Homo sapien
tgcgtctggaacgaagactcttcta

SEQ ID NO: 3718282 - DNA, 25 bp, Homo sapien
aaagtggaacaggaattatctacca

SEQ ID NO: 3718283 - DNA, 25 bp, Homo sapien
ttcctggactgcgtctggaacgaag

SEQ ID NO: 3718284 - DNA, 25 bp, Homo sapien
aaaagtagagttgcagaacttctcc

SEQ ID NO: 3718285 - DNA, 25 bp, Homo sapien
agtagagttgcagaacttctccagc

SEQ ID NO: 3718286 - DNA, 25 bp, Homo sapien
ccaaaaagtagagttgcagaacttc

SEQ ID NO: 3718287 - DNA, 25 bp, Homo sapien
aaagtagagttgcagaacttctcca

SEQ ID NO: 3718288 - DNA, 25 bp, Homo sapien
gagaaggcaattttgcgactagcta

SEQ ID NO: 3718289 - DNA, 25 bp, Homo sapien
ggcaattttgcgactagctagtaca

SEQ ID NO: 3718290 - DNA, 25 bp, Homo sapien
gaaggcaattttgcgactagctagt

SEQ ID NO: 3718291 - DNA, 25 bp, Homo sapien
ttttgcgactagctagtacaagagt

SEQ ID NO: 3718292 - DNA, 25 bp, Homo sapien
ctgcttagcaagatagagtttggtg

SEQ ID NO: 3718293 - DNA, 25 bp, Homo sapien
gaacagtttgctcaaaacaaagtgg

SEQ ID NO: 3718294 - DNA, 25 bp, Homo sapien
ccggactgtccaggaatgaggaatt

SEQ ID NO: 3718295 - DNA, 25 bp, Homo sapien
cataggtagcccaagggaatccaca

SEQ ID NO: 3718296 - DNA, 25 bp, Homo sapien
tctgtgagtacaagggccagctcta

SEQ ID NO: 3718297 - DNA, 25 bp, Homo sapien
ctatggctgctagaataagaagaaa

SEQ ID NO: 3718298 - DNA, 25 bp, Homo sapien
ttggtatatcgaacagcagggactg

SEQ ID NO: 3718299 - DNA, 25 bp, Homo sapien
ccatgtgcctaggtagaggcttgga

SEQ ID NO: 3718300 - DNA, 25 bp, Homo sapien
tatcgagagaatccagaatagggac

SEQ ID NO: 3718301 - DNA, 25 bp, Homo sapien
ggaaagtgccacagagtatcgagag

SEQ ID NO: 3718302 - DNA, 25 bp, Homo sapien
ccattgtctgctgtattggatcagc

SEQ ID NO: 3718303 - DNA, 25 bp, Homo sapien
ggagtttttctgtacacaccattgt

SEQ ID NO: 3718304 - DNA, 25 bp, Homo sapien
agtaggctagattagaattgtcacc

SEQ ID NO: 3718305 - DNA, 25 bp, Homo sapien
tgaaaatgctgaaaagatcaggatc

SEQ ID NO: 3718306 - DNA, 25 bp, Homo sapien
aatccgtaggagatgaagaacaggc

SEQ ID NO: 3718307 - DNA, 25 bp, Homo sapien
aggatctggaatccgtaggagatga

SEQ ID NO: 3718308 - DNA, 25 bp, Homo sapien
aatatatgagatgggcatatttaga

SEQ ID NO: 3718309 - DNA, 25 bp, Homo sapien
gtaatatatgagatgggcatattta

SEQ ID NO: 3718310 - DNA, 25 bp, Homo sapien
taagtaatatatgagatgggcatat

SEQ ID NO: 3718311 - DNA, 25 bp, Homo sapien
attaagtaatatatgagatgggcat

SEQ ID NO: 3718312 - DNA, 25 bp, Homo sapien
gtaggtaatgctactcaggaatgaa

SEQ ID NO: 3718313 - DNA, 25 bp, Homo sapien
tacagccaatccatactccaggctt

SEQ ID NO: 3718314 - DNA, 25 bp, Homo sapien
gagagagtaaggatacagccaatcc

SEQ ID NO: 3718315 - DNA, 25 bp, Homo sapien
gatacagccaatccatactccaggc

SEQ ID NO: 3718316 - DNA, 25 bp, Homo sapien
atacagccaatccatactccaggct

SEQ ID NO: 3718317 - DNA, 25 bp, Homo sapien
cagacatcctcgagtgtcagaggac

SEQ ID NO: 3718318 - DNA, 25 bp, Homo sapien
gtcagaggacgcttgtagcctttca

SEQ ID NO: 3718319 - DNA, 25 bp, Homo sapien
acttcccagacatcctcgagtgtca

SEQ ID NO: 3718320 - DNA, 25 bp, Homo sapien
tcgagtgtcagaggacgcttgtagc

SEQ ID NO: 3718321 - DNA, 25 bp, Homo sapien
tgggagctcttctcctgccgtctct

SEQ ID NO: 3718322 - DNA, 25 bp, Homo sapien
agctctctcttcatgtgcgtttcaa

SEQ ID NO: 3718323 - DNA, 25 bp, Homo sapien
tgccgtctctggagtgcccgcctgg

SEQ ID NO: 3718324 - DNA, 25 bp, Homo sapien
tttgactctgattcttgttcaagcc

SEQ ID NO: 3718325 - DNA, 25 bp, Homo sapien
taaggacagaatcgccatgatgctg

SEQ ID NO: 3718326 - DNA, 25 bp, Homo sapien
cctgagcaagccaaatgtgttcccc

SEQ ID NO: 3718327 - DNA, 25 bp, Homo sapien
gatgctgatgtacccttgcctgaaa

SEQ ID NO: 3718328 - DNA, 25 bp, Homo sapien
gatgagcaatcttttagtgcccaga

SEQ ID NO: 3718329 - DNA, 25 bp, Homo sapien
cactagcttcagtaggaatgatttc

SEQ ID NO: 3718330 - DNA, 25 bp, Homo sapien
ttcactagcttcagtaggaatgatt

SEQ ID NO: 3718331 - DNA, 25 bp, Homo sapien
cattcactagcttcagtaggaatga

SEQ ID NO: 3718332 - DNA, 25 bp, Homo sapien
tagcttcagtaggaatgatttcagg

SEQ ID NO: 3718333 - DNA, 25 bp, Homo sapien
ccacaaatatgtgtcacggtcactt

SEQ ID NO: 3718334 - DNA, 25 bp, Homo sapien
cacggtcacttgcaaaggagatcag

SEQ ID NO: 3718335 - DNA, 25 bp, Homo sapien
ccgcagtgaataagaggattgcaca

SEQ ID NO: 3718336 - DNA, 25 bp, Homo sapien
ttgcacagagatatccaatccacaa

SEQ ID NO: 3718337 - DNA, 25 bp, Homo sapien
gaagccatgatagctgtccgtactt

SEQ ID NO: 3718338 - DNA, 25 bp, Homo sapien
tacttttacacccagcttgaagcac

SEQ ID NO: 3718339 - DNA, 25 bp, Homo sapien
gatagctgtccgtacttttacaccc

SEQ ID NO: 3718340 - DNA, 25 bp, Homo sapien
tcttatatacagaagccatgatagc

SEQ ID NO: 3718341 - DNA, 25 bp, Homo sapien
tgggcatccacagacatcaggttca

SEQ ID NO: 3718342 - DNA, 25 bp, Homo sapien
ggtcacatccatgagcttctgggca

SEQ ID NO: 3718343 - DNA, 25 bp, Homo sapien
cctggccaagttggatagggtcaat

SEQ ID NO: 3718344 - DNA, 25 bp, Homo sapien
caggttcactgtttctccaacggtg

SEQ ID NO: 3718345 - DNA, 25 bp, Homo sapien
ctgagggtcccaactctctccatag

SEQ ID NO: 3718346 - DNA, 25 bp, Homo sapien
ggtggacagtatcgcattaattggg

SEQ ID NO: 3718347 - DNA, 25 bp, Homo sapien
ctgaatggtcttactcttggtggac

SEQ ID NO: 3718348 - DNA, 25 bp, Homo sapien
caacacctgctaagactgagggtcc

SEQ ID NO: 3718349 - DNA, 25 bp, Homo sapien
ttccactaagaatctcattcatgat

SEQ ID NO: 3718350 - DNA, 25 bp, Homo sapien
gattccactaagaatctcattcatg

SEQ ID NO: 3718351 - DNA, 25 bp, Homo sapien
cttgattccactaagaatctcattc

SEQ ID NO: 3718352 - DNA, 25 bp, Homo sapien
ttcatgatctttaaacgtttgtctt

SEQ ID NO: 3718353 - DNA, 25 bp, Homo sapien
tagttgactaaaggccagcaggttc

SEQ ID NO: 3718354 - DNA, 25 bp, Homo sapien
caggactggagttaactggaagacg

SEQ ID NO: 3718355 - DNA, 25 bp, Homo sapien
tacttggtctctgaatgaaggttcc

SEQ ID NO: 3718356 - DNA, 25 bp, Homo sapien
tgaaggttcccaggcaaaatatttc

SEQ ID NO: 3718357 - DNA, 25 bp, Homo sapien
agcatggaggagatcatcatgggaa

SEQ ID NO: 3718358 - DNA, 25 bp, Homo sapien
aaagcgcaggatattgaagagggta

SEQ ID NO: 3718359 - DNA, 25 bp, Homo sapien
taatggaggtgaaggccttttgtgc

SEQ ID NO: 3718360 - DNA, 25 bp, Homo sapien
catggaggagatcatcatgggaagc

SEQ ID NO: 3718361 - DNA, 25 bp, Homo sapien
caagtacttctctagccgctctgtg

SEQ ID NO: 3718362 - DNA, 25 bp, Homo sapien
caaaattgcagtcatgtcgaatggc

SEQ ID NO: 3718363 - DNA, 25 bp, Homo sapien
gaatggcagatgtgtccaagtcatc

SEQ ID NO: 3718364 - DNA, 25 bp, Homo sapien
tctagccgctctgtggaaacactgg

SEQ ID NO: 3718365 - DNA, 25 bp, Homo sapien
ttttattcagaactcccaagcctac

SEQ ID NO: 3718366 - DNA, 25 bp, Homo sapien
tttttattcagaactcccaagccta

SEQ ID NO: 3718367 - DNA, 25 bp, Homo sapien
aaagccctcttttagtccaatgtag

SEQ ID NO: 3718368 - DNA, 25 bp, Homo sapien
tgactgtctgccctcacgtgtctct

SEQ ID NO: 3718369 - DNA, 25 bp, Homo sapien
tcttttagtccaatgtaggtcccca

SEQ ID NO: 3718370 - DNA, 25 bp, Homo sapien
cagctcctaggattgtttctgctaa

SEQ ID NO: 3718371 - DNA, 25 bp, Homo sapien
actgtggcttccgaatcatgttccc

SEQ ID NO: 3718372 - DNA, 25 bp, Homo sapien
tccgaatcatgttcccaggtaaagg

SEQ ID NO: 3718373 - DNA, 25 bp, Homo sapien
tgttcccaggtaaaggaggcctcag

SEQ ID NO: 3718374 - DNA, 25 bp, Homo sapien
ctcggactgtggcttccgaatcatg

SEQ ID NO: 3718375 - DNA, 25 bp, Homo sapien
tacccattgaacaagaccctagtgg

SEQ ID NO: 3718376 - DNA, 25 bp, Homo sapien
taggttcccggaaactgtgtgtgcc

SEQ ID NO: 3718377 - DNA, 25 bp, Homo sapien
tgctgaaagtagattccctggccct

SEQ ID NO: 3718378 - DNA, 25 bp, Homo sapien
cactgctggtctatgttatcttgga

SEQ ID NO: 3718379 - DNA, 25 bp, Homo sapien
cttgatggtgatgtgcccgtggaca

SEQ ID NO: 3718380 - DNA, 25 bp, Homo sapien
tcccagagccgacagggcctatcac

SEQ ID NO: 3718381 - DNA, 25 bp, Homo sapien
gggcctatcacagccacaagttggc

SEQ ID NO: 3718382 - DNA, 25 bp, Homo sapien
tcaaggaggatttcccagagccgac

SEQ ID NO: 3718383 - DNA, 25 bp, Homo sapien
gccattctgaatccaggactgctgt

SEQ ID NO: 3718384 - DNA, 25 bp, Homo sapien
gtcctttatggtgccattctgaatc

SEQ ID NO: 3718385 - DNA, 25 bp, Homo sapien
caggactgctgtgggacataggcag

SEQ ID NO: 3718386 - DNA, 25 bp, Homo sapien
gctgtgggacataggcagtggtgcc

SEQ ID NO: 3718387 - DNA, 25 bp, Homo sapien
ccaatctcagccaaatctcctccag

SEQ ID NO: 3718388 - DNA, 25 bp, Homo sapien
gaggagagcacaggcctccagtact

SEQ ID NO: 3718389 - DNA, 25 bp, Homo sapien
caggcagcatttccaagtctgggag

SEQ ID NO: 3718390 - DNA, 25 bp, Homo sapien
tcctccaggcagcatttccaagtct

SEQ ID NO: 3718391 - DNA, 25 bp, Homo sapien
aattttggtaggtagctctggccag

SEQ ID NO: 3718392 - DNA, 25 bp, Homo sapien
tgcctttcaacaggccattggggcc

SEQ ID NO: 3718393 - DNA, 25 bp, Homo sapien
gcttctgacccccactaagatttat

SEQ ID NO: 3718394 - DNA, 25 bp, Homo sapien
gcagacagggggtcatctagaagat

SEQ ID NO: 3718395 - DNA, 25 bp, Homo sapien
agtgcatgctatgtgtaaccaagag

SEQ ID NO: 3718396 - DNA, 25 bp, Homo sapien
tctacaattgttccattccccagaa

SEQ ID NO: 3718397 - DNA, 25 bp, Homo sapien
aggaagaaagtgcatgctatgtgta

SEQ ID NO: 3718398 - DNA, 25 bp, Homo sapien
tacaatctcatccacttgaggaaga

SEQ ID NO: 3718399 - DNA, 25 bp, Homo sapien
catatacagtcagccgtacggtaag

SEQ ID NO: 3718400 - DNA, 25 bp, Homo sapien
cagaagaagatagcgtttcagttcc

SEQ ID NO: 3718401 - DNA, 25 bp, Homo sapien
caagtcgacgagagatcccgagtac

SEQ ID NO: 3718402 - DNA, 25 bp, Homo sapien
gacgcccctagaagctgtatagtag

SEQ ID NO: 3718403 - DNA, 25 bp, Homo sapien
tgcggctaagtgttcgacgaaagct

SEQ ID NO: 3718404 - DNA, 25 bp, Homo sapien
ttcgacgaaagctgttctctcttct

SEQ ID NO: 3718405 - DNA, 25 bp, Homo sapien
ggaggctgcatcttcggggatctct

SEQ ID NO: 3718406 - DNA, 25 bp, Homo sapien
ttccacactggatatcagcccatag

SEQ ID NO: 3718407 - DNA, 25 bp, Homo sapien
cttccttcaggctattcacattccg

SEQ ID NO: 3718408 - DNA, 25 bp, Homo sapien
tctcagggacttcagatgcctgcca

SEQ ID NO: 3718409 - DNA, 25 bp, Homo sapien
ttcacattccgagttttcaaggagt

SEQ ID NO: 3718410 - DNA, 25 bp, Homo sapien
tcaaggagtttctcagggacttcag

SEQ ID NO: 3718411 - DNA, 25 bp, Homo sapien
cacctcaatattagtagaactccct

SEQ ID NO: 3718412 - DNA, 25 bp, Homo sapien
tagaactccctaatggcttttgata

SEQ ID NO: 3718413 - DNA, 25 bp, Homo sapien
tgcaaagtccccacctcaatattag

SEQ ID NO: 3718414 - DNA, 25 bp, Homo sapien
aatattagtagaactccctaatggc

SEQ ID NO: 3718415 - DNA, 25 bp, Homo sapien
tctgagatgctggatagtcggtgct

SEQ ID NO: 3718416 - DNA, 25 bp, Homo sapien
tcctattgcttgtaggtactccagg

SEQ ID NO: 3718417 - DNA, 25 bp, Homo sapien
tgggctaatcccagagctccgtaga

SEQ ID NO: 3718418 - DNA, 25 bp, Homo sapien
cacagaattcatcacaaacgcaagg

SEQ ID NO: 3718419 - DNA, 25 bp, Homo sapien
tgcatggacgaaaccaaaggcactc

SEQ ID NO: 3718420 - DNA, 25 bp, Homo sapien
aaaaaatctcataggtgctcgaagg

SEQ ID NO: 3718421 - DNA, 25 bp, Homo sapien
cactccagaaatgtgctatgaacac

SEQ ID NO: 3718422 - DNA, 25 bp, Homo sapien
ccggcctgtgggtgttgtgtcaaaa

SEQ ID NO: 3718423 - DNA, 25 bp, Homo sapien
ccatgcagatcatgacaagggtgct

SEQ ID NO: 3718424 - DNA, 25 bp, Homo sapien
tgtaatccagctgcgcaaggactga

SEQ ID NO: 3718425 - DNA, 25 bp, Homo sapien
gacaagggtgctgattatccccagg

SEQ ID NO: 3718426 - DNA, 25 bp, Homo sapien
cataaataatgccaagaggaatgac

SEQ ID NO: 3718427 - DNA, 25 bp, Homo sapien
tggcaaacctgatacggtctcgctg

SEQ ID NO: 3718428 - DNA, 25 bp, Homo sapien
tttcagaaatcgctgctggtgctca

SEQ ID NO: 3718429 - DNA, 25 bp, Homo sapien
tgacagagtccagacgcctcagctg

SEQ ID NO: 3718430 - DNA, 25 bp, Homo sapien
tcaaaggcacggataactggcaaac

SEQ ID NO: 3718431 - DNA, 25 bp, Homo sapien
tctgcccggccagccgccccgtccg

SEQ ID NO: 3718432 - DNA, 25 bp, Homo sapien
ccctctgcccggccagccgccccgt

SEQ ID NO: 3718433 - DNA, 25 bp, Homo sapien
gagcccctctgcccggccagccgcc

SEQ ID NO: 3718434 - DNA, 25 bp, Homo sapien
gcccctctgcccggccagccgcccc

SEQ ID NO: 3718435 - DNA, 25 bp, Homo sapien
gccccagctgcagatatgaagcgga

SEQ ID NO: 3718436 - DNA, 25 bp, Homo sapien
cgggcagcggagctgtctcagtctt

SEQ ID NO: 3718437 - DNA, 25 bp, Homo sapien
cgcccgaccgccgggaggatggagt

SEQ ID NO: 3718438 - DNA, 25 bp, Homo sapien
aggatggagttcagcgggcagcgga

SEQ ID NO: 3718439 - DNA, 25 bp, Homo sapien
tataaataaccatcatcaaggctga

SEQ ID NO: 3718440 - DNA, 25 bp, Homo sapien
caaccagctccaggcgaattgcaag

SEQ ID NO: 3718441 - DNA, 25 bp, Homo sapien
gtgtccccacttagggtatctctat

SEQ ID NO: 3718442 - DNA, 25 bp, Homo sapien
tgagtgcattggacagaacaaagcc

SEQ ID NO: 3718443 - DNA, 25 bp, Homo sapien
ccaactcaaccactcaaaccacaag

SEQ ID NO: 3718444 - DNA, 25 bp, Homo sapien
cagaaaccaactcaaccactcaaac

SEQ ID NO: 3718445 - DNA, 25 bp, Homo sapien
acagaaaccaactcaaccactcaaa

SEQ ID NO: 3718446 - DNA, 25 bp, Homo sapien
gcacagaaaccaactcaaccactca

SEQ ID NO: 3718447 - DNA, 25 bp, Homo sapien
tttctgatgtcatcctcaccagcca

SEQ ID NO: 3718448 - DNA, 25 bp, Homo sapien
cagccacaatgttggtctctatttc

SEQ ID NO: 3718449 - DNA, 25 bp, Homo sapien
tcagttattcgctcaacagccacaa

SEQ ID NO: 3718450 - DNA, 25 bp, Homo sapien
ccagccagttcagggtttgtgtgat

SEQ ID NO: 3718451 - DNA, 25 bp, Homo sapien
ttctccatgctaccgatgtcacaag

SEQ ID NO: 3718452 - DNA, 25 bp, Homo sapien
ttaaactggatcttgcctttgctgg

SEQ ID NO: 3718453 - DNA, 25 bp, Homo sapien
gctcaggtcggtaccgcacttggta

SEQ ID NO: 3718454 - DNA, 25 bp, Homo sapien
caatctggcggaggcctcttatcag

SEQ ID NO: 3718455 - DNA, 25 bp, Homo sapien
ggaaagattaggtctgccaccagct

SEQ ID NO: 3718456 - DNA, 25 bp, Homo sapien
cagctgcggtaagtctgtgtgatcc

SEQ ID NO: 3718457 - DNA, 25 bp, Homo sapien
tgttgtttgatcacaaggcctccca

SEQ ID NO: 3718458 - DNA, 25 bp, Homo sapien
aagtcctcggagaacaacagcacct

SEQ ID NO: 3718459 - DNA, 25 bp, Homo sapien
tgaagaggcagtttgtgagggatga

SEQ ID NO: 3718460 - DNA, 25 bp, Homo sapien
gagggatgactttccagctcctgtc

SEQ ID NO: 3718461 - DNA, 25 bp, Homo sapien
ctgaagaggcagtttgtgagggatg

SEQ ID NO: 3718462 - DNA, 25 bp, Homo sapien
tgtgagggatgactttccagctcct

SEQ ID NO: 3718463 - DNA, 25 bp, Homo sapien
ttctctcggaggtcgtggagcccaa

SEQ ID NO: 3718464 - DNA, 25 bp, Homo sapien
tggagcccaatggaagcaatatcta

SEQ ID NO: 3718465 - DNA, 25 bp, Homo sapien
tgataatctgaccaccggcagcctc

SEQ ID NO: 3718466 - DNA, 25 bp, Homo sapien
tctgaccaccggcagcctctaagat

SEQ ID NO: 3718467 - DNA, 25 bp, Homo sapien
catgtgcccgagtaagttctagagc

SEQ ID NO: 3718468 - DNA, 25 bp, Homo sapien
tgcccgagtaagttctagagctcac

SEQ ID NO: 3718469 - DNA, 25 bp, Homo sapien
tgtgcccgagtaagttctagagctc

SEQ ID NO: 3718470 - DNA, 25 bp, Homo sapien
ggcatgtgcccgagtaagttctaga

SEQ ID NO: 3718471 - DNA, 25 bp, Homo sapien
gaagccgaagggaaatctttcttgc

SEQ ID NO: 3718472 - DNA, 25 bp, Homo sapien
gcttcaagcttcagcggcaaaactg

SEQ ID NO: 3718473 - DNA, 25 bp, Homo sapien
ctatcttttaaccatagcaaatggg

SEQ ID NO: 3718474 - DNA, 25 bp, Homo sapien
tctttcttgctgatgcacgaagcgt

SEQ ID NO: 3718475 - DNA, 25 bp, Homo sapien
gataacccaagttgcaggctggcca

SEQ ID NO: 3718476 - DNA, 25 bp, Homo sapien
tctgtcacttcgtgggataacccaa

SEQ ID NO: 3718477 - DNA, 25 bp, Homo sapien
ctcatctgagtagttgttgaaaggg

SEQ ID NO: 3718478 - DNA, 25 bp, Homo sapien
gaaagggtcgagattcatcctcagg

SEQ ID NO: 3718479 - DNA, 25 bp, Homo sapien
tgcagtgggcgaactcgttttggat

SEQ ID NO: 3718480 - DNA, 25 bp, Homo sapien
gtctctagatccaccgcagcagtgg

SEQ ID NO: 3718481 - DNA, 25 bp, Homo sapien
tttggatggtcgtctgaatgaggtt

SEQ ID NO: 3718482 - DNA, 25 bp, Homo sapien
cactgtccatgatggtgtgcagcct

SEQ ID NO: 3718483 - DNA, 25 bp, Homo sapien
atttgtagcagttcttcagggctgc

SEQ ID NO: 3718484 - DNA, 25 bp, Homo sapien
tcagggctgccgcactctataatct

SEQ ID NO: 3718485 - DNA, 25 bp, Homo sapien
aatgccagcttccttagccataaag

SEQ ID NO: 3718486 - DNA, 25 bp, Homo sapien
taaaagggtccagggatttgtagca

SEQ ID NO: 3718487 - DNA, 25 bp, Homo sapien
cattttatacacacttttgtatgta

SEQ ID NO: 3718488 - DNA, 25 bp, Homo sapien
cttatagtccttttctaacccatgg

SEQ ID NO: 3718489 - DNA, 25 bp, Homo sapien
caagtacctggtgacatttattttc

SEQ ID NO: 3718490 - DNA, 25 bp, Homo sapien
ggtagtaggttcatgggtgttcact

SEQ ID NO: 3718491 - DNA, 25 bp, Homo sapien
caaggaagtacgatcgaggtagaca

SEQ ID NO: 3718492 - DNA, 25 bp, Homo sapien
gatgtatgcagtatgagtcagtcca

SEQ ID NO: 3718493 - DNA, 25 bp, Homo sapien
gcattaccagtttggcatcagctag

SEQ ID NO: 3718494 - DNA, 25 bp, Homo sapien
caatgccagactacagagcagtgaa

SEQ ID NO: 3718495 - DNA, 25 bp, Homo sapien
aattggcagtatcctttcttcgtgg

SEQ ID NO: 3718496 - DNA, 25 bp, Homo sapien
tctgcagtcagcgtaaatagttcct

SEQ ID NO: 3718497 - DNA, 25 bp, Homo sapien
gataactatatcgacatcagcctgg

SEQ ID NO: 3718498 - DNA, 25 bp, Homo sapien
cacagggctatgtgtaggaggcaca

SEQ ID NO: 3718499 - DNA, 25 bp, Homo sapien
tagatgcagacaacataacacctgt

SEQ ID NO: 3718500 - DNA, 25 bp, Homo sapien
tacttgaattgggataagccattcc

SEQ ID NO: 3718501 - DNA, 25 bp, Homo sapien
gctttgagctgaaaccagttgagcc

SEQ ID NO: 3718502 - DNA, 25 bp, Homo sapien
gagtaacagtatgagagctccagcc

SEQ ID NO: 3718503 - DNA, 25 bp, Homo sapien
tgcaaagggactggaggctctgttt

SEQ ID NO: 3718504 - DNA, 25 bp, Homo sapien
aacgctctcagatgtctgacttggc

SEQ ID NO: 3718505 - DNA, 25 bp, Homo sapien
tactagggaccgacctgagtctggg

SEQ ID NO: 3718506 - DNA, 25 bp, Homo sapien
tgtttcagaggccagtcacattgtg

SEQ ID NO: 3718507 - DNA, 25 bp, Homo sapien
aaagccttatggagccacgggcaaa

SEQ ID NO: 3718508 - DNA, 25 bp, Homo sapien
tggtcataggtggaaagtactcgct

SEQ ID NO: 3718509 - DNA, 25 bp, Homo sapien
ttttaaacacatcccgccgagagct

SEQ ID NO: 3718510 - DNA, 25 bp, Homo sapien
gatagagaatgatcaagcagcactg

SEQ ID NO: 3718511 - DNA, 25 bp, Homo sapien
tgttggacatctaccctagaccgta

SEQ ID NO: 3718512 - DNA, 25 bp, Homo sapien
actccatggtttcgtctctgagttc

SEQ ID NO: 3718513 - DNA, 25 bp, Homo sapien
cagattgatagtccctgctccctgt

SEQ ID NO: 3718514 - DNA, 25 bp, Homo sapien
ggacatctaccctagaccgtaaaca

SEQ ID NO: 3718515 - DNA, 25 bp, Homo sapien
ttccaacatgggcttgacttaactt

SEQ ID NO: 3718516 - DNA, 25 bp, Homo sapien
ggacctaacaggctcttaacctgca

SEQ ID NO: 3718517 - DNA, 25 bp, Homo sapien
tctggggcaccattttggacctaac

SEQ ID NO: 3718518 - DNA, 25 bp, Homo sapien
ggcttgacttaacttgaatttctgg

SEQ ID NO: 3718519 - DNA, 25 bp, Homo sapien
ggcccggcacagagccagataaaat

SEQ ID NO: 3718520 - DNA, 25 bp, Homo sapien
gaaggatattgtccgaggttcctca

SEQ ID NO: 3718521 - DNA, 25 bp, Homo sapien
caacagctgatcgagtttgagaaga

SEQ ID NO: 3718522 - DNA, 25 bp, Homo sapien
tcctcaaagttaatcaccgagcagg

SEQ ID NO: 3718523 - DNA, 25 bp, Homo sapien
ctgacacacgggtggaggaaaccat

SEQ ID NO: 3718524 - DNA, 25 bp, Homo sapien
gcagccttgccaggatcccggaaac

SEQ ID NO: 3718525 - DNA, 25 bp, Homo sapien
caggatcccggaaacttctttggat

SEQ ID NO: 3718526 - DNA, 25 bp, Homo sapien
aaattatgtcctgacacacgggtgg

SEQ ID NO: 3718527 - DNA, 25 bp, Homo sapien
catcttcatgtgtccgcgagctctg

SEQ ID NO: 3718528 - DNA, 25 bp, Homo sapien
gagcgccctgtttcagattccggaa

SEQ ID NO: 3718529 - DNA, 25 bp, Homo sapien
aatattccatgggacaagcccgggc

SEQ ID NO: 3718530 - DNA, 25 bp, Homo sapien
gacccacctgtagggttccatggaa

SEQ ID NO: 3718531 - DNA, 25 bp, Homo sapien
aaaaattaatgaggaatgacattgc

SEQ ID NO: 3718532 - DNA, 25 bp, Homo sapien
tgttcttccagttcgacattctgta

SEQ ID NO: 3718533 - DNA, 25 bp, Homo sapien
accagagtccgtgtggtgagtcagt

SEQ ID NO: 3718534 - DNA, 25 bp, Homo sapien
ctaagccagcgcagggttttcattt

SEQ ID NO: 3718535 - DNA, 25 bp, Homo sapien
gtaccctgtggaaccagagtccgtg

SEQ ID NO: 3718536 - DNA, 25 bp, Homo sapien
ctgttcagctggagatgcagctttg

SEQ ID NO: 3718537 - DNA, 25 bp, Homo sapien
ttcagctggagatgcagctttggtc

SEQ ID NO: 3718538 - DNA, 25 bp, Homo sapien
tgttcagctggagatgcagctttgg

SEQ ID NO: 3718539 - DNA, 25 bp, Homo sapien
cagctggagatgcagctttggtcat

SEQ ID NO: 3718540 - DNA, 25 bp, Homo sapien
aaacgtgaggcgcagcaattccagc

SEQ ID NO: 3718541 - DNA, 25 bp, Homo sapien
acagtcatagactcgccgccttctt

SEQ ID NO: 3718542 - DNA, 25 bp, Homo sapien
cctctaggtagattccagaaacgtg

SEQ ID NO: 3718543 - DNA, 25 bp, Homo sapien
cagcaacatagccaagctgtgtaac

SEQ ID NO: 3718544 - DNA, 25 bp, Homo sapien
taccaatgttgtagcaaggtttgag

SEQ ID NO: 3718545 - DNA, 25 bp, Homo sapien
gggaggtacatctcacgcatgagca

SEQ ID NO: 3718546 - DNA, 25 bp, Homo sapien
agggaggtacatctcacgcatgagc

SEQ ID NO: 3718547 - DNA, 25 bp, Homo sapien
aggtacatctcacgcatgagcatga

SEQ ID NO: 3718548 - DNA, 25 bp, Homo sapien
cctgctttcatcaagtgaaaactcc

SEQ ID NO: 3718549 - DNA, 25 bp, Homo sapien
ctgctttcatcaagtgaaaactccc

SEQ ID NO: 3718550 - DNA, 25 bp, Homo sapien
tcctgctttcatcaagtgaaaactc

SEQ ID NO: 3718551 - DNA, 25 bp, Homo sapien
tgctttcatcaagtgaaaactccct

SEQ ID NO: 3718552 - DNA, 25 bp, Homo sapien
gtttaactgatgcaaggctggccca

SEQ ID NO: 3718553 - DNA, 25 bp, Homo sapien
tgatacctggaggatcaaagccctc

SEQ ID NO: 3718554 - DNA, 25 bp, Homo sapien
ggagaatcgtcctcttgctctgagt

SEQ ID NO: 3718555 - DNA, 25 bp, Homo sapien
taggcactgggaacatgtccccagg

SEQ ID NO: 3718556 - DNA, 25 bp, Homo sapien
tgccttacagataatcacttaatat

SEQ ID NO: 3718557 - DNA, 25 bp, Homo sapien
tggttaggcagttgttaactctctc

SEQ ID NO: 3718558 - DNA, 25 bp, Homo sapien
gaaagaagttacctgcaattttgcc

SEQ ID NO: 3718559 - DNA, 25 bp, Homo sapien
taagtaggtagacacgagcagggca

SEQ ID NO: 3718560 - DNA, 25 bp, Homo sapien
gcggccccggtgcaggcaaaagttc

SEQ ID NO: 3718561 - DNA, 25 bp, Homo sapien
gcggccgtgcagctgtcgtccgaac

SEQ ID NO: 3718562 - DNA, 25 bp, Homo sapien
gatgtggctgtcctcgactgacgca

SEQ ID NO: 3718563 - DNA, 25 bp, Homo sapien
gccgcaggcggtgaaacgcaagatt

SEQ ID NO: 3718564 - DNA, 25 bp, Homo sapien
tcaacagatatcgtgcaagggcggg

SEQ ID NO: 3718565 - DNA, 25 bp, Homo sapien
aatcaacagatatcgtgcaagggcg

SEQ ID NO: 3718566 - DNA, 25 bp, Homo sapien
caacagatatcgtgcaagggcgggt

SEQ ID NO: 3718567 - DNA, 25 bp, Homo sapien
caaatcaacagatatcgtgcaaggg

SEQ ID NO: 3718568 - DNA, 25 bp, Homo sapien
gcattgccaggtaatgtggaataag

SEQ ID NO: 3718569 - DNA, 25 bp, Homo sapien
ataagtcagaatccccgctacccag

SEQ ID NO: 3718570 - DNA, 25 bp, Homo sapien
caacagctgcattgccaggtaatgt

SEQ ID NO: 3718571 - DNA, 25 bp, Homo sapien
aataagtcagaatccccgctaccca

SEQ ID NO: 3718572 - DNA, 25 bp, Homo sapien
gaatttgtgaattagaagccgtggc

SEQ ID NO: 3718573 - DNA, 25 bp, Homo sapien
gactattaagatgttagcggcccaa

SEQ ID NO: 3718574 - DNA, 25 bp, Homo sapien
gggatcaaccccatagtatcctagg

SEQ ID NO: 3718575 - DNA, 25 bp, Homo sapien
aggagacagaccaagccagagaagg

SEQ ID NO: 3718576 - DNA, 25 bp, Homo sapien
gaaatgccgctgtgaagtcttaaag

SEQ ID NO: 3718577 - DNA, 25 bp, Homo sapien
taacttttctggagcagtgtgctgc

SEQ ID NO: 3718578 - DNA, 25 bp, Homo sapien
taggagacctacttcatgtggaccc

SEQ ID NO: 3718579 - DNA, 25 bp, Homo sapien
tgttgccccaaagtgatggccctgg

SEQ ID NO: 3718580 - DNA, 25 bp, Homo sapien
tgccatggtcacaagcacactgatg

SEQ ID NO: 3718581 - DNA, 25 bp, Homo sapien
agattgtttatctggagcccacata

SEQ ID NO: 3718582 - DNA, 25 bp, Homo sapien
acctagaaagcatccttggtcatca

SEQ ID NO: 3718583 - DNA, 25 bp, Homo sapien
aaagtcacctagaaagcatccttgg

SEQ ID NO: 3718584 - DNA, 25 bp, Homo sapien
gatgctaagatactgcctgcactgg

SEQ ID NO: 3718585 - DNA, 25 bp, Homo sapien
taaggtacctggttttagccacagc

SEQ ID NO: 3718586 - DNA, 25 bp, Homo sapien
agaagactgattgcacctgggaccc

SEQ ID NO: 3718587 - DNA, 25 bp, Homo sapien
tgtgattaagatccaggccgctgaa

SEQ ID NO: 3718588 - DNA, 25 bp, Homo sapien
cgaggggtcggctttcctcgcgagc

SEQ ID NO: 3718589 - DNA, 25 bp, Homo sapien
gccgaggggtcggctttcctcgcga

SEQ ID NO: 3718590 - DNA, 25 bp, Homo sapien
ccgaggggtcggctttcctcgcgag

SEQ ID NO: 3718591 - DNA, 25 bp, Homo sapien
tacaaatttataaaggtctgcactc

SEQ ID NO: 3718592 - DNA, 25 bp, Homo sapien
aaggtctgcactcctttatctgtaa

SEQ ID NO: 3718593 - DNA, 25 bp, Homo sapien
aaacaaggtttccataagcttggtg

SEQ ID NO: 3718594 - DNA, 25 bp, Homo sapien
tttcatgtcttgtcatacaaattta

SEQ ID NO: 3718595 - DNA, 25 bp, Homo sapien
cccaaacctatggaagttgttgcta

SEQ ID NO: 3718596 - DNA, 25 bp, Homo sapien
catttgccttcagtcttggtaaaac

SEQ ID NO: 3718597 - DNA, 25 bp, Homo sapien
gaaatgtccaaacagaaaacttgca

SEQ ID NO: 3718598 - DNA, 25 bp, Homo sapien
gaaatggctatgaacagaaactaca

SEQ ID NO: 3718599 - DNA, 25 bp, Homo sapien
gctcaggaggtcatgcagttgcaca

SEQ ID NO: 3718600 - DNA, 25 bp, Homo sapien
taagatgtgccgtatccaaagccag

SEQ ID NO: 3718601 - DNA, 25 bp, Homo sapien
tgcaagaactcagattccaagccct

SEQ ID NO: 3718602 - DNA, 25 bp, Homo sapien
cagaagtgcagccatgttacatcac

SEQ ID NO: 3718603 - DNA, 25 bp, Homo sapien
tgtgaatcaacagagatgcttgcct

SEQ ID NO: 3718604 - DNA, 25 bp, Homo sapien
ggtcccttgtaggatccagtctaga

SEQ ID NO: 3718605 - DNA, 25 bp, Homo sapien
tagaaggtgcagtaacccctcagac

SEQ ID NO: 3718606 - DNA, 25 bp, Homo sapien
actcctcaagatgggtgggtttact

SEQ ID NO: 3718607 - DNA, 25 bp, Homo sapien
catttgagggtatctggctgctgcc

SEQ ID NO: 3718608 - DNA, 25 bp, Homo sapien
tgtagaacccattgtgaccaacagc

SEQ ID NO: 3718609 - DNA, 25 bp, Homo sapien
caggatgtctacaggtccctttact

SEQ ID NO: 3718610 - DNA, 25 bp, Homo sapien
aagatgtcatactgccctcaaatgg

SEQ ID NO: 3718611 - DNA, 25 bp, Homo sapien
tggtcacctgctcataacaaaagga

SEQ ID NO: 3718612 - DNA, 25 bp, Homo sapien
tgacgttgttgtacagccataaccc

SEQ ID NO: 3718613 - DNA, 25 bp, Homo sapien
tccattaacatgagcattcagggct

SEQ ID NO: 3718614 - DNA, 25 bp, Homo sapien
gcaccaggtatcatcttatctctag

SEQ ID NO: 3718615 - DNA, 25 bp, Homo sapien
ttgtttccccatcccttagccggca

SEQ ID NO: 3718616 - DNA, 25 bp, Homo sapien
ccccatcccttagccggcagggctc

SEQ ID NO: 3718617 - DNA, 25 bp, Homo sapien
ccatcccttagccggcagggctctg

SEQ ID NO: 3718618 - DNA, 25 bp, Homo sapien
ttccccatcccttagccggcagggc

SEQ ID NO: 3718619 - DNA, 25 bp, Homo sapien
gggaattacgagattacagccccac

SEQ ID NO: 3718620 - DNA, 25 bp, Homo sapien
gatggccacttctgggtcagcccaa

SEQ ID NO: 3718621 - DNA, 25 bp, Homo sapien
caatcatcagtatccctgggtcctc

SEQ ID NO: 3718622 - DNA, 25 bp, Homo sapien
tttgactgggaattacgagattaca

SEQ ID NO: 3718623 - DNA, 25 bp, Homo sapien
aaaattgaagattgtggagcctggg

SEQ ID NO: 3718624 - DNA, 25 bp, Homo sapien
aaactgagactcggaaaattgaaga

SEQ ID NO: 3718625 - DNA, 25 bp, Homo sapien
tatattgggcacttatggtccagac

SEQ ID NO: 3718626 - DNA, 25 bp, Homo sapien
cacttatggtccagacactgtttca

SEQ ID NO: 3718627 - DNA, 25 bp, Homo sapien
gtatgtctgtcatccagctcctatg

SEQ ID NO: 3718628 - DNA, 25 bp, Homo sapien
aagaataaaagtatgtctgtcatcc

SEQ ID NO: 3718629 - DNA, 25 bp, Homo sapien
gctcctatgtctgttatccagctcc

SEQ ID NO: 3718630 - DNA, 25 bp, Homo sapien
cagcttgtgtatatcaacattttca

SEQ ID NO: 3718631 - DNA, 25 bp, Homo sapien
gtcccatggaacttgcctacagcaa

SEQ ID NO: 3718632 - DNA, 25 bp, Homo sapien
tgccttggcttcttaacctgctggg

SEQ ID NO: 3718633 - DNA, 25 bp, Homo sapien
taaagaaactacaatctcccatggg

SEQ ID NO: 3718634 - DNA, 25 bp, Homo sapien
gctggtctgtaatgcctaggctcaa

SEQ ID NO: 3718635 - DNA, 25 bp, Homo sapien
tgaactccacaggaagtagtaaagc

SEQ ID NO: 3718636 - DNA, 25 bp, Homo sapien
tttttatgaactccacaggaagtag

SEQ ID NO: 3718637 - DNA, 25 bp, Homo sapien
tatgaactccacaggaagtagtaaa

SEQ ID NO: 3718638 - DNA, 25 bp, Homo sapien
caagcaggattgcagtggcataact

SEQ ID NO: 3718639 - DNA, 25 bp, Homo sapien
taatgttcctgataagtctgactgg

SEQ ID NO: 3718640 - DNA, 25 bp, Homo sapien
gccatccttaatgttcctgataagt

SEQ ID NO: 3718641 - DNA, 25 bp, Homo sapien
gtcagatcagcaaggaagacgagga

SEQ ID NO: 3718642 - DNA, 25 bp, Homo sapien
tttgagccctatgactttactctgg

SEQ ID NO: 3718643 - DNA, 25 bp, Homo sapien
gctctttaggcaaggctctagcagc

SEQ ID NO: 3718644 - DNA, 25 bp, Homo sapien
cactaaagcaaggaatgtcaagttc

SEQ ID NO: 3718645 - DNA, 25 bp, Homo sapien
caagttcccttactagcatgcacgg

SEQ ID NO: 3718646 - DNA, 25 bp, Homo sapien
ttgctagtaggaaaataagattcac

SEQ ID NO: 3718647 - DNA, 25 bp, Homo sapien
gtgttctgtactccatggaatcggt

SEQ ID NO: 3718648 - DNA, 25 bp, Homo sapien
ccttcccgtaccacagtgttctgta

SEQ ID NO: 3718649 - DNA, 25 bp, Homo sapien
tatagggcagagttcaccacgtctc

SEQ ID NO: 3718650 - DNA, 25 bp, Homo sapien
ttatatagggcagagttcaccacgt

SEQ ID NO: 3718651 - DNA, 25 bp, Homo sapien
ctggcacattacatggtcaagaaca

SEQ ID NO: 3718652 - DNA, 25 bp, Homo sapien
catgtgcaccgtgatgttgacattc

SEQ ID NO: 3718653 - DNA, 25 bp, Homo sapien
cccatgtgcaccgtgatgttgacat

SEQ ID NO: 3718654 - DNA, 25 bp, Homo sapien
tacatggtcaagaacagcagtcaaa

SEQ ID NO: 3718655 - DNA, 25 bp, Homo sapien
acgcttatcataatcctcttcaatg

SEQ ID NO: 3718656 - DNA, 25 bp, Homo sapien
cacacgcttatcataatcctcttca

SEQ ID NO: 3718657 - DNA, 25 bp, Homo sapien
gcttatcataatcctcttcaatgct

SEQ ID NO: 3718658 - DNA, 25 bp, Homo sapien
agcacacgcttatcataatcctctt

SEQ ID NO: 3718659 - DNA, 25 bp, Homo sapien
gttctccagcatcaaagtgagccac

SEQ ID NO: 3718660 - DNA, 25 bp, Homo sapien
tagttctccagcatcaaagtgagcc

SEQ ID NO: 3718661 - DNA, 25 bp, Homo sapien
attagttctccagcatcaaagtgag

SEQ ID NO: 3718662 - DNA, 25 bp, Homo sapien
ctttaggtgattagttctccagcat

SEQ ID NO: 3718663 - DNA, 25 bp, Homo sapien
ctctgtaaggtcgttgctcatctgc

SEQ ID NO: 3718664 - DNA, 25 bp, Homo sapien
cttgctctgtaaggtcgttgctcat

SEQ ID NO: 3718665 - DNA, 25 bp, Homo sapien
tgctctgtaaggtcgttgctcatct

SEQ ID NO: 3718666 - DNA, 25 bp, Homo sapien
gctgcttgctctgtaaggtcgttgc

SEQ ID NO: 3718667 - DNA, 25 bp, Homo sapien
tcatagtgatttctagggttggggc

SEQ ID NO: 3718668 - DNA, 25 bp, Homo sapien
gagtataagagctggaatgtgatgt

SEQ ID NO: 3718669 - DNA, 25 bp, Homo sapien
ttcatagtgatttctagggttgggg

SEQ ID NO: 3718670 - DNA, 25 bp, Homo sapien
gtataagagctggaatgtgatgtcc

SEQ ID NO: 3718671 - DNA, 25 bp, Homo sapien
caggtgccgtgctaatattctcttt

SEQ ID NO: 3718672 - DNA, 25 bp, Homo sapien
gcaggtgccgtgctaatattctctt

SEQ ID NO: 3718673 - DNA, 25 bp, Homo sapien
aggtgccgtgctaatattctcttta

SEQ ID NO: 3718674 - DNA, 25 bp, Homo sapien
aagaactgcagtgtgccggacgctg

SEQ ID NO: 3718675 - DNA, 25 bp, Homo sapien
caacagatggagttcctgctttaat

SEQ ID NO: 3718676 - DNA, 25 bp, Homo sapien
agaatccagataatgggccgggcgc

SEQ ID NO: 3718677 - DNA, 25 bp, Homo sapien
cgtagagtctagaggaacaggtact

SEQ ID NO: 3718678 - DNA, 25 bp, Homo sapien
taacttggcgtatgtgatgggcccc

SEQ ID NO: 3718679 - DNA, 25 bp, Homo sapien
ttgccatattcaggacagagactct

SEQ ID NO: 3718680 - DNA, 25 bp, Homo sapien
cattgacatgcgatcagtttgggaa

SEQ ID NO: 3718681 - DNA, 25 bp, Homo sapien
tcaacgttcgagtaaactggaggac

SEQ ID NO: 3718682 - DNA, 25 bp, Homo sapien
gaagagccatatttctaagcaggtc

SEQ ID NO: 3718683 - DNA, 25 bp, Homo sapien
caccacatctggttcaagtacatga

SEQ ID NO: 3718684 - DNA, 25 bp, Homo sapien
taaggacactaagccagtacaggga

SEQ ID NO: 3718685 - DNA, 25 bp, Homo sapien
cactaagccagtacagggaagagcc

SEQ ID NO: 3718686 - DNA, 25 bp, Homo sapien
ggtgagattccaacgttgcagagga

SEQ ID NO: 3718687 - DNA, 25 bp, Homo sapien
caagatttgttgctagcacccatgg

SEQ ID NO: 3718688 - DNA, 25 bp, Homo sapien
gaacctggaaactgagtgggcttta

SEQ ID NO: 3718689 - DNA, 25 bp, Homo sapien
ggcactcccggagcaaagtctatga

SEQ ID NO: 3718690 - DNA, 25 bp, Homo sapien
tgccaaaagaatagggtgccagaag

SEQ ID NO: 3718691 - DNA, 25 bp, Homo sapien
tgaaaccaagcaacatacacaggag

SEQ ID NO: 3718692 - DNA, 25 bp, Homo sapien
tagctcacaagtggacaagcagagg

SEQ ID NO: 3718693 - DNA, 25 bp, Homo sapien
gaaacaggcaaggaccacactgaga

SEQ ID NO: 3718694 - DNA, 25 bp, Homo sapien
tacccacgaattgctgtatatgagt

SEQ ID NO: 3718695 - DNA, 25 bp, Homo sapien
gctgcttgaaatagtgtagacacag

SEQ ID NO: 3718696 - DNA, 25 bp, Homo sapien
cgtgtcgctcagaaacaatgtcaaa

SEQ ID NO: 3718697 - DNA, 25 bp, Homo sapien
ccattctactggtgtcagctgcttg

SEQ ID NO: 3718698 - DNA, 25 bp, Homo sapien
ccgcaccggactccggccgcacaca

SEQ ID NO: 3718699 - DNA, 25 bp, Homo sapien
accggactccggccgcacacacagg

SEQ ID NO: 3718700 - DNA, 25 bp, Homo sapien
gaccgcaccggactccggccgcaca

SEQ ID NO: 3718701 - DNA, 25 bp, Homo sapien
gggaccgcaccggactccggccgca

SEQ ID NO: 3718702 - DNA, 25 bp, Homo sapien
taatgaggcttctgtaaactccggc

SEQ ID NO: 3718703 - DNA, 25 bp, Homo sapien
ggctcggcgcaatctgctgttccct

SEQ ID NO: 3718704 - DNA, 25 bp, Homo sapien
cgcgtcgggagctttctctctggaa

SEQ ID NO: 3718705 - DNA, 25 bp, Homo sapien
gccgaagggaatttggtgccacctc

SEQ ID NO: 3718706 - DNA, 25 bp, Homo sapien
cgagccgggaatttaaaggctagag

SEQ ID NO: 3718707 - DNA, 25 bp, Homo sapien
gccgcggtgcgtggaggtccccgag

SEQ ID NO: 3718708 - DNA, 25 bp, Homo sapien
tgcgtggaggtccccgagccgggaa

SEQ ID NO: 3718709 - DNA, 25 bp, Homo sapien
ctagccgcggtgcgtggaggtcccc

SEQ ID NO: 3718710 - DNA, 25 bp, Homo sapien
gaggactgcggtttcgaagcccgcc

SEQ ID NO: 3718711 - DNA, 25 bp, Homo sapien
ccttgcacgctagctggttgtcggc

SEQ ID NO: 3718712 - DNA, 25 bp, Homo sapien
cggatgccgggatcactttccaggg

SEQ ID NO: 3718713 - DNA, 25 bp, Homo sapien
ctgaggctccggagcggagttcggg

SEQ ID NO: 3718714 - DNA, 25 bp, Homo sapien
tcgtcctgcagcaagtgggccggca

SEQ ID NO: 3718715 - DNA, 25 bp, Homo sapien
atcgtcctgcagcaagtgggccggc

SEQ ID NO: 3718716 - DNA, 25 bp, Homo sapien
cgtcctgcagcaagtgggccggcat

SEQ ID NO: 3718717 - DNA, 25 bp, Homo sapien
tacggggccaggctgggaaactcac

SEQ ID NO: 3718718 - DNA, 25 bp, Homo sapien
gtacggggccaggctgggaaactca

SEQ ID NO: 3718719 - DNA, 25 bp, Homo sapien
atgaccaagtcctccgcggagctct

SEQ ID NO: 3718720 - DNA, 25 bp, Homo sapien
gcacaactcgaaaaagatgaccaag

SEQ ID NO: 3718721 - DNA, 25 bp, Homo sapien
gcagcacaactcgaaaaagatgacc

SEQ ID NO: 3718722 - DNA, 25 bp, Homo sapien
tcgaaaaagatgaccaagtcctccg

SEQ ID NO: 3718723 - DNA, 25 bp, Homo sapien
cagagacataaggatgatgtttctc

SEQ ID NO: 3718724 - DNA, 25 bp, Homo sapien
catcttttatatcagggcgaatgtc

SEQ ID NO: 3718725 - DNA, 25 bp, Homo sapien
gaatcaaagtgatcccatacagggc

SEQ ID NO: 3718726 - DNA, 25 bp, Homo sapien
tggtggtggtggtataggagctaga

SEQ ID NO: 3718727 - DNA, 25 bp, Homo sapien
tggaggactaggtcaggaggacagg

SEQ ID NO: 3718728 - DNA, 25 bp, Homo sapien
aggtcaggaggacagggaggctgct

SEQ ID NO: 3718729 - DNA, 25 bp, Homo sapien
ctggaggactaggtcaggaggacag

SEQ ID NO: 3718730 - DNA, 25 bp, Homo sapien
tcaggaggacagggaggctgcttac

SEQ ID NO: 3718731 - DNA, 25 bp, Homo sapien
gccgtaggggcagccgagctttgta

SEQ ID NO: 3718732 - DNA, 25 bp, Homo sapien
tatgcccagggcactgacaaaatag

SEQ ID NO: 3718733 - DNA, 25 bp, Homo sapien
gagctttgtaagagcggtggctcca

SEQ ID NO: 3718734 - DNA, 25 bp, Homo sapien
agcggtggctccacagacgatgagc

SEQ ID NO: 3718735 - DNA, 25 bp, Homo sapien
cttatgatgaagagccacaacggcc

SEQ ID NO: 3718736 - DNA, 25 bp, Homo sapien
tgcccaggaatctaaggtcagtctc

SEQ ID NO: 3718737 - DNA, 25 bp, Homo sapien
caacggccagattgtgtgacaacac

SEQ ID NO: 3718738 - DNA, 25 bp, Homo sapien
aatttattgtccagtgtctgcccag

SEQ ID NO: 3718739 - DNA, 25 bp, Homo sapien
cacaggacaactttggaagccttca

SEQ ID NO: 3718740 - DNA, 25 bp, Homo sapien
gagctcatacaacccaataacaagg

SEQ ID NO: 3718741 - DNA, 25 bp, Homo sapien
ccttcaaggtataagctgctatggc

SEQ ID NO: 3718742 - DNA, 25 bp, Homo sapien
caagttcttgggatattgccaccac

SEQ ID NO: 3718743 - DNA, 25 bp, Homo sapien
tgggtgtttgcgcacaagcagccaa

SEQ ID NO: 3718744 - DNA, 25 bp, Homo sapien
gcttctaggtcagacaagtctagcg

SEQ ID NO: 3718745 - DNA, 25 bp, Homo sapien
ggaattatgaggatcagcatgtgtt

SEQ ID NO: 3718746 - DNA, 25 bp, Homo sapien
agcagccaacccacgtgagagaaga

SEQ ID NO: 3718747 - DNA, 25 bp, Homo sapien
aattaagattgtgaacatgcaaacc

SEQ ID NO: 3718748 - DNA, 25 bp, Homo sapien
taaattaagattgtgaacatgcaaa

SEQ ID NO: 3718749 - DNA, 25 bp, Homo sapien
ttaagattgtgaacatgcaaaccca

SEQ ID NO: 3718750 - DNA, 25 bp, Homo sapien
taagattgtgaacatgcaaacccag

SEQ ID NO: 3718751 - DNA, 25 bp, Homo sapien
ttaggactcgacaagaatggcatta

SEQ ID NO: 3718752 - DNA, 25 bp, Homo sapien
taaagcacgtccgtaactatgccac

SEQ ID NO: 3718753 - DNA, 25 bp, Homo sapien
gccattgacattccaagggcactga

SEQ ID NO: 3718754 - DNA, 25 bp, Homo sapien
cattgagtgtccttgatcacctgca

SEQ ID NO: 3718755 - DNA, 25 bp, Homo sapien
tggcattaagcaccacagcatatcg

SEQ ID NO: 3718756 - DNA, 25 bp, Homo sapien
aagtgaaaccaggatattctcccgg

SEQ ID NO: 3718757 - DNA, 25 bp, Homo sapien
ctaatgttcttgtcataaggacgat

SEQ ID NO: 3718758 - DNA, 25 bp, Homo sapien
cagcatatcgcaagaaagtggcaac

SEQ ID NO: 3718759 - DNA, 25 bp, Homo sapien
gaatgaagcactctggctatgactc

SEQ ID NO: 3718760 - DNA, 25 bp, Homo sapien
tagagagaagctcctacttttggga

SEQ ID NO: 3718761 - DNA, 25 bp, Homo sapien
catcttaaggagtgattggagaccc

SEQ ID NO: 3718762 - DNA, 25 bp, Homo sapien
gaggttccaaaagagtgggccctgc

SEQ ID NO: 3718763 - DNA, 25 bp, Homo sapien
gagtgacggtgcattgaggttttct

SEQ ID NO: 3718764 - DNA, 25 bp, Homo sapien
aaacaaaagcgagaagttatggagt

SEQ ID NO: 3718765 - DNA, 25 bp, Homo sapien
caaaagcgagaagttatggagtgac

SEQ ID NO: 3718766 - DNA, 25 bp, Homo sapien
aagttatggagtgacggtgcattga

SEQ ID NO: 3718767 - DNA, 25 bp, Homo sapien
gtgaagttgatgtgccagcggtact

SEQ ID NO: 3718768 - DNA, 25 bp, Homo sapien
cggccatgcaatcaatgaagaatgt

SEQ ID NO: 3718769 - DNA, 25 bp, Homo sapien
gccagcggtactcactggcagagta

SEQ ID NO: 3718770 - DNA, 25 bp, Homo sapien
ggcggccatgcaatcaatgaagaat

SEQ ID NO: 3718771 - DNA, 25 bp, Homo sapien
ggagggcgatagcaataaagtgaaa

SEQ ID NO: 3718772 - DNA, 25 bp, Homo sapien
gaaaggagggcgatagcaataaagt

SEQ ID NO: 3718773 - DNA, 25 bp, Homo sapien
aaggagggcgatagcaataaagtga

SEQ ID NO: 3718774 - DNA, 25 bp, Homo sapien
gagggcgatagcaataaagtgaaaa

SEQ ID NO: 3718775 - DNA, 25 bp, Homo sapien
aataactcactcagtaaccttctca

SEQ ID NO: 3718776 - DNA, 25 bp, Homo sapien
gactcccaataactcactcagtaac

SEQ ID NO: 3718777 - DNA, 25 bp, Homo sapien
taactcactcagtaaccttctcaag

SEQ ID NO: 3718778 - DNA, 25 bp, Homo sapien
tcccaataactcactcagtaacctt

SEQ ID NO: 3718779 - DNA, 25 bp, Homo sapien
tcaacatgagcgcttggcttggctg

SEQ ID NO: 3718780 - DNA, 25 bp, Homo sapien
tctatactattgtctgccctaggct

SEQ ID NO: 3718781 - DNA, 25 bp, Homo sapien
ccccaggcagttgtatactttaggc

SEQ ID NO: 3718782 - DNA, 25 bp, Homo sapien
gggcaccctcaccaagtaagcaggg

SEQ ID NO: 3718783 - DNA, 25 bp, Homo sapien
tattatcaagcaggcatctgatgac

SEQ ID NO: 3718784 - DNA, 25 bp, Homo sapien
ttatcaagcaggcatctgatgacct

SEQ ID NO: 3718785 - DNA, 25 bp, Homo sapien
atatattatcaagcaggcatctgat

SEQ ID NO: 3718786 - DNA, 25 bp, Homo sapien
tatcaagcaggcatctgatgacctg

SEQ ID NO: 3718787 - DNA, 25 bp, Homo sapien
gcacctgagctaagttgtcagcaca

SEQ ID NO: 3718788 - DNA, 25 bp, Homo sapien
ttttgtctggctagttatccaccgc

SEQ ID NO: 3718789 - DNA, 25 bp, Homo sapien
cggacgtatcaagttcatggtggac

SEQ ID NO: 3718790 - DNA, 25 bp, Homo sapien
gtcttgagaattcctgtgctgaagg

SEQ ID NO: 3718791 - DNA, 25 bp, Homo sapien
accagatcatagcaacattacacat

SEQ ID NO: 3718792 - DNA, 25 bp, Homo sapien
tagagccagtagttaagaccatagg

SEQ ID NO: 3718793 - DNA, 25 bp, Homo sapien
aagaccataggtctggaaccagatc

SEQ ID NO: 3718794 - DNA, 25 bp, Homo sapien
gaaccagatcatagcaacattacac

SEQ ID NO: 3718795 - DNA, 25 bp, Homo sapien
ttcctatctgtgactgttgaaaagt

SEQ ID NO: 3718796 - DNA, 25 bp, Homo sapien
tctgtgactgttgaaaagtttaatg

SEQ ID NO: 3718797 - DNA, 25 bp, Homo sapien
tctgggtgaggaccgaggcgttgga

SEQ ID NO: 3718798 - DNA, 25 bp, Homo sapien
agagctggcaccttccacaccgagc

SEQ ID NO: 3718799 - DNA, 25 bp, Homo sapien
taagagcccacaaagaatctcgggt

SEQ ID NO: 3718800 - DNA, 25 bp, Homo sapien
tactgggccgtcctggttagcaagg

SEQ ID NO: 3718801 - DNA, 25 bp, Homo sapien
tcaaaggcagctatggactaagagc

SEQ ID NO: 3718802 - DNA, 25 bp, Homo sapien
taagaggcgtttttgcacgattgca

SEQ ID NO: 3718803 - DNA, 25 bp, Homo sapien
tatcccagcttttgaggtcccatga

SEQ ID NO: 3718804 - DNA, 25 bp, Homo sapien
ggttgcgtcagcctcgaacgttcct

SEQ ID NO: 3718805 - DNA, 25 bp, Homo sapien
caccagagtggtaacaatagcttcc

SEQ ID NO: 3718806 - DNA, 25 bp, Homo sapien
tctactgggtattacatccacaggg

SEQ ID NO: 3718807 - DNA, 25 bp, Homo sapien
tggcctctgtgtcctctttctacct

SEQ ID NO: 3718808 - DNA, 25 bp, Homo sapien
cctctcgagaagctggaattaacag

SEQ ID NO: 3718809 - DNA, 25 bp, Homo sapien
cctctgtgtcctctttctaccttcc

SEQ ID NO: 3718810 - DNA, 25 bp, Homo sapien
agcctctcgagaagctggaattaac

SEQ ID NO: 3718811 - DNA, 25 bp, Homo sapien
gtgattgtggctcaccaaagccgca

SEQ ID NO: 3718812 - DNA, 25 bp, Homo sapien
caccaaagccgcaacctctcaggct

SEQ ID NO: 3718813 - DNA, 25 bp, Homo sapien
cacaactataatgatcacactaatg

SEQ ID NO: 3718814 - DNA, 25 bp, Homo sapien
ggaacaaatattgcaagttgttact

SEQ ID NO: 3718815 - DNA, 25 bp, Homo sapien
gtctgaacaaccagtttgtcagtca

SEQ ID NO: 3718816 - DNA, 25 bp, Homo sapien
gctcacaactataatgatcacacta

SEQ ID NO: 3718817 - DNA, 25 bp, Homo sapien
tcttaagggcgggggagaatatatc

SEQ ID NO: 3718818 - DNA, 25 bp, Homo sapien
ggagaatatatcgtatcagttaggg

SEQ ID NO: 3718819 - DNA, 25 bp, Homo sapien
gcgggggagaatatatcgtatcagt

SEQ ID NO: 3718820 - DNA, 25 bp, Homo sapien
gaatatatcgtatcagttagggtgg

SEQ ID NO: 3718821 - DNA, 25 bp, Homo sapien
tgagggcgacaacagggcactggtc

SEQ ID NO: 3718822 - DNA, 25 bp, Homo sapien
agtgagggcgacaacagggcactgg

SEQ ID NO: 3718823 - DNA, 25 bp, Homo sapien
atgtcacatgcatccgtgtgaagaa

SEQ ID NO: 3718824 - DNA, 25 bp, Homo sapien
gtcacatgcatccgtgtgaagaaac

SEQ ID NO: 3718825 - DNA, 25 bp, Homo sapien
aaagaaggattcagaggactcggaa

SEQ ID NO: 3718826 - DNA, 25 bp, Homo sapien
ccatagtgaaggaggtaaacccgag

SEQ ID NO: 3718827 - DNA, 25 bp, Homo sapien
caggtgtccccgcaattgacttgtc

SEQ ID NO: 3718828 - DNA, 25 bp, Homo sapien
aaagagagggtagaggcacggagaa

SEQ ID NO: 3718829 - DNA, 25 bp, Homo sapien
tcttggcggtgcagatgggacaaac

SEQ ID NO: 3718830 - DNA, 25 bp, Homo sapien
tgtcagaacacccactcattccagg

SEQ ID NO: 3718831 - DNA, 25 bp, Homo sapien
tgaagtcaggatagtcagccatctc

SEQ ID NO: 3718832 - DNA, 25 bp, Homo sapien
gaatcaccatgcactgcgctgtggg

SEQ ID NO: 3718833 - DNA, 25 bp, Homo sapien
tgactttagtaactgggtgtccaga

SEQ ID NO: 3718834 - DNA, 25 bp, Homo sapien
ccgggagtggccgagcggttgcctg

SEQ ID NO: 3718835 - DNA, 25 bp, Homo sapien
aggagtgaccgggagtggccgagcg

SEQ ID NO: 3718836 - DNA, 25 bp, Homo sapien
tttagtaactgggtgtccagagagg

SEQ ID NO: 3718837 - DNA, 25 bp, Homo sapien
gcagtcattcaggatttcagggtcc

SEQ ID NO: 3718838 - DNA, 25 bp, Homo sapien
ggcttctgcgagtgaggtttcctca

SEQ ID NO: 3718839 - DNA, 25 bp, Homo sapien
gagtccctagcacttggctcctagc

SEQ ID NO: 3718840 - DNA, 25 bp, Homo sapien
tagcctgtgcgattctggtaaacac

SEQ ID NO: 3718841 - DNA, 25 bp, Homo sapien
ttatattagtatgaaaaacaaaaca

SEQ ID NO: 3718842 - DNA, 25 bp, Homo sapien
tagtggtgaagtgttgaggcagcga

SEQ ID NO: 3718843 - DNA, 25 bp, Homo sapien
acaaaatagtggtgaagtgttgagg

SEQ ID NO: 3718844 - DNA, 25 bp, Homo sapien
aatagtggtgaagtgttgaggcagc

SEQ ID NO: 3718845 - DNA, 25 bp, Homo sapien
tttgggataggtgtacaaagtacat

SEQ ID NO: 3718846 - DNA, 25 bp, Homo sapien
aagaatatatggtatcagttagcgt

SEQ ID NO: 3718847 - DNA, 25 bp, Homo sapien
tcaagggcgggggaagaatatatgg

SEQ ID NO: 3718848 - DNA, 25 bp, Homo sapien
cgggggaagaatatatggtatcagt

SEQ ID NO: 3718849 - DNA, 25 bp, Homo sapien
ggttttcctccgttcattgctagaa

SEQ ID NO: 3718850 - DNA, 25 bp, Homo sapien
tttcctccgttcattgctagaatgg

SEQ ID NO: 3718851 - DNA, 25 bp, Homo sapien
cattgctagaatggccttggggtcc

SEQ ID NO: 3718852 - DNA, 25 bp, Homo sapien
cttgaggttttcctccgttcattgc

SEQ ID NO: 3718853 - DNA, 25 bp, Homo sapien
tttagctcggactagtttgatcatc

SEQ ID NO: 3718854 - DNA, 25 bp, Homo sapien
ttagctcggactagtttgatcatct

SEQ ID NO: 3718855 - DNA, 25 bp, Homo sapien
gaacagcagatattggtgaacagca

SEQ ID NO: 3718856 - DNA, 25 bp, Homo sapien
cagatattggtgaacagcaaatgtt

SEQ ID NO: 3718857 - DNA, 25 bp, Homo sapien
aaaaaattctggctgcgcagagtcc

SEQ ID NO: 3718858 - DNA, 25 bp, Homo sapien
gaggcaaaactcatgggtagcagag

SEQ ID NO: 3718859 - DNA, 25 bp, Homo sapien
aaagaactattggtcacagagggta

SEQ ID NO: 3718860 - DNA, 25 bp, Homo sapien
gaagcatcctgccttcatcagttag

SEQ ID NO: 3718861 - DNA, 25 bp, Homo sapien
gtccagagcttgtgggtattgagtt

SEQ ID NO: 3718862 - DNA, 25 bp, Homo sapien
agatgctgaaatggtccagagcttg

SEQ ID NO: 3718863 - DNA, 25 bp, Homo sapien
gaaatggtccagagcttgtgggtat

SEQ ID NO: 3718864 - DNA, 25 bp, Homo sapien
gagcttgtgggtattgagtttcacc

SEQ ID NO: 3718865 - DNA, 25 bp, Homo sapien
agttctccagttgggggtctgtcag

SEQ ID NO: 3718866 - DNA, 25 bp, Homo sapien
tcccgttggctcttttggagttctc

SEQ ID NO: 3718867 - DNA, 25 bp, Homo sapien
gtctgtcagctgtcctgttgcttcc

SEQ ID NO: 3718868 - DNA, 25 bp, Homo sapien
cgttggctcttttggagttctccag

SEQ ID NO: 3718869 - DNA, 25 bp, Homo sapien
tattgagccctttcttattgagcca

SEQ ID NO: 3718870 - DNA, 25 bp, Homo sapien
catttgctccctctgttgtatgtgg

SEQ ID NO: 3718871 - DNA, 25 bp, Homo sapien
gagcgaaattgatgggccagctgtt

SEQ ID NO: 3718872 - DNA, 25 bp, Homo sapien
tttttatctgggtggtcaaatccca

SEQ ID NO: 3718873 - DNA, 25 bp, Homo sapien
tcacctttcttaaggtctccctgag

SEQ ID NO: 3718874 - DNA, 25 bp, Homo sapien
cttctactttagcatccgcatcacc

SEQ ID NO: 3718875 - DNA, 25 bp, Homo sapien
cacctttcttaaggtctccctgaga

SEQ ID NO: 3718876 - DNA, 25 bp, Homo sapien
aagcccaacttccttggtgtgtaag

SEQ ID NO: 3718877 - DNA, 25 bp, Homo sapien
taagcaagacggagaaatattctcc

SEQ ID NO: 3718878 - DNA, 25 bp, Homo sapien
cagtgccagtgggatggaattctca

SEQ ID NO: 3718879 - DNA, 25 bp, Homo sapien
cttggtgtgtaagcgatcccaaaca

SEQ ID NO: 3718880 - DNA, 25 bp, Homo sapien
agttggaggacacaggtgaaaagac

SEQ ID NO: 3718881 - DNA, 25 bp, Homo sapien
tggctgagttggaggacacaggtga

SEQ ID NO: 3718882 - DNA, 25 bp, Homo sapien
aaagacagatgtacacagaaggctt

SEQ ID NO: 3718883 - DNA, 25 bp, Homo sapien
caggtgaaaagacagatgtacacag

SEQ ID NO: 3718884 - DNA, 25 bp, Homo sapien
gacatcaggatttcgtgaaaagggc

SEQ ID NO: 3718885 - DNA, 25 bp, Homo sapien
ctacaatgctgacatcaggatttcg

SEQ ID NO: 3718886 - DNA, 25 bp, Homo sapien
tagaacttgctttgaactaccttcc

SEQ ID NO: 3718887 - DNA, 25 bp, Homo sapien
tcaagatcagattcaacacacggta

SEQ ID NO: 3718888 - DNA, 25 bp, Homo sapien
tctttttgaatccagacacttgaat

SEQ ID NO: 3718889 - DNA, 25 bp, Homo sapien
aaatgaacatgaccccctccagcag

SEQ ID NO: 3718890 - DNA, 25 bp, Homo sapien
cagtgtggctgtgtcagtatcggaa

SEQ ID NO: 3718891 - DNA, 25 bp, Homo sapien
ttgaatttggacagacaagcaaccc

SEQ ID NO: 3718892 - DNA, 25 bp, Homo sapien
agagcagcattaaaccaattttccc

SEQ ID NO: 3718893 - DNA, 25 bp, Homo sapien
tatagagcagcattaaaccaatttt

SEQ ID NO: 3718894 - DNA, 25 bp, Homo sapien
caatatagagcagcattaaaccaat

SEQ ID NO: 3718895 - DNA, 25 bp, Homo sapien
ccaatatagagcagcattaaaccaa

SEQ ID NO: 3718896 - DNA, 25 bp, Homo sapien
tgtacctggatgctcatagccactt

SEQ ID NO: 3718897 - DNA, 25 bp, Homo sapien
gacttagcaattgcactcttgggca

SEQ ID NO: 3718898 - DNA, 25 bp, Homo sapien
ttgtcatatgacttagcaattgcac

SEQ ID NO: 3718899 - DNA, 25 bp, Homo sapien
tcactcagaaatttgtacctggatg

SEQ ID NO: 3718900 - DNA, 25 bp, Homo sapien
accagtcatcaggaaattgttcacc

SEQ ID NO: 3718901 - DNA, 25 bp, Homo sapien
tttggaccagtcatcaggaaattgt

SEQ ID NO: 3718902 - DNA, 25 bp, Homo sapien
ctttggaccagtcatcaggaaattg

SEQ ID NO: 3718903 - DNA, 25 bp, Homo sapien
agtcatcaggaaattgttcaccgac

SEQ ID NO: 3718904 - DNA, 25 bp, Homo sapien
ctgccacactgctggagtaaatcag

SEQ ID NO: 3718905 - DNA, 25 bp, Homo sapien
actgcgaagcccaccatggctggac

SEQ ID NO: 3718906 - DNA, 25 bp, Homo sapien
cactgctggagtaaatcaggtaagc

SEQ ID NO: 3718907 - DNA, 25 bp, Homo sapien
gcattcttcaataccactctgggca

SEQ ID NO: 3718908 - DNA, 25 bp, Homo sapien
ccagggagctgtggctgaggttttt

SEQ ID NO: 3718909 - DNA, 25 bp, Homo sapien
agggagctgtggctgaggtttttct

SEQ ID NO: 3718910 - DNA, 25 bp, Homo sapien
gagctgtggctgaggtttttcttac

SEQ ID NO: 3718911 - DNA, 25 bp, Homo sapien
ctgtgaccagagggtccagggagct

SEQ ID NO: 3718912 - DNA, 25 bp, Homo sapien
aaggctgcagtttctagtcagggtg

SEQ ID NO: 3718913 - DNA, 25 bp, Homo sapien
gcagtttctagtcagggtgtacatg

SEQ ID NO: 3718914 - DNA, 25 bp, Homo sapien
gttatcaaaatctccaaggctgcag

SEQ ID NO: 3718915 - DNA, 25 bp, Homo sapien
tgcccgttgcgggagtcatcacagc

SEQ ID NO: 3718916 - DNA, 25 bp, Homo sapien
ttggaaatcgcctctccgaagccca

SEQ ID NO: 3718917 - DNA, 25 bp, Homo sapien
ctgtttccagggcatcgacaaactg

SEQ ID NO: 3718918 - DNA, 25 bp, Homo sapien
ccagggcatcgacaaactgcttgga

SEQ ID NO: 3718919 - DNA, 25 bp, Homo sapien
tgcttggaaatcgcctctccgaagc

SEQ ID NO: 3718920 - DNA, 25 bp, Homo sapien
tctgcgcggctacagaagtacttgg

SEQ ID NO: 3718921 - DNA, 25 bp, Homo sapien
tgcccagcagccctagcgttttgtt

SEQ ID NO: 3718922 - DNA, 25 bp, Homo sapien
caccttgagtgctgcgtggtacttc

SEQ ID NO: 3718923 - DNA, 25 bp, Homo sapien
ttttctcccgggtttgtgcgcagcg

SEQ ID NO: 3718924 - DNA, 25 bp, Homo sapien
taggaaagtcattgccccactagta

SEQ ID NO: 3718925 - DNA, 25 bp, Homo sapien
cagacagtgggcaaaagggcaaagc

SEQ ID NO: 3718926 - DNA, 25 bp, Homo sapien
gaagggttcttccagcgcctaaggc

SEQ ID NO: 3718927 - DNA, 25 bp, Homo sapien
gataccatagggatgagtagcaccc

SEQ ID NO: 3718928 - DNA, 25 bp, Homo sapien
gacgtatttagagtgctgacctgga

SEQ ID NO: 3718929 - DNA, 25 bp, Homo sapien
tgaaaggaagtgtatccccggtcag

SEQ ID NO: 3718930 - DNA, 25 bp, Homo sapien
cattgccttagtttggaatacggga

SEQ ID NO: 3718931 - DNA, 25 bp, Homo sapien
ttaaactccgtgatgcagcaatggt

SEQ ID NO: 3718932 - DNA, 25 bp, Homo sapien
gggatgaactgccttttgctggaag

SEQ ID NO: 3718933 - DNA, 25 bp, Homo sapien
tctgtgatgataaagcccagttctg

SEQ ID NO: 3718934 - DNA, 25 bp, Homo sapien
catctgccggcattattaagggtgg

SEQ ID NO: 3718935 - DNA, 25 bp, Homo sapien
tatgttggagccttagcccaaggcc

SEQ ID NO: 3718936 - DNA, 25 bp, Homo sapien
aaccaggcagcctctcttgctagga

SEQ ID NO: 3718937 - DNA, 25 bp, Homo sapien
tcatcatcgctcataagctgctggt

SEQ ID NO: 3718938 - DNA, 25 bp, Homo sapien
tgccaggtatgtgatgctgtaggct

SEQ ID NO: 3718939 - DNA, 25 bp, Homo sapien
ccccagggatcttctatttaagtgg

SEQ ID NO: 3718940 - DNA, 25 bp, Homo sapien
ccagccgaggccgtccggtgtcgct

SEQ ID NO: 3718941 - DNA, 25 bp, Homo sapien
cgtccggtgtcgctgcgtttgggct

SEQ ID NO: 3718942 - DNA, 25 bp, Homo sapien
gaggccgtccggtgtcgctgcgttt

SEQ ID NO: 3718943 - DNA, 25 bp, Homo sapien
cggtgtcgctgcgtttgggctgggc

SEQ ID NO: 3718944 - DNA, 25 bp, Homo sapien
tctactgtccctgccgcacgggaac

SEQ ID NO: 3718945 - DNA, 25 bp, Homo sapien
cttgaattggatccggctctactgt

SEQ ID NO: 3718946 - DNA, 25 bp, Homo sapien
gcgccttcccatccgccttggtcct

SEQ ID NO: 3718947 - DNA, 25 bp, Homo sapien
gaacccccagccggatgagggtctc

SEQ ID NO: 3718948 - DNA, 25 bp, Homo sapien
actgctcctttctcggcagagcgcg

SEQ ID NO: 3718949 - DNA, 25 bp, Homo sapien
gtagcagagattgcgctggggaccc

SEQ ID NO: 3718950 - DNA, 25 bp, Homo sapien
ctcctttctcggcagagcgcggagg

SEQ ID NO: 3718951 - DNA, 25 bp, Homo sapien
ccggcccgcgcctgccctgcccgcg

SEQ ID NO: 3718952 - DNA, 25 bp, Homo sapien
gggtcttccgcacaggttggttcgc

SEQ ID NO: 3718953 - DNA, 25 bp, Homo sapien
tctgtcagtgtctcgggctcggcgc

SEQ ID NO: 3718954 - DNA, 25 bp, Homo sapien
gctataatcctgtttggaaacgttc

SEQ ID NO: 3718955 - DNA, 25 bp, Homo sapien
cggagcgtgtttccgacggtgccct

SEQ ID NO: 3718956 - DNA, 25 bp, Homo sapien
cgctgcgcaatcacagggtaggtga

SEQ ID NO: 3718957 - DNA, 25 bp, Homo sapien
gcctggctcaaactgaatagaccag

SEQ ID NO: 3718958 - DNA, 25 bp, Homo sapien
tcccttttcagagactggccctaga

SEQ ID NO: 3718959 - DNA, 25 bp, Homo sapien
aacttactggtccagatctgacccg

SEQ ID NO: 3718960 - DNA, 25 bp, Homo sapien
gtgagacagagagggtatgctcgca

SEQ ID NO: 3718961 - DNA, 25 bp, Homo sapien
gggtgagacagagagggtatgctcg

SEQ ID NO: 3718962 - DNA, 25 bp, Homo sapien
gagacagagagggtatgctcgcacc

SEQ ID NO: 3718963 - DNA, 25 bp, Homo sapien
tggggtgagacagagagggtatgct

SEQ ID NO: 3718964 - DNA, 25 bp, Homo sapien
tttgaggctgcagggggcaatcaag

SEQ ID NO: 3718965 - DNA, 25 bp, Homo sapien
ctctgtggaagtgtttgaggctgca

SEQ ID NO: 3718966 - DNA, 25 bp, Homo sapien
aggctgcagggggcaatcaaggctt

SEQ ID NO: 3718967 - DNA, 25 bp, Homo sapien
ctgcagggggcaatcaaggctttca

SEQ ID NO: 3718968 - DNA, 25 bp, Homo sapien
tcaaacaatctatactgattataaa

SEQ ID NO: 3718969 - DNA, 25 bp, Homo sapien
ctgcgagagagagcggtccagagac

SEQ ID NO: 3718970 - DNA, 25 bp, Homo sapien
gcgagagagagcggtccagagacat

SEQ ID NO: 3718971 - DNA, 25 bp, Homo sapien
tgcgagagagagcggtccagagaca

SEQ ID NO: 3718972 - DNA, 25 bp, Homo sapien
tcgggaagctataactgcgcaactg

SEQ ID NO: 3718973 - DNA, 25 bp, Homo sapien
ctagtcgggaagctataactgcgca

SEQ ID NO: 3718974 - DNA, 25 bp, Homo sapien
taactgcgcaactgggattcatccc

SEQ ID NO: 3718975 - DNA, 25 bp, Homo sapien
gaagctataactgcgcaactgggat

SEQ ID NO: 3718976 - DNA, 25 bp, Homo sapien
tcgctctgactcagacgcggaatgg

SEQ ID NO: 3718977 - DNA, 25 bp, Homo sapien
cccgggggtcgctctgactcagacg

SEQ ID NO: 3718978 - DNA, 25 bp, Homo sapien
gggtcgctctgactcagacgcggaa

SEQ ID NO: 3718979 - DNA, 25 bp, Homo sapien
gctctgactcagacgcggaatgggc

SEQ ID NO: 3718980 - DNA, 25 bp, Homo sapien
gatttgtgtcggtcagcaccacagg

SEQ ID NO: 3718981 - DNA, 25 bp, Homo sapien
ttggacctcggcttaaagttctgga

SEQ ID NO: 3718982 - DNA, 25 bp, Homo sapien
tgctggcactgtacacagagaagtc

SEQ ID NO: 3718983 - DNA, 25 bp, Homo sapien
tattcaaggtcccatttcagggcag

SEQ ID NO: 3718984 - DNA, 25 bp, Homo sapien
tgggagaggccaatctctaattgac

SEQ ID NO: 3718985 - DNA, 25 bp, Homo sapien
ggctggaagaccagactactccttc

SEQ ID NO: 3718986 - DNA, 25 bp, Homo sapien
cacaccttcaaacaagtataggaaa

SEQ ID NO: 3718987 - DNA, 25 bp, Homo sapien
gaaaaatgagtgtcctaaatccaac

SEQ ID NO: 3718988 - DNA, 25 bp, Homo sapien
ccagagattcatagctcaagtttaa

SEQ ID NO: 3718989 - DNA, 25 bp, Homo sapien
gatttcacacagacgatattactcc

SEQ ID NO: 3718990 - DNA, 25 bp, Homo sapien
gaagaagatgggaacccagagattc

SEQ ID NO: 3718991 - DNA, 25 bp, Homo sapien
ggcaactaactctttatgaggaaga

SEQ ID NO: 3718992 - DNA, 25 bp, Homo sapien
aatcggaatatctcccaaccctaga

SEQ ID NO: 3718993 - DNA, 25 bp, Homo sapien
aaccctagaactgcactccaaaact

SEQ ID NO: 3718994 - DNA, 25 bp, Homo sapien
gaacttctcttgaaaatcggaatat

SEQ ID NO: 3718995 - DNA, 25 bp, Homo sapien
cactccaaaactgaagcaagcagag

SEQ ID NO: 3718996 - DNA, 25 bp, Homo sapien
gcttattaatccagttccagttaaa

SEQ ID NO: 3718997 - DNA, 25 bp, Homo sapien
taaaacctaagaagtccatgacaat

SEQ ID NO: 3718998 - DNA, 25 bp, Homo sapien
caatgagcagcaggttagaggtaag

SEQ ID NO: 3718999 - DNA, 25 bp, Homo sapien
ccagttaaaacctaagaagtccatg

SEQ ID NO: 3719000 - DNA, 25 bp, Homo sapien
catggagctaataagcggtgaagac

SEQ ID NO: 3719001 - DNA, 25 bp, Homo sapien
tcatatgactccaagccatgctgct

SEQ ID NO: 3719002 - DNA, 25 bp, Homo sapien
ggcatccagcccctattatgtttct

SEQ ID NO: 3719003 - DNA, 25 bp, Homo sapien
gaagtggcttgttcaaagtcatgga

SEQ ID NO: 3719004 - DNA, 25 bp, Homo sapien
gcacagtaatatgctaacaccatgt

SEQ ID NO: 3719005 - DNA, 25 bp, Homo sapien
cctaggcatatagaaggctacacaa

SEQ ID NO: 3719006 - DNA, 25 bp, Homo sapien
tgtagtacatggtttagtcagaggc

SEQ ID NO: 3719007 - DNA, 25 bp, Homo sapien
gaacgtatccctgacattaagcatc

SEQ ID NO: 3719008 - DNA, 25 bp, Homo sapien
tccggagggaataagatgcatcgtt

SEQ ID NO: 3719009 - DNA, 25 bp, Homo sapien
gcatcgtttgtaaccttttatctga

SEQ ID NO: 3719010 - DNA, 25 bp, Homo sapien
tatgggtagaggcactcgaactgat

SEQ ID NO: 3719011 - DNA, 25 bp, Homo sapien
tcacatgggtgatgaacagggtatg

SEQ ID NO: 3719012 - DNA, 25 bp, Homo sapien
agggaacctctcgtagtcgggattg

SEQ ID NO: 3719013 - DNA, 25 bp, Homo sapien
cgtagtcgggattgtcaaagtccac

SEQ ID NO: 3719014 - DNA, 25 bp, Homo sapien
ggatgtaaagaacatcaccagggcc

SEQ ID NO: 3719015 - DNA, 25 bp, Homo sapien
cactgtttcgtaaccaaccacattt

SEQ ID NO: 3719016 - DNA, 25 bp, Homo sapien
catttagtaatgactctatgtgatg

SEQ ID NO: 3719017 - DNA, 25 bp, Homo sapien
tggtaatccccccatttagtaatga

SEQ ID NO: 3719018 - DNA, 25 bp, Homo sapien
tagtaatgactctatgtgatgccac

SEQ ID NO: 3719019 - DNA, 25 bp, Homo sapien
cacagtgatggtaatccccccattt

SEQ ID NO: 3719020 - DNA, 25 bp, Homo sapien
atccaaaatcatttattatacctac

SEQ ID NO: 3719021 - DNA, 25 bp, Homo sapien
catccaaaatcatttattataccta

SEQ ID NO: 3719022 - DNA, 25 bp, Homo sapien
tctcattatggccactttctgatga

SEQ ID NO: 3719023 - DNA, 25 bp, Homo sapien
aggatattcaattctcttaggggtg

SEQ ID NO: 3719024 - DNA, 25 bp, Homo sapien
ggatattcaattctcttaggggtgg

SEQ ID NO: 3719025 - DNA, 25 bp, Homo sapien
tcattatggccactttctgatgagc

SEQ ID NO: 3719026 - DNA, 25 bp, Homo sapien
gagccaccttggggcagtcacctac

SEQ ID NO: 3719027 - DNA, 25 bp, Homo sapien
actgagccaccttggggcagtcacc

SEQ ID NO: 3719028 - DNA, 25 bp, Homo sapien
tgagccaccttggggcagtcaccta

SEQ ID NO: 3719029 - DNA, 25 bp, Homo sapien
ctgagccaccttggggcagtcacct

SEQ ID NO: 3719030 - DNA, 25 bp, Homo sapien
tcggcccttgatcattgtgttcaac

SEQ ID NO: 3719031 - DNA, 25 bp, Homo sapien
tatcggcccttgatcattgtgttca

SEQ ID NO: 3719032 - DNA, 25 bp, Homo sapien
ctagttgtatcggcccttgatcatt

SEQ ID NO: 3719033 - DNA, 25 bp, Homo sapien
gttgtatcggcccttgatcattgtg

SEQ ID NO: 3719034 - DNA, 25 bp, Homo sapien
tgaataagggaaactgcaggcagct

SEQ ID NO: 3719035 - DNA, 25 bp, Homo sapien
cactgaatgcaggactttaggcggg

SEQ ID NO: 3719036 - DNA, 25 bp, Homo sapien
cacaagaggcaagggtatgaagtcc

SEQ ID NO: 3719037 - DNA, 25 bp, Homo sapien
taatcttgtccacacagggtgcacg

SEQ ID NO: 3719038 - DNA, 25 bp, Homo sapien
acaggcgtgaggtaatcctcccagg

SEQ ID NO: 3719039 - DNA, 25 bp, Homo sapien
ctatgctgcccaaggttggttcgaa

SEQ ID NO: 3719040 - DNA, 25 bp, Homo sapien
ttaaatacatggaaaggcatggact

SEQ ID NO: 3719041 - DNA, 25 bp, Homo sapien
ctggccaacacttatataatttaaa

SEQ ID NO: 3719042 - DNA, 25 bp, Homo sapien
cgaagcatagcgagatgaacacccc

SEQ ID NO: 3719043 - DNA, 25 bp, Homo sapien
caaacccttgtgagaacaatgacca

SEQ ID NO: 3719044 - DNA, 25 bp, Homo sapien
tgctatttcctacccctcacagagg

SEQ ID NO: 3719045 - DNA, 25 bp, Homo sapien
ggaatcagatggcaacccagaacca

SEQ ID NO: 3719046 - DNA, 25 bp, Homo sapien
tacaaactgcatagatccttacagc

SEQ ID NO: 3719047 - DNA, 25 bp, Homo sapien
gatgactgagattgcagaacaacca

SEQ ID NO: 3719048 - DNA, 25 bp, Homo sapien
taccaaggaaacacctgatgccact

SEQ ID NO: 3719049 - DNA, 25 bp, Homo sapien
ttggttgggccactgactagactgt

SEQ ID NO: 3719050 - DNA, 25 bp, Homo sapien
aaccatgtctgtggccgactggact

SEQ ID NO: 3719051 - DNA, 25 bp, Homo sapien
ttacatttagaacccactctctgag

SEQ ID NO: 3719052 - DNA, 25 bp, Homo sapien
actagcggtggccatcttttaacgg

SEQ ID NO: 3719053 - DNA, 25 bp, Homo sapien
taacggctgctagttacgtggtact

SEQ ID NO: 3719054 - DNA, 25 bp, Homo sapien
tggaactcagctccttcaagtgtct

SEQ ID NO: 3719055 - DNA, 25 bp, Homo sapien
cagctccttcaagtgtctgctctct

SEQ ID NO: 3719056 - DNA, 25 bp, Homo sapien
agaagccaacctcaacctttactct

SEQ ID NO: 3719057 - DNA, 25 bp, Homo sapien
acctgggtccaggttgaaccccatg

SEQ ID NO: 3719058 - DNA, 25 bp, Homo sapien
tcagaggtataaccccaggtccttg

SEQ ID NO: 3719059 - DNA, 25 bp, Homo sapien
catcatcttgctgcagtgtaagtgg

SEQ ID NO: 3719060 - DNA, 25 bp, Homo sapien
gtttcgtgttctcggaaagcacgta

SEQ ID NO: 3719061 - DNA, 25 bp, Homo sapien
ggaaagcacgtaactctcatcatct

SEQ ID NO: 3719062 - DNA, 25 bp, Homo sapien
atcaaagagtcatcggtccctcggg

SEQ ID NO: 3719063 - DNA, 25 bp, Homo sapien
ggctcactggcttaagtgacaccat

SEQ ID NO: 3719064 - DNA, 25 bp, Homo sapien
ctggctcactggcttaagtgacacc

SEQ ID NO: 3719065 - DNA, 25 bp, Homo sapien
tggctcactggcttaagtgacacca

SEQ ID NO: 3719066 - DNA, 25 bp, Homo sapien
cgcagctgcccggaggacagataca

SEQ ID NO: 3719067 - DNA, 25 bp, Homo sapien
agctgcccggaggacagatacacgg

SEQ ID NO: 3719068 - DNA, 25 bp, Homo sapien
gggtgcgcagctgcccggaggacag

SEQ ID NO: 3719069 - DNA, 25 bp, Homo sapien
ctgcccggaggacagatacacggag

SEQ ID NO: 3719070 - DNA, 25 bp, Homo sapien
gacaggatataacagggcagcgaga

SEQ ID NO: 3719071 - DNA, 25 bp, Homo sapien
acagggcagcgagaaatggcttcag

SEQ ID NO: 3719072 - DNA, 25 bp, Homo sapien
tgtgcttcgggtgacaggatataac

SEQ ID NO: 3719073 - DNA, 25 bp, Homo sapien
actctggacaggaggtgtgcttcgg

SEQ ID NO: 3719074 - DNA, 25 bp, Homo sapien
taaaactgtgcttaacacactcgga

SEQ ID NO: 3719075 - DNA, 25 bp, Homo sapien
tttgaatcagatagcagaatggaat

SEQ ID NO: 3719076 - DNA, 25 bp, Homo sapien
cacactcggatgagttatgaggact

SEQ ID NO: 3719077 - DNA, 25 bp, Homo sapien
tgttctgcagggtattaaaatgtgg

SEQ ID NO: 3719078 - DNA, 25 bp, Homo sapien
caaaacgcataaagaaagtgattaa

SEQ ID NO: 3719079 - DNA, 25 bp, Homo sapien
taaaattggaattatcgctgccacc

SEQ ID NO: 3719080 - DNA, 25 bp, Homo sapien
gacttctcaccacattccaaataaa

SEQ ID NO: 3719081 - DNA, 25 bp, Homo sapien
ccctgatcgctggaacaaaacgcat

SEQ ID NO: 3719082 - DNA, 25 bp, Homo sapien
catgcaccgtgggttcaggtagcta

SEQ ID NO: 3719083 - DNA, 25 bp, Homo sapien
agagctcatgcaccgtgggttcagg

SEQ ID NO: 3719084 - DNA, 25 bp, Homo sapien
tctcagagagctcatgcaccgtggg

SEQ ID NO: 3719085 - DNA, 25 bp, Homo sapien
caggtagctagggaaggctttctgg

SEQ ID NO: 3719086 - DNA, 25 bp, Homo sapien
atgggaagaggccaggacttcacca

SEQ ID NO: 3719087 - DNA, 25 bp, Homo sapien
gggaagaggccaggacttcaccagc

SEQ ID NO: 3719088 - DNA, 25 bp, Homo sapien
ggaagaggccaggacttcaccagct

SEQ ID NO: 3719089 - DNA, 25 bp, Homo sapien
gagatgggaagaggccaggacttca

SEQ ID NO: 3719090 - DNA, 25 bp, Homo sapien
tgcagccaagttcaggatatagaga

SEQ ID NO: 3719091 - DNA, 25 bp, Homo sapien
gcagccaagttcaggatatagagag

SEQ ID NO: 3719092 - DNA, 25 bp, Homo sapien
agcacttgggctggtggtgccgagg

SEQ ID NO: 3719093 - DNA, 25 bp, Homo sapien
caagcacttgggctggtggtgccga

SEQ ID NO: 3719094 - DNA, 25 bp, Homo sapien
cttggtcatactccaagcacttggg

SEQ ID NO: 3719095 - DNA, 25 bp, Homo sapien
caggaccctgggatagaggatgtgg

SEQ ID NO: 3719096 - DNA, 25 bp, Homo sapien
tccactttagccttgggtcctggac

SEQ ID NO: 3719097 - DNA, 25 bp, Homo sapien
ctctggattcgtgccccaagaggcc

SEQ ID NO: 3719098 - DNA, 25 bp, Homo sapien
gcaggaggtaccctcagcctctgga

SEQ ID NO: 3719099 - DNA, 25 bp, Homo sapien
ccccgttttgtgtgggagtacgcat

SEQ ID NO: 3719100 - DNA, 25 bp, Homo sapien
ctgggccttcttcacgcctgaaggc

SEQ ID NO: 3719101 - DNA, 25 bp, Homo sapien
ctcgggaccctggacaaaagtgaag

SEQ ID NO: 3719102 - DNA, 25 bp, Homo sapien
ccttcttcacgcctgaaggcagtga

SEQ ID NO: 3719103 - DNA, 25 bp, Homo sapien
cccggggctgttgatgcctgggcct

SEQ ID NO: 3719104 - DNA, 25 bp, Homo sapien
ccaggtcccaggacagagccagtac

SEQ ID NO: 3719105 - DNA, 25 bp, Homo sapien
ggaagcagaaaccaggtcccaggac

SEQ ID NO: 3719106 - DNA, 25 bp, Homo sapien
aaaccaggtcccaggacagagccag

SEQ ID NO: 3719107 - DNA, 25 bp, Homo sapien
ctggaagcagaaaccaggtcccagg

SEQ ID NO: 3719108 - DNA, 25 bp, Homo sapien
agctgagtttgaaatcgatccaggt

SEQ ID NO: 3719109 - DNA, 25 bp, Homo sapien
gctgagtttgaaatcgatccaggtc

SEQ ID NO: 3719110 - DNA, 25 bp, Homo sapien
ggccactgtcgggatgaagctaaaa

SEQ ID NO: 3719111 - DNA, 25 bp, Homo sapien
cactgtcgggatgaagctaaaacgg

SEQ ID NO: 3719112 - DNA, 25 bp, Homo sapien
tcaggccactgtcgggatgaagcta

SEQ ID NO: 3719113 - DNA, 25 bp, Homo sapien
ctgtcgggatgaagctaaaacggga

SEQ ID NO: 3719114 - DNA, 25 bp, Homo sapien
cttcctggatacaaacgacccggtg

SEQ ID NO: 3719115 - DNA, 25 bp, Homo sapien
gctcagcgggcccatcttcctggat

SEQ ID NO: 3719116 - DNA, 25 bp, Homo sapien
cggtgtttagctgcgaggactgcct

SEQ ID NO: 3719117 - DNA, 25 bp, Homo sapien
aaacgacccggtgtttagctgcgag

SEQ ID NO: 3719118 - DNA, 25 bp, Homo sapien
acacctggaactttgatgtaacttc

SEQ ID NO: 3719119 - DNA, 25 bp, Homo sapien
tgtggaggaggtgagagtttgggca

SEQ ID NO: 3719120 - DNA, 25 bp, Homo sapien
tgagagtttgggcagtaggtccaca

SEQ ID NO: 3719121 - DNA, 25 bp, Homo sapien
ttgatgtaacttcctgagaggtccc

SEQ ID NO: 3719122 - DNA, 25 bp, Homo sapien
agcgatgtgacttattggttctgtc

SEQ ID NO: 3719123 - DNA, 25 bp, Homo sapien
tattgtagcgatgtgacttattggt

SEQ ID NO: 3719124 - DNA, 25 bp, Homo sapien
ggcattattgtagcgatgtgactta

SEQ ID NO: 3719125 - DNA, 25 bp, Homo sapien
tgagggcattattgtagcgatgtga

SEQ ID NO: 3719126 - DNA, 25 bp, Homo sapien
ggctggggcagagttcccagacttg

SEQ ID NO: 3719127 - DNA, 25 bp, Homo sapien
gggagcgaggaccaggctggggcag

SEQ ID NO: 3719128 - DNA, 25 bp, Homo sapien
ggagcgaggaccaggctggggcaga

SEQ ID NO: 3719129 - DNA, 25 bp, Homo sapien
tggccgtgcgctcggaacttgtact

SEQ ID NO: 3719130 - DNA, 25 bp, Homo sapien
tatgcaccattaagcactcagcagc

SEQ ID NO: 3719131 - DNA, 25 bp, Homo sapien
catgcctcgacaacatgggaaccgg

SEQ ID NO: 3719132 - DNA, 25 bp, Homo sapien
gagagcctcggcttaatcttatgca

SEQ ID NO: 3719133 - DNA, 25 bp, Homo sapien
cagtcccgccggggtgggccagtcg

SEQ ID NO: 3719134 - DNA, 25 bp, Homo sapien
tgggtttccgggaggcgcaggccgc

SEQ ID NO: 3719135 - DNA, 25 bp, Homo sapien
cttccacccgggctatctgcctggg

SEQ ID NO: 3719136 - DNA, 25 bp, Homo sapien
cgcttccacccgggctatctgcctg

SEQ ID NO: 3719137 - DNA, 25 bp, Homo sapien
ctgggtttccgggaggcgcaggccg

SEQ ID NO: 3719138 - DNA, 25 bp, Homo sapien
ttttcgcgcagaatttttccactgg

SEQ ID NO: 3719139 - DNA, 25 bp, Homo sapien
ataatttatgactgcctctggtcct

SEQ ID NO: 3719140 - DNA, 25 bp, Homo sapien
ctcgcacgcgctcccatataattta

SEQ ID NO: 3719141 - DNA, 25 bp, Homo sapien
tgatttccctcttgtggcgcgctct

SEQ ID NO: 3719142 - DNA, 25 bp, Homo sapien
ccactgccctggggatcggtggacc

SEQ ID NO: 3719143 - DNA, 25 bp, Homo sapien
tgccctggggatcggtggacctcgg

SEQ ID NO: 3719144 - DNA, 25 bp, Homo sapien
actgccctggggatcggtggacctc

SEQ ID NO: 3719145 - DNA, 25 bp, Homo sapien
ctggggatcggtggacctcggcccg

SEQ ID NO: 3719146 - DNA, 25 bp, Homo sapien
tgtgcaaaaaacaacttctatttgg

SEQ ID NO: 3719147 - DNA, 25 bp, Homo sapien
ccaagcagcaaatatgccggatgat

SEQ ID NO: 3719148 - DNA, 25 bp, Homo sapien
tctatttggctagccaagcagcaaa

SEQ ID NO: 3719149 - DNA, 25 bp, Homo sapien
tgccggatgatacgctttattaagc

SEQ ID NO: 3719150 - DNA, 25 bp, Homo sapien
cgtcaccgccgaaatcgccgaaatt

SEQ ID NO: 3719151 - DNA, 25 bp, Homo sapien
ggctgcaactagtaaagatgccagg

SEQ ID NO: 3719152 - DNA, 25 bp, Homo sapien
gccgaaattggctgcaactagtaaa

SEQ ID NO: 3719153 - DNA, 25 bp, Homo sapien
tgagaatccccgtcaccgccgaaat

SEQ ID NO: 3719154 - DNA, 25 bp, Homo sapien
gcgctctctggggccgacaggcggg

SEQ ID NO: 3719155 - DNA, 25 bp, Homo sapien
ctgcgctctctggggccgacaggcg

SEQ ID NO: 3719156 - DNA, 25 bp, Homo sapien
tgcgctctctggggccgacaggcgg

SEQ ID NO: 3719157 - DNA, 25 bp, Homo sapien
ggccgcccataatgagatgcataat

SEQ ID NO: 3719158 - DNA, 25 bp, Homo sapien
taatgagatgcataattgcggaggc

SEQ ID NO: 3719159 - DNA, 25 bp, Homo sapien
tgggcggccgcccataatgagatgc

SEQ ID NO: 3719160 - DNA, 25 bp, Homo sapien
tcccaggatgcatttgggcggccgc

SEQ ID NO: 3719161 - DNA, 25 bp, Homo sapien
ctatagtgggctccagtcgatggtg

SEQ ID NO: 3719162 - DNA, 25 bp, Homo sapien
tcgatggtgccatgtggaatcttgg

SEQ ID NO: 3719163 - DNA, 25 bp, Homo sapien
tgggctttggtggttctgccccagc

SEQ ID NO: 3719164 - DNA, 25 bp, Homo sapien
gctccagtcgatggtgccatgtgga

SEQ ID NO: 3719165 - DNA, 25 bp, Homo sapien
tgtggccatagagcacccccagtgg

SEQ ID NO: 3719166 - DNA, 25 bp, Homo sapien
tggccatagagcacccccagtgggg

SEQ ID NO: 3719167 - DNA, 25 bp, Homo sapien
gtggccatagagcacccccagtggg

SEQ ID NO: 3719168 - DNA, 25 bp, Homo sapien
acgtcggcgtgtcgggcacggcgca

SEQ ID NO: 3719169 - DNA, 25 bp, Homo sapien
gggtctcgtggctctctcgggcgcc

SEQ ID NO: 3719170 - DNA, 25 bp, Homo sapien
aggcggcgggtctcgtggctctctc

SEQ ID NO: 3719171 - DNA, 25 bp, Homo sapien
ctggtggacgtcggcgtgtcgggca

SEQ ID NO: 3719172 - DNA, 25 bp, Homo sapien
gcctcgggtgggtccgcgcccgcag

SEQ ID NO: 3719173 - DNA, 25 bp, Homo sapien
gccagcccatcctccggacccgcag

SEQ ID NO: 3719174 - DNA, 25 bp, Homo sapien
ggtccgcgcccgcaggtgcgaggaa

SEQ ID NO: 3719175 - DNA, 25 bp, Homo sapien
tccggacccgcagaccgaggctcgg

SEQ ID NO: 3719176 - DNA, 25 bp, Homo sapien
aaggcaagggtagcctggtagtctc

SEQ ID NO: 3719177 - DNA, 25 bp, Homo sapien
agggtagcctggtagtctcaatctc

SEQ ID NO: 3719178 - DNA, 25 bp, Homo sapien
ctcctcaacagtgaactccgggaag

SEQ ID NO: 3719179 - DNA, 25 bp, Homo sapien
caacagtgaactccgggaaggcaag

SEQ ID NO: 3719180 - DNA, 25 bp, Homo sapien
gacttcctctatttgaatgtttctg

SEQ ID NO: 3719181 - DNA, 25 bp, Homo sapien
ccggctgccggtctttccaagagcg

SEQ ID NO: 3719182 - DNA, 25 bp, Homo sapien
tttctgagagtcagtgcagagggct

SEQ ID NO: 3719183 - DNA, 25 bp, Homo sapien
ggtctttccaagagcgacttcctct

SEQ ID NO: 3719184 - DNA, 25 bp, Homo sapien
gagtaattgtctccgccagacgcag

SEQ ID NO: 3719185 - DNA, 25 bp, Homo sapien
aaggccagccggagcgtatccgagt

SEQ ID NO: 3719186 - DNA, 25 bp, Homo sapien
caggcggctcggaaaatcccggatt

SEQ ID NO: 3719187 - DNA, 25 bp, Homo sapien
cgaagcaggcggctcggaaaatccc

SEQ ID NO: 3719188 - DNA, 25 bp, Homo sapien
tgaaaaataatgctggggcatgagg

SEQ ID NO: 3719189 - DNA, 25 bp, Homo sapien
ttgataaatccatcagcctttttct

SEQ ID NO: 3719190 - DNA, 25 bp, Homo sapien
cacaggtaggtgacaacaggtgggg

SEQ ID NO: 3719191 - DNA, 25 bp, Homo sapien
ctgaaaaataatgctggggcatgag

SEQ ID NO: 3719192 - DNA, 25 bp, Homo sapien
cacttcctctgcttggggcccgctc

SEQ ID NO: 3719193 - DNA, 25 bp, Homo sapien
ccacttcctctgcttggggcccgct

SEQ ID NO: 3719194 - DNA, 25 bp, Homo sapien
gcctttgagtaagctcagagtccag

SEQ ID NO: 3719195 - DNA, 25 bp, Homo sapien
cggcctttgagtaagctcagagtcc

SEQ ID NO: 3719196 - DNA, 25 bp, Homo sapien
ggcctttgagtaagctcagagtcca

SEQ ID NO: 3719197 - DNA, 25 bp, Homo sapien
ctcagagtccagtcagggagatgaa

SEQ ID NO: 3719198 - DNA, 25 bp, Homo sapien
tggagaaatccgtcttcgtcaccgc

SEQ ID NO: 3719199 - DNA, 25 bp, Homo sapien
gaaaatggaattgccagcctggaat

SEQ ID NO: 3719200 - DNA, 25 bp, Homo sapien
ccaagtgagtggacgagagatacaa

SEQ ID NO: 3719201 - DNA, 25 bp, Homo sapien
tgggattaatgcgactgaaggctcc

SEQ ID NO: 3719202 - DNA, 25 bp, Homo sapien
cacttaatgattttgacgggcccca

SEQ ID NO: 3719203 - DNA, 25 bp, Homo sapien
gcctttagagcaacctcggccatca

SEQ ID NO: 3719204 - DNA, 25 bp, Homo sapien
aattggctctcgacagccacttgga

SEQ ID NO: 3719205 - DNA, 25 bp, Homo sapien
ggtcccatctgaagtctgccggctc

SEQ ID NO: 3719206 - DNA, 25 bp, Homo sapien
tcaggcgcaggattgttcccgacac

SEQ ID NO: 3719207 - DNA, 25 bp, Homo sapien
ttctgtgtcagggagttttgcaggc

SEQ ID NO: 3719208 - DNA, 25 bp, Homo sapien
ggccaagagtgaccagcgcggccgg

SEQ ID NO: 3719209 - DNA, 25 bp, Homo sapien
tttgcaggcgccgtgacccatacga

SEQ ID NO: 3719210 - DNA, 25 bp, Homo sapien
ccaggctggcccgcacccgtcgggc

SEQ ID NO: 3719211 - DNA, 25 bp, Homo sapien
aggctggcccgcacccgtcgggcct

SEQ ID NO: 3719212 - DNA, 25 bp, Homo sapien
tggcccgcacccgtcgggcctgcgg

SEQ ID NO: 3719213 - DNA, 25 bp, Homo sapien
gcccgcacccgtcgggcctgcggac

SEQ ID NO: 3719214 - DNA, 25 bp, Homo sapien
caggtgagggggatagtgttaaacg

SEQ ID NO: 3719215 - DNA, 25 bp, Homo sapien
gcaggtgagggggatagtgttaaac

SEQ ID NO: 3719216 - DNA, 25 bp, Homo sapien
ccgccagtgcccctgcgtgtacccc

SEQ ID NO: 3719217 - DNA, 25 bp, Homo sapien
gacctggcggggaatttgcctcagc

SEQ ID NO: 3719218 - DNA, 25 bp, Homo sapien
agcgcaattctgagtgccgtcgccc

SEQ ID NO: 3719219 - DNA, 25 bp, Homo sapien
tatccgggcactcgatgctcctgtc

SEQ ID NO: 3719220 - DNA, 25 bp, Homo sapien
caggaggcagatacgagatgaattc

SEQ ID NO: 3719221 - DNA, 25 bp, Homo sapien
cgttaaccccaatggcggagcctcg

SEQ ID NO: 3719222 - DNA, 25 bp, Homo sapien
aacttttataatcctcctcaatgaa

SEQ ID NO: 3719223 - DNA, 25 bp, Homo sapien
gctctgccgtccttgtgaatattgt

SEQ ID NO: 3719224 - DNA, 25 bp, Homo sapien
agctaggagcctgcttaaatgactt

SEQ ID NO: 3719225 - DNA, 25 bp, Homo sapien
tctggagactgttgccaagcaggag

SEQ ID NO: 3719226 - DNA, 25 bp, Homo sapien
caggcactatttgcatatgttctca

SEQ ID NO: 3719227 - DNA, 25 bp, Homo sapien
aagaaacaacctaactgggcagatg

SEQ ID NO: 3719228 - DNA, 25 bp, Homo sapien
gaaaaagtaacgcagccagaaccgc

SEQ ID NO: 3719229 - DNA, 25 bp, Homo sapien
aaggttcacggctcgttcttgggca

SEQ ID NO: 3719230 - DNA, 25 bp, Homo sapien
cattgggcgcctgggactttcagcc

SEQ ID NO: 3719231 - DNA, 25 bp, Homo sapien
ggaaaactcccttcttgcggatcta

SEQ ID NO: 3719232 - DNA, 25 bp, Homo sapien
cgccgtcgcgaaggacactgtttga

SEQ ID NO: 3719233 - DNA, 25 bp, Homo sapien
ttggtcacggcttcctgagcaggca

SEQ ID NO: 3719234 - DNA, 25 bp, Homo sapien
ccgcgcgtagactcaagccgagcat

SEQ ID NO: 3719235 - DNA, 25 bp, Homo sapien
tgtttgaggcgacagaggcatcttc

SEQ ID NO: 3719236 - DNA, 25 bp, Homo sapien
tgtgtgcacgtgtaagctcgccagt

SEQ ID NO: 3719237 - DNA, 25 bp, Homo sapien
ttaatagggaccaggagaccaacgc

SEQ ID NO: 3719238 - DNA, 25 bp, Homo sapien
tgtttaatccgtcacgccaggctgg

SEQ ID NO: 3719239 - DNA, 25 bp, Homo sapien
caagggtctaatgtcacagcgaggc

SEQ ID NO: 3719240 - DNA, 25 bp, Homo sapien
cattttcacgtgtgctaaattggtt

SEQ ID NO: 3719241 - DNA, 25 bp, Homo sapien
tcacgtgtgctaaattggttttaaa

SEQ ID NO: 3719242 - DNA, 25 bp, Homo sapien
gttattgtcttgtcagaccctgagg

SEQ ID NO: 3719243 - DNA, 25 bp, Homo sapien
ctgttgttattgtcttgtcagaccc

SEQ ID NO: 3719244 - DNA, 25 bp, Homo sapien
catacagcgggaagcacccactggg

SEQ ID NO: 3719245 - DNA, 25 bp, Homo sapien
cagacacatacagcgggaagcaccc

SEQ ID NO: 3719246 - DNA, 25 bp, Homo sapien
tgctcctgagcccattggtcacagt

SEQ ID NO: 3719247 - DNA, 25 bp, Homo sapien
tcctgagcccattggtcacagttac

SEQ ID NO: 3719248 - DNA, 25 bp, Homo sapien
ttgcttctgttctgtcagagacttg

SEQ ID NO: 3719249 - DNA, 25 bp, Homo sapien
ctgttctgtcagagacttgaactga

SEQ ID NO: 3719250 - DNA, 25 bp, Homo sapien
ctgtcagagacttgaactgaggccc

SEQ ID NO: 3719251 - DNA, 25 bp, Homo sapien
gttctgtcagagacttgaactgagg

SEQ ID NO: 3719252 - DNA, 25 bp, Homo sapien
ggacccgcgcgctcttccatgctag

SEQ ID NO: 3719253 - DNA, 25 bp, Homo sapien
gacaacgcgtctcgccttcgccgcc

SEQ ID NO: 3719254 - DNA, 25 bp, Homo sapien
ctccgcggcccgacaacgcgtctcg

SEQ ID NO: 3719255 - DNA, 25 bp, Homo sapien
tccatgctaggctccccgcggccgc

SEQ ID NO: 3719256 - DNA, 25 bp, Homo sapien
cagggcacctaaagggcagtccaga

SEQ ID NO: 3719257 - DNA, 25 bp, Homo sapien
cgctgtacaacaccagggcacctaa

SEQ ID NO: 3719258 - DNA, 25 bp, Homo sapien
ggcacctaaagggcagtccagagct

SEQ ID NO: 3719259 - DNA, 25 bp, Homo sapien
ctgtacaacaccagggcacctaaag

SEQ ID NO: 3719260 - DNA, 25 bp, Homo sapien
tccacagtcatcgccgccgcgaccg

SEQ ID NO: 3719261 - DNA, 25 bp, Homo sapien
ctccacagtcatcgccgccgcgacc

SEQ ID NO: 3719262 - DNA, 25 bp, Homo sapien
cacagtcatcgccgccgcgaccgtg

SEQ ID NO: 3719263 - DNA, 25 bp, Homo sapien
ccacagtcatcgccgccgcgaccgt

SEQ ID NO: 3719264 - DNA, 25 bp, Homo sapien
cctaggccgggcgagagagtcggag

SEQ ID NO: 3719265 - DNA, 25 bp, Homo sapien
tcgctggcgaagtaatgattaactc

SEQ ID NO: 3719266 - DNA, 25 bp, Homo sapien
tgattaactctcttagcagccggcc

SEQ ID NO: 3719267 - DNA, 25 bp, Homo sapien
tcatcgggctgtggtcgagggagac

SEQ ID NO: 3719268 - DNA, 25 bp, Homo sapien
ccgccaaaaccgtcgggaggagctg

SEQ ID NO: 3719269 - DNA, 25 bp, Homo sapien
ctcttcagccagtccgccaaaaccg

SEQ ID NO: 3719270 - DNA, 25 bp, Homo sapien
cagccagtccgccaaaaccgtcggg

SEQ ID NO: 3719271 - DNA, 25 bp, Homo sapien
ttcagccagtccgccaaaaccgtcg

SEQ ID NO: 3719272 - DNA, 25 bp, Homo sapien
tgaggagcaacaacaatgcaagcca

SEQ ID NO: 3719273 - DNA, 25 bp, Homo sapien
ttgaggagcaacaacaatgcaagcc

SEQ ID NO: 3719274 - DNA, 25 bp, Homo sapien
ctttgaggagcaacaacaatgcaag

SEQ ID NO: 3719275 - DNA, 25 bp, Homo sapien
tttgaggagcaacaacaatgcaagc

SEQ ID NO: 3719276 - DNA, 25 bp, Homo sapien
caagaggtctttgcgacctgcccag

SEQ ID NO: 3719277 - DNA, 25 bp, Homo sapien
caatatttgggctccctgcgtgaag

SEQ ID NO: 3719278 - DNA, 25 bp, Homo sapien
ttaatctagcttcccctcacaagag

SEQ ID NO: 3719279 - DNA, 25 bp, Homo sapien
tgggctgcaatttcacactccacag

SEQ ID NO: 3719280 - DNA, 25 bp, Homo sapien
caagccaagccaagcgcgactccag

SEQ ID NO: 3719281 - DNA, 25 bp, Homo sapien
aagccaagcgcgactccagggctct

SEQ ID NO: 3719282 - DNA, 25 bp, Homo sapien
gccaagccaagcgcgactccagggc

SEQ ID NO: 3719283 - DNA, 25 bp, Homo sapien
gccaagcgcgactccagggctctca

SEQ ID NO: 3719284 - DNA, 25 bp, Homo sapien
ccaggccggctcctggccgcttccc

SEQ ID NO: 3719285 - DNA, 25 bp, Homo sapien
gccaggccggctcctggccgcttcc

SEQ ID NO: 3719286 - DNA, 25 bp, Homo sapien
tcttccgccaggccggctcctggcc

SEQ ID NO: 3719287 - DNA, 25 bp, Homo sapien
ctgcaggtcgctggcggcagaggat

SEQ ID NO: 3719288 - DNA, 25 bp, Homo sapien
gacccagcggatggcgggagagccg

SEQ ID NO: 3719289 - DNA, 25 bp, Homo sapien
ctgcctcggtgggacccagcggatg

SEQ ID NO: 3719290 - DNA, 25 bp, Homo sapien
gctgcaggtcgctggcggcagagga

SEQ ID NO: 3719291 - DNA, 25 bp, Homo sapien
tctccaagtgctggcgagttggcga

SEQ ID NO: 3719292 - DNA, 25 bp, Homo sapien
cccaggtgggttgcggctgcgagaa

SEQ ID NO: 3719293 - DNA, 25 bp, Homo sapien
tggaacctggtcatccgagaggcgg

SEQ ID NO: 3719294 - DNA, 25 bp, Homo sapien
ctgcgagaagactcggccggagact

SEQ ID NO: 3719295 - DNA, 25 bp, Homo sapien
gtagccgcaacttgccactgtcggg

SEQ ID NO: 3719296 - DNA, 25 bp, Homo sapien
aggatgagtgaacgcccggctgctg

SEQ ID NO: 3719297 - DNA, 25 bp, Homo sapien
ctcctccgggttggccggagcttgc

SEQ ID NO: 3719298 - DNA, 25 bp, Homo sapien
gcttgcaactgcagtagccgcaact

SEQ ID NO: 3719299 - DNA, 25 bp, Homo sapien
ccgtgtcgcctctcaaactcaactt

SEQ ID NO: 3719300 - DNA, 25 bp, Homo sapien
cgccgccgccgtgtcgcctctcaaa

SEQ ID NO: 3719301 - DNA, 25 bp, Homo sapien
ccgccgtgtcgcctctcaaactcaa

SEQ ID NO: 3719302 - DNA, 25 bp, Homo sapien
ccgccgccgtgtcgcctctcaaact

SEQ ID NO: 3719303 - DNA, 25 bp, Homo sapien
ggtgcatcgcggagaaggggtctgc

SEQ ID NO: 3719304 - DNA, 25 bp, Homo sapien
gtgcatcgcggagaaggggtctgct

SEQ ID NO: 3719305 - DNA, 25 bp, Homo sapien
tcggctctcttgtcctaaacacagg

SEQ ID NO: 3719306 - DNA, 25 bp, Homo sapien
tgctggctgcgtgatcctcaatggg

SEQ ID NO: 3719307 - DNA, 25 bp, Homo sapien
tgattagcgaaaaacacagctctcc

SEQ ID NO: 3719308 - DNA, 25 bp, Homo sapien
acacaggtccaagccgggtctaaag

SEQ ID NO: 3719309 - DNA, 25 bp, Homo sapien
gaatccgcaaaaaaggagaacgaga

SEQ ID NO: 3719310 - DNA, 25 bp, Homo sapien
tccgacctctgcttggccgtgcaga

SEQ ID NO: 3719311 - DNA, 25 bp, Homo sapien
tgcttggccgtgcagaaacctttgg

SEQ ID NO: 3719312 - DNA, 25 bp, Homo sapien
ttgggtttcaaagtggctgcccgcg

SEQ ID NO: 3719313 - DNA, 25 bp, Homo sapien
tgtttatccgagctcctagcacaga

SEQ ID NO: 3719314 - DNA, 25 bp, Homo sapien
tcgaggctcggctgactgtttatcc

SEQ ID NO: 3719315 - DNA, 25 bp, Homo sapien
gaattcatgccagcggaaagggcgt

SEQ ID NO: 3719316 - DNA, 25 bp, Homo sapien
cagaggactggactagtgcgaagca

SEQ ID NO: 3719317 - DNA, 25 bp, Homo sapien
cgctgcctcaccacgtcgggtaggg

SEQ ID NO: 3719318 - DNA, 25 bp, Homo sapien
tgcccaggattttgctgacacagcc

SEQ ID NO: 3719319 - DNA, 25 bp, Homo sapien
cgggagatgtcacagggccgcacac

SEQ ID NO: 3719320 - DNA, 25 bp, Homo sapien
gtgggccagctccacgatgcgctgc

SEQ ID NO: 3719321 - DNA, 25 bp, Homo sapien
ttgtccaccactttgggcgtcgcca

SEQ ID NO: 3719322 - DNA, 25 bp, Homo sapien
aatctcccaggcgaacatagtcggg

SEQ ID NO: 3719323 - DNA, 25 bp, Homo sapien
gatcacacccggcttgatgctgccg

SEQ ID NO: 3719324 - DNA, 25 bp, Homo sapien
cgtcgccactttgggcttggagcca

SEQ ID NO: 3719325 - DNA, 25 bp, Homo sapien
gcaccatgtgaattattagttgccc

SEQ ID NO: 3719326 - DNA, 25 bp, Homo sapien
gaattattagttgccctgataatga

SEQ ID NO: 3719327 - DNA, 25 bp, Homo sapien
caatttcagaataaggcaccatgtg

SEQ ID NO: 3719328 - DNA, 25 bp, Homo sapien
aaaaaatcctttatatgtgatgcca

SEQ ID NO: 3719329 - DNA, 25 bp, Homo sapien
cctgtctctttgccatgagaccaac

SEQ ID NO: 3719330 - DNA, 25 bp, Homo sapien
tatttgtgggcccaatctgctaggc

SEQ ID NO: 3719331 - DNA, 25 bp, Homo sapien
ccacagaaggtgagttccctgtcct

SEQ ID NO: 3719332 - DNA, 25 bp, Homo sapien
gtttctgccattcctctgtggatag

SEQ ID NO: 3719333 - DNA, 25 bp, Homo sapien
ggaactgatggatcaatcccagagt

SEQ ID NO: 3719334 - DNA, 25 bp, Homo sapien
gaactgatggatcaatcccagagtc

SEQ ID NO: 3719335 - DNA, 25 bp, Homo sapien
actgatggatcaatcccagagtcca

SEQ ID NO: 3719336 - DNA, 25 bp, Homo sapien
gaggaactgatggatcaatcccaga

SEQ ID NO: 3719337 - DNA, 25 bp, Homo sapien
tatgtggacatttctaaatcgccag

SEQ ID NO: 3719338 - DNA, 25 bp, Homo sapien
ggcatcatatcgacaacctttatag

SEQ ID NO: 3719339 - DNA, 25 bp, Homo sapien
tccatccagatgtttgggagttgcc

SEQ ID NO: 3719340 - DNA, 25 bp, Homo sapien
cagcaagtgctcatgaatttccaag

SEQ ID NO: 3719341 - DNA, 25 bp, Homo sapien
tctggtaatgaataggcagcccttg

SEQ ID NO: 3719342 - DNA, 25 bp, Homo sapien
tggccctgcatctggtaatgaatag

SEQ ID NO: 3719343 - DNA, 25 bp, Homo sapien
taggcagcccttgacttgtttcgta

SEQ ID NO: 3719344 - DNA, 25 bp, Homo sapien
atctggccctgcatctggtaatgaa

SEQ ID NO: 3719345 - DNA, 25 bp, Homo sapien
tctggacacgtccacctgctggaga

SEQ ID NO: 3719346 - DNA, 25 bp, Homo sapien
cctgctggagaaacggcatggtgct

SEQ ID NO: 3719347 - DNA, 25 bp, Homo sapien
aggtgatggtctggacacgtccacc

SEQ ID NO: 3719348 - DNA, 25 bp, Homo sapien
gagcccagaggccttattagaggtg

SEQ ID NO: 3719349 - DNA, 25 bp, Homo sapien
cctggttgaaaggtctggtgccctc

SEQ ID NO: 3719350 - DNA, 25 bp, Homo sapien
agcctggttgaaaggtctggtgccc

SEQ ID NO: 3719351 - DNA, 25 bp, Homo sapien
gcctggttgaaaggtctggtgccct

SEQ ID NO: 3719352 - DNA, 25 bp, Homo sapien
cagcctggttgaaaggtctggtgcc

SEQ ID NO: 3719353 - DNA, 25 bp, Homo sapien
ggctttcctacttgggactgtgtca

SEQ ID NO: 3719354 - DNA, 25 bp, Homo sapien
cttgggactgtgtcacagtccttca

SEQ ID NO: 3719355 - DNA, 25 bp, Homo sapien
ggagctggctttcctacttgggact

SEQ ID NO: 3719356 - DNA, 25 bp, Homo sapien
tttcctacttgggactgtgtcacag

SEQ ID NO: 3719357 - DNA, 25 bp, Homo sapien
ccatccggcgttgggtggaaaggct

SEQ ID NO: 3719358 - DNA, 25 bp, Homo sapien
cagccccatccggcgttgggtggaa

SEQ ID NO: 3719359 - DNA, 25 bp, Homo sapien
ccggcgttgggtggaaaggctgctg

SEQ ID NO: 3719360 - DNA, 25 bp, Homo sapien
ccagccccatccggcgttgggtgga

SEQ ID NO: 3719361 - DNA, 25 bp, Homo sapien
ttggagcgaggaatccccaggatcc

SEQ ID NO: 3719362 - DNA, 25 bp, Homo sapien
cattggaggcgctggaaacaggagg

SEQ ID NO: 3719363 - DNA, 25 bp, Homo sapien
cattggagcgaggaatccccaggat

SEQ ID NO: 3719364 - DNA, 25 bp, Homo sapien
ctgggtcattggaggcgctggaaac

SEQ ID NO: 3719365 - DNA, 25 bp, Homo sapien
gtgaatggcaaaggccgtggcggcc

SEQ ID NO: 3719366 - DNA, 25 bp, Homo sapien
cctgtgaaacgaggccattagggct

SEQ ID NO: 3719367 - DNA, 25 bp, Homo sapien
caaatcggtttggatattttggaag

SEQ ID NO: 3719368 - DNA, 25 bp, Homo sapien
tgtttccctgtgaaacgaggccatt

SEQ ID NO: 3719369 - DNA, 25 bp, Homo sapien
ttggccacgaggttggcatacttgg

SEQ ID NO: 3719370 - DNA, 25 bp, Homo sapien
acttggccacgaggttggcatactt

SEQ ID NO: 3719371 - DNA, 25 bp, Homo sapien
gagagtacagaggggtatctgtggc

SEQ ID NO: 3719372 - DNA, 25 bp, Homo sapien
atacttggccacgaggttggcatac

SEQ ID NO: 3719373 - DNA, 25 bp, Homo sapien
gaagaataggccgaactgtacccag

SEQ ID NO: 3719374 - DNA, 25 bp, Homo sapien
gacactcctaggaagatgccacagt

SEQ ID NO: 3719375 - DNA, 25 bp, Homo sapien
aagagattcacagcttgcccttggg

SEQ ID NO: 3719376 - DNA, 25 bp, Homo sapien
ccatcaccgtgacattgttagagct

SEQ ID NO: 3719377 - DNA, 25 bp, Homo sapien
tgggcaggatcagtgtatacctcaa

SEQ ID NO: 3719378 - DNA, 25 bp, Homo sapien
taatgtgggcaggatcagtgtatac

SEQ ID NO: 3719379 - DNA, 25 bp, Homo sapien
ctctaatgtgggcaggatcagtgta

SEQ ID NO: 3719380 - DNA, 25 bp, Homo sapien
ctcctctaatgtgggcaggatcagt

SEQ ID NO: 3719381 - DNA, 25 bp, Homo sapien
caagatgggtgctcgtccacgaggg

SEQ ID NO: 3719382 - DNA, 25 bp, Homo sapien
cgtccacgagggtgcaaacatggag

SEQ ID NO: 3719383 - DNA, 25 bp, Homo sapien
tgaagatgtattctgacaagatggg

SEQ ID NO: 3719384 - DNA, 25 bp, Homo sapien
ggtgctcgtccacgagggtgcaaac

SEQ ID NO: 3719385 - DNA, 25 bp, Homo sapien
ccctttttccagtggcctgcgcttc

SEQ ID NO: 3719386 - DNA, 25 bp, Homo sapien
ttttccagtggcctgcgcttctcag

SEQ ID NO: 3719387 - DNA, 25 bp, Homo sapien
cctttttccagtggcctgcgcttct

SEQ ID NO: 3719388 - DNA, 25 bp, Homo sapien
ttccagtggcctgcgcttctcagct

SEQ ID NO: 3719389 - DNA, 25 bp, Homo sapien
ggcccacagtgccctcggctcccca

SEQ ID NO: 3719390 - DNA, 25 bp, Homo sapien
tggcccacagtgccctcggctcccc

SEQ ID NO: 3719391 - DNA, 25 bp, Homo sapien
aggcggctcctacaagctggctgcc

SEQ ID NO: 3719392 - DNA, 25 bp, Homo sapien
ccaggcggctcctacaagctggctg

SEQ ID NO: 3719393 - DNA, 25 bp, Homo sapien
ccactgcccaagaccacccacactg

SEQ ID NO: 3719394 - DNA, 25 bp, Homo sapien
caagaccacccacactgtccctcac

SEQ ID NO: 3719395 - DNA, 25 bp, Homo sapien
ctgcccaagaccacccacactgtcc

SEQ ID NO: 3719396 - DNA, 25 bp, Homo sapien
ccaagaccacccacactgtccctca

SEQ ID NO: 3719397 - DNA, 25 bp, Homo sapien
ctggcttcccaaggcgtcctccaca

SEQ ID NO: 3719398 - DNA, 25 bp, Homo sapien
gtcagcaatttctgagcatccttcg

SEQ ID NO: 3719399 - DNA, 25 bp, Homo sapien
gagcatccttcgctatccttttgcc

SEQ ID NO: 3719400 - DNA, 25 bp, Homo sapien
gcaatttctgagcatccttcgctat

SEQ ID NO: 3719401 - DNA, 25 bp, Homo sapien
tttacacaccaaagcagtcaaggac

SEQ ID NO: 3719402 - DNA, 25 bp, Homo sapien
agtcaaggactcttagctcactgaa

SEQ ID NO: 3719403 - DNA, 25 bp, Homo sapien
aattgtctgagtgcaacagccttgc

SEQ ID NO: 3719404 - DNA, 25 bp, Homo sapien
tgggcccacattgatacaaagatcc

SEQ ID NO: 3719405 - DNA, 25 bp, Homo sapien
ggggctgacaccagagggtggccct

SEQ ID NO: 3719406 - DNA, 25 bp, Homo sapien
tgggcatctggttccgggcccagga

SEQ ID NO: 3719407 - DNA, 25 bp, Homo sapien
gctctgcacccctatgggacccctt

SEQ ID NO: 3719408 - DNA, 25 bp, Homo sapien
gaacacatggacactcggggcgtta

SEQ ID NO: 3719409 - DNA, 25 bp, Homo sapien
agacccgatccaaagcttccagctg

SEQ ID NO: 3719410 - DNA, 25 bp, Homo sapien
gatttgatgtgctctgatgcctgga

SEQ ID NO: 3719411 - DNA, 25 bp, Homo sapien
tgaaggtgtcagctcgcaagtgctt

SEQ ID NO: 3719412 - DNA, 25 bp, Homo sapien
aggaaggacgctcaaagacccgatc

SEQ ID NO: 3719413 - DNA, 25 bp, Homo sapien
cggctgccggggctagctgtgagta

SEQ ID NO: 3719414 - DNA, 25 bp, Homo sapien
ggctccatgcggctgccggggctag

SEQ ID NO: 3719415 - DNA, 25 bp, Homo sapien
ctccatgcggctgccggggctagct

SEQ ID NO: 3719416 - DNA, 25 bp, Homo sapien
ctgccggggctagctgtgagtaccg

SEQ ID NO: 3719417 - DNA, 25 bp, Homo sapien
cctccatggctggacgggattgcct

SEQ ID NO: 3719418 - DNA, 25 bp, Homo sapien
gaaatcagttttgtaattagctgca

SEQ ID NO: 3719419 - DNA, 25 bp, Homo sapien
cctgatttatcaccagagtaattcg

SEQ ID NO: 3719420 - DNA, 25 bp, Homo sapien
ttccaattccttctcgtattgatct

SEQ ID NO: 3719421 - DNA, 25 bp, Homo sapien
gatagactcgacttgacttcatcaa

SEQ ID NO: 3719422 - DNA, 25 bp, Homo sapien
ctgtgtgcctgacacgttgctgccc

SEQ ID NO: 3719423 - DNA, 25 bp, Homo sapien
gtgtgcctgacacgttgctgcccag

SEQ ID NO: 3719424 - DNA, 25 bp, Homo sapien
gttggtggatgcagatagactcgac

SEQ ID NO: 3719425 - DNA, 25 bp, Homo sapien
ggcatgggctgaggcaccctccact

SEQ ID NO: 3719426 - DNA, 25 bp, Homo sapien
atgggctgaggcaccctccactgaa

SEQ ID NO: 3719427 - DNA, 25 bp, Homo sapien
tgaggcaccctccactgaacgcagt

SEQ ID NO: 3719428 - DNA, 25 bp, Homo sapien
caccctccactgaacgcagtgcccc

SEQ ID NO: 3719429 - DNA, 25 bp, Homo sapien
aagcccaaagccatgatcacccatg

SEQ ID NO: 3719430 - DNA, 25 bp, Homo sapien
ttaataacacctcaatgcgtgtctc

SEQ ID NO: 3719431 - DNA, 25 bp, Homo sapien
gaattttaataacacctcaatgcgt

SEQ ID NO: 3719432 - DNA, 25 bp, Homo sapien
gcagtggcacgtgcattccacagcc

SEQ ID NO: 3719433 - DNA, 25 bp, Homo sapien
tggagctctgcggccttccctggac

SEQ ID NO: 3719434 - DNA, 25 bp, Homo sapien
tactcctcgcttgattgaaatgtcg

SEQ ID NO: 3719435 - DNA, 25 bp, Homo sapien
tgttagtgctaacttgccacctggg

SEQ ID NO: 3719436 - DNA, 25 bp, Homo sapien
taccactggtgaacagctccgaatg

SEQ ID NO: 3719437 - DNA, 25 bp, Homo sapien
tggatcagccggagatgttcccagg

SEQ ID NO: 3719438 - DNA, 25 bp, Homo sapien
tcccctaaggtttgcagccgcagct

SEQ ID NO: 3719439 - DNA, 25 bp, Homo sapien
tcatcccctaaggtttgcagccgca

SEQ ID NO: 3719440 - DNA, 25 bp, Homo sapien
ctaaggtttgcagccgcagctgtca

SEQ ID NO: 3719441 - DNA, 25 bp, Homo sapien
ccctaaggtttgcagccgcagctgt

SEQ ID NO: 3719442 - DNA, 25 bp, Homo sapien
tcacttaggagagacgaggctccgt

SEQ ID NO: 3719443 - DNA, 25 bp, Homo sapien
ggccagaatgcccgtgacccattct

SEQ ID NO: 3719444 - DNA, 25 bp, Homo sapien
acgaggctccgttccagaccagcag

SEQ ID NO: 3719445 - DNA, 25 bp, Homo sapien
tctcatgtagctggtccctctttct

SEQ ID NO: 3719446 - DNA, 25 bp, Homo sapien
tggccggtaggcacagacaaggaca

SEQ ID NO: 3719447 - DNA, 25 bp, Homo sapien
gtcaaatatggcctgactctgatcc

SEQ ID NO: 3719448 - DNA, 25 bp, Homo sapien
tctgatcccgacagtggattagggc

SEQ ID NO: 3719449 - DNA, 25 bp, Homo sapien
ccggtaggcacagacaaggacatgg

SEQ ID NO: 3719450 - DNA, 25 bp, Homo sapien
gctgttctccgagccctgcaggatt

SEQ ID NO: 3719451 - DNA, 25 bp, Homo sapien
tgcagcattaggctgttctccgagc

SEQ ID NO: 3719452 - DNA, 25 bp, Homo sapien
gcattaggctgttctccgagccctg

SEQ ID NO: 3719453 - DNA, 25 bp, Homo sapien
ttctccgagccctgcaggatttcct

SEQ ID NO: 3719454 - DNA, 25 bp, Homo sapien
agggatgttacccagatctgcaggg

SEQ ID NO: 3719455 - DNA, 25 bp, Homo sapien
ctggtgtgtcctaggcagggatgtt

SEQ ID NO: 3719456 - DNA, 25 bp, Homo sapien
tgcaggggcttagtgaggtctacac

SEQ ID NO: 3719457 - DNA, 25 bp, Homo sapien
atctgcaggggcttagtgaggtcta

SEQ ID NO: 3719458 - DNA, 25 bp, Homo sapien
ttctggaacaccattgtcaataatg

SEQ ID NO: 3719459 - DNA, 25 bp, Homo sapien
catactgcaggaagttttcaaatta

SEQ ID NO: 3719460 - DNA, 25 bp, Homo sapien
ttgtcaataatggaaaacacatact

SEQ ID NO: 3719461 - DNA, 25 bp, Homo sapien
ggaaaacacatactgcaggaagttt

SEQ ID NO: 3719462 - DNA, 25 bp, Homo sapien
gagtaccctgttcaggacccctgag

SEQ ID NO: 3719463 - DNA, 25 bp, Homo sapien
ctgctgctgcggagtctataacacc

SEQ ID NO: 3719464 - DNA, 25 bp, Homo sapien
aggagtaccctgttcaggacccctg

SEQ ID NO: 3719465 - DNA, 25 bp, Homo sapien
taacaccagtatctccacaaaggag

SEQ ID NO: 3719466 - DNA, 25 bp, Homo sapien
caggcagagtggtgctcgccatgtc

SEQ ID NO: 3719467 - DNA, 25 bp, Homo sapien
cagagtggtgctcgccatgtcacga

SEQ ID NO: 3719468 - DNA, 25 bp, Homo sapien
accaggcagagtggtgctcgccatg

SEQ ID NO: 3719469 - DNA, 25 bp, Homo sapien
cacgtgaggggggtaaccaggcaga

SEQ ID NO: 3719470 - DNA, 25 bp, Homo sapien
agtgggttgcacacaagggggcact

SEQ ID NO: 3719471 - DNA, 25 bp, Homo sapien
ggttgcacacaagggggcacttctg

SEQ ID NO: 3719472 - DNA, 25 bp, Homo sapien
ttgcacacaagggggcacttctgca

SEQ ID NO: 3719473 - DNA, 25 bp, Homo sapien
tgggttgcacacaagggggcacttc

SEQ ID NO: 3719474 - DNA, 25 bp, Homo sapien
cttcccagcggaggcgctcgcggcc

SEQ ID NO: 3719475 - DNA, 25 bp, Homo sapien
ggcctttatagatgccactccggtt

SEQ ID NO: 3719476 - DNA, 25 bp, Homo sapien
ctcgcggccacccacgaagggtttg

SEQ ID NO: 3719477 - DNA, 25 bp, Homo sapien
gtattggggcgcgtccaccctgtcg

SEQ ID NO: 3719478 - DNA, 25 bp, Homo sapien
taaggcggggttgctgaatctccaa

SEQ ID NO: 3719479 - DNA, 25 bp, Homo sapien
agcctcgttgtaggccgtgtactgg

SEQ ID NO: 3719480 - DNA, 25 bp, Homo sapien
tacgggttgccggagaactcgctcc

SEQ ID NO: 3719481 - DNA, 25 bp, Homo sapien
tggctgtacgggttgccggagaact

SEQ ID NO: 3719482 - DNA, 25 bp, Homo sapien
gtggcggtcataggcagcggcagca

SEQ ID NO: 3719483 - DNA, 25 bp, Homo sapien
cggcagcagcggcaggggcggagcc

SEQ ID NO: 3719484 - DNA, 25 bp, Homo sapien
gcagcagcggcaggggcggagcccc

SEQ ID NO: 3719485 - DNA, 25 bp, Homo sapien
ctagtggcggtcataggcagcggca

SEQ ID NO: 3719486 - DNA, 25 bp, Homo sapien
gatgtggaggccgaagctgtcggcc

SEQ ID NO: 3719487 - DNA, 25 bp, Homo sapien
aagcttgatgtggtccccgcggtaa

SEQ ID NO: 3719488 - DNA, 25 bp, Homo sapien
gggacgatgtggaggccgaagctgt

SEQ ID NO: 3719489 - DNA, 25 bp, Homo sapien
tgtcggcctgaagcttgatgtggtc

SEQ ID NO: 3719490 - DNA, 25 bp, Homo sapien
cggtccgcgctgattgtgtgtcaca

SEQ ID NO: 3719491 - DNA, 25 bp, Homo sapien
ttttcccagggattcggcagcgggc

SEQ ID NO: 3719492 - DNA, 25 bp, Homo sapien
tcccaaccttggaaagacctgacgc

SEQ ID NO: 3719493 - DNA, 25 bp, Homo sapien
tcttctgggacagggcacacccgga

SEQ ID NO: 3719494 - DNA, 25 bp, Homo sapien
agggcgtcaagggacaggcgaagga

SEQ ID NO: 3719495 - DNA, 25 bp, Homo sapien
gcagggcgtcaagggacaggcgaag

SEQ ID NO: 3719496 - DNA, 25 bp, Homo sapien
ggatgcagggcgtcaagggacaggc

SEQ ID NO: 3719497 - DNA, 25 bp, Homo sapien
atgcagggcgtcaagggacaggcga

SEQ ID NO: 3719498 - DNA, 25 bp, Homo sapien
cggtcccgggagagcgtccgatggg

SEQ ID NO: 3719499 - DNA, 25 bp, Homo sapien
caccggcagattgagagtctgtgtc

SEQ ID NO: 3719500 - DNA, 25 bp, Homo sapien
gaccccagtccgcagtctatggaaa

SEQ ID NO: 3719501 - DNA, 25 bp, Homo sapien
ggtcctgcggcggtcccgggagagc

SEQ ID NO: 3719502 - DNA, 25 bp, Homo sapien
ttaatgggcgtgtagctgtgtcccc

SEQ ID NO: 3719503 - DNA, 25 bp, Homo sapien
gacgccagctcagaaccggttctta

SEQ ID NO: 3719504 - DNA, 25 bp, Homo sapien
acctcggatctagcctgcggagaca

SEQ ID NO: 3719505 - DNA, 25 bp, Homo sapien
caggacgtgctgtgctttaatgggc

SEQ ID NO: 3719506 - DNA, 25 bp, Homo sapien
cgatccacgggtgaggagacatgca

SEQ ID NO: 3719507 - DNA, 25 bp, Homo sapien
cgagtcgtcacgatccacgggtgag

SEQ ID NO: 3719508 - DNA, 25 bp, Homo sapien
aggagacatgcagggcgcatcgcca

SEQ ID NO: 3719509 - DNA, 25 bp, Homo sapien
tgtttctgttatttcgagtcgtcac

SEQ ID NO: 3719510 - DNA, 25 bp, Homo sapien
agagatctgggcgaggactccaagc

SEQ ID NO: 3719511 - DNA, 25 bp, Homo sapien
tctcaaataaaaagggctcgcaggg

SEQ ID NO: 3719512 - DNA, 25 bp, Homo sapien
agtggccgaggagaccagaaccgtc

SEQ ID NO: 3719513 - DNA, 25 bp, Homo sapien
gaatcaaaacgaaccgacgcactga

SEQ ID NO: 3719514 - DNA, 25 bp, Homo sapien
aggcgcgtgaagtcccatgaaccag

SEQ ID NO: 3719515 - DNA, 25 bp, Homo sapien
aaacttgcggcaagcgtctgcggtc

SEQ ID NO: 3719516 - DNA, 25 bp, Homo sapien
tcttcgggcccagaagtaaacgcag

SEQ ID NO: 3719517 - DNA, 25 bp, Homo sapien
taaacgcagagcgaggaaacttgcg

SEQ ID NO: 3719518 - DNA, 25 bp, Homo sapien
cccagacccccagggctatccccat

SEQ ID NO: 3719519 - DNA, 25 bp, Homo sapien
tctcttcaaaacgaagacccagacc

SEQ ID NO: 3719520 - DNA, 25 bp, Homo sapien
tttctctcttcaaaacgaagaccca

SEQ ID NO: 3719521 - DNA, 25 bp, Homo sapien
tctctcttcaaaacgaagacccaga

SEQ ID NO: 3719522 - DNA, 25 bp, Homo sapien
tggaggcttgccagtgaggctctcc

SEQ ID NO: 3719523 - DNA, 25 bp, Homo sapien
gcttgccagtgaggctctcctggct

SEQ ID NO: 3719524 - DNA, 25 bp, Homo sapien
acacacgtgccacgtgccacgtgcc

SEQ ID NO: 3719525 - DNA, 25 bp, Homo sapien
cacgtgccaggctggaggcttgcca

SEQ ID NO: 3719526 - DNA, 25 bp, Homo sapien
acccacaggccacactccttccagc

SEQ ID NO: 3719527 - DNA, 25 bp, Homo sapien
agtgccccagggtcacctgactgtc

SEQ ID NO: 3719528 - DNA, 25 bp, Homo sapien
ctgtccaccatctgagtccctgtgt

SEQ ID NO: 3719529 - DNA, 25 bp, Homo sapien
ggagcagccccaaggcttgcagtgc

SEQ ID NO: 3719530 - DNA, 25 bp, Homo sapien
tgtctcttcttcacccagcgtcaag

SEQ ID NO: 3719531 - DNA, 25 bp, Homo sapien
catttgcgtgtctcttcttcaccca

SEQ ID NO: 3719532 - DNA, 25 bp, Homo sapien
gtctcttcttcacccagcgtcaagg

SEQ ID NO: 3719533 - DNA, 25 bp, Homo sapien
tggtgcatttgcgtgtctcttcttc

SEQ ID NO: 3719534 - DNA, 25 bp, Homo sapien
tagaatctgggtgaagtaaggttaa

SEQ ID NO: 3719535 - DNA, 25 bp, Homo sapien
cccaaccccatcactcccaatctgg

SEQ ID NO: 3719536 - DNA, 25 bp, Homo sapien
caaccccatcactcccaatctggga

SEQ ID NO: 3719537 - DNA, 25 bp, Homo sapien
ccaaccccatcactcccaatctggg

SEQ ID NO: 3719538 - DNA, 25 bp, Homo sapien
tgggattcccggttcttgcctgatt

SEQ ID NO: 3719539 - DNA, 25 bp, Homo sapien
tcccccttgtgacccttgccacact

SEQ ID NO: 3719540 - DNA, 25 bp, Homo sapien
ccctgggattcccggttcttgcctg

SEQ ID NO: 3719541 - DNA, 25 bp, Homo sapien
ctcccccttgtgacccttgccacac

SEQ ID NO: 3719542 - DNA, 25 bp, Homo sapien
cggggcctcctggtattagcattga

SEQ ID NO: 3719543 - DNA, 25 bp, Homo sapien
tcaaggttcctgtcggttccatcca

SEQ ID NO: 3719544 - DNA, 25 bp, Homo sapien
cagcccccgtgtcgggatttcaagg

SEQ ID NO: 3719545 - DNA, 25 bp, Homo sapien
ctgtcggttccatccatcttccggg

SEQ ID NO: 3719546 - DNA, 25 bp, Homo sapien
gtgcctcagaaatccgcagctgttc

SEQ ID NO: 3719547 - DNA, 25 bp, Homo sapien
tgcctcagaaatccgcagctgttca

SEQ ID NO: 3719548 - DNA, 25 bp, Homo sapien
cagctggcggacagctgacgacacc

SEQ ID NO: 3719549 - DNA, 25 bp, Homo sapien
ttcgttgaggatggccaacacttgg

SEQ ID NO: 3719550 - DNA, 25 bp, Homo sapien
gacgacacccgcctggttgaaggcg

SEQ ID NO: 3719551 - DNA, 25 bp, Homo sapien
tttgctgaagcaaaccggagcccgg

SEQ ID NO: 3719552 - DNA, 25 bp, Homo sapien
ctggcacggtggtcatttcggtggt

SEQ ID NO: 3719553 - DNA, 25 bp, Homo sapien
cttacttcatgaatcacgtcttgat

SEQ ID NO: 3719554 - DNA, 25 bp, Homo sapien
catttcggtggtggcgcaataggaa

SEQ ID NO: 3719555 - DNA, 25 bp, Homo sapien
tcacgtcttgattggctggcacggt

SEQ ID NO: 3719556 - DNA, 25 bp, Homo sapien
ggcggttctctcttcggaagtgact

SEQ ID NO: 3719557 - DNA, 25 bp, Homo sapien
gttctctcttcggaagtgactccgg

SEQ ID NO: 3719558 - DNA, 25 bp, Homo sapien
gactccggcgtgagcgggaaggaac

SEQ ID NO: 3719559 - DNA, 25 bp, Homo sapien
tcttcggaagtgactccggcgtgag

SEQ ID NO: 3719560 - DNA, 25 bp, Homo sapien
tcggagcagaggtgggcggcacccc

SEQ ID NO: 3719561 - DNA, 25 bp, Homo sapien
ctgtcggagcagaggtgggcggcac

SEQ ID NO: 3719562 - DNA, 25 bp, Homo sapien
agaggtgggcggcacccccttctct

SEQ ID NO: 3719563 - DNA, 25 bp, Homo sapien
agcagaggtgggcggcacccccttc

SEQ ID NO: 3719564 - DNA, 25 bp, Homo sapien
tggagaagttgggtgcgtggttgcc

SEQ ID NO: 3719565 - DNA, 25 bp, Homo sapien
gggtgcgtggttgccgtcttgctgc

SEQ ID NO: 3719566 - DNA, 25 bp, Homo sapien
gccgtggctggagaagttgggtgcg

SEQ ID NO: 3719567 - DNA, 25 bp, Homo sapien
gaagttgggtgcgtggttgccgtct

SEQ ID NO: 3719568 - DNA, 25 bp, Homo sapien
tagcgggcatgcagcgccttgtcat

SEQ ID NO: 3719569 - DNA, 25 bp, Homo sapien
ctagcgggcatgcagcgccttgtca

SEQ ID NO: 3719570 - DNA, 25 bp, Homo sapien
tggcagcgcgggggcgacgaccccg

SEQ ID NO: 3719571 - DNA, 25 bp, Homo sapien
ctaccgggtctcagatggcagcgcg

SEQ ID NO: 3719572 - DNA, 25 bp, Homo sapien
accgggtctcagatggcagcgcggg

SEQ ID NO: 3719573 - DNA, 25 bp, Homo sapien
agatggcagcgcgggggcgacgacc

SEQ ID NO: 3719574 - DNA, 25 bp, Homo sapien
gtccccaggactctctgttctcttt

SEQ ID NO: 3719575 - DNA, 25 bp, Homo sapien
tgtccccaggactctctgttctctt

SEQ ID NO: 3719576 - DNA, 25 bp, Homo sapien
tctgttctctttcccgctgcagcat

SEQ ID NO: 3719577 - DNA, 25 bp, Homo sapien
ctttcccgctgcagcatgggcggta

SEQ ID NO: 3719578 - DNA, 25 bp, Homo sapien
ccttctcaagccctctgcacggtac

SEQ ID NO: 3719579 - DNA, 25 bp, Homo sapien
ggccccttctcaagccctctgcacg

SEQ ID NO: 3719580 - DNA, 25 bp, Homo sapien
acccggccccttctcaagccctctg

SEQ ID NO: 3719581 - DNA, 25 bp, Homo sapien
cggccccttctcaagccctctgcac

SEQ ID NO: 3719582 - DNA, 25 bp, Homo sapien
tttaagtatgaactagcgtgcacgc

SEQ ID NO: 3719583 - DNA, 25 bp, Homo sapien
tgcattaagcagttagggtcccggg

SEQ ID NO: 3719584 - DNA, 25 bp, Homo sapien
gcgtgcacgctggactacaaagtaa

SEQ ID NO: 3719585 - DNA, 25 bp, Homo sapien
gaagggattccctcatcacaggtta

SEQ ID NO: 3719586 - DNA, 25 bp, Homo sapien
cttgttttgaagctggtttgaagaa

SEQ ID NO: 3719587 - DNA, 25 bp, Homo sapien
ttgttttgaagctggtttgaagaaa

SEQ ID NO: 3719588 - DNA, 25 bp, Homo sapien
tttgaagaaatctataattgactgc

SEQ ID NO: 3719589 - DNA, 25 bp, Homo sapien
gaagaaatctataattgactgcttc

SEQ ID NO: 3719590 - DNA, 25 bp, Homo sapien
ctaaatagccaattaaaacacatac

SEQ ID NO: 3719591 - DNA, 25 bp, Homo sapien
tagccaattaaaacacatacaaatt

SEQ ID NO: 3719592 - DNA, 25 bp, Homo sapien
caattaaaacacatacaaattgcat

SEQ ID NO: 3719593 - DNA, 25 bp, Homo sapien
gccaattaaaacacatacaaattgc

SEQ ID NO: 3719594 - DNA, 25 bp, Homo sapien
tgtcccagtgatagacaatctactt

SEQ ID NO: 3719595 - DNA, 25 bp, Homo sapien
tttgatttttgtggtgaatccaaca

SEQ ID NO: 3719596 - DNA, 25 bp, Homo sapien
gctcttttctggtggcacccttttg

SEQ ID NO: 3719597 - DNA, 25 bp, Homo sapien
gatagacaatctacttcctccatat

SEQ ID NO: 3719598 - DNA, 25 bp, Homo sapien
tagtgacaactggaatttagctccc

SEQ ID NO: 3719599 - DNA, 25 bp, Homo sapien
ctttcttccgggtggtgcctggaca

SEQ ID NO: 3719600 - DNA, 25 bp, Homo sapien
ggagtctgcattggttttgcctcga

SEQ ID NO: 3719601 - DNA, 25 bp, Homo sapien
cagacaaggccgacgtgactcatgt

SEQ ID NO: 3719602 - DNA, 25 bp, Homo sapien
ctaaatatgacatagcagtagcaat

SEQ ID NO: 3719603 - DNA, 25 bp, Homo sapien
agtagcaatgctaattcaataattc

SEQ ID NO: 3719604 - DNA, 25 bp, Homo sapien
tatgacatagcagtagcaatgctaa

SEQ ID NO: 3719605 - DNA, 25 bp, Homo sapien
catagcagtagcaatgctaattcaa

SEQ ID NO: 3719606 - DNA, 25 bp, Homo sapien
tgaagtaggttcccatgaatcagaa

SEQ ID NO: 3719607 - DNA, 25 bp, Homo sapien
gaagtaggttcccatgaatcagaag

SEQ ID NO: 3719608 - DNA, 25 bp, Homo sapien
tcagggaatttattctgcttagagc

SEQ ID NO: 3719609 - DNA, 25 bp, Homo sapien
gcagggcttgggatacatggcacaa

SEQ ID NO: 3719610 - DNA, 25 bp, Homo sapien
tctaagcgcaacacatcaccaggtg

SEQ ID NO: 3719611 - DNA, 25 bp, Homo sapien
gccatattctgagcgcaaaggtccc

SEQ ID NO: 3719612 - DNA, 25 bp, Homo sapien
ggtccatcaggacgcttctcaagga

SEQ ID NO: 3719613 - DNA, 25 bp, Homo sapien
tgcaaggtgatccattggggtgcag

SEQ ID NO: 3719614 - DNA, 25 bp, Homo sapien
ggtgtgcaaggtgatccattggggt

SEQ ID NO: 3719615 - DNA, 25 bp, Homo sapien
tgtgcaaggtgatccattggggtgc

SEQ ID NO: 3719616 - DNA, 25 bp, Homo sapien
gcaaggtgatccattggggtgcagg

SEQ ID NO: 3719617 - DNA, 25 bp, Homo sapien
tgtaagttccaggatgaacatgtcc

SEQ ID NO: 3719618 - DNA, 25 bp, Homo sapien
tagacgttctaaggtatttgtgtaa

SEQ ID NO: 3719619 - DNA, 25 bp, Homo sapien
catttccttcactagacgttctaag

SEQ ID NO: 3719620 - DNA, 25 bp, Homo sapien
ttgtgtaagttccaggatgaacatg

SEQ ID NO: 3719621 - DNA, 25 bp, Homo sapien
tgcgtccggccaacatatcttattc

SEQ ID NO: 3719622 - DNA, 25 bp, Homo sapien
ttaaaagtaagccacacaaacaagc

SEQ ID NO: 3719623 - DNA, 25 bp, Homo sapien
caaaatgcacgctaatttctcatga

SEQ ID NO: 3719624 - DNA, 25 bp, Homo sapien
acagagtccaaaatgcacgctaatt

SEQ ID NO: 3719625 - DNA, 25 bp, Homo sapien
gggaccataggtatgtggcaccatg

SEQ ID NO: 3719626 - DNA, 25 bp, Homo sapien
ccataggtatgtggcaccatgactg

SEQ ID NO: 3719627 - DNA, 25 bp, Homo sapien
gaccataggtatgtggcaccatgac

SEQ ID NO: 3719628 - DNA, 25 bp, Homo sapien
tgcagtgaagtggcgccatcacgac

SEQ ID NO: 3719629 - DNA, 25 bp, Homo sapien
gtcttcttgtagttgcttctgcagt

SEQ ID NO: 3719630 - DNA, 25 bp, Homo sapien
ggggatttaatgcctcggccttgcc

SEQ ID NO: 3719631 - DNA, 25 bp, Homo sapien
cctcggccttgccttatgtcttctt

SEQ ID NO: 3719632 - DNA, 25 bp, Homo sapien
cggccttgccttatgtcttcttgta

SEQ ID NO: 3719633 - DNA, 25 bp, Homo sapien
ggaatagcatcaattgtaactgaaa

SEQ ID NO: 3719634 - DNA, 25 bp, Homo sapien
cttcacctggatgatgatcaggaat

SEQ ID NO: 3719635 - DNA, 25 bp, Homo sapien
cacctggatgatgatcaggaatagc

SEQ ID NO: 3719636 - DNA, 25 bp, Homo sapien
ggatgatgatcaggaatagcatcaa

SEQ ID NO: 3719637 - DNA, 25 bp, Homo sapien
gacgtaaggaaaccttgtgttgtca

SEQ ID NO: 3719638 - DNA, 25 bp, Homo sapien
taacacagggacaggacactggaca

SEQ ID NO: 3719639 - DNA, 25 bp, Homo sapien
gaaacagccactttaacacagggac

SEQ ID NO: 3719640 - DNA, 25 bp, Homo sapien
ctggacatagtgataagcagacgta

SEQ ID NO: 3719641 - DNA, 25 bp, Homo sapien
gcccacatcaacaagaggcaaatta

SEQ ID NO: 3719642 - DNA, 25 bp, Homo sapien
tgaatggctataacaatgggcccac

SEQ ID NO: 3719643 - DNA, 25 bp, Homo sapien
gagtctcactgaaaactgctggtaa

SEQ ID NO: 3719644 - DNA, 25 bp, Homo sapien
taatgaagccctggcataacagtaa

SEQ ID NO: 3719645 - DNA, 25 bp, Homo sapien
gaaaaggataacgtatcaacactct

SEQ ID NO: 3719646 - DNA, 25 bp, Homo sapien
gaaattaggacttgggagttcagcc

SEQ ID NO: 3719647 - DNA, 25 bp, Homo sapien
tcaacactctgagatgaaatgctca

SEQ ID NO: 3719648 - DNA, 25 bp, Homo sapien
caagttataagacacattcacatgt

SEQ ID NO: 3719649 - DNA, 25 bp, Homo sapien
ttaaaatctgcactgacacaataca

SEQ ID NO: 3719650 - DNA, 25 bp, Homo sapien
tgcactgacacaatacagtctgtat

SEQ ID NO: 3719651 - DNA, 25 bp, Homo sapien
aaatctgcactgacacaatacagtc

SEQ ID NO: 3719652 - DNA, 25 bp, Homo sapien
tctgcactgacacaatacagtctgt

SEQ ID NO: 3719653 - DNA, 25 bp, Homo sapien
tacatcagacaatgatgggatccat

SEQ ID NO: 3719654 - DNA, 25 bp, Homo sapien
acaatgatgggatccatggccaaac

SEQ ID NO: 3719655 - DNA, 25 bp, Homo sapien
aacacagctgctacatcagacaatg

SEQ ID NO: 3719656 - DNA, 25 bp, Homo sapien
gctgctacatcagacaatgatggga

SEQ ID NO: 3719657 - DNA, 25 bp, Homo sapien
caatagtgactatagccactaccag

SEQ ID NO: 3719658 - DNA, 25 bp, Homo sapien
tactcaccagtatacaacaatagtg

SEQ ID NO: 3719659 - DNA, 25 bp, Homo sapien
catgctcatgttgtttaaacaggca

SEQ ID NO: 3719660 - DNA, 25 bp, Homo sapien
tctagctgaaatgttgctatccaac

SEQ ID NO: 3719661 - DNA, 25 bp, Homo sapien
ttgcgccccttcctagttgtataac

SEQ ID NO: 3719662 - DNA, 25 bp, Homo sapien
tacttaacctctccgtgctgacctt

SEQ ID NO: 3719663 - DNA, 25 bp, Homo sapien
ctagtcattatggtgtggagggaca

SEQ ID NO: 3719664 - DNA, 25 bp, Homo sapien
ggtactatgtgaagcccttagaaca

SEQ ID NO: 3719665 - DNA, 25 bp, Homo sapien
ttatgccaaatccaagtcaatctgc

SEQ ID NO: 3719666 - DNA, 25 bp, Homo sapien
gaacaagctactttttatatggtac

SEQ ID NO: 3719667 - DNA, 25 bp, Homo sapien
tggtactatcctcattgctgttggt

SEQ ID NO: 3719668 - DNA, 25 bp, Homo sapien
aatctgctatccctgactcaaggca

SEQ ID NO: 3719669 - DNA, 25 bp, Homo sapien
ttctttcccccttgatgttgtctgt

SEQ ID NO: 3719670 - DNA, 25 bp, Homo sapien
tatttcacgatcctggtaaccttct

SEQ ID NO: 3719671 - DNA, 25 bp, Homo sapien
ccttctggatgtatagatgtacaca

SEQ ID NO: 3719672 - DNA, 25 bp, Homo sapien
taaaatcagcaacattatttcacga

SEQ ID NO: 3719673 - DNA, 25 bp, Homo sapien
cctggtaaccttctggatgtataga

SEQ ID NO: 3719674 - DNA, 25 bp, Homo sapien
ctaaaggaatctgtttcagctgttt

SEQ ID NO: 3719675 - DNA, 25 bp, Homo sapien
actaaaggaatctgtttcagctgtt

SEQ ID NO: 3719676 - DNA, 25 bp, Homo sapien
cttccacgtgatgtccaattaggga

SEQ ID NO: 3719677 - DNA, 25 bp, Homo sapien
catttatgcccagacagagttcagg

SEQ ID NO: 3719678 - DNA, 25 bp, Homo sapien
agagttcatttatgcccagacagag

SEQ ID NO: 3719679 - DNA, 25 bp, Homo sapien
aattagggaccagctgtaccaacca

SEQ ID NO: 3719680 - DNA, 25 bp, Homo sapien
gaacatcttcgtgtttctcatccaa

SEQ ID NO: 3719681 - DNA, 25 bp, Homo sapien
taggaacatcttcgtgtttctcatc

SEQ ID NO: 3719682 - DNA, 25 bp, Homo sapien
tggcattaggaacatcttcgtgttt

SEQ ID NO: 3719683 - DNA, 25 bp, Homo sapien
cattaggaacatcttcgtgtttctc

SEQ ID NO: 3719684 - DNA, 25 bp, Homo sapien
gcttcatctgcacaagatagcgatg

SEQ ID NO: 3719685 - DNA, 25 bp, Homo sapien
atgaagactgtcatcaataatgcca

SEQ ID NO: 3719686 - DNA, 25 bp, Homo sapien
atctgcacaagatagcgatgtagga

SEQ ID NO: 3719687 - DNA, 25 bp, Homo sapien
tgccatctggttgttcagccttttt

SEQ ID NO: 3719688 - DNA, 25 bp, Homo sapien
aacaactaacttcaccgactaaatg

SEQ ID NO: 3719689 - DNA, 25 bp, Homo sapien
acttcaccgactaaatgaagaagaa

SEQ ID NO: 3719690 - DNA, 25 bp, Homo sapien
caactaacttcaccgactaaatgaa

SEQ ID NO: 3719691 - DNA, 25 bp, Homo sapien
ttcaccgactaaatgaagaagaatg

SEQ ID NO: 3719692 - DNA, 25 bp, Homo sapien
tatagttacaagaccattatcatgc

SEQ ID NO: 3719693 - DNA, 25 bp, Homo sapien
tcttggttacatggaggttgctagg

SEQ ID NO: 3719694 - DNA, 25 bp, Homo sapien
aacaccagcccatttggtatttggt

SEQ ID NO: 3719695 - DNA, 25 bp, Homo sapien
gagtcaatatgggtccagcacaaca

SEQ ID NO: 3719696 - DNA, 25 bp, Homo sapien
atttatagccggcatggtggatcag

SEQ ID NO: 3719697 - DNA, 25 bp, Homo sapien
aagtaatttatagccggcatggtgg

SEQ ID NO: 3719698 - DNA, 25 bp, Homo sapien
tatagccggcatggtggatcaggcc

SEQ ID NO: 3719699 - DNA, 25 bp, Homo sapien
aaaaagtaatttatagccggcatgg

SEQ ID NO: 3719700 - DNA, 25 bp, Homo sapien
gattacaagaccactatcatgcccc

SEQ ID NO: 3719701 - DNA, 25 bp, Homo sapien
gagccactgcgactcgctagcacaa

SEQ ID NO: 3719702 - DNA, 25 bp, Homo sapien
gctagcacaacactggcccatttga

SEQ ID NO: 3719703 - DNA, 25 bp, Homo sapien
ggctagtgtcaaatgcatggcttca

SEQ ID NO: 3719704 - DNA, 25 bp, Homo sapien
agacaggttttgccacgttggccag

SEQ ID NO: 3719705 - DNA, 25 bp, Homo sapien
tagagacaggttttgccacgttggc

SEQ ID NO: 3719706 - DNA, 25 bp, Homo sapien
gtagagacaggttttgccacgttgg

SEQ ID NO: 3719707 - DNA, 25 bp, Homo sapien
ttagtagagacaggttttgccacgt

SEQ ID NO: 3719708 - DNA, 25 bp, Homo sapien
caaatgcaagggatgaaaacaattc

SEQ ID NO: 3719709 - DNA, 25 bp, Homo sapien
caaaatattcagacaacggctagcc

SEQ ID NO: 3719710 - DNA, 25 bp, Homo sapien
tattcctgttagcaatgactgatat

SEQ ID NO: 3719711 - DNA, 25 bp, Homo sapien
aattaaccccagagctctaactggg

SEQ ID NO: 3719712 - DNA, 25 bp, Homo sapien
caaagccccacagagtagcacaaag

SEQ ID NO: 3719713 - DNA, 25 bp, Homo sapien
agttctgtaaaaaagtcttgcatct

SEQ ID NO: 3719714 - DNA, 25 bp, Homo sapien
tccctaatatcacatttaacatgct

SEQ ID NO: 3719715 - DNA, 25 bp, Homo sapien
gtcttgcatcttccctaatatcaca

SEQ ID NO: 3719716 - DNA, 25 bp, Homo sapien
tttccatgtatcctggcgaccaagt

SEQ ID NO: 3719717 - DNA, 25 bp, Homo sapien
tgagtaggccgacagttctggatta

SEQ ID NO: 3719718 - DNA, 25 bp, Homo sapien
gtaggccgacagttctggattattt

SEQ ID NO: 3719719 - DNA, 25 bp, Homo sapien
gagtaggccgacagttctggattat

SEQ ID NO: 3719720 - DNA, 25 bp, Homo sapien
atacatgaaattgtataacaaaatg

SEQ ID NO: 3719721 - DNA, 25 bp, Homo sapien
agtatgaagagtgccattcagcaaa

SEQ ID NO: 3719722 - DNA, 25 bp, Homo sapien
acatgaaattgtataacaaaatgac

SEQ ID NO: 3719723 - DNA, 25 bp, Homo sapien
tatgaagagtgccattcagcaaaac

SEQ ID NO: 3719724 - DNA, 25 bp, Homo sapien
gaatctggtacccagaagtcatgaa

SEQ ID NO: 3719725 - DNA, 25 bp, Homo sapien
tctggtacccagaagtcatgaagct

SEQ ID NO: 3719726 - DNA, 25 bp, Homo sapien
taagaatctggtacccagaagtcat

SEQ ID NO: 3719727 - DNA, 25 bp, Homo sapien
ttaagaatctggtacccagaagtca

SEQ ID NO: 3719728 - DNA, 25 bp, Homo sapien
aaggctcttattgaatttctcttgg

SEQ ID NO: 3719729 - DNA, 25 bp, Homo sapien
ctatgaaaggctcttattgaatttc

SEQ ID NO: 3719730 - DNA, 25 bp, Homo sapien
aaaggctcttattgaatttctcttg

SEQ ID NO: 3719731 - DNA, 25 bp, Homo sapien
tgaaaggctcttattgaatttctct

SEQ ID NO: 3719732 - DNA, 25 bp, Homo sapien
tgtgtccgaaaataaccaagaggga

SEQ ID NO: 3719733 - DNA, 25 bp, Homo sapien
taagactctgcacttttgaaaggtc

SEQ ID NO: 3719734 - DNA, 25 bp, Homo sapien
cagggccactactttacagcttaac

SEQ ID NO: 3719735 - DNA, 25 bp, Homo sapien
gggatctgacaacatgccaaacttt

SEQ ID NO: 3719736 - DNA, 25 bp, Homo sapien
cacagataatgaggtgcgccgacac

SEQ ID NO: 3719737 - DNA, 25 bp, Homo sapien
aatactgactggactatgacctgga

SEQ ID NO: 3719738 - DNA, 25 bp, Homo sapien
gacacagtgtcccaaagaattcagg

SEQ ID NO: 3719739 - DNA, 25 bp, Homo sapien
taccagagtcataaatacaagggcc

SEQ ID NO: 3719740 - DNA, 25 bp, Homo sapien
gaaaagtcagctagtagtttgaaaa

SEQ ID NO: 3719741 - DNA, 25 bp, Homo sapien
tagtttgaaaaagaccacagaagaa

SEQ ID NO: 3719742 - DNA, 25 bp, Homo sapien
gggaaaagtcagctagtagtttgaa

SEQ ID NO: 3719743 - DNA, 25 bp, Homo sapien
ctaaggaaggggcatgaaagagggc

SEQ ID NO: 3719744 - DNA, 25 bp, Homo sapien
caagcttatgcacaggcttgtgttg

SEQ ID NO: 3719745 - DNA, 25 bp, Homo sapien
agcttatgcacaggcttgtgttggg

SEQ ID NO: 3719746 - DNA, 25 bp, Homo sapien
tggcaaaggtagaaatgttcaagct

SEQ ID NO: 3719747 - DNA, 25 bp, Homo sapien
ggtagaaatgttcaagcttatgcac

SEQ ID NO: 3719748 - DNA, 25 bp, Homo sapien
cattcttgtgtttatggagaggaca

SEQ ID NO: 3719749 - DNA, 25 bp, Homo sapien
cccatcctgaggaatttatagcccc

SEQ ID NO: 3719750 - DNA, 25 bp, Homo sapien
tatttgtaccctcatcccatcctga

SEQ ID NO: 3719751 - DNA, 25 bp, Homo sapien
ggaaacaggctctaagacattaagt

SEQ ID NO: 3719752 - DNA, 25 bp, Homo sapien
ctttgcgctcggatccggggccata

SEQ ID NO: 3719753 - DNA, 25 bp, Homo sapien
atccggggccatagagacagcgacg

SEQ ID NO: 3719754 - DNA, 25 bp, Homo sapien
atagagacagcgacgcgcggctccg

SEQ ID NO: 3719755 - DNA, 25 bp, Homo sapien
ttgcgctcggatccggggccataga

SEQ ID NO: 3719756 - DNA, 25 bp, Homo sapien
ctctagagccgtcatgcaggaccgg

SEQ ID NO: 3719757 - DNA, 25 bp, Homo sapien
ccgggagacgtgacccagatcctgg

SEQ ID NO: 3719758 - DNA, 25 bp, Homo sapien
ccgactccgtggtggccggtttgca

SEQ ID NO: 3719759 - DNA, 25 bp, Homo sapien
ctctactgctgcagctcgaggacaa

SEQ ID NO: 3719760 - DNA, 25 bp, Homo sapien
tcataaggtcataggagtcaaggaa

SEQ ID NO: 3719761 - DNA, 25 bp, Homo sapien
gggagggatcacatgcctttctgca

SEQ ID NO: 3719762 - DNA, 25 bp, Homo sapien
catggaatccccagctaagaggtca

SEQ ID NO: 3719763 - DNA, 25 bp, Homo sapien
ccaaagggagccagagtcacaggtt

SEQ ID NO: 3719764 - DNA, 25 bp, Homo sapien
agacggtctccgcagtgagggtcct

SEQ ID NO: 3719765 - DNA, 25 bp, Homo sapien
tatggtcatccgaggggtggcatct

SEQ ID NO: 3719766 - DNA, 25 bp, Homo sapien
gggtggcatctagttctctagacgg

SEQ ID NO: 3719767 - DNA, 25 bp, Homo sapien
ctgcagttgctgtgaggatgctgag

SEQ ID NO: 3719768 - DNA, 25 bp, Homo sapien
tgtcgttggcactgagagagaacag

SEQ ID NO: 3719769 - DNA, 25 bp, Homo sapien
cagtgttgagtagttctgggcttgg

SEQ ID NO: 3719770 - DNA, 25 bp, Homo sapien
tgagccccatctcctatgtcgttgg

SEQ ID NO: 3719771 - DNA, 25 bp, Homo sapien
ttgaagtgccgggtcccagagagct

SEQ ID NO: 3719772 - DNA, 25 bp, Homo sapien
ggataagcatagagaccctctgggt

SEQ ID NO: 3719773 - DNA, 25 bp, Homo sapien
gctggcagggttttaaggaagttga

SEQ ID NO: 3719774 - DNA, 25 bp, Homo sapien
gctggataagcatagagaccctctg

SEQ ID NO: 3719775 - DNA, 25 bp, Homo sapien
agggagctggataagcatagagacc

SEQ ID NO: 3719776 - DNA, 25 bp, Homo sapien
tctctggggaggcttcccagtggat

SEQ ID NO: 3719777 - DNA, 25 bp, Homo sapien
tccctttttgatgacatttgctttg

SEQ ID NO: 3719778 - DNA, 25 bp, Homo sapien
ttttccctttttgatgacatttgct

SEQ ID NO: 3719779 - DNA, 25 bp, Homo sapien
ttgctttgcatctctggggaggctt

SEQ ID NO: 3719780 - DNA, 25 bp, Homo sapien
gcgtgagtcccacatgcatagaggt

SEQ ID NO: 3719781 - DNA, 25 bp, Homo sapien
accgcacatggttaaagcactccgt

SEQ ID NO: 3719782 - DNA, 25 bp, Homo sapien
gaaggcgtgagtcccacatgcatag

SEQ ID NO: 3719783 - DNA, 25 bp, Homo sapien
tgggtagaattgagccgctgcagga

SEQ ID NO: 3719784 - DNA, 25 bp, Homo sapien
tcccctcctcgaagctggttggcaa

SEQ ID NO: 3719785 - DNA, 25 bp, Homo sapien
tggttggcaaggtgaaggcctcagc

SEQ ID NO: 3719786 - DNA, 25 bp, Homo sapien
tccttcccctcctcgaagctggttg

SEQ ID NO: 3719787 - DNA, 25 bp, Homo sapien
aagccacgggctgggtcataaggac

SEQ ID NO: 3719788 - DNA, 25 bp, Homo sapien
cattggtgtctcctcagttctcagg

SEQ ID NO: 3719789 - DNA, 25 bp, Homo sapien
cattgagccaatgcattggtgtctc

SEQ ID NO: 3719790 - DNA, 25 bp, Homo sapien
ttcatacctagtggctgtgtagagg

SEQ ID NO: 3719791 - DNA, 25 bp, Homo sapien
gcggatgtcaggaatgctccggaat

SEQ ID NO: 3719792 - DNA, 25 bp, Homo sapien
tggaatggacaggctcacctgggga

SEQ ID NO: 3719793 - DNA, 25 bp, Homo sapien
gacccctcacttgacaacacacagg

SEQ ID NO: 3719794 - DNA, 25 bp, Homo sapien
ctcacttgacaacacacaggaatgg

SEQ ID NO: 3719795 - DNA, 25 bp, Homo sapien
aggctgacccctcacttgacaacac

SEQ ID NO: 3719796 - DNA, 25 bp, Homo sapien
agaagtagtacaccttgtcatcatc

SEQ ID NO: 3719797 - DNA, 25 bp, Homo sapien
tcagtggcacgctccgtgaagaagt

SEQ ID NO: 3719798 - DNA, 25 bp, Homo sapien
cacggtgactgctgcggctctgagt

SEQ ID NO: 3719799 - DNA, 25 bp, Homo sapien
ttgctctcccgcacgaggacggaga

SEQ ID NO: 3719800 - DNA, 25 bp, Homo sapien
ccgtgccccaacgtcagcccaatcc

SEQ ID NO: 3719801 - DNA, 25 bp, Homo sapien
gtgccccaacgtcagcccaatccac

SEQ ID NO: 3719802 - DNA, 25 bp, Homo sapien
cgtgccccaacgtcagcccaatcca

SEQ ID NO: 3719803 - DNA, 25 bp, Homo sapien
gaggtagaggcacgggataaggggc

SEQ ID NO: 3719804 - DNA, 25 bp, Homo sapien
tggggaggtagaggcacgggataag

SEQ ID NO: 3719805 - DNA, 25 bp, Homo sapien
ggtagaggcacgggataaggggcca

SEQ ID NO: 3719806 - DNA, 25 bp, Homo sapien
tagaggcacgggataaggggccagg

SEQ ID NO: 3719807 - DNA, 25 bp, Homo sapien
aggctgcatagaagtgtgtacggct

SEQ ID NO: 3719808 - DNA, 25 bp, Homo sapien
gaccccacgcagtgtctcatacagt

SEQ ID NO: 3719809 - DNA, 25 bp, Homo sapien
aatgtggcagatgagacgggctttc

SEQ ID NO: 3719810 - DNA, 25 bp, Homo sapien
gtacggcttgaggtttcagcatcca

SEQ ID NO: 3719811 - DNA, 25 bp, Homo sapien
catatagggtcctgcaaagacagcc

SEQ ID NO: 3719812 - DNA, 25 bp, Homo sapien
ggatctctgccaggtcatagcggca

SEQ ID NO: 3719813 - DNA, 25 bp, Homo sapien
tgccaggtcatagcggcagatggct

SEQ ID NO: 3719814 - DNA, 25 bp, Homo sapien
cagcgccgggaaccatcctggtatt

SEQ ID NO: 3719815 - DNA, 25 bp, Homo sapien
ccaggccggggctcaggcaccccac

SEQ ID NO: 3719816 - DNA, 25 bp, Homo sapien
gccaggccggggctcaggcacccca

SEQ ID NO: 3719817 - DNA, 25 bp, Homo sapien
cgagccaggccggggctcaggcacc

SEQ ID NO: 3719818 - DNA, 25 bp, Homo sapien
agccaggccggggctcaggcacccc

SEQ ID NO: 3719819 - DNA, 25 bp, Homo sapien
gaaggtggtgaacctcgggactcca

SEQ ID NO: 3719820 - DNA, 25 bp, Homo sapien
caagtcttgggatgaattgtagcct

SEQ ID NO: 3719821 - DNA, 25 bp, Homo sapien
tccctgtaaggtgtgtgtagcgtat

SEQ ID NO: 3719822 - DNA, 25 bp, Homo sapien
gtagcgtatgttgcgcttgagcagc

SEQ ID NO: 3719823 - DNA, 25 bp, Homo sapien
ccatcagtgggtgcaactttacaaa

SEQ ID NO: 3719824 - DNA, 25 bp, Homo sapien
gagttagaccccaactatgggatct

SEQ ID NO: 3719825 - DNA, 25 bp, Homo sapien
gaccccaactatgggatctgctctc

SEQ ID NO: 3719826 - DNA, 25 bp, Homo sapien
gaaagagcagagagttagaccccaa

SEQ ID NO: 3719827 - DNA, 25 bp, Homo sapien
cagagagttagaccccaactatggg

SEQ ID NO: 3719828 - DNA, 25 bp, Homo sapien
tacggccttgtggatccagccatca

SEQ ID NO: 3719829 - DNA, 25 bp, Homo sapien
caggactacggccttgtggatccag

SEQ ID NO: 3719830 - DNA, 25 bp, Homo sapien
ccagagcccaggactacggccttgt

SEQ ID NO: 3719831 - DNA, 25 bp, Homo sapien
gagcccaggactacggccttgtgga

SEQ ID NO: 3719832 - DNA, 25 bp, Homo sapien
tcgggccaagatgcagtcatagcag

SEQ ID NO: 3719833 - DNA, 25 bp, Homo sapien
agctggatgactccgctaggagccc

SEQ ID NO: 3719834 - DNA, 25 bp, Homo sapien
gtcatagcaggatcggtagcgggag

SEQ ID NO: 3719835 - DNA, 25 bp, Homo sapien
ggctgctgcgcaggcatgggtgcca

SEQ ID NO: 3719836 - DNA, 25 bp, Homo sapien
ctctatgtcctgtatcagtgctgtc

SEQ ID NO: 3719837 - DNA, 25 bp, Homo sapien
ctctctatgtcctgtatcagtgctg

SEQ ID NO: 3719838 - DNA, 25 bp, Homo sapien
tctctatgtcctgtatcagtgctgt

SEQ ID NO: 3719839 - DNA, 25 bp, Homo sapien
caggctctgtgtttgagtcatcctt

SEQ ID NO: 3719840 - DNA, 25 bp, Homo sapien
ccacagccactcagatacaaacata

SEQ ID NO: 3719841 - DNA, 25 bp, Homo sapien
cgtacacatggcagtaaatggcaaa

SEQ ID NO: 3719842 - DNA, 25 bp, Homo sapien
taccaaatgtacatagccacagcca

SEQ ID NO: 3719843 - DNA, 25 bp, Homo sapien
actcggatatctaccatgtgctggg

SEQ ID NO: 3719844 - DNA, 25 bp, Homo sapien
cttgaatcgccaccactgtgaatgg

SEQ ID NO: 3719845 - DNA, 25 bp, Homo sapien
gcatctccacatgaggtctcttgga

SEQ ID NO: 3719846 - DNA, 25 bp, Homo sapien
agtaactcctaatctctacctcaga

SEQ ID NO: 3719847 - DNA, 25 bp, Homo sapien
tgtgcatctgtaaccagcagcccgt

SEQ ID NO: 3719848 - DNA, 25 bp, Homo sapien
tagagcagtctcacatcaggtgcca

SEQ ID NO: 3719849 - DNA, 25 bp, Homo sapien
caagcgcggcaatggctagcacata

SEQ ID NO: 3719850 - DNA, 25 bp, Homo sapien
tggcccgacccagtgagtatttccg

SEQ ID NO: 3719851 - DNA, 25 bp, Homo sapien
tcatcttcctctccaggacactggc

SEQ ID NO: 3719852 - DNA, 25 bp, Homo sapien
ctcatcttcctctccaggacactgg

SEQ ID NO: 3719853 - DNA, 25 bp, Homo sapien
cctcatcttcctctccaggacactg

SEQ ID NO: 3719854 - DNA, 25 bp, Homo sapien
cccagggatgatctggagacagctg

SEQ ID NO: 3719855 - DNA, 25 bp, Homo sapien
cctccccagggatgatctggagaca

SEQ ID NO: 3719856 - DNA, 25 bp, Homo sapien
gctccctccccagggatgatctgga

SEQ ID NO: 3719857 - DNA, 25 bp, Homo sapien
gggatgatctggagacagctgccct

SEQ ID NO: 3719858 - DNA, 25 bp, Homo sapien
ggtactccattgttgctctgcctca

SEQ ID NO: 3719859 - DNA, 25 bp, Homo sapien
agttcctcggcgaaggagcagggcc

SEQ ID NO: 3719860 - DNA, 25 bp, Homo sapien
acagagctctcatctagctgctcca

SEQ ID NO: 3719861 - DNA, 25 bp, Homo sapien
tccacgagctgcgtgtgcttccttt

SEQ ID NO: 3719862 - DNA, 25 bp, Homo sapien
ctggcttggaagagcatttgttctg

SEQ ID NO: 3719863 - DNA, 25 bp, Homo sapien
ccctacagggacatcaaaaagttgg

SEQ ID NO: 3719864 - DNA, 25 bp, Homo sapien
gctgtgttagggaggcagtggccca

SEQ ID NO: 3719865 - DNA, 25 bp, Homo sapien
ggagggtggctgtgttagggaggca

SEQ ID NO: 3719866 - DNA, 25 bp, Homo sapien
gggcacctgatcctgagggagcacc

SEQ ID NO: 3719867 - DNA, 25 bp, Homo sapien
gggtctgcagggcacctgatcctga

SEQ ID NO: 3719868 - DNA, 25 bp, Homo sapien
aatggaacaggaggatggagtcctc

SEQ ID NO: 3719869 - DNA, 25 bp, Homo sapien
cctcacctataagtgtttaggttag

SEQ ID NO: 3719870 - DNA, 25 bp, Homo sapien
tcttgacaaagaggtcaccacatgg

SEQ ID NO: 3719871 - DNA, 25 bp, Homo sapien
tgtggcaattgggagggtaccccaa

SEQ ID NO: 3719872 - DNA, 25 bp, Homo sapien
tgaaacaagaatgcaccaggagaag

SEQ ID NO: 3719873 - DNA, 25 bp, Homo sapien
gcatgtgaatgtacgcagggcttag

SEQ ID NO: 3719874 - DNA, 25 bp, Homo sapien
gaggaggggagtgatgcagtcttac

SEQ ID NO: 3719875 - DNA, 25 bp, Homo sapien
gagaggaggggagtgatgcagtctt

SEQ ID NO: 3719876 - DNA, 25 bp, Homo sapien
gagtggggaggctgattcacaaggg

SEQ ID NO: 3719877 - DNA, 25 bp, Homo sapien
agtggggaggctgattcacaagggc

SEQ ID NO: 3719878 - DNA, 25 bp, Homo sapien
aataacagtcatcctcacccgaggg

SEQ ID NO: 3719879 - DNA, 25 bp, Homo sapien
gtcatccatcctaggcaagggcctg

SEQ ID NO: 3719880 - DNA, 25 bp, Homo sapien
tccaagacagcaagggaggctcaga

SEQ ID NO: 3719881 - DNA, 25 bp, Homo sapien
tcattgagtgcagtgttggtcatcc

SEQ ID NO: 3719882 - DNA, 25 bp, Homo sapien
gggcattcctaaagaagtgtagcca

SEQ ID NO: 3719883 - DNA, 25 bp, Homo sapien
tgtcacatgcctgttccacccacct

SEQ ID NO: 3719884 - DNA, 25 bp, Homo sapien
gccattctcacaataaatacattca

SEQ ID NO: 3719885 - DNA, 25 bp, Homo sapien
ccacctggttgtaagtgggggcatt

SEQ ID NO: 3719886 - DNA, 25 bp, Homo sapien
gatatcaccttctgtataggctcag

SEQ ID NO: 3719887 - DNA, 25 bp, Homo sapien
tgtgaaccttactaaagaggcctgt

SEQ ID NO: 3719888 - DNA, 25 bp, Homo sapien
aggcctgtgtgcctgccaaggagtc

SEQ ID NO: 3719889 - DNA, 25 bp, Homo sapien
gatggaagcggaggatcccaatttc

SEQ ID NO: 3719890 - DNA, 25 bp, Homo sapien
cgcgggactccgagccgcttcttgg

SEQ ID NO: 3719891 - DNA, 25 bp, Homo sapien
gcttcttggccagcgttctccacaa

SEQ ID NO: 3719892 - DNA, 25 bp, Homo sapien
ccaagctgtagctatgacggcgcgc

SEQ ID NO: 3719893 - DNA, 25 bp, Homo sapien
cttgacctcggaagcaaaactccgg

SEQ ID NO: 3719894 - DNA, 25 bp, Homo sapien
cacttcgccggcaacgtgagtctcc

SEQ ID NO: 3719895 - DNA, 25 bp, Homo sapien
gtgagtctcccgcacatgctactcg

SEQ ID NO: 3719896 - DNA, 25 bp, Homo sapien
cggcaacgtgagtctcccgcacatg

SEQ ID NO: 3719897 - DNA, 25 bp, Homo sapien
tctctcccacttcgccggcaacgtg

SEQ ID NO: 3719898 - DNA, 25 bp, Homo sapien
aacacggcgagagcacccagcacga

SEQ ID NO: 3719899 - DNA, 25 bp, Homo sapien
tcccctcactgggacctcaacacgg

SEQ ID NO: 3719900 - DNA, 25 bp, Homo sapien
tcttcactccgctctactactccga

SEQ ID NO: 3719901 - DNA, 25 bp, Homo sapien
ctttgccctaggccccgactagaga

SEQ ID NO: 3719902 - DNA, 25 bp, Homo sapien
tcctagccaaatgtgggaagtcact

SEQ ID NO: 3719903 - DNA, 25 bp, Homo sapien
aaatgccttaggtgcctggttagcg

SEQ ID NO: 3719904 - DNA, 25 bp, Homo sapien
ggatatcccacgcagcactctgcag

SEQ ID NO: 3719905 - DNA, 25 bp, Homo sapien
gccttcactagaccaaactctaggg

SEQ ID NO: 3719906 - DNA, 25 bp, Homo sapien
cactccccacgcaggggtaacaaga

SEQ ID NO: 3719907 - DNA, 25 bp, Homo sapien
tccttcctgtaacgtctgcgaggag

SEQ ID NO: 3719908 - DNA, 25 bp, Homo sapien
acccacttcggaggaggacccacat

SEQ ID NO: 3719909 - DNA, 25 bp, Homo sapien
cctgtaacgtctgcgaggagggcct

SEQ ID NO: 3719910 - DNA, 25 bp, Homo sapien
agtggtaacaccagtctggcctttg

SEQ ID NO: 3719911 - DNA, 25 bp, Homo sapien
tgtcctcaaattctggtgccttgct

SEQ ID NO: 3719912 - DNA, 25 bp, Homo sapien
gctggtcatgcagagaaagtggcct

SEQ ID NO: 3719913 - DNA, 25 bp, Homo sapien
gcggatttcagttgcagttacaggc

SEQ ID NO: 3719914 - DNA, 25 bp, Homo sapien
agctcccagagaggtattgctcggt

SEQ ID NO: 3719915 - DNA, 25 bp, Homo sapien
cccagagaggtattgctcggttcca

SEQ ID NO: 3719916 - DNA, 25 bp, Homo sapien
gagaggtattgctcggttccagatc

SEQ ID NO: 3719917 - DNA, 25 bp, Homo sapien
ttgctcggttccagatcctccggac

SEQ ID NO: 3719918 - DNA, 25 bp, Homo sapien
tggtcgcaccaagaagcatcgtttg

SEQ ID NO: 3719919 - DNA, 25 bp, Homo sapien
gagcaggtcgcagatatcgcacact

SEQ ID NO: 3719920 - DNA, 25 bp, Homo sapien
aagattgaagcctccgttcagggcc

SEQ ID NO: 3719921 - DNA, 25 bp, Homo sapien
tacgattgaggtctggaaagcggct

SEQ ID NO: 3719922 - DNA, 25 bp, Homo sapien
ctcactgatgaatgtcgtctttcca

SEQ ID NO: 3719923 - DNA, 25 bp, Homo sapien
atccagggcatactcactgatgaat

SEQ ID NO: 3719924 - DNA, 25 bp, Homo sapien
tcactgatgaatgtcgtctttccac

SEQ ID NO: 3719925 - DNA, 25 bp, Homo sapien
actcactgatgaatgtcgtctttcc

SEQ ID NO: 3719926 - DNA, 25 bp, Homo sapien
cagcccagtgatcatatttgtccag

SEQ ID NO: 3719927 - DNA, 25 bp, Homo sapien
atctcgaagctaccccacagtgtgt

SEQ ID NO: 3719928 - DNA, 25 bp, Homo sapien
ggcaggtcctcaaagcggtcagccc

SEQ ID NO: 3719929 - DNA, 25 bp, Homo sapien
gcatgacccgggctagtctcacatt

SEQ ID NO: 3719930 - DNA, 25 bp, Homo sapien
tgcaggttgtcgatgatcacatgac

SEQ ID NO: 3719931 - DNA, 25 bp, Homo sapien
cccatcatgaactgcaggttgtcga

SEQ ID NO: 3719932 - DNA, 25 bp, Homo sapien
tggacagctgctcgtgacccatcat

SEQ ID NO: 3719933 - DNA, 25 bp, Homo sapien
tcatagacgtagactgcatgttgca

SEQ ID NO: 3719934 - DNA, 25 bp, Homo sapien
caagcgggctcaagctagacaagag

SEQ ID NO: 3719935 - DNA, 25 bp, Homo sapien
ttgtatgtccaagcgggctcaagct

SEQ ID NO: 3719936 - DNA, 25 bp, Homo sapien
atgtgtgcctagaggccagctgcct

SEQ ID NO: 3719937 - DNA, 25 bp, Homo sapien
tgtgtgttgtatgtccaagcgggct

SEQ ID NO: 3719938 - DNA, 25 bp, Homo sapien
tacgccatcccaacaacacaaagag

SEQ ID NO: 3719939 - DNA, 25 bp, Homo sapien
tatgatacacatgggggtggtacgt

SEQ ID NO: 3719940 - DNA, 25 bp, Homo sapien
ctaccacaacccactctacctccct

SEQ ID NO: 3719941 - DNA, 25 bp, Homo sapien
taccccacacctccatatgatacac

SEQ ID NO: 3719942 - DNA, 25 bp, Homo sapien
ttattgtctgttgcaaacttccgaa

SEQ ID NO: 3719943 - DNA, 25 bp, Homo sapien
aaaaatggacgctgtctgcagttcc

SEQ ID NO: 3719944 - DNA, 25 bp, Homo sapien
agaccccgatgatgtagtcttgagc

SEQ ID NO: 3719945 - DNA, 25 bp, Homo sapien
agtgtcacatggcagttattgtctg

SEQ ID NO: 3719946 - DNA, 25 bp, Homo sapien
ccactctattttccaaagcttgagc

SEQ ID NO: 3719947 - DNA, 25 bp, Homo sapien
cactctattttccaaagcttgagct

SEQ ID NO: 3719948 - DNA, 25 bp, Homo sapien
ctctattttccaaagcttgagctcc

SEQ ID NO: 3719949 - DNA, 25 bp, Homo sapien
tctattttccaaagcttgagctccg

SEQ ID NO: 3719950 - DNA, 25 bp, Homo sapien
tctcagagttctgtgtcgtagcccc

SEQ ID NO: 3719951 - DNA, 25 bp, Homo sapien
tcaagcgggaagacacctacatctc

SEQ ID NO: 3719952 - DNA, 25 bp, Homo sapien
agagggctttttggccactggtcca

SEQ ID NO: 3719953 - DNA, 25 bp, Homo sapien
tcttggacacctgcagataccgttt

SEQ ID NO: 3719954 - DNA, 25 bp, Homo sapien
caatggcatcagtgtctaggtggca

SEQ ID NO: 3719955 - DNA, 25 bp, Homo sapien
gatattgcagggctaagcacctagg

SEQ ID NO: 3719956 - DNA, 25 bp, Homo sapien
ggaccacaggatagaggagcccttg

SEQ ID NO: 3719957 - DNA, 25 bp, Homo sapien
taggttaggcccctcagactgagaa

SEQ ID NO: 3719958 - DNA, 25 bp, Homo sapien
ggtatgactgatatggtattgtgcc

SEQ ID NO: 3719959 - DNA, 25 bp, Homo sapien
tgccgttcagcgttacagactctgg

SEQ ID NO: 3719960 - DNA, 25 bp, Homo sapien
ggcatggctgccgttcagcgttaca

SEQ ID NO: 3719961 - DNA, 25 bp, Homo sapien
cagcgttacagactctggatgaggc

SEQ ID NO: 3719962 - DNA, 25 bp, Homo sapien
tggggctgcccaggcagaaccagca

SEQ ID NO: 3719963 - DNA, 25 bp, Homo sapien
tcagcgtggggctgcccaggcagaa

SEQ ID NO: 3719964 - DNA, 25 bp, Homo sapien
gcgtggggctgcccaggcagaacca

SEQ ID NO: 3719965 - DNA, 25 bp, Homo sapien
gggctgcccaggcagaaccagcaca

SEQ ID NO: 3719966 - DNA, 25 bp, Homo sapien
gacaacgccggctccctagccggct

SEQ ID NO: 3719967 - DNA, 25 bp, Homo sapien
tcctcgccgcgacaacgccggctcc

SEQ ID NO: 3719968 - DNA, 25 bp, Homo sapien
ctccgaactctaggttccgaactct

SEQ ID NO: 3719969 - DNA, 25 bp, Homo sapien
gccggctccgaactctaggttccga

SEQ ID NO: 3719970 - DNA, 25 bp, Homo sapien
aagggcctgtctccgaaaccttcag

SEQ ID NO: 3719971 - DNA, 25 bp, Homo sapien
tgtctccgaaaccttcagggatgca

SEQ ID NO: 3719972 - DNA, 25 bp, Homo sapien
tgctctctgggctggcggtaacagg

SEQ ID NO: 3719973 - DNA, 25 bp, Homo sapien
gccatcaagggcctgtctccgaaac

SEQ ID NO: 3719974 - DNA, 25 bp, Homo sapien
tcagcctcacaagaacagactgagc

SEQ ID NO: 3719975 - DNA, 25 bp, Homo sapien
cctcacaagaacagactgagcccct

SEQ ID NO: 3719976 - DNA, 25 bp, Homo sapien
agaccctcagcctcacaagaacaga

SEQ ID NO: 3719977 - DNA, 25 bp, Homo sapien
cctcagcctcacaagaacagactga

SEQ ID NO: 3719978 - DNA, 25 bp, Homo sapien
ttcgcacccagtcacagtctcaagt

SEQ ID NO: 3719979 - DNA, 25 bp, Homo sapien
acaggcttccacaacaatccgcagt

SEQ ID NO: 3719980 - DNA, 25 bp, Homo sapien
agtctcagccgtcacgtgggtccgc

SEQ ID NO: 3719981 - DNA, 25 bp, Homo sapien
tcacacacagacacggtgtcacagg

SEQ ID NO: 3719982 - DNA, 25 bp, Homo sapien
aagcacccgcgtcacgcgaatccgc

SEQ ID NO: 3719983 - DNA, 25 bp, Homo sapien
tccgacgccctgtgactgcgtgtct

SEQ ID NO: 3719984 - DNA, 25 bp, Homo sapien
ctgctcggcggcagtcgggagccct

SEQ ID NO: 3719985 - DNA, 25 bp, Homo sapien
ccagcggcagctggtcattgttcca

SEQ ID NO: 3719986 - DNA, 25 bp, Homo sapien
tggctaaataagaaacccgcggctc

SEQ ID NO: 3719987 - DNA, 25 bp, Homo sapien
gagggcccataagtccaaagtgcca

SEQ ID NO: 3719988 - DNA, 25 bp, Homo sapien
gcgatcacgagttcccattctgcgg

SEQ ID NO: 3719989 - DNA, 25 bp, Homo sapien
ggctggattccaccgcgcataagtt

SEQ ID NO: 3719990 - DNA, 25 bp, Homo sapien
cctggccagcggcctcgcaggcgac

SEQ ID NO: 3719991 - DNA, 25 bp, Homo sapien
agcaggctccagtggcactggcaga

SEQ ID NO: 3719992 - DNA, 25 bp, Homo sapien
gtggcagcttcaggagcaggctcca

SEQ ID NO: 3719993 - DNA, 25 bp, Homo sapien
cagtggcagcttcaggagcaggctc

SEQ ID NO: 3719994 - DNA, 25 bp, Homo sapien
ggcagcttcaggagcaggctccagt

SEQ ID NO: 3719995 - DNA, 25 bp, Homo sapien
tcctgctggcggaagaaggtgggcc

SEQ ID NO: 3719996 - DNA, 25 bp, Homo sapien
gctgctctcgggcatcctcaacatc

SEQ ID NO: 3719997 - DNA, 25 bp, Homo sapien
gtgggcattgtgtgcccgctgctct

SEQ ID NO: 3719998 - DNA, 25 bp, Homo sapien
ccggcctgagataaggctgctcaca

SEQ ID NO: 3719999 - DNA, 25 bp, Homo sapien
aggtctggtgaatctggagcccaca

SEQ ID NO: 3720000 - DNA, 25 bp, Homo sapien
taaccagaacgtaagcaactagcac

SEQ ID NO: 3720001 - DNA, 25 bp, Homo sapien
tgaggtcacacatccagaatgagag

SEQ ID NO: 3720002 - DNA, 25 bp, Homo sapien
taaattccagtttcccaagcgagga

SEQ ID NO: 3720003 - DNA, 25 bp, Homo sapien
gacggagcccctcgaggtttgggca

SEQ ID NO: 3720004 - DNA, 25 bp, Homo sapien
gcccggtggcccgaggacccatgaa

SEQ ID NO: 3720005 - DNA, 25 bp, Homo sapien
ggcttgaaggctgttgggcggatca

SEQ ID NO: 3720006 - DNA, 25 bp, Homo sapien
acccatgaagctaggcagggacgga

SEQ ID NO: 3720007 - DNA, 25 bp, Homo sapien
gctgcgtcaggctgccctggctccc

SEQ ID NO: 3720008 - DNA, 25 bp, Homo sapien
cgtcaggctgccctggctcccagac

SEQ ID NO: 3720009 - DNA, 25 bp, Homo sapien
agctgcgtcaggctgccctggctcc

SEQ ID NO: 3720010 - DNA, 25 bp, Homo sapien
tgcgtcaggctgccctggctcccag

SEQ ID NO: 3720011 - DNA, 25 bp, Homo sapien
aatgccaggggtttgtcagcagctg

SEQ ID NO: 3720012 - DNA, 25 bp, Homo sapien
taaatgccaggggtttgtcagcagc

SEQ ID NO: 3720013 - DNA, 25 bp, Homo sapien
ctaaatgccaggggtttgtcagcag

SEQ ID NO: 3720014 - DNA, 25 bp, Homo sapien
tgccaggggtttgtcagcagctgaa

SEQ ID NO: 3720015 - DNA, 25 bp, Homo sapien
aggaccggccactgtctgagtggga

SEQ ID NO: 3720016 - DNA, 25 bp, Homo sapien
tggttggctcggcacctccggtgct

SEQ ID NO: 3720017 - DNA, 25 bp, Homo sapien
ggatagcgtccctgatgggcagcca

SEQ ID NO: 3720018 - DNA, 25 bp, Homo sapien
tggacagtgagtttcggccagagtc

SEQ ID NO: 3720019 - DNA, 25 bp, Homo sapien
aggcccgagtaccactgcccaaaag

SEQ ID NO: 3720020 - DNA, 25 bp, Homo sapien
ggtagcctcattctcgtccagactg

SEQ ID NO: 3720021 - DNA, 25 bp, Homo sapien
ggccccctagggagcctgtgctctt

SEQ ID NO: 3720022 - DNA, 25 bp, Homo sapien
tggtggtgagcgctccccacaggag

SEQ ID NO: 3720023 - DNA, 25 bp, Homo sapien
ccttccccatcattgcctctgacca

SEQ ID NO: 3720024 - DNA, 25 bp, Homo sapien
tccccatcattgcctctgaccacac

SEQ ID NO: 3720025 - DNA, 25 bp, Homo sapien
ttccccatcattgcctctgaccaca

SEQ ID NO: 3720026 - DNA, 25 bp, Homo sapien
ccccttccccatcattgcctctgac

SEQ ID NO: 3720027 - DNA, 25 bp, Homo sapien
aaatggaaatgccgcttgcatccca

SEQ ID NO: 3720028 - DNA, 25 bp, Homo sapien
ggaaatgccgcttgcatcccagggc

SEQ ID NO: 3720029 - DNA, 25 bp, Homo sapien
caaaatggaaatgccgcttgcatcc

SEQ ID NO: 3720030 - DNA, 25 bp, Homo sapien
atggaaatgccgcttgcatcccagg

SEQ ID NO: 3720031 - DNA, 25 bp, Homo sapien
caagagcaagcagaccgggctcggt

SEQ ID NO: 3720032 - DNA, 25 bp, Homo sapien
gtggattccattaaacaacaatagt

SEQ ID NO: 3720033 - DNA, 25 bp, Homo sapien
gcccacttccgagggctcaggaagg

SEQ ID NO: 3720034 - DNA, 25 bp, Homo sapien
aaaagcaagcacttggccgggtgca

SEQ ID NO: 3720035 - DNA, 25 bp, Homo sapien
cagtgccgctgccgctcctcgtatg

SEQ ID NO: 3720036 - DNA, 25 bp, Homo sapien
ccagtgccgctgccgctcctcgtat

SEQ ID NO: 3720037 - DNA, 25 bp, Homo sapien
agtgccgctgccgctcctcgtatgc

SEQ ID NO: 3720038 - DNA, 25 bp, Homo sapien
tctcgcagggcctcacgctctcgct

SEQ ID NO: 3720039 - DNA, 25 bp, Homo sapien
ctcgcagggcctcacgctctcgctg

SEQ ID NO: 3720040 - DNA, 25 bp, Homo sapien
aagtcgtcctgcaattgccgcttct

SEQ ID NO: 3720041 - DNA, 25 bp, Homo sapien
acttggtctcctcaagcctcggccc

SEQ ID NO: 3720042 - DNA, 25 bp, Homo sapien
ctgctcccgctccaaggtggcgcag

SEQ ID NO: 3720043 - DNA, 25 bp, Homo sapien
tcctgcagcagctgtgcgaagtcgt

SEQ ID NO: 3720044 - DNA, 25 bp, Homo sapien
gctcagatattggagccagactgcc

SEQ ID NO: 3720045 - DNA, 25 bp, Homo sapien
cttaagtggaaagcagacctagaac

SEQ ID NO: 3720046 - DNA, 25 bp, Homo sapien
ctgctggagaggtactacagtgacc

SEQ ID NO: 3720047 - DNA, 25 bp, Homo sapien
gggcttcagcctttatgggcctcag

SEQ ID NO: 3720048 - DNA, 25 bp, Homo sapien
tcactgacccgcagcgtagcacggg

SEQ ID NO: 3720049 - DNA, 25 bp, Homo sapien
gagctcgggcggcctcctgtagacc

SEQ ID NO: 3720050 - DNA, 25 bp, Homo sapien
gtagaccccgcgcacggccctcact

SEQ ID NO: 3720051 - DNA, 25 bp, Homo sapien
agagccaccagctcgctgcccttct

SEQ ID NO: 3720052 - DNA, 25 bp, Homo sapien
ctcagtagcagtgatctcctccagg

SEQ ID NO: 3720053 - DNA, 25 bp, Homo sapien
cggttgcgccggtacatctggatgt

SEQ ID NO: 3720054 - DNA, 25 bp, Homo sapien
tctggtagcggatcacctgctcctt

SEQ ID NO: 3720055 - DNA, 25 bp, Homo sapien
caggaggaatgggtcagcggtggca

SEQ ID NO: 3720056 - DNA, 25 bp, Homo sapien
cctggatcctaggagacaagtggct

SEQ ID NO: 3720057 - DNA, 25 bp, Homo sapien
ccaccctgagttcttggcagaagcc

SEQ ID NO: 3720058 - DNA, 25 bp, Homo sapien
tgaagtgggtagtaacaagagcctc

SEQ ID NO: 3720059 - DNA, 25 bp, Homo sapien
ttgctcctccaagtcatagggccac

SEQ ID NO: 3720060 - DNA, 25 bp, Homo sapien
ggccctgtcccccaatgtgggcagg

SEQ ID NO: 3720061 - DNA, 25 bp, Homo sapien
aaatatacaagtgaaaacgaggcca

SEQ ID NO: 3720062 - DNA, 25 bp, Homo sapien
gcacatccggagcagctggtgccat

SEQ ID NO: 3720063 - DNA, 25 bp, Homo sapien
gctcaaacctgggaaccgagcccag

SEQ ID NO: 3720064 - DNA, 25 bp, Homo sapien
tgccggctgcggcagtagctctcgc

SEQ ID NO: 3720065 - DNA, 25 bp, Homo sapien
cctggagggccgagttgatgttggg

SEQ ID NO: 3720066 - DNA, 25 bp, Homo sapien
acaccagcgaccaggtgaggccgac

SEQ ID NO: 3720067 - DNA, 25 bp, Homo sapien
tctcgcctgcgggtggtttgacaag

SEQ ID NO: 3720068 - DNA, 25 bp, Homo sapien
ccggtagctggctcggctcagagaa

SEQ ID NO: 3720069 - DNA, 25 bp, Homo sapien
cagacccaagccctaaatttgcgga

SEQ ID NO: 3720070 - DNA, 25 bp, Homo sapien
aatttgcggaatgagctagggcgtc

SEQ ID NO: 3720071 - DNA, 25 bp, Homo sapien
ctagggcgtcagaaccagaactggg

SEQ ID NO: 3720072 - DNA, 25 bp, Homo sapien
ccatcacgcgggacgtcacgcgtga

SEQ ID NO: 3720073 - DNA, 25 bp, Homo sapien
ctcccagccatcacgcgggacgtca

SEQ ID NO: 3720074 - DNA, 25 bp, Homo sapien
cacccggtgggcacggggattggca

SEQ ID NO: 3720075 - DNA, 25 bp, Homo sapien
ggacgtcacgcgtgacgccgaccag

SEQ ID NO: 3720076 - DNA, 25 bp, Homo sapien
caggaaagtactttggtcccagcga

SEQ ID NO: 3720077 - DNA, 25 bp, Homo sapien
cagcagcagatttcgaggatcagta

SEQ ID NO: 3720078 - DNA, 25 bp, Homo sapien
acagtgaaaaagtgccgggctctgc

SEQ ID NO: 3720079 - DNA, 25 bp, Homo sapien
gcacgatgttccgagaagcttccag

SEQ ID NO: 3720080 - DNA, 25 bp, Homo sapien
tggtcctcggtgatccctggggtca

SEQ ID NO: 3720081 - DNA, 25 bp, Homo sapien
ggaaggcggagtcatacacatactt

SEQ ID NO: 3720082 - DNA, 25 bp, Homo sapien
cccctgtgtccggatggaaggcgga

SEQ ID NO: 3720083 - DNA, 25 bp, Homo sapien
atgcggccaatcaggaccaccttct

SEQ ID NO: 3720084 - DNA, 25 bp, Homo sapien
gtgagcatgcagccagtgatggtca

SEQ ID NO: 3720085 - DNA, 25 bp, Homo sapien
atgcagccagtgatggtcatgttca

SEQ ID NO: 3720086 - DNA, 25 bp, Homo sapien
cagtgatggtcatgttcatgggcac

SEQ ID NO: 3720087 - DNA, 25 bp, Homo sapien
aatgtgagcatgcagccagtgatgg

SEQ ID NO: 3720088 - DNA, 25 bp, Homo sapien
tcacttctgccccgtctacagtggc

SEQ ID NO: 3720089 - DNA, 25 bp, Homo sapien
acttctgccccgtctacagtggccc

SEQ ID NO: 3720090 - DNA, 25 bp, Homo sapien
cacttctgccccgtctacagtggcc

SEQ ID NO: 3720091 - DNA, 25 bp, Homo sapien
actcacttctgccccgtctacagtg

SEQ ID NO: 3720092 - DNA, 25 bp, Homo sapien
ctgccagaacaccacggttggggtc

SEQ ID NO: 3720093 - DNA, 25 bp, Homo sapien
tgccagaacaccacggttggggtct

SEQ ID NO: 3720094 - DNA, 25 bp, Homo sapien
atgggagtgtcaccactgcggttgg

SEQ ID NO: 3720095 - DNA, 25 bp, Homo sapien
gagtgtcaccactgcggttggagta

SEQ ID NO: 3720096 - DNA, 25 bp, Homo sapien
cggttggagtagttaacaatggcat

SEQ ID NO: 3720097 - DNA, 25 bp, Homo sapien
ccactgcggttggagtagttaacaa

SEQ ID NO: 3720098 - DNA, 25 bp, Homo sapien
atttgagtcccagggccgtggccac

SEQ ID NO: 3720099 - DNA, 25 bp, Homo sapien
tgagggatttgagtcccagggccgt

SEQ ID NO: 3720100 - DNA, 25 bp, Homo sapien
ggatttgagtcccagggccgtggcc

SEQ ID NO: 3720101 - DNA, 25 bp, Homo sapien
agggatttgagtcccagggccgtgg

SEQ ID NO: 3720102 - DNA, 25 bp, Homo sapien
ccctaagggccatggggtggtgagg

SEQ ID NO: 3720103 - DNA, 25 bp, Homo sapien
ggaagggtgttgttcagtggcccta

SEQ ID NO: 3720104 - DNA, 25 bp, Homo sapien
aagggtgttgttcagtggccctaag

SEQ ID NO: 3720105 - DNA, 25 bp, Homo sapien
ggaggaagggtgttgttcagtggcc

SEQ ID NO: 3720106 - DNA, 25 bp, Homo sapien
gttgatgcagttggcagctgccact

SEQ ID NO: 3720107 - DNA, 25 bp, Homo sapien
tgccactgctgcaaagggcacaaat

SEQ ID NO: 3720108 - DNA, 25 bp, Homo sapien
ctctgcctcatcagggggatgttga

SEQ ID NO: 3720109 - DNA, 25 bp, Homo sapien
gatgttgatgcagttggcagctgcc

SEQ ID NO: 3720110 - DNA, 25 bp, Homo sapien
accacctggaagattccctgcttgg

SEQ ID NO: 3720111 - DNA, 25 bp, Homo sapien
tgcagattcttgaaatcaccacctg

SEQ ID NO: 3720112 - DNA, 25 bp, Homo sapien
catggcaggaatcgccatgcagatt

SEQ ID NO: 3720113 - DNA, 25 bp, Homo sapien
agtcaccgagtagccaagcctctga

SEQ ID NO: 3720114 - DNA, 25 bp, Homo sapien
cagagtgtccatgatcagtggtggg

SEQ ID NO: 3720115 - DNA, 25 bp, Homo sapien
tccagagtgtccatgatcagtggtg

SEQ ID NO: 3720116 - DNA, 25 bp, Homo sapien
ctccagagtgtccatgatcagtggt

SEQ ID NO: 3720117 - DNA, 25 bp, Homo sapien
ggacaagagaggtacagtcgcctac

SEQ ID NO: 3720118 - DNA, 25 bp, Homo sapien
cattccaggacaagagaggtacagt

SEQ ID NO: 3720119 - DNA, 25 bp, Homo sapien
cccattccaggacaagagaggtaca

SEQ ID NO: 3720120 - DNA, 25 bp, Homo sapien
tccaggacaagagaggtacagtcgc

SEQ ID NO: 3720121 - DNA, 25 bp, Homo sapien
cccgtgtgtacctctcagtatggag

SEQ ID NO: 3720122 - DNA, 25 bp, Homo sapien
ccttgccttggagcccttagacctg

SEQ ID NO: 3720123 - DNA, 25 bp, Homo sapien
caatggaacggcttgtgtcccctgc

SEQ ID NO: 3720124 - DNA, 25 bp, Homo sapien
taaaacatgcctggtgcatggcact

SEQ ID NO: 3720125 - DNA, 25 bp, Homo sapien
agaagcccaccagtcccacctgcag

SEQ ID NO: 3720126 - DNA, 25 bp, Homo sapien
caggggtgcccccagccaggggcgg

SEQ ID NO: 3720127 - DNA, 25 bp, Homo sapien
ctgcaggggtgcccccagccagggg

SEQ ID NO: 3720128 - DNA, 25 bp, Homo sapien
ccacctgcaggggtgcccccagcca

SEQ ID NO: 3720129 - DNA, 25 bp, Homo sapien
cagcacaggggggttgcaaatacca

SEQ ID NO: 3720130 - DNA, 25 bp, Homo sapien
ctcttctgggggaatagggcacagc

SEQ ID NO: 3720131 - DNA, 25 bp, Homo sapien
ttctgggggaatagggcacagcaca

SEQ ID NO: 3720132 - DNA, 25 bp, Homo sapien
gcacagcacaggggggttgcaaata

SEQ ID NO: 3720133 - DNA, 25 bp, Homo sapien
tactgccagaaggactggctcactg

SEQ ID NO: 3720134 - DNA, 25 bp, Homo sapien
agagatgcagagtccaatccagagt

SEQ ID NO: 3720135 - DNA, 25 bp, Homo sapien
gaagaccctaggtcagctggtccag

SEQ ID NO: 3720136 - DNA, 25 bp, Homo sapien
tcccagaatcagtggagtgcctgcc

SEQ ID NO: 3720137 - DNA, 25 bp, Homo sapien
tggttccaggttgcttatgtgtatg

SEQ ID NO: 3720138 - DNA, 25 bp, Homo sapien
ctcagctctggttccaggttgctta

SEQ ID NO: 3720139 - DNA, 25 bp, Homo sapien
tgtagtagaccacttcaacgctggg

SEQ ID NO: 3720140 - DNA, 25 bp, Homo sapien
tcaaagccccttgttgtagtagacc

SEQ ID NO: 3720141 - DNA, 25 bp, Homo sapien
tattccaggatacaagggatggcac

SEQ ID NO: 3720142 - DNA, 25 bp, Homo sapien
tgaagatgcccacgctgtcaagtag

SEQ ID NO: 3720143 - DNA, 25 bp, Homo sapien
tttggactagccactgatgcccggg

SEQ ID NO: 3720144 - DNA, 25 bp, Homo sapien
tatgcatggacactcaagcacagga

SEQ ID NO: 3720145 - DNA, 25 bp, Homo sapien
tggagcctaggagagacccaatgag

SEQ ID NO: 3720146 - DNA, 25 bp, Homo sapien
caagctatgcaaggttcctcctgcc

SEQ ID NO: 3720147 - DNA, 25 bp, Homo sapien
ggttgtccttcatgcctttcgggca

SEQ ID NO: 3720148 - DNA, 25 bp, Homo sapien
cccaatgagggaaaagatgtgtata

SEQ ID NO: 3720149 - DNA, 25 bp, Homo sapien
agaggggcccctcggtcctcagcct

SEQ ID NO: 3720150 - DNA, 25 bp, Homo sapien
gccgctcggcgggagatacagagca

SEQ ID NO: 3720151 - DNA, 25 bp, Homo sapien
caaagaggggcccctcggtcctcag

SEQ ID NO: 3720152 - DNA, 25 bp, Homo sapien
ctggtgccgctcggcgggagataca

SEQ ID NO: 3720153 - DNA, 25 bp, Homo sapien
ctggcggaggcccttaatgaagctg

SEQ ID NO: 3720154 - DNA, 25 bp, Homo sapien
cttgcggagcgcgaggggcgctgca

SEQ ID NO: 3720155 - DNA, 25 bp, Homo sapien
gcagagctggcggaggcccttaatg

SEQ ID NO: 3720156 - DNA, 25 bp, Homo sapien
agagctggcggaggcccttaatgaa

SEQ ID NO: 3720157 - DNA, 25 bp, Homo sapien
gccgggttggctcgcgcgaagcgag

SEQ ID NO: 3720158 - DNA, 25 bp, Homo sapien
cccggagccgggcaactattaatct

SEQ ID NO: 3720159 - DNA, 25 bp, Homo sapien
aaggcggagtggagcgacagcagcg

SEQ ID NO: 3720160 - DNA, 25 bp, Homo sapien
gagagcctcaggtgcgcgggcgagt

SEQ ID NO: 3720161 - DNA, 25 bp, Homo sapien
tggagagggcgagcccttcttcccc

SEQ ID NO: 3720162 - DNA, 25 bp, Homo sapien
gcagagaacactgacgctcgcaatc

SEQ ID NO: 3720163 - DNA, 25 bp, Homo sapien
gaagtccttaaatcgaggcagcagg

SEQ ID NO: 3720164 - DNA, 25 bp, Homo sapien
tcttccccgaagtgccaagacttgc

SEQ ID NO: 3720165 - DNA, 25 bp, Homo sapien
tgcagtcagtacctcactcatatac

SEQ ID NO: 3720166 - DNA, 25 bp, Homo sapien
gaccacaaaccccatagcagatgca

SEQ ID NO: 3720167 - DNA, 25 bp, Homo sapien
ctctgtttaggtgatgtgctcaaca

SEQ ID NO: 3720168 - DNA, 25 bp, Homo sapien
tggctcactccaaaggttacctgca

SEQ ID NO: 3720169 - DNA, 25 bp, Homo sapien
tgcatccaggtaggcacaaagataa

SEQ ID NO: 3720170 - DNA, 25 bp, Homo sapien
cgctgatggagaacagtaggtagac

SEQ ID NO: 3720171 - DNA, 25 bp, Homo sapien
gaacatgctggaaccgtgcatccag

SEQ ID NO: 3720172 - DNA, 25 bp, Homo sapien
ggcttgtggttcgtgacgagaacat

SEQ ID NO: 3720173 - DNA, 25 bp, Homo sapien
cacagaagccttggcgcagtccagc

SEQ ID NO: 3720174 - DNA, 25 bp, Homo sapien
gatcgactccgcatgcgcactggag

SEQ ID NO: 3720175 - DNA, 25 bp, Homo sapien
tggagcctcggaatacagccaggac

SEQ ID NO: 3720176 - DNA, 25 bp, Homo sapien
gaatgcgcccctaagttgggccaag

SEQ ID NO: 3720177 - DNA, 25 bp, Homo sapien
caattttatgtagccgcatgggacc

SEQ ID NO: 3720178 - DNA, 25 bp, Homo sapien
tctgagagagcccacgaacttggat

SEQ ID NO: 3720179 - DNA, 25 bp, Homo sapien
tcacaatgcgagcagaggagccgta

SEQ ID NO: 3720180 - DNA, 25 bp, Homo sapien
tgattttacagtccctggcgtcggc

SEQ ID NO: 3720181 - DNA, 25 bp, Homo sapien
caggaagggaagccaggtcaggagg

SEQ ID NO: 3720182 - DNA, 25 bp, Homo sapien
tgccaggaagggaagccaggtcagg

SEQ ID NO: 3720183 - DNA, 25 bp, Homo sapien
ctgccaggaagggaagccaggtcag

SEQ ID NO: 3720184 - DNA, 25 bp, Homo sapien
ccaggaagggaagccaggtcaggag

SEQ ID NO: 3720185 - DNA, 25 bp, Homo sapien
tagcgggaagccctgcgagcactcg

SEQ ID NO: 3720186 - DNA, 25 bp, Homo sapien
ggttagcgggaagccctgcgagcac

SEQ ID NO: 3720187 - DNA, 25 bp, Homo sapien
agcactcggggcatcagcgcgttcg

SEQ ID NO: 3720188 - DNA, 25 bp, Homo sapien
cctgcgagcactcggggcatcagcg

SEQ ID NO: 3720189 - DNA, 25 bp, Homo sapien
ggtcgggggcggcgtcagcaccacc

SEQ ID NO: 3720190 - DNA, 25 bp, Homo sapien
cttgcgccggtcgggggcggcgtca

SEQ ID NO: 3720191 - DNA, 25 bp, Homo sapien
aggcagcgccaaggcagctgcgggc

SEQ ID NO: 3720192 - DNA, 25 bp, Homo sapien
tcgggggcggcgtcagcaccaccag

SEQ ID NO: 3720193 - DNA, 25 bp, Homo sapien
cagccgcgccgcaggtaatctgggc

SEQ ID NO: 3720194 - DNA, 25 bp, Homo sapien
ccagccgcgccgcaggtaatctggg

SEQ ID NO: 3720195 - DNA, 25 bp, Homo sapien
ggcgcactcttctggccggcaggga

SEQ ID NO: 3720196 - DNA, 25 bp, Homo sapien
gccgcagtgcccgtagaagtgagca

SEQ ID NO: 3720197 - DNA, 25 bp, Homo sapien
gtgtccagccggcactcaagctgct

SEQ ID NO: 3720198 - DNA, 25 bp, Homo sapien
tggccctcgaggttggcgcattccc

SEQ ID NO: 3720199 - DNA, 25 bp, Homo sapien
ctgcgaacgacaggcacacagaggt

SEQ ID NO: 3720200 - DNA, 25 bp, Homo sapien
aacgacaggcacacagaggttccgg

SEQ ID NO: 3720201 - DNA, 25 bp, Homo sapien
gcgaacgacaggcacacagaggttc

SEQ ID NO: 3720202 - DNA, 25 bp, Homo sapien
gacaggcacacagaggttccggcac

SEQ ID NO: 3720203 - DNA, 25 bp, Homo sapien
cacagtgaggttggcatcgggccga

SEQ ID NO: 3720204 - DNA, 25 bp, Homo sapien
agggccccgggtgtgccacagtgag

SEQ ID NO: 3720205 - DNA, 25 bp, Homo sapien
taggtgtgaccgtcggacccgcaga

SEQ ID NO: 3720206 - DNA, 25 bp, Homo sapien
tgcaggcggcagatctgggagtagg

SEQ ID NO: 3720207 - DNA, 25 bp, Homo sapien
tatggatgctggtacacacaagggt

SEQ ID NO: 3720208 - DNA, 25 bp, Homo sapien
tctacattgtagcttggcagccact

SEQ ID NO: 3720209 - DNA, 25 bp, Homo sapien
cacgcagacgtggagataggtatac

SEQ ID NO: 3720210 - DNA, 25 bp, Homo sapien
aagctagaggcctgaatggacccca

SEQ ID NO: 3720211 - DNA, 25 bp, Homo sapien
tcctccactcgatggaggccatggg

SEQ ID NO: 3720212 - DNA, 25 bp, Homo sapien
taggcaaacacttcacagccaaaga

SEQ ID NO: 3720213 - DNA, 25 bp, Homo sapien
agccaaagatcacatcctgccctgt

SEQ ID NO: 3720214 - DNA, 25 bp, Homo sapien
ggccatggggtaggcaaacacttca

SEQ ID NO: 3720215 - DNA, 25 bp, Homo sapien
tgtgagcactgtcaagctagcaggg

SEQ ID NO: 3720216 - DNA, 25 bp, Homo sapien
cattgcggccaaggcagcggtaagt

SEQ ID NO: 3720217 - DNA, 25 bp, Homo sapien
tgggacgcacagcctggatctgcag

SEQ ID NO: 3720218 - DNA, 25 bp, Homo sapien
taagtgccctcatcactgggacgca

SEQ ID NO: 3720219 - DNA, 25 bp, Homo sapien
agtagtaatcgtcattctcttcact

SEQ ID NO: 3720220 - DNA, 25 bp, Homo sapien
caggaaccaggtttagtgatcgcag

SEQ ID NO: 3720221 - DNA, 25 bp, Homo sapien
accaggtttagtgatcgcagctggg

SEQ ID NO: 3720222 - DNA, 25 bp, Homo sapien
aatcgtcattctcttcactctcagc

SEQ ID NO: 3720223 - DNA, 25 bp, Homo sapien
gaaagcagtcgatgaagggaccctg

SEQ ID NO: 3720224 - DNA, 25 bp, Homo sapien
gcagggatgaacactatagccgctc

SEQ ID NO: 3720225 - DNA, 25 bp, Homo sapien
ttggaggtcctactggccagggcat

SEQ ID NO: 3720226 - DNA, 25 bp, Homo sapien
ggtataagatctcgagctggcctca

SEQ ID NO: 3720227 - DNA, 25 bp, Homo sapien
cctcaaaggcgggataggcccaagt

SEQ ID NO: 3720228 - DNA, 25 bp, Homo sapien
cattgagtctcaccagtgtccctgg

SEQ ID NO: 3720229 - DNA, 25 bp, Homo sapien
taatgtatatcagccccaatggagg

SEQ ID NO: 3720230 - DNA, 25 bp, Homo sapien
ggaaacagccttaccatgactctgg

SEQ ID NO: 3720231 - DNA, 25 bp, Homo sapien
cttgcgctgttgtgcgcggctccta

SEQ ID NO: 3720232 - DNA, 25 bp, Homo sapien
aactgtcgctggcttaaggacccgg

SEQ ID NO: 3720233 - DNA, 25 bp, Homo sapien
ctgggttcggcaataaaaactgtcg

SEQ ID NO: 3720234 - DNA, 25 bp, Homo sapien
tctgtgggcgccctggaatcggctc

SEQ ID NO: 3720235 - DNA, 25 bp, Homo sapien
attttggccacagcgccgaacagca

SEQ ID NO: 3720236 - DNA, 25 bp, Homo sapien
gtcccctctttcagcgccgggcgga

SEQ ID NO: 3720237 - DNA, 25 bp, Homo sapien
gcggattttggccacagcgccgaac

SEQ ID NO: 3720238 - DNA, 25 bp, Homo sapien
cagcgccgggcggattttggccaca

SEQ ID NO: 3720239 - DNA, 25 bp, Homo sapien
ggcgaagaacaagctaggggcggat

SEQ ID NO: 3720240 - DNA, 25 bp, Homo sapien
gaagaacaagctaggggcggattcc

SEQ ID NO: 3720241 - DNA, 25 bp, Homo sapien
cgaagaacaagctaggggcggattc

SEQ ID NO: 3720242 - DNA, 25 bp, Homo sapien
ctgggcgaagaacaagctaggggcg

SEQ ID NO: 3720243 - DNA, 25 bp, Homo sapien
tggacgcggtaggagctatgggccc

SEQ ID NO: 3720244 - DNA, 25 bp, Homo sapien
tatgggcccgcagagggcgtcttgg

SEQ ID NO: 3720245 - DNA, 25 bp, Homo sapien
ctgctctgcaggtggacgcggtagg

SEQ ID NO: 3720246 - DNA, 25 bp, Homo sapien
tgcgtgaccctctccggtggggtgg

SEQ ID NO: 3720247 - DNA, 25 bp, Homo sapien
taaatcgcgtgtcactttccagcga

SEQ ID NO: 3720248 - DNA, 25 bp, Homo sapien
tattaaagcgggtccgctgcagcag

SEQ ID NO: 3720249 - DNA, 25 bp, Homo sapien
cgattaaggagtgcggattccccgg

SEQ ID NO: 3720250 - DNA, 25 bp, Homo sapien
tgaacacctacaaagtcggctaacg

SEQ ID NO: 3720251 - DNA, 25 bp, Homo sapien
ttggaagcccgtgggcaggcgaaac

SEQ ID NO: 3720252 - DNA, 25 bp, Homo sapien
gggatggcttggaagcccgtgggca

SEQ ID NO: 3720253 - DNA, 25 bp, Homo sapien
ctaggacacaaaacgcggggatggc

SEQ ID NO: 3720254 - DNA, 25 bp, Homo sapien
tgggcaggcgaaaccgggagttctg

SEQ ID NO: 3720255 - DNA, 25 bp, Homo sapien
tccagggatttcaagcgaactatac

SEQ ID NO: 3720256 - DNA, 25 bp, Homo sapien
ctggaacctcacatctcgggtgtga

SEQ ID NO: 3720257 - DNA, 25 bp, Homo sapien
taggagccagaagaaagcgcattcc

SEQ ID NO: 3720258 - DNA, 25 bp, Homo sapien
aatgtagggtgcgactgagcctctc

SEQ ID NO: 3720259 - DNA, 25 bp, Homo sapien
gagagaggtacgcccagcccggctc

SEQ ID NO: 3720260 - DNA, 25 bp, Homo sapien
aggagagaggtacgcccagcccggc

SEQ ID NO: 3720261 - DNA, 25 bp, Homo sapien
ggaggagagaggtacgcccagcccg

SEQ ID NO: 3720262 - DNA, 25 bp, Homo sapien
agagaggtacgcccagcccggctca

SEQ ID NO: 3720263 - DNA, 25 bp, Homo sapien
gggtcattttcagacagccccctct

SEQ ID NO: 3720264 - DNA, 25 bp, Homo sapien
ctttggagccttcgcggtgacgagc

SEQ ID NO: 3720265 - DNA, 25 bp, Homo sapien
tcctcctcacgacagcccgaggagg

SEQ ID NO: 3720266 - DNA, 25 bp, Homo sapien
cacggctgcgcaacacttctttgga

SEQ ID NO: 3720267 - DNA, 25 bp, Homo sapien
caggcttctttttgaggggcgctct

SEQ ID NO: 3720268 - DNA, 25 bp, Homo sapien
agttctgcccagtccgcacatcgac

SEQ ID NO: 3720269 - DNA, 25 bp, Homo sapien
gcttctttttgaggggcgctctcca

SEQ ID NO: 3720270 - DNA, 25 bp, Homo sapien
ctgggcttcgccaggacaccctcag

SEQ ID NO: 3720271 - DNA, 25 bp, Homo sapien
tactcccaacttgccagagatgtcg

SEQ ID NO: 3720272 - DNA, 25 bp, Homo sapien
tgtcactaccagaaggatccaccag

SEQ ID NO: 3720273 - DNA, 25 bp, Homo sapien
gagatgtcgcctctttccgctaagg

SEQ ID NO: 3720274 - DNA, 25 bp, Homo sapien
agtaaattgtctcaaggcccctggc

SEQ ID NO: 3720275 - DNA, 25 bp, Homo sapien
tttggagagaaggatcccggcctga

SEQ ID NO: 3720276 - DNA, 25 bp, Homo sapien
tagtaatgccctctgctttggagag

SEQ ID NO: 3720277 - DNA, 25 bp, Homo sapien
tatgcaaatagtaatgccctctgct

SEQ ID NO: 3720278 - DNA, 25 bp, Homo sapien
cccaaagtaattaattgctatgcaa

SEQ ID NO: 3720279 - DNA, 25 bp, Homo sapien
agaggaagccctgccgcaggagccc

SEQ ID NO: 3720280 - DNA, 25 bp, Homo sapien
gagtggtcagaggagcagtgggtgg

SEQ ID NO: 3720281 - DNA, 25 bp, Homo sapien
gtgggtgggagctccgggagaggaa

SEQ ID NO: 3720282 - DNA, 25 bp, Homo sapien
cttctgggagtggtcagaggagcag

SEQ ID NO: 3720283 - DNA, 25 bp, Homo sapien
tagtcagagcataattgaagttgaa

SEQ ID NO: 3720284 - DNA, 25 bp, Homo sapien
tcagagcataattgaagttgaaaca

SEQ ID NO: 3720285 - DNA, 25 bp, Homo sapien
agcccaagcagacccccctttatca

SEQ ID NO: 3720286 - DNA, 25 bp, Homo sapien
gctgtagtcagagcataattgaagt

SEQ ID NO: 3720287 - DNA, 25 bp, Homo sapien
ccctgagtggcccaagggtctcttc

SEQ ID NO: 3720288 - DNA, 25 bp, Homo sapien
ggttcatttgggactgagacagctt

SEQ ID NO: 3720289 - DNA, 25 bp, Homo sapien
ttgccctcagccgtgtggacaggga

SEQ ID NO: 3720290 - DNA, 25 bp, Homo sapien
tgagctctgagaaagtttgccctca

SEQ ID NO: 3720291 - DNA, 25 bp, Homo sapien
gcaggagaagggagatgtatgcttg

SEQ ID NO: 3720292 - DNA, 25 bp, Homo sapien
cagagcccaagagcggaagagacct

SEQ ID NO: 3720293 - DNA, 25 bp, Homo sapien
gtttcagagcccaagagcggaagag

SEQ ID NO: 3720294 - DNA, 25 bp, Homo sapien
agcccaagagcggaagagacctgga

SEQ ID NO: 3720295 - DNA, 25 bp, Homo sapien
tttgccctgttgtaccaactgatag

SEQ ID NO: 3720296 - DNA, 25 bp, Homo sapien
aactgatagaaacgctcacaccttc

SEQ ID NO: 3720297 - DNA, 25 bp, Homo sapien
ttcgtttcatcggtagtaccttgcc

SEQ ID NO: 3720298 - DNA, 25 bp, Homo sapien
tcatcggtagtaccttgccccagtc

SEQ ID NO: 3720299 - DNA, 25 bp, Homo sapien
tgtgcggccatgtgcccaagagtgc

SEQ ID NO: 3720300 - DNA, 25 bp, Homo sapien
ccgaccaccggcaatttacagtggg

SEQ ID NO: 3720301 - DNA, 25 bp, Homo sapien
aaggccactgctgggaattagacca

SEQ ID NO: 3720302 - DNA, 25 bp, Homo sapien
taaagtcgctgcctgttatctgccc

SEQ ID NO: 3720303 - DNA, 25 bp, Homo sapien
tgtgattaatgggactgcggcgagg

SEQ ID NO: 3720304 - DNA, 25 bp, Homo sapien
ttctcagctgccctgcgttccggtg

SEQ ID NO: 3720305 - DNA, 25 bp, Homo sapien
ccttgggtgccgagggacggattga

SEQ ID NO: 3720306 - DNA, 25 bp, Homo sapien
gaaggaggcgtctccgcctgagccc

SEQ ID NO: 3720307 - DNA, 25 bp, Homo sapien
gctaattgaattaggtcggccaggc

SEQ ID NO: 3720308 - DNA, 25 bp, Homo sapien
atggtcttcgtgcacaaagagcagc

SEQ ID NO: 3720309 - DNA, 25 bp, Homo sapien
gggaggaaccgcatccatatgcatg

SEQ ID NO: 3720310 - DNA, 25 bp, Homo sapien
taattgaattaggtcggccaggccc

SEQ ID NO: 3720311 - DNA, 25 bp, Homo sapien
ggcacgctcacttccacacagacct

SEQ ID NO: 3720312 - DNA, 25 bp, Homo sapien
gcacgctcacttccacacagacctt

SEQ ID NO: 3720313 - DNA, 25 bp, Homo sapien
aggcacgctcacttccacacagacc

SEQ ID NO: 3720314 - DNA, 25 bp, Homo sapien
cacgctcacttccacacagaccttc

SEQ ID NO: 3720315 - DNA, 25 bp, Homo sapien
ttagggaatctcccatcctgagtca

SEQ ID NO: 3720316 - DNA, 25 bp, Homo sapien
agggaatctcccatcctgagtcacc

SEQ ID NO: 3720317 - DNA, 25 bp, Homo sapien
tagggaatctcccatcctgagtcac

SEQ ID NO: 3720318 - DNA, 25 bp, Homo sapien
gagcacggtgttgcaaggttgggaa

SEQ ID NO: 3720319 - DNA, 25 bp, Homo sapien
gagaggagactcacacaagtttata

SEQ ID NO: 3720320 - DNA, 25 bp, Homo sapien
caagtttatattcgctgcagcttct

SEQ ID NO: 3720321 - DNA, 25 bp, Homo sapien
tccaccgtgcttttgcatgccttgc

SEQ ID NO: 3720322 - DNA, 25 bp, Homo sapien
caatcaccaggcgaaaaagcccggt

SEQ ID NO: 3720323 - DNA, 25 bp, Homo sapien
tgctcgctcgctgttgactctggga

SEQ ID NO: 3720324 - DNA, 25 bp, Homo sapien
tgcaagagagcttcgcggtttcgac

SEQ ID NO: 3720325 - DNA, 25 bp, Homo sapien
ggaagcgaccattcccagagacgga

SEQ ID NO: 3720326 - DNA, 25 bp, Homo sapien
gccgccgtaagtgtaggcgcctccg

SEQ ID NO: 3720327 - DNA, 25 bp, Homo sapien
caaggccgtattctccgtcctggag

SEQ ID NO: 3720328 - DNA, 25 bp, Homo sapien
gaccaagcagccaaggccgtattct

SEQ ID NO: 3720329 - DNA, 25 bp, Homo sapien
ctaatgggctctgcgtgacccgggt

SEQ ID NO: 3720330 - DNA, 25 bp, Homo sapien
ttcacgttgtaggagccggtcagag

SEQ ID NO: 3720331 - DNA, 25 bp, Homo sapien
aggccatgttcacgttgtaggagcc

SEQ ID NO: 3720332 - DNA, 25 bp, Homo sapien
agccggtcagaggacccatgctgca

SEQ ID NO: 3720333 - DNA, 25 bp, Homo sapien
ctgtgtgccggcacccggattaccc

SEQ ID NO: 3720334 - DNA, 25 bp, Homo sapien
gtatctgcggttactctccatccag

SEQ ID NO: 3720335 - DNA, 25 bp, Homo sapien
cacggtgggcaagccggtggccagg

SEQ ID NO: 3720336 - DNA, 25 bp, Homo sapien
cagtgaggttgttgacgcccggcat

SEQ ID NO: 3720337 - DNA, 25 bp, Homo sapien
ttgacgcccggcatggcaggcacag

SEQ ID NO: 3720338 - DNA, 25 bp, Homo sapien
ccgcggccaggcggggagcgcgcgg

SEQ ID NO: 3720339 - DNA, 25 bp, Homo sapien
gggccgcggccaggcggggagcgcg

SEQ ID NO: 3720340 - DNA, 25 bp, Homo sapien
cgcggccaggcggggagcgcgcggg

SEQ ID NO: 3720341 - DNA, 25 bp, Homo sapien
ccgggccgcggccaggcggggagcg

SEQ ID NO: 3720342 - DNA, 25 bp, Homo sapien
tcttgtgtctgatcctggggctcgc

SEQ ID NO: 3720343 - DNA, 25 bp, Homo sapien
agctaggggcgcgaagtgcatgtgt

SEQ ID NO: 3720344 - DNA, 25 bp, Homo sapien
gtgtctgatcctggggctcgcttcc

SEQ ID NO: 3720345 - DNA, 25 bp, Homo sapien
cttgtgtctgatcctggggctcgct

SEQ ID NO: 3720346 - DNA, 25 bp, Homo sapien
cgggagtagtcttcccgccaccgat

SEQ ID NO: 3720347 - DNA, 25 bp, Homo sapien
cacttagtacccaatgtcccgggag

SEQ ID NO: 3720348 - DNA, 25 bp, Homo sapien
tcgtggtctaggatccagggaaccc

SEQ ID NO: 3720349 - DNA, 25 bp, Homo sapien
gatcaccagcctaccggtgcattgt

SEQ ID NO: 3720350 - DNA, 25 bp, Homo sapien
agaggcccaggattagtggactccc

SEQ ID NO: 3720351 - DNA, 25 bp, Homo sapien
gcccaggattagtggactcccggct

SEQ ID NO: 3720352 - DNA, 25 bp, Homo sapien
ccaggattagtggactcccggctgg

SEQ ID NO: 3720353 - DNA, 25 bp, Homo sapien
gtggactcccggctgggtttccagc

SEQ ID NO: 3720354 - DNA, 25 bp, Homo sapien
ctatacggcgtgttacagtgaaggg

SEQ ID NO: 3720355 - DNA, 25 bp, Homo sapien
caggttttgacctgcgcatcggtca

SEQ ID NO: 3720356 - DNA, 25 bp, Homo sapien
cggtcattttgagcgccttggccag

SEQ ID NO: 3720357 - DNA, 25 bp, Homo sapien
gcgctcggccgaggccaggtacttc

SEQ ID NO: 3720358 - DNA, 25 bp, Homo sapien
ctcgcagatctgcaggcgtgtgaag

SEQ ID NO: 3720359 - DNA, 25 bp, Homo sapien
ttccagggtagggaccggctgcgca

SEQ ID NO: 3720360 - DNA, 25 bp, Homo sapien
ccggcgcggattgattttctccttc

SEQ ID NO: 3720361 - DNA, 25 bp, Homo sapien
gcagccggcgcggattgattttctc

SEQ ID NO: 3720362 - DNA, 25 bp, Homo sapien
catctgctcctaattgattcccctt

SEQ ID NO: 3720363 - DNA, 25 bp, Homo sapien
tagtgattttggtcgagtcgtcaga

SEQ ID NO: 3720364 - DNA, 25 bp, Homo sapien
cgagtcgtcagaccacggctgcaga

SEQ ID NO: 3720365 - DNA, 25 bp, Homo sapien
atgcggttcgcttgctgcctctcgg

SEQ ID NO: 3720366 - DNA, 25 bp, Homo sapien
acgccaccgacgtgacgctagtgat

SEQ ID NO: 3720367 - DNA, 25 bp, Homo sapien
cctgtgcctgatcgtaaggtccaaa

SEQ ID NO: 3720368 - DNA, 25 bp, Homo sapien
gtaaacactgtgaccctctgtctgg

SEQ ID NO: 3720369 - DNA, 25 bp, Homo sapien
ttaacagttcagacaggtgcgggac

SEQ ID NO: 3720370 - DNA, 25 bp, Homo sapien
ttccaccgaagggagaacagtgtcg

SEQ ID NO: 3720371 - DNA, 25 bp, Homo sapien
tgctgtgctcacgacctgtgtcaca

SEQ ID NO: 3720372 - DNA, 25 bp, Homo sapien
tgtgctcacgacctgtgtcacagcc

SEQ ID NO: 3720373 - DNA, 25 bp, Homo sapien
cactcagccgaacttccccatgggc

SEQ ID NO: 3720374 - DNA, 25 bp, Homo sapien
aagttgctgtgctcacgacctgtgt

SEQ ID NO: 3720375 - DNA, 25 bp, Homo sapien
gctcactacgctccacacagctcgt

SEQ ID NO: 3720376 - DNA, 25 bp, Homo sapien
agaacctgctcactacgctccacac

SEQ ID NO: 3720377 - DNA, 25 bp, Homo sapien
acacagctcgtcagggcccaacctg

SEQ ID NO: 3720378 - DNA, 25 bp, Homo sapien
ggcccaacctgagcactccgcgggc

SEQ ID NO: 3720379 - DNA, 25 bp, Homo sapien
tgccacagccggtgaatgcgggaga

SEQ ID NO: 3720380 - DNA, 25 bp, Homo sapien
ccaggtagagggagacgacttctga

SEQ ID NO: 3720381 - DNA, 25 bp, Homo sapien
tatttctggattttgcgcggcctgg

SEQ ID NO: 3720382 - DNA, 25 bp, Homo sapien
gcctggcgctgggtgccacagccgg

SEQ ID NO: 3720383 - DNA, 25 bp, Homo sapien
cccgagaagaaggcgcgagctcggt

SEQ ID NO: 3720384 - DNA, 25 bp, Homo sapien
ggctccagtcctgcgggagcagagg

SEQ ID NO: 3720385 - DNA, 25 bp, Homo sapien
gcgcgagctcggtggctccagtcct

SEQ ID NO: 3720386 - DNA, 25 bp, Homo sapien
agaagaaggcgcgagctcggtggct

SEQ ID NO: 3720387 - DNA, 25 bp, Homo sapien
cttctgcatgagtccgcgtcgagct

SEQ ID NO: 3720388 - DNA, 25 bp, Homo sapien
tccgcggttagtgagtgtgagccct

SEQ ID NO: 3720389 - DNA, 25 bp, Homo sapien
ctgcatgtgctctccgcggttagtg

SEQ ID NO: 3720390 - DNA, 25 bp, Homo sapien
ttctgcatgagtccgcgtcgagctg

SEQ ID NO: 3720391 - DNA, 25 bp, Homo sapien
gggaatggagttagatcctcctctg

SEQ ID NO: 3720392 - DNA, 25 bp, Homo sapien
ctgggtccgtagggcataaaacagg

SEQ ID NO: 3720393 - DNA, 25 bp, Homo sapien
tgggtccgtagggcataaaacagga

SEQ ID NO: 3720394 - DNA, 25 bp, Homo sapien
ggctcttctcgcagcaaccaaagaa

SEQ ID NO: 3720395 - DNA, 25 bp, Homo sapien
gtggctgctgaatcacggccgcggc

SEQ ID NO: 3720396 - DNA, 25 bp, Homo sapien
tggctgctgaatcacggccgcggcc

SEQ ID NO: 3720397 - DNA, 25 bp, Homo sapien
tcttctcgcagcaaccaaagaaatg

SEQ ID NO: 3720398 - DNA, 25 bp, Homo sapien
aaggttccagtagactggatgggac

SEQ ID NO: 3720399 - DNA, 25 bp, Homo sapien
gggaggaaggttccagtagactgga

SEQ ID NO: 3720400 - DNA, 25 bp, Homo sapien
gactgaaggcgattttcccagagct

SEQ ID NO: 3720401 - DNA, 25 bp, Homo sapien
actggatgggactgaaggcgatttt

SEQ ID NO: 3720402 - DNA, 25 bp, Homo sapien
tcacaataaccataccaccgctgcg

SEQ ID NO: 3720403 - DNA, 25 bp, Homo sapien
ccatattcttttgcccactcctctg

SEQ ID NO: 3720404 - DNA, 25 bp, Homo sapien
ctctgcagaattcgccccagggcaa

SEQ ID NO: 3720405 - DNA, 25 bp, Homo sapien
gccccagggcaataatcacaataac

SEQ ID NO: 3720406 - DNA, 25 bp, Homo sapien
tctgtgaacgtttgtgcttggcttc

SEQ ID NO: 3720407 - DNA, 25 bp, Homo sapien
ggctgtctccagcgcatggcctggc

SEQ ID NO: 3720408 - DNA, 25 bp, Homo sapien
gcacctccatgcaggtgtcccttgg

SEQ ID NO: 3720409 - DNA, 25 bp, Homo sapien
caggagctcagtggatctctgtgaa

SEQ ID NO: 3720410 - DNA, 25 bp, Homo sapien
cccagggtgcttctcctcaacggaa

SEQ ID NO: 3720411 - DNA, 25 bp, Homo sapien
gcccttgccccgatccttcagggag

SEQ ID NO: 3720412 - DNA, 25 bp, Homo sapien
ggtgcttctcctcaacggaaattaa

SEQ ID NO: 3720413 - DNA, 25 bp, Homo sapien
gcttctcctcaacggaaattaacag

SEQ ID NO: 3720414 - DNA, 25 bp, Homo sapien
ctgggggaattccttcctctgaaca

SEQ ID NO: 3720415 - DNA, 25 bp, Homo sapien
gcacaggcgctgaaacacacaatta

SEQ ID NO: 3720416 - DNA, 25 bp, Homo sapien
gcggcacacggcacaggcgctgaaa

SEQ ID NO: 3720417 - DNA, 25 bp, Homo sapien
tggccattcagggtgatagcagccc

SEQ ID NO: 3720418 - DNA, 25 bp, Homo sapien
aacacacaattacagggcacgagct

SEQ ID NO: 3720419 - DNA, 25 bp, Homo sapien
agctagacaagcttggttattgggg

SEQ ID NO: 3720420 - DNA, 25 bp, Homo sapien
ctagacaagcttggttattggggga

SEQ ID NO: 3720421 - DNA, 25 bp, Homo sapien
tagacaagcttggttattgggggaa

SEQ ID NO: 3720422 - DNA, 25 bp, Homo sapien
aagctagacaagcttggttattggg

SEQ ID NO: 3720423 - DNA, 25 bp, Homo sapien
ggactgaggacccatccagtcctgg

SEQ ID NO: 3720424 - DNA, 25 bp, Homo sapien
ctgaggacccatccagtcctggtgg

SEQ ID NO: 3720425 - DNA, 25 bp, Homo sapien
gactgaggacccatccagtcctggt

SEQ ID NO: 3720426 - DNA, 25 bp, Homo sapien
gaggacccatccagtcctggtggca

SEQ ID NO: 3720427 - DNA, 25 bp, Homo sapien
cccaacaggttcatccaaaggcaca

SEQ ID NO: 3720428 - DNA, 25 bp, Homo sapien
agtcagccttgggaagtggtatttc

SEQ ID NO: 3720429 - DNA, 25 bp, Homo sapien
tcctgctaattcctccactttgtgc

SEQ ID NO: 3720430 - DNA, 25 bp, Homo sapien
cactttgtgcctacataagggagga

SEQ ID NO: 3720431 - DNA, 25 bp, Homo sapien
tcacagagtcgggaagaagagtaag

SEQ ID NO: 3720432 - DNA, 25 bp, Homo sapien
tgtggccccagctaaacagaagcct

SEQ ID NO: 3720433 - DNA, 25 bp, Homo sapien
tgtctagtggtaggcctctgctggt

SEQ ID NO: 3720434 - DNA, 25 bp, Homo sapien
taagaacgaagtagagaccaggtgc

SEQ ID NO: 3720435 - DNA, 25 bp, Homo sapien
tccacgtagaggtccagaggtagag

SEQ ID NO: 3720436 - DNA, 25 bp, Homo sapien
gcaggtttggtgcagaaactgctcc

SEQ ID NO: 3720437 - DNA, 25 bp, Homo sapien
accgtatctaccagggctcaaccag

SEQ ID NO: 3720438 - DNA, 25 bp, Homo sapien
catgaagttctcaggaaccgtatct

SEQ ID NO: 3720439 - DNA, 25 bp, Homo sapien
aattgatggaaattggcaagattat

SEQ ID NO: 3720440 - DNA, 25 bp, Homo sapien
gaaattggcaagattattggtggaa

SEQ ID NO: 3720441 - DNA, 25 bp, Homo sapien
gatggaaattggcaagattattggt

SEQ ID NO: 3720442 - DNA, 25 bp, Homo sapien
ttggcaagattattggtggaatgtg

SEQ ID NO: 3720443 - DNA, 25 bp, Homo sapien
cctacatgaggtacagcagaaatgt

SEQ ID NO: 3720444 - DNA, 25 bp, Homo sapien
aggtacagcagaaatgtctgggcca

SEQ ID NO: 3720445 - DNA, 25 bp, Homo sapien
cagagtcaaggcttccaatacggac

SEQ ID NO: 3720446 - DNA, 25 bp, Homo sapien
aaatgtctgggccagagtcaaggct

SEQ ID NO: 3720447 - DNA, 25 bp, Homo sapien
tttttgctgccctaacacttcacca

SEQ ID NO: 3720448 - DNA, 25 bp, Homo sapien
tctttcttcagtttaatctctccca

SEQ ID NO: 3720449 - DNA, 25 bp, Homo sapien
tgtaggttgccacgctgcccctaat

SEQ ID NO: 3720450 - DNA, 25 bp, Homo sapien
tgctcctgacaaccacacaatatca

SEQ ID NO: 3720451 - DNA, 25 bp, Homo sapien
ttgggcgaggctggcacagtgtggc

SEQ ID NO: 3720452 - DNA, 25 bp, Homo sapien
ggctttgaagtggttcataattaaa

SEQ ID NO: 3720453 - DNA, 25 bp, Homo sapien
gaaaggctttgaagtggttcataat

SEQ ID NO: 3720454 - DNA, 25 bp, Homo sapien
gagtcaggaaagaccgcgtcctggc

SEQ ID NO: 3720455 - DNA, 25 bp, Homo sapien
gaacccaggttggttattgcagaga

SEQ ID NO: 3720456 - DNA, 25 bp, Homo sapien
gagttaccgcttagacaatgttggg

SEQ ID NO: 3720457 - DNA, 25 bp, Homo sapien
tgaatccgtgtcaagtgctttgctc

SEQ ID NO: 3720458 - DNA, 25 bp, Homo sapien
caggacaatccccacattaggagag

SEQ ID NO: 3720459 - DNA, 25 bp, Homo sapien
ttcttttgaccagatccagggtctg

SEQ ID NO: 3720460 - DNA, 25 bp, Homo sapien
tctggtccaggattctgcgttgcag

SEQ ID NO: 3720461 - DNA, 25 bp, Homo sapien
gaagcacaggatgtcggtttgcccc

SEQ ID NO: 3720462 - DNA, 25 bp, Homo sapien
ggttcctgccagatctatccattgt

SEQ ID NO: 3720463 - DNA, 25 bp, Homo sapien
acaagggctagacatctctgtggcc

SEQ ID NO: 3720464 - DNA, 25 bp, Homo sapien
ttcggacaagggctagacatctctg

SEQ ID NO: 3720465 - DNA, 25 bp, Homo sapien
cttgaacttgcataatctggggcta

SEQ ID NO: 3720466 - DNA, 25 bp, Homo sapien
ctcctgggcattcggacaagggcta

SEQ ID NO: 3720467 - DNA, 25 bp, Homo sapien
gcgtgcagggttccaggattgtcca

SEQ ID NO: 3720468 - DNA, 25 bp, Homo sapien
caagcgtgcagggttccaggattgt

SEQ ID NO: 3720469 - DNA, 25 bp, Homo sapien
ggttccaggattgtccaggcctggt

SEQ ID NO: 3720470 - DNA, 25 bp, Homo sapien
tgcagggttccaggattgtccaggc

SEQ ID NO: 3720471 - DNA, 25 bp, Homo sapien
gtagcactatgttcaacttccagaa

SEQ ID NO: 3720472 - DNA, 25 bp, Homo sapien
cagccccagtgaaatctgtagcact

SEQ ID NO: 3720473 - DNA, 25 bp, Homo sapien
ctctgcagcacgaccttccagcccc

SEQ ID NO: 3720474 - DNA, 25 bp, Homo sapien
tatgttcaacttccagaattctgcc

SEQ ID NO: 3720475 - DNA, 25 bp, Homo sapien
tgatcgcagatgacagttggcagtg

SEQ ID NO: 3720476 - DNA, 25 bp, Homo sapien
gcatgtgcgacttcagggtggcagc

SEQ ID NO: 3720477 - DNA, 25 bp, Homo sapien
gtgggagaccagaatcgagcctgtt

SEQ ID NO: 3720478 - DNA, 25 bp, Homo sapien
gcaaggtagggcatgtgcgacttca

SEQ ID NO: 3720479 - DNA, 25 bp, Homo sapien
ctttcccaccaaagatatgtaactg

SEQ ID NO: 3720480 - DNA, 25 bp, Homo sapien
tttcccaccaaagatatgtaactga

SEQ ID NO: 3720481 - DNA, 25 bp, Homo sapien
cccaccaaagatatgtaactgatct

SEQ ID NO: 3720482 - DNA, 25 bp, Homo sapien
ttcccaccaaagatatgtaactgat

SEQ ID NO: 3720483 - DNA, 25 bp, Homo sapien
gaggtgtccgcgagaaactaattcc

SEQ ID NO: 3720484 - DNA, 25 bp, Homo sapien
gaggcaggaccccacaaatttgagg

SEQ ID NO: 3720485 - DNA, 25 bp, Homo sapien
tctctaatttgcaagcgccgtggaa

SEQ ID NO: 3720486 - DNA, 25 bp, Homo sapien
tatggatcggtccaagaaaggcccc

SEQ ID NO: 3720487 - DNA, 25 bp, Homo sapien
aggagctcgggtccaccaggcctga

SEQ ID NO: 3720488 - DNA, 25 bp, Homo sapien
ggcttttgcccctcctcggatctcg

SEQ ID NO: 3720489 - DNA, 25 bp, Homo sapien
ctcggatctcgagttcccagacggc

SEQ ID NO: 3720490 - DNA, 25 bp, Homo sapien
caaggagctcgggtccaccaggcct

SEQ ID NO: 3720491 - DNA, 25 bp, Homo sapien
tggaaacccagaaacgtaaatctgc

SEQ ID NO: 3720492 - DNA, 25 bp, Homo sapien
cgtaaatctgctcccgataaatatt

SEQ ID NO: 3720493 - DNA, 25 bp, Homo sapien
cttttggttcgcgggcccgaggcat

SEQ ID NO: 3720494 - DNA, 25 bp, Homo sapien
tcgcgggcccgaggcatctggcttt

SEQ ID NO: 3720495 - DNA, 25 bp, Homo sapien
caggatggaagccttttcgttccgt

SEQ ID NO: 3720496 - DNA, 25 bp, Homo sapien
tctggcgtcactcgtctccaggtct

SEQ ID NO: 3720497 - DNA, 25 bp, Homo sapien
tttcgttccgtgttcagcgtctggg

SEQ ID NO: 3720498 - DNA, 25 bp, Homo sapien
tggagcggacaattcgggccggaga

SEQ ID NO: 3720499 - DNA, 25 bp, Homo sapien
cagccgggtgttgggcctcccagtt

SEQ ID NO: 3720500 - DNA, 25 bp, Homo sapien
gccagccatgcgctcggctgcagcc

SEQ ID NO: 3720501 - DNA, 25 bp, Homo sapien
cgctgagtgctccaggccgtttggc

SEQ ID NO: 3720502 - DNA, 25 bp, Homo sapien
ggcgctgagtgctccaggccgtttg

SEQ ID NO: 3720503 - DNA, 25 bp, Homo sapien
aatcccttcagtcgcgtggcctcat

SEQ ID NO: 3720504 - DNA, 25 bp, Homo sapien
agtcgcgtggcctcatcgtctccag

SEQ ID NO: 3720505 - DNA, 25 bp, Homo sapien
cttcagtcgcgtggcctcatcgtct

SEQ ID NO: 3720506 - DNA, 25 bp, Homo sapien
ccccaatcccttcagtcgcgtggcc

SEQ ID NO: 3720507 - DNA, 25 bp, Homo sapien
ttcggcccgaagagcgggagccaca

SEQ ID NO: 3720508 - DNA, 25 bp, Homo sapien
aagagaagaaagttgggcggattgc

SEQ ID NO: 3720509 - DNA, 25 bp, Homo sapien
gattgcggacttcccagcgcgttaa

SEQ ID NO: 3720510 - DNA, 25 bp, Homo sapien
ctggttcgtccaccgccacgttgtc

SEQ ID NO: 3720511 - DNA, 25 bp, Homo sapien
caatggatctgagtgtggacgtgac

SEQ ID NO: 3720512 - DNA, 25 bp, Homo sapien
catgtaaccaatggatctgagtgtg

SEQ ID NO: 3720513 - DNA, 25 bp, Homo sapien
tatccatgtaaccaatggatctgag

SEQ ID NO: 3720514 - DNA, 25 bp, Homo sapien
taaccaatggatctgagtgtggacg

SEQ ID NO: 3720515 - DNA, 25 bp, Homo sapien
tcagacgcagctccgataagtaata

SEQ ID NO: 3720516 - DNA, 25 bp, Homo sapien
gcagctccgataagtaatactccag

SEQ ID NO: 3720517 - DNA, 25 bp, Homo sapien
gacgcagctccgataagtaatactc

SEQ ID NO: 3720518 - DNA, 25 bp, Homo sapien
cgcagctccgataagtaatactcca

SEQ ID NO: 3720519 - DNA, 25 bp, Homo sapien
aggtcccattgcgcagggaggcggc

SEQ ID NO: 3720520 - DNA, 25 bp, Homo sapien
ctaggtcccattgcgcagggaggcg

SEQ ID NO: 3720521 - DNA, 25 bp, Homo sapien
ggaggcggcgaggaagtcagcagct

SEQ ID NO: 3720522 - DNA, 25 bp, Homo sapien
agggaggcggcgaggaagtcagcag

SEQ ID NO: 3720523 - DNA, 25 bp, Homo sapien
tcgcccgaggttcgggtgcaataaa

SEQ ID NO: 3720524 - DNA, 25 bp, Homo sapien
ccggtgcggtcattgcagctaggcc

SEQ ID NO: 3720525 - DNA, 25 bp, Homo sapien
tcggagagaccgagaccttcgggcc

SEQ ID NO: 3720526 - DNA, 25 bp, Homo sapien
cggtggcttttcagtcgcccgaggt

SEQ ID NO: 3720527 - DNA, 25 bp, Homo sapien
tgggaaaaggttggtgtagcaggtg

SEQ ID NO: 3720528 - DNA, 25 bp, Homo sapien
ttgctctgcaagaggggtacaagag

SEQ ID NO: 3720529 - DNA, 25 bp, Homo sapien
cagacccccacacaatgcggttttt

SEQ ID NO: 3720530 - DNA, 25 bp, Homo sapien
tgggctggtttccaaaggtggcctg

SEQ ID NO: 3720531 - DNA, 25 bp, Homo sapien
tgggcacccaggacttgagcatctc

SEQ ID NO: 3720532 - DNA, 25 bp, Homo sapien
tcaaccgatattcagcgggagcccg

SEQ ID NO: 3720533 - DNA, 25 bp, Homo sapien
tgaagcccattcaaagagcccttgg

SEQ ID NO: 3720534 - DNA, 25 bp, Homo sapien
tagagaatgaggcttctgggcccct

SEQ ID NO: 3720535 - DNA, 25 bp, Homo sapien
aacatcatgaaactccatccctaca

SEQ ID NO: 3720536 - DNA, 25 bp, Homo sapien
tacaggagcataccataacacccgg

SEQ ID NO: 3720537 - DNA, 25 bp, Homo sapien
tgcgcccggccttaatcctatttaa

SEQ ID NO: 3720538 - DNA, 25 bp, Homo sapien
gcttggtggcatgctcctttggtcc

SEQ ID NO: 3720539 - DNA, 25 bp, Homo sapien
tgggttttccacaggtcagacgtcc

SEQ ID NO: 3720540 - DNA, 25 bp, Homo sapien
ggaactccaattgtaggcccaggaa

SEQ ID NO: 3720541 - DNA, 25 bp, Homo sapien
ggctctctgaactcgacctgggtaa

SEQ ID NO: 3720542 - DNA, 25 bp, Homo sapien
ttttgaggtctggtgcatgccggcc

SEQ ID NO: 3720543 - DNA, 25 bp, Homo sapien
gcatcgcgaccttaacctcagtttc

SEQ ID NO: 3720544 - DNA, 25 bp, Homo sapien
gaaggtttctaatgcctggcacccc

SEQ ID NO: 3720545 - DNA, 25 bp, Homo sapien
cagagcatcgcgaccttaacctcag

SEQ ID NO: 3720546 - DNA, 25 bp, Homo sapien
ctggccagagcatcgcgaccttaac

SEQ ID NO: 3720547 - DNA, 25 bp, Homo sapien
gctcctctcggcttaggtcactcca

SEQ ID NO: 3720548 - DNA, 25 bp, Homo sapien
cctgcgagggctggattcacccgtc

SEQ ID NO: 3720549 - DNA, 25 bp, Homo sapien
cgtctaacgtcagactgtgtggctt

SEQ ID NO: 3720550 - DNA, 25 bp, Homo sapien
ggcttaaacacaagagccgctccaa

SEQ ID NO: 3720551 - DNA, 25 bp, Homo sapien
ttctatctttctccgggcactgcca

SEQ ID NO: 3720552 - DNA, 25 bp, Homo sapien
tttctccgggcactgccaaaatcgt

SEQ ID NO: 3720553 - DNA, 25 bp, Homo sapien
tatctttctccgggcactgccaaaa

SEQ ID NO: 3720554 - DNA, 25 bp, Homo sapien
tccgggcactgccaaaatcgtttac

SEQ ID NO: 3720555 - DNA, 25 bp, Homo sapien
ttctcccgttaggtccaggactgcc

SEQ ID NO: 3720556 - DNA, 25 bp, Homo sapien
caggacagacgcttgaggaaaaaca

SEQ ID NO: 3720557 - DNA, 25 bp, Homo sapien
gaaaaacagatccaagagcgatggc

SEQ ID NO: 3720558 - DNA, 25 bp, Homo sapien
gggctctcccataacatgcggaaag

SEQ ID NO: 3720559 - DNA, 25 bp, Homo sapien
gaggaggacccgatctcagagagag

SEQ ID NO: 3720560 - DNA, 25 bp, Homo sapien
gcaggaggaggacccgatctcagag

SEQ ID NO: 3720561 - DNA, 25 bp, Homo sapien
aggacccgatctcagagagaggccc

SEQ ID NO: 3720562 - DNA, 25 bp, Homo sapien
gaggacccgatctcagagagaggcc

SEQ ID NO: 3720563 - DNA, 25 bp, Homo sapien
tgtggaaacagcgttttattaaatg

SEQ ID NO: 3720564 - DNA, 25 bp, Homo sapien
tattaaatgcttcacacagatttgg

SEQ ID NO: 3720565 - DNA, 25 bp, Homo sapien
cagagtgagacaataataagggagg

SEQ ID NO: 3720566 - DNA, 25 bp, Homo sapien
agatgaatatattatatcctttgcc

SEQ ID NO: 3720567 - DNA, 25 bp, Homo sapien
ctgaactgtggcaataccctcatcc

SEQ ID NO: 3720568 - DNA, 25 bp, Homo sapien
gaactgtggcaataccctcatccat

SEQ ID NO: 3720569 - DNA, 25 bp, Homo sapien
tgaactgtggcaataccctcatcca

SEQ ID NO: 3720570 - DNA, 25 bp, Homo sapien
ctggacagatacttgtgtcaggaaa

SEQ ID NO: 3720571 - DNA, 25 bp, Homo sapien
cggcacaagtttgggcgcacaggaa

SEQ ID NO: 3720572 - DNA, 25 bp, Homo sapien
gccctgctgtcttattctcgtcttg

SEQ ID NO: 3720573 - DNA, 25 bp, Homo sapien
ttattctcgtcttggtgcccggcac

SEQ ID NO: 3720574 - DNA, 25 bp, Homo sapien
gattctagttggacaccattgcctg

SEQ ID NO: 3720575 - DNA, 25 bp, Homo sapien
cctgctgaaagctcttgcagttgaa

SEQ ID NO: 3720576 - DNA, 25 bp, Homo sapien
actacagtaactgcgaaaccacccg

SEQ ID NO: 3720577 - DNA, 25 bp, Homo sapien
caatgtgtttcgattctagttggac

SEQ ID NO: 3720578 - DNA, 25 bp, Homo sapien
tatctagtaatgaactaaagaaatg

SEQ ID NO: 3720579 - DNA, 25 bp, Homo sapien
tcagcgctctacatattcagagaaa

SEQ ID NO: 3720580 - DNA, 25 bp, Homo sapien
ttcagcgctctacatattcagagaa

SEQ ID NO: 3720581 - DNA, 25 bp, Homo sapien
gaaacttatctagtaatgaactaaa

SEQ ID NO: 3720582 - DNA, 25 bp, Homo sapien
gtcgccgccgatgattggtccctgc

SEQ ID NO: 3720583 - DNA, 25 bp, Homo sapien
cgcggatctcagggtctcctcgctg

SEQ ID NO: 3720584 - DNA, 25 bp, Homo sapien
ggcagggtgggcgtacggcgactcc

SEQ ID NO: 3720585 - DNA, 25 bp, Homo sapien
ggaagcgcccaaaggctaggtcacc

SEQ ID NO: 3720586 - DNA, 25 bp, Homo sapien
gctcccagaaacagccttacacgtt

SEQ ID NO: 3720587 - DNA, 25 bp, Homo sapien
taagaggagaatttagagcggtccc

SEQ ID NO: 3720588 - DNA, 25 bp, Homo sapien
tccagcccctactcaataagaggag

SEQ ID NO: 3720589 - DNA, 25 bp, Homo sapien
gcgcgccgccgagctgaatgatttc

SEQ ID NO: 3720590 - DNA, 25 bp, Homo sapien
gccctcagtgccctttgaaggttta

SEQ ID NO: 3720591 - DNA, 25 bp, Homo sapien
atagtcatataaatcgcagagtccc

SEQ ID NO: 3720592 - DNA, 25 bp, Homo sapien
atataaatcgcagagtcccatgcca

SEQ ID NO: 3720593 - DNA, 25 bp, Homo sapien
tcatataaatcgcagagtcccatgc

SEQ ID NO: 3720594 - DNA, 25 bp, Homo sapien
ggctgagggaccacagaggtgccat

SEQ ID NO: 3720595 - DNA, 25 bp, Homo sapien
ccacttccaaccaggctgagggacc

SEQ ID NO: 3720596 - DNA, 25 bp, Homo sapien
caccccacttccaaccaggctgagg

SEQ ID NO: 3720597 - DNA, 25 bp, Homo sapien
ccccacttccaaccaggctgaggga

SEQ ID NO: 3720598 - DNA, 25 bp, Homo sapien
gctggtaaaaacatactacatttga

SEQ ID NO: 3720599 - DNA, 25 bp, Homo sapien
ggttgatgcataggagtggatgaag

SEQ ID NO: 3720600 - DNA, 25 bp, Homo sapien
ttgatgcataggagtggatgaagca

SEQ ID NO: 3720601 - DNA, 25 bp, Homo sapien
ttagccaaaagaccgagaggtgata

SEQ ID NO: 3720602 - DNA, 25 bp, Homo sapien
tctaattcagtgctaaatcgtacag

SEQ ID NO: 3720603 - DNA, 25 bp, Homo sapien
ccgcacggtctaattcagtgctaaa

SEQ ID NO: 3720604 - DNA, 25 bp, Homo sapien
gccaggaaggtttcatcctttccca

SEQ ID NO: 3720605 - DNA, 25 bp, Homo sapien
taaatcgtacagtgaatgccaggaa

SEQ ID NO: 3720606 - DNA, 25 bp, Homo sapien
gagcagaacttaactgagccatggg

SEQ ID NO: 3720607 - DNA, 25 bp, Homo sapien
agagatcaccaggaggggttgcaga

SEQ ID NO: 3720608 - DNA, 25 bp, Homo sapien
ctggggagcagaacttaactgagcc

SEQ ID NO: 3720609 - DNA, 25 bp, Homo sapien
ctggtgggaatccttgcagagagcc

SEQ ID NO: 3720610 - DNA, 25 bp, Homo sapien
tcctggtgggaatccttgcagagag

SEQ ID NO: 3720611 - DNA, 25 bp, Homo sapien
cctggtgggaatccttgcagagagc

SEQ ID NO: 3720612 - DNA, 25 bp, Homo sapien
caggacccgcccctaagcaggaatt

SEQ ID NO: 3720613 - DNA, 25 bp, Homo sapien
tacccagaaaaatcagagcctccag

SEQ ID NO: 3720614 - DNA, 25 bp, Homo sapien
aggaatttttcagatctcccttctg

SEQ ID NO: 3720615 - DNA, 25 bp, Homo sapien
gatctcccttctgggtcctttggtc

SEQ ID NO: 3720616 - DNA, 25 bp, Homo sapien
caggagctccgacaaagtggctgac

SEQ ID NO: 3720617 - DNA, 25 bp, Homo sapien
gaaccactaccaacctggagaatgt

SEQ ID NO: 3720618 - DNA, 25 bp, Homo sapien
tgcgggcctttatcacatgtcctgg

SEQ ID NO: 3720619 - DNA, 25 bp, Homo sapien
gataagagcactgtccatgatccca

SEQ ID NO: 3720620 - DNA, 25 bp, Homo sapien
ggccaagtatcgagcagacagcata

SEQ ID NO: 3720621 - DNA, 25 bp, Homo sapien
ctggccagggaagctgaccattgct

SEQ ID NO: 3720622 - DNA, 25 bp, Homo sapien
tgctgggcccctgcttaaagctctg

SEQ ID NO: 3720623 - DNA, 25 bp, Homo sapien
ctttctagaagccaccaaggatgcc

SEQ ID NO: 3720624 - DNA, 25 bp, Homo sapien
tcaccacgacgctggcccattggat

SEQ ID NO: 3720625 - DNA, 25 bp, Homo sapien
gagggtaatcctgccgtgaatttca

SEQ ID NO: 3720626 - DNA, 25 bp, Homo sapien
tatagacagaattagctcggtgaca

SEQ ID NO: 3720627 - DNA, 25 bp, Homo sapien
cgagcctgattgtctttcactaggg

SEQ ID NO: 3720628 - DNA, 25 bp, Homo sapien
aggccactgggtccgctctccgccg

SEQ ID NO: 3720629 - DNA, 25 bp, Homo sapien
cgccgaggccactgggtccgctctc

SEQ ID NO: 3720630 - DNA, 25 bp, Homo sapien
tttggtgccaggccgcagccaacgc

SEQ ID NO: 3720631 - DNA, 25 bp, Homo sapien
gcagccaacgcagcgcccggatccc

SEQ ID NO: 3720632 - DNA, 25 bp, Homo sapien
aaacttgagtgccttctcttgcagc

SEQ ID NO: 3720633 - DNA, 25 bp, Homo sapien
acttgagtgccttctcttgcagcac

SEQ ID NO: 3720634 - DNA, 25 bp, Homo sapien
tgagtgccttctcttgcagcaccgc

SEQ ID NO: 3720635 - DNA, 25 bp, Homo sapien
cataaacttgagtgccttctcttgc

SEQ ID NO: 3720636 - DNA, 25 bp, Homo sapien
tcccgctgcccggtcccgcagtggg

SEQ ID NO: 3720637 - DNA, 25 bp, Homo sapien
ttccccggcctccaccgtctcctca

SEQ ID NO: 3720638 - DNA, 25 bp, Homo sapien
gggcgggcggcccaggccagcgacg

SEQ ID NO: 3720639 - DNA, 25 bp, Homo sapien
gccagcgcctccaccgttccccggc

SEQ ID NO: 3720640 - DNA, 25 bp, Homo sapien
cgcttttcagtaacagtccccacgc

SEQ ID NO: 3720641 - DNA, 25 bp, Homo sapien
tcctcgattaagctcccgctgtcac

SEQ ID NO: 3720642 - DNA, 25 bp, Homo sapien
cggcgtttctccagagagcttcctc

SEQ ID NO: 3720643 - DNA, 25 bp, Homo sapien
ccgccagcggcctcacggcgtttct

SEQ ID NO: 3720644 - DNA, 25 bp, Homo sapien
gagtaagccaagtttagatcatcca

SEQ ID NO: 3720645 - DNA, 25 bp, Homo sapien
taaatcaactgtactagatcactgc

SEQ ID NO: 3720646 - DNA, 25 bp, Homo sapien
aagtgctatcaggagagtgtcaaca

SEQ ID NO: 3720647 - DNA, 25 bp, Homo sapien
gatcactgcagtagattactgtcac

SEQ ID NO: 3720648 - DNA, 25 bp, Homo sapien
ttattatagttagggaccatcccaa

SEQ ID NO: 3720649 - DNA, 25 bp, Homo sapien
tctcttgcgtagactattacatact

SEQ ID NO: 3720650 - DNA, 25 bp, Homo sapien
taattgcccttaacatgactgatgc

SEQ ID NO: 3720651 - DNA, 25 bp, Homo sapien
ctttgataaccctctaattgccctt

SEQ ID NO: 3720652 - DNA, 25 bp, Homo sapien
atgtagtacctcagtggccacattc

SEQ ID NO: 3720653 - DNA, 25 bp, Homo sapien
gatacacaatctgttcatagtacta

SEQ ID NO: 3720654 - DNA, 25 bp, Homo sapien
aagatgatacacaatctgttcatag

SEQ ID NO: 3720655 - DNA, 25 bp, Homo sapien
tgtgatgtgattttaatgtagtacc

SEQ ID NO: 3720656 - DNA, 25 bp, Homo sapien
tccttcaggagtgaataaacagtct

SEQ ID NO: 3720657 - DNA, 25 bp, Homo sapien
tcaacaatagtaagacgtgaactcc

SEQ ID NO: 3720658 - DNA, 25 bp, Homo sapien
caaaaatttgcatacagcaggcatg

SEQ ID NO: 3720659 - DNA, 25 bp, Homo sapien
catggattaatctagctcaaaggca

SEQ ID NO: 3720660 - DNA, 25 bp, Homo sapien
caagctttgtaagaatcgttcctta

SEQ ID NO: 3720661 - DNA, 25 bp, Homo sapien
tacaagctttgtaagaatcgttcct

SEQ ID NO: 3720662 - DNA, 25 bp, Homo sapien
ttacaagctttgtaagaatcgttcc

SEQ ID NO: 3720663 - DNA, 25 bp, Homo sapien
agctttgtaagaatcgttccttaat

SEQ ID NO: 3720664 - DNA, 25 bp, Homo sapien
tatttacacagtctccaagtttgct

SEQ ID NO: 3720665 - DNA, 25 bp, Homo sapien
tatatgccttctgatgtagtagtgc

SEQ ID NO: 3720666 - DNA, 25 bp, Homo sapien
ggtaaaactactgcgtgaaacaatg

SEQ ID NO: 3720667 - DNA, 25 bp, Homo sapien
tgattttacaactaccacagaagaa

SEQ ID NO: 3720668 - DNA, 25 bp, Homo sapien
cctcaaagtgtagtcccagaaccag

SEQ ID NO: 3720669 - DNA, 25 bp, Homo sapien
ccaggcctaaagaatggcaaactca

SEQ ID NO: 3720670 - DNA, 25 bp, Homo sapien
cccaacccaggcctaaagaatggca

SEQ ID NO: 3720671 - DNA, 25 bp, Homo sapien
gcagcatcacctataaactagttag

SEQ ID NO: 3720672 - DNA, 25 bp, Homo sapien
gaaggactcaaccaaaaagtcagag

SEQ ID NO: 3720673 - DNA, 25 bp, Homo sapien
tggtcttgcaagagtttggcaaatt

SEQ ID NO: 3720674 - DNA, 25 bp, Homo sapien
agaactgagatataaaggataaacg

SEQ ID NO: 3720675 - DNA, 25 bp, Homo sapien
cttatagtggtcttgcaagagtttg

SEQ ID NO: 3720676 - DNA, 25 bp, Homo sapien
tacactggctatgcttgtttgaaag

SEQ ID NO: 3720677 - DNA, 25 bp, Homo sapien
tacactcagttttagagggacatgc

SEQ ID NO: 3720678 - DNA, 25 bp, Homo sapien
ggacatgctctacagtctacgaagt

SEQ ID NO: 3720679 - DNA, 25 bp, Homo sapien
tctacgaagtctgcattacactggc

SEQ ID NO: 3720680 - DNA, 25 bp, Homo sapien
tgtttatcatttatcatcaaatcca

SEQ ID NO: 3720681 - DNA, 25 bp, Homo sapien
catttatcatcaaatccatctgttc

SEQ ID NO: 3720682 - DNA, 25 bp, Homo sapien
aggatgtttatcatttatcatcaaa

SEQ ID NO: 3720683 - DNA, 25 bp, Homo sapien
aaatccatctgttcataggcaatca

SEQ ID NO: 3720684 - DNA, 25 bp, Homo sapien
gaacaaagaccacggttttcatcag

SEQ ID NO: 3720685 - DNA, 25 bp, Homo sapien
gctgctgaacaaagaccacggtttt

SEQ ID NO: 3720686 - DNA, 25 bp, Homo sapien
acagagatgccaatgccattaccac

SEQ ID NO: 3720687 - DNA, 25 bp, Homo sapien
aatgccattaccacaaaaacctgtg

SEQ ID NO: 3720688 - DNA, 25 bp, Homo sapien
aagtgtcatgttccctggtaagtaa

SEQ ID NO: 3720689 - DNA, 25 bp, Homo sapien
tttagcaggagaataggttattggc

SEQ ID NO: 3720690 - DNA, 25 bp, Homo sapien
cactgactgattggcagctacaata

SEQ ID NO: 3720691 - DNA, 25 bp, Homo sapien
gatttcccgcacatcacagatcagc

SEQ ID NO: 3720692 - DNA, 25 bp, Homo sapien
gaaataactacactaccagctgagg

SEQ ID NO: 3720693 - DNA, 25 bp, Homo sapien
ttcacgtgataagagtaaaactgca

SEQ ID NO: 3720694 - DNA, 25 bp, Homo sapien
gaagctggcctatacacaaatttca

SEQ ID NO: 3720695 - DNA, 25 bp, Homo sapien
tgcaataagttcgaagggactgtcc

SEQ ID NO: 3720696 - DNA, 25 bp, Homo sapien
actccagcctgggcaacaaagcgag

SEQ ID NO: 3720697 - DNA, 25 bp, Homo sapien
gtgagccaagatcacgccacttcac

SEQ ID NO: 3720698 - DNA, 25 bp, Homo sapien
cttgaagccagaggcggagtttgca

SEQ ID NO: 3720699 - DNA, 25 bp, Homo sapien
atcacttgaagccagaggcggagtt

SEQ ID NO: 3720700 - DNA, 25 bp, Homo sapien
cgaaggcatgctgtccgccaggctg

SEQ ID NO: 3720701 - DNA, 25 bp, Homo sapien
gaaagctgtgagtgcgccagtccct

SEQ ID NO: 3720702 - DNA, 25 bp, Homo sapien
gccagtccctgggttatacaggcat

SEQ ID NO: 3720703 - DNA, 25 bp, Homo sapien
ggttatacaggcatcgcagcgaagg

SEQ ID NO: 3720704 - DNA, 25 bp, Homo sapien
ttgaatggcccataagacctcagtg

SEQ ID NO: 3720705 - DNA, 25 bp, Homo sapien
tatcctttttatagccagagtaaca

SEQ ID NO: 3720706 - DNA, 25 bp, Homo sapien
aacttgtgcttaaatcctttcagtg

SEQ ID NO: 3720707 - DNA, 25 bp, Homo sapien
atgcatcttcttatagccagagtaa

SEQ ID NO: 3720708 - DNA, 25 bp, Homo sapien
catatacaatagagagggtatcagc

SEQ ID NO: 3720709 - DNA, 25 bp, Homo sapien
acccctaaggtgaagggtgtagctg

SEQ ID NO: 3720710 - DNA, 25 bp, Homo sapien
ggtatcagctacagaatgagaagca

SEQ ID NO: 3720711 - DNA, 25 bp, Homo sapien
tgatttgtcattccctgcaaacccc

SEQ ID NO: 3720712 - DNA, 25 bp, Homo sapien
cagggaagactttaattctagctca

SEQ ID NO: 3720713 - DNA, 25 bp, Homo sapien
gactaacaattacatgagagggagg

SEQ ID NO: 3720714 - DNA, 25 bp, Homo sapien
ctgaaacggtaatctctgggaggac

SEQ ID NO: 3720715 - DNA, 25 bp, Homo sapien
gaagattaggtagacaaaggcagag

SEQ ID NO: 3720716 - DNA, 25 bp, Homo sapien
ttcactagactgatgcagaacagct

SEQ ID NO: 3720717 - DNA, 25 bp, Homo sapien
cattttcagaggagagggctaagct

SEQ ID NO: 3720718 - DNA, 25 bp, Homo sapien
tttctagcatgacctcaaagcagga

SEQ ID NO: 3720719 - DNA, 25 bp, Homo sapien
aaggagcaggacttatattttacaa

SEQ ID NO: 3720720 - DNA, 25 bp, Homo sapien
aggattttctaaatcagtaaaatgt

SEQ ID NO: 3720721 - DNA, 25 bp, Homo sapien
ctacttgatgtcaaaaggattttct

SEQ ID NO: 3720722 - DNA, 25 bp, Homo sapien
gattttctaaatcagtaaaatgtcc

SEQ ID NO: 3720723 - DNA, 25 bp, Homo sapien
acttgatgtcaaaaggattttctaa

SEQ ID NO: 3720724 - DNA, 25 bp, Homo sapien
ccaatagacagaccgataatagtcg

SEQ ID NO: 3720725 - DNA, 25 bp, Homo sapien
taatagtcgattattacataccagt

SEQ ID NO: 3720726 - DNA, 25 bp, Homo sapien
agagaccaatagacagaccgataat

SEQ ID NO: 3720727 - DNA, 25 bp, Homo sapien
cagaccgataatagtcgattattac

SEQ ID NO: 3720728 - DNA, 25 bp, Homo sapien
aaatgccagtggttcccaacatctc

SEQ ID NO: 3720729 - DNA, 25 bp, Homo sapien
tgagtggaatcaagtctgagagcac

SEQ ID NO: 3720730 - DNA, 25 bp, Homo sapien
ggtagtggtcagtaaagaaaacatg

SEQ ID NO: 3720731 - DNA, 25 bp, Homo sapien
actgctgtacaaaggacattctggg

SEQ ID NO: 3720732 - DNA, 25 bp, Homo sapien
ttatacacgaagattttggggcagc

SEQ ID NO: 3720733 - DNA, 25 bp, Homo sapien
ggggcagcactaacagttatttcaa

SEQ ID NO: 3720734 - DNA, 25 bp, Homo sapien
ccaatatacaattttatacacgaag

SEQ ID NO: 3720735 - DNA, 25 bp, Homo sapien
gattttggggcagcactaacagtta

SEQ ID NO: 3720736 - DNA, 25 bp, Homo sapien
gattttattcgctggtgtctgctgc

SEQ ID NO: 3720737 - DNA, 25 bp, Homo sapien
ggctgattttattcgctggtgtctg

SEQ ID NO: 3720738 - DNA, 25 bp, Homo sapien
aatggctgattttattcgctggtgt

SEQ ID NO: 3720739 - DNA, 25 bp, Homo sapien
tgattttattcgctggtgtctgctg

SEQ ID NO: 3720740 - DNA, 25 bp, Homo sapien
ttgacattatcattaagagtgggtg

SEQ ID NO: 3720741 - DNA, 25 bp, Homo sapien
gctagattgacattatcattaagag

SEQ ID NO: 3720742 - DNA, 25 bp, Homo sapien
ttatgaactcgtgacaactccaatg

SEQ ID NO: 3720743 - DNA, 25 bp, Homo sapien
gaactcgtgacaactccaatgtgta

SEQ ID NO: 3720744 - DNA, 25 bp, Homo sapien
aataatctttgagtaagcatcttgc

SEQ ID NO: 3720745 - DNA, 25 bp, Homo sapien
caaggttggatggtgcaacagagcc

SEQ ID NO: 3720746 - DNA, 25 bp, Homo sapien
catcttgctcaaggttggatggtgc

SEQ ID NO: 3720747 - DNA, 25 bp, Homo sapien
gagtaagcatcttgctcaaggttgg

SEQ ID NO: 3720748 - DNA, 25 bp, Homo sapien
tacttgaccatgagtcattgacatt

SEQ ID NO: 3720749 - DNA, 25 bp, Homo sapien
ctcctgacatcccaccaccaacatc

SEQ ID NO: 3720750 - DNA, 25 bp, Homo sapien
tacatgctacttgaccatgagtcat

SEQ ID NO: 3720751 - DNA, 25 bp, Homo sapien
cactgtacatgctacttgaccatga

SEQ ID NO: 3720752 - DNA, 25 bp, Homo sapien
gcagaaatatcttatgaggtttaac

SEQ ID NO: 3720753 - DNA, 25 bp, Homo sapien
tcacctttagtaagcctgacaggcc

SEQ ID NO: 3720754 - DNA, 25 bp, Homo sapien
ttgtgatgatcccttgtaaaagtcc

SEQ ID NO: 3720755 - DNA, 25 bp, Homo sapien
ccagtaccctaatgtgtttcttttg

SEQ ID NO: 3720756 - DNA, 25 bp, Homo sapien
tatcttcctagggggttcgccatta

SEQ ID NO: 3720757 - DNA, 25 bp, Homo sapien
tagggggttcgccattattacagtc

SEQ ID NO: 3720758 - DNA, 25 bp, Homo sapien
ggggttcgccattattacagtcttc

SEQ ID NO: 3720759 - DNA, 25 bp, Homo sapien
tcctagggggttcgccattattaca

SEQ ID NO: 3720760 - DNA, 25 bp, Homo sapien
cgaatattgcacacaacagatcttg

SEQ ID NO: 3720761 - DNA, 25 bp, Homo sapien
ggagaaaaagcctcatgacctaatt

SEQ ID NO: 3720762 - DNA, 25 bp, Homo sapien
tgacctgctggtccatctgtatgtg

SEQ ID NO: 3720763 - DNA, 25 bp, Homo sapien
aatcagattagtcccatgtgtgacc

SEQ ID NO: 3720764 - DNA, 25 bp, Homo sapien
agggccccaggaggatctcctactt

SEQ ID NO: 3720765 - DNA, 25 bp, Homo sapien
gaggatctcctacttccctgtttct

SEQ ID NO: 3720766 - DNA, 25 bp, Homo sapien
ccaggaggatctcctacttccctgt

SEQ ID NO: 3720767 - DNA, 25 bp, Homo sapien
gggccccaggaggatctcctacttc

SEQ ID NO: 3720768 - DNA, 25 bp, Homo sapien
ttgctcctccaatatttaaatagct

SEQ ID NO: 3720769 - DNA, 25 bp, Homo sapien
gaaatcccattagaaatatctgcaa

SEQ ID NO: 3720770 - DNA, 25 bp, Homo sapien
caacaatggcaaaacgctatttttg

SEQ ID NO: 3720771 - DNA, 25 bp, Homo sapien
catgcagtagttatgtcctatcaac

SEQ ID NO: 3720772 - DNA, 25 bp, Homo sapien
caattttcacactgctgctagggta

SEQ ID NO: 3720773 - DNA, 25 bp, Homo sapien
tatatcgcatataaagcacataagc

SEQ ID NO: 3720774 - DNA, 25 bp, Homo sapien
gctgaaaactaccttctttgtgaaa

SEQ ID NO: 3720775 - DNA, 25 bp, Homo sapien
aaactagtaagatgccttgctgaaa

SEQ ID NO: 3720776 - DNA, 25 bp, Homo sapien
acttattaattactggacaatatat

SEQ ID NO: 3720777 - DNA, 25 bp, Homo sapien
cattggtaatactatagttatactt

SEQ ID NO: 3720778 - DNA, 25 bp, Homo sapien
aaacttattaattactggacaatat

SEQ ID NO: 3720779 - DNA, 25 bp, Homo sapien
aacattggtaatactatagttatac

SEQ ID NO: 3720780 - DNA, 25 bp, Homo sapien
gcagtgcttgctaaacatactgttt

SEQ ID NO: 3720781 - DNA, 25 bp, Homo sapien
catactgtttcttggtttaagcaga

SEQ ID NO: 3720782 - DNA, 25 bp, Homo sapien
ggccacacaattctcagtcttcata

SEQ ID NO: 3720783 - DNA, 25 bp, Homo sapien
tgtttcttggtttaagcagagtctg

SEQ ID NO: 3720784 - DNA, 25 bp, Homo sapien
tggattaagttatagggataaaata

SEQ ID NO: 3720785 - DNA, 25 bp, Homo sapien
gattaagttatagggataaaataga

SEQ ID NO: 3720786 - DNA, 25 bp, Homo sapien
tatagggataaaatagaccctccta

SEQ ID NO: 3720787 - DNA, 25 bp, Homo sapien
gcttctcataccaggaccattttgc

SEQ ID NO: 3720788 - DNA, 25 bp, Homo sapien
aatctgaatttaaacagcttgtttc

SEQ ID NO: 3720789 - DNA, 25 bp, Homo sapien
tgctcgtaaaacagcacgttgcttc

SEQ ID NO: 3720790 - DNA, 25 bp, Homo sapien
tgagaaaagggactctgtgctcgta

SEQ ID NO: 3720791 - DNA, 25 bp, Homo sapien
aacgtgcctaatcaatgcggctgga

SEQ ID NO: 3720792 - DNA, 25 bp, Homo sapien
gcggctggacttcaggcttaaaaac

SEQ ID NO: 3720793 - DNA, 25 bp, Homo sapien
tgtctatattcaagggccatccaga

SEQ ID NO: 3720794 - DNA, 25 bp, Homo sapien
agaatcagcactaaaacctgggtcc

SEQ ID NO: 3720795 - DNA, 25 bp, Homo sapien
agccccgcagatcgcactgtttgtg

SEQ ID NO: 3720796 - DNA, 25 bp, Homo sapien
tacagagccaaaacgaggcgaattg

SEQ ID NO: 3720797 - DNA, 25 bp, Homo sapien
gccgatctctgagcgttagcagtaa

SEQ ID NO: 3720798 - DNA, 25 bp, Homo sapien
taacaatgcaattacagccccgcag

SEQ ID NO: 3720799 - DNA, 25 bp, Homo sapien
tgctgatggcgccaattacaagccc

SEQ ID NO: 3720800 - DNA, 25 bp, Homo sapien
tgcactccgcaaaacgtgctgatgg

SEQ ID NO: 3720801 - DNA, 25 bp, Homo sapien
gatttatgcggactcttgccgacgt

SEQ ID NO: 3720802 - DNA, 25 bp, Homo sapien
taattggattacaacagccgcttgc

SEQ ID NO: 3720803 - DNA, 25 bp, Homo sapien
tgttgaagttaatgtgacaggagtc

SEQ ID NO: 3720804 - DNA, 25 bp, Homo sapien
tgacaggagtccaaagatggattac

SEQ ID NO: 3720805 - DNA, 25 bp, Homo sapien
ttttcacactgttgaagttaatgtg

SEQ ID NO: 3720806 - DNA, 25 bp, Homo sapien
gttaatgtgacaggagtccaaagat

SEQ ID NO: 3720807 - DNA, 25 bp, Homo sapien
tactaaagtaagtcaccaccctgaa

SEQ ID NO: 3720808 - DNA, 25 bp, Homo sapien
tgcatgcttacactacaaattgtga

SEQ ID NO: 3720809 - DNA, 25 bp, Homo sapien
cacccagccgaaaagagatagtaag

SEQ ID NO: 3720810 - DNA, 25 bp, Homo sapien
gaattactgactaggtaacccagaa

SEQ ID NO: 3720811 - DNA, 25 bp, Homo sapien
tcatgtcttcacaatcaccgaacca

SEQ ID NO: 3720812 - DNA, 25 bp, Homo sapien
catgtcttcacaatcaccgaaccat

SEQ ID NO: 3720813 - DNA, 25 bp, Homo sapien
gaaagcagggagtaactaacaattg

SEQ ID NO: 3720814 - DNA, 25 bp, Homo sapien
caacttcagaagtttcaagggcact

SEQ ID NO: 3720815 - DNA, 25 bp, Homo sapien
tacacattttctattgaaggaaagc

SEQ ID NO: 3720816 - DNA, 25 bp, Homo sapien
cattttgagaacctacccgtgcaag

SEQ ID NO: 3720817 - DNA, 25 bp, Homo sapien
gaagactgttccacgttcaagtgct

SEQ ID NO: 3720818 - DNA, 25 bp, Homo sapien
tgctaggtcaactgggtatcacact

SEQ ID NO: 3720819 - DNA, 25 bp, Homo sapien
tatggtcaaagaaaacaatccggta

SEQ ID NO: 3720820 - DNA, 25 bp, Homo sapien
tacacaaggcgtggatcacacagct

SEQ ID NO: 3720821 - DNA, 25 bp, Homo sapien
cttgagccactgtgcctggccctcg

SEQ ID NO: 3720822 - DNA, 25 bp, Homo sapien
aacctctgccccgcaggttcaggca

SEQ ID NO: 3720823 - DNA, 25 bp, Homo sapien
gacttgagccactgtgcctggccct

SEQ ID NO: 3720824 - DNA, 25 bp, Homo sapien
ctctgccccgcaggttcaggcaatt

SEQ ID NO: 3720825 - DNA, 25 bp, Homo sapien
gatgtagatagtgccaccttaaaag

SEQ ID NO: 3720826 - DNA, 25 bp, Homo sapien
actgatgtagatagtgccaccttaa

SEQ ID NO: 3720827 - DNA, 25 bp, Homo sapien
tgtagatagtgccaccttaaaagga

SEQ ID NO: 3720828 - DNA, 25 bp, Homo sapien
tagatagtgccaccttaaaaggatt

SEQ ID NO: 3720829 - DNA, 25 bp, Homo sapien
tgctcagacatactcaatgtggaac

SEQ ID NO: 3720830 - DNA, 25 bp, Homo sapien
gacatactcaatgtggaacatgcta

SEQ ID NO: 3720831 - DNA, 25 bp, Homo sapien
ccctgctcagacatactcaatgtgg

SEQ ID NO: 3720832 - DNA, 25 bp, Homo sapien
ctcaatgtggaacatgctataaaac

SEQ ID NO: 3720833 - DNA, 25 bp, Homo sapien
gatcgactggatatgagtatgagaa

SEQ ID NO: 3720834 - DNA, 25 bp, Homo sapien
tcacaaatgggtacaactgggtact

SEQ ID NO: 3720835 - DNA, 25 bp, Homo sapien
gaagacagatcctactgaatttgct

SEQ ID NO: 3720836 - DNA, 25 bp, Homo sapien
taaggcaacccaaatgtggcagaaa

SEQ ID NO: 3720837 - DNA, 25 bp, Homo sapien
tttccataacataaaatattccgta

SEQ ID NO: 3720838 - DNA, 25 bp, Homo sapien
acataaaatattccgtatttcccat

SEQ ID NO: 3720839 - DNA, 25 bp, Homo sapien
cataacataaaatattccgtatttc

SEQ ID NO: 3720840 - DNA, 25 bp, Homo sapien
tccataacataaaatattccgtatt

SEQ ID NO: 3720841 - DNA, 25 bp, Homo sapien
tgtctacatgattgagcccactctg

SEQ ID NO: 3720842 - DNA, 25 bp, Homo sapien
ccacagaaataccatagaaagttgg

SEQ ID NO: 3720843 - DNA, 25 bp, Homo sapien
gaaagcatgttattactagcaagcc

SEQ ID NO: 3720844 - DNA, 25 bp, Homo sapien
tctattagcaattacgtggaaaacc

SEQ ID NO: 3720845 - DNA, 25 bp, Homo sapien
tggaagtgccattggcaagttttgt

SEQ ID NO: 3720846 - DNA, 25 bp, Homo sapien
ctggaagtgccattggcaagttttg

SEQ ID NO: 3720847 - DNA, 25 bp, Homo sapien
actggaagtgccattggcaagtttt

SEQ ID NO: 3720848 - DNA, 25 bp, Homo sapien
taagatacgagtttatgtgcccatg

SEQ ID NO: 3720849 - DNA, 25 bp, Homo sapien
tgatctgactctgaccactgctcaa

SEQ ID NO: 3720850 - DNA, 25 bp, Homo sapien
tgagagtttccgttgcttgggcaca

SEQ ID NO: 3720851 - DNA, 25 bp, Homo sapien
tctgcaacataggtttaagatacga

SEQ ID NO: 3720852 - DNA, 25 bp, Homo sapien
gatatcagtcacacttttcagcaga

SEQ ID NO: 3720853 - DNA, 25 bp, Homo sapien
catcattgtccctagtgtggtccag

SEQ ID NO: 3720854 - DNA, 25 bp, Homo sapien
cctcatagagtggtcagtggataca

SEQ ID NO: 3720855 - DNA, 25 bp, Homo sapien
taatgggtgccatcaaattgttcct

SEQ ID NO: 3720856 - DNA, 25 bp, Homo sapien
ggtcactcggtaccattccttgcac

SEQ ID NO: 3720857 - DNA, 25 bp, Homo sapien
tgatttggcatccaggtatgacaga

SEQ ID NO: 3720858 - DNA, 25 bp, Homo sapien
cagcatgccatcagaggtcactcgg

SEQ ID NO: 3720859 - DNA, 25 bp, Homo sapien
tgttctcagcaatatgatccaatcc

SEQ ID NO: 3720860 - DNA, 25 bp, Homo sapien
atcctcttcgttctgccaggcctct

SEQ ID NO: 3720861 - DNA, 25 bp, Homo sapien
tcttcgttctgccaggcctctccac

SEQ ID NO: 3720862 - DNA, 25 bp, Homo sapien
cttcgttctgccaggcctctccaca

SEQ ID NO: 3720863 - DNA, 25 bp, Homo sapien
cctcttcgttctgccaggcctctcc

SEQ ID NO: 3720864 - DNA, 25 bp, Homo sapien
caccagaggcataagataaaggcaa

SEQ ID NO: 3720865 - DNA, 25 bp, Homo sapien
aacaggagggctgatcagctttcca

SEQ ID NO: 3720866 - DNA, 25 bp, Homo sapien
tttggaaggacatcactaagcacac

SEQ ID NO: 3720867 - DNA, 25 bp, Homo sapien
gccaggtcctgaagccgtataagag

SEQ ID NO: 3720868 - DNA, 25 bp, Homo sapien
ggaatactcgtatcccaagctagat

SEQ ID NO: 3720869 - DNA, 25 bp, Homo sapien
tgacagcacatctctggaatactcg

SEQ ID NO: 3720870 - DNA, 25 bp, Homo sapien
catggagatcacttttgctaggtct

SEQ ID NO: 3720871 - DNA, 25 bp, Homo sapien
ccaaacacggtgtggaagctagtaa

SEQ ID NO: 3720872 - DNA, 25 bp, Homo sapien
gactactgcttagattcactggcct

SEQ ID NO: 3720873 - DNA, 25 bp, Homo sapien
cacccggccgacattatatatttat

SEQ ID NO: 3720874 - DNA, 25 bp, Homo sapien
tcaggagtcccatgtcaaagagtaa

SEQ ID NO: 3720875 - DNA, 25 bp, Homo sapien
gaacatcggagtaccaagcctttag

SEQ ID NO: 3720876 - DNA, 25 bp, Homo sapien
aaaagagttgggaggagcattcccg

SEQ ID NO: 3720877 - DNA, 25 bp, Homo sapien
agagttgggaggagcattcccgtca

SEQ ID NO: 3720878 - DNA, 25 bp, Homo sapien
gaggagcattcccgtcaggaggttt

SEQ ID NO: 3720879 - DNA, 25 bp, Homo sapien
gggaggagcattcccgtcaggaggt

SEQ ID NO: 3720880 - DNA, 25 bp, Homo sapien
ttcggcagtgaattctctgtaaact

SEQ ID NO: 3720881 - DNA, 25 bp, Homo sapien
cttgtttcacttcggcagtgaattc

SEQ ID NO: 3720882 - DNA, 25 bp, Homo sapien
tctgtaaactatgtcttccacatct

SEQ ID NO: 3720883 - DNA, 25 bp, Homo sapien
tgttgtctcgaaggccgcttactat

SEQ ID NO: 3720884 - DNA, 25 bp, Homo sapien
tgaccgtggaatccgatgatcctgt

SEQ ID NO: 3720885 - DNA, 25 bp, Homo sapien
tactggagacagaggactgaacctg

SEQ ID NO: 3720886 - DNA, 25 bp, Homo sapien
acctgtatggcctgtgagaattcgc

SEQ ID NO: 3720887 - DNA, 25 bp, Homo sapien
gagaattcgcttgcattccaatgtg

SEQ ID NO: 3720888 - DNA, 25 bp, Homo sapien
tggaacgatctttggagcaggtcac

SEQ ID NO: 3720889 - DNA, 25 bp, Homo sapien
ccctccggagggtaatgtcagttgg

SEQ ID NO: 3720890 - DNA, 25 bp, Homo sapien
gccattattgaaacgcaagtgcaga

SEQ ID NO: 3720891 - DNA, 25 bp, Homo sapien
tctacaacattgacagcagctcggt

SEQ ID NO: 3720892 - DNA, 25 bp, Homo sapien
tgtgtccatttaaggtccttacaaa

SEQ ID NO: 3720893 - DNA, 25 bp, Homo sapien
caggcaatgcctcgtttgtgtccat

SEQ ID NO: 3720894 - DNA, 25 bp, Homo sapien
ctgatagtgttgtcagatgagccac

SEQ ID NO: 3720895 - DNA, 25 bp, Homo sapien
cagcctgtccctgtactgcaaacag

SEQ ID NO: 3720896 - DNA, 25 bp, Homo sapien
acagaaatatgtaggtttaagttca

SEQ ID NO: 3720897 - DNA, 25 bp, Homo sapien
tccaggcataaaaacgaattcaatg

SEQ ID NO: 3720898 - DNA, 25 bp, Homo sapien
aagcacagggctttacataattctg

SEQ ID NO: 3720899 - DNA, 25 bp, Homo sapien
acataattctgtaaacaggttcttc

SEQ ID NO: 3720900 - DNA, 25 bp, Homo sapien
tcaaatcgaatacaacgcaccaatt

SEQ ID NO: 3720901 - DNA, 25 bp, Homo sapien
tggccttctaacactcgtaaacatg

SEQ ID NO: 3720902 - DNA, 25 bp, Homo sapien
gaatacaacgcaccaattcctcatg

SEQ ID NO: 3720903 - DNA, 25 bp, Homo sapien
tgcaccacattctatgtcccataat

SEQ ID NO: 3720904 - DNA, 25 bp, Homo sapien
ccgtagacagagtgtccctgcagga

SEQ ID NO: 3720905 - DNA, 25 bp, Homo sapien
gccacaagatcccacactttaattt

SEQ ID NO: 3720906 - DNA, 25 bp, Homo sapien
ccaaagcagccacaagatcccacac

SEQ ID NO: 3720907 - DNA, 25 bp, Homo sapien
cacaagggtccgtagacagagtgtc

SEQ ID NO: 3720908 - DNA, 25 bp, Homo sapien
catttatgtacgtgtcttttgctga

SEQ ID NO: 3720909 - DNA, 25 bp, Homo sapien
tctcttgttggtggacataggggct

SEQ ID NO: 3720910 - DNA, 25 bp, Homo sapien
gggctgattatagtttatggctatt

SEQ ID NO: 3720911 - DNA, 25 bp, Homo sapien
atactacaatccatctattctcttg

SEQ ID NO: 3720912 - DNA, 25 bp, Homo sapien
tattgttattaatttgtttagtctc

SEQ ID NO: 3720913 - DNA, 25 bp, Homo sapien
tgttattaatttgtttagtctctta

SEQ ID NO: 3720914 - DNA, 25 bp, Homo sapien
ccaatgctgttattgttattaattt

SEQ ID NO: 3720915 - DNA, 25 bp, Homo sapien
gctgttattgttattaatttgttta

SEQ ID NO: 3720916 - DNA, 25 bp, Homo sapien
catgtgaactactgacaatctggaa

SEQ ID NO: 3720917 - DNA, 25 bp, Homo sapien
tgaggattgtgtcatcatgtgaact

SEQ ID NO: 3720918 - DNA, 25 bp, Homo sapien
gtcgaaaaactcttccggaatgctc

SEQ ID NO: 3720919 - DNA, 25 bp, Homo sapien
cagctggatcatttaggaagtccca

SEQ ID NO: 3720920 - DNA, 25 bp, Homo sapien
caagtatgaggtcagtgtatggtta

SEQ ID NO: 3720921 - DNA, 25 bp, Homo sapien
tgggcaagtatgaggtcagtgtatg

SEQ ID NO: 3720922 - DNA, 25 bp, Homo sapien
ggcaagtatgaggtcagtgtatggt

SEQ ID NO: 3720923 - DNA, 25 bp, Homo sapien
ctgggcaagtatgaggtcagtgtat

SEQ ID NO: 3720924 - DNA, 25 bp, Homo sapien
tagggcaggaatgactaggcttacc

SEQ ID NO: 3720925 - DNA, 25 bp, Homo sapien
taggcttaccacacaagtaggaccc

SEQ ID NO: 3720926 - DNA, 25 bp, Homo sapien
tacaggagttggtgacccaaacggc

SEQ ID NO: 3720927 - DNA, 25 bp, Homo sapien
tggctaccttggtgaaaggcactgt

SEQ ID NO: 3720928 - DNA, 25 bp, Homo sapien
ggcaggaggcccaaatcttccagtg

SEQ ID NO: 3720929 - DNA, 25 bp, Homo sapien
ggtctctcccagcaggctatacagg

SEQ ID NO: 3720930 - DNA, 25 bp, Homo sapien
tcctcggctagtccagggaaactgg

SEQ ID NO: 3720931 - DNA, 25 bp, Homo sapien
tcagttgtgctgagtagaccgtcct

SEQ ID NO: 3720932 - DNA, 25 bp, Homo sapien
tacgcagaatgcaccaagcgattgg

SEQ ID NO: 3720933 - DNA, 25 bp, Homo sapien
aatgcaccaagcgattggctctggc

SEQ ID NO: 3720934 - DNA, 25 bp, Homo sapien
tctgtaggctgagccttaccagtga

SEQ ID NO: 3720935 - DNA, 25 bp, Homo sapien
ccaagcgattggctctggccatttc

SEQ ID NO: 3720936 - DNA, 25 bp, Homo sapien
atgaggaaatcggagatggaaacca

SEQ ID NO: 3720937 - DNA, 25 bp, Homo sapien
tgaggaaatcggagatggaaaccat

SEQ ID NO: 3720938 - DNA, 25 bp, Homo sapien
ctgatgaggaaatcggagatggaaa

SEQ ID NO: 3720939 - DNA, 25 bp, Homo sapien
tgatgaggaaatcggagatggaaac

SEQ ID NO: 3720940 - DNA, 25 bp, Homo sapien
ttgtgcagtgcaaggttgacacggt

SEQ ID NO: 3720941 - DNA, 25 bp, Homo sapien
gaccatctctcttaagctaccttga

SEQ ID NO: 3720942 - DNA, 25 bp, Homo sapien
cacggtcttggcaaagatacaggca

SEQ ID NO: 3720943 - DNA, 25 bp, Homo sapien
ctgatcctctctcttaagcagcttt

SEQ ID NO: 3720944 - DNA, 25 bp, Homo sapien
tgccttccgagtgactgggtttgcc

SEQ ID NO: 3720945 - DNA, 25 bp, Homo sapien
tgaggtccagctgtttatgctgttc

SEQ ID NO: 3720946 - DNA, 25 bp, Homo sapien
gactgggtttgcctgacccttgctg

SEQ ID NO: 3720947 - DNA, 25 bp, Homo sapien
caccaatcgccacagacgctttatt

SEQ ID NO: 3720948 - DNA, 25 bp, Homo sapien
gatgacgaaccctgatagtggccaa

SEQ ID NO: 3720949 - DNA, 25 bp, Homo sapien
tttgagacagctcgaaacccatgcc

SEQ ID NO: 3720950 - DNA, 25 bp, Homo sapien
ttggtgtggcacaggtacccttgca

SEQ ID NO: 3720951 - DNA, 25 bp, Homo sapien
gaacctagattggagagcaaaaccc

SEQ ID NO: 3720952 - DNA, 25 bp, Homo sapien
tcttgtccaagtagctccagtgtgc

SEQ ID NO: 3720953 - DNA, 25 bp, Homo sapien
tgtgcaccaaaaggtcacgtgtctg

SEQ ID NO: 3720954 - DNA, 25 bp, Homo sapien
tcagaccaatggtaccaggagccgg

SEQ ID NO: 3720955 - DNA, 25 bp, Homo sapien
caaccaatcaggagctaagagcgcc

SEQ ID NO: 3720956 - DNA, 25 bp, Homo sapien
cacactccattatcatgatcctagg

SEQ ID NO: 3720957 - DNA, 25 bp, Homo sapien
gaacatattggtacactgactacac

SEQ ID NO: 3720958 - DNA, 25 bp, Homo sapien
cctaggttgtgaacatattggtaca

SEQ ID NO: 3720959 - DNA, 25 bp, Homo sapien
gactacacatcaccataacataatc

SEQ ID NO: 3720960 - DNA, 25 bp, Homo sapien
gaagaataaattcgggctgcagatg

SEQ ID NO: 3720961 - DNA, 25 bp, Homo sapien
ggaggagcctcactcgccactctag

SEQ ID NO: 3720962 - DNA, 25 bp, Homo sapien
cggtctgcaaggagatgtcccctct

SEQ ID NO: 3720963 - DNA, 25 bp, Homo sapien
ctctctacctccctgcgaagaataa

SEQ ID NO: 3720964 - DNA, 25 bp, Homo sapien
cctcagagggagaacctcagaagtt

SEQ ID NO: 3720965 - DNA, 25 bp, Homo sapien
tgccagcatcccatctctctatcgg

SEQ ID NO: 3720966 - DNA, 25 bp, Homo sapien
ggaaggtataagctccatctctggg

SEQ ID NO: 3720967 - DNA, 25 bp, Homo sapien
tccttgacagtcttcggcaggaagg

SEQ ID NO: 3720968 - DNA, 25 bp, Homo sapien
tcccttgagggagattgtgagccta

SEQ ID NO: 3720969 - DNA, 25 bp, Homo sapien
tcctggataagtgggtctgtgcaca

SEQ ID NO: 3720970 - DNA, 25 bp, Homo sapien
tactggccagtggttagtaacccca

SEQ ID NO: 3720971 - DNA, 25 bp, Homo sapien
gaagttctggccaaagcctacagtg

SEQ ID NO: 3720972 - DNA, 25 bp, Homo sapien
agaagaagcagaaggtgagctgacc

SEQ ID NO: 3720973 - DNA, 25 bp, Homo sapien
agaagcagaaggtgagctgacccag

SEQ ID NO: 3720974 - DNA, 25 bp, Homo sapien
aagcagaaggtgagctgacccagtc

SEQ ID NO: 3720975 - DNA, 25 bp, Homo sapien
cagaaggtgagctgacccagtctca

SEQ ID NO: 3720976 - DNA, 25 bp, Homo sapien
gaccaacgctccaataggccgggat

SEQ ID NO: 3720977 - DNA, 25 bp, Homo sapien
ttcccaagcggcagaaaattcatgc

SEQ ID NO: 3720978 - DNA, 25 bp, Homo sapien
ggttggagggcctcaattctggatt

SEQ ID NO: 3720979 - DNA, 25 bp, Homo sapien
cagccatacttcaatggatcccagg

SEQ ID NO: 3720980 - DNA, 25 bp, Homo sapien
aagtcctcctccttcctctgcgagt

SEQ ID NO: 3720981 - DNA, 25 bp, Homo sapien
cgaaagtcctcctccttcctctgcg

SEQ ID NO: 3720982 - DNA, 25 bp, Homo sapien
cccgaaagtcctcctccttcctctg

SEQ ID NO: 3720983 - DNA, 25 bp, Homo sapien
aaagtcctcctccttcctctgcgag

SEQ ID NO: 3720984 - DNA, 25 bp, Homo sapien
cctgctaagcagcacgcccagccgc

SEQ ID NO: 3720985 - DNA, 25 bp, Homo sapien
cagcagcgcagtcttctgggctgtc

SEQ ID NO: 3720986 - DNA, 25 bp, Homo sapien
tctccaaccagcccgtcaccgccat

SEQ ID NO: 3720987 - DNA, 25 bp, Homo sapien
actctccaaccagcccgtcaccgcc

SEQ ID NO: 3720988 - DNA, 25 bp, Homo sapien
agtcttctgggctgtccgcagactc

SEQ ID NO: 3720989 - DNA, 25 bp, Homo sapien
tgtccggagacatgtgttccagtca

SEQ ID NO: 3720990 - DNA, 25 bp, Homo sapien
agtgaggcccaaacaagtaaaggag

SEQ ID NO: 3720991 - DNA, 25 bp, Homo sapien
gaattaatggcacagtcggaactag

SEQ ID NO: 3720992 - DNA, 25 bp, Homo sapien
tgaagcgcccgtggtgaattaatgg

SEQ ID NO: 3720993 - DNA, 25 bp, Homo sapien
tctcctgtcaggagcgggatccaag

SEQ ID NO: 3720994 - DNA, 25 bp, Homo sapien
tagcagagccctaggtaataccacc

SEQ ID NO: 3720995 - DNA, 25 bp, Homo sapien
gatgcagcgcttactaaatccaggc

SEQ ID NO: 3720996 - DNA, 25 bp, Homo sapien
gctcacaggcattagaaagggctct

SEQ ID NO: 3720997 - DNA, 25 bp, Homo sapien
ctgggaataaatagtgaaccttcct

SEQ ID NO: 3720998 - DNA, 25 bp, Homo sapien
caagtagttcactcgtcttctcgtc

SEQ ID NO: 3720999 - DNA, 25 bp, Homo sapien
actcgtcttctcgtcatattcttca

SEQ ID NO: 3721000 - DNA, 25 bp, Homo sapien
gtagttcactcgtcttctcgtcata

SEQ ID NO: 3721001 - DNA, 25 bp, Homo sapien
gtcttctcgtcatattcttcagcca

SEQ ID NO: 3721002 - DNA, 25 bp, Homo sapien
cctgtctgcccatcagtccacactc

SEQ ID NO: 3721003 - DNA, 25 bp, Homo sapien
tgtctgcccatcagtccacactcag

SEQ ID NO: 3721004 - DNA, 25 bp, Homo sapien
tcctgtctgcccatcagtccacact

SEQ ID NO: 3721005 - DNA, 25 bp, Homo sapien
ctgtctgcccatcagtccacactca

SEQ ID NO: 3721006 - DNA, 25 bp, Homo sapien
tttccaccccggtgaagagtctgat

SEQ ID NO: 3721007 - DNA, 25 bp, Homo sapien
tttcctaaatcagcaggaagcaggc

SEQ ID NO: 3721008 - DNA, 25 bp, Homo sapien
gctcctgcggcaacagaagactgtt

SEQ ID NO: 3721009 - DNA, 25 bp, Homo sapien
gaatatataaaggaggtggcgcctg

SEQ ID NO: 3721010 - DNA, 25 bp, Homo sapien
gggacaactcacactggacggcagt

SEQ ID NO: 3721011 - DNA, 25 bp, Homo sapien
gaagtgacaaatgcctccgagcagc

SEQ ID NO: 3721012 - DNA, 25 bp, Homo sapien
tgtgaaaagatccatgtaccctact

SEQ ID NO: 3721013 - DNA, 25 bp, Homo sapien
cagattctcgctcagactaggtata

SEQ ID NO: 3721014 - DNA, 25 bp, Homo sapien
ttccctgctcctaggggcgctgggt

SEQ ID NO: 3721015 - DNA, 25 bp, Homo sapien
tccttgatgagttcaggccccaggt

SEQ ID NO: 3721016 - DNA, 25 bp, Homo sapien
ttccttgatgagttcaggccccagg

SEQ ID NO: 3721017 - DNA, 25 bp, Homo sapien
gtctcctacttcaagctgccactgg

SEQ ID NO: 3721018 - DNA, 25 bp, Homo sapien
gcagaaggcaaatccaactcgagga

SEQ ID NO: 3721019 - DNA, 25 bp, Homo sapien
gaaggcaaatccaactcgaggactg

SEQ ID NO: 3721020 - DNA, 25 bp, Homo sapien
ggcaaatccaactcgaggactgttc

SEQ ID NO: 3721021 - DNA, 25 bp, Homo sapien
cagaaggcaaatccaactcgaggac

SEQ ID NO: 3721022 - DNA, 25 bp, Homo sapien
tgacaatgatgcagcgctccttctg

SEQ ID NO: 3721023 - DNA, 25 bp, Homo sapien
tcttgttggttgttctgacaatgat

SEQ ID NO: 3721024 - DNA, 25 bp, Homo sapien
ggaggtttcgaatccgccactggaa

SEQ ID NO: 3721025 - DNA, 25 bp, Homo sapien
cactatagacatccttaggataggg

SEQ ID NO: 3721026 - DNA, 25 bp, Homo sapien
ctaaattccactttaggcagtgact

SEQ ID NO: 3721027 - DNA, 25 bp, Homo sapien
gagtttgttctcctacaggcaattt

SEQ ID NO: 3721028 - DNA, 25 bp, Homo sapien
tccaccaaggaatgcttgctgaagc

SEQ ID NO: 3721029 - DNA, 25 bp, Homo sapien
cttccaccaaggaatgcttgctgaa

SEQ ID NO: 3721030 - DNA, 25 bp, Homo sapien
ttctgtctgatatctgtattcgaca

SEQ ID NO: 3721031 - DNA, 25 bp, Homo sapien
ctgatatctgtattcgacagtgacc

SEQ ID NO: 3721032 - DNA, 25 bp, Homo sapien
tctgatatctgtattcgacagtgac

SEQ ID NO: 3721033 - DNA, 25 bp, Homo sapien
tgtctgatatctgtattcgacagtg

SEQ ID NO: 3721034 - DNA, 25 bp, Homo sapien
ggctgtaacccctgatgagaaataa

SEQ ID NO: 3721035 - DNA, 25 bp, Homo sapien
tctggctaagggttcagcggcctct

SEQ ID NO: 3721036 - DNA, 25 bp, Homo sapien
tctaggttacctcccaacagagaga

SEQ ID NO: 3721037 - DNA, 25 bp, Homo sapien
aaatgccactaggttcgggaacgat

SEQ ID NO: 3721038 - DNA, 25 bp, Homo sapien
ctcagagggggtgccatgcacacct

SEQ ID NO: 3721039 - DNA, 25 bp, Homo sapien
ccagagaagcctccaaccagtccgc

SEQ ID NO: 3721040 - DNA, 25 bp, Homo sapien
cacaccgcatggccagaggggtcca

SEQ ID NO: 3721041 - DNA, 25 bp, Homo sapien
gagggggtgccatgcacacctgcac

SEQ ID NO: 3721042 - DNA, 25 bp, Homo sapien
tcttctccctgtttgacagacgact

SEQ ID NO: 3721043 - DNA, 25 bp, Homo sapien
cctgtttgacagacgactcctccat

SEQ ID NO: 3721044 - DNA, 25 bp, Homo sapien
gtcttctccctgtttgacagacgac

SEQ ID NO: 3721045 - DNA, 25 bp, Homo sapien
tctccctgtttgacagacgactcct

SEQ ID NO: 3721046 - DNA, 25 bp, Homo sapien
tgtacttgactttctcaccagcacc

SEQ ID NO: 3721047 - DNA, 25 bp, Homo sapien
tagaagctcccgataggctcaaggg

SEQ ID NO: 3721048 - DNA, 25 bp, Homo sapien
catttattgggcatcaactgtgtcc

SEQ ID NO: 3721049 - DNA, 25 bp, Homo sapien
ggtcataacgttcagcctcaggcag

SEQ ID NO: 3721050 - DNA, 25 bp, Homo sapien
aagacttgttaggaagtgttaacat

SEQ ID NO: 3721051 - DNA, 25 bp, Homo sapien
gacttgttaggaagtgttaacatct

SEQ ID NO: 3721052 - DNA, 25 bp, Homo sapien
cttgttaggaagtgttaacatcttc

SEQ ID NO: 3721053 - DNA, 25 bp, Homo sapien
ttgttaggaagtgttaacatcttcc

SEQ ID NO: 3721054 - DNA, 25 bp, Homo sapien
ttactcatcacggaagctggacctc

SEQ ID NO: 3721055 - DNA, 25 bp, Homo sapien
gcctttcaaggccttgttagcctgg

SEQ ID NO: 3721056 - DNA, 25 bp, Homo sapien
gaaatctctttgagaggacgaacca

SEQ ID NO: 3721057 - DNA, 25 bp, Homo sapien
ccttgtaggccagagggaaaagtat

SEQ ID NO: 3721058 - DNA, 25 bp, Homo sapien
aggaatggagaacttcttgtagtac

SEQ ID NO: 3721059 - DNA, 25 bp, Homo sapien
gatcaggaatggagaacttcttgta

SEQ ID NO: 3721060 - DNA, 25 bp, Homo sapien
ctagatcaggaatggagaacttctt

SEQ ID NO: 3721061 - DNA, 25 bp, Homo sapien
tcaggaatggagaacttcttgtagt

SEQ ID NO: 3721062 - DNA, 25 bp, Homo sapien
tgcagttggcgtgggcaaagctcag

SEQ ID NO: 3721063 - DNA, 25 bp, Homo sapien
caaagctcagcaaggcgtcatccag

SEQ ID NO: 3721064 - DNA, 25 bp, Homo sapien
gcaaggcgtcatccagaggtagctg

SEQ ID NO: 3721065 - DNA, 25 bp, Homo sapien
tcatccagaggtagctggtgtctat

SEQ ID NO: 3721066 - DNA, 25 bp, Homo sapien
ctgatgcagtgtccaagaagtctgg

SEQ ID NO: 3721067 - DNA, 25 bp, Homo sapien
actgaggactcttatgggatgggaa

SEQ ID NO: 3721068 - DNA, 25 bp, Homo sapien
gactctccctgatgcagtgtccaag

SEQ ID NO: 3721069 - DNA, 25 bp, Homo sapien
gcttggggctagaactgaggactct

SEQ ID NO: 3721070 - DNA, 25 bp, Homo sapien
gctgtgaattatatggtcaggctcc

SEQ ID NO: 3721071 - DNA, 25 bp, Homo sapien
tatttgcacgagaaaattgaggcct

SEQ ID NO: 3721072 - DNA, 25 bp, Homo sapien
gctcaaggtcatgtgcctgagtagg

SEQ ID NO: 3721073 - DNA, 25 bp, Homo sapien
cctgagtaggagcagaccttggacc

SEQ ID NO: 3721074 - DNA, 25 bp, Homo sapien
ttctgtagctcagactcggccacca

SEQ ID NO: 3721075 - DNA, 25 bp, Homo sapien
gccaccacaacctcctttggcttct

SEQ ID NO: 3721076 - DNA, 25 bp, Homo sapien
ctactgggtcttgcagtccccatcg

SEQ ID NO: 3721077 - DNA, 25 bp, Homo sapien
gggtcttgcagtccccatcgttgct

SEQ ID NO: 3721078 - DNA, 25 bp, Homo sapien
agctttatgttgtaggtctccggga

SEQ ID NO: 3721079 - DNA, 25 bp, Homo sapien
gagacccttgatagctcctagaaga

SEQ ID NO: 3721080 - DNA, 25 bp, Homo sapien
cagtccctgtgcagtaagtaactca

SEQ ID NO: 3721081 - DNA, 25 bp, Homo sapien
gactcactggctaggagtgccccat

SEQ ID NO: 3721082 - DNA, 25 bp, Homo sapien
acttctgcaagctacggtagcacag

SEQ ID NO: 3721083 - DNA, 25 bp, Homo sapien
gccacttctgcaagctacggtagca

SEQ ID NO: 3721084 - DNA, 25 bp, Homo sapien
cacttctgcaagctacggtagcaca

SEQ ID NO: 3721085 - DNA, 25 bp, Homo sapien
ttctgcaagctacggtagcacaggg

SEQ ID NO: 3721086 - DNA, 25 bp, Homo sapien
tggaagctcagttgttgcctgtggt

SEQ ID NO: 3721087 - DNA, 25 bp, Homo sapien
gattctggctttttacccacaatgc

SEQ ID NO: 3721088 - DNA, 25 bp, Homo sapien
cacccttggcaaaattatgaccctg

SEQ ID NO: 3721089 - DNA, 25 bp, Homo sapien
tgtggaaagggtacaggctgctgga

SEQ ID NO: 3721090 - DNA, 25 bp, Homo sapien
tcatggctctgtgtcccaaagaaca

SEQ ID NO: 3721091 - DNA, 25 bp, Homo sapien
tgaaacgacaagaccagcctcatgg

SEQ ID NO: 3721092 - DNA, 25 bp, Homo sapien
aagggaacagcagacccaagctcag

SEQ ID NO: 3721093 - DNA, 25 bp, Homo sapien
ggctgagtagtcctagcaggctcca

SEQ ID NO: 3721094 - DNA, 25 bp, Homo sapien
agttgctgtagctttgtcttctcca

SEQ ID NO: 3721095 - DNA, 25 bp, Homo sapien
gcttcctcagttgctgtagctttgt

SEQ ID NO: 3721096 - DNA, 25 bp, Homo sapien
cctcagttgctgtagctttgtcttc

SEQ ID NO: 3721097 - DNA, 25 bp, Homo sapien
tgctgtagctttgtcttctccattt

SEQ ID NO: 3721098 - DNA, 25 bp, Homo sapien
tcattcttgcataagagccatgcca

SEQ ID NO: 3721099 - DNA, 25 bp, Homo sapien
cattcttgcataagagccatgccag

SEQ ID NO: 3721100 - DNA, 25 bp, Homo sapien
catgtcattcttgcataagagccat

SEQ ID NO: 3721101 - DNA, 25 bp, Homo sapien
tcttgcataagagccatgccagtct

SEQ ID NO: 3721102 - DNA, 25 bp, Homo sapien
ctcttgcctctgtctgttcagcaca

SEQ ID NO: 3721103 - DNA, 25 bp, Homo sapien
tgatgtccttgtccctggaataccc

SEQ ID NO: 3721104 - DNA, 25 bp, Homo sapien
ctctgtctgttcagcacagatttga

SEQ ID NO: 3721105 - DNA, 25 bp, Homo sapien
atttgatgtccttgtccctggaata

SEQ ID NO: 3721106 - DNA, 25 bp, Homo sapien
ctgcatgatgccaggtttgcctgag

SEQ ID NO: 3721107 - DNA, 25 bp, Homo sapien
ctagggccaggggacgagtaaggca

SEQ ID NO: 3721108 - DNA, 25 bp, Homo sapien
tgcatgatgccaggtttgcctgagc

SEQ ID NO: 3721109 - DNA, 25 bp, Homo sapien
ggacgagtaaggcaggttgaagatc

SEQ ID NO: 3721110 - DNA, 25 bp, Homo sapien
attgagttgggctgaaaattaccat

SEQ ID NO: 3721111 - DNA, 25 bp, Homo sapien
ctgaaaagccctcagctaattgagt

SEQ ID NO: 3721112 - DNA, 25 bp, Homo sapien
cctcagctaattgagttgggctgaa

SEQ ID NO: 3721113 - DNA, 25 bp, Homo sapien
gggcccaattcagagtcctcttttg

SEQ ID NO: 3721114 - DNA, 25 bp, Homo sapien
ctgctgttggcatccttcagactgt

SEQ ID NO: 3721115 - DNA, 25 bp, Homo sapien
ctgtcttgggaattggcgccagtca

SEQ ID NO: 3721116 - DNA, 25 bp, Homo sapien
gctgttggcatccttcagactgtct

SEQ ID NO: 3721117 - DNA, 25 bp, Homo sapien
gtcttgggaattggcgccagtcaca

SEQ ID NO: 3721118 - DNA, 25 bp, Homo sapien
aggctggccgctgagatgaggtggc

SEQ ID NO: 3721119 - DNA, 25 bp, Homo sapien
tatggatcggaaggcagagatgcag

SEQ ID NO: 3721120 - DNA, 25 bp, Homo sapien
ggctggccgctgagatgaggtggcc

SEQ ID NO: 3721121 - DNA, 25 bp, Homo sapien
tcactttccatatggatcggaaggc

SEQ ID NO: 3721122 - DNA, 25 bp, Homo sapien
tgtaggcgagtaattagtcccctct

SEQ ID NO: 3721123 - DNA, 25 bp, Homo sapien
ccttcccaccgctcacagagctggg

SEQ ID NO: 3721124 - DNA, 25 bp, Homo sapien
gcacaatgaagccagggtgtttggc

SEQ ID NO: 3721125 - DNA, 25 bp, Homo sapien
gttttctctctgggcgctccagagt

SEQ ID NO: 3721126 - DNA, 25 bp, Homo sapien
gagacaatgggccagccgattttcc

SEQ ID NO: 3721127 - DNA, 25 bp, Homo sapien
cttgattggggtctcataaaggccc

SEQ ID NO: 3721128 - DNA, 25 bp, Homo sapien
aataactagaggtgattggcaggcg

SEQ ID NO: 3721129 - DNA, 25 bp, Homo sapien
aaggtctggtgtctctactaggtac

SEQ ID NO: 3721130 - DNA, 25 bp, Homo sapien
gggtagtaattccacagggcttgtc

SEQ ID NO: 3721131 - DNA, 25 bp, Homo sapien
gtccagttgcatagtgtgaagcatg

SEQ ID NO: 3721132 - DNA, 25 bp, Homo sapien
tagtccccagaagtagcagtcaggg

SEQ ID NO: 3721133 - DNA, 25 bp, Homo sapien
ctgtgggtcagttcagtcagctcca

SEQ ID NO: 3721134 - DNA, 25 bp, Homo sapien
tgtgggtatatgaatgaacgtggaa

SEQ ID NO: 3721135 - DNA, 25 bp, Homo sapien
tgcgatctgctctggcgccggatag

SEQ ID NO: 3721136 - DNA, 25 bp, Homo sapien
acgcggctcggcaccgacctgtaag

SEQ ID NO: 3721137 - DNA, 25 bp, Homo sapien
tggctgcggcgcttcaccagctgcg

SEQ ID NO: 3721138 - DNA, 25 bp, Homo sapien
ggctcggcaccgacctgtaagcgtc

SEQ ID NO: 3721139 - DNA, 25 bp, Homo sapien
cgccccatgtgacccggtccgacat

SEQ ID NO: 3721140 - DNA, 25 bp, Homo sapien
cccgcgccgccccatgtgacccggt

SEQ ID NO: 3721141 - DNA, 25 bp, Homo sapien
atgtgacccggtccgacatggtgtc

SEQ ID NO: 3721142 - DNA, 25 bp, Homo sapien
ggctgcaggtgtgaggggcgtgccc

SEQ ID NO: 3721143 - DNA, 25 bp, Homo sapien
tgataagaagccctagctgtgccat

SEQ ID NO: 3721144 - DNA, 25 bp, Homo sapien
cagccacatgtgacgagggaggaca

SEQ ID NO: 3721145 - DNA, 25 bp, Homo sapien
agggaggacactgttggacagcaca

SEQ ID NO: 3721146 - DNA, 25 bp, Homo sapien
gatctagaagactgcaaatccccaa

SEQ ID NO: 3721147 - DNA, 25 bp, Homo sapien
aatgctattcaggtccttcatgaag

SEQ ID NO: 3721148 - DNA, 25 bp, Homo sapien
tgcttctctgagctaaggctaaagg

SEQ ID NO: 3721149 - DNA, 25 bp, Homo sapien
ttattacaaactcatcttttcagcc

SEQ ID NO: 3721150 - DNA, 25 bp, Homo sapien
agtttggttacatcccaaattggat

SEQ ID NO: 3721151 - DNA, 25 bp, Homo sapien
gagagctggtgttgacttgaagcaa

SEQ ID NO: 3721152 - DNA, 25 bp, Homo sapien
cttttactgggaaactcttctagcg

SEQ ID NO: 3721153 - DNA, 25 bp, Homo sapien
ttctagcggaaagcctgtcatctgt

SEQ ID NO: 3721154 - DNA, 25 bp, Homo sapien
tcatctgttgtgaaggagagctggt

SEQ ID NO: 3721155 - DNA, 25 bp, Homo sapien
tatcagcttctattgcagatgtgaa

SEQ ID NO: 3721156 - DNA, 25 bp, Homo sapien
tcagcttctattgcagatgtgaagt

SEQ ID NO: 3721157 - DNA, 25 bp, Homo sapien
tttatcagcttctattgcagatgtg

SEQ ID NO: 3721158 - DNA, 25 bp, Homo sapien
tcatttatcagcttctattgcagat

SEQ ID NO: 3721159 - DNA, 25 bp, Homo sapien
ccctggcaatactcagaactgcttc

SEQ ID NO: 3721160 - DNA, 25 bp, Homo sapien
tttagcaccaattcttgcatccctg

SEQ ID NO: 3721161 - DNA, 25 bp, Homo sapien
tgcatccctggcaatactcagaact

SEQ ID NO: 3721162 - DNA, 25 bp, Homo sapien
tggcaatactcagaactgcttccat

SEQ ID NO: 3721163 - DNA, 25 bp, Homo sapien
cacagctatcttatgtctagtgacc

SEQ ID NO: 3721164 - DNA, 25 bp, Homo sapien
taaaaaatgattgttctcgacaagt

SEQ ID NO: 3721165 - DNA, 25 bp, Homo sapien
ggaacaatgtcaaatttcacagcta

SEQ ID NO: 3721166 - DNA, 25 bp, Homo sapien
tgtctagtgaccttacgggacccca

SEQ ID NO: 3721167 - DNA, 25 bp, Homo sapien
cccaagaactggcatattgtttttg

SEQ ID NO: 3721168 - DNA, 25 bp, Homo sapien
ccccaagaactggcatattgttttt

SEQ ID NO: 3721169 - DNA, 25 bp, Homo sapien
caagaactggcatattgtttttgtt

SEQ ID NO: 3721170 - DNA, 25 bp, Homo sapien
agaactggcatattgtttttgttcc

SEQ ID NO: 3721171 - DNA, 25 bp, Homo sapien
catgccagagccacggcttggagga

SEQ ID NO: 3721172 - DNA, 25 bp, Homo sapien
tgtacagctgtactccaagatgccc

SEQ ID NO: 3721173 - DNA, 25 bp, Homo sapien
ggagtctagttcatggtgaccacag

SEQ ID NO: 3721174 - DNA, 25 bp, Homo sapien
ctgtggtgagagttgtgccctttgc

SEQ ID NO: 3721175 - DNA, 25 bp, Homo sapien
aatgtcagaccgaagttcaggaacc

SEQ ID NO: 3721176 - DNA, 25 bp, Homo sapien
ttggaaatgtcagaccgaagttcag

SEQ ID NO: 3721177 - DNA, 25 bp, Homo sapien
gacacttgctgtaggctggaggtac

SEQ ID NO: 3721178 - DNA, 25 bp, Homo sapien
gacaatggccgggaaacaggccaca

SEQ ID NO: 3721179 - DNA, 25 bp, Homo sapien
tgtacgtctgtacatatgttgatct

SEQ ID NO: 3721180 - DNA, 25 bp, Homo sapien
gctgctcaggccacgttggcagaca

SEQ ID NO: 3721181 - DNA, 25 bp, Homo sapien
tcaggccacgttggcagacagctgt

SEQ ID NO: 3721182 - DNA, 25 bp, Homo sapien
ctaatatactgtacgtctgtacata

SEQ ID NO: 3721183 - DNA, 25 bp, Homo sapien
taacgttaacctgccgcacgcagat

SEQ ID NO: 3721184 - DNA, 25 bp, Homo sapien
aatggcaggcttaacgttaacctgc

SEQ ID NO: 3721185 - DNA, 25 bp, Homo sapien
ttaacatatggacaaaggcacactg

SEQ ID NO: 3721186 - DNA, 25 bp, Homo sapien
cttgctggaattctcatccgaatta

SEQ ID NO: 3721187 - DNA, 25 bp, Homo sapien
ctgttacaatcacgttgtgtttgct

SEQ ID NO: 3721188 - DNA, 25 bp, Homo sapien
tcatgctactgggaggtatctgctt

SEQ ID NO: 3721189 - DNA, 25 bp, Homo sapien
tgcatcttcatgctactgggaggta

SEQ ID NO: 3721190 - DNA, 25 bp, Homo sapien
tgtttgctacaggcaactgcagctt

SEQ ID NO: 3721191 - DNA, 25 bp, Homo sapien
ttccatgcaccaagggccatgggga

SEQ ID NO: 3721192 - DNA, 25 bp, Homo sapien
tccatgcaccaagggccatggggac

SEQ ID NO: 3721193 - DNA, 25 bp, Homo sapien
ctttccatgcaccaagggccatggg

SEQ ID NO: 3721194 - DNA, 25 bp, Homo sapien
tttccatgcaccaagggccatgggg

SEQ ID NO: 3721195 - DNA, 25 bp, Homo sapien
caagctgagaagtttctcagagaat

SEQ ID NO: 3721196 - DNA, 25 bp, Homo sapien
tctcagagaatccaaacgggatccc

SEQ ID NO: 3721197 - DNA, 25 bp, Homo sapien
agagaatccaaacgggatcccctgc

SEQ ID NO: 3721198 - DNA, 25 bp, Homo sapien
agctgagaagtttctcagagaatcc

SEQ ID NO: 3721199 - DNA, 25 bp, Homo sapien
gagcgttttccacaggtcccagaac

SEQ ID NO: 3721200 - DNA, 25 bp, Homo sapien
ccctgagcgccttctgattgactgt

SEQ ID NO: 3721201 - DNA, 25 bp, Homo sapien
tggttcctcagtgaccaaggtcgcc

SEQ ID NO: 3721202 - DNA, 25 bp, Homo sapien
gaggagatttcctagtcccgctgct

SEQ ID NO: 3721203 - DNA, 25 bp, Homo sapien
gggggaaaaacatcagagtcaagga

SEQ ID NO: 3721204 - DNA, 25 bp, Homo sapien
cacgggtttgcctttcacagagatc

SEQ ID NO: 3721205 - DNA, 25 bp, Homo sapien
tcaaatagctcctttgtccggctga

SEQ ID NO: 3721206 - DNA, 25 bp, Homo sapien
taccccctgatcaaatagctccttt

SEQ ID NO: 3721207 - DNA, 25 bp, Homo sapien
tttgtccggctgatataaaaacatg

SEQ ID NO: 3721208 - DNA, 25 bp, Homo sapien
ctttgtccggctgatataaaaacat

SEQ ID NO: 3721209 - DNA, 25 bp, Homo sapien
tggtgttactccatgaatagaggcc

SEQ ID NO: 3721210 - DNA, 25 bp, Homo sapien
tggcttcgggcagctatcggtgaca

SEQ ID NO: 3721211 - DNA, 25 bp, Homo sapien
gcagctatcggtgacactgctagga

SEQ ID NO: 3721212 - DNA, 25 bp, Homo sapien
gataacagctgtggggttggaaact

SEQ ID NO: 3721213 - DNA, 25 bp, Homo sapien
gagtgagaggccacttaagagcagc

SEQ ID NO: 3721214 - DNA, 25 bp, Homo sapien
ccgtataagcctttgtaagtgggca

SEQ ID NO: 3721215 - DNA, 25 bp, Homo sapien
caatgcacttaggaagaaaagggcc

SEQ ID NO: 3721216 - DNA, 25 bp, Homo sapien
ggatgggaatctgagcctccaggaa

SEQ ID NO: 3721217 - DNA, 25 bp, Homo sapien
tcatggggccgccagcagcaatggg

SEQ ID NO: 3721218 - DNA, 25 bp, Homo sapien
aatgggctgctggagcagtcagtca

SEQ ID NO: 3721219 - DNA, 25 bp, Homo sapien
agtcatggggccgccagcagcaatg

SEQ ID NO: 3721220 - DNA, 25 bp, Homo sapien
tccaatgggctgctggagcagtcag

SEQ ID NO: 3721221 - DNA, 25 bp, Homo sapien
ggaccgtccaggaaacgctttcatc

SEQ ID NO: 3721222 - DNA, 25 bp, Homo sapien
cctagcccagtaattacccacattt

SEQ ID NO: 3721223 - DNA, 25 bp, Homo sapien
attacccacatttcatttgtttgag

SEQ ID NO: 3721224 - DNA, 25 bp, Homo sapien
ttcatctgcacggtctcctgtccag

SEQ ID NO: 3721225 - DNA, 25 bp, Homo sapien
ttcaatttgatagtcccaagacctc

SEQ ID NO: 3721226 - DNA, 25 bp, Homo sapien
tcctcaatctaagagacatcactgt

SEQ ID NO: 3721227 - DNA, 25 bp, Homo sapien
tgaaaaccataatcccgtccactgc

SEQ ID NO: 3721228 - DNA, 25 bp, Homo sapien
cctctcttgagaacccagtttgaaa

SEQ ID NO: 3721229 - DNA, 25 bp, Homo sapien
ccttgcatttctcgccggttttccg

SEQ ID NO: 3721230 - DNA, 25 bp, Homo sapien
cgagcacgctcctgcccgcagtggg

SEQ ID NO: 3721231 - DNA, 25 bp, Homo sapien
gcgatgccactgatcgctccttgca

SEQ ID NO: 3721232 - DNA, 25 bp, Homo sapien
gatcgctccttgcatttctcgccgg

SEQ ID NO: 3721233 - DNA, 25 bp, Homo sapien
tggaatcaggtagttctggcacttg

SEQ ID NO: 3721234 - DNA, 25 bp, Homo sapien
ggaatcaggtagttctggcacttgg

SEQ ID NO: 3721235 - DNA, 25 bp, Homo sapien
gcagataagcgagcttaggcagcct

SEQ ID NO: 3721236 - DNA, 25 bp, Homo sapien
ggcttcgctcctcctttgagccttg

SEQ ID NO: 3721237 - DNA, 25 bp, Homo sapien
tgaggaatgcgcgtccctagcccca

SEQ ID NO: 3721238 - DNA, 25 bp, Homo sapien
tccctagccccacgagggtctctgg

SEQ ID NO: 3721239 - DNA, 25 bp, Homo sapien
tcagcatccaaacaaggggtctggg

SEQ ID NO: 3721240 - DNA, 25 bp, Homo sapien
atcagcatccaaacaaggggtctgg

SEQ ID NO: 3721241 - DNA, 25 bp, Homo sapien
cagcatccaaacaaggggtctgggc

SEQ ID NO: 3721242 - DNA, 25 bp, Homo sapien
tgatgtttccctagggaccgccagg

SEQ ID NO: 3721243 - DNA, 25 bp, Homo sapien
ctgggccccagttgccttgctggaa

SEQ ID NO: 3721244 - DNA, 25 bp, Homo sapien
gtggcactgtggaagcacccagcgt

SEQ ID NO: 3721245 - DNA, 25 bp, Homo sapien
ggagaactgtgggatcctctaccct

SEQ ID NO: 3721246 - DNA, 25 bp, Homo sapien
taaccttccgcctgaagtcgggctc

SEQ ID NO: 3721247 - DNA, 25 bp, Homo sapien
tgtaaccttccgcctgaagtcgggc

SEQ ID NO: 3721248 - DNA, 25 bp, Homo sapien
ctgtaaccttccgcctgaagtcggg

SEQ ID NO: 3721249 - DNA, 25 bp, Homo sapien
aaccttccgcctgaagtcgggctct

SEQ ID NO: 3721250 - DNA, 25 bp, Homo sapien
atgatgcggagcacgtgctggcact

SEQ ID NO: 3721251 - DNA, 25 bp, Homo sapien
gaagaggatgatgcggagcacgtgc

SEQ ID NO: 3721252 - DNA, 25 bp, Homo sapien
gatgcggagcacgtgctggcactaa

SEQ ID NO: 3721253 - DNA, 25 bp, Homo sapien
cggagcacgtgctggcactaaccat

SEQ ID NO: 3721254 - DNA, 25 bp, Homo sapien
gtcccggccccggtcactatggaca

SEQ ID NO: 3721255 - DNA, 25 bp, Homo sapien
cggccccggtcactatggacagttt

SEQ ID NO: 3721256 - DNA, 25 bp, Homo sapien
cccggccccggtcactatggacagt

SEQ ID NO: 3721257 - DNA, 25 bp, Homo sapien
tcaggagagccgaacgcgggccggg

SEQ ID NO: 3721258 - DNA, 25 bp, Homo sapien
ggtagggctgcggggtctcggcgcc

SEQ ID NO: 3721259 - DNA, 25 bp, Homo sapien
gctgcggggtctcggcgccttttct

SEQ ID NO: 3721260 - DNA, 25 bp, Homo sapien
ctccgggtagggctgcggggtctcg

SEQ ID NO: 3721261 - DNA, 25 bp, Homo sapien
tagggctgcggggtctcggcgcctt

SEQ ID NO: 3721262 - DNA, 25 bp, Homo sapien
tacctagtggtacctagtgacttcc

SEQ ID NO: 3721263 - DNA, 25 bp, Homo sapien
tcatcactctaggatcatgaagtgc

SEQ ID NO: 3721264 - DNA, 25 bp, Homo sapien
gtgacttccaaccaaagcctttgag

SEQ ID NO: 3721265 - DNA, 25 bp, Homo sapien
tgagagagccctaaagcattgtacc

SEQ ID NO: 3721266 - DNA, 25 bp, Homo sapien
taaagtgcctcccacctaggcgtag

SEQ ID NO: 3721267 - DNA, 25 bp, Homo sapien
cctcaatattaggtcagcatgtgaa

SEQ ID NO: 3721268 - DNA, 25 bp, Homo sapien
taggcgtaggccatgaccatttggg

SEQ ID NO: 3721269 - DNA, 25 bp, Homo sapien
acatgtcaggtagggttcagggact

SEQ ID NO: 3721270 - DNA, 25 bp, Homo sapien
taaagccgtggccaattgtctcctg

SEQ ID NO: 3721271 - DNA, 25 bp, Homo sapien
tgagactactcactggttggaagaa

SEQ ID NO: 3721272 - DNA, 25 bp, Homo sapien
catgggcttatacagggagagagtc

SEQ ID NO: 3721273 - DNA, 25 bp, Homo sapien
ggtgctgagaccttttacatgggct

SEQ ID NO: 3721274 - DNA, 25 bp, Homo sapien
ctctggcccaagcttttaaaagtga

SEQ ID NO: 3721275 - DNA, 25 bp, Homo sapien
tgcacgcgagggagaatgcctgccc

SEQ ID NO: 3721276 - DNA, 25 bp, Homo sapien
gaccagccctgacgatataaatagg

SEQ ID NO: 3721277 - DNA, 25 bp, Homo sapien
ccttctctgataaagatggacattc

SEQ ID NO: 3721278 - DNA, 25 bp, Homo sapien
tgtcagactggtattattagccaag

SEQ ID NO: 3721279 - DNA, 25 bp, Homo sapien
taactggtgaccttaaatagagact

SEQ ID NO: 3721280 - DNA, 25 bp, Homo sapien
aataacatcaattggctctccttag

SEQ ID NO: 3721281 - DNA, 25 bp, Homo sapien
agattattataatggctggtcagag

SEQ ID NO: 3721282 - DNA, 25 bp, Homo sapien
gctcacgacagggagagtattttct

SEQ ID NO: 3721283 - DNA, 25 bp, Homo sapien
tccacatagctttacaaaagctcac

SEQ ID NO: 3721284 - DNA, 25 bp, Homo sapien
tacaaaagctcacgacagggagagt

SEQ ID NO: 3721285 - DNA, 25 bp, Homo sapien
tcttggttctgtagtaatttcaggg

SEQ ID NO: 3721286 - DNA, 25 bp, Homo sapien
ggacttatatacagcacacagcagg

SEQ ID NO: 3721287 - DNA, 25 bp, Homo sapien
gactttaacttgctctgactgaatg

SEQ ID NO: 3721288 - DNA, 25 bp, Homo sapien
aattgctgaaatgacctaaagggcc

SEQ ID NO: 3721289 - DNA, 25 bp, Homo sapien
cagccctgtgcgcatgcgagcttta

SEQ ID NO: 3721290 - DNA, 25 bp, Homo sapien
ctcctaggtttctcagtttgggtgc

SEQ ID NO: 3721291 - DNA, 25 bp, Homo sapien
ttgggtgcagatcatttgctttgct

SEQ ID NO: 3721292 - DNA, 25 bp, Homo sapien
ttcttttgctcatgcccaagtctcc

SEQ ID NO: 3721293 - DNA, 25 bp, Homo sapien
tcttttgctcatgcccaagtctcca

SEQ ID NO: 3721294 - DNA, 25 bp, Homo sapien
ctaacctcatggtttgcccgcctcg

SEQ ID NO: 3721295 - DNA, 25 bp, Homo sapien
ttaatgtaaaagctgcagacttcct

SEQ ID NO: 3721296 - DNA, 25 bp, Homo sapien
cagacttcctttggtccaatgtagg

SEQ ID NO: 3721297 - DNA, 25 bp, Homo sapien
tggtccaatgtagggggcttccatt

SEQ ID NO: 3721298 - DNA, 25 bp, Homo sapien
ggcctgttgttaagttggacatgac

SEQ ID NO: 3721299 - DNA, 25 bp, Homo sapien
aaagcagcggctgcattttatgcct

SEQ ID NO: 3721300 - DNA, 25 bp, Homo sapien
tatgcctttcaaatgctgcaggaaa

SEQ ID NO: 3721301 - DNA, 25 bp, Homo sapien
gactctcatctctgctgcacgagaa

SEQ ID NO: 3721302 - DNA, 25 bp, Homo sapien
catattataaagtagttatgtgtag

SEQ ID NO: 3721303 - DNA, 25 bp, Homo sapien
taccctgattcttaagaaagcattt

SEQ ID NO: 3721304 - DNA, 25 bp, Homo sapien
attgggcctggcctaccctgattct

SEQ ID NO: 3721305 - DNA, 25 bp, Homo sapien
tggcctaccctgattcttaagaaag

SEQ ID NO: 3721306 - DNA, 25 bp, Homo sapien
acagcgtttgtcactttgttaccca

SEQ ID NO: 3721307 - DNA, 25 bp, Homo sapien
ttcccatagatagaaacaggtcaag

SEQ ID NO: 3721308 - DNA, 25 bp, Homo sapien
gcttaccccatctccatctagtgtt

SEQ ID NO: 3721309 - DNA, 25 bp, Homo sapien
gatatttggttacagagcccagcca

SEQ ID NO: 3721310 - DNA, 25 bp, Homo sapien
gtcagattctttcctaatcctatct

SEQ ID NO: 3721311 - DNA, 25 bp, Homo sapien
agtaactggaattccagtcctggcc

SEQ ID NO: 3721312 - DNA, 25 bp, Homo sapien
tgctttacctgtttatctcccctca

SEQ ID NO: 3721313 - DNA, 25 bp, Homo sapien
gagcacgatcataaaattaagtcag

SEQ ID NO: 3721314 - DNA, 25 bp, Homo sapien
ttacattaacagcattgcttcctct

SEQ ID NO: 3721315 - DNA, 25 bp, Homo sapien
tcctctttgtggtgccagtcaaccg

SEQ ID NO: 3721316 - DNA, 25 bp, Homo sapien
cagtcaaccgaaaccatgaacctga

SEQ ID NO: 3721317 - DNA, 25 bp, Homo sapien
ggcaccagccgtaaaatgaatgagc

SEQ ID NO: 3721318 - DNA, 25 bp, Homo sapien
tcagtcaggctaacttcacatcctt

SEQ ID NO: 3721319 - DNA, 25 bp, Homo sapien
tccccaaaggaggagtgagtatcac

SEQ ID NO: 3721320 - DNA, 25 bp, Homo sapien
ctttggactctgttgttcgttccac

SEQ ID NO: 3721321 - DNA, 25 bp, Homo sapien
gctcagtcaggctaacttcacatcc

SEQ ID NO: 3721322 - DNA, 25 bp, Homo sapien
tcagaccagccattgagagccctgt

SEQ ID NO: 3721323 - DNA, 25 bp, Homo sapien
gcatagcatctgaacccagtgtggg

SEQ ID NO: 3721324 - DNA, 25 bp, Homo sapien
gagatgccccttagcacacctagag

SEQ ID NO: 3721325 - DNA, 25 bp, Homo sapien
tatagctccaagttccacaggtctg

SEQ ID NO: 3721326 - DNA, 25 bp, Homo sapien
cccaagggaacacgtggagagcttc

SEQ ID NO: 3721327 - DNA, 25 bp, Homo sapien
aagggaacacgtggagagcttcttc

SEQ ID NO: 3721328 - DNA, 25 bp, Homo sapien
ccaagggaacacgtggagagcttct

SEQ ID NO: 3721329 - DNA, 25 bp, Homo sapien
gccccaagggaacacgtggagagct

SEQ ID NO: 3721330 - DNA, 25 bp, Homo sapien
taattgggccttcaacctgtatgac

SEQ ID NO: 3721331 - DNA, 25 bp, Homo sapien
caggaatgtcccagcggaattgtca

SEQ ID NO: 3721332 - DNA, 25 bp, Homo sapien
tttgacaccaaccatgatggctcgg

SEQ ID NO: 3721333 - DNA, 25 bp, Homo sapien
gaacttcaagcagatttactcccag

SEQ ID NO: 3721334 - DNA, 25 bp, Homo sapien
tctgggactcctgatccaaccttta

SEQ ID NO: 3721335 - DNA, 25 bp, Homo sapien
aagcctatttgaggccagacgcggt

SEQ ID NO: 3721336 - DNA, 25 bp, Homo sapien
aatcgctagcgccaccgcactttag

SEQ ID NO: 3721337 - DNA, 25 bp, Homo sapien
ccaacctttagggattggcaagcaa

SEQ ID NO: 3721338 - DNA, 25 bp, Homo sapien
gattgttgagtatcccacggcactg

SEQ ID NO: 3721339 - DNA, 25 bp, Homo sapien
ttgacaccccgcacatattggagag

SEQ ID NO: 3721340 - DNA, 25 bp, Homo sapien
gcaagtttctcactgaacccgagga

SEQ ID NO: 3721341 - DNA, 25 bp, Homo sapien
gaggtcttcactggctgggttaaca

SEQ ID NO: 3721342 - DNA, 25 bp, Homo sapien
tctttcgcagaaattgactttagca

SEQ ID NO: 3721343 - DNA, 25 bp, Homo sapien
tcttcatatgcagtaacctctttcg

SEQ ID NO: 3721344 - DNA, 25 bp, Homo sapien
cagtaacctctttcgcagaaattga

SEQ ID NO: 3721345 - DNA, 25 bp, Homo sapien
tatgcagtaacctctttcgcagaaa

SEQ ID NO: 3721346 - DNA, 25 bp, Homo sapien
gctctcaggatgtagtcagaaggtt

SEQ ID NO: 3721347 - DNA, 25 bp, Homo sapien
ggatgtagtcagaaggttcagccat

SEQ ID NO: 3721348 - DNA, 25 bp, Homo sapien
caggatgtagtcagaaggttcagcc

SEQ ID NO: 3721349 - DNA, 25 bp, Homo sapien
tctcaggatgtagtcagaaggttca

SEQ ID NO: 3721350 - DNA, 25 bp, Homo sapien
gtaaaggcaagacttggctctgagg

SEQ ID NO: 3721351 - DNA, 25 bp, Homo sapien
ggtggtttatcttgattcctcagtt

SEQ ID NO: 3721352 - DNA, 25 bp, Homo sapien
gtttatcttgattcctcagtttgca

SEQ ID NO: 3721353 - DNA, 25 bp, Homo sapien
cagtttgcatgttagctccgtaaag

SEQ ID NO: 3721354 - DNA, 25 bp, Homo sapien
tccaagctaatggttggtccttcct

SEQ ID NO: 3721355 - DNA, 25 bp, Homo sapien
gctgtcagtgtcagtcacagatatg

SEQ ID NO: 3721356 - DNA, 25 bp, Homo sapien
caggtgattgccctgatggagtcta

SEQ ID NO: 3721357 - DNA, 25 bp, Homo sapien
cacttgtgtagaattttgcactcac

SEQ ID NO: 3721358 - DNA, 25 bp, Homo sapien
tgagcacatcagtcacccttgtaag

SEQ ID NO: 3721359 - DNA, 25 bp, Homo sapien
tgtaagccttccgaaattctggtct

SEQ ID NO: 3721360 - DNA, 25 bp, Homo sapien
gaccgcaaataatgcaacctgagca

SEQ ID NO: 3721361 - DNA, 25 bp, Homo sapien
tcagcttgtccctcgctagtggcct

SEQ ID NO: 3721362 - DNA, 25 bp, Homo sapien
gatacagttcatccacttaaagtgt

SEQ ID NO: 3721363 - DNA, 25 bp, Homo sapien
gccaaggaggccataatcatttata

SEQ ID NO: 3721364 - DNA, 25 bp, Homo sapien
tgaaagaaaccctatacccaatagc

SEQ ID NO: 3721365 - DNA, 25 bp, Homo sapien
ggtataatcatagggttgtacaacc

SEQ ID NO: 3721366 - DNA, 25 bp, Homo sapien
tactgcagggcttgaagtgcggcat

SEQ ID NO: 3721367 - DNA, 25 bp, Homo sapien
tgggtttagcctggtttctatagcc

SEQ ID NO: 3721368 - DNA, 25 bp, Homo sapien
ggagctgggtttagcctggtttcta

SEQ ID NO: 3721369 - DNA, 25 bp, Homo sapien
gatgaggatggttgacttgttactg

SEQ ID NO: 3721370 - DNA, 25 bp, Homo sapien
tctttttgacaagactctggtagtc

SEQ ID NO: 3721371 - DNA, 25 bp, Homo sapien
tggtagtctttgttagccttcttgc

SEQ ID NO: 3721372 - DNA, 25 bp, Homo sapien
ttacaggtacaagcctctgcgtcca

SEQ ID NO: 3721373 - DNA, 25 bp, Homo sapien
tctggcacaagatgtcgcaggatta

SEQ ID NO: 3721374 - DNA, 25 bp, Homo sapien
ttagggatgcttaacagctaagtgt

SEQ ID NO: 3721375 - DNA, 25 bp, Homo sapien
taagccttttagcaaccccaggaga

SEQ ID NO: 3721376 - DNA, 25 bp, Homo sapien
atcctaagtacttctatcccaaatg

SEQ ID NO: 3721377 - DNA, 25 bp, Homo sapien
tgcttaacagctaagtgtaatgcac

SEQ ID NO: 3721378 - DNA, 25 bp, Homo sapien
tattgtaaaatataccctatcaggg

SEQ ID NO: 3721379 - DNA, 25 bp, Homo sapien
gctctccttatgctctaacttaggg

SEQ ID NO: 3721380 - DNA, 25 bp, Homo sapien
gggtcttcagaactgattggtccaa

SEQ ID NO: 3721381 - DNA, 25 bp, Homo sapien
tatcctagatgtctcatgaagtttc

SEQ ID NO: 3721382 - DNA, 25 bp, Homo sapien
catgttggatacatctatcaacttg

SEQ ID NO: 3721383 - DNA, 25 bp, Homo sapien
caacttgactagacactcagattct

SEQ ID NO: 3721384 - DNA, 25 bp, Homo sapien
tctatcaacttgactagacactcag

SEQ ID NO: 3721385 - DNA, 25 bp, Homo sapien
tggatacatctatcaacttgactag

SEQ ID NO: 3721386 - DNA, 25 bp, Homo sapien
ttttcaggtataggctgaacaccca

SEQ ID NO: 3721387 - DNA, 25 bp, Homo sapien
tttcaggtataggctgaacacccat

SEQ ID NO: 3721388 - DNA, 25 bp, Homo sapien
tgggaatagtcctggttttgccatt

SEQ ID NO: 3721389 - DNA, 25 bp, Homo sapien
gagaaacggcttcgctcttccagcg

SEQ ID NO: 3721390 - DNA, 25 bp, Homo sapien
agagagaaacggcttcgctcttcca

SEQ ID NO: 3721391 - DNA, 25 bp, Homo sapien
gcatccctgcggggccttctggctt

SEQ ID NO: 3721392 - DNA, 25 bp, Homo sapien
cacacggtcccggtcacgtccctct

SEQ ID NO: 3721393 - DNA, 25 bp, Homo sapien
ccagcagggcgaggcccgattctcg

SEQ ID NO: 3721394 - DNA, 25 bp, Homo sapien
gggagcgcgcccaggctttgcccag

SEQ ID NO: 3721395 - DNA, 25 bp, Homo sapien
cggagcagggccaagacttccgtct

SEQ ID NO: 3721396 - DNA, 25 bp, Homo sapien
aggcccgattctcgggggagcggag

SEQ ID NO: 3721397 - DNA, 25 bp, Homo sapien
cagccgcagagtccccgagcgcttc

SEQ ID NO: 3721398 - DNA, 25 bp, Homo sapien
ctgccacggactcggaccgctgagt

SEQ ID NO: 3721399 - DNA, 25 bp, Homo sapien
ccgaaggcgctcaggtccgagagca

SEQ ID NO: 3721400 - DNA, 25 bp, Homo sapien
aagtggcggccgtccggactgccac

SEQ ID NO: 3721401 - DNA, 25 bp, Homo sapien
tgaaagcagacgaagattccctcgg

SEQ ID NO: 3721402 - DNA, 25 bp, Homo sapien
taccaccgtgggactgcaataggct

SEQ ID NO: 3721403 - DNA, 25 bp, Homo sapien
agatgagtagaacgtgggccacgcc

SEQ ID NO: 3721404 - DNA, 25 bp, Homo sapien
tcttactgtaggagagaccaagccg

SEQ ID NO: 3721405 - DNA, 25 bp, Homo sapien
cttggctgaaggcaactcaacaccc

SEQ ID NO: 3721406 - DNA, 25 bp, Homo sapien
gctgaaggcaactcaacaccctgtg

SEQ ID NO: 3721407 - DNA, 25 bp, Homo sapien
tggctgaaggcaactcaacaccctg

SEQ ID NO: 3721408 - DNA, 25 bp, Homo sapien
tgaaggcaactcaacaccctgtggg

SEQ ID NO: 3721409 - DNA, 25 bp, Homo sapien
gaagctcggtcctcaacatggtcag

SEQ ID NO: 3721410 - DNA, 25 bp, Homo sapien
gctgttctaagcctcggtaatcccg

SEQ ID NO: 3721411 - DNA, 25 bp, Homo sapien
gcttggagcacagctttaggccgcc

SEQ ID NO: 3721412 - DNA, 25 bp, Homo sapien
cattcccatctagctggagctgcag

SEQ ID NO: 3721413 - DNA, 25 bp, Homo sapien
cataggtcccgaggtggagtcgggg

SEQ ID NO: 3721414 - DNA, 25 bp, Homo sapien
gacagaacagtattgcatacacagg

SEQ ID NO: 3721415 - DNA, 25 bp, Homo sapien
aatgcctggcttctattaaatgctc

SEQ ID NO: 3721416 - DNA, 25 bp, Homo sapien
ggaactgtccaagcaagcctccagt

SEQ ID NO: 3721417 - DNA, 25 bp, Homo sapien
gactttagccaaaagatccagatcc

SEQ ID NO: 3721418 - DNA, 25 bp, Homo sapien
cttgaccccttggagcttagattcc

SEQ ID NO: 3721419 - DNA, 25 bp, Homo sapien
tcatgccaagcactgaggtctctac

SEQ ID NO: 3721420 - DNA, 25 bp, Homo sapien
ggatgatgaacaggctaacagagtg

SEQ ID NO: 3721421 - DNA, 25 bp, Homo sapien
tagctaggattacactgctcccaga

SEQ ID NO: 3721422 - DNA, 25 bp, Homo sapien
ggaaggagtgaaggtcatatgtgtt

SEQ ID NO: 3721423 - DNA, 25 bp, Homo sapien
ttcctgaggaaaaggccgctgtaga

SEQ ID NO: 3721424 - DNA, 25 bp, Homo sapien
cagctccccattgcttatgaagcag

SEQ ID NO: 3721425 - DNA, 25 bp, Homo sapien
tagaaaatggcctcatacagctccc

SEQ ID NO: 3721426 - DNA, 25 bp, Homo sapien
gtatggtaccaatcaataaagagac

SEQ ID NO: 3721427 - DNA, 25 bp, Homo sapien
gacttttcggtttgagagtgtcctg

SEQ ID NO: 3721428 - DNA, 25 bp, Homo sapien
gccatttgagtcatgtatggtacca

SEQ ID NO: 3721429 - DNA, 25 bp, Homo sapien
gagtgtcctggttggtcattgatgc

SEQ ID NO: 3721430 - DNA, 25 bp, Homo sapien
cattgacgacgaggacagctttaac

SEQ ID NO: 3721431 - DNA, 25 bp, Homo sapien
tttgacgcagccaacggcattgacg

SEQ ID NO: 3721432 - DNA, 25 bp, Homo sapien
tcccctaggcagctggtaatagagg

SEQ ID NO: 3721433 - DNA, 25 bp, Homo sapien
tgtggatgcctacttggaacctggg

SEQ ID NO: 3721434 - DNA, 25 bp, Homo sapien
ggccagggagctccataagaccgtc

SEQ ID NO: 3721435 - DNA, 25 bp, Homo sapien
gattatcggacagctcccaagaggg

SEQ ID NO: 3721436 - DNA, 25 bp, Homo sapien
cactctcttataatcaggccaggga

SEQ ID NO: 3721437 - DNA, 25 bp, Homo sapien
gagacaggtgctccctagagtagcc

SEQ ID NO: 3721438 - DNA, 25 bp, Homo sapien
gctgccagtgcggaagcttccttga

SEQ ID NO: 3721439 - DNA, 25 bp, Homo sapien
ccccacaaatccccaagggaagctg

SEQ ID NO: 3721440 - DNA, 25 bp, Homo sapien
aagctgccagtgcggaagcttcctt

SEQ ID NO: 3721441 - DNA, 25 bp, Homo sapien
gccagtgcggaagcttccttgaaaa

SEQ ID NO: 3721442 - DNA, 25 bp, Homo sapien
cagggaggtattgattgcggcccat

SEQ ID NO: 3721443 - DNA, 25 bp, Homo sapien
tgtttgcagggaggtattgattgcg

SEQ ID NO: 3721444 - DNA, 25 bp, Homo sapien
ctatcctgtgacatcccccccatgc

SEQ ID NO: 3721445 - DNA, 25 bp, Homo sapien
tgcagggaggtattgattgcggccc

SEQ ID NO: 3721446 - DNA, 25 bp, Homo sapien
tctcatctccgaagccctcaaagga

SEQ ID NO: 3721447 - DNA, 25 bp, Homo sapien
gcggttggtacggaggtgaaggcac

SEQ ID NO: 3721448 - DNA, 25 bp, Homo sapien
tccgaagccctcaaaggacagcagc

SEQ ID NO: 3721449 - DNA, 25 bp, Homo sapien
gttggtacggaggtgaaggcaccaa

SEQ ID NO: 3721450 - DNA, 25 bp, Homo sapien
ccttaggcgtaagtggtcacaggat

SEQ ID NO: 3721451 - DNA, 25 bp, Homo sapien
cattagtgcatgctcaagtaaggca

SEQ ID NO: 3721452 - DNA, 25 bp, Homo sapien
gcaagtgtaaaaggcctagggcagt

SEQ ID NO: 3721453 - DNA, 25 bp, Homo sapien
gaggtaatagcaccttcttccaaag

SEQ ID NO: 3721454 - DNA, 25 bp, Homo sapien
gatgctccaaagatgttctcttctc

SEQ ID NO: 3721455 - DNA, 25 bp, Homo sapien
cttggcccctgaacacccagcgctg

SEQ ID NO: 3721456 - DNA, 25 bp, Homo sapien
cgcctcgcccagccgattgtgggaa

SEQ ID NO: 3721457 - DNA, 25 bp, Homo sapien
gctgctctgatcgctggcgccgcct

SEQ ID NO: 3721458 - DNA, 25 bp, Homo sapien
tcgcccagccgattgtgggaaagga

SEQ ID NO: 3721459 - DNA, 25 bp, Homo sapien
catacggcgcttggcttcgacttcc

SEQ ID NO: 3721460 - DNA, 25 bp, Homo sapien
gggcggcgcgactccgtctctccgt

SEQ ID NO: 3721461 - DNA, 25 bp, Homo sapien
acttccccaaccactgccgcgggct

SEQ ID NO: 3721462 - DNA, 25 bp, Homo sapien
gcccaaagtcccatacggcgcttgg

SEQ ID NO: 3721463 - DNA, 25 bp, Homo sapien
cgcgggccgccagccaacctctcac

SEQ ID NO: 3721464 - DNA, 25 bp, Homo sapien
atggcgggacccgtggagacacacc

SEQ ID NO: 3721465 - DNA, 25 bp, Homo sapien
accaggagcccgacccacgtggatg

SEQ ID NO: 3721466 - DNA, 25 bp, Homo sapien
cagttcgcgtcagccaggctccaag

SEQ ID NO: 3721467 - DNA, 25 bp, Homo sapien
aaggccgatactagatgcccgacag

SEQ ID NO: 3721468 - DNA, 25 bp, Homo sapien
ggtttctccaataagccatgctctc

SEQ ID NO: 3721469 - DNA, 25 bp, Homo sapien
tgtagtacaggtctcggtttctcca

SEQ ID NO: 3721470 - DNA, 25 bp, Homo sapien
tctcggtttctccaataagccatgc

SEQ ID NO: 3721471 - DNA, 25 bp, Homo sapien
tctgtagtacaggtctcggtttctc

SEQ ID NO: 3721472 - DNA, 25 bp, Homo sapien
aagccagaatcacccgcctcctcat

SEQ ID NO: 3721473 - DNA, 25 bp, Homo sapien
ccagaatcacccgcctcctcatgca

SEQ ID NO: 3721474 - DNA, 25 bp, Homo sapien
gacaaagccagaatcacccgcctcc

SEQ ID NO: 3721475 - DNA, 25 bp, Homo sapien
ctgacaaagccagaatcacccgcct

SEQ ID NO: 3721476 - DNA, 25 bp, Homo sapien
cagagatgggcccagccgagagaga

SEQ ID NO: 3721477 - DNA, 25 bp, Homo sapien
cctgcagcattagctcctccatttc

SEQ ID NO: 3721478 - DNA, 25 bp, Homo sapien
aggtccttgtccctcagagatgggc

SEQ ID NO: 3721479 - DNA, 25 bp, Homo sapien
gcagcattagctcctccatttccag

SEQ ID NO: 3721480 - DNA, 25 bp, Homo sapien
tgagggagataagggaggcatccat

SEQ ID NO: 3721481 - DNA, 25 bp, Homo sapien
ccaaaatcctcaatgagggagataa

SEQ ID NO: 3721482 - DNA, 25 bp, Homo sapien
gagataagggaggcatccatgtagc

SEQ ID NO: 3721483 - DNA, 25 bp, Homo sapien
aatcctcaatgagggagataaggga

SEQ ID NO: 3721484 - DNA, 25 bp, Homo sapien
ttctcagaatctgcattgtccaaga

SEQ ID NO: 3721485 - DNA, 25 bp, Homo sapien
caagatctccgtcagagccgtgagc

SEQ ID NO: 3721486 - DNA, 25 bp, Homo sapien
tgagcagcgacacttcattctggtc

SEQ ID NO: 3721487 - DNA, 25 bp, Homo sapien
ttctggtcctccagagataacctgc

SEQ ID NO: 3721488 - DNA, 25 bp, Homo sapien
gggtgacacaagcagctccgaatca

SEQ ID NO: 3721489 - DNA, 25 bp, Homo sapien
gacacaagcagctccgaatcaggaa

SEQ ID NO: 3721490 - DNA, 25 bp, Homo sapien
agccctcccggggtgacacaagcag

SEQ ID NO: 3721491 - DNA, 25 bp, Homo sapien
agaggagccctcccggggtgacaca

SEQ ID NO: 3721492 - DNA, 25 bp, Homo sapien
gggtgtccgagagagagtaagcagc

SEQ ID NO: 3721493 - DNA, 25 bp, Homo sapien
cgagagagagtaagcagcttgtgca

SEQ ID NO: 3721494 - DNA, 25 bp, Homo sapien
tgtccgagagagagtaagcagcttg

SEQ ID NO: 3721495 - DNA, 25 bp, Homo sapien
gaggtcacgttctgggggtgtccga

SEQ ID NO: 3721496 - DNA, 25 bp, Homo sapien
gtctccagctaggaagcttggggga

SEQ ID NO: 3721497 - DNA, 25 bp, Homo sapien
cgtggtcttgatcttgggggtctcc

SEQ ID NO: 3721498 - DNA, 25 bp, Homo sapien
ggattggccccagcgtggtcttgat

SEQ ID NO: 3721499 - DNA, 25 bp, Homo sapien
ttgggggtctccagctaggaagctt

SEQ ID NO: 3721500 - DNA, 25 bp, Homo sapien
ggaagtccgggatactgctcacaca

SEQ ID NO: 3721501 - DNA, 25 bp, Homo sapien
ggatctccaggtcatcgccagctgt

SEQ ID NO: 3721502 - DNA, 25 bp, Homo sapien
tctagcgagtcatccaggagcacag

SEQ ID NO: 3721503 - DNA, 25 bp, Homo sapien
tacctacagtagactgcccgcgaga

SEQ ID NO: 3721504 - DNA, 25 bp, Homo sapien
caggcccgagcccaagcccggggct

SEQ ID NO: 3721505 - DNA, 25 bp, Homo sapien
tgatgacactgcaccacgtctggga

SEQ ID NO: 3721506 - DNA, 25 bp, Homo sapien
tcatgggttgtagcactggtaccac

SEQ ID NO: 3721507 - DNA, 25 bp, Homo sapien
tcagataagctgagaggccgaggtc

SEQ ID NO: 3721508 - DNA, 25 bp, Homo sapien
ttaactagcactgggtcaactggag

SEQ ID NO: 3721509 - DNA, 25 bp, Homo sapien
gggaaggtctcgccaacagtggcat

SEQ ID NO: 3721510 - DNA, 25 bp, Homo sapien
gtggcatctcctgggatggcacctg

SEQ ID NO: 3721511 - DNA, 25 bp, Homo sapien
agcagacatcgagggaggtgtgggc

SEQ ID NO: 3721512 - DNA, 25 bp, Homo sapien
agggcagcagacatcgagggaggtg

SEQ ID NO: 3721513 - DNA, 25 bp, Homo sapien
gggcagactggggggcatgccaagc

SEQ ID NO: 3721514 - DNA, 25 bp, Homo sapien
gggggcagactggggggcatgccaa

SEQ ID NO: 3721515 - DNA, 25 bp, Homo sapien
cagactggggggcatgccaagccca

SEQ ID NO: 3721516 - DNA, 25 bp, Homo sapien
ggcagactggggggcatgccaagcc

SEQ ID NO: 3721517 - DNA, 25 bp, Homo sapien
ggcatagtgagtaaacggatcaggt

SEQ ID NO: 3721518 - DNA, 25 bp, Homo sapien
tgagtaaacggatcaggtagtactg

SEQ ID NO: 3721519 - DNA, 25 bp, Homo sapien
tagtactggccccatagacaatgga

SEQ ID NO: 3721520 - DNA, 25 bp, Homo sapien
gatcaggtagtactggccccataga

SEQ ID NO: 3721521 - DNA, 25 bp, Homo sapien
actgcaagtgggaggcacggcatag

SEQ ID NO: 3721522 - DNA, 25 bp, Homo sapien
tcccaagggcccataggtacatgtg

SEQ ID NO: 3721523 - DNA, 25 bp, Homo sapien
aggcacggcataggcaccaggagta

SEQ ID NO: 3721524 - DNA, 25 bp, Homo sapien
ccagaatggagcatgttgaggccct

SEQ ID NO: 3721525 - DNA, 25 bp, Homo sapien
tggagtgcccctagactccatttta

SEQ ID NO: 3721526 - DNA, 25 bp, Homo sapien
gaggagccatcgacaagggaagtac

SEQ ID NO: 3721527 - DNA, 25 bp, Homo sapien
agccatcgacaagggaagtacattt

SEQ ID NO: 3721528 - DNA, 25 bp, Homo sapien
tgcccctagactccattttaggttg

SEQ ID NO: 3721529 - DNA, 25 bp, Homo sapien
acacatgctagagccttcatctggg

SEQ ID NO: 3721530 - DNA, 25 bp, Homo sapien
acaccttgtgtttcggatggggaga

SEQ ID NO: 3721531 - DNA, 25 bp, Homo sapien
gcttgacctccaccttggtaggctc

SEQ ID NO: 3721532 - DNA, 25 bp, Homo sapien
ccttcagcagacacacatgctagag

SEQ ID NO: 3721533 - DNA, 25 bp, Homo sapien
atcttcagaaccctgagtacgtggg

SEQ ID NO: 3721534 - DNA, 25 bp, Homo sapien
tctcttgggtctcaggctttagcct

SEQ ID NO: 3721535 - DNA, 25 bp, Homo sapien
tggtgtgggaacagccttggtagca

SEQ ID NO: 3721536 - DNA, 25 bp, Homo sapien
gaaggacagcttccttagacgggct

SEQ ID NO: 3721537 - DNA, 25 bp, Homo sapien
caacttagtacacaggtcccaggaa

SEQ ID NO: 3721538 - DNA, 25 bp, Homo sapien
aacgagcccctatcaacttagtaca

SEQ ID NO: 3721539 - DNA, 25 bp, Homo sapien
aacacaggattgaaaacgagcccct

SEQ ID NO: 3721540 - DNA, 25 bp, Homo sapien
caggattgaaaacgagcccctatca

SEQ ID NO: 3721541 - DNA, 25 bp, Homo sapien
ctggacaggtccgatgcctcaattc

SEQ ID NO: 3721542 - DNA, 25 bp, Homo sapien
cagactggacaggtccgatgcctca

SEQ ID NO: 3721543 - DNA, 25 bp, Homo sapien
gactggacaggtccgatgcctcaat

SEQ ID NO: 3721544 - DNA, 25 bp, Homo sapien
cagcagactggacaggtccgatgcc

SEQ ID NO: 3721545 - DNA, 25 bp, Homo sapien
tatcactgccgtccctggcttggat

SEQ ID NO: 3721546 - DNA, 25 bp, Homo sapien
ccagtctactctttaataccttcct

SEQ ID NO: 3721547 - DNA, 25 bp, Homo sapien
ctggcctggattcccagtctactct

SEQ ID NO: 3721548 - DNA, 25 bp, Homo sapien
ttaataccttccttactgtatcact

SEQ ID NO: 3721549 - DNA, 25 bp, Homo sapien
tgttctagactgaggcggcacagaa

SEQ ID NO: 3721550 - DNA, 25 bp, Homo sapien
gaagaagatagtgtcctccatagca

SEQ ID NO: 3721551 - DNA, 25 bp, Homo sapien
taagaaagccagctatccattgcct

SEQ ID NO: 3721552 - DNA, 25 bp, Homo sapien
tataagcctagcgttcaaggtgatc

SEQ ID NO: 3721553 - DNA, 25 bp, Homo sapien
agccggaggaggacactcctttttg

SEQ ID NO: 3721554 - DNA, 25 bp, Homo sapien
gagtttcctacagccaagctgtcag

SEQ ID NO: 3721555 - DNA, 25 bp, Homo sapien
cctgagtttcctacagccaagctgt

SEQ ID NO: 3721556 - DNA, 25 bp, Homo sapien
tacagccaagctgtcagcaggagcc

SEQ ID NO: 3721557 - DNA, 25 bp, Homo sapien
aaggcacctctaggacatttggagc

SEQ ID NO: 3721558 - DNA, 25 bp, Homo sapien
catttggagcccgactggaatcagc

SEQ ID NO: 3721559 - DNA, 25 bp, Homo sapien
aacagaggcatccagttgacagtcc

SEQ ID NO: 3721560 - DNA, 25 bp, Homo sapien
tgtagggtaactcgctcatgtctcc

SEQ ID NO: 3721561 - DNA, 25 bp, Homo sapien
cagttctggggcttgtaaccggtct

SEQ ID NO: 3721562 - DNA, 25 bp, Homo sapien
tgccacgttggccagttctggggct

SEQ ID NO: 3721563 - DNA, 25 bp, Homo sapien
accggtctaggggcctcttctcctg

SEQ ID NO: 3721564 - DNA, 25 bp, Homo sapien
cttctcctggggaatgtcaacgccg

SEQ ID NO: 3721565 - DNA, 25 bp, Homo sapien
gcgtgtaccaccacgcccaactaat

SEQ ID NO: 3721566 - DNA, 25 bp, Homo sapien
cacctcctggattttagcaattctc

SEQ ID NO: 3721567 - DNA, 25 bp, Homo sapien
cgtgtaccaccacgcccaactaatt

SEQ ID NO: 3721568 - DNA, 25 bp, Homo sapien
ccacctcctggattttagcaattct

SEQ ID NO: 3721569 - DNA, 25 bp, Homo sapien
tctcacaaagtacaccaagcaaggt

SEQ ID NO: 3721570 - DNA, 25 bp, Homo sapien
gatgagatccgattctacgcttcca

SEQ ID NO: 3721571 - DNA, 25 bp, Homo sapien
taccgtgtatatagcctccagagac

SEQ ID NO: 3721572 - DNA, 25 bp, Homo sapien
tggagcacccaaaaaccaatctggc

SEQ ID NO: 3721573 - DNA, 25 bp, Homo sapien
gacacaatagtcatggtccccagag

SEQ ID NO: 3721574 - DNA, 25 bp, Homo sapien
tgggcccaaggacaagacaggtttg

SEQ ID NO: 3721575 - DNA, 25 bp, Homo sapien
tgttcatgtcattccggcagggtga

SEQ ID NO: 3721576 - DNA, 25 bp, Homo sapien
tcttggaggcgaactgcagctggat

SEQ ID NO: 3721577 - DNA, 25 bp, Homo sapien
tgacagaacggctgttgcggcctcg

SEQ ID NO: 3721578 - DNA, 25 bp, Homo sapien
gaggaagatgcttcgctagtccggt

SEQ ID NO: 3721579 - DNA, 25 bp, Homo sapien
tagtccggttggacccagagctgac

SEQ ID NO: 3721580 - DNA, 25 bp, Homo sapien
ccgagatcgggatgaggaagacgat

SEQ ID NO: 3721581 - DNA, 25 bp, Homo sapien
actgctagacttgtagtatgggcca

SEQ ID NO: 3721582 - DNA, 25 bp, Homo sapien
gttactattgctcccctaccaggtc

SEQ ID NO: 3721583 - DNA, 25 bp, Homo sapien
ccatgagagaggttaactgctagac

SEQ ID NO: 3721584 - DNA, 25 bp, Homo sapien
cactgaaatactgtgaccatgagag

SEQ ID NO: 3721585 - DNA, 25 bp, Homo sapien
gcttcgagaactggatgatgaggat

SEQ ID NO: 3721586 - DNA, 25 bp, Homo sapien
tcgtgagcggcttcgagaactggat

SEQ ID NO: 3721587 - DNA, 25 bp, Homo sapien
gagaacgtccagaggaactacagct

SEQ ID NO: 3721588 - DNA, 25 bp, Homo sapien
aagaggaagagcatcttcgagaacg

SEQ ID NO: 3721589 - DNA, 25 bp, Homo sapien
aagagggtgtcatcagccccccaaa

SEQ ID NO: 3721590 - DNA, 25 bp, Homo sapien
atggcgctccctgaacacatgctca

SEQ ID NO: 3721591 - DNA, 25 bp, Homo sapien
ccccaaacataagacaattcaagac

SEQ ID NO: 3721592 - DNA, 25 bp, Homo sapien
tcaagactcaactcttaggcacctg

SEQ ID NO: 3721593 - DNA, 25 bp, Homo sapien
gcacgctccttttgtagcactcttt

SEQ ID NO: 3721594 - DNA, 25 bp, Homo sapien
tattgcacgctccttttgtagcact

SEQ ID NO: 3721595 - DNA, 25 bp, Homo sapien
gtaatggtcatgtgaacgataagag

SEQ ID NO: 3721596 - DNA, 25 bp, Homo sapien
tctttgcctttggtaatggtcatgt

SEQ ID NO: 3721597 - DNA, 25 bp, Homo sapien
tctctccaaaaacggagaacctctg

SEQ ID NO: 3721598 - DNA, 25 bp, Homo sapien
tatctttccaatgaagaccaccctt

SEQ ID NO: 3721599 - DNA, 25 bp, Homo sapien
aaaacggagaacctctgtttcagct

SEQ ID NO: 3721600 - DNA, 25 bp, Homo sapien
tttcagctctgatcgagtcatgcgg

SEQ ID NO: 3721601 - DNA, 25 bp, Homo sapien
agatcagaatagctcctcttgcaga

SEQ ID NO: 3721602 - DNA, 25 bp, Homo sapien
ataagtgacgaagccgtagttgtcc

SEQ ID NO: 3721603 - DNA, 25 bp, Homo sapien
tgcaaatgcctcctcagcatagcga

SEQ ID NO: 3721604 - DNA, 25 bp, Homo sapien
tgtggccactctcaatggctgcaaa

SEQ ID NO: 3721605 - DNA, 25 bp, Homo sapien
gcattccaaagctttaggccctccc

SEQ ID NO: 3721606 - DNA, 25 bp, Homo sapien
ggaggggatgaagcattccaaagct

SEQ ID NO: 3721607 - DNA, 25 bp, Homo sapien
taaggtaagtctgcctagccccact

SEQ ID NO: 3721608 - DNA, 25 bp, Homo sapien
ccttgggttctttgtatgtcaaact

SEQ ID NO: 3721609 - DNA, 25 bp, Homo sapien
tttacaggtgctgggtcaaagtctt

SEQ ID NO: 3721610 - DNA, 25 bp, Homo sapien
ttctgggcctgtttcaacaatgtgt

SEQ ID NO: 3721611 - DNA, 25 bp, Homo sapien
gtttcaacaatgtgtcaaagtcaag

SEQ ID NO: 3721612 - DNA, 25 bp, Homo sapien
gaatcaaatttgctctttacaggtg

SEQ ID NO: 3721613 - DNA, 25 bp, Homo sapien
gagaaaaaggatagcagggaagggc

SEQ ID NO: 3721614 - DNA, 25 bp, Homo sapien
gctctctcccctagagtaggggaag

SEQ ID NO: 3721615 - DNA, 25 bp, Homo sapien
agcagctctctcccctagagtaggg

SEQ ID NO: 3721616 - DNA, 25 bp, Homo sapien
ttataaaacagtcatctcactagca

SEQ ID NO: 3721617 - DNA, 25 bp, Homo sapien
taaaacagtcatctcactagcagct

SEQ ID NO: 3721618 - DNA, 25 bp, Homo sapien
acataggaatgcaagttaacttgtt

SEQ ID NO: 3721619 - DNA, 25 bp, Homo sapien
ctctagttgatgtttattagtctgc

SEQ ID NO: 3721620 - DNA, 25 bp, Homo sapien
taacttgtttcaatacctgttataa

SEQ ID NO: 3721621 - DNA, 25 bp, Homo sapien
tagtgacttatgttccaaacactgg

SEQ ID NO: 3721622 - DNA, 25 bp, Homo sapien
cgcataacggaaagggtgggctcca

SEQ ID NO: 3721623 - DNA, 25 bp, Homo sapien
tcagaggtagggtagacgggaaatc

SEQ ID NO: 3721624 - DNA, 25 bp, Homo sapien
ctgtgttacgtcattgcgccgcgcg

SEQ ID NO: 3721625 - DNA, 25 bp, Homo sapien
tcccaccttcacctcagaggtaggg

SEQ ID NO: 3721626 - DNA, 25 bp, Homo sapien
aggaacccaacaggggcagtgggcg

SEQ ID NO: 3721627 - DNA, 25 bp, Homo sapien
ctcaggaacccaacaggggcagtgg

SEQ ID NO: 3721628 - DNA, 25 bp, Homo sapien
caggaacccaacaggggcagtgggc

SEQ ID NO: 3721629 - DNA, 25 bp, Homo sapien
tcaggaacccaacaggggcagtggg

SEQ ID NO: 3721630 - DNA, 25 bp, Homo sapien
agagttggttatcgcgcaggaagcc

SEQ ID NO: 3721631 - DNA, 25 bp, Homo sapien
tcgctttggcgaacttattggccac

SEQ ID NO: 3721632 - DNA, 25 bp, Homo sapien
gaaccacgcggcgaatgccggcgtc

SEQ ID NO: 3721633 - DNA, 25 bp, Homo sapien
cttattggccacctctgagagttgg

SEQ ID NO: 3721634 - DNA, 25 bp, Homo sapien
tgaagccttgtggtcatctcagccc

SEQ ID NO: 3721635 - DNA, 25 bp, Homo sapien
ccacctggaaacctaagcacgtcag

SEQ ID NO: 3721636 - DNA, 25 bp, Homo sapien
taaaggccttgcagacactggactg

SEQ ID NO: 3721637 - DNA, 25 bp, Homo sapien
aaacctaagcacgtcagggcctgaa

SEQ ID NO: 3721638 - DNA, 25 bp, Homo sapien
gccgccgctgcacaggtcacaagaa

SEQ ID NO: 3721639 - DNA, 25 bp, Homo sapien
cagcgatatctactcagacatggag

SEQ ID NO: 3721640 - DNA, 25 bp, Homo sapien
cagacatggaggaaggtaagcgacc

SEQ ID NO: 3721641 - DNA, 25 bp, Homo sapien
aaaaaagcaacaagactcagcgata

SEQ ID NO: 3721642 - DNA, 25 bp, Homo sapien
tacagcgaagtatgattgcatcact

SEQ ID NO: 3721643 - DNA, 25 bp, Homo sapien
caggagttcgatgctacagcgaagt

SEQ ID NO: 3721644 - DNA, 25 bp, Homo sapien
cacagaagagtacaggatcaggcca

SEQ ID NO: 3721645 - DNA, 25 bp, Homo sapien
aatgatcagagtcagtacagatggg

SEQ ID NO: 3721646 - DNA, 25 bp, Homo sapien
aagctatagatgtctaagagggaag

SEQ ID NO: 3721647 - DNA, 25 bp, Homo sapien
ctgtaactttcgctctgggaccttg

SEQ ID NO: 3721648 - DNA, 25 bp, Homo sapien
ctttcgctctgggaccttggcagac

SEQ ID NO: 3721649 - DNA, 25 bp, Homo sapien
tgtaactttcgctctgggaccttgg

SEQ ID NO: 3721650 - DNA, 25 bp, Homo sapien
taactttcgctctgggaccttggca

SEQ ID NO: 3721651 - DNA, 25 bp, Homo sapien
aggctgtttcttttggtcctcctca

SEQ ID NO: 3721652 - DNA, 25 bp, Homo sapien
ctggacaggctgtttcttttggtcc

SEQ ID NO: 3721653 - DNA, 25 bp, Homo sapien
cactggactcttcactgctgctact

SEQ ID NO: 3721654 - DNA, 25 bp, Homo sapien
actgctgctactctctgatgctttg

SEQ ID NO: 3721655 - DNA, 25 bp, Homo sapien
tgtcacaggtgttatctttggcttc

SEQ ID NO: 3721656 - DNA, 25 bp, Homo sapien
ggaggggctttagtctgagctttaa

SEQ ID NO: 3721657 - DNA, 25 bp, Homo sapien
gggctttagtctgagctttaactgt

SEQ ID NO: 3721658 - DNA, 25 bp, Homo sapien
tttgggaggggctttagtctgagct

SEQ ID NO: 3721659 - DNA, 25 bp, Homo sapien
gccagccatggtttaccacatcaaa

SEQ ID NO: 3721660 - DNA, 25 bp, Homo sapien
acatcaaaggatacctttcctatcc

SEQ ID NO: 3721661 - DNA, 25 bp, Homo sapien
tttagagcagccatcgaggagaatg

SEQ ID NO: 3721662 - DNA, 25 bp, Homo sapien
tgcagtggttcaggcaactctcccg

SEQ ID NO: 3721663 - DNA, 25 bp, Homo sapien
gctactggctgctttaccattggct

SEQ ID NO: 3721664 - DNA, 25 bp, Homo sapien
ggggtggctgctgccttctcctcct

SEQ ID NO: 3721665 - DNA, 25 bp, Homo sapien
cttcttgggggtggctgctgccttc

SEQ ID NO: 3721666 - DNA, 25 bp, Homo sapien
tcttgggggtggctgctgccttctc

SEQ ID NO: 3721667 - DNA, 25 bp, Homo sapien
tgggggtggctgctgccttctcctc

SEQ ID NO: 3721668 - DNA, 25 bp, Homo sapien
tgccctgacagaagttatggtccag

SEQ ID NO: 3721669 - DNA, 25 bp, Homo sapien
ccctgacagaagttatggtccagac

SEQ ID NO: 3721670 - DNA, 25 bp, Homo sapien
ctgccctgacagaagttatggtcca

SEQ ID NO: 3721671 - DNA, 25 bp, Homo sapien
gccctgacagaagttatggtccaga

SEQ ID NO: 3721672 - DNA, 25 bp, Homo sapien
cctcttcctcgtcactggaggaatc

SEQ ID NO: 3721673 - DNA, 25 bp, Homo sapien
ctcttccgggtaggggtggtagctg

SEQ ID NO: 3721674 - DNA, 25 bp, Homo sapien
tggaggaatcctcactgctagaact

SEQ ID NO: 3721675 - DNA, 25 bp, Homo sapien
ggccttggccacaacttgcttttta

SEQ ID NO: 3721676 - DNA, 25 bp, Homo sapien
tgggttcccagagacttctttggtg

SEQ ID NO: 3721677 - DNA, 25 bp, Homo sapien
tcccagagacttctttggtggggga

SEQ ID NO: 3721678 - DNA, 25 bp, Homo sapien
taagcaaaaagcaaccgaaggatgg

SEQ ID NO: 3721679 - DNA, 25 bp, Homo sapien
gaatgcaaagacacgcacagagcct

SEQ ID NO: 3721680 - DNA, 25 bp, Homo sapien
tgaggagaacctgtagcattatgct

SEQ ID NO: 3721681 - DNA, 25 bp, Homo sapien
caaccgaaggatggaaggctttctc

SEQ ID NO: 3721682 - DNA, 25 bp, Homo sapien
gttgctttagagactactgccttag

SEQ ID NO: 3721683 - DNA, 25 bp, Homo sapien
tggttgctttagagactactgcctt

SEQ ID NO: 3721684 - DNA, 25 bp, Homo sapien
ctggaggtggtttagtggttgcttt

SEQ ID NO: 3721685 - DNA, 25 bp, Homo sapien
tagtggttgctttagagactactgc

SEQ ID NO: 3721686 - DNA, 25 bp, Homo sapien
caggcagagatagagctgctttggc

SEQ ID NO: 3721687 - DNA, 25 bp, Homo sapien
tgctttggcagtcgccttgggctta

SEQ ID NO: 3721688 - DNA, 25 bp, Homo sapien
cttggtggtaccagctggcttagaa

SEQ ID NO: 3721689 - DNA, 25 bp, Homo sapien
gctgctgtccctactaccctgagga

SEQ ID NO: 3721690 - DNA, 25 bp, Homo sapien
tgatttggaaactaccactgccgcc

SEQ ID NO: 3721691 - DNA, 25 bp, Homo sapien
ctgatttggaaactaccactgccgc

SEQ ID NO: 3721692 - DNA, 25 bp, Homo sapien
atttggaaactaccactgccgcctt

SEQ ID NO: 3721693 - DNA, 25 bp, Homo sapien
ggagagcccttgcccttgagcttct

SEQ ID NO: 3721694 - DNA, 25 bp, Homo sapien
ctcattctgcttccgcttctttaat

SEQ ID NO: 3721695 - DNA, 25 bp, Homo sapien
atcttcttggcctgaggagtctctg

SEQ ID NO: 3721696 - DNA, 25 bp, Homo sapien
ttctgcttccgcttctttaatgaac

SEQ ID NO: 3721697 - DNA, 25 bp, Homo sapien
cttcttggcctgaggagtctctgcc

SEQ ID NO: 3721698 - DNA, 25 bp, Homo sapien
tttggaaatgtgttaggggtctgaa

SEQ ID NO: 3721699 - DNA, 25 bp, Homo sapien
ttggaaatgtgttaggggtctgaag

SEQ ID NO: 3721700 - DNA, 25 bp, Homo sapien
atcaaaggagttgtccgcaactcgt

SEQ ID NO: 3721701 - DNA, 25 bp, Homo sapien
gagttgtccgcaactcgtgaatcca

SEQ ID NO: 3721702 - DNA, 25 bp, Homo sapien
cttcggaatggggatgatgcccttt

SEQ ID NO: 3721703 - DNA, 25 bp, Homo sapien
gcaactcgtgaatccacctcaattt

SEQ ID NO: 3721704 - DNA, 25 bp, Homo sapien
ctggacagagattgagcctccccgg

SEQ ID NO: 3721705 - DNA, 25 bp, Homo sapien
gaacttcaaaacctgattggctcgc

SEQ ID NO: 3721706 - DNA, 25 bp, Homo sapien
ttctcatgccgaaaggacttgcctt

SEQ ID NO: 3721707 - DNA, 25 bp, Homo sapien
tcaaaacctgattggctcgctctcc

SEQ ID NO: 3721708 - DNA, 25 bp, Homo sapien
cgctgtcaaacttaatagaattgac

SEQ ID NO: 3721709 - DNA, 25 bp, Homo sapien
ctcgctgtcaaacttaatagaattg

SEQ ID NO: 3721710 - DNA, 25 bp, Homo sapien
tcactcgctgtcaaacttaatagaa

SEQ ID NO: 3721711 - DNA, 25 bp, Homo sapien
cactcgctgtcaaacttaatagaat

SEQ ID NO: 3721712 - DNA, 25 bp, Homo sapien
tagtctccgatcatcacccttgctt

SEQ ID NO: 3721713 - DNA, 25 bp, Homo sapien
ttgcttcaccgaagatggcctcagg

SEQ ID NO: 3721714 - DNA, 25 bp, Homo sapien
gaaagtaagtagtctccgatcatca

SEQ ID NO: 3721715 - DNA, 25 bp, Homo sapien
ggtccactggagaaagtaagtagtc

SEQ ID NO: 3721716 - DNA, 25 bp, Homo sapien
tacactgtaaagtcttaggacctac

SEQ ID NO: 3721717 - DNA, 25 bp, Homo sapien
tttctcagtatgaggactttcacag

SEQ ID NO: 3721718 - DNA, 25 bp, Homo sapien
caaaaacaagtctgtacaaaactag

SEQ ID NO: 3721719 - DNA, 25 bp, Homo sapien
agaaaaggaccagagaggatgttac

SEQ ID NO: 3721720 - DNA, 25 bp, Homo sapien
tatgttttgggcaatagccaagatt

SEQ ID NO: 3721721 - DNA, 25 bp, Homo sapien
agtcacacgtgaccctttactatgt

SEQ ID NO: 3721722 - DNA, 25 bp, Homo sapien
aatgcccctctctagggttttgagg

SEQ ID NO: 3721723 - DNA, 25 bp, Homo sapien
tatctgtgggaatccacctttgaaa

SEQ ID NO: 3721724 - DNA, 25 bp, Homo sapien
aatatattcagaatgacccatggca

SEQ ID NO: 3721725 - DNA, 25 bp, Homo sapien
tacatagtgcatgcttaacagacat

SEQ ID NO: 3721726 - DNA, 25 bp, Homo sapien
tctaccttcctactgaggattgagg

SEQ ID NO: 3721727 - DNA, 25 bp, Homo sapien
tatgctctgtaaggttctttccaac

SEQ ID NO: 3721728 - DNA, 25 bp, Homo sapien
tagaggcagttacatggaaaaccag

SEQ ID NO: 3721729 - DNA, 25 bp, Homo sapien
tggtctggctgagtaccgctactgc

SEQ ID NO: 3721730 - DNA, 25 bp, Homo sapien
cactggtttgtgttgttacagccac

SEQ ID NO: 3721731 - DNA, 25 bp, Homo sapien
gcatgtcaattgctcccaggtacca

SEQ ID NO: 3721732 - DNA, 25 bp, Homo sapien
tttagaacttttaccatgcagactg

SEQ ID NO: 3721733 - DNA, 25 bp, Homo sapien
tagaacttttaccatgcagactgaa

SEQ ID NO: 3721734 - DNA, 25 bp, Homo sapien
gaacttttaccatgcagactgaaat

SEQ ID NO: 3721735 - DNA, 25 bp, Homo sapien
gatttagaacttttaccatgcagac

SEQ ID NO: 3721736 - DNA, 25 bp, Homo sapien
cggggaacattaatcttctacaagc

SEQ ID NO: 3721737 - DNA, 25 bp, Homo sapien
ccacggggaacattaatcttctaca

SEQ ID NO: 3721738 - DNA, 25 bp, Homo sapien
ttccacggggaacattaatcttcta

SEQ ID NO: 3721739 - DNA, 25 bp, Homo sapien
cacggggaacattaatcttctacaa

SEQ ID NO: 3721740 - DNA, 25 bp, Homo sapien
aacacaggcccgcaatttccatcag

SEQ ID NO: 3721741 - DNA, 25 bp, Homo sapien
tctgcagccggtcacccttgcagga

SEQ ID NO: 3721742 - DNA, 25 bp, Homo sapien
gaagaacacaggcccgcaatttcca

SEQ ID NO: 3721743 - DNA, 25 bp, Homo sapien
ctgcagccggtcacccttgcaggag

SEQ ID NO: 3721744 - DNA, 25 bp, Homo sapien
ccaaggcggaagcctggcatttgtt

SEQ ID NO: 3721745 - DNA, 25 bp, Homo sapien
ttgttctcctcaatcctgagctcct

SEQ ID NO: 3721746 - DNA, 25 bp, Homo sapien
taggcccaagaaaagagtggtagca

SEQ ID NO: 3721747 - DNA, 25 bp, Homo sapien
aagagtggtagcaatcacccctgtg

SEQ ID NO: 3721748 - DNA, 25 bp, Homo sapien
gtggtagcaatcacccctgtgagag

SEQ ID NO: 3721749 - DNA, 25 bp, Homo sapien
ttgcctaggcccaagaaaagagtgg

SEQ ID NO: 3721750 - DNA, 25 bp, Homo sapien
ggagcacacaggcttcgtgacaatg

SEQ ID NO: 3721751 - DNA, 25 bp, Homo sapien
caatgagtgcactgtggcttggacg

SEQ ID NO: 3721752 - DNA, 25 bp, Homo sapien
actgtggcttggacggtgactggga

SEQ ID NO: 3721753 - DNA, 25 bp, Homo sapien
ttcgtgacaatggttgagaactcct

SEQ ID NO: 3721754 - DNA, 25 bp, Homo sapien
cgccccaagtcccgtcgtaggccat

SEQ ID NO: 3721755 - DNA, 25 bp, Homo sapien
gcgcagccagctatcccgggcgcag

SEQ ID NO: 3721756 - DNA, 25 bp, Homo sapien
tgcgatatataacgcggacttgcaa

SEQ ID NO: 3721757 - DNA, 25 bp, Homo sapien
cggacttgcaaagctgcctgcccgg

SEQ ID NO: 3721758 - DNA, 25 bp, Homo sapien
ggcgcagccactgcgatatataacg

SEQ ID NO: 3721759 - DNA, 25 bp, Homo sapien
gcagaagtcaaggtccaaagcttgg

SEQ ID NO: 3721760 - DNA, 25 bp, Homo sapien
gggcgagacggaacagagccgggac

SEQ ID NO: 3721761 - DNA, 25 bp, Homo sapien
gagacggaacagagccgggacagaa

SEQ ID NO: 3721762 - DNA, 25 bp, Homo sapien
tcaaggtccaaagcttggaggcgct

SEQ ID NO: 3721763 - DNA, 25 bp, Homo sapien
gatttacttcatgtgagacattcat

SEQ ID NO: 3721764 - DNA, 25 bp, Homo sapien
catgtccttggacagctcgaagtta

SEQ ID NO: 3721765 - DNA, 25 bp, Homo sapien
caatactcctcgaaaaagggcctca

SEQ ID NO: 3721766 - DNA, 25 bp, Homo sapien
gctcgaagttatagggctggaacag

SEQ ID NO: 3721767 - DNA, 25 bp, Homo sapien
ccttctccacagcaggaacggtgga

SEQ ID NO: 3721768 - DNA, 25 bp, Homo sapien
aattggttggagcataaagtcagcc

SEQ ID NO: 3721769 - DNA, 25 bp, Homo sapien
ctgtggcgtaagaagaatgtggcaa

SEQ ID NO: 3721770 - DNA, 25 bp, Homo sapien
tgtggcaatagcttctccctggctg

SEQ ID NO: 3721771 - DNA, 25 bp, Homo sapien
ccccacagcgatgagaaccaggtag

SEQ ID NO: 3721772 - DNA, 25 bp, Homo sapien
ttgcaggttgaagcccttgcgttcc

SEQ ID NO: 3721773 - DNA, 25 bp, Homo sapien
cttcatgtagttctgccccacagcg

SEQ ID NO: 3721774 - DNA, 25 bp, Homo sapien
cagcgatgagaaccaggtagatcag

SEQ ID NO: 3721775 - DNA, 25 bp, Homo sapien
gaagttgatgaagcacacggtttgc

SEQ ID NO: 3721776 - DNA, 25 bp, Homo sapien
gacccaggaccagaatttgactgtg

SEQ ID NO: 3721777 - DNA, 25 bp, Homo sapien
ggtaagtagcacagtccccataatg

SEQ ID NO: 3721778 - DNA, 25 bp, Homo sapien
cgagttctatgaccttgctgagaag

SEQ ID NO: 3721779 - DNA, 25 bp, Homo sapien
tggagagtcatagttggcataccac

SEQ ID NO: 3721780 - DNA, 25 bp, Homo sapien
tagttggcataccacccagtgctgg

SEQ ID NO: 3721781 - DNA, 25 bp, Homo sapien
gttggcataccacccagtgctggga

SEQ ID NO: 3721782 - DNA, 25 bp, Homo sapien
gtcatagttggcataccacccagtg

SEQ ID NO: 3721783 - DNA, 25 bp, Homo sapien
tatccaaagcttgtgtacacgagca

SEQ ID NO: 3721784 - DNA, 25 bp, Homo sapien
tggccgcttacgcaggatgatgaag

SEQ ID NO: 3721785 - DNA, 25 bp, Homo sapien
gatcctgcctccagatgtacgtgag

SEQ ID NO: 3721786 - DNA, 25 bp, Homo sapien
cagtgaataaagatgagtggccgct

SEQ ID NO: 3721787 - DNA, 25 bp, Homo sapien
tgttaagtgcctaccaggcctagga

SEQ ID NO: 3721788 - DNA, 25 bp, Homo sapien
gcagatcatccccttggtagcagcc

SEQ ID NO: 3721789 - DNA, 25 bp, Homo sapien
gaaaccatgcaggtaaggcaaccta

SEQ ID NO: 3721790 - DNA, 25 bp, Homo sapien
taaataatcagctcttaggaccctc

SEQ ID NO: 3721791 - DNA, 25 bp, Homo sapien
tggtagatctggtctccaacgcttc

SEQ ID NO: 3721792 - DNA, 25 bp, Homo sapien
ggtgtcagctctgctattcagggag

SEQ ID NO: 3721793 - DNA, 25 bp, Homo sapien
tctacaggcgagctggatgtacagg

SEQ ID NO: 3721794 - DNA, 25 bp, Homo sapien
gattcctgcagcaaagaggtgcgtg

SEQ ID NO: 3721795 - DNA, 25 bp, Homo sapien
cctggaaagccgattggaaaatcct

SEQ ID NO: 3721796 - DNA, 25 bp, Homo sapien
gctcgccaatatctacttctacata

SEQ ID NO: 3721797 - DNA, 25 bp, Homo sapien
taagtgggccaaaaatttctgctcg

SEQ ID NO: 3721798 - DNA, 25 bp, Homo sapien
gcctgtctcagattgagaggtcctg

SEQ ID NO: 3721799 - DNA, 25 bp, Homo sapien
tgggactgcacagtccgccaggatg

SEQ ID NO: 3721800 - DNA, 25 bp, Homo sapien
ccaggatgagtcgtccgggacgggc

SEQ ID NO: 3721801 - DNA, 25 bp, Homo sapien
gtagagccgggtaccttccctgtca

SEQ ID NO: 3721802 - DNA, 25 bp, Homo sapien
ttccctgtcagctcactgacgtggt

SEQ ID NO: 3721803 - DNA, 25 bp, Homo sapien
atgtccagcccgcaccccggaggcg

SEQ ID NO: 3721804 - DNA, 25 bp, Homo sapien
cggggcctagtcccaggaccggcag

SEQ ID NO: 3721805 - DNA, 25 bp, Homo sapien
ctgtcagcggatccaaaatggcggg

SEQ ID NO: 3721806 - DNA, 25 bp, Homo sapien
ccggaggcgtctccgagcagctctc

SEQ ID NO: 3721807 - DNA, 25 bp, Homo sapien
cacgacaccggaactctaggaagag

SEQ ID NO: 3721808 - DNA, 25 bp, Homo sapien
tatcaactcaacagggcaatggccc

SEQ ID NO: 3721809 - DNA, 25 bp, Homo sapien
gctaaatactaggtcaagcctggga

SEQ ID NO: 3721810 - DNA, 25 bp, Homo sapien
tcctgcggcagaggcatgacctttg

SEQ ID NO: 3721811 - DNA, 25 bp, Homo sapien
atggttgagctcaggagtcagagac

SEQ ID NO: 3721812 - DNA, 25 bp, Homo sapien
gaatggttgagctcaggagtcagag

SEQ ID NO: 3721813 - DNA, 25 bp, Homo sapien
aatggttgagctcaggagtcagaga

SEQ ID NO: 3721814 - DNA, 25 bp, Homo sapien
ggaatggttgagctcaggagtcaga

SEQ ID NO: 3721815 - DNA, 25 bp, Homo sapien
tcaggtgatctgcctcccttgactt

SEQ ID NO: 3721816 - DNA, 25 bp, Homo sapien
cctcaggtgatctgcctcccttgac

SEQ ID NO: 3721817 - DNA, 25 bp, Homo sapien
acctcaggtgatctgcctcccttga

SEQ ID NO: 3721818 - DNA, 25 bp, Homo sapien
aggtgatctgcctcccttgacttcc

SEQ ID NO: 3721819 - DNA, 25 bp, Homo sapien
taatctccccttgaatgatgtaaat

SEQ ID NO: 3721820 - DNA, 25 bp, Homo sapien
tggccccaaccacaatgttaatctc

SEQ ID NO: 3721821 - DNA, 25 bp, Homo sapien
gtgtatgggtgctccatcgggcatt

SEQ ID NO: 3721822 - DNA, 25 bp, Homo sapien
catcgggcatttcgtttgatggccc

SEQ ID NO: 3721823 - DNA, 25 bp, Homo sapien
ttagatgaccgaaactatgcagcag

SEQ ID NO: 3721824 - DNA, 25 bp, Homo sapien
ctttagatgaccgaaactatgcagc

SEQ ID NO: 3721825 - DNA, 25 bp, Homo sapien
acctcctttagatgaccgaaactat

SEQ ID NO: 3721826 - DNA, 25 bp, Homo sapien
tcctttagatgaccgaaactatgca

SEQ ID NO: 3721827 - DNA, 25 bp, Homo sapien
tataaagggcgcagcttgacagtgg

SEQ ID NO: 3721828 - DNA, 25 bp, Homo sapien
ggatattcctgccacacctgatcaa

SEQ ID NO: 3721829 - DNA, 25 bp, Homo sapien
gacagcctgaaatttgcatccggaa

SEQ ID NO: 3721830 - DNA, 25 bp, Homo sapien
cacctgatcaaacacactccgtggg

SEQ ID NO: 3721831 - DNA, 25 bp, Homo sapien
atttttgcctctcaacccgtctatt

SEQ ID NO: 3721832 - DNA, 25 bp, Homo sapien
tttgcctctcaacccgtctatttca

SEQ ID NO: 3721833 - DNA, 25 bp, Homo sapien
ttttgcctctcaacccgtctatttc

SEQ ID NO: 3721834 - DNA, 25 bp, Homo sapien
tatttttgcctctcaacccgtctat

SEQ ID NO: 3721835 - DNA, 25 bp, Homo sapien
tggacacaactagaagagggcaata

SEQ ID NO: 3721836 - DNA, 25 bp, Homo sapien
ctgtgcctggacacaactagaagag

SEQ ID NO: 3721837 - DNA, 25 bp, Homo sapien
cacaactagaagagggcaatagtca

SEQ ID NO: 3721838 - DNA, 25 bp, Homo sapien
tgcctggacacaactagaagagggc

SEQ ID NO: 3721839 - DNA, 25 bp, Homo sapien
tatattactgctacacagctccaga

SEQ ID NO: 3721840 - DNA, 25 bp, Homo sapien
gaagcagtgaaaatcccctacaggt

SEQ ID NO: 3721841 - DNA, 25 bp, Homo sapien
gaccaggctccacaaactgcctttt

SEQ ID NO: 3721842 - DNA, 25 bp, Homo sapien
actgggacctaagtctgatctctga

SEQ ID NO: 3721843 - DNA, 25 bp, Homo sapien
ggccaactcctaaggctcttatctg

SEQ ID NO: 3721844 - DNA, 25 bp, Homo sapien
acatgcggccaactcctaaggctct

SEQ ID NO: 3721845 - DNA, 25 bp, Homo sapien
actcctaaggctcttatctgactgg

SEQ ID NO: 3721846 - DNA, 25 bp, Homo sapien
aaggctcttatctgactggtataca

SEQ ID NO: 3721847 - DNA, 25 bp, Homo sapien
cactgtggctatcgacttgcttgtc

SEQ ID NO: 3721848 - DNA, 25 bp, Homo sapien
gcctgtgcagtcctcatcactgtgg

SEQ ID NO: 3721849 - DNA, 25 bp, Homo sapien
tgtcaccaagagctgaataagtata

SEQ ID NO: 3721850 - DNA, 25 bp, Homo sapien
tgcatagctggaatgattaccaaac

SEQ ID NO: 3721851 - DNA, 25 bp, Homo sapien
cagccttaggctatttcctaggaag

SEQ ID NO: 3721852 - DNA, 25 bp, Homo sapien
tactacgccagtaaatgacaacagg

SEQ ID NO: 3721853 - DNA, 25 bp, Homo sapien
taaacacaattttggaacctctctg

SEQ ID NO: 3721854 - DNA, 25 bp, Homo sapien
tgacaacaggaatatgaggccaggg

SEQ ID NO: 3721855 - DNA, 25 bp, Homo sapien
cacagagataaggttctactacata

SEQ ID NO: 3721856 - DNA, 25 bp, Homo sapien
tctatggcattctggttcaatgtat

SEQ ID NO: 3721857 - DNA, 25 bp, Homo sapien
aagagtatcctcagccaatttcagc

SEQ ID NO: 3721858 - DNA, 25 bp, Homo sapien
tgctaagaacttctggccccactga

SEQ ID NO: 3721859 - DNA, 25 bp, Homo sapien
atgtatagtaaatggattccttggg

SEQ ID NO: 3721860 - DNA, 25 bp, Homo sapien
aattaatgtatagtaaatggattcc

SEQ ID NO: 3721861 - DNA, 25 bp, Homo sapien
taaatggattccttggggaagcgta

SEQ ID NO: 3721862 - DNA, 25 bp, Homo sapien
ttaatgtatagtaaatggattcctt

SEQ ID NO: 3721863 - DNA, 25 bp, Homo sapien
tgtgtaaccacgtactatatgatga

SEQ ID NO: 3721864 - DNA, 25 bp, Homo sapien
tgagatatagttcactcctttaaag

SEQ ID NO: 3721865 - DNA, 25 bp, Homo sapien
gagttgtgtaaccacgtactatatg

SEQ ID NO: 3721866 - DNA, 25 bp, Homo sapien
tataactcaccccttatatattgag

SEQ ID NO: 3721867 - DNA, 25 bp, Homo sapien
tacatacgatgtggcccatgactgt

SEQ ID NO: 3721868 - DNA, 25 bp, Homo sapien
ggcattcgaagtctttgcatgttgt

SEQ ID NO: 3721869 - DNA, 25 bp, Homo sapien
tttcaaaattacatacgatgtggcc

SEQ ID NO: 3721870 - DNA, 25 bp, Homo sapien
tcgaagtctttgcatgttgtaatgt

SEQ ID NO: 3721871 - DNA, 25 bp, Homo sapien
tttacttactactacataaggaaga

SEQ ID NO: 3721872 - DNA, 25 bp, Homo sapien
tacttactactacataaggaagaac

SEQ ID NO: 3721873 - DNA, 25 bp, Homo sapien
atttacttactactacataaggaag

SEQ ID NO: 3721874 - DNA, 25 bp, Homo sapien
cttactactacataaggaagaactt

SEQ ID NO: 3721875 - DNA, 25 bp, Homo sapien
gcttaatgtccgctaaatttagtaa

SEQ ID NO: 3721876 - DNA, 25 bp, Homo sapien
ttccatggtcattacagaccttctc

SEQ ID NO: 3721877 - DNA, 25 bp, Homo sapien
ttacagcttaatgtccgctaaattt

SEQ ID NO: 3721878 - DNA, 25 bp, Homo sapien
ggagattcttggctggctttccatg

SEQ ID NO: 3721879 - DNA, 25 bp, Homo sapien
tccacatccttgctatcacttgata

SEQ ID NO: 3721880 - DNA, 25 bp, Homo sapien
catatatatgattacctgctgggca

SEQ ID NO: 3721881 - DNA, 25 bp, Homo sapien
tacccttagggtatgaaagtctgag

SEQ ID NO: 3721882 - DNA, 25 bp, Homo sapien
aattgctggcaaatcagctcttgta

SEQ ID NO: 3721883 - DNA, 25 bp, Homo sapien
gcaatagcgtaagatcatcctggag

SEQ ID NO: 3721884 - DNA, 25 bp, Homo sapien
agccctttcttcacagccgcgttag

SEQ ID NO: 3721885 - DNA, 25 bp, Homo sapien
tggtggccccagaacaactaaggac

SEQ ID NO: 3721886 - DNA, 25 bp, Homo sapien
gacaaacacatagaagcaatagcgt

SEQ ID NO: 3721887 - DNA, 25 bp, Homo sapien
taagtttgtgaacagtgcaccatac

SEQ ID NO: 3721888 - DNA, 25 bp, Homo sapien
taaaccctcagttccactggagtag

SEQ ID NO: 3721889 - DNA, 25 bp, Homo sapien
ccacgcccggcgagatttaacattt

SEQ ID NO: 3721890 - DNA, 25 bp, Homo sapien
gaaattaggcccatagccacaattc

SEQ ID NO: 3721891 - DNA, 25 bp, Homo sapien
gacaggattagttccaagtcaccta

SEQ ID NO: 3721892 - DNA, 25 bp, Homo sapien
ccattgtagttcagtggaaaagcca

SEQ ID NO: 3721893 - DNA, 25 bp, Homo sapien
gcaattgtgtcccaatcaaccagca

SEQ ID NO: 3721894 - DNA, 25 bp, Homo sapien
tgtattcagactcgatctccatgtg

SEQ ID NO: 3721895 - DNA, 25 bp, Homo sapien
tgtgcccagctataaggtcttaata

SEQ ID NO: 3721896 - DNA, 25 bp, Homo sapien
catgtaggagtaggaagtcaataga

SEQ ID NO: 3721897 - DNA, 25 bp, Homo sapien
taatctaaataaccactgggcacgg

SEQ ID NO: 3721898 - DNA, 25 bp, Homo sapien
taagcaaaaaatcgtgtaccaagat

SEQ ID NO: 3721899 - DNA, 25 bp, Homo sapien
ccctgcaggagagctaggtcatgag

SEQ ID NO: 3721900 - DNA, 25 bp, Homo sapien
aatagatcattgaaatggctggctc

SEQ ID NO: 3721901 - DNA, 25 bp, Homo sapien
gaggtatcatgtcaaaggaagccac

SEQ ID NO: 3721902 - DNA, 25 bp, Homo sapien
taaactgccatgtacacagtctaag

SEQ ID NO: 3721903 - DNA, 25 bp, Homo sapien
gagacgaggtcctgctattatttcc

SEQ ID NO: 3721904 - DNA, 25 bp, Homo sapien
tatggtaatcacttgccactgctgt

SEQ ID NO: 3721905 - DNA, 25 bp, Homo sapien
gaagcagcagtaccctgaaaagtca

SEQ ID NO: 3721906 - DNA, 25 bp, Homo sapien
caaaagcgtcaaaaatagatggagc

SEQ ID NO: 3721907 - DNA, 25 bp, Homo sapien
gtttatcagcttcaaagttttccag

SEQ ID NO: 3721908 - DNA, 25 bp, Homo sapien
tcgtttatcagcttcaaagttttcc

SEQ ID NO: 3721909 - DNA, 25 bp, Homo sapien
ttatcagcttcaaagttttccagac

SEQ ID NO: 3721910 - DNA, 25 bp, Homo sapien
cttcgtttatcagcttcaaagtttt

SEQ ID NO: 3721911 - DNA, 25 bp, Homo sapien
cagaatgccatcattcacaagatgg

SEQ ID NO: 3721912 - DNA, 25 bp, Homo sapien
caagatggatcatgtataacagact

SEQ ID NO: 3721913 - DNA, 25 bp, Homo sapien
gaaagtgttaggtctcatatgctac

SEQ ID NO: 3721914 - DNA, 25 bp, Homo sapien
tatccagagacagacgacaaaagct

SEQ ID NO: 3721915 - DNA, 25 bp, Homo sapien
gaaaggataacgagatgtccccacc

SEQ ID NO: 3721916 - DNA, 25 bp, Homo sapien
tacgactgggcagggtgcttcactc

SEQ ID NO: 3721917 - DNA, 25 bp, Homo sapien
tggaagactgtcaacctcaaggcac

SEQ ID NO: 3721918 - DNA, 25 bp, Homo sapien
tattacctgcgccatgccaagtgct

SEQ ID NO: 3721919 - DNA, 25 bp, Homo sapien
atttttttttccaatatcattcagt

SEQ ID NO: 3721920 - DNA, 25 bp, Homo sapien
tgtgattcctccaacttcatttttt

SEQ ID NO: 3721921 - DNA, 25 bp, Homo sapien
tagagacaaaaggaagcagggtttc

SEQ ID NO: 3721922 - DNA, 25 bp, Homo sapien
aaaaacctagagaagaacgtgtgtg

SEQ ID NO: 3721923 - DNA, 25 bp, Homo sapien
gctgctcctcagattaacgctttaa

SEQ ID NO: 3721924 - DNA, 25 bp, Homo sapien
catgcaaatatagggagctgcctac

SEQ ID NO: 3721925 - DNA, 25 bp, Homo sapien
ggtcgaaggaatacattgggctcaa

SEQ ID NO: 3721926 - DNA, 25 bp, Homo sapien
tgagtgccagtccagtgatagggcc

SEQ ID NO: 3721927 - DNA, 25 bp, Homo sapien
ggtatcttcagagcgaatcacttcc

SEQ ID NO: 3721928 - DNA, 25 bp, Homo sapien
cataggacaggaacttgttgacaga

SEQ ID NO: 3721929 - DNA, 25 bp, Homo sapien
gctcaggatcctgaatgcatcagct

SEQ ID NO: 3721930 - DNA, 25 bp, Homo sapien
ggtacccaggattcctgctcaggat

SEQ ID NO: 3721931 - DNA, 25 bp, Homo sapien
cccaaattgagtgtcaagaccaact

SEQ ID NO: 3721932 - DNA, 25 bp, Homo sapien
catgggctgccaatcagggaaaatg

SEQ ID NO: 3721933 - DNA, 25 bp, Homo sapien
tcttgcaatgataagccagaagtct

SEQ ID NO: 3721934 - DNA, 25 bp, Homo sapien
gatgtgtgctaacatgccaggagaa

SEQ ID NO: 3721935 - DNA, 25 bp, Homo sapien
tcatgcagaaggaagccagtttcat

SEQ ID NO: 3721936 - DNA, 25 bp, Homo sapien
cacgtttctcccgatcagcacaaaa

SEQ ID NO: 3721937 - DNA, 25 bp, Homo sapien
agttgtcaccatcaagggtcttgcc

SEQ ID NO: 3721938 - DNA, 25 bp, Homo sapien
gaagctagaggtcagacaaccggca

SEQ ID NO: 3721939 - DNA, 25 bp, Homo sapien
gataaactaaacaggactggaggct

SEQ ID NO: 3721940 - DNA, 25 bp, Homo sapien
taatatgacgacgagcaagaatcct

SEQ ID NO: 3721941 - DNA, 25 bp, Homo sapien
ccacaaaacgagcatgggtgacagc

SEQ ID NO: 3721942 - DNA, 25 bp, Homo sapien
tggcaggatccgtgcccacaaaacg

SEQ ID NO: 3721943 - DNA, 25 bp, Homo sapien
tcaggacaacttcatcactggcagg

SEQ ID NO: 3721944 - DNA, 25 bp, Homo sapien
aacttcatcactggcaggatccgtg

SEQ ID NO: 3721945 - DNA, 25 bp, Homo sapien
ttcaaagcagatccggaagcaagac

SEQ ID NO: 3721946 - DNA, 25 bp, Homo sapien
gaagcaagactgcataatctcacac

SEQ ID NO: 3721947 - DNA, 25 bp, Homo sapien
gggttagcagcagagtccgtagaac

SEQ ID NO: 3721948 - DNA, 25 bp, Homo sapien
gattcattggttaggtgggcaccca

SEQ ID NO: 3721949 - DNA, 25 bp, Homo sapien
caccatgtctacgagagtgtgctct

SEQ ID NO: 3721950 - DNA, 25 bp, Homo sapien
tgctctgcggattttctcaataact

SEQ ID NO: 3721951 - DNA, 25 bp, Homo sapien
gcagctgcaccatgtctacgagagt

SEQ ID NO: 3721952 - DNA, 25 bp, Homo sapien
tctacgagagtgtgctctgcggatt

SEQ ID NO: 3721953 - DNA, 25 bp, Homo sapien
gctgtgtggaagcaggcagactcaa

SEQ ID NO: 3721954 - DNA, 25 bp, Homo sapien
cagccgggctgaagcaaacagcagc

SEQ ID NO: 3721955 - DNA, 25 bp, Homo sapien
tgtgtggaagcaggcagactcaaga

SEQ ID NO: 3721956 - DNA, 25 bp, Homo sapien
tgggcagccgggctgaagcaaacag

SEQ ID NO: 3721957 - DNA, 25 bp, Homo sapien
tggtccccacatagttcttgggttc

SEQ ID NO: 3721958 - DNA, 25 bp, Homo sapien
ccccacatagttcttgggttcttct

SEQ ID NO: 3721959 - DNA, 25 bp, Homo sapien
tgttggtccccacatagttcttggg

SEQ ID NO: 3721960 - DNA, 25 bp, Homo sapien
catgttggtccccacatagttcttg

SEQ ID NO: 3721961 - DNA, 25 bp, Homo sapien
tcttagggctgcaagcggaatcctc

SEQ ID NO: 3721962 - DNA, 25 bp, Homo sapien
tacagactagcacaagcaagagccc

SEQ ID NO: 3721963 - DNA, 25 bp, Homo sapien
gatttgggacatagcctctctaggc

SEQ ID NO: 3721964 - DNA, 25 bp, Homo sapien
taagcaaggttaccccaaggcactg

SEQ ID NO: 3721965 - DNA, 25 bp, Homo sapien
cactacttagctccagtttgttgag

SEQ ID NO: 3721966 - DNA, 25 bp, Homo sapien
gctttggtctgctccccactactta

SEQ ID NO: 3721967 - DNA, 25 bp, Homo sapien
tccagtttgttgaggagacatggag

SEQ ID NO: 3721968 - DNA, 25 bp, Homo sapien
cagggctttggtctgctccccacta

SEQ ID NO: 3721969 - DNA, 25 bp, Homo sapien
atgggacccaggtgttatatataaa

SEQ ID NO: 3721970 - DNA, 25 bp, Homo sapien
tatataaaaaataaacattgaaaga

SEQ ID NO: 3721971 - DNA, 25 bp, Homo sapien
tgggacccaggtgttatatataaaa

SEQ ID NO: 3721972 - DNA, 25 bp, Homo sapien
ctgtatgtccacaaccacaccttca

SEQ ID NO: 3721973 - DNA, 25 bp, Homo sapien
cacactcttgtgatggacagcccag

SEQ ID NO: 3721974 - DNA, 25 bp, Homo sapien
acaccttcagcatgcacactcttgt

SEQ ID NO: 3721975 - DNA, 25 bp, Homo sapien
gtatgtccacaaccacaccttcagc

SEQ ID NO: 3721976 - DNA, 25 bp, Homo sapien
tgccagttctcacgaatgcctcagc

SEQ ID NO: 3721977 - DNA, 25 bp, Homo sapien
tgtatgactctgtactccaaaggac

SEQ ID NO: 3721978 - DNA, 25 bp, Homo sapien
cctctcctaaggtctgaaggtgtgg

SEQ ID NO: 3721979 - DNA, 25 bp, Homo sapien
ggaattctacgccaccttatctgta

SEQ ID NO: 3721980 - DNA, 25 bp, Homo sapien
aatatatcctattgtccatggcctg

SEQ ID NO: 3721981 - DNA, 25 bp, Homo sapien
cctggattgggcaatggcaacactc

SEQ ID NO: 3721982 - DNA, 25 bp, Homo sapien
gaactcagtccctctacaaagtcat

SEQ ID NO: 3721983 - DNA, 25 bp, Homo sapien
gatagaccattcttggattggacca

SEQ ID NO: 3721984 - DNA, 25 bp, Homo sapien
aatgagactacctgtccctctggcc

SEQ ID NO: 3721985 - DNA, 25 bp, Homo sapien
ggatagaaggtcatgtcacgctgct

SEQ ID NO: 3721986 - DNA, 25 bp, Homo sapien
gatggtaaggccactgattccttga

SEQ ID NO: 3721987 - DNA, 25 bp, Homo sapien
gattggtcaaaagctcattccttgg

SEQ ID NO: 3721988 - DNA, 25 bp, Homo sapien
atgataaggtggttccattgggagt

SEQ ID NO: 3721989 - DNA, 25 bp, Homo sapien
tggatgaatcactcatgcctccggc

SEQ ID NO: 3721990 - DNA, 25 bp, Homo sapien
tgaggttagatgataaggtggttcc

SEQ ID NO: 3721991 - DNA, 25 bp, Homo sapien
ctggtgtgactttggtcatatggcg

SEQ ID NO: 3721992 - DNA, 25 bp, Homo sapien
tttgggaggagaattccaggccact

SEQ ID NO: 3721993 - DNA, 25 bp, Homo sapien
gctcgggaacacctagctcactgct

SEQ ID NO: 3721994 - DNA, 25 bp, Homo sapien
ccactgtctgtagagggactgacca

SEQ ID NO: 3721995 - DNA, 25 bp, Homo sapien
tagctgtgctgtaccctggagagcc

SEQ ID NO: 3721996 - DNA, 25 bp, Homo sapien
tccaagctgtctctaatgggctaca

SEQ ID NO: 3721997 - DNA, 25 bp, Homo sapien
gcaacttggaacttactcccctgaa

SEQ ID NO: 3721998 - DNA, 25 bp, Homo sapien
tcagtggtttatgaatcaccgcaag

SEQ ID NO: 3721999 - DNA, 25 bp, Homo sapien
gctacagatgtagggccaactcagt

SEQ ID NO: 3722000 - DNA, 25 bp, Homo sapien
gattgacgtaatccatgtcatggac

SEQ ID NO: 3722001 - DNA, 25 bp, Homo sapien
agatgctgactgggacttttccaca

SEQ ID NO: 3722002 - DNA, 25 bp, Homo sapien
gggacgtgcactcctctaacacttc

SEQ ID NO: 3722003 - DNA, 25 bp, Homo sapien
aggactgtgtaaagcgcacgccccg

SEQ ID NO: 3722004 - DNA, 25 bp, Homo sapien
cagcaaatgcagtcccatgtgaatc

SEQ ID NO: 3722005 - DNA, 25 bp, Homo sapien
gacggcacatctcatccttgatgag

SEQ ID NO: 3722006 - DNA, 25 bp, Homo sapien
taacctctgagttatggcggtcgtg

SEQ ID NO: 3722007 - DNA, 25 bp, Homo sapien
tacaggggctgactcaagggccact

SEQ ID NO: 3722008 - DNA, 25 bp, Homo sapien
ggaagcagcataaaggtttagtcgc

SEQ ID NO: 3722009 - DNA, 25 bp, Homo sapien
ggaacttgaggtgctctcgcatgct

SEQ ID NO: 3722010 - DNA, 25 bp, Homo sapien
tctcgcatgctctcaaacagtagga

SEQ ID NO: 3722011 - DNA, 25 bp, Homo sapien
taggaagcatactcgcagggaagca

SEQ ID NO: 3722012 - DNA, 25 bp, Homo sapien
ccttttctttccacatcaagaaact

SEQ ID NO: 3722013 - DNA, 25 bp, Homo sapien
tcccccttttctttccacatcaaga

SEQ ID NO: 3722014 - DNA, 25 bp, Homo sapien
ttttctttccacatcaagaaactca

SEQ ID NO: 3722015 - DNA, 25 bp, Homo sapien
tttctttccacatcaagaaactcac

SEQ ID NO: 3722016 - DNA, 25 bp, Homo sapien
ctggcagttctcatatttggggtca

SEQ ID NO: 3722017 - DNA, 25 bp, Homo sapien
tggcagttctcatatttggggtcag

SEQ ID NO: 3722018 - DNA, 25 bp, Homo sapien
caatcatagttgatgtagagctctg

SEQ ID NO: 3722019 - DNA, 25 bp, Homo sapien
ccttcatctcataaggcatcttggg

SEQ ID NO: 3722020 - DNA, 25 bp, Homo sapien
gatgcgccagagctgcacaatggcc

SEQ ID NO: 3722021 - DNA, 25 bp, Homo sapien
tcctcaaagaggttggaacagtagt

SEQ ID NO: 3722022 - DNA, 25 bp, Homo sapien
tgttgtatagagttgaccagacaca

SEQ ID NO: 3722023 - DNA, 25 bp, Homo sapien
caatagggcatcaagagatagtagg

SEQ ID NO: 3722024 - DNA, 25 bp, Homo sapien
gctgtcaatcactgtcaatagggca

SEQ ID NO: 3722025 - DNA, 25 bp, Homo sapien
ttgaggactttagcctggcagtggg

SEQ ID NO: 3722026 - DNA, 25 bp, Homo sapien
tattgctagcttctcgggtgccatc

SEQ ID NO: 3722027 - DNA, 25 bp, Homo sapien
ttgctagcttctcgggtgccatcta

SEQ ID NO: 3722028 - DNA, 25 bp, Homo sapien
tgctagcttctcgggtgccatctac

SEQ ID NO: 3722029 - DNA, 25 bp, Homo sapien
attgctagcttctcgggtgccatct

SEQ ID NO: 3722030 - DNA, 25 bp, Homo sapien
tttcccatgttctggtggcagccgc

SEQ ID NO: 3722031 - DNA, 25 bp, Homo sapien
tttcccatcgctggcagttctctca

SEQ ID NO: 3722032 - DNA, 25 bp, Homo sapien
gtctgaggccatgcctacagctttc

SEQ ID NO: 3722033 - DNA, 25 bp, Homo sapien
tgatttcccatgttctggtggcagc

SEQ ID NO: 3722034 - DNA, 25 bp, Homo sapien
ggtgaggagcttagggtcatggaca

SEQ ID NO: 3722035 - DNA, 25 bp, Homo sapien
ctccaggtgaggagcttagggtcat

SEQ ID NO: 3722036 - DNA, 25 bp, Homo sapien
tgaggagcttagggtcatggacacc

SEQ ID NO: 3722037 - DNA, 25 bp, Homo sapien
gtgaggagcttagggtcatggacac

SEQ ID NO: 3722038 - DNA, 25 bp, Homo sapien
tggcttccgggcaaactttttgtca

SEQ ID NO: 3722039 - DNA, 25 bp, Homo sapien
ttagttcccgtggatctggcaggag

SEQ ID NO: 3722040 - DNA, 25 bp, Homo sapien
caattagttcccgtggatctggcag

SEQ ID NO: 3722041 - DNA, 25 bp, Homo sapien
taatttcaattagttcccgtggatc

SEQ ID NO: 3722042 - DNA, 25 bp, Homo sapien
caggtcaatgtttttgcggtcactc

SEQ ID NO: 3722043 - DNA, 25 bp, Homo sapien
agggttctctcggagccactgagca

SEQ ID NO: 3722044 - DNA, 25 bp, Homo sapien
tcttcttgtccagccgagggttctc

SEQ ID NO: 3722045 - DNA, 25 bp, Homo sapien
tttctgattgaactgctctgtgcca

SEQ ID NO: 3722046 - DNA, 25 bp, Homo sapien
cgtccagtcgcagaccctgaaaact

SEQ ID NO: 3722047 - DNA, 25 bp, Homo sapien
caggcaaacggaaggcttccaggta

SEQ ID NO: 3722048 - DNA, 25 bp, Homo sapien
gtgaatgcctccagcaacctctgga

SEQ ID NO: 3722049 - DNA, 25 bp, Homo sapien
tctggatgactggtgcttccccagg

SEQ ID NO: 3722050 - DNA, 25 bp, Homo sapien
catgggtgcattctgtttacgaaca

SEQ ID NO: 3722051 - DNA, 25 bp, Homo sapien
gcaggcatcgctattggcaaatggg

SEQ ID NO: 3722052 - DNA, 25 bp, Homo sapien
cgaacattgtggttgtgctggtcag

SEQ ID NO: 3722053 - DNA, 25 bp, Homo sapien
catgatgacagcataggccagggaa

SEQ ID NO: 3722054 - DNA, 25 bp, Homo sapien
gatggcatggtacatgtcctccagg

SEQ ID NO: 3722055 - DNA, 25 bp, Homo sapien
ccttgcctccattcacacctttcag

SEQ ID NO: 3722056 - DNA, 25 bp, Homo sapien
cctccaggatgtcttgctcaaagtc

SEQ ID NO: 3722057 - DNA, 25 bp, Homo sapien
cacctttcagatttttgcgaaactc

SEQ ID NO: 3722058 - DNA, 25 bp, Homo sapien
ggtggcacctcgatgaagcagcaca

SEQ ID NO: 3722059 - DNA, 25 bp, Homo sapien
tctggatgattgtctcctcaaggct

SEQ ID NO: 3722060 - DNA, 25 bp, Homo sapien
catagttctcccgaaccaagcctgt

SEQ ID NO: 3722061 - DNA, 25 bp, Homo sapien
tcaagatcatagctggcagtaggca

SEQ ID NO: 3722062 - DNA, 25 bp, Homo sapien
gtgggcggagatcatggcgcacttc

SEQ ID NO: 3722063 - DNA, 25 bp, Homo sapien
ccatagtgggcggagatcatggcgc

SEQ ID NO: 3722064 - DNA, 25 bp, Homo sapien
ctgaggccatagtgggcggagatca

SEQ ID NO: 3722065 - DNA, 25 bp, Homo sapien
tgaggccatagtgggcggagatcat

SEQ ID NO: 3722066 - DNA, 25 bp, Homo sapien
gagatgatgagattgtcaaacacat

SEQ ID NO: 3722067 - DNA, 25 bp, Homo sapien
gctgtgaatttgcatagagagatga

SEQ ID NO: 3722068 - DNA, 25 bp, Homo sapien
agagctgtgaatttgcatagagaga

SEQ ID NO: 3722069 - DNA, 25 bp, Homo sapien
ctgtgaatttgcatagagagatgat

SEQ ID NO: 3722070 - DNA, 25 bp, Homo sapien
caggatgtcaccatgacgatgggcc

SEQ ID NO: 3722071 - DNA, 25 bp, Homo sapien
atacactgggcaggttctcaataga

SEQ ID NO: 3722072 - DNA, 25 bp, Homo sapien
ggctttagggttgcttccaaataca

SEQ ID NO: 3722073 - DNA, 25 bp, Homo sapien
aatggaatactgtcttggctgcaat

SEQ ID NO: 3722074 - DNA, 25 bp, Homo sapien
gatggtgtctcttcccgctgtagag

SEQ ID NO: 3722075 - DNA, 25 bp, Homo sapien
tgatggtgtctcttcccgctgtaga

SEQ ID NO: 3722076 - DNA, 25 bp, Homo sapien
tgtctcttcccgctgtagagagatc

SEQ ID NO: 3722077 - DNA, 25 bp, Homo sapien
cttcccgctgtagagagatcttgcc

SEQ ID NO: 3722078 - DNA, 25 bp, Homo sapien
gttagccagctcacaaagctcagca

SEQ ID NO: 3722079 - DNA, 25 bp, Homo sapien
ctttatacactctaaggccactctc

SEQ ID NO: 3722080 - DNA, 25 bp, Homo sapien
atgggccccgaacactagactgctc

SEQ ID NO: 3722081 - DNA, 25 bp, Homo sapien
tcaggaccactcagtgttagccagc

SEQ ID NO: 3722082 - DNA, 25 bp, Homo sapien
tctgtgatcattttttctgggtcac

SEQ ID NO: 3722083 - DNA, 25 bp, Homo sapien
gaggaacttgctttctgtgatcatt

SEQ ID NO: 3722084 - DNA, 25 bp, Homo sapien
tagtgactccagctggaggaacttg

SEQ ID NO: 3722085 - DNA, 25 bp, Homo sapien
cttcatgagctcctgtagtgactcc

SEQ ID NO: 3722086 - DNA, 25 bp, Homo sapien
atcttcctcatcatatgtctcttca

SEQ ID NO: 3722087 - DNA, 25 bp, Homo sapien
catctggtgtcactgagaccagagc

SEQ ID NO: 3722088 - DNA, 25 bp, Homo sapien
acaatccttagcagcatctctaggc

SEQ ID NO: 3722089 - DNA, 25 bp, Homo sapien
gcagcatctctaggcagaaagcagc

SEQ ID NO: 3722090 - DNA, 25 bp, Homo sapien
tgagcactgatctcttctctccgga

SEQ ID NO: 3722091 - DNA, 25 bp, Homo sapien
gtctcgaacagtctgccacacacag

SEQ ID NO: 3722092 - DNA, 25 bp, Homo sapien
ggtatagatggtctcgaacagtctg

SEQ ID NO: 3722093 - DNA, 25 bp, Homo sapien
aagccgaatggccaggcgtagcaac

SEQ ID NO: 3722094 - DNA, 25 bp, Homo sapien
tccagacagtgttgaggcaagagac

SEQ ID NO: 3722095 - DNA, 25 bp, Homo sapien
tttgcttagctctagatcctgaaga

SEQ ID NO: 3722096 - DNA, 25 bp, Homo sapien
aaatatttcctcctcgtctacagct

SEQ ID NO: 3722097 - DNA, 25 bp, Homo sapien
gaaaaggctattcctcctccactga

SEQ ID NO: 3722098 - DNA, 25 bp, Homo sapien
ctgcacccagcctcaaatacaaatt

SEQ ID NO: 3722099 - DNA, 25 bp, Homo sapien
cagcctcaaatacaaatttttattg

SEQ ID NO: 3722100 - DNA, 25 bp, Homo sapien
cacccagcctcaaatacaaattttt

SEQ ID NO: 3722101 - DNA, 25 bp, Homo sapien
ccagcctcaaatacaaatttttatt

SEQ ID NO: 3722102 - DNA, 25 bp, Homo sapien
ttcatggagcccatacgcaacctgg

SEQ ID NO: 3722103 - DNA, 25 bp, Homo sapien
tgactcgggatagcacactgggctt

SEQ ID NO: 3722104 - DNA, 25 bp, Homo sapien
cagtagcaaaatgcgcagggagagc

SEQ ID NO: 3722105 - DNA, 25 bp, Homo sapien
gagccgatgcactccagcagtgtga

SEQ ID NO: 3722106 - DNA, 25 bp, Homo sapien
tagacctctgagtcggaagtgtacc

SEQ ID NO: 3722107 - DNA, 25 bp, Homo sapien
gaagtgtaccctcgatccaggctca

SEQ ID NO: 3722108 - DNA, 25 bp, Homo sapien
taggatgggagctcactatctgact

SEQ ID NO: 3722109 - DNA, 25 bp, Homo sapien
tgatcggtgtatcttgcccggcctg

SEQ ID NO: 3722110 - DNA, 25 bp, Homo sapien
aattgctgcccatattgtcactcac

SEQ ID NO: 3722111 - DNA, 25 bp, Homo sapien
caattgctgcccatattgtcactca

SEQ ID NO: 3722112 - DNA, 25 bp, Homo sapien
tcaattgctgcccatattgtcactc

SEQ ID NO: 3722113 - DNA, 25 bp, Homo sapien
ctcaattgctgcccatattgtcact

SEQ ID NO: 3722114 - DNA, 25 bp, Homo sapien
ttggcccctgtgtgaatgtccttgc

SEQ ID NO: 3722115 - DNA, 25 bp, Homo sapien
aatgtccttgcagaggaccaggaat

SEQ ID NO: 3722116 - DNA, 25 bp, Homo sapien
ctgtaaagtacacagaggagctggg

SEQ ID NO: 3722117 - DNA, 25 bp, Homo sapien
gggacacaggcttggcccctgtgtg

SEQ ID NO: 3722118 - DNA, 25 bp, Homo sapien
aatccagtcccactgttaggctgta

SEQ ID NO: 3722119 - DNA, 25 bp, Homo sapien
tccggagagtcttgacgcagagctc

SEQ ID NO: 3722120 - DNA, 25 bp, Homo sapien
agagacttagtgtcgtgtggcccca

SEQ ID NO: 3722121 - DNA, 25 bp, Homo sapien
caatgaaggacagcgattccacaca

SEQ ID NO: 3722122 - DNA, 25 bp, Homo sapien
tttgtgactcttgccacgtttctcc

SEQ ID NO: 3722123 - DNA, 25 bp, Homo sapien
cttcttgaagcggttccctttgctg

SEQ ID NO: 3722124 - DNA, 25 bp, Homo sapien
taaagacaccgtatggtagctggca

SEQ ID NO: 3722125 - DNA, 25 bp, Homo sapien
ttcgaggccggcgaagcattgatcc

SEQ ID NO: 3722126 - DNA, 25 bp, Homo sapien
ctaggatcacaggagggggcaggat

SEQ ID NO: 3722127 - DNA, 25 bp, Homo sapien
acaggagggggcaggatgtgagtgg

SEQ ID NO: 3722128 - DNA, 25 bp, Homo sapien
tcacaggagggggcaggatgtgagt

SEQ ID NO: 3722129 - DNA, 25 bp, Homo sapien
gatcacaggagggggcaggatgtga

SEQ ID NO: 3722130 - DNA, 25 bp, Homo sapien
cctccgcccatgagctgtagataga

SEQ ID NO: 3722131 - DNA, 25 bp, Homo sapien
ccagagggtgcgagaatcagcttca

SEQ ID NO: 3722132 - DNA, 25 bp, Homo sapien
gcagggtgtgcatcaggtctagcaa

SEQ ID NO: 3722133 - DNA, 25 bp, Homo sapien
tagatagaggctgcccgcgtgtgca

SEQ ID NO: 3722134 - DNA, 25 bp, Homo sapien
caggcatcttgatcctgatgctccc

SEQ ID NO: 3722135 - DNA, 25 bp, Homo sapien
ccttcaggcatcttgatcctgatgc

SEQ ID NO: 3722136 - DNA, 25 bp, Homo sapien
ggatccttcaggcatcttgatcctg

SEQ ID NO: 3722137 - DNA, 25 bp, Homo sapien
gctccccaaactccctacctctgcc

SEQ ID NO: 3722138 - DNA, 25 bp, Homo sapien
ttccagggcatctagcttttgcaga

SEQ ID NO: 3722139 - DNA, 25 bp, Homo sapien
aaaacaggactcccattccagggca

SEQ ID NO: 3722140 - DNA, 25 bp, Homo sapien
ttttgcagatcatgtacaagtagtg

SEQ ID NO: 3722141 - DNA, 25 bp, Homo sapien
tgctcgctgcagataggtcagtgcc

SEQ ID NO: 3722142 - DNA, 25 bp, Homo sapien
ttcaggctgcctggctttccttttc

SEQ ID NO: 3722143 - DNA, 25 bp, Homo sapien
ggctgaagactcacattaggggctc

SEQ ID NO: 3722144 - DNA, 25 bp, Homo sapien
ccaggaactggatgggcatagagct

SEQ ID NO: 3722145 - DNA, 25 bp, Homo sapien
tgaactttatcttaagaccagtagg

SEQ ID NO: 3722146 - DNA, 25 bp, Homo sapien
agcaatgtggaagccctcatccggg

SEQ ID NO: 3722147 - DNA, 25 bp, Homo sapien
gcaatgtggaagccctcatccgggt

SEQ ID NO: 3722148 - DNA, 25 bp, Homo sapien
gagcctgcgtgcatgtacttgtcca

SEQ ID NO: 3722149 - DNA, 25 bp, Homo sapien
gcagtggagacaggtgctgcaggaa

SEQ ID NO: 3722150 - DNA, 25 bp, Homo sapien
ccagagggccgcaaaggtagagagt

SEQ ID NO: 3722151 - DNA, 25 bp, Homo sapien
cgcaaaggtagagagtgacagcagt

SEQ ID NO: 3722152 - DNA, 25 bp, Homo sapien
ctgcaggtggcagtgggaccatgag

SEQ ID NO: 3722153 - DNA, 25 bp, Homo sapien
gaaaacagtcaatgcgttcccaggt

SEQ ID NO: 3722154 - DNA, 25 bp, Homo sapien
tgcactgtggaaaatctccgctgtg

SEQ ID NO: 3722155 - DNA, 25 bp, Homo sapien
ttcttcagagactcagggatcgcct

SEQ ID NO: 3722156 - DNA, 25 bp, Homo sapien
gatgacggtctgcttgaagagttca

SEQ ID NO: 3722157 - DNA, 25 bp, Homo sapien
gctgaggcgagaggcttttggcctt

SEQ ID NO: 3722158 - DNA, 25 bp, Homo sapien
atggccaggtgtcctagtgtcgcca

SEQ ID NO: 3722159 - DNA, 25 bp, Homo sapien
tcctagtgtcgccagcagcggaagt

SEQ ID NO: 3722160 - DNA, 25 bp, Homo sapien
aggtgtcctagtgtcgccagcagcg

SEQ ID NO: 3722161 - DNA, 25 bp, Homo sapien
agtcataggtggcacgcccacctgc

SEQ ID NO: 3722162 - DNA, 25 bp, Homo sapien
gtgaggtggcctcgatgagcgcagg

SEQ ID NO: 3722163 - DNA, 25 bp, Homo sapien
tggcctcgatgagcgcagggttgag

SEQ ID NO: 3722164 - DNA, 25 bp, Homo sapien
gcggctcgggggctctcgggcttct

SEQ ID NO: 3722165 - DNA, 25 bp, Homo sapien
ggaaaaaggtcccacagctgattgg

SEQ ID NO: 3722166 - DNA, 25 bp, Homo sapien
gatgacagctgagttcactctcagg

SEQ ID NO: 3722167 - DNA, 25 bp, Homo sapien
gaagcactggtcctgatctctgagt

SEQ ID NO: 3722168 - DNA, 25 bp, Homo sapien
ttagttttcaatgcctgaccgtggg

SEQ ID NO: 3722169 - DNA, 25 bp, Homo sapien
tggcggcggctctggttgcggcttc

SEQ ID NO: 3722170 - DNA, 25 bp, Homo sapien
tctccgcgcccgacccacctgggac

SEQ ID NO: 3722171 - DNA, 25 bp, Homo sapien
gggaccggtcgcgacacctcgcctg

SEQ ID NO: 3722172 - DNA, 25 bp, Homo sapien
tctggttgcggcttctctccgcgcc

SEQ ID NO: 3722173 - DNA, 25 bp, Homo sapien
ggcgctgtccgctaaaggccctcct

SEQ ID NO: 3722174 - DNA, 25 bp, Homo sapien
cgtggatccgagtgtcgtcgcctgc

SEQ ID NO: 3722175 - DNA, 25 bp, Homo sapien
gtccgcgtatctttgtacaacggtg

SEQ ID NO: 3722176 - DNA, 25 bp, Homo sapien
gccctttccggctgtgtgcagctgc

SEQ ID NO: 3722177 - DNA, 25 bp, Homo sapien
cgggcctggaaatgacgccactggc

SEQ ID NO: 3722178 - DNA, 25 bp, Homo sapien
gcagcttaggaaagtcccgaaaata

SEQ ID NO: 3722179 - DNA, 25 bp, Homo sapien
tgagatccggtggagagcgagatcc

SEQ ID NO: 3722180 - DNA, 25 bp, Homo sapien
cctgtccgggtgtggcgggtgagat

SEQ ID NO: 3722181 - DNA, 25 bp, Homo sapien
agttgggaggagtggcgtgggggag

SEQ ID NO: 3722182 - DNA, 25 bp, Homo sapien
agggggtcagatctaaatgggggtg

SEQ ID NO: 3722183 - DNA, 25 bp, Homo sapien
gctctgtctagtggctccggccagg

SEQ ID NO: 3722184 - DNA, 25 bp, Homo sapien
gcttcccagaattttagacgcccgc

SEQ ID NO: 3722185 - DNA, 25 bp, Homo sapien
ctgcttcccagaattttagacgccc

SEQ ID NO: 3722186 - DNA, 25 bp, Homo sapien
gctaggcccggctctgtctagtggc

SEQ ID NO: 3722187 - DNA, 25 bp, Homo sapien
tccttgggttccacaatggaggagt

SEQ ID NO: 3722188 - DNA, 25 bp, Homo sapien
catcatattcaataataccatccag

SEQ ID NO: 3722189 - DNA, 25 bp, Homo sapien
ccacaatggaggagttcaatttgaa

SEQ ID NO: 3722190 - DNA, 25 bp, Homo sapien
gttcaatttgaaatcatcatattca

SEQ ID NO: 3722191 - DNA, 25 bp, Homo sapien
gggacagagagaccttgctgagcca

SEQ ID NO: 3722192 - DNA, 25 bp, Homo sapien
gagagaccttgctgagccacgatct

SEQ ID NO: 3722193 - DNA, 25 bp, Homo sapien
ttgctgagccacgatctcccagccc

SEQ ID NO: 3722194 - DNA, 25 bp, Homo sapien
accttgctgagccacgatctcccag

SEQ ID NO: 3722195 - DNA, 25 bp, Homo sapien
gctgttccacgatcaccaggtaggg

SEQ ID NO: 3722196 - DNA, 25 bp, Homo sapien
tgttccacgatcaccaggtaggggc

SEQ ID NO: 3722197 - DNA, 25 bp, Homo sapien
aggctgttccacgatcaccaggtag

SEQ ID NO: 3722198 - DNA, 25 bp, Homo sapien
gttccacgatcaccaggtaggggcc

SEQ ID NO: 3722199 - DNA, 25 bp, Homo sapien
agtgaccgcagtgcctggtagtagc

SEQ ID NO: 3722200 - DNA, 25 bp, Homo sapien
cagcagtgaccgcagtgcctggtag

SEQ ID NO: 3722201 - DNA, 25 bp, Homo sapien
agggcatagtagcattgtgatcagg

SEQ ID NO: 3722202 - DNA, 25 bp, Homo sapien
aaggtccaagggcatagtagcattg

SEQ ID NO: 3722203 - DNA, 25 bp, Homo sapien
cttgacagtgggataggtctttcgg

SEQ ID NO: 3722204 - DNA, 25 bp, Homo sapien
agccatatcgaaatcggaagcctct

SEQ ID NO: 3722205 - DNA, 25 bp, Homo sapien
ggataggtctttcggcccttctcac

SEQ ID NO: 3722206 - DNA, 25 bp, Homo sapien
ggccttcacagccatatcgaaatcg

SEQ ID NO: 3722207 - DNA, 25 bp, Homo sapien
acagaaacggcgcagatccccagct

SEQ ID NO: 3722208 - DNA, 25 bp, Homo sapien
caggtccacctcgatcttggctggt

SEQ ID NO: 3722209 - DNA, 25 bp, Homo sapien
cgagcattgcttgcccaccagactg

SEQ ID NO: 3722210 - DNA, 25 bp, Homo sapien
ttggctggtccctcgtagttacaga

SEQ ID NO: 3722211 - DNA, 25 bp, Homo sapien
ttgtatcatagtccccatcatgttc

SEQ ID NO: 3722212 - DNA, 25 bp, Homo sapien
aagtttttgtatcatagtccccatc

SEQ ID NO: 3722213 - DNA, 25 bp, Homo sapien
acatgcaggacacccaggttgttaa

SEQ ID NO: 3722214 - DNA, 25 bp, Homo sapien
tagtcacatgcaggacacccaggtt

SEQ ID NO: 3722215 - DNA, 25 bp, Homo sapien
aggccctggggcctagagcggagcc

SEQ ID NO: 3722216 - DNA, 25 bp, Homo sapien
ccctggggcctagagcggagccgct

SEQ ID NO: 3722217 - DNA, 25 bp, Homo sapien
ccgtaaggccctggggcctagagcg

SEQ ID NO: 3722218 - DNA, 25 bp, Homo sapien
taaggccctggggcctagagcggag

SEQ ID NO: 3722219 - DNA, 25 bp, Homo sapien
aagcgcagccgcactatactcagat

SEQ ID NO: 3722220 - DNA, 25 bp, Homo sapien
catcactggctctaaggaaggcaga

SEQ ID NO: 3722221 - DNA, 25 bp, Homo sapien
agccgcactatactcagatccatca

SEQ ID NO: 3722222 - DNA, 25 bp, Homo sapien
gccatcactggctctaaggaaggca

SEQ ID NO: 3722223 - DNA, 25 bp, Homo sapien
ttcaggtttgatgcccccggagatt

SEQ ID NO: 3722224 - DNA, 25 bp, Homo sapien
gagaaatcttcaggtttgatgcccc

SEQ ID NO: 3722225 - DNA, 25 bp, Homo sapien
tgtcttgtccattcgagaaatcttc

SEQ ID NO: 3722226 - DNA, 25 bp, Homo sapien
ctgcaccttgtcacaaagcagataa

SEQ ID NO: 3722227 - DNA, 25 bp, Homo sapien
tcatcatcctcatagaaccgaacct

SEQ ID NO: 3722228 - DNA, 25 bp, Homo sapien
aaggcctgccatccattctcatcat

SEQ ID NO: 3722229 - DNA, 25 bp, Homo sapien
aaaggcctgccatccattctcatca

SEQ ID NO: 3722230 - DNA, 25 bp, Homo sapien
atcctcatagaaccgaacctcaatg

SEQ ID NO: 3722231 - DNA, 25 bp, Homo sapien
gtcagtgagtccttagcctaattta

SEQ ID NO: 3722232 - DNA, 25 bp, Homo sapien
gggtgtcagtgagtccttagcctaa

SEQ ID NO: 3722233 - DNA, 25 bp, Homo sapien
tgagtccttagcctaatttagcccc

SEQ ID NO: 3722234 - DNA, 25 bp, Homo sapien
acagggtgtcagtgagtccttagcc

SEQ ID NO: 3722235 - DNA, 25 bp, Homo sapien
gtttggaatcagacacgtcccctcc

SEQ ID NO: 3722236 - DNA, 25 bp, Homo sapien
tacaggccgctcaatcttcatcttg

SEQ ID NO: 3722237 - DNA, 25 bp, Homo sapien
tccaccagagggtaataggtgaact

SEQ ID NO: 3722238 - DNA, 25 bp, Homo sapien
cctcgcttgcgtttcagttgcagaa

SEQ ID NO: 3722239 - DNA, 25 bp, Homo sapien
cctccgcttccgctgcacctcttcc

SEQ ID NO: 3722240 - DNA, 25 bp, Homo sapien
ttcctccgcttccgctgcacctctt

SEQ ID NO: 3722241 - DNA, 25 bp, Homo sapien
cttcctccgcttccgctgcacctct

SEQ ID NO: 3722242 - DNA, 25 bp, Homo sapien
tcctccgcttccgctgcacctcttc

SEQ ID NO: 3722243 - DNA, 25 bp, Homo sapien
aacctcttgtctcccagggttcaag

SEQ ID NO: 3722244 - DNA, 25 bp, Homo sapien
ccctccctccatcagtaccccctca

SEQ ID NO: 3722245 - DNA, 25 bp, Homo sapien
cctccacagcttctcttacctttac

SEQ ID NO: 3722246 - DNA, 25 bp, Homo sapien
cacagcttctcttacctttacccct

SEQ ID NO: 3722247 - DNA, 25 bp, Homo sapien
ggaggggaagaaaccgaggctgcca

SEQ ID NO: 3722248 - DNA, 25 bp, Homo sapien
cctgcggctcgcactggggggtcct

SEQ ID NO: 3722249 - DNA, 25 bp, Homo sapien
cgcctcccgggtagcagcccatggg

SEQ ID NO: 3722250 - DNA, 25 bp, Homo sapien
ggggcgcttggctccgcggcttcct

SEQ ID NO: 3722251 - DNA, 25 bp, Homo sapien
gccaggccgaacaggcgcgcgttgt

SEQ ID NO: 3722252 - DNA, 25 bp, Homo sapien
gtgtctccgttctcgtcctgcgccg

SEQ ID NO: 3722253 - DNA, 25 bp, Homo sapien
cgtagtcgagtagggctcgggcgct

SEQ ID NO: 3722254 - DNA, 25 bp, Homo sapien
tccgcggtgacgccgtagtcgagta

SEQ ID NO: 3722255 - DNA, 25 bp, Homo sapien
gcctgcacttaacgtttcgcagcac

SEQ ID NO: 3722256 - DNA, 25 bp, Homo sapien
ccagggcatcgctgtgcctgcactt

SEQ ID NO: 3722257 - DNA, 25 bp, Homo sapien
gggcccatggaacccagcacgtggc

SEQ ID NO: 3722258 - DNA, 25 bp, Homo sapien
tagtctccctcgctggggcccatgg

SEQ ID NO: 3722259 - DNA, 25 bp, Homo sapien
tgctcaatgacactggtctgcccgt

SEQ ID NO: 3722260 - DNA, 25 bp, Homo sapien
gttggtgaggttgacaacgccgagg

SEQ ID NO: 3722261 - DNA, 25 bp, Homo sapien
atgacactggtctgcccgtggatga

SEQ ID NO: 3722262 - DNA, 25 bp, Homo sapien
ttgacaacgccgaggtcctgggcgt

SEQ ID NO: 3722263 - DNA, 25 bp, Homo sapien
catgccgatccagcagagctgggtc

SEQ ID NO: 3722264 - DNA, 25 bp, Homo sapien
gcccgcagcgccagatgcatggctg

SEQ ID NO: 3722265 - DNA, 25 bp, Homo sapien
tctgaagcagtgcacgcagcagctc

SEQ ID NO: 3722266 - DNA, 25 bp, Homo sapien
ggtctgcacctacccgcagcagaaa

SEQ ID NO: 3722267 - DNA, 25 bp, Homo sapien
gacccttaaggcagcccctggacca

SEQ ID NO: 3722268 - DNA, 25 bp, Homo sapien
ctgtgacccttaaggcagcccctgg

SEQ ID NO: 3722269 - DNA, 25 bp, Homo sapien
cagctgtgacccttaaggcagcccc

SEQ ID NO: 3722270 - DNA, 25 bp, Homo sapien
gtgacccttaaggcagcccctggac

SEQ ID NO: 3722271 - DNA, 25 bp, Homo sapien
ggctagatgcaaggctgttcgtccc

SEQ ID NO: 3722272 - DNA, 25 bp, Homo sapien
cttcgggctcggactgccaggtgta

SEQ ID NO: 3722273 - DNA, 25 bp, Homo sapien
cggactgccaggtgtactggataca

SEQ ID NO: 3722274 - DNA, 25 bp, Homo sapien
atctctgtggctagatgcaaggctg

SEQ ID NO: 3722275 - DNA, 25 bp, Homo sapien
tgcgagcgttcacgttggcccggag

SEQ ID NO: 3722276 - DNA, 25 bp, Homo sapien
tgtgtttcccgcaaaggtgcgagcg

SEQ ID NO: 3722277 - DNA, 25 bp, Homo sapien
ccgcaaaggtgcgagcgttcacgtt

SEQ ID NO: 3722278 - DNA, 25 bp, Homo sapien
tgagggtcgggtaccccagtccagc

SEQ ID NO: 3722279 - DNA, 25 bp, Homo sapien
gttcaagtgcccctgagggtgagac

SEQ ID NO: 3722280 - DNA, 25 bp, Homo sapien
gggcctacattaaggactgcaaagt

SEQ ID NO: 3722281 - DNA, 25 bp, Homo sapien
atggtgggggcctacattaaggact

SEQ ID NO: 3722282 - DNA, 25 bp, Homo sapien
ctacattaaggactgcaaagtcggg

SEQ ID NO: 3722283 - DNA, 25 bp, Homo sapien
ctcgttttcagcatggatgtcagca

SEQ ID NO: 3722284 - DNA, 25 bp, Homo sapien
cctcgttttcagcatggatgtcagc

SEQ ID NO: 3722285 - DNA, 25 bp, Homo sapien
tcgttttcagcatggatgtcagcac

SEQ ID NO: 3722286 - DNA, 25 bp, Homo sapien
caagaggcgtgtggccccggaagct

SEQ ID NO: 3722287 - DNA, 25 bp, Homo sapien
aggtcaagaggcgtgtggccccgga

SEQ ID NO: 3722288 - DNA, 25 bp, Homo sapien
gtcaagaggcgtgtggccccggaag

SEQ ID NO: 3722289 - DNA, 25 bp, Homo sapien
ggtgctgcaagtgaggtcaagaggc

SEQ ID NO: 3722290 - DNA, 25 bp, Homo sapien
tgagcagcatttagcagcaaggtct

SEQ ID NO: 3722291 - DNA, 25 bp, Homo sapien
tctgagcagcatttagcagcaaggt

SEQ ID NO: 3722292 - DNA, 25 bp, Homo sapien
ctccatggtgttctgagcagcattt

SEQ ID NO: 3722293 - DNA, 25 bp, Homo sapien
gtgttctgagcagcatttagcagca

SEQ ID NO: 3722294 - DNA, 25 bp, Homo sapien
ttctcccaaggtaagcgacagacag

SEQ ID NO: 3722295 - DNA, 25 bp, Homo sapien
cccaaggtaagcgacagacaggacc

SEQ ID NO: 3722296 - DNA, 25 bp, Homo sapien
ggtggggacatggacacctgaacac

SEQ ID NO: 3722297 - DNA, 25 bp, Homo sapien
caaggtaagcgacagacaggaccat

SEQ ID NO: 3722298 - DNA, 25 bp, Homo sapien
ctgtatcaccaagtgacagtcccgg

SEQ ID NO: 3722299 - DNA, 25 bp, Homo sapien
tgtcggtacgtgtctaccaggctgc

SEQ ID NO: 3722300 - DNA, 25 bp, Homo sapien
cactgggtgaggttgtctgtcggta

SEQ ID NO: 3722301 - DNA, 25 bp, Homo sapien
agagctgtatcaccaagtgacagtc

SEQ ID NO: 3722302 - DNA, 25 bp, Homo sapien
gtcagacagggcctccagtagacct

SEQ ID NO: 3722303 - DNA, 25 bp, Homo sapien
atgtcagacagggcctccagtagac

SEQ ID NO: 3722304 - DNA, 25 bp, Homo sapien
tcagacagggcctccagtagacctg

SEQ ID NO: 3722305 - DNA, 25 bp, Homo sapien
cctccagtagacctgccaggtcccc

SEQ ID NO: 3722306 - DNA, 25 bp, Homo sapien
tgtctcgggtttctggacccctcag

SEQ ID NO: 3722307 - DNA, 25 bp, Homo sapien
ttgtctcgggtttctggacccctca

SEQ ID NO: 3722308 - DNA, 25 bp, Homo sapien
cagcttgtctcgggtttctggaccc

SEQ ID NO: 3722309 - DNA, 25 bp, Homo sapien
ggctgggggtgcccgtggcagagcc

SEQ ID NO: 3722310 - DNA, 25 bp, Homo sapien
tccactgactggctcccgtacgcac

SEQ ID NO: 3722311 - DNA, 25 bp, Homo sapien
gactggctcccgtacgcactgtctt

SEQ ID NO: 3722312 - DNA, 25 bp, Homo sapien
ccgtacgcactgtcttccttcacct

SEQ ID NO: 3722313 - DNA, 25 bp, Homo sapien
atcaggggctgccataagttgggaa

SEQ ID NO: 3722314 - DNA, 25 bp, Homo sapien
tttgaaataggtggggacgctgtac

SEQ ID NO: 3722315 - DNA, 25 bp, Homo sapien
tgggcagggtgggtagctggttcca

SEQ ID NO: 3722316 - DNA, 25 bp, Homo sapien
atcctttatttgtcccaactgaggg

SEQ ID NO: 3722317 - DNA, 25 bp, Homo sapien
tttcccccgcttcagtgggccttgc

SEQ ID NO: 3722318 - DNA, 25 bp, Homo sapien
ccaagggcttactctttctcttgct

SEQ ID NO: 3722319 - DNA, 25 bp, Homo sapien
tggaggaagggcgtccatgccaagg

SEQ ID NO: 3722320 - DNA, 25 bp, Homo sapien
tagcgcccctgaacttttgatgctt

SEQ ID NO: 3722321 - DNA, 25 bp, Homo sapien
actgaatgggctacctgctccaggg

SEQ ID NO: 3722322 - DNA, 25 bp, Homo sapien
caaccggaagttacggctggaagca

SEQ ID NO: 3722323 - DNA, 25 bp, Homo sapien
tggcagccggaaccttgtacatggg

SEQ ID NO: 3722324 - DNA, 25 bp, Homo sapien
catcttccgctttgtggagaaggcc

SEQ ID NO: 3722325 - DNA, 25 bp, Homo sapien
gggcgggagcgcgtgtggcatgtaa

SEQ ID NO: 3722326 - DNA, 25 bp, Homo sapien
gcgcgtgtggcatgtaacaggtcat

SEQ ID NO: 3722327 - DNA, 25 bp, Homo sapien
cgtgtgcttggcgcggccgcgtgct

SEQ ID NO: 3722328 - DNA, 25 bp, Homo sapien
cttggcgcggccgcgtgctcgtggg

SEQ ID NO: 3722329 - DNA, 25 bp, Homo sapien
tgaagtctgatttaacatccccctg

SEQ ID NO: 3722330 - DNA, 25 bp, Homo sapien
taactcaggcagcaaggaagttctt

SEQ ID NO: 3722331 - DNA, 25 bp, Homo sapien
cctgggcaggcgtgacgacacctaa

SEQ ID NO: 3722332 - DNA, 25 bp, Homo sapien
ggttcaagacggtgttccctagatc

SEQ ID NO: 3722333 - DNA, 25 bp, Homo sapien
gtcaagttaggtgagggcttgctat

SEQ ID NO: 3722334 - DNA, 25 bp, Homo sapien
caagttaggtgagggcttgctatct

SEQ ID NO: 3722335 - DNA, 25 bp, Homo sapien
taggtgagggcttgctatctcttct

SEQ ID NO: 3722336 - DNA, 25 bp, Homo sapien
agagacaagaaaggggtcaagttag

SEQ ID NO: 3722337 - DNA, 25 bp, Homo sapien
tctgttatctcgtcaaggcttcggg

SEQ ID NO: 3722338 - DNA, 25 bp, Homo sapien
tgggcaggtctatgctatcagtcca

SEQ ID NO: 3722339 - DNA, 25 bp, Homo sapien
ttgtccagaatcaagccagacggga

SEQ ID NO: 3722340 - DNA, 25 bp, Homo sapien
ggctcatcacaacgaaaaccacttc

SEQ ID NO: 3722341 - DNA, 25 bp, Homo sapien
agctcagcccgccagtggtagtgct

SEQ ID NO: 3722342 - DNA, 25 bp, Homo sapien
agtgcttctcggctggccttgggtt

SEQ ID NO: 3722343 - DNA, 25 bp, Homo sapien
tgggtccgccctgggacaatgacgc

SEQ ID NO: 3722344 - DNA, 25 bp, Homo sapien
gctgggtccgccctgggacaatgac

SEQ ID NO: 3722345 - DNA, 25 bp, Homo sapien
ggtggtgtaacattaggcctcgcct

SEQ ID NO: 3722346 - DNA, 25 bp, Homo sapien
cagtagccgcctctgagcgaagtgg

SEQ ID NO: 3722347 - DNA, 25 bp, Homo sapien
ccttctcggctacagggcttgaggc

SEQ ID NO: 3722348 - DNA, 25 bp, Homo sapien
taattatgaagagctatccagcctc

SEQ ID NO: 3722349 - DNA, 25 bp, Homo sapien
tatttaatcgagtgccgtctcaccg

SEQ ID NO: 3722350 - DNA, 25 bp, Homo sapien
agtgccgtctcaccgaggatccgat

SEQ ID NO: 3722351 - DNA, 25 bp, Homo sapien
tctcaccgaggatccgatctgaaag

SEQ ID NO: 3722352 - DNA, 25 bp, Homo sapien
gtagagacagacctatttaatcgag

SEQ ID NO: 3722353 - DNA, 25 bp, Homo sapien
attgcgcgtgcgcagtaagattttc

SEQ ID NO: 3722354 - DNA, 25 bp, Homo sapien
ttggagtggccgcaccaaacccgcc

SEQ ID NO: 3722355 - DNA, 25 bp, Homo sapien
gcagtaagattttctcgctttggcc

SEQ ID NO: 3722356 - DNA, 25 bp, Homo sapien
agattttctcgctttggccttggag

SEQ ID NO: 3722357 - DNA, 25 bp, Homo sapien
ctcttgctcccctccggacggctcc

SEQ ID NO: 3722358 - DNA, 25 bp, Homo sapien
tcttgctcccctccggacggctcca

SEQ ID NO: 3722359 - DNA, 25 bp, Homo sapien
cctctcggcccctccggtgctcggt

SEQ ID NO: 3722360 - DNA, 25 bp, Homo sapien
ttggcactggcgtcccggggccact

SEQ ID NO: 3722361 - DNA, 25 bp, Homo sapien
gggccactattacctgcgagtccgc

SEQ ID NO: 3722362 - DNA, 25 bp, Homo sapien
tccgttatgttcctgcgccccagct

SEQ ID NO: 3722363 - DNA, 25 bp, Homo sapien
cgtgtgggagcagcacgtcttccca

SEQ ID NO: 3722364 - DNA, 25 bp, Homo sapien
tgcgcggcatcgaagcgacgcagcc

SEQ ID NO: 3722365 - DNA, 25 bp, Homo sapien
cggctaacgcgctgcagccggagca

SEQ ID NO: 3722366 - DNA, 25 bp, Homo sapien
aggtgaagctgcaccagcgaccgga

SEQ ID NO: 3722367 - DNA, 25 bp, Homo sapien
agaggcggggcggtacccaggcagg

SEQ ID NO: 3722368 - DNA, 25 bp, Homo sapien
tagaggcggggcggtacccaggcag

SEQ ID NO: 3722369 - DNA, 25 bp, Homo sapien
ctagaggcggggcggtacccaggca

SEQ ID NO: 3722370 - DNA, 25 bp, Homo sapien
ctttggtgcgtggatcccttccggg

SEQ ID NO: 3722371 - DNA, 25 bp, Homo sapien
tgagttcttttctggcagcctcctg

SEQ ID NO: 3722372 - DNA, 25 bp, Homo sapien
tctgagtcgctaccgagtatttgcc

SEQ ID NO: 3722373 - DNA, 25 bp, Homo sapien
ccaagggggtccagaagggcatact

SEQ ID NO: 3722374 - DNA, 25 bp, Homo sapien
tacacgatggcctcgtccttgagct

SEQ ID NO: 3722375 - DNA, 25 bp, Homo sapien
cgagccaactcttgaaccgcggcgt

SEQ ID NO: 3722376 - DNA, 25 bp, Homo sapien
tctgacagccattcgtgacacggcg

SEQ ID NO: 3722377 - DNA, 25 bp, Homo sapien
ggagttctgggcagttccgagccaa

SEQ ID NO: 3722378 - DNA, 25 bp, Homo sapien
cagctccgcctaggattgcaagatc

SEQ ID NO: 3722379 - DNA, 25 bp, Homo sapien
gactggctccggcaaaatcccggtc

SEQ ID NO: 3722380 - DNA, 25 bp, Homo sapien
taaactatgggctctctggcctagg

SEQ ID NO: 3722381 - DNA, 25 bp, Homo sapien
cctacacaagggaggcgcctggatt

SEQ ID NO: 3722382 - DNA, 25 bp, Homo sapien
catggtggcagtgccgcacccgcag

SEQ ID NO: 3722383 - DNA, 25 bp, Homo sapien
tgcagcggcggctccacgtcgatgt

SEQ ID NO: 3722384 - DNA, 25 bp, Homo sapien
gcgcttccgcaagcggctcaggctg

SEQ ID NO: 3722385 - DNA, 25 bp, Homo sapien
gctcaggctggactccgccacatgg

SEQ ID NO: 3722386 - DNA, 25 bp, Homo sapien
gctccgattggcaggcgggtcagac

SEQ ID NO: 3722387 - DNA, 25 bp, Homo sapien
ccctacagctcagtgtcaggcccca

SEQ ID NO: 3722388 - DNA, 25 bp, Homo sapien
cacacagtccagctgtgctccgatt

SEQ ID NO: 3722389 - DNA, 25 bp, Homo sapien
tctcaccagaggtcctcacagttca

SEQ ID NO: 3722390 - DNA, 25 bp, Homo sapien
aagagatttgggagagcccctgacg

SEQ ID NO: 3722391 - DNA, 25 bp, Homo sapien
ctgggaagttgggagcccaaaccat

SEQ ID NO: 3722392 - DNA, 25 bp, Homo sapien
tggaggccgtactatagaagacttt

SEQ ID NO: 3722393 - DNA, 25 bp, Homo sapien
tttgagcataagagtagcccgagtc

SEQ ID NO: 3722394 - DNA, 25 bp, Homo sapien
atgtccaggattccaacagacagtg

SEQ ID NO: 3722395 - DNA, 25 bp, Homo sapien
ccagcatgagaagtgtggagccgga

SEQ ID NO: 3722396 - DNA, 25 bp, Homo sapien
aagaggcatctgagagaggctttga

SEQ ID NO: 3722397 - DNA, 25 bp, Homo sapien
cagtgacaggcaagaggtgtcccca

SEQ ID NO: 3722398 - DNA, 25 bp, Homo sapien
ttacattatgctgggaaaccagagc

SEQ ID NO: 3722399 - DNA, 25 bp, Homo sapien
gaaggagtgcttcaccggagctcaa

SEQ ID NO: 3722400 - DNA, 25 bp, Homo sapien
ggaatccaggactcttagctcccag

SEQ ID NO: 3722401 - DNA, 25 bp, Homo sapien
gagctcaaactgtaggcaggaatcc

SEQ ID NO: 3722402 - DNA, 25 bp, Homo sapien
tcagcaggatgaaacaagttgacat

SEQ ID NO: 3722403 - DNA, 25 bp, Homo sapien
tcagataaacctaaacggagagatg

SEQ ID NO: 3722404 - DNA, 25 bp, Homo sapien
catcagttcagcagtaatgcagtca

SEQ ID NO: 3722405 - DNA, 25 bp, Homo sapien
gggacaaatcaacatcataagcttc

SEQ ID NO: 3722406 - DNA, 25 bp, Homo sapien
gtgtctgtcccctatttctgtgtct

SEQ ID NO: 3722407 - DNA, 25 bp, Homo sapien
tgccttaaaggctcacataaactct

SEQ ID NO: 3722408 - DNA, 25 bp, Homo sapien
taagttatcaaagctgtagggtccc

SEQ ID NO: 3722409 - DNA, 25 bp, Homo sapien
tgtgacccaacatgttttaccctga

SEQ ID NO: 3722410 - DNA, 25 bp, Homo sapien
ttcctgccaagccgagggcgacggt

SEQ ID NO: 3722411 - DNA, 25 bp, Homo sapien
gatccccagcttagtaagaaaagta

SEQ ID NO: 3722412 - DNA, 25 bp, Homo sapien
aagccgagggcgacggtgatcccca

SEQ ID NO: 3722413 - DNA, 25 bp, Homo sapien
gggcgacggtgatccccagcttagt

SEQ ID NO: 3722414 - DNA, 25 bp, Homo sapien
ccctctatcagagtcgtcgcccacc

SEQ ID NO: 3722415 - DNA, 25 bp, Homo sapien
tggaggacgtgggatggaagaaggg

SEQ ID NO: 3722416 - DNA, 25 bp, Homo sapien
tgcagtaagccccaactttcccttc

SEQ ID NO: 3722417 - DNA, 25 bp, Homo sapien
ggacgtgggatggaagaagggcctg

SEQ ID NO: 3722418 - DNA, 25 bp, Homo sapien
tgcaagacggaatcgagggcacctc

SEQ ID NO: 3722419 - DNA, 25 bp, Homo sapien
tgccggccagtttcctgcacttgtt

SEQ ID NO: 3722420 - DNA, 25 bp, Homo sapien
gagggcacctctgggtgttctgtac

SEQ ID NO: 3722421 - DNA, 25 bp, Homo sapien
ctcgctttattgctggacggtggga

SEQ ID NO: 3722422 - DNA, 25 bp, Homo sapien
cgcgggaggcggacgcgctgctcac

SEQ ID NO: 3722423 - DNA, 25 bp, Homo sapien
ctgtgcgcgggaggcggacgcgctg

SEQ ID NO: 3722424 - DNA, 25 bp, Homo sapien
gtgcgcgggaggcggacgcgctgct

SEQ ID NO: 3722425 - DNA, 25 bp, Homo sapien
gcgcgggaggcggacgcgctgctca

SEQ ID NO: 3722426 - DNA, 25 bp, Homo sapien
tcctgtgtgtgccgccgccgacagg

SEQ ID NO: 3722427 - DNA, 25 bp, Homo sapien
tgtgtgccgccgccgacaggcagaa

SEQ ID NO: 3722428 - DNA, 25 bp, Homo sapien
ctgtgtgtgccgccgccgacaggca

SEQ ID NO: 3722429 - DNA, 25 bp, Homo sapien
tttcctgtgtgtgccgccgccgaca

SEQ ID NO: 3722430 - DNA, 25 bp, Homo sapien
tagacagacgctggtagctcctggc

SEQ ID NO: 3722431 - DNA, 25 bp, Homo sapien
tgtagtgactgggagctaaccggat

SEQ ID NO: 3722432 - DNA, 25 bp, Homo sapien
taaccggattagacagccatcagta

SEQ ID NO: 3722433 - DNA, 25 bp, Homo sapien
cagctacaaagtgcggagaggagcc

SEQ ID NO: 3722434 - DNA, 25 bp, Homo sapien
aaaaaattctgatcaggccgatgct

SEQ ID NO: 3722435 - DNA, 25 bp, Homo sapien
gcacgtgctaaccactcactttttg

SEQ ID NO: 3722436 - DNA, 25 bp, Homo sapien
gttcccacaatataaactgctgatg

SEQ ID NO: 3722437 - DNA, 25 bp, Homo sapien
caagcaggaagaggtaactttgtgg

SEQ ID NO: 3722438 - DNA, 25 bp, Homo sapien
ttaagatgctgttaatctgtaaccc

SEQ ID NO: 3722439 - DNA, 25 bp, Homo sapien
atggcttaagggctgtgcaaggtgt

SEQ ID NO: 3722440 - DNA, 25 bp, Homo sapien
cttaagggctgtgcaaggtgtgctt

SEQ ID NO: 3722441 - DNA, 25 bp, Homo sapien
taaatggcttaagggctgtgcaagg

SEQ ID NO: 3722442 - DNA, 25 bp, Homo sapien
tgaccgtcttccgtattcaaagccg

SEQ ID NO: 3722443 - DNA, 25 bp, Homo sapien
tattccacagttaaggacccttgtg

SEQ ID NO: 3722444 - DNA, 25 bp, Homo sapien
aatgagaattctgatcacaggccag

SEQ ID NO: 3722445 - DNA, 25 bp, Homo sapien
gagatttcagcaccccagcatttta

SEQ ID NO: 3722446 - DNA, 25 bp, Homo sapien
ctggcagccaagatgtcaatagtgt

SEQ ID NO: 3722447 - DNA, 25 bp, Homo sapien
cccagggtggcagctgttacggtaa

SEQ ID NO: 3722448 - DNA, 25 bp, Homo sapien
tgagtggggtccaaacaagctggca

SEQ ID NO: 3722449 - DNA, 25 bp, Homo sapien
tagggaccagatggagacaagccca

SEQ ID NO: 3722450 - DNA, 25 bp, Homo sapien
ttctctttgtggttgccagtcacag

SEQ ID NO: 3722451 - DNA, 25 bp, Homo sapien
aatgccccacagttacactctgagg

SEQ ID NO: 3722452 - DNA, 25 bp, Homo sapien
ggcccctcaaccctctgattatata

SEQ ID NO: 3722453 - DNA, 25 bp, Homo sapien
ttatatagacaacgtagccagttac

SEQ ID NO: 3722454 - DNA, 25 bp, Homo sapien
ttaatgccccacagttacactctga

SEQ ID NO: 3722455 - DNA, 25 bp, Homo sapien
cttacctccatctgtgctttcctgg

SEQ ID NO: 3722456 - DNA, 25 bp, Homo sapien
ctcttacctccatctgtgctttcct

SEQ ID NO: 3722457 - DNA, 25 bp, Homo sapien
tcttacctccatctgtgctttcctg

SEQ ID NO: 3722458 - DNA, 25 bp, Homo sapien
gatccagaaagcctcatgagtagaa

SEQ ID NO: 3722459 - DNA, 25 bp, Homo sapien
tcctcctgatccagaaagcctcatg

SEQ ID NO: 3722460 - DNA, 25 bp, Homo sapien
gaaagcctcatgagtagaagacagg

SEQ ID NO: 3722461 - DNA, 25 bp, Homo sapien
gtagaagacaggtgatcattttgtc

SEQ ID NO: 3722462 - DNA, 25 bp, Homo sapien
gagccaggtgcgagccaatgcgcct

SEQ ID NO: 3722463 - DNA, 25 bp, Homo sapien
atcgtagccggcgaagcctaatccc

SEQ ID NO: 3722464 - DNA, 25 bp, Homo sapien
tgcgcctgcgcgcacttctagggct

SEQ ID NO: 3722465 - DNA, 25 bp, Homo sapien
agctccggcaggtgactgcgcctga

SEQ ID NO: 3722466 - DNA, 25 bp, Homo sapien
cagtcactaggtggggcgttgtggc

SEQ ID NO: 3722467 - DNA, 25 bp, Homo sapien
tttaggacttgggaaggccaagaca

SEQ ID NO: 3722468 - DNA, 25 bp, Homo sapien
cgagagccaccgtgtggtttcatga

SEQ ID NO: 3722469 - DNA, 25 bp, Homo sapien
agccaccgtgtggtttcatgatctt

SEQ ID NO: 3722470 - DNA, 25 bp, Homo sapien
tgggtcacacgaggaaaagtcagaa

SEQ ID NO: 3722471 - DNA, 25 bp, Homo sapien
ctagatcagggtaggagcaggtaaa

SEQ ID NO: 3722472 - DNA, 25 bp, Homo sapien
caggtaaatatccttgtaatcgggc

SEQ ID NO: 3722473 - DNA, 25 bp, Homo sapien
tccttcctcaggtaagggaatttga

SEQ ID NO: 3722474 - DNA, 25 bp, Homo sapien
gttggtattgataaggaagacggga

SEQ ID NO: 3722475 - DNA, 25 bp, Homo sapien
tggtattgataaggaagacgggaag

SEQ ID NO: 3722476 - DNA, 25 bp, Homo sapien
tgttggtattgataaggaagacggg

SEQ ID NO: 3722477 - DNA, 25 bp, Homo sapien
ttggtattgataaggaagacgggaa

SEQ ID NO: 3722478 - DNA, 25 bp, Homo sapien
cgtcaggcagttacccaacccaggc

SEQ ID NO: 3722479 - DNA, 25 bp, Homo sapien
aacgtcaggcagttacccaacccag

SEQ ID NO: 3722480 - DNA, 25 bp, Homo sapien
acgtcaggcagttacccaacccagg

SEQ ID NO: 3722481 - DNA, 25 bp, Homo sapien
gtcaggcagttacccaacccaggcc

SEQ ID NO: 3722482 - DNA, 25 bp, Homo sapien
taatggtctagacgggacaaccctg

SEQ ID NO: 3722483 - DNA, 25 bp, Homo sapien
aaattgcactgtgtgactttaatgg

SEQ ID NO: 3722484 - DNA, 25 bp, Homo sapien
tgactttaatggtctagacgggaca

SEQ ID NO: 3722485 - DNA, 25 bp, Homo sapien
tctagacgggacaaccctgagcttg

SEQ ID NO: 3722486 - DNA, 25 bp, Homo sapien
gagctagacaccactaatctgggag

SEQ ID NO: 3722487 - DNA, 25 bp, Homo sapien
aacagcgctgggaattatgaatgaa

SEQ ID NO: 3722488 - DNA, 25 bp, Homo sapien
cagaaacagtgctgagctagacacc

SEQ ID NO: 3722489 - DNA, 25 bp, Homo sapien
tctgggagtgactcgaggaaacaga

SEQ ID NO: 3722490 - DNA, 25 bp, Homo sapien
cagccttagccccaggagcaccggg

SEQ ID NO: 3722491 - DNA, 25 bp, Homo sapien
ggctcatggccacaggcggtcttcc

SEQ ID NO: 3722492 - DNA, 25 bp, Homo sapien
agcaccggggagggctcatggccac

SEQ ID NO: 3722493 - DNA, 25 bp, Homo sapien
agccttagccccaggagcaccgggg

SEQ ID NO: 3722494 - DNA, 25 bp, Homo sapien
caggcctggggctgacccagcccca

SEQ ID NO: 3722495 - DNA, 25 bp, Homo sapien
tgtgggcagacccagcaaccaggcc

SEQ ID NO: 3722496 - DNA, 25 bp, Homo sapien
ctgtgggcagacccagcaaccaggc

SEQ ID NO: 3722497 - DNA, 25 bp, Homo sapien
caaccaggcctggggctgacccagc

SEQ ID NO: 3722498 - DNA, 25 bp, Homo sapien
tagagcaggaagacattgtgcagga

SEQ ID NO: 3722499 - DNA, 25 bp, Homo sapien
aagagagccagggagccatagacca

SEQ ID NO: 3722500 - DNA, 25 bp, Homo sapien
tctccgacccagaaggccattttgt

SEQ ID NO: 3722501 - DNA, 25 bp, Homo sapien
tacactgagacaaaggtgtccacat

SEQ ID NO: 3722502 - DNA, 25 bp, Homo sapien
acagcaactatgtaagacagtggcc

SEQ ID NO: 3722503 - DNA, 25 bp, Homo sapien
gggcccagctggtaaatgtatgcag

SEQ ID NO: 3722504 - DNA, 25 bp, Homo sapien
ttatatatatgagtacacagaacag

SEQ ID NO: 3722505 - DNA, 25 bp, Homo sapien
aaagctagtctagtccccatcgagg

SEQ ID NO: 3722506 - DNA, 25 bp, Homo sapien
cagttcctctgctaaaacccactct

SEQ ID NO: 3722507 - DNA, 25 bp, Homo sapien
gttcctctgctaaaacccactctgg

SEQ ID NO: 3722508 - DNA, 25 bp, Homo sapien
agttcctctgctaaaacccactctg

SEQ ID NO: 3722509 - DNA, 25 bp, Homo sapien
ttcctctgctaaaacccactctggc

SEQ ID NO: 3722510 - DNA, 25 bp, Homo sapien
gctcaccacccctgaaagatggccc

SEQ ID NO: 3722511 - DNA, 25 bp, Homo sapien
accacccctgaaagatggccccagc

SEQ ID NO: 3722512 - DNA, 25 bp, Homo sapien
ctgctcaccacccctgaaagatggc

SEQ ID NO: 3722513 - DNA, 25 bp, Homo sapien
tcaccacccctgaaagatggcccca

SEQ ID NO: 3722514 - DNA, 25 bp, Homo sapien
aggaactgccggtcactgagccaac

SEQ ID NO: 3722515 - DNA, 25 bp, Homo sapien
cggtcactgagccaaccgaagaggg

SEQ ID NO: 3722516 - DNA, 25 bp, Homo sapien
ctgggagctgaggaactgccggtca

SEQ ID NO: 3722517 - DNA, 25 bp, Homo sapien
agctgaggaactgccggtcactgag

SEQ ID NO: 3722518 - DNA, 25 bp, Homo sapien
cccttattagcctgttgggctgatg

SEQ ID NO: 3722519 - DNA, 25 bp, Homo sapien
aagggtatgggatgcccacttctca

SEQ ID NO: 3722520 - DNA, 25 bp, Homo sapien
agaggggccaaccaagccaagccag

SEQ ID NO: 3722521 - DNA, 25 bp, Homo sapien
ggatggggcaaaggaatcttccaga

SEQ ID NO: 3722522 - DNA, 25 bp, Homo sapien
ccttgttccaaaaggcataggatgc

SEQ ID NO: 3722523 - DNA, 25 bp, Homo sapien
agggcacccagaacgccaggaacga

SEQ ID NO: 3722524 - DNA, 25 bp, Homo sapien
agccatcatagaggcacaggcacag

SEQ ID NO: 3722525 - DNA, 25 bp, Homo sapien
tgcaggtccacgagcgtcaggaagc

SEQ ID NO: 3722526 - DNA, 25 bp, Homo sapien
ctatccacaaccaggcctgagcacc

SEQ ID NO: 3722527 - DNA, 25 bp, Homo sapien
gacagccagtgtcacgcagaaagcg

SEQ ID NO: 3722528 - DNA, 25 bp, Homo sapien
gagctgacagccagtgtcacgcaga

SEQ ID NO: 3722529 - DNA, 25 bp, Homo sapien
cagtgtcacgcagaaagcgcggaag

SEQ ID NO: 3722530 - DNA, 25 bp, Homo sapien
aggtgatgctgtccgcctcctcact

SEQ ID NO: 3722531 - DNA, 25 bp, Homo sapien
atggcgtgccagctgccggagatac

SEQ ID NO: 3722532 - DNA, 25 bp, Homo sapien
acaggaagttccgatggcgtgccag

SEQ ID NO: 3722533 - DNA, 25 bp, Homo sapien
gctgccggagataccggcccaaggt

SEQ ID NO: 3722534 - DNA, 25 bp, Homo sapien
caagcggtctttccaccttggcgtc

SEQ ID NO: 3722535 - DNA, 25 bp, Homo sapien
tcaagcggtctttccaccttggcgt

SEQ ID NO: 3722536 - DNA, 25 bp, Homo sapien
ctcaagcggtctttccaccttggcg

SEQ ID NO: 3722537 - DNA, 25 bp, Homo sapien
tgttttaggtacagcacttagctct

SEQ ID NO: 3722538 - DNA, 25 bp, Homo sapien
atactgcatgttttaggtacagcac

SEQ ID NO: 3722539 - DNA, 25 bp, Homo sapien
catgttttaggtacagcacttagct

SEQ ID NO: 3722540 - DNA, 25 bp, Homo sapien
tgcatgttttaggtacagcacttag

SEQ ID NO: 3722541 - DNA, 25 bp, Homo sapien
gatatggtcggacaacagatgctcc

SEQ ID NO: 3722542 - DNA, 25 bp, Homo sapien
cccgtggaaagggagatatggtcgg

SEQ ID NO: 3722543 - DNA, 25 bp, Homo sapien
ccaacaggatggagcccgtggaaag

SEQ ID NO: 3722544 - DNA, 25 bp, Homo sapien
gtcggacaacagatgctccaggaag

SEQ ID NO: 3722545 - DNA, 25 bp, Homo sapien
gtggtccgggccggccaacaacatg

SEQ ID NO: 3722546 - DNA, 25 bp, Homo sapien
caacaacatgagcaggctaagtccc

SEQ ID NO: 3722547 - DNA, 25 bp, Homo sapien
agatggggagcgacataggagaggc

SEQ ID NO: 3722548 - DNA, 25 bp, Homo sapien
ccgggccggccaacaacatgagcag

SEQ ID NO: 3722549 - DNA, 25 bp, Homo sapien
cctcgtctaccaggtcagtgaccac

SEQ ID NO: 3722550 - DNA, 25 bp, Homo sapien
gcctgcttgcggtggttcagcacca

SEQ ID NO: 3722551 - DNA, 25 bp, Homo sapien
ccaaggtcagcagcttacaggtgcc

SEQ ID NO: 3722552 - DNA, 25 bp, Homo sapien
ccaaagaggagtgccgaggctgcct

SEQ ID NO: 3722553 - DNA, 25 bp, Homo sapien
agcaggtagaagcagccctggcgga

SEQ ID NO: 3722554 - DNA, 25 bp, Homo sapien
catccagggtttgggcctgtgacag

SEQ ID NO: 3722555 - DNA, 25 bp, Homo sapien
gccttgaccatgtgcaggcgtctcc

SEQ ID NO: 3722556 - DNA, 25 bp, Homo sapien
aggcgtctcccatgcagcgtgaact

SEQ ID NO: 3722557 - DNA, 25 bp, Homo sapien
tctcagagaaaccactagaagggtg

SEQ ID NO: 3722558 - DNA, 25 bp, Homo sapien
aggtgggacttacagtcagctttcc

SEQ ID NO: 3722559 - DNA, 25 bp, Homo sapien
tggtaaaactagctcctggccgagt

SEQ ID NO: 3722560 - DNA, 25 bp, Homo sapien
aagagaagcacgtccctgagcacat

SEQ ID NO: 3722561 - DNA, 25 bp, Homo sapien
gtgcctatgcagttaccaatctatg

SEQ ID NO: 3722562 - DNA, 25 bp, Homo sapien
gggaaatgcactgaggcctaatggt

SEQ ID NO: 3722563 - DNA, 25 bp, Homo sapien
cctaatggtcattttgggcccgagt

SEQ ID NO: 3722564 - DNA, 25 bp, Homo sapien
gcatcttggtaacccaccaaggtgg

SEQ ID NO: 3722565 - DNA, 25 bp, Homo sapien
cagagtgccaggagctaatggagcc

SEQ ID NO: 3722566 - DNA, 25 bp, Homo sapien
gactgcagtgcgcttaaccaactca

SEQ ID NO: 3722567 - DNA, 25 bp, Homo sapien
gactcctaggagtggtccaaaggcc

SEQ ID NO: 3722568 - DNA, 25 bp, Homo sapien
tatgtgtgaaagcaacgtagcgccc

SEQ ID NO: 3722569 - DNA, 25 bp, Homo sapien
ggaggccctcatgttcaccagggaa

SEQ ID NO: 3722570 - DNA, 25 bp, Homo sapien
ttgggagagtttaaggcacctgctg

SEQ ID NO: 3722571 - DNA, 25 bp, Homo sapien
accccaagagctattacagagactg

SEQ ID NO: 3722572 - DNA, 25 bp, Homo sapien
gaccatttgagattggaagctacac

SEQ ID NO: 3722573 - DNA, 25 bp, Homo sapien
ggaaaactcgagctgggtaggacca

SEQ ID NO: 3722574 - DNA, 25 bp, Homo sapien
tcagtaaggcccaacacaaagtcgt

SEQ ID NO: 3722575 - DNA, 25 bp, Homo sapien
tgaacttaggttgtggtctcagacc

SEQ ID NO: 3722576 - DNA, 25 bp, Homo sapien
cacctgtggctatagggaaaactcg

SEQ ID NO: 3722577 - DNA, 25 bp, Homo sapien
ctcaaagtgatttgcgtgcctcggc

SEQ ID NO: 3722578 - DNA, 25 bp, Homo sapien
tatttgccaggtacacagttcctag

SEQ ID NO: 3722579 - DNA, 25 bp, Homo sapien
gactactcaagaagcctctaccagg

SEQ ID NO: 3722580 - DNA, 25 bp, Homo sapien
gattcttcaccctatgactggcatg

SEQ ID NO: 3722581 - DNA, 25 bp, Homo sapien
aaatcccagggtactgcgcattgga

SEQ ID NO: 3722582 - DNA, 25 bp, Homo sapien
caatcttaaactaggcgggcaacaa

SEQ ID NO: 3722583 - DNA, 25 bp, Homo sapien
catggagtcctacgatgtgatcgcc

SEQ ID NO: 3722584 - DNA, 25 bp, Homo sapien
aagcaagctagatcgctaacccagg

SEQ ID NO: 3722585 - DNA, 25 bp, Homo sapien
cagcgggcggactcggtgggtgaga

SEQ ID NO: 3722586 - DNA, 25 bp, Homo sapien
gtgggtgagactccccgaggcgatg

SEQ ID NO: 3722587 - DNA, 25 bp, Homo sapien
ccgccgagtctgccagagggtgcct

SEQ ID NO: 3722588 - DNA, 25 bp, Homo sapien
gctgcagcgaggtctagctccgcgc

SEQ ID NO: 3722589 - DNA, 25 bp, Homo sapien
ttgacgatagcggtaacctggagcg

SEQ ID NO: 3722590 - DNA, 25 bp, Homo sapien
taaaggcggcggcactctccgtaga

SEQ ID NO: 3722591 - DNA, 25 bp, Homo sapien
gagcgggttcggctggtcagggtaa

SEQ ID NO: 3722592 - DNA, 25 bp, Homo sapien
ctctccgtagatggcgtgcagtccc

SEQ ID NO: 3722593 - DNA, 25 bp, Homo sapien
agctccccggagaaactgcaggcca

SEQ ID NO: 3722594 - DNA, 25 bp, Homo sapien
ttactctcagctccccggagaaact

SEQ ID NO: 3722595 - DNA, 25 bp, Homo sapien
ttgagggttactctcagctccccgg

SEQ ID NO: 3722596 - DNA, 25 bp, Homo sapien
ctcagctccccggagaaactgcagg

SEQ ID NO: 3722597 - DNA, 25 bp, Homo sapien
tatcacatgttggcccatctctgaa

SEQ ID NO: 3722598 - DNA, 25 bp, Homo sapien
acaaagtgctgtataatcccttttc

SEQ ID NO: 3722599 - DNA, 25 bp, Homo sapien
cacaaagtgctgtataatccctttt

SEQ ID NO: 3722600 - DNA, 25 bp, Homo sapien
tttctgcatctaggaagggctttca

SEQ ID NO: 3722601 - DNA, 25 bp, Homo sapien
catgctaacatagtccaaggggtct

SEQ ID NO: 3722602 - DNA, 25 bp, Homo sapien
aagctgatgtagtgccagtgctcgg

SEQ ID NO: 3722603 - DNA, 25 bp, Homo sapien
tagagatcactcaggccgaagctga

SEQ ID NO: 3722604 - DNA, 25 bp, Homo sapien
catggactctgttgtcaccatagag

SEQ ID NO: 3722605 - DNA, 25 bp, Homo sapien
gagtcataaccatgctaccttcctg

SEQ ID NO: 3722606 - DNA, 25 bp, Homo sapien
tgttaacgaggaccaccttggcatg

SEQ ID NO: 3722607 - DNA, 25 bp, Homo sapien
tttgggaatcctgctcatcaagact

SEQ ID NO: 3722608 - DNA, 25 bp, Homo sapien
taagcaggaatcaggtgttaacgag

SEQ ID NO: 3722609 - DNA, 25 bp, Homo sapien
caaattaagaggttgccccttctga

SEQ ID NO: 3722610 - DNA, 25 bp, Homo sapien
tggaagaatccttaagccacatagg

SEQ ID NO: 3722611 - DNA, 25 bp, Homo sapien
gggccttgggcctatacctagcagg

SEQ ID NO: 3722612 - DNA, 25 bp, Homo sapien
ttaatactgtaatgctgggtcccca

SEQ ID NO: 3722613 - DNA, 25 bp, Homo sapien
ccatgcgcagcctatagaagtactt

SEQ ID NO: 3722614 - DNA, 25 bp, Homo sapien
atactggaaaatactaggcttgatt

SEQ ID NO: 3722615 - DNA, 25 bp, Homo sapien
cccaagcagctagggctacgatgca

SEQ ID NO: 3722616 - DNA, 25 bp, Homo sapien
tctgcaacatagaccagaactgggt

SEQ ID NO: 3722617 - DNA, 25 bp, Homo sapien
cagtcatcccagtacaaagccaatt

SEQ ID NO: 3722618 - DNA, 25 bp, Homo sapien
cttaacaggatcaaaaagaaaccag

SEQ ID NO: 3722619 - DNA, 25 bp, Homo sapien
agaaaccagtcatcccagtacaaag

SEQ ID NO: 3722620 - DNA, 25 bp, Homo sapien
tcttcaagaaacttaacaggatcaa

SEQ ID NO: 3722621 - DNA, 25 bp, Homo sapien
atctcatgcaaatagtcatcctgac

SEQ ID NO: 3722622 - DNA, 25 bp, Homo sapien
ccatctcatgcaaatagtcatcctg

SEQ ID NO: 3722623 - DNA, 25 bp, Homo sapien
catctcatgcaaatagtcatcctga

SEQ ID NO: 3722624 - DNA, 25 bp, Homo sapien
accatctcatgcaaatagtcatcct

SEQ ID NO: 3722625 - DNA, 25 bp, Homo sapien
agttttgacctactgggccaggtca

SEQ ID NO: 3722626 - DNA, 25 bp, Homo sapien
ttttgacctactgggccaggtcacc

SEQ ID NO: 3722627 - DNA, 25 bp, Homo sapien
gagttttgacctactgggccaggtc

SEQ ID NO: 3722628 - DNA, 25 bp, Homo sapien
gttttgacctactgggccaggtcac

SEQ ID NO: 3722629 - DNA, 25 bp, Homo sapien
attctgccaacacaaacctgaggga

SEQ ID NO: 3722630 - DNA, 25 bp, Homo sapien
ttgcctccgaaactctgcgcaggtg

SEQ ID NO: 3722631 - DNA, 25 bp, Homo sapien
gactggcagatctgtggacacactg

SEQ ID NO: 3722632 - DNA, 25 bp, Homo sapien
tcagtaagtctcactaggccaccgt

SEQ ID NO: 3722633 - DNA, 25 bp, Homo sapien
tcaatctgctctaagaccttcagtg

SEQ ID NO: 3722634 - DNA, 25 bp, Homo sapien
caatctgctctaagaccttcagtgc

SEQ ID NO: 3722635 - DNA, 25 bp, Homo sapien
tgtcaatctgctctaagaccttcag

SEQ ID NO: 3722636 - DNA, 25 bp, Homo sapien
aatctgctctaagaccttcagtgct

SEQ ID NO: 3722637 - DNA, 25 bp, Homo sapien
ttatggttgcacaacaaggtaaatg

SEQ ID NO: 3722638 - DNA, 25 bp, Homo sapien
aaagtggaaggtggttatggttgca

SEQ ID NO: 3722639 - DNA, 25 bp, Homo sapien
acttaattccactgaactgtaaatc

SEQ ID NO: 3722640 - DNA, 25 bp, Homo sapien
ccagctactcggagtctgtagcaga

SEQ ID NO: 3722641 - DNA, 25 bp, Homo sapien
tgcattaactctgcgggccatgttg

SEQ ID NO: 3722642 - DNA, 25 bp, Homo sapien
ggaacacgtatcgtgccaagccctg

SEQ ID NO: 3722643 - DNA, 25 bp, Homo sapien
aaccactaggtccatctgttcctgt

SEQ ID NO: 3722644 - DNA, 25 bp, Homo sapien
gacgaaaggtcaactcaaagccaaa

SEQ ID NO: 3722645 - DNA, 25 bp, Homo sapien
tcacccagcttcacaagttgttaac

SEQ ID NO: 3722646 - DNA, 25 bp, Homo sapien
aacatttcgcctcatttgctttagc

SEQ ID NO: 3722647 - DNA, 25 bp, Homo sapien
ttagcctttatctctagcaacaggg

SEQ ID NO: 3722648 - DNA, 25 bp, Homo sapien
tgaataaccaaataccattcaccca

SEQ ID NO: 3722649 - DNA, 25 bp, Homo sapien
atggagaacagttcaggcaagagga

SEQ ID NO: 3722650 - DNA, 25 bp, Homo sapien
tagctgagcaaatggatgtacatgt

SEQ ID NO: 3722651 - DNA, 25 bp, Homo sapien
taagctattagcaatgagttcagac

SEQ ID NO: 3722652 - DNA, 25 bp, Homo sapien
gagccaatatgaatgcaggctatct

SEQ ID NO: 3722653 - DNA, 25 bp, Homo sapien
ctgcgtaccaggcacattctaagtg

SEQ ID NO: 3722654 - DNA, 25 bp, Homo sapien
tgataatgattgcaggtaaaacata

SEQ ID NO: 3722655 - DNA, 25 bp, Homo sapien
aaaacatagtacttactgcgtacca

SEQ ID NO: 3722656 - DNA, 25 bp, Homo sapien
taatgataatgattgcaggtaaaac

SEQ ID NO: 3722657 - DNA, 25 bp, Homo sapien
ggaacacaatctttcaactattaat

SEQ ID NO: 3722658 - DNA, 25 bp, Homo sapien
gcagtaggaacacaatctttcaact

SEQ ID NO: 3722659 - DNA, 25 bp, Homo sapien
agtgcagtaggaacacaatctttca

SEQ ID NO: 3722660 - DNA, 25 bp, Homo sapien
gtaggaacacaatctttcaactatt

SEQ ID NO: 3722661 - DNA, 25 bp, Homo sapien
aaacataggctgctggagctaggcc

SEQ ID NO: 3722662 - DNA, 25 bp, Homo sapien
tgtcatctgtccagagagagggctc

SEQ ID NO: 3722663 - DNA, 25 bp, Homo sapien
caggaggacctagacatgcccggtt

SEQ ID NO: 3722664 - DNA, 25 bp, Homo sapien
gaataaaagtgtaccagccaaggac

SEQ ID NO: 3722665 - DNA, 25 bp, Homo sapien
agaccaaccccggagaacaagcttg

SEQ ID NO: 3722666 - DNA, 25 bp, Homo sapien
gaccaaccccggagaacaagcttga

SEQ ID NO: 3722667 - DNA, 25 bp, Homo sapien
caaccccggagaacaagcttgacca

SEQ ID NO: 3722668 - DNA, 25 bp, Homo sapien
cagaagaccaaccccggagaacaag

SEQ ID NO: 3722669 - DNA, 25 bp, Homo sapien
ccaagtgtgggcgagacctataact

SEQ ID NO: 3722670 - DNA, 25 bp, Homo sapien
cttggtactcaagccctgtctaata

SEQ ID NO: 3722671 - DNA, 25 bp, Homo sapien
caatttggtatgctgtgaatttcac

SEQ ID NO: 3722672 - DNA, 25 bp, Homo sapien
tctaatcttatgctgaacatcttgc

SEQ ID NO: 3722673 - DNA, 25 bp, Homo sapien
cagatttggaatagatggaacttcc

SEQ ID NO: 3722674 - DNA, 25 bp, Homo sapien
tctacgatcaggaacacgacagagg

SEQ ID NO: 3722675 - DNA, 25 bp, Homo sapien
tattagagtgcaagccaggacaatt

SEQ ID NO: 3722676 - DNA, 25 bp, Homo sapien
acgacagaggtgcttactctcacca

SEQ ID NO: 3722677 - DNA, 25 bp, Homo sapien
taacctcaatagtgttcattcaggc

SEQ ID NO: 3722678 - DNA, 25 bp, Homo sapien
caggagaaggaagactgcttcatct

SEQ ID NO: 3722679 - DNA, 25 bp, Homo sapien
tttccatccaagatacggcttcagt

SEQ ID NO: 3722680 - DNA, 25 bp, Homo sapien
tcaggtagagccaactagaaacccc

SEQ ID NO: 3722681 - DNA, 25 bp, Homo sapien
ctgttatccaaagggctgtgccagg

SEQ ID NO: 3722682 - DNA, 25 bp, Homo sapien
aagggtgtctgcacgggctgcatct

SEQ ID NO: 3722683 - DNA, 25 bp, Homo sapien
gtaactaccccaaagggtgtctgca

SEQ ID NO: 3722684 - DNA, 25 bp, Homo sapien
aattcttgactcactgttatccaaa

SEQ ID NO: 3722685 - DNA, 25 bp, Homo sapien
tccaggatgccctgcccgttccact

SEQ ID NO: 3722686 - DNA, 25 bp, Homo sapien
atgccctgcccgttccactgctggg

SEQ ID NO: 3722687 - DNA, 25 bp, Homo sapien
ctccaggatgccctgcccgttccac

SEQ ID NO: 3722688 - DNA, 25 bp, Homo sapien
ggatgccctgcccgttccactgctg

SEQ ID NO: 3722689 - DNA, 25 bp, Homo sapien
aatatggtctctcccctccgcatgt

SEQ ID NO: 3722690 - DNA, 25 bp, Homo sapien
tgtggatcgatctcaaatatggtct

SEQ ID NO: 3722691 - DNA, 25 bp, Homo sapien
gtgtggatcgatctcaaatatggtc

SEQ ID NO: 3722692 - DNA, 25 bp, Homo sapien
tccgcatgtcagttatcagccaggg

SEQ ID NO: 3722693 - DNA, 25 bp, Homo sapien
gcactgacaccactcaggttggagc

SEQ ID NO: 3722694 - DNA, 25 bp, Homo sapien
cacttggcactgacaccactcaggt

SEQ ID NO: 3722695 - DNA, 25 bp, Homo sapien
gctgtgtgccgatgcagatgctccg

SEQ ID NO: 3722696 - DNA, 25 bp, Homo sapien
ggctgtgtgccgatgcagatgctcc

SEQ ID NO: 3722697 - DNA, 25 bp, Homo sapien
caggtttgctgttgatctcgagtcc

SEQ ID NO: 3722698 - DNA, 25 bp, Homo sapien
ttgatctcgagtcctctcctcaggg

SEQ ID NO: 3722699 - DNA, 25 bp, Homo sapien
attctgccgctgagggttgattggt

SEQ ID NO: 3722700 - DNA, 25 bp, Homo sapien
ccggtcgtgggcgaggccattctgc

SEQ ID NO: 3722701 - DNA, 25 bp, Homo sapien
gataaggagggaaccgtgctcagca

SEQ ID NO: 3722702 - DNA, 25 bp, Homo sapien
gaagggcaactctggccaagactga

SEQ ID NO: 3722703 - DNA, 25 bp, Homo sapien
ttgcagctatcagccggagaccagg

SEQ ID NO: 3722704 - DNA, 25 bp, Homo sapien
taagcctagagatcctgggcccatc

SEQ ID NO: 3722705 - DNA, 25 bp, Homo sapien
tggtcttgcaggatgatcaacctcc

SEQ ID NO: 3722706 - DNA, 25 bp, Homo sapien
gtcagacagcaaatgtgtaataaag

SEQ ID NO: 3722707 - DNA, 25 bp, Homo sapien
ttcatagaagaaggctagatcaccc

SEQ ID NO: 3722708 - DNA, 25 bp, Homo sapien
ctcccaaaggaagagcctgtgcacc

SEQ ID NO: 3722709 - DNA, 25 bp, Homo sapien
aagggaggcgccagcaagctgaagg

SEQ ID NO: 3722710 - DNA, 25 bp, Homo sapien
gaatgcaagggttgtgaaatgctga

SEQ ID NO: 3722711 - DNA, 25 bp, Homo sapien
cagatacagatttcatggctggaat

SEQ ID NO: 3722712 - DNA, 25 bp, Homo sapien
gaaggaggcttttctcaactgatca

SEQ ID NO: 3722713 - DNA, 25 bp, Homo sapien
caatgaggatggtctggcaagcctg

SEQ ID NO: 3722714 - DNA, 25 bp, Homo sapien
tgtcaatgcctgtgggacccttcct

SEQ ID NO: 3722715 - DNA, 25 bp, Homo sapien
gaaacttccgagtacttccagtctg

SEQ ID NO: 3722716 - DNA, 25 bp, Homo sapien
tgactctcgcctgccaattctggtg

SEQ ID NO: 3722717 - DNA, 25 bp, Homo sapien
atgagggctccggactcctggttga

SEQ ID NO: 3722718 - DNA, 25 bp, Homo sapien
gctccggactcctggttgaatttca

SEQ ID NO: 3722719 - DNA, 25 bp, Homo sapien
gaatttcagatgtacgctctcaagc

SEQ ID NO: 3722720 - DNA, 25 bp, Homo sapien
tgccgcgtgcgaatcagctcatggg

SEQ ID NO: 3722721 - DNA, 25 bp, Homo sapien
tcccgtggagacaaacgtgatggcc

SEQ ID NO: 3722722 - DNA, 25 bp, Homo sapien
gcgtaaggatgctcctcagtggcaa

SEQ ID NO: 3722723 - DNA, 25 bp, Homo sapien
cagggtccatgagccgcgtaaggat

SEQ ID NO: 3722724 - DNA, 25 bp, Homo sapien
taaagtgccgtccatgcaggagcct

SEQ ID NO: 3722725 - DNA, 25 bp, Homo sapien
tgggcaaggaagtctatgaaaggaa

SEQ ID NO: 3722726 - DNA, 25 bp, Homo sapien
gtgggcaaggaagtctatgaaagga

SEQ ID NO: 3722727 - DNA, 25 bp, Homo sapien
ggtgggcaaggaagtctatgaaagg

SEQ ID NO: 3722728 - DNA, 25 bp, Homo sapien
caggccctgaatccatgaggcattc

SEQ ID NO: 3722729 - DNA, 25 bp, Homo sapien
ccccaggaaggggtgccatcaagag

SEQ ID NO: 3722730 - DNA, 25 bp, Homo sapien
tccatgaggcattcatgaccagccc

SEQ ID NO: 3722731 - DNA, 25 bp, Homo sapien
ggccccaggccctgaatccatgagg

SEQ ID NO: 3722732 - DNA, 25 bp, Homo sapien
tttcttgatacttgcgagcgaggtg

SEQ ID NO: 3722733 - DNA, 25 bp, Homo sapien
tgtccctccaagacactcgggagtg

SEQ ID NO: 3722734 - DNA, 25 bp, Homo sapien
gccagggcctggagagttaacactt

SEQ ID NO: 3722735 - DNA, 25 bp, Homo sapien
aaagtgctccggataagccagcagg

SEQ ID NO: 3722736 - DNA, 25 bp, Homo sapien
tctccacaggggcagacgcagcagc

SEQ ID NO: 3722737 - DNA, 25 bp, Homo sapien
ctgttctccacaggggcagacgcag

SEQ ID NO: 3722738 - DNA, 25 bp, Homo sapien
gttctccacaggggcagacgcagca

SEQ ID NO: 3722739 - DNA, 25 bp, Homo sapien
ccctgttctccacaggggcagacgc

SEQ ID NO: 3722740 - DNA, 25 bp, Homo sapien
tgtgacatctgcgaagtcctgtggg

SEQ ID NO: 3722741 - DNA, 25 bp, Homo sapien
tgggagtgggaaccccggcagctag

SEQ ID NO: 3722742 - DNA, 25 bp, Homo sapien
gactgaggggcaatgtgacatctgc

SEQ ID NO: 3722743 - DNA, 25 bp, Homo sapien
ctgaaaattggagatgctgactacc

SEQ ID NO: 3722744 - DNA, 25 bp, Homo sapien
ggaggggaccatgtgctggggagcc

SEQ ID NO: 3722745 - DNA, 25 bp, Homo sapien
ccatgggaggggaccatgtgctggg

SEQ ID NO: 3722746 - DNA, 25 bp, Homo sapien
cgcgccccggttccctgggcaacag

SEQ ID NO: 3722747 - DNA, 25 bp, Homo sapien
gcgccccggttccctgggcaacagc

SEQ ID NO: 3722748 - DNA, 25 bp, Homo sapien
actttattgaaacatgccgaggcca

SEQ ID NO: 3722749 - DNA, 25 bp, Homo sapien
gcaactttattgaaacatgccgagg

SEQ ID NO: 3722750 - DNA, 25 bp, Homo sapien
cagcaactttattgaaacatgccga

SEQ ID NO: 3722751 - DNA, 25 bp, Homo sapien
tttattgaaacatgccgaggccagc

SEQ ID NO: 3722752 - DNA, 25 bp, Homo sapien
ccactgggcccggccaggggctgga

SEQ ID NO: 3722753 - DNA, 25 bp, Homo sapien
cggccaggggctggagttttgtctg

SEQ ID NO: 3722754 - DNA, 25 bp, Homo sapien
ctgggcccggccaggggctggagtt

SEQ ID NO: 3722755 - DNA, 25 bp, Homo sapien
ccggccaggggctggagttttgtct

SEQ ID NO: 3722756 - DNA, 25 bp, Homo sapien
tgggaattgtcagctgccaagaaca

SEQ ID NO: 3722757 - DNA, 25 bp, Homo sapien
ggtttcccctgggaattgtcagctg

SEQ ID NO: 3722758 - DNA, 25 bp, Homo sapien
ccctgggaattgtcagctgccaaga

SEQ ID NO: 3722759 - DNA, 25 bp, Homo sapien
tcccctgggaattgtcagctgccaa

SEQ ID NO: 3722760 - DNA, 25 bp, Homo sapien
tgtcttctcccgtacaccttgagca

SEQ ID NO: 3722761 - DNA, 25 bp, Homo sapien
ctgtcttctcccgtacaccttgagc

SEQ ID NO: 3722762 - DNA, 25 bp, Homo sapien
agcacccaggtagggcacaaaggaa

SEQ ID NO: 3722763 - DNA, 25 bp, Homo sapien
tacaccttgagcacccaggtagggc

SEQ ID NO: 3722764 - DNA, 25 bp, Homo sapien
ctacaaactcttcggtcaacagaat

SEQ ID NO: 3722765 - DNA, 25 bp, Homo sapien
cagcggaatgttctctggcaacaga

SEQ ID NO: 3722766 - DNA, 25 bp, Homo sapien
tcaggagctggcaattcagacgatt

SEQ ID NO: 3722767 - DNA, 25 bp, Homo sapien
cagacgatttgctgggtgtccttac

SEQ ID NO: 3722768 - DNA, 25 bp, Homo sapien
gagaactcgtactagcctgaaggcc

SEQ ID NO: 3722769 - DNA, 25 bp, Homo sapien
ctagtgtagcggactgtcgaacacc

SEQ ID NO: 3722770 - DNA, 25 bp, Homo sapien
ctgtcgaacaccacgtcaggcagga

SEQ ID NO: 3722771 - DNA, 25 bp, Homo sapien
caggccagctgtactctttgggaag

SEQ ID NO: 3722772 - DNA, 25 bp, Homo sapien
ccacgtcaggcaggatggagacctt

SEQ ID NO: 3722773 - DNA, 25 bp, Homo sapien
tgcagagcaataaaataccacccgg

SEQ ID NO: 3722774 - DNA, 25 bp, Homo sapien
caggtcccgagcaagagagagttca

SEQ ID NO: 3722775 - DNA, 25 bp, Homo sapien
aagaaaagcctctctgtgcagccgg

SEQ ID NO: 3722776 - DNA, 25 bp, Homo sapien
gaaacaagagcttcacaggcagggc

SEQ ID NO: 3722777 - DNA, 25 bp, Homo sapien
gatgtttaatgcacttagattacag

SEQ ID NO: 3722778 - DNA, 25 bp, Homo sapien
agatgtttaatgcacttagattaca

SEQ ID NO: 3722779 - DNA, 25 bp, Homo sapien
ttggtgagaggaggatagaagaggg

SEQ ID NO: 3722780 - DNA, 25 bp, Homo sapien
tgagaggaggatagaagagggatgt

SEQ ID NO: 3722781 - DNA, 25 bp, Homo sapien
gaggaggatagaagagggatgtagt

SEQ ID NO: 3722782 - DNA, 25 bp, Homo sapien
gaggatagaagagggatgtagtggc

SEQ ID NO: 3722783 - DNA, 25 bp, Homo sapien
aggagtgcggacctctcagcaaagg

SEQ ID NO: 3722784 - DNA, 25 bp, Homo sapien
ctgctgcactgctccgttggagagt

SEQ ID NO: 3722785 - DNA, 25 bp, Homo sapien
ggaaggagtgcggacctctcagcaa

SEQ ID NO: 3722786 - DNA, 25 bp, Homo sapien
gctccgttggagagttcagtaagag

SEQ ID NO: 3722787 - DNA, 25 bp, Homo sapien
gacttgttggcaataaggaggaaag

SEQ ID NO: 3722788 - DNA, 25 bp, Homo sapien
cagacttgttggcaataaggaggaa

SEQ ID NO: 3722789 - DNA, 25 bp, Homo sapien
ccagacttgttggcaataaggagga

SEQ ID NO: 3722790 - DNA, 25 bp, Homo sapien
cttgttggcaataaggaggaaagga

SEQ ID NO: 3722791 - DNA, 25 bp, Homo sapien
cagcagtcagctgcttcttccctca

SEQ ID NO: 3722792 - DNA, 25 bp, Homo sapien
agcagtcagctgcttcttccctcat

SEQ ID NO: 3722793 - DNA, 25 bp, Homo sapien
gccgctgtcgcctcagagctttatc

SEQ ID NO: 3722794 - DNA, 25 bp, Homo sapien
gtctgcccgcggcttctcaagggag

SEQ ID NO: 3722795 - DNA, 25 bp, Homo sapien
tcgataataaaaacgatcggcgggc

SEQ ID NO: 3722796 - DNA, 25 bp, Homo sapien
aaaaatacctgcgtatccagcccct

SEQ ID NO: 3722797 - DNA, 25 bp, Homo sapien
gggctctgccgaggaaaacaaggat

SEQ ID NO: 3722798 - DNA, 25 bp, Homo sapien
ctcccttcacaaatagaaacggaag

SEQ ID NO: 3722799 - DNA, 25 bp, Homo sapien
caaggattgatcaaactagaaagga

SEQ ID NO: 3722800 - DNA, 25 bp, Homo sapien
tcagatgaaattccagtccccggcc

SEQ ID NO: 3722801 - DNA, 25 bp, Homo sapien
ctccctcgcaggggccggagcccgg

SEQ ID NO: 3722802 - DNA, 25 bp, Homo sapien
gctcctgcctggctcgtcggcgccg

SEQ ID NO: 3722803 - DNA, 25 bp, Homo sapien
cctgcctggctcgtcggcgccgcac

SEQ ID NO: 3722804 - DNA, 25 bp, Homo sapien
agcggcggctcctgcctggctcgtc

SEQ ID NO: 3722805 - DNA, 25 bp, Homo sapien
cggctcctgcctggctcgtcggcgc

SEQ ID NO: 3722806 - DNA, 25 bp, Homo sapien
aattccatataagaggccgcctccc

SEQ ID NO: 3722807 - DNA, 25 bp, Homo sapien
gagcgccggggtccaaattccatat

SEQ ID NO: 3722808 - DNA, 25 bp, Homo sapien
cgtcggcgcggctagggcagtggcg

SEQ ID NO: 3722809 - DNA, 25 bp, Homo sapien
gctcgtccccgcggctgacattggg

SEQ ID NO: 3722810 - DNA, 25 bp, Homo sapien
gcgcgcagcgggctgcgtctcctcc

SEQ ID NO: 3722811 - DNA, 25 bp, Homo sapien
cggagccgctgtaggcccaccgagc

SEQ ID NO: 3722812 - DNA, 25 bp, Homo sapien
ccgacggtcgctcagtcagcagcgc

SEQ ID NO: 3722813 - DNA, 25 bp, Homo sapien
gagccgcggtcctcacgccgcgcgc

SEQ ID NO: 3722814 - DNA, 25 bp, Homo sapien
gcattgaacttctccacgatgttgg

SEQ ID NO: 3722815 - DNA, 25 bp, Homo sapien
gatgcgcgccgctgtagtagcagca

SEQ ID NO: 3722816 - DNA, 25 bp, Homo sapien
gcagaagttgtgtttgcacggcagc

SEQ ID NO: 3722817 - DNA, 25 bp, Homo sapien
tggttgcactctgggcagcgtacga

SEQ ID NO: 3722818 - DNA, 25 bp, Homo sapien
ttcattccttcggatctccacgtcg

SEQ ID NO: 3722819 - DNA, 25 bp, Homo sapien
ggatttcattccttcggatctccac

SEQ ID NO: 3722820 - DNA, 25 bp, Homo sapien
ccggatttcattccttcggatctcc

SEQ ID NO: 3722821 - DNA, 25 bp, Homo sapien
atttcattccttcggatctccacgt

SEQ ID NO: 3722822 - DNA, 25 bp, Homo sapien
cgggacactcattacataaacagca

SEQ ID NO: 3722823 - DNA, 25 bp, Homo sapien
ggcaccgggacactcattacataaa

SEQ ID NO: 3722824 - DNA, 25 bp, Homo sapien
cagcggcaccgggacactcattaca

SEQ ID NO: 3722825 - DNA, 25 bp, Homo sapien
gaccggggtcactgcctcggtgact

SEQ ID NO: 3722826 - DNA, 25 bp, Homo sapien
ctgtccagagagacggccggagttc

SEQ ID NO: 3722827 - DNA, 25 bp, Homo sapien
tgtccagagagacggccggagttct

SEQ ID NO: 3722828 - DNA, 25 bp, Homo sapien
ggaatccaaatagcggagccgctgt

SEQ ID NO: 3722829 - DNA, 25 bp, Homo sapien
ggctctcgggaggaatccaaatagc

SEQ ID NO: 3722830 - DNA, 25 bp, Homo sapien
gccggctctcgggaggaatccaaat

SEQ ID NO: 3722831 - DNA, 25 bp, Homo sapien
gggagagccggctctcgggaggaat

SEQ ID NO: 3722832 - DNA, 25 bp, Homo sapien
agtgacactgggctactgaagggtt

SEQ ID NO: 3722833 - DNA, 25 bp, Homo sapien
tcaataagtcaaactcatacttgag

SEQ ID NO: 3722834 - DNA, 25 bp, Homo sapien
gacactgggctactgaagggtttcc

SEQ ID NO: 3722835 - DNA, 25 bp, Homo sapien
ccacattcaataagtcaaactcata

SEQ ID NO: 3722836 - DNA, 25 bp, Homo sapien
tgtcaggaaggcacactcaacttca

SEQ ID NO: 3722837 - DNA, 25 bp, Homo sapien
gcacagtagtgctgccaactgtcag

SEQ ID NO: 3722838 - DNA, 25 bp, Homo sapien
gcaagcccggcaggcagacacggct

SEQ ID NO: 3722839 - DNA, 25 bp, Homo sapien
ctgagcgggcactcacacagcagca

SEQ ID NO: 3722840 - DNA, 25 bp, Homo sapien
cccaccccagttcaccgaatgagca

SEQ ID NO: 3722841 - DNA, 25 bp, Homo sapien
aatgagcaaatcaggttgccaagac

SEQ ID NO: 3722842 - DNA, 25 bp, Homo sapien
gagcaaatcaggttgccaagacact

SEQ ID NO: 3722843 - DNA, 25 bp, Homo sapien
gcctgccgtccccttcacgacccca

SEQ ID NO: 3722844 - DNA, 25 bp, Homo sapien
tgggtgggagtatcagagggactgt

SEQ ID NO: 3722845 - DNA, 25 bp, Homo sapien
gggtgggagtatcagagggactgtg

SEQ ID NO: 3722846 - DNA, 25 bp, Homo sapien
ttgggtgggagtatcagagggactg

SEQ ID NO: 3722847 - DNA, 25 bp, Homo sapien
tccaccaggcgcttgtctgactcga

SEQ ID NO: 3722848 - DNA, 25 bp, Homo sapien
cgagtttgtacagctggtcctcaat

SEQ ID NO: 3722849 - DNA, 25 bp, Homo sapien
tgtctgactcgagtttgtacagctg

SEQ ID NO: 3722850 - DNA, 25 bp, Homo sapien
caggcgcttgtctgactcgagtttg

SEQ ID NO: 3722851 - DNA, 25 bp, Homo sapien
ccccaccccgcagcatggccttggg

SEQ ID NO: 3722852 - DNA, 25 bp, Homo sapien
ccaaagccctgcgctcaagccaccc

SEQ ID NO: 3722853 - DNA, 25 bp, Homo sapien
caaagccctgcgctcaagccacccc

SEQ ID NO: 3722854 - DNA, 25 bp, Homo sapien
gcagcatggccttgggcttagctac

SEQ ID NO: 3722855 - DNA, 25 bp, Homo sapien
gcttctcgtactgcagccgaacttc

SEQ ID NO: 3722856 - DNA, 25 bp, Homo sapien
tgacatcctccgtcttatcaaagag

SEQ ID NO: 3722857 - DNA, 25 bp, Homo sapien
gggccttgtctaggacctccactgt

SEQ ID NO: 3722858 - DNA, 25 bp, Homo sapien
ttctcgctgcagaacttggcctggg

SEQ ID NO: 3722859 - DNA, 25 bp, Homo sapien
atcaggattttcacagacttggtgt

SEQ ID NO: 3722860 - DNA, 25 bp, Homo sapien
tcaggattttcacagacttggtgtt

SEQ ID NO: 3722861 - DNA, 25 bp, Homo sapien
ctccttcttggccacttcgttcagg

SEQ ID NO: 3722862 - DNA, 25 bp, Homo sapien
cttctagcattttccgcagctgctt

SEQ ID NO: 3722863 - DNA, 25 bp, Homo sapien
agcttggagttcaggtggccgatct

SEQ ID NO: 3722864 - DNA, 25 bp, Homo sapien
ccacttcgttcaggaagagcttgga

SEQ ID NO: 3722865 - DNA, 25 bp, Homo sapien
aagaatgttacatctcaggtgatgc

SEQ ID NO: 3722866 - DNA, 25 bp, Homo sapien
gggaggtcatgttgcttacccactg

SEQ ID NO: 3722867 - DNA, 25 bp, Homo sapien
ggaccattgacacctagaggcccaa

SEQ ID NO: 3722868 - DNA, 25 bp, Homo sapien
gatgcttgctcctctaccattagga

SEQ ID NO: 3722869 - DNA, 25 bp, Homo sapien
taacagttgtccacagaacagacga

SEQ ID NO: 3722870 - DNA, 25 bp, Homo sapien
gaacagacgagaatcttgcggccgc

SEQ ID NO: 3722871 - DNA, 25 bp, Homo sapien
catggttggccacggaagaacagta

SEQ ID NO: 3722872 - DNA, 25 bp, Homo sapien
cgacgacgtctctaggaaactggcc

SEQ ID NO: 3722873 - DNA, 25 bp, Homo sapien
gtttggtggacggctgcccatacac

SEQ ID NO: 3722874 - DNA, 25 bp, Homo sapien
ttagctcgtcacgtagtgtttggtg

SEQ ID NO: 3722875 - DNA, 25 bp, Homo sapien
tgtttggtggacggctgcccataca

SEQ ID NO: 3722876 - DNA, 25 bp, Homo sapien
tggcctttgaactccgtctgggaag

SEQ ID NO: 3722877 - DNA, 25 bp, Homo sapien
tgaaggtgccaaaagctgcttgaga

SEQ ID NO: 3722878 - DNA, 25 bp, Homo sapien
tttaaaagattccactctgaggctg

SEQ ID NO: 3722879 - DNA, 25 bp, Homo sapien
aggtctctggatgcataactcccga

SEQ ID NO: 3722880 - DNA, 25 bp, Homo sapien
ggaagtccacgattcatacaaagtg

SEQ ID NO: 3722881 - DNA, 25 bp, Homo sapien
ggtgtgtgctctagacagatacaga

SEQ ID NO: 3722882 - DNA, 25 bp, Homo sapien
gaataaatacctgcgccttgagaac

SEQ ID NO: 3722883 - DNA, 25 bp, Homo sapien
gaagttgctgtgtcaaaatccaggc

SEQ ID NO: 3722884 - DNA, 25 bp, Homo sapien
cccacaccgacgcctgaagatccca

SEQ ID NO: 3722885 - DNA, 25 bp, Homo sapien
ctccccacaccgacgcctgaagatc

SEQ ID NO: 3722886 - DNA, 25 bp, Homo sapien
acaccgacgcctgaagatcccaggc

SEQ ID NO: 3722887 - DNA, 25 bp, Homo sapien
cacaccgacgcctgaagatcccagg

SEQ ID NO: 3722888 - DNA, 25 bp, Homo sapien
cgcctggcaggaatgggactttaca

SEQ ID NO: 3722889 - DNA, 25 bp, Homo sapien
gattcccgatgagtctaagctaggc

SEQ ID NO: 3722890 - DNA, 25 bp, Homo sapien
aagaaagataactaggcacccagca

SEQ ID NO: 3722891 - DNA, 25 bp, Homo sapien
tgtgcagagcatcaggcaacaaccg

SEQ ID NO: 3722892 - DNA, 25 bp, Homo sapien
ggatacccaggaatcacgactccag

SEQ ID NO: 3722893 - DNA, 25 bp, Homo sapien
tcccatttcttagtaggccagagtg

SEQ ID NO: 3722894 - DNA, 25 bp, Homo sapien
cctgggtcctgaagttgcgaatcga

SEQ ID NO: 3722895 - DNA, 25 bp, Homo sapien
caaggcctgttaagaaccctgaggt

SEQ ID NO: 3722896 - DNA, 25 bp, Homo sapien
tggtcctaatgaacactaagcaagc

SEQ ID NO: 3722897 - DNA, 25 bp, Homo sapien
gtttgtaaacaacagcccatcctgg

SEQ ID NO: 3722898 - DNA, 25 bp, Homo sapien
gcatagcagcaggtcggaagaagaa

SEQ ID NO: 3722899 - DNA, 25 bp, Homo sapien
gagacctccagatctggcatagcag

SEQ ID NO: 3722900 - DNA, 25 bp, Homo sapien
caagtcactacagaaacatacccca

SEQ ID NO: 3722901 - DNA, 25 bp, Homo sapien
cggagactacgtatgtaatcctcac

SEQ ID NO: 3722902 - DNA, 25 bp, Homo sapien
taattaaaccatctcatcgtcttgc

SEQ ID NO: 3722903 - DNA, 25 bp, Homo sapien
tcttgcagacaagtcactacagaaa

SEQ ID NO: 3722904 - DNA, 25 bp, Homo sapien
tccctcaaaggatggcatgaactgg

SEQ ID NO: 3722905 - DNA, 25 bp, Homo sapien
gaaagaatccccattccagcagtag

SEQ ID NO: 3722906 - DNA, 25 bp, Homo sapien
gaactgggtctgcaaaaatgtcaat

SEQ ID NO: 3722907 - DNA, 25 bp, Homo sapien
gagccgaattcggtcctgaaaaaca

SEQ ID NO: 3722908 - DNA, 25 bp, Homo sapien
gagcccgggctccatcattactctg

SEQ ID NO: 3722909 - DNA, 25 bp, Homo sapien
cggagagcagctttcgctagcaggc

SEQ ID NO: 3722910 - DNA, 25 bp, Homo sapien
cctgctatctgggttgtggactgat

SEQ ID NO: 3722911 - DNA, 25 bp, Homo sapien
ctagcaggcttagacttcccgggca

SEQ ID NO: 3722912 - DNA, 25 bp, Homo sapien
atgccaccagttacagcccgccttg

SEQ ID NO: 3722913 - DNA, 25 bp, Homo sapien
ttcgaccaatcccaggccgggaggc

SEQ ID NO: 3722914 - DNA, 25 bp, Homo sapien
gccttgaaaactggcccgggtgaga

SEQ ID NO: 3722915 - DNA, 25 bp, Homo sapien
ctccttttcgaccaatcccaggccg

SEQ ID NO: 3722916 - DNA, 25 bp, Homo sapien
gaacccgagaggtggaggttgtgat

SEQ ID NO: 3722917 - DNA, 25 bp, Homo sapien
ttgaacccgagaggtggaggttgtg

SEQ ID NO: 3722918 - DNA, 25 bp, Homo sapien
cccgagaggtggaggttgtgatgag

SEQ ID NO: 3722919 - DNA, 25 bp, Homo sapien
acccgagaggtggaggttgtgatga

SEQ ID NO: 3722920 - DNA, 25 bp, Homo sapien
tgtccagctttcagtgaaaaattac

SEQ ID NO: 3722921 - DNA, 25 bp, Homo sapien
tcagttcctctcacagggtacatca

SEQ ID NO: 3722922 - DNA, 25 bp, Homo sapien
ggtacatcatgtccagctttcagtg

SEQ ID NO: 3722923 - DNA, 25 bp, Homo sapien
tctcacagggtacatcatgtccagc

SEQ ID NO: 3722924 - DNA, 25 bp, Homo sapien
agaagatgactgtcccctaaatcaa

SEQ ID NO: 3722925 - DNA, 25 bp, Homo sapien
cacagaggacctgagcacgtcccac

SEQ ID NO: 3722926 - DNA, 25 bp, Homo sapien
agaggacctgagcacgtcccactgt

SEQ ID NO: 3722927 - DNA, 25 bp, Homo sapien
aagaagatgactgtcccctaaatca

SEQ ID NO: 3722928 - DNA, 25 bp, Homo sapien
cttgctcacacataaaactgtggac

SEQ ID NO: 3722929 - DNA, 25 bp, Homo sapien
ccagctcccgctcagatacaaagac

SEQ ID NO: 3722930 - DNA, 25 bp, Homo sapien
tctccccaggaaggtgcgctggtcc

SEQ ID NO: 3722931 - DNA, 25 bp, Homo sapien
ggggcatcgatgttaaagccagaca

SEQ ID NO: 3722932 - DNA, 25 bp, Homo sapien
caacggggggcatcgatgttaaagc

SEQ ID NO: 3722933 - DNA, 25 bp, Homo sapien
ctggaaagacatgcgcccgatgaca

SEQ ID NO: 3722934 - DNA, 25 bp, Homo sapien
gaactggagcatgaagcccgtgatg

SEQ ID NO: 3722935 - DNA, 25 bp, Homo sapien
cgtgatgatcatgccgccaggaagc

SEQ ID NO: 3722936 - DNA, 25 bp, Homo sapien
ggccgagtcatacagcttcttggca

SEQ ID NO: 3722937 - DNA, 25 bp, Homo sapien
gtagttgactaaggcattgaaggac

SEQ ID NO: 3722938 - DNA, 25 bp, Homo sapien
ttcctgttggtgtagttgactaagg

SEQ ID NO: 3722939 - DNA, 25 bp, Homo sapien
actgatgtgggggaagccgcattcc

SEQ ID NO: 3722940 - DNA, 25 bp, Homo sapien
actgccagaagatcaccgccggcat

SEQ ID NO: 3722941 - DNA, 25 bp, Homo sapien
gtcaacatgttcatgcccacagccg

SEQ ID NO: 3722942 - DNA, 25 bp, Homo sapien
ctttgtcaacatgttcatgcccaca

SEQ ID NO: 3722943 - DNA, 25 bp, Homo sapien
agtggttgtggctgtgaagtaggaa

SEQ ID NO: 3722944 - DNA, 25 bp, Homo sapien
tgtgaagtaggaaagggccatctgc

SEQ ID NO: 3722945 - DNA, 25 bp, Homo sapien
gggctgaacgactagaatacaaaaa

SEQ ID NO: 3722946 - DNA, 25 bp, Homo sapien
agttgttcagaagcgctggaagatg

SEQ ID NO: 3722947 - DNA, 25 bp, Homo sapien
ggaagagaacagtaggagttgttca

SEQ ID NO: 3722948 - DNA, 25 bp, Homo sapien
aacagtaggagttgttcagaagcgc

SEQ ID NO: 3722949 - DNA, 25 bp, Homo sapien
gggatattgacacagttagccgcag

SEQ ID NO: 3722950 - DNA, 25 bp, Homo sapien
cagcggcccaccaagggcggcgctt

SEQ ID NO: 3722951 - DNA, 25 bp, Homo sapien
tgctgtcgcatcatggggatattga

SEQ ID NO: 3722952 - DNA, 25 bp, Homo sapien
atattgacacagttagccgcagcca

SEQ ID NO: 3722953 - DNA, 25 bp, Homo sapien
ttcacgcagattccctttatgagct

SEQ ID NO: 3722954 - DNA, 25 bp, Homo sapien
cttcacgcagattccctttatgagc

SEQ ID NO: 3722955 - DNA, 25 bp, Homo sapien
ccttcacgcagattccctttatgag

SEQ ID NO: 3722956 - DNA, 25 bp, Homo sapien
cacgcagattccctttatgagctcc

SEQ ID NO: 3722957 - DNA, 25 bp, Homo sapien
ggtgatccgagaaataactacttgg

SEQ ID NO: 3722958 - DNA, 25 bp, Homo sapien
caggagctgacatggtgatccgaga

SEQ ID NO: 3722959 - DNA, 25 bp, Homo sapien
taactacttgggtgatgcctatggc

SEQ ID NO: 3722960 - DNA, 25 bp, Homo sapien
gggtgatgcctatggccgcagctct

SEQ ID NO: 3722961 - DNA, 25 bp, Homo sapien
gctccagaaaatacttaccactagg

SEQ ID NO: 3722962 - DNA, 25 bp, Homo sapien
aaccaagtggttccctctccttcag

SEQ ID NO: 3722963 - DNA, 25 bp, Homo sapien
ctccagaaaatacttaccactaggc

SEQ ID NO: 3722964 - DNA, 25 bp, Homo sapien
cagaccaggaaccaagtggttccct

SEQ ID NO: 3722965 - DNA, 25 bp, Homo sapien
tgcatgaagtgcaatttctcaagcc

SEQ ID NO: 3722966 - DNA, 25 bp, Homo sapien
gcatgaagtgcaatttctcaagcct

SEQ ID NO: 3722967 - DNA, 25 bp, Homo sapien
atgaagtgcaatttctcaagccttt

SEQ ID NO: 3722968 - DNA, 25 bp, Homo sapien
catgaagtgcaatttctcaagcctt

SEQ ID NO: 3722969 - DNA, 25 bp, Homo sapien
gcacccgctcagcatgacctgcaat

SEQ ID NO: 3722970 - DNA, 25 bp, Homo sapien
acctgcaatggggcgtgcaggacct

SEQ ID NO: 3722971 - DNA, 25 bp, Homo sapien
aagcacccgctcagcatgacctgca

SEQ ID NO: 3722972 - DNA, 25 bp, Homo sapien
atggggcgtgcaggaccttgacttt

SEQ ID NO: 3722973 - DNA, 25 bp, Homo sapien
tttctgtgggaaaagcccacacgcc

SEQ ID NO: 3722974 - DNA, 25 bp, Homo sapien
catttctgtgggaaaagcccacacg

SEQ ID NO: 3722975 - DNA, 25 bp, Homo sapien
gtgggaaaagcccacacgccactgg

SEQ ID NO: 3722976 - DNA, 25 bp, Homo sapien
tctgtgggaaaagcccacacgccac

SEQ ID NO: 3722977 - DNA, 25 bp, Homo sapien
ggcagcatggtcaattaaaccaagt

SEQ ID NO: 3722978 - DNA, 25 bp, Homo sapien
gcatggtcaattaaaccaagtaagg

SEQ ID NO: 3722979 - DNA, 25 bp, Homo sapien
gagcgcgctggcagcatggtcaatt

SEQ ID NO: 3722980 - DNA, 25 bp, Homo sapien
gcgctggcagcatggtcaattaaac

SEQ ID NO: 3722981 - DNA, 25 bp, Homo sapien
gccaccaggaacaagcagtaagtta

SEQ ID NO: 3722982 - DNA, 25 bp, Homo sapien
ttggacacacaaaggaaatagaggg

SEQ ID NO: 3722983 - DNA, 25 bp, Homo sapien
gctttaccattacgcaggcctgact

SEQ ID NO: 3722984 - DNA, 25 bp, Homo sapien
tattattggcctctgtataccacaa

SEQ ID NO: 3722985 - DNA, 25 bp, Homo sapien
tagtgtcttggagcttcggttccag

SEQ ID NO: 3722986 - DNA, 25 bp, Homo sapien
ttggccttgatagtgtcttggagct

SEQ ID NO: 3722987 - DNA, 25 bp, Homo sapien
cttggagcttcggttccagatagga

SEQ ID NO: 3722988 - DNA, 25 bp, Homo sapien
ttcggttccagataggaaactggca

SEQ ID NO: 3722989 - DNA, 25 bp, Homo sapien
tgaagtagacataaggctcaagttc

SEQ ID NO: 3722990 - DNA, 25 bp, Homo sapien
gacataaggctcaagttctccatac

SEQ ID NO: 3722991 - DNA, 25 bp, Homo sapien
gtagacataaggctcaagttctcca

SEQ ID NO: 3722992 - DNA, 25 bp, Homo sapien
ccttattgaagtagacataaggctc

SEQ ID NO: 3722993 - DNA, 25 bp, Homo sapien
ggtcttttcctcaaccctggctgga

SEQ ID NO: 3722994 - DNA, 25 bp, Homo sapien
caagtgtgcacgtagctaaggagga

SEQ ID NO: 3722995 - DNA, 25 bp, Homo sapien
taatttcaaggttagcagcactccc

SEQ ID NO: 3722996 - DNA, 25 bp, Homo sapien
ggaagcagctagaagacattggcct

SEQ ID NO: 3722997 - DNA, 25 bp, Homo sapien
gagcagttgtctataagagaacagg

SEQ ID NO: 3722998 - DNA, 25 bp, Homo sapien
tgtctataagagaacaggaaatcca

SEQ ID NO: 3722999 - DNA, 25 bp, Homo sapien
cagttgtctataagagaacaggaaa

SEQ ID NO: 3723000 - DNA, 25 bp, Homo sapien
agagcagttgtctataagagaacag

SEQ ID NO: 3723001 - DNA, 25 bp, Homo sapien
gaatagagagtccaaacttcccaac

SEQ ID NO: 3723002 - DNA, 25 bp, Homo sapien
caagttcgacggacaaaattctggt

SEQ ID NO: 3723003 - DNA, 25 bp, Homo sapien
gaggcatagtgcttcgtcaccccaa

SEQ ID NO: 3723004 - DNA, 25 bp, Homo sapien
aaatagcagcttaggtccgtttgaa

SEQ ID NO: 3723005 - DNA, 25 bp, Homo sapien
ttcccctgaagacgaagcgatgcag

SEQ ID NO: 3723006 - DNA, 25 bp, Homo sapien
aaagtaggaggaagccggaccatct

SEQ ID NO: 3723007 - DNA, 25 bp, Homo sapien
tgtcgatcaaatataagtcccgcct

SEQ ID NO: 3723008 - DNA, 25 bp, Homo sapien
gagagactctccagttccagcgctt

SEQ ID NO: 3723009 - DNA, 25 bp, Homo sapien
ggagcaggagcgccatgccacccag

SEQ ID NO: 3723010 - DNA, 25 bp, Homo sapien
gcaggagcgccatgccacccaggag

SEQ ID NO: 3723011 - DNA, 25 bp, Homo sapien
gaggagcaggagcgccatgccaccc

SEQ ID NO: 3723012 - DNA, 25 bp, Homo sapien
ggagcgccatgccacccaggagcct

SEQ ID NO: 3723013 - DNA, 25 bp, Homo sapien
cgaaaagggaatacactgggctaga

SEQ ID NO: 3723014 - DNA, 25 bp, Homo sapien
tgggctagaaaatgagctacattcc

SEQ ID NO: 3723015 - DNA, 25 bp, Homo sapien
cttaactttactggtcctgagggct

SEQ ID NO: 3723016 - DNA, 25 bp, Homo sapien
gctacgatgtggatgggccttataa

SEQ ID NO: 3723017 - DNA, 25 bp, Homo sapien
tgtggtcaagatgggtgacgacccc

SEQ ID NO: 3723018 - DNA, 25 bp, Homo sapien
cacagtactgtgtatgagagcagac

SEQ ID NO: 3723019 - DNA, 25 bp, Homo sapien
gagccacatgtggtctagccctgtg

SEQ ID NO: 3723020 - DNA, 25 bp, Homo sapien
caagaataatagtatcgctgggtgc

SEQ ID NO: 3723021 - DNA, 25 bp, Homo sapien
attaaacattaaaggcctggcacag

SEQ ID NO: 3723022 - DNA, 25 bp, Homo sapien
gcaagacactgtccctaaaaaatta

SEQ ID NO: 3723023 - DNA, 25 bp, Homo sapien
cctgaaatctggagttcgagacaag

SEQ ID NO: 3723024 - DNA, 25 bp, Homo sapien
tgggtgtatcacgagatcaggaaat

SEQ ID NO: 3723025 - DNA, 25 bp, Homo sapien
taccggaagggtaggcatagtcagc

SEQ ID NO: 3723026 - DNA, 25 bp, Homo sapien
agtactgtaccggaagggtaggcat

SEQ ID NO: 3723027 - DNA, 25 bp, Homo sapien
tagggaccaacagcttgcatccccg

SEQ ID NO: 3723028 - DNA, 25 bp, Homo sapien
acacaggatagggaccaacagcttg

SEQ ID NO: 3723029 - DNA, 25 bp, Homo sapien
gaagagcacctgcatgttctccaag

SEQ ID NO: 3723030 - DNA, 25 bp, Homo sapien
ggcaaagcctccgtgtgtctcatta

SEQ ID NO: 3723031 - DNA, 25 bp, Homo sapien
tcatgaagtctgatgcggcaaagcc

SEQ ID NO: 3723032 - DNA, 25 bp, Homo sapien
tgggccatggtctaactccctagca

SEQ ID NO: 3723033 - DNA, 25 bp, Homo sapien
caagtcacagagcttatctcttcca

SEQ ID NO: 3723034 - DNA, 25 bp, Homo sapien
caggacaaggcgttttacaagtcac

SEQ ID NO: 3723035 - DNA, 25 bp, Homo sapien
ctgcttctgggcaggacaaggcgtt

SEQ ID NO: 3723036 - DNA, 25 bp, Homo sapien
tttacaagtcacagagcttatctct

SEQ ID NO: 3723037 - DNA, 25 bp, Homo sapien
gacatggtcagtctatcccaggcct

SEQ ID NO: 3723038 - DNA, 25 bp, Homo sapien
tataaattcttgtgtgcaaggcagc

SEQ ID NO: 3723039 - DNA, 25 bp, Homo sapien
ggcagcatttaacccaaggcattac

SEQ ID NO: 3723040 - DNA, 25 bp, Homo sapien
caaactgccatacagacaaggctgg

SEQ ID NO: 3723041 - DNA, 25 bp, Homo sapien
tcaggcgcagcagaaaaaacttcag

SEQ ID NO: 3723042 - DNA, 25 bp, Homo sapien
gacagctgcactggaatactgagga

SEQ ID NO: 3723043 - DNA, 25 bp, Homo sapien
ttctcgtgacatatctcagacgcag

SEQ ID NO: 3723044 - DNA, 25 bp, Homo sapien
tatctcagacgcagcaaagccgaag

SEQ ID NO: 3723045 - DNA, 25 bp, Homo sapien
tcctggttcaccggccttctttagc

SEQ ID NO: 3723046 - DNA, 25 bp, Homo sapien
taaggtcttggaatgagcattgccc

SEQ ID NO: 3723047 - DNA, 25 bp, Homo sapien
ctgcaagagcatcgtccacactaac

SEQ ID NO: 3723048 - DNA, 25 bp, Homo sapien
cacactaacgttggaacaaagggct

SEQ ID NO: 3723049 - DNA, 25 bp, Homo sapien
tgtctaagacccaaaaggaaaggca

SEQ ID NO: 3723050 - DNA, 25 bp, Homo sapien
ctaaggtccttatcttgccccaggc

SEQ ID NO: 3723051 - DNA, 25 bp, Homo sapien
ctggtgaactaaggtccttatcttg

SEQ ID NO: 3723052 - DNA, 25 bp, Homo sapien
tgaactaaggtccttatcttgcccc

SEQ ID NO: 3723053 - DNA, 25 bp, Homo sapien
aactaaggtccttatcttgccccag

SEQ ID NO: 3723054 - DNA, 25 bp, Homo sapien
gaccgctgagtcaagtaaccatagg

SEQ ID NO: 3723055 - DNA, 25 bp, Homo sapien
cctagcgaccgctgagtcaagtaac

SEQ ID NO: 3723056 - DNA, 25 bp, Homo sapien
tcaagtaaccataggagctggtcat

SEQ ID NO: 3723057 - DNA, 25 bp, Homo sapien
acaaagtcctgaacctagcgaccgc

SEQ ID NO: 3723058 - DNA, 25 bp, Homo sapien
gcctttcacctcgggaatgaccgtg

SEQ ID NO: 3723059 - DNA, 25 bp, Homo sapien
ccgtggtagtggctactaggagccc

SEQ ID NO: 3723060 - DNA, 25 bp, Homo sapien
tggtagtggctactaggagccccat

SEQ ID NO: 3723061 - DNA, 25 bp, Homo sapien
ggaatgaccgtggtagtggctacta

SEQ ID NO: 3723062 - DNA, 25 bp, Homo sapien
taacctcagccggtaggagggtgat

SEQ ID NO: 3723063 - DNA, 25 bp, Homo sapien
caagggctgcctcactttaggtcca

SEQ ID NO: 3723064 - DNA, 25 bp, Homo sapien
cagagtgaagttttcctcagacagg

SEQ ID NO: 3723065 - DNA, 25 bp, Homo sapien
ttcatgttccggtgctaacctcagc

SEQ ID NO: 3723066 - DNA, 25 bp, Homo sapien
cagcactgagactgtccacagcagt

SEQ ID NO: 3723067 - DNA, 25 bp, Homo sapien
agcactgagactgtccacagcagtg

SEQ ID NO: 3723068 - DNA, 25 bp, Homo sapien
gcactgagactgtccacagcagtgt

SEQ ID NO: 3723069 - DNA, 25 bp, Homo sapien
aatttgcctgctatccttggccggg

SEQ ID NO: 3723070 - DNA, 25 bp, Homo sapien
tttgcctgctatccttggccggggc

SEQ ID NO: 3723071 - DNA, 25 bp, Homo sapien
aaatttgcctgctatccttggccgg

SEQ ID NO: 3723072 - DNA, 25 bp, Homo sapien
tgcctgctatccttggccggggcca

SEQ ID NO: 3723073 - DNA, 25 bp, Homo sapien
agatgcagggccattagcagccgct

SEQ ID NO: 3723074 - DNA, 25 bp, Homo sapien
aaatgatttcctctgctctcgacat

SEQ ID NO: 3723075 - DNA, 25 bp, Homo sapien
tctgggatcatactcagagaatctc

SEQ ID NO: 3723076 - DNA, 25 bp, Homo sapien
aatcctaatcgggtacaattccatc

SEQ ID NO: 3723077 - DNA, 25 bp, Homo sapien
ctcctctcttaagagatttctgaga

SEQ ID NO: 3723078 - DNA, 25 bp, Homo sapien
cctcctctcttaagagatttctgag

SEQ ID NO: 3723079 - DNA, 25 bp, Homo sapien
cagcgctgagtaattgtgggcttct

SEQ ID NO: 3723080 - DNA, 25 bp, Homo sapien
aaataaaatggcagcgctgagtaat

SEQ ID NO: 3723081 - DNA, 25 bp, Homo sapien
taattgtgggcttctcggtaagcga

SEQ ID NO: 3723082 - DNA, 25 bp, Homo sapien
cggtaagcgatcaggttgatttcat

SEQ ID NO: 3723083 - DNA, 25 bp, Homo sapien
gctcctgagggtgggtatgggggct

SEQ ID NO: 3723084 - DNA, 25 bp, Homo sapien
ctcctgagggtgggtatgggggctt

SEQ ID NO: 3723085 - DNA, 25 bp, Homo sapien
agctcctgagggtgggtatgggggc

SEQ ID NO: 3723086 - DNA, 25 bp, Homo sapien
tcctgagggtgggtatgggggcttg

SEQ ID NO: 3723087 - DNA, 25 bp, Homo sapien
tgtgctgaatgccttatgacacaga

SEQ ID NO: 3723088 - DNA, 25 bp, Homo sapien
cagggccagggtccctaacttcaga

SEQ ID NO: 3723089 - DNA, 25 bp, Homo sapien
cactatgtagggtcttttgctaggg

SEQ ID NO: 3723090 - DNA, 25 bp, Homo sapien
cttgcttagagtgtgtccttcatcc

SEQ ID NO: 3723091 - DNA, 25 bp, Homo sapien
gagtcacctgtgaagcggcgatgtc

SEQ ID NO: 3723092 - DNA, 25 bp, Homo sapien
ttctctttgctgtcgggtgcgccgt

SEQ ID NO: 3723093 - DNA, 25 bp, Homo sapien
ttgaggtcatcgtcatggtggcccc

SEQ ID NO: 3723094 - DNA, 25 bp, Homo sapien
ggtgcgccgtgttcagagctgtcat

SEQ ID NO: 3723095 - DNA, 25 bp, Homo sapien
tcagagcacgcttccatttataggg

SEQ ID NO: 3723096 - DNA, 25 bp, Homo sapien
aagacttcatatgcacagggccggg

SEQ ID NO: 3723097 - DNA, 25 bp, Homo sapien
gaaatgcgtcactgagactgcccag

SEQ ID NO: 3723098 - DNA, 25 bp, Homo sapien
aaagggtaacgtgcctcacacagga

SEQ ID NO: 3723099 - DNA, 25 bp, Homo sapien
ctgcagtgagctgagattgtgccac

SEQ ID NO: 3723100 - DNA, 25 bp, Homo sapien
ctgagattgtgccactgcactccag

SEQ ID NO: 3723101 - DNA, 25 bp, Homo sapien
atcacttgagcctgggaagttgagg

SEQ ID NO: 3723102 - DNA, 25 bp, Homo sapien
ttggggaggatgaagtgggaagatc

SEQ ID NO: 3723103 - DNA, 25 bp, Homo sapien
actgcactgcatcctagagcaagac

SEQ ID NO: 3723104 - DNA, 25 bp, Homo sapien
tgcactgcatcctagagcaagaccc

SEQ ID NO: 3723105 - DNA, 25 bp, Homo sapien
ctgcactgcatcctagagcaagacc

SEQ ID NO: 3723106 - DNA, 25 bp, Homo sapien
tcaggacactcgagctccgtggtct

SEQ ID NO: 3723107 - DNA, 25 bp, Homo sapien
tcagagtggacatagtggtccgttc

SEQ ID NO: 3723108 - DNA, 25 bp, Homo sapien
tggtccgttcccactgtagctggga

SEQ ID NO: 3723109 - DNA, 25 bp, Homo sapien
aagcaggtaaaaaggcctccaggtg

SEQ ID NO: 3723110 - DNA, 25 bp, Homo sapien
ctgtccaccctatgtggccccacaa

SEQ ID NO: 3723111 - DNA, 25 bp, Homo sapien
cccaggctgagggtagcacctaaag

SEQ ID NO: 3723112 - DNA, 25 bp, Homo sapien
gagggtagcacctaaaggctgtaac

SEQ ID NO: 3723113 - DNA, 25 bp, Homo sapien
agcacctaaaggctgtaactcacag

SEQ ID NO: 3723114 - DNA, 25 bp, Homo sapien
ctgtataggtgagatcctggcccgc

SEQ ID NO: 3723115 - DNA, 25 bp, Homo sapien
tctgatcgactctttcaaagtgaag

SEQ ID NO: 3723116 - DNA, 25 bp, Homo sapien
cccaaggtggtctttctgatcgact

SEQ ID NO: 3723117 - DNA, 25 bp, Homo sapien
atttgcccttcggagcaggacctcg

SEQ ID NO: 3723118 - DNA, 25 bp, Homo sapien
ctgcagagcgtttcttgaatccagc

SEQ ID NO: 3723119 - DNA, 25 bp, Homo sapien
gtttcttgaatccagcggggaccca

SEQ ID NO: 3723120 - DNA, 25 bp, Homo sapien
gagcgtttcttgaatccagcgggga

SEQ ID NO: 3723121 - DNA, 25 bp, Homo sapien
aatccagcggggacccagctcatct

SEQ ID NO: 3723122 - DNA, 25 bp, Homo sapien
actctggagcagcatcggtgagttt

SEQ ID NO: 3723123 - DNA, 25 bp, Homo sapien
caaggaagggagtacgaagtcccag

SEQ ID NO: 3723124 - DNA, 25 bp, Homo sapien
ctctggagcagcatcggtgagtttg

SEQ ID NO: 3723125 - DNA, 25 bp, Homo sapien
gagcaaggaagggagtacgaagtcc

SEQ ID NO: 3723126 - DNA, 25 bp, Homo sapien
tctcctgggcttacacacactagtc

SEQ ID NO: 3723127 - DNA, 25 bp, Homo sapien
agcagtagttggctttgaccccaga

SEQ ID NO: 3723128 - DNA, 25 bp, Homo sapien
aagggactggacaggctcttctcga

SEQ ID NO: 3723129 - DNA, 25 bp, Homo sapien
cacagttggattcttctctaagccc

SEQ ID NO: 3723130 - DNA, 25 bp, Homo sapien
tgtcttcgtcgtcatgataaacccg

SEQ ID NO: 3723131 - DNA, 25 bp, Homo sapien
aaggagcttgtctgagccttcaggc

SEQ ID NO: 3723132 - DNA, 25 bp, Homo sapien
agaaagctaagatccgcctccagga

SEQ ID NO: 3723133 - DNA, 25 bp, Homo sapien
taagggctggacacatagcagagtc

SEQ ID NO: 3723134 - DNA, 25 bp, Homo sapien
agtaggttttattatccccattgtg

SEQ ID NO: 3723135 - DNA, 25 bp, Homo sapien
tttattatccccattgtgcaggtga

SEQ ID NO: 3723136 - DNA, 25 bp, Homo sapien
gttttattatccccattgtgcaggt

SEQ ID NO: 3723137 - DNA, 25 bp, Homo sapien
aggttttattatccccattgtgcag

SEQ ID NO: 3723138 - DNA, 25 bp, Homo sapien
gagcagtggtcccgaccacagtgca

SEQ ID NO: 3723139 - DNA, 25 bp, Homo sapien
agcagtggtcccgaccacagtgcat

SEQ ID NO: 3723140 - DNA, 25 bp, Homo sapien
cagagcagtggtcccgaccacagtg

SEQ ID NO: 3723141 - DNA, 25 bp, Homo sapien
gcagtacaagggcttctgcacggat

SEQ ID NO: 3723142 - DNA, 25 bp, Homo sapien
ccagtctttccaatgattggagtcc

SEQ ID NO: 3723143 - DNA, 25 bp, Homo sapien
caatgattggagtccacactaagcc

SEQ ID NO: 3723144 - DNA, 25 bp, Homo sapien
ctttccaatgattggagtccacact

SEQ ID NO: 3723145 - DNA, 25 bp, Homo sapien
taagccagttaagctttgccctttg

SEQ ID NO: 3723146 - DNA, 25 bp, Homo sapien
gtcttgtgaatgatcatctgctcca

SEQ ID NO: 3723147 - DNA, 25 bp, Homo sapien
tcttcaccacccatgtggttcatca

SEQ ID NO: 3723148 - DNA, 25 bp, Homo sapien
tctgctccatctgctaaatctacat

SEQ ID NO: 3723149 - DNA, 25 bp, Homo sapien
catctgctaaatctacatcctcttc

SEQ ID NO: 3723150 - DNA, 25 bp, Homo sapien
agatctggcattttttcatcatcac

SEQ ID NO: 3723151 - DNA, 25 bp, Homo sapien
cagatctggcattttttcatcatca

SEQ ID NO: 3723152 - DNA, 25 bp, Homo sapien
tccagatctggcattttttcatcat

SEQ ID NO: 3723153 - DNA, 25 bp, Homo sapien
ccagatctggcattttttcatcatc

SEQ ID NO: 3723154 - DNA, 25 bp, Homo sapien
gtttctgattggggtgaaatatcag

SEQ ID NO: 3723155 - DNA, 25 bp, Homo sapien
ttctgattggggtgaaatatcaggt

SEQ ID NO: 3723156 - DNA, 25 bp, Homo sapien
tctgattggggtgaaatatcaggtc

SEQ ID NO: 3723157 - DNA, 25 bp, Homo sapien
ctgattggggtgaaatatcaggtca

SEQ ID NO: 3723158 - DNA, 25 bp, Homo sapien
gtcgccggggccaaaagacaagcaa

SEQ ID NO: 3723159 - DNA, 25 bp, Homo sapien
agcaaagcggaaggaaaagaggcgt

SEQ ID NO: 3723160 - DNA, 25 bp, Homo sapien
tgcgcactgacgatggtgagtcgcc

SEQ ID NO: 3723161 - DNA, 25 bp, Homo sapien
ttcagttagcgaacggttgcgcact

SEQ ID NO: 3723162 - DNA, 25 bp, Homo sapien
gtggtcaccttctccgtgagaagcc

SEQ ID NO: 3723163 - DNA, 25 bp, Homo sapien
tcagcacctgcttggtgagcgcgat

SEQ ID NO: 3723164 - DNA, 25 bp, Homo sapien
cgaaccgcgcttgagactctggcgt

SEQ ID NO: 3723165 - DNA, 25 bp, Homo sapien
gagcgcgattacgtcagtaccacag

SEQ ID NO: 3723166 - DNA, 25 bp, Homo sapien
tcttcctggagtaccatgtttcgag

SEQ ID NO: 3723167 - DNA, 25 bp, Homo sapien
atgtttcgagctgcctgacctagca

SEQ ID NO: 3723168 - DNA, 25 bp, Homo sapien
ttctgagtgcaagatggcatcttcc

SEQ ID NO: 3723169 - DNA, 25 bp, Homo sapien
gagtaccatgtttcgagctgcctga

SEQ ID NO: 3723170 - DNA, 25 bp, Homo sapien
tgttattattgccatcttccttaaa

SEQ ID NO: 3723171 - DNA, 25 bp, Homo sapien
tggtattgaagatgtgttgttatta

SEQ ID NO: 3723172 - DNA, 25 bp, Homo sapien
ttgaagatgtgttgttattattgcc

SEQ ID NO: 3723173 - DNA, 25 bp, Homo sapien
gaagatgtgttgttattattgccat

SEQ ID NO: 3723174 - DNA, 25 bp, Homo sapien
atagttgctggagggggcatactca

SEQ ID NO: 3723175 - DNA, 25 bp, Homo sapien
caaatagttgctggagggggcatac

SEQ ID NO: 3723176 - DNA, 25 bp, Homo sapien
ctgcagcaaatagttgctggagggg

SEQ ID NO: 3723177 - DNA, 25 bp, Homo sapien
cagcaaatagttgctggagggggca

SEQ ID NO: 3723178 - DNA, 25 bp, Homo sapien
tgaaagcagaccagggataatgatt

SEQ ID NO: 3723179 - DNA, 25 bp, Homo sapien
tcgagaaagtcatccttggccaccc

SEQ ID NO: 3723180 - DNA, 25 bp, Homo sapien
tttgccatcgagaaagtcatccttg

SEQ ID NO: 3723181 - DNA, 25 bp, Homo sapien
ggcatctttgccatcgagaaagtca

SEQ ID NO: 3723182 - DNA, 25 bp, Homo sapien
tcaggcatctttgccatcgagaaag

SEQ ID NO: 3723183 - DNA, 25 bp, Homo sapien
gaggttcataaagggtggactctgc

SEQ ID NO: 3723184 - DNA, 25 bp, Homo sapien
ctgctcctgattctcatcctttacc

SEQ ID NO: 3723185 - DNA, 25 bp, Homo sapien
ggagccctcaatttaacatggggag

SEQ ID NO: 3723186 - DNA, 25 bp, Homo sapien
tcataaagggtggactctgctcctg

SEQ ID NO: 3723187 - DNA, 25 bp, Homo sapien
cactatgctgcacaaggcaatctca

SEQ ID NO: 3723188 - DNA, 25 bp, Homo sapien
cacctgtcctgtacaagctatctgt

SEQ ID NO: 3723189 - DNA, 25 bp, Homo sapien
gaagaaaggtttgcaaagccaatta

SEQ ID NO: 3723190 - DNA, 25 bp, Homo sapien
taaggttggtctctataccccataa

SEQ ID NO: 3723191 - DNA, 25 bp, Homo sapien
ggtcctgtagatccgatgactgttc

SEQ ID NO: 3723192 - DNA, 25 bp, Homo sapien
ttcaactggtcctgtagatccgatg

SEQ ID NO: 3723193 - DNA, 25 bp, Homo sapien
ctgtagatccgatgactgttcaaca

SEQ ID NO: 3723194 - DNA, 25 bp, Homo sapien
caactggtcctgtagatccgatgac

SEQ ID NO: 3723195 - DNA, 25 bp, Homo sapien
cattaggcaaaggagtcctacagca

SEQ ID NO: 3723196 - DNA, 25 bp, Homo sapien
gaaaaccaaacccagaggacagctg

SEQ ID NO: 3723197 - DNA, 25 bp, Homo sapien
ttcaataagagcatgggttaatccg

SEQ ID NO: 3723198 - DNA, 25 bp, Homo sapien
taatccgattcaagaagtgcttcca

SEQ ID NO: 3723199 - DNA, 25 bp, Homo sapien
catatttggcagtaacgtcatgcaa

SEQ ID NO: 3723200 - DNA, 25 bp, Homo sapien
taggtttgacaacagactcatggta

SEQ ID NO: 3723201 - DNA, 25 bp, Homo sapien
aattctaggaatgcaggtcaaggca

SEQ ID NO: 3723202 - DNA, 25 bp, Homo sapien
tgataatgataccacttgcctaatg

SEQ ID NO: 3723203 - DNA, 25 bp, Homo sapien
gtatgagaaataaacgtaatctgat

SEQ ID NO: 3723204 - DNA, 25 bp, Homo sapien
taccttaagttaatatccatatgta

SEQ ID NO: 3723205 - DNA, 25 bp, Homo sapien
taaacgtaatctgataatgcttagt

SEQ ID NO: 3723206 - DNA, 25 bp, Homo sapien
tgatgattggacaataacaatatga

SEQ ID NO: 3723207 - DNA, 25 bp, Homo sapien
aacttaagtatttctttgcttcttg

SEQ ID NO: 3723208 - DNA, 25 bp, Homo sapien
tgtatacatttccacctgttctaac

SEQ ID NO: 3723209 - DNA, 25 bp, Homo sapien
gttacgatgttctctagtgactaaa

SEQ ID NO: 3723210 - DNA, 25 bp, Homo sapien
taacatttgttccagcatgaagaaa

SEQ ID NO: 3723211 - DNA, 25 bp, Homo sapien
taaaaatattatcttccggcacaac

SEQ ID NO: 3723212 - DNA, 25 bp, Homo sapien
tttccactctatccctaatacaggg

SEQ ID NO: 3723213 - DNA, 25 bp, Homo sapien
acaacttagacgttatttagtgaag

SEQ ID NO: 3723214 - DNA, 25 bp, Homo sapien
agtactgctttggtattatcacaca

SEQ ID NO: 3723215 - DNA, 25 bp, Homo sapien
cttctctatcattccaactatatgt

SEQ ID NO: 3723216 - DNA, 25 bp, Homo sapien
gccatgcaaatcttctctatcattc

SEQ ID NO: 3723217 - DNA, 25 bp, Homo sapien
cacgaatttgtatgtcatcttgcgc

SEQ ID NO: 3723218 - DNA, 25 bp, Homo sapien
aatttgtatgtcatcttgcgcaggg

SEQ ID NO: 3723219 - DNA, 25 bp, Homo sapien
tctagcccctcgctcaggcgcccac

SEQ ID NO: 3723220 - DNA, 25 bp, Homo sapien
ccgctctagcccctcgctcaggcgc

SEQ ID NO: 3723221 - DNA, 25 bp, Homo sapien
gctctagcccctcgctcaggcgccc

SEQ ID NO: 3723222 - DNA, 25 bp, Homo sapien
tagcccctcgctcaggcgcccaccg

SEQ ID NO: 3723223 - DNA, 25 bp, Homo sapien
tggcaggcttgctccgcccgcccat

SEQ ID NO: 3723224 - DNA, 25 bp, Homo sapien
ctggcaggcttgctccgcccgccca

SEQ ID NO: 3723225 - DNA, 25 bp, Homo sapien
gctggcaggcttgctccgcccgccc

SEQ ID NO: 3723226 - DNA, 25 bp, Homo sapien
tcggcctgcgactcagggcgcgcac

SEQ ID NO: 3723227 - DNA, 25 bp, Homo sapien
ctcggcctgcgactcagggcgcgca

SEQ ID NO: 3723228 - DNA, 25 bp, Homo sapien
cggcctgcgactcagggcgcgcact

SEQ ID NO: 3723229 - DNA, 25 bp, Homo sapien
ggcctgcgactcagggcgcgcactc

SEQ ID NO: 3723230 - DNA, 25 bp, Homo sapien
gggaggacaaaggtctcgagacaca

SEQ ID NO: 3723231 - DNA, 25 bp, Homo sapien
aggacaaaggtctcgagacacagct

SEQ ID NO: 3723232 - DNA, 25 bp, Homo sapien
aggcgctcgcgttcccgccttgcgg

SEQ ID NO: 3723233 - DNA, 25 bp, Homo sapien
caaaggtctcgagacacagctcggg

SEQ ID NO: 3723234 - DNA, 25 bp, Homo sapien
tgtatctcagcgtcacgaagtgcag

SEQ ID NO: 3723235 - DNA, 25 bp, Homo sapien
tatctcagcgtcacgaagtgcagcc

SEQ ID NO: 3723236 - DNA, 25 bp, Homo sapien
atctcagcgtcacgaagtgcagcca

SEQ ID NO: 3723237 - DNA, 25 bp, Homo sapien
ttctgtatctcagcgtcacgaagtg

SEQ ID NO: 3723238 - DNA, 25 bp, Homo sapien
ggtctgccgatctcttcagcacctg

SEQ ID NO: 3723239 - DNA, 25 bp, Homo sapien
cttagggctacttcttcgtgtacat

SEQ ID NO: 3723240 - DNA, 25 bp, Homo sapien
ttggtctggaggtctgccgatctct

SEQ ID NO: 3723241 - DNA, 25 bp, Homo sapien
tttgcaaggcttcccggatgtgctt

SEQ ID NO: 3723242 - DNA, 25 bp, Homo sapien
caccaaccagctggctaagtacata

SEQ ID NO: 3723243 - DNA, 25 bp, Homo sapien
tccagtcacgtgtcctttttcacca

SEQ ID NO: 3723244 - DNA, 25 bp, Homo sapien
cagcagttttctagatgctcaggga

SEQ ID NO: 3723245 - DNA, 25 bp, Homo sapien
tggcctttggtcatgtctattccag

SEQ ID NO: 3723246 - DNA, 25 bp, Homo sapien
aaaagtcacattagatgcctggaag

SEQ ID NO: 3723247 - DNA, 25 bp, Homo sapien
gtgatagtcaagatacttttcagcc

SEQ ID NO: 3723248 - DNA, 25 bp, Homo sapien
attcttgattccagcctctcccaac

SEQ ID NO: 3723249 - DNA, 25 bp, Homo sapien
caatatcatggctctcattcttgat

SEQ ID NO: 3723250 - DNA, 25 bp, Homo sapien
gcacaaggttaataacacagtttga

SEQ ID NO: 3723251 - DNA, 25 bp, Homo sapien
ttgtttatcaggcacaaggttaata

SEQ ID NO: 3723252 - DNA, 25 bp, Homo sapien
agcacccgatatgcctcctgaagca

SEQ ID NO: 3723253 - DNA, 25 bp, Homo sapien
ttcagcacccgatatgcctcctgaa

SEQ ID NO: 3723254 - DNA, 25 bp, Homo sapien
tgacaactgtcacctcggatttact

SEQ ID NO: 3723255 - DNA, 25 bp, Homo sapien
cacctcggatttactaccttttgca

SEQ ID NO: 3723256 - DNA, 25 bp, Homo sapien
cttaacacattcagtgacaactgtc

SEQ ID NO: 3723257 - DNA, 25 bp, Homo sapien
cattcagtgacaactgtcacctcgg

SEQ ID NO: 3723258 - DNA, 25 bp, Homo sapien
tttcttctggcagttcaaggctcgt

SEQ ID NO: 3723259 - DNA, 25 bp, Homo sapien
tagacgtcactgaaatataactccc

SEQ ID NO: 3723260 - DNA, 25 bp, Homo sapien
caaggctcgtatagacgtcactgaa

SEQ ID NO: 3723261 - DNA, 25 bp, Homo sapien
cactgaaatataactccccaccatg

SEQ ID NO: 3723262 - DNA, 25 bp, Homo sapien
catagactgatgaaaagcatgcatt

SEQ ID NO: 3723263 - DNA, 25 bp, Homo sapien
catcctggctattagcagaaaggag

SEQ ID NO: 3723264 - DNA, 25 bp, Homo sapien
accagcttgggaacaattgtcctca

SEQ ID NO: 3723265 - DNA, 25 bp, Homo sapien
gtgatctcatatagcctcatcctgg

SEQ ID NO: 3723266 - DNA, 25 bp, Homo sapien
gttccttccagtataaagcaccacc

SEQ ID NO: 3723267 - DNA, 25 bp, Homo sapien
tgttttgaattgtaatgagattggc

SEQ ID NO: 3723268 - DNA, 25 bp, Homo sapien
tgaccaaacgtggagggcagaaccc

SEQ ID NO: 3723269 - DNA, 25 bp, Homo sapien
agcaagttccttccagtataaagca

SEQ ID NO: 3723270 - DNA, 25 bp, Homo sapien
tcctccattgtaaataacttggcat

SEQ ID NO: 3723271 - DNA, 25 bp, Homo sapien
cctccattgtaaataacttggcatc

SEQ ID NO: 3723272 - DNA, 25 bp, Homo sapien
aagaggcgaaatgttgcagaaacaa

SEQ ID NO: 3723273 - DNA, 25 bp, Homo sapien
tgaagaggcgaaatgttgcagaaac

SEQ ID NO: 3723274 - DNA, 25 bp, Homo sapien
caagagaggattaaagtgaatggaa

SEQ ID NO: 3723275 - DNA, 25 bp, Homo sapien
agagaggattaaagtgaatggaaaa

SEQ ID NO: 3723276 - DNA, 25 bp, Homo sapien
aagagaggattaaagtgaatggaaa

SEQ ID NO: 3723277 - DNA, 25 bp, Homo sapien
ttaactccaaagcagaacagcctcc

SEQ ID NO: 3723278 - DNA, 25 bp, Homo sapien
tcttcatccacttcaacaatttcac

SEQ ID NO: 3723279 - DNA, 25 bp, Homo sapien
ctgatcagaaaatcttgagcaaatc

SEQ ID NO: 3723280 - DNA, 25 bp, Homo sapien
ctctccaattggtctgatcagaaaa

SEQ ID NO: 3723281 - DNA, 25 bp, Homo sapien
tcagactcttctgcaagcttaaatg

SEQ ID NO: 3723282 - DNA, 25 bp, Homo sapien
ctcttctgcaagcttaaatggatct

SEQ ID NO: 3723283 - DNA, 25 bp, Homo sapien
ttctgcaagcttaaatggatctgtg

SEQ ID NO: 3723284 - DNA, 25 bp, Homo sapien
agggacacatctggacttcatactg

SEQ ID NO: 3723285 - DNA, 25 bp, Homo sapien
tactgtggtcccctggttggctata

SEQ ID NO: 3723286 - DNA, 25 bp, Homo sapien
taaaaaacatgcagatcactcttgc

SEQ ID NO: 3723287 - DNA, 25 bp, Homo sapien
cagatcactcttgcccactactgtg

SEQ ID NO: 3723288 - DNA, 25 bp, Homo sapien
tgtggtcccctggttggctatagat

SEQ ID NO: 3723289 - DNA, 25 bp, Homo sapien
gtacagtggcgtgatgcttactcac

SEQ ID NO: 3723290 - DNA, 25 bp, Homo sapien
ttcctgggttcaagcaattctcctg

SEQ ID NO: 3723291 - DNA, 25 bp, Homo sapien
ggcatgagccactgtgcccggcccc

SEQ ID NO: 3723292 - DNA, 25 bp, Homo sapien
cctctacttcctgggttcaagcaat

SEQ ID NO: 3723293 - DNA, 25 bp, Homo sapien
ttcagtgatttggaatatggtggct

SEQ ID NO: 3723294 - DNA, 25 bp, Homo sapien
tttcagtgatttggaatatggtggc

SEQ ID NO: 3723295 - DNA, 25 bp, Homo sapien
ttttcagtgatttggaatatggtgg

SEQ ID NO: 3723296 - DNA, 25 bp, Homo sapien
ggtgctatgcaaaagatcagaagga

SEQ ID NO: 3723297 - DNA, 25 bp, Homo sapien
caaaagtcctcctaccaaacatgat

SEQ ID NO: 3723298 - DNA, 25 bp, Homo sapien
accactatgtggcaccagaactttg

SEQ ID NO: 3723299 - DNA, 25 bp, Homo sapien
tgaacaaggcttaagacagcttctc

SEQ ID NO: 3723300 - DNA, 25 bp, Homo sapien
ggtgagatacttatgattcatttgt

SEQ ID NO: 3723301 - DNA, 25 bp, Homo sapien
gagatacttatgattcatttgtttt

SEQ ID NO: 3723302 - DNA, 25 bp, Homo sapien
gtgagatacttatgattcatttgtt

SEQ ID NO: 3723303 - DNA, 25 bp, Homo sapien
gggtgagatacttatgattcatttg

SEQ ID NO: 3723304 - DNA, 25 bp, Homo sapien
cagtgggagttgtgctttcaggaat

SEQ ID NO: 3723305 - DNA, 25 bp, Homo sapien
cccactgcggaaaggaattgttaca

SEQ ID NO: 3723306 - DNA, 25 bp, Homo sapien
cagggtcagcagttgaacagaaact

SEQ ID NO: 3723307 - DNA, 25 bp, Homo sapien
ggctcactcagcaggaggaaattaa

SEQ ID NO: 3723308 - DNA, 25 bp, Homo sapien
caagtctggattacagtgtgcctag

SEQ ID NO: 3723309 - DNA, 25 bp, Homo sapien
tctctctggcttatgaggcatcatg

SEQ ID NO: 3723310 - DNA, 25 bp, Homo sapien
tagaacatcattgactggccagtct

SEQ ID NO: 3723311 - DNA, 25 bp, Homo sapien
tctggcccagacaagatagcaagac

SEQ ID NO: 3723312 - DNA, 25 bp, Homo sapien
catttccctttttagttgctatatt

SEQ ID NO: 3723313 - DNA, 25 bp, Homo sapien
taatcatttccctttttagttgcta

SEQ ID NO: 3723314 - DNA, 25 bp, Homo sapien
tccctttttagttgctatattctta

SEQ ID NO: 3723315 - DNA, 25 bp, Homo sapien
tagttgctatattcttaaatttggg

SEQ ID NO: 3723316 - DNA, 25 bp, Homo sapien
tattaatatttaacctggctgggca

SEQ ID NO: 3723317 - DNA, 25 bp, Homo sapien
aatgtacagtataatagctgaacac

SEQ ID NO: 3723318 - DNA, 25 bp, Homo sapien
atagctgaacacataacatatcatc

SEQ ID NO: 3723319 - DNA, 25 bp, Homo sapien
tcatctaaaacagaacccctttgaa

SEQ ID NO: 3723320 - DNA, 25 bp, Homo sapien
tgtggtctctgtagtaatcttgaat

SEQ ID NO: 3723321 - DNA, 25 bp, Homo sapien
gctgtggtctctgtagtaatcttga

SEQ ID NO: 3723322 - DNA, 25 bp, Homo sapien
ctggattggcaatactactgctgtg

SEQ ID NO: 3723323 - DNA, 25 bp, Homo sapien
gattggcaatactactgctgtggtc

SEQ ID NO: 3723324 - DNA, 25 bp, Homo sapien
agttccagatcaaggtccaacaggg

SEQ ID NO: 3723325 - DNA, 25 bp, Homo sapien
caaacaaaccataacagacgggttg

SEQ ID NO: 3723326 - DNA, 25 bp, Homo sapien
tcctcatatggactttcctctatat

SEQ ID NO: 3723327 - DNA, 25 bp, Homo sapien
tatacaatggacactgttctggagg

SEQ ID NO: 3723328 - DNA, 25 bp, Homo sapien
ctctctttccagaatccttcactat

SEQ ID NO: 3723329 - DNA, 25 bp, Homo sapien
taactaaccctctctttccagaatc

SEQ ID NO: 3723330 - DNA, 25 bp, Homo sapien
tctttccagaatccttcactatata

SEQ ID NO: 3723331 - DNA, 25 bp, Homo sapien
ctaactaaccctctctttccagaat

SEQ ID NO: 3723332 - DNA, 25 bp, Homo sapien
gatgcctaagtcaagtaattgttcc

SEQ ID NO: 3723333 - DNA, 25 bp, Homo sapien
ggttgctgaatgatcctggatggtt

SEQ ID NO: 3723334 - DNA, 25 bp, Homo sapien
tcagaaaggacacccagacaactta

SEQ ID NO: 3723335 - DNA, 25 bp, Homo sapien
aattgttccttagcaagagggatct

SEQ ID NO: 3723336 - DNA, 25 bp, Homo sapien
gacatgatccttctaactcagtgga

SEQ ID NO: 3723337 - DNA, 25 bp, Homo sapien
aatggcattatggaagtttcccaag

SEQ ID NO: 3723338 - DNA, 25 bp, Homo sapien
gctcaggcttggcatgcatttataa

SEQ ID NO: 3723339 - DNA, 25 bp, Homo sapien
caaaggttaaggatagacatgatcc

SEQ ID NO: 3723340 - DNA, 25 bp, Homo sapien
gcagaagttacggatggagcggtca

SEQ ID NO: 3723341 - DNA, 25 bp, Homo sapien
ctgcaacgctttccaggtcggcggc

SEQ ID NO: 3723342 - DNA, 25 bp, Homo sapien
ggcggcgtaccccaaaaggtgtgca

SEQ ID NO: 3723343 - DNA, 25 bp, Homo sapien
tgcgggcagcatgagcgccctgcaa

SEQ ID NO: 3723344 - DNA, 25 bp, Homo sapien
ctcgcgcctcgagactcctagggta

SEQ ID NO: 3723345 - DNA, 25 bp, Homo sapien
actcctagggtacgggctctctgcg

SEQ ID NO: 3723346 - DNA, 25 bp, Homo sapien
ggcacagctgcggaccagcagtcct

SEQ ID NO: 3723347 - DNA, 25 bp, Homo sapien
tgcggctcgcgatcacgtggcgcca

SEQ ID NO: 3723348 - DNA, 25 bp, Homo sapien
cgtctgcacgccaagtttccaactg

SEQ ID NO: 3723349 - DNA, 25 bp, Homo sapien
gctccgcggaccaatggcaaggtaa

SEQ ID NO: 3723350 - DNA, 25 bp, Homo sapien
agactgcaacggagcgtccgcggcc

SEQ ID NO: 3723351 - DNA, 25 bp, Homo sapien
cgaccagccaatcacaagcgggtgc

SEQ ID NO: 3723352 - DNA, 25 bp, Homo sapien
tgcgcagccgcccgcaccgcagcag

SEQ ID NO: 3723353 - DNA, 25 bp, Homo sapien
cgcctgcaggatcccccggccgcga

SEQ ID NO: 3723354 - DNA, 25 bp, Homo sapien
tgggcagtgcggcggctgcctgccc

SEQ ID NO: 3723355 - DNA, 25 bp, Homo sapien
ttgggttcacaagcgccacagccaa

SEQ ID NO: 3723356 - DNA, 25 bp, Homo sapien
agtcgcagcccgatgatcaccgtct

SEQ ID NO: 3723357 - DNA, 25 bp, Homo sapien
gtcgttcgtgtcctccagtcgcagc

SEQ ID NO: 3723358 - DNA, 25 bp, Homo sapien
gaacgacacgtcgttcgtgtcctcc

SEQ ID NO: 3723359 - DNA, 25 bp, Homo sapien
atcaccgtctcctcattctcgccca

SEQ ID NO: 3723360 - DNA, 25 bp, Homo sapien
tattgatgttctgcccgtacacccg

SEQ ID NO: 3723361 - DNA, 25 bp, Homo sapien
cgtacacccgcagcttgacccgggt

SEQ ID NO: 3723362 - DNA, 25 bp, Homo sapien
gtctcgttattgatgttctgcccgt

SEQ ID NO: 3723363 - DNA, 25 bp, Homo sapien
agcttgacccgggtccgttcgctca

SEQ ID NO: 3723364 - DNA, 25 bp, Homo sapien
gccgccgctcgtgctcggtgaaggc

SEQ ID NO: 3723365 - DNA, 25 bp, Homo sapien
tggcgccgccgctcgtgctcggtga

SEQ ID NO: 3723366 - DNA, 25 bp, Homo sapien
cgctcgtgctcggtgaaggcgatgc

SEQ ID NO: 3723367 - DNA, 25 bp, Homo sapien
cgtgctcggtgaaggcgatgcggga

SEQ ID NO: 3723368 - DNA, 25 bp, Homo sapien
tgtcctcgccgtcgtggtaaatcca

SEQ ID NO: 3723369 - DNA, 25 bp, Homo sapien
tggagagcgacgtgcacaggtaata

SEQ ID NO: 3723370 - DNA, 25 bp, Homo sapien
ccatcttgcgtagcggtttgatctc

SEQ ID NO: 3723371 - DNA, 25 bp, Homo sapien
ggtaaatccaggtggtctcggccca

SEQ ID NO: 3723372 - DNA, 25 bp, Homo sapien
cagcagcagcgaaatgaagatcacc

SEQ ID NO: 3723373 - DNA, 25 bp, Homo sapien
tatagacggtgcctatctcctggcc

SEQ ID NO: 3723374 - DNA, 25 bp, Homo sapien
cagcagcttgctgaccgggtaggaa

SEQ ID NO: 3723375 - DNA, 25 bp, Homo sapien
gtctttgacaaacagcaggtccacg

SEQ ID NO: 3723376 - DNA, 25 bp, Homo sapien
gcacggggtgtcaccaggtagccca

SEQ ID NO: 3723377 - DNA, 25 bp, Homo sapien
ttgtaggcacggggtgtcaccaggt

SEQ ID NO: 3723378 - DNA, 25 bp, Homo sapien
gggtgtcaccaggtagcccaggcta

SEQ ID NO: 3723379 - DNA, 25 bp, Homo sapien
gtgtcaccaggtagcccaggctagt

SEQ ID NO: 3723380 - DNA, 25 bp, Homo sapien
tatctggatatttcataatagtgtt

SEQ ID NO: 3723381 - DNA, 25 bp, Homo sapien
tcatccagctcctacttagtcaggg

SEQ ID NO: 3723382 - DNA, 25 bp, Homo sapien
gacttcggtgatcctagtaacgcaa

SEQ ID NO: 3723383 - DNA, 25 bp, Homo sapien
tcaggaaagatagtgtgtaatcccc

SEQ ID NO: 3723384 - DNA, 25 bp, Homo sapien
tacagagggtacacaaatgcacgaa

SEQ ID NO: 3723385 - DNA, 25 bp, Homo sapien
tcagtgttggtatgatttgggtttc

SEQ ID NO: 3723386 - DNA, 25 bp, Homo sapien
ttatccctctgtatagacatcctag

SEQ ID NO: 3723387 - DNA, 25 bp, Homo sapien
tggtggccagactgtcagtctggaa

SEQ ID NO: 3723388 - DNA, 25 bp, Homo sapien
cctagagttgccaatgtctgtgatg

SEQ ID NO: 3723389 - DNA, 25 bp, Homo sapien
cagccaactgccacccctttttatc

SEQ ID NO: 3723390 - DNA, 25 bp, Homo sapien
actttgtcgtccagtgacgtgatct

SEQ ID NO: 3723391 - DNA, 25 bp, Homo sapien
ctttgtcgtccagtgacgtgatctc

SEQ ID NO: 3723392 - DNA, 25 bp, Homo sapien
agaagctgggaattcaagcacccac

SEQ ID NO: 3723393 - DNA, 25 bp, Homo sapien
cactttgtcgtccagtgacgtgatc

SEQ ID NO: 3723394 - DNA, 25 bp, Homo sapien
ctacagaaagaattgttataataaa

SEQ ID NO: 3723395 - DNA, 25 bp, Homo sapien
caagagcctacagaaagaattgtta

SEQ ID NO: 3723396 - DNA, 25 bp, Homo sapien
aagagcctacagaaagaattgttat

SEQ ID NO: 3723397 - DNA, 25 bp, Homo sapien
gttgacacttaatccccacagtagt

SEQ ID NO: 3723398 - DNA, 25 bp, Homo sapien
gactatcaggctccagtcaagagaa

SEQ ID NO: 3723399 - DNA, 25 bp, Homo sapien
taaggacacacgctaaaatgtctct

SEQ ID NO: 3723400 - DNA, 25 bp, Homo sapien
tgaaccagcgcctcatacaagtgct

SEQ ID NO: 3723401 - DNA, 25 bp, Homo sapien
gcggataaacaactcaaaagacttg

SEQ ID NO: 3723402 - DNA, 25 bp, Homo sapien
cactgtttctagataacgctgcaac

SEQ ID NO: 3723403 - DNA, 25 bp, Homo sapien
aaaatgcatgccaatgttcacagca

SEQ ID NO: 3723404 - DNA, 25 bp, Homo sapien
gtctttggttattcaagggcttcca

SEQ ID NO: 3723405 - DNA, 25 bp, Homo sapien
aaaaagacaagttggactcaatcaa

SEQ ID NO: 3723406 - DNA, 25 bp, Homo sapien
gacaagttggactcaatcaaaatta

SEQ ID NO: 3723407 - DNA, 25 bp, Homo sapien
aaaaaagacaagttggactcaatca

SEQ ID NO: 3723408 - DNA, 25 bp, Homo sapien
caagttggactcaatcaaaattaaa

SEQ ID NO: 3723409 - DNA, 25 bp, Homo sapien
ctcttgggttaaagcgattctcctg

SEQ ID NO: 3723410 - DNA, 25 bp, Homo sapien
tgcaaccttgacctcttgggttaaa

SEQ ID NO: 3723411 - DNA, 25 bp, Homo sapien
ccttgacctcttgggttaaagcgat

SEQ ID NO: 3723412 - DNA, 25 bp, Homo sapien
cctcttgggttaaagcgattctcct

SEQ ID NO: 3723413 - DNA, 25 bp, Homo sapien
actcacacacattacgggctttaaa

SEQ ID NO: 3723414 - DNA, 25 bp, Homo sapien
gcacagctgcactatagataaaata

SEQ ID NO: 3723415 - DNA, 25 bp, Homo sapien
tcttactaagatgtcacgtgtgtac

SEQ ID NO: 3723416 - DNA, 25 bp, Homo sapien
aatggcataaatgacagcacagctg

SEQ ID NO: 3723417 - DNA, 25 bp, Homo sapien
tacatagagctacaattaggccagg

SEQ ID NO: 3723418 - DNA, 25 bp, Homo sapien
tccagaagttcgatacagcccaagc

SEQ ID NO: 3723419 - DNA, 25 bp, Homo sapien
cacagtacctcgcatatagtcaata

SEQ ID NO: 3723420 - DNA, 25 bp, Homo sapien
taaccttgagcaagtgatttggcct

SEQ ID NO: 3723421 - DNA, 25 bp, Homo sapien
ctgtcttggcaacacgggccctttt

SEQ ID NO: 3723422 - DNA, 25 bp, Homo sapien
actgtcttggcaacacgggcccttt

SEQ ID NO: 3723423 - DNA, 25 bp, Homo sapien
tggccctccgcagatgtccttaagt

SEQ ID NO: 3723424 - DNA, 25 bp, Homo sapien
gttgttgccacatctcactacggac

SEQ ID NO: 3723425 - DNA, 25 bp, Homo sapien
ctgtattacctagttcccaaggacg

SEQ ID NO: 3723426 - DNA, 25 bp, Homo sapien
ggacatgtacatgccccatcttaga

SEQ ID NO: 3723427 - DNA, 25 bp, Homo sapien
tgtgtgccccagaattgaccaagac

SEQ ID NO: 3723428 - DNA, 25 bp, Homo sapien
aagacttgatagttgtgtccacccc

SEQ ID NO: 3723429 - DNA, 25 bp, Homo sapien
tgaagtacatctgctggctaagtga

SEQ ID NO: 3723430 - DNA, 25 bp, Homo sapien
tgctagagcaaattcaccatccagt

SEQ ID NO: 3723431 - DNA, 25 bp, Homo sapien
cacaagtgtggcttcagtctaaggg

SEQ ID NO: 3723432 - DNA, 25 bp, Homo sapien
catattgatgtgcttagccaggcca

SEQ ID NO: 3723433 - DNA, 25 bp, Homo sapien
gaagtatgcattcgctgaacaccca

SEQ ID NO: 3723434 - DNA, 25 bp, Homo sapien
tatatagaagatcgtgtcacctgtg

SEQ ID NO: 3723435 - DNA, 25 bp, Homo sapien
tgtatctaactgtacaaactgattg

SEQ ID NO: 3723436 - DNA, 25 bp, Homo sapien
taatacggacatatatcagttcccc

SEQ ID NO: 3723437 - DNA, 25 bp, Homo sapien
atttcagagacatagagcaaaaatg

SEQ ID NO: 3723438 - DNA, 25 bp, Homo sapien
gatatcgcgaattattttcctagga

SEQ ID NO: 3723439 - DNA, 25 bp, Homo sapien
tggtcctcggtatggaattatgaca

SEQ ID NO: 3723440 - DNA, 25 bp, Homo sapien
cattccctctagagcaggtaagaga

SEQ ID NO: 3723441 - DNA, 25 bp, Homo sapien
gacacagtttgagtagggtctgcag

SEQ ID NO: 3723442 - DNA, 25 bp, Homo sapien
tatttgtgctagagatggtcctcgg

SEQ ID NO: 3723443 - DNA, 25 bp, Homo sapien
gggactgaacttgctcctataacaa

SEQ ID NO: 3723444 - DNA, 25 bp, Homo sapien
cacgaggaacctgatgacccaatca

SEQ ID NO: 3723445 - DNA, 25 bp, Homo sapien
tttgtgagacacattcaacccacag

SEQ ID NO: 3723446 - DNA, 25 bp, Homo sapien
taatgacaccaatccattcacgagg

SEQ ID NO: 3723447 - DNA, 25 bp, Homo sapien
tgatgctgcaattatgtaatttaag

SEQ ID NO: 3723448 - DNA, 25 bp, Homo sapien
tacttgatgctgcaattatgtaatt

SEQ ID NO: 3723449 - DNA, 25 bp, Homo sapien
catttgtacttgatgctgcaattat

SEQ ID NO: 3723450 - DNA, 25 bp, Homo sapien
tgtacttgatgctgcaattatgtaa

SEQ ID NO: 3723451 - DNA, 25 bp, Homo sapien
gaagtagttgctcccgcttactgga

SEQ ID NO: 3723452 - DNA, 25 bp, Homo sapien
gctcccgcttactggatgaggcagt

SEQ ID NO: 3723453 - DNA, 25 bp, Homo sapien
ctctagaagtagttgctcccgctta

SEQ ID NO: 3723454 - DNA, 25 bp, Homo sapien
tagttgctcccgcttactggatgag

SEQ ID NO: 3723455 - DNA, 25 bp, Homo sapien
gttctgagagcattccattccatag

SEQ ID NO: 3723456 - DNA, 25 bp, Homo sapien
aaggttctagtggaattgaacacct

SEQ ID NO: 3723457 - DNA, 25 bp, Homo sapien
gcctaggcgctatcagatccttaaa

SEQ ID NO: 3723458 - DNA, 25 bp, Homo sapien
tagtggaattgaacacctgctgcct

SEQ ID NO: 3723459 - DNA, 25 bp, Homo sapien
gaaacttattctgcagttatgcata

SEQ ID NO: 3723460 - DNA, 25 bp, Homo sapien
gactagttcacgcaggcttgcagtg

SEQ ID NO: 3723461 - DNA, 25 bp, Homo sapien
ctgcctcattgctaatgctcaatat

SEQ ID NO: 3723462 - DNA, 25 bp, Homo sapien
tcatgctcgtgcatcagtgcaggca

SEQ ID NO: 3723463 - DNA, 25 bp, Homo sapien
gatgacctcaatttggagcgaggta

SEQ ID NO: 3723464 - DNA, 25 bp, Homo sapien
ggagcgaggtagaattgctattatt

SEQ ID NO: 3723465 - DNA, 25 bp, Homo sapien
gacctcaatttggagcgaggtagaa

SEQ ID NO: 3723466 - DNA, 25 bp, Homo sapien
caatttggagcgaggtagaattgct

SEQ ID NO: 3723467 - DNA, 25 bp, Homo sapien
taaaagagatctatacttctgctgc

SEQ ID NO: 3723468 - DNA, 25 bp, Homo sapien
gatttcaactaagctaatttcttgg

SEQ ID NO: 3723469 - DNA, 25 bp, Homo sapien
gatggtctcgatcagtaggagattt

SEQ ID NO: 3723470 - DNA, 25 bp, Homo sapien
tcttggctgatttctacaacacaag

SEQ ID NO: 3723471 - DNA, 25 bp, Homo sapien
catcctcactcctggttaggcctga

SEQ ID NO: 3723472 - DNA, 25 bp, Homo sapien
ggctgactggtggaatatggaatca

SEQ ID NO: 3723473 - DNA, 25 bp, Homo sapien
ttaggcctgaactaatgcgtctgcc

SEQ ID NO: 3723474 - DNA, 25 bp, Homo sapien
agacctccctagcaggacagttcct

SEQ ID NO: 3723475 - DNA, 25 bp, Homo sapien
ttcaaggctgaaacttctccatctg

SEQ ID NO: 3723476 - DNA, 25 bp, Homo sapien
ccagggccacattcttttaactttg

SEQ ID NO: 3723477 - DNA, 25 bp, Homo sapien
tccaagttcacttgtttcaaggctg

SEQ ID NO: 3723478 - DNA, 25 bp, Homo sapien
ggtgagaagtcctgttttctgaaac

SEQ ID NO: 3723479 - DNA, 25 bp, Homo sapien
gtgactttctgaattttctgaatga

SEQ ID NO: 3723480 - DNA, 25 bp, Homo sapien
agtttaggaagtgactttctgaatt

SEQ ID NO: 3723481 - DNA, 25 bp, Homo sapien
actttctgaattttctgaatgacat

SEQ ID NO: 3723482 - DNA, 25 bp, Homo sapien
aagtttaggaagtgactttctgaat

SEQ ID NO: 3723483 - DNA, 25 bp, Homo sapien
tgcacgatagccaggtgagatttac

SEQ ID NO: 3723484 - DNA, 25 bp, Homo sapien
ctgcacgatagccaggtgagattta

SEQ ID NO: 3723485 - DNA, 25 bp, Homo sapien
gattcccagaacttcataaaatgga

SEQ ID NO: 3723486 - DNA, 25 bp, Homo sapien
cgattcccagaacttcataaaatgg

SEQ ID NO: 3723487 - DNA, 25 bp, Homo sapien
catcttctaaggtgacgattcccag

SEQ ID NO: 3723488 - DNA, 25 bp, Homo sapien
cttctaaggtgacgattcccagaac

SEQ ID NO: 3723489 - DNA, 25 bp, Homo sapien
tgctttcgttcccggtgagccactt

SEQ ID NO: 3723490 - DNA, 25 bp, Homo sapien
aaatcttgctttcgttcccggtgag

SEQ ID NO: 3723491 - DNA, 25 bp, Homo sapien
tcttgctttcgttcccggtgagcca

SEQ ID NO: 3723492 - DNA, 25 bp, Homo sapien
aatcttgctttcgttcccggtgagc

SEQ ID NO: 3723493 - DNA, 25 bp, Homo sapien
ggaggagctgtggtgatattttaac

SEQ ID NO: 3723494 - DNA, 25 bp, Homo sapien
gtggtgatattttaaccttcatctc

SEQ ID NO: 3723495 - DNA, 25 bp, Homo sapien
caggaggagctgtggtgatatttta

SEQ ID NO: 3723496 - DNA, 25 bp, Homo sapien
agctgtggtgatattttaaccttca

SEQ ID NO: 3723497 - DNA, 25 bp, Homo sapien
tgggtgagaaacacgcttcagggtt

SEQ ID NO: 3723498 - DNA, 25 bp, Homo sapien
gagatctcaaactgtgataagctgc

SEQ ID NO: 3723499 - DNA, 25 bp, Homo sapien
gaaacacgcttcagggttggtagag

SEQ ID NO: 3723500 - DNA, 25 bp, Homo sapien
tcagggttggtagagatctcaaact

SEQ ID NO: 3723501 - DNA, 25 bp, Homo sapien
tgggatgggctaaatgcttctactt

SEQ ID NO: 3723502 - DNA, 25 bp, Homo sapien
aatgagaacgaagtagtctactggc

SEQ ID NO: 3723503 - DNA, 25 bp, Homo sapien
gggtgctttagcagccttagaagga

SEQ ID NO: 3723504 - DNA, 25 bp, Homo sapien
ctactggcttgttgcgctggtagag

SEQ ID NO: 3723505 - DNA, 25 bp, Homo sapien
tcaccaaacatctccgtaagtcctg

SEQ ID NO: 3723506 - DNA, 25 bp, Homo sapien
cactacttgtaaaacccccatggca

SEQ ID NO: 3723507 - DNA, 25 bp, Homo sapien
gttcatcaaacatacacactacttg

SEQ ID NO: 3723508 - DNA, 25 bp, Homo sapien
taggtaactggctgtctgcaagatc

SEQ ID NO: 3723509 - DNA, 25 bp, Homo sapien
ccaacactatcgagggagtaaagct

SEQ ID NO: 3723510 - DNA, 25 bp, Homo sapien
ggcacactctgtacaatatttggtc

SEQ ID NO: 3723511 - DNA, 25 bp, Homo sapien
caggtattttcagtccagttgcaaa

SEQ ID NO: 3723512 - DNA, 25 bp, Homo sapien
aagcctactggcacactctgtacaa

SEQ ID NO: 3723513 - DNA, 25 bp, Homo sapien
ctggagaggctgtcagggccatcac

SEQ ID NO: 3723514 - DNA, 25 bp, Homo sapien
ccatcacgccatagtatgagaaggc

SEQ ID NO: 3723515 - DNA, 25 bp, Homo sapien
tatgagaaggcgctcgcttcaaact

SEQ ID NO: 3723516 - DNA, 25 bp, Homo sapien
ggcgctcgcttcaaacttcatacct

SEQ ID NO: 3723517 - DNA, 25 bp, Homo sapien
acaaaggtacgagacagggacaaag

SEQ ID NO: 3723518 - DNA, 25 bp, Homo sapien
gctgacaacaaaggtacgagacagg

SEQ ID NO: 3723519 - DNA, 25 bp, Homo sapien
taacaactctgttctgctgacaaca

SEQ ID NO: 3723520 - DNA, 25 bp, Homo sapien
gctgctaacaactctgttctgctga

SEQ ID NO: 3723521 - DNA, 25 bp, Homo sapien
tactgtatccctgcgctttggccac

SEQ ID NO: 3723522 - DNA, 25 bp, Homo sapien
tcacccagggtgacagattagtcct

SEQ ID NO: 3723523 - DNA, 25 bp, Homo sapien
gatcttccaaagcatctagactcag

SEQ ID NO: 3723524 - DNA, 25 bp, Homo sapien
caaggtactttgcttgtctgaggcc

SEQ ID NO: 3723525 - DNA, 25 bp, Homo sapien
aaagggctcgcaccgagtaatcggg

SEQ ID NO: 3723526 - DNA, 25 bp, Homo sapien
ggtcgcttcgactgagagagtctga

SEQ ID NO: 3723527 - DNA, 25 bp, Homo sapien
taacaaactgcagatccgaaagggc

SEQ ID NO: 3723528 - DNA, 25 bp, Homo sapien
cccagtgttggtgtgacggcgtcaa

SEQ ID NO: 3723529 - DNA, 25 bp, Homo sapien
atccgggatgccatcaaggcatttt

SEQ ID NO: 3723530 - DNA, 25 bp, Homo sapien
tctcgtctggcaacccgtcatgcag

SEQ ID NO: 3723531 - DNA, 25 bp, Homo sapien
tgcagctccgtaagagtcaattcga

SEQ ID NO: 3723532 - DNA, 25 bp, Homo sapien
gagtcaattcgattttagtgttttc

SEQ ID NO: 3723533 - DNA, 25 bp, Homo sapien
agatggcgccttcgttgtgcaggct

SEQ ID NO: 3723534 - DNA, 25 bp, Homo sapien
cgccttcgttgtgcaggctgtggtt

SEQ ID NO: 3723535 - DNA, 25 bp, Homo sapien
ctagatggcgccttcgttgtgcagg

SEQ ID NO: 3723536 - DNA, 25 bp, Homo sapien
atggcgccttcgttgtgcaggctgt

SEQ ID NO: 3723537 - DNA, 25 bp, Homo sapien
tctttggtctcaggatgttgcaggg

SEQ ID NO: 3723538 - DNA, 25 bp, Homo sapien
tatttgggcggaatcagttcatctc

SEQ ID NO: 3723539 - DNA, 25 bp, Homo sapien
acttcatgcaaatcgagggcagagg

SEQ ID NO: 3723540 - DNA, 25 bp, Homo sapien
catcatgggatcacagcagagttca

SEQ ID NO: 3723541 - DNA, 25 bp, Homo sapien
aacacggtcttcttcattcagccag

SEQ ID NO: 3723542 - DNA, 25 bp, Homo sapien
cattcagccagcgagatcgacggtg

SEQ ID NO: 3723543 - DNA, 25 bp, Homo sapien
cagcgagatcgacggtgatgcccac

SEQ ID NO: 3723544 - DNA, 25 bp, Homo sapien
ggttctgcagtaacacggtcttctt

SEQ ID NO: 3723545 - DNA, 25 bp, Homo sapien
gtgcagctagaaggtccgactcgtt

SEQ ID NO: 3723546 - DNA, 25 bp, Homo sapien
tatccctcgggctaacaaaacacag

SEQ ID NO: 3723547 - DNA, 25 bp, Homo sapien
tccttagggtgggagcaaaatcaca

SEQ ID NO: 3723548 - DNA, 25 bp, Homo sapien
gacactctgtgagcttaggcgctgg

SEQ ID NO: 3723549 - DNA, 25 bp, Homo sapien
cagcccagccgtggctgaacagact

SEQ ID NO: 3723550 - DNA, 25 bp, Homo sapien
agccacgctccctgccccgcacaca

SEQ ID NO: 3723551 - DNA, 25 bp, Homo sapien
tcagccacgctccctgccccgcaca

SEQ ID NO: 3723552 - DNA, 25 bp, Homo sapien
agcccagccgtggctgaacagactt

SEQ ID NO: 3723553 - DNA, 25 bp, Homo sapien
cctaggcttggaaaagctggtcctt

SEQ ID NO: 3723554 - DNA, 25 bp, Homo sapien
tgacgacagcacaggtaaatatact

SEQ ID NO: 3723555 - DNA, 25 bp, Homo sapien
ggtctgctcctcaacccaaagagag

SEQ ID NO: 3723556 - DNA, 25 bp, Homo sapien
ggacacagacttgatcagccagggc

SEQ ID NO: 3723557 - DNA, 25 bp, Homo sapien
cggctggccttcagatgacagaggt

SEQ ID NO: 3723558 - DNA, 25 bp, Homo sapien
acagatccccggctggccttcagat

SEQ ID NO: 3723559 - DNA, 25 bp, Homo sapien
cctaggcaaggcgaggatggctaca

SEQ ID NO: 3723560 - DNA, 25 bp, Homo sapien
caaggcgaggatggctacagatccc

SEQ ID NO: 3723561 - DNA, 25 bp, Homo sapien
gcttggagccccagagaacaaggtg

SEQ ID NO: 3723562 - DNA, 25 bp, Homo sapien
gtaagcaatggcacctcagaggcct

SEQ ID NO: 3723563 - DNA, 25 bp, Homo sapien
caagagccagtttcctcagtaagga

SEQ ID NO: 3723564 - DNA, 25 bp, Homo sapien
ggagtttttcccatgccaccaggga

SEQ ID NO: 3723565 - DNA, 25 bp, Homo sapien
cataaggaatacaggtgggcccaac

SEQ ID NO: 3723566 - DNA, 25 bp, Homo sapien
ttcgcatccgtagggttgaccaggg

SEQ ID NO: 3723567 - DNA, 25 bp, Homo sapien
tttcatggaggtacttgagaggccc

SEQ ID NO: 3723568 - DNA, 25 bp, Homo sapien
taggcaggcagcttccattatccag

SEQ ID NO: 3723569 - DNA, 25 bp, Homo sapien
tcattctactttcaggtagttgggc

SEQ ID NO: 3723570 - DNA, 25 bp, Homo sapien
tctactttcaggtagttgggcgata

SEQ ID NO: 3723571 - DNA, 25 bp, Homo sapien
attctactttcaggtagttgggcga

SEQ ID NO: 3723572 - DNA, 25 bp, Homo sapien
ctactttcaggtagttgggcgatac

SEQ ID NO: 3723573 - DNA, 25 bp, Homo sapien
gaaaaacatgcactactgctaagga

SEQ ID NO: 3723574 - DNA, 25 bp, Homo sapien
agttctcgcgctgctaggtatctag

SEQ ID NO: 3723575 - DNA, 25 bp, Homo sapien
tctaccatggagctaccagagcaac

SEQ ID NO: 3723576 - DNA, 25 bp, Homo sapien
cagagcaaccctgcagatagaagaa

SEQ ID NO: 3723577 - DNA, 25 bp, Homo sapien
ttactaaagtagagggcacaatcag

SEQ ID NO: 3723578 - DNA, 25 bp, Homo sapien
tacagaacatgcattagtgtgggct

SEQ ID NO: 3723579 - DNA, 25 bp, Homo sapien
gaagagggctctgtaagccagaacc

SEQ ID NO: 3723580 - DNA, 25 bp, Homo sapien
gaaagaatttagctgcaagtggaca

SEQ ID NO: 3723581 - DNA, 25 bp, Homo sapien
catgaatcaacggtggagcacacac

SEQ ID NO: 3723582 - DNA, 25 bp, Homo sapien
cctcatgaatcaacggtggagcaca

SEQ ID NO: 3723583 - DNA, 25 bp, Homo sapien
tgaatcaacggtggagcacacacac

SEQ ID NO: 3723584 - DNA, 25 bp, Homo sapien
atgcctcatgaatcaacggtggagc

SEQ ID NO: 3723585 - DNA, 25 bp, Homo sapien
gatgcgttatgctgacctctatgca

SEQ ID NO: 3723586 - DNA, 25 bp, Homo sapien
aagcctgtttcgcagtggctcccgg

SEQ ID NO: 3723587 - DNA, 25 bp, Homo sapien
ccctttttgccagtcaagtgatgcg

SEQ ID NO: 3723588 - DNA, 25 bp, Homo sapien
gacatggacatgtgctatgggatga

SEQ ID NO: 3723589 - DNA, 25 bp, Homo sapien
agcaatgagcgtccagacatcagtt

SEQ ID NO: 3723590 - DNA, 25 bp, Homo sapien
cagcagtagcaatgagcgtccagac

SEQ ID NO: 3723591 - DNA, 25 bp, Homo sapien
catcagttccatccagagacgtatt

SEQ ID NO: 3723592 - DNA, 25 bp, Homo sapien
cagttccatccagagacgtattaag

SEQ ID NO: 3723593 - DNA, 25 bp, Homo sapien
gcttggatattttcttggctgaact

SEQ ID NO: 3723594 - DNA, 25 bp, Homo sapien
ttcagagcttggatattttcttggc

SEQ ID NO: 3723595 - DNA, 25 bp, Homo sapien
gaacttcagagcttggatattttct

SEQ ID NO: 3723596 - DNA, 25 bp, Homo sapien
cacttttcgaagaacttcagagctt

SEQ ID NO: 3723597 - DNA, 25 bp, Homo sapien
tcaaagaaacggcaagggtggcgaa

SEQ ID NO: 3723598 - DNA, 25 bp, Homo sapien
ttcttctgatacgatctgtgacctg

SEQ ID NO: 3723599 - DNA, 25 bp, Homo sapien
tgaactcgcacaggagctacatgtc

SEQ ID NO: 3723600 - DNA, 25 bp, Homo sapien
gctacatgtctggactgacaagagt

SEQ ID NO: 3723601 - DNA, 25 bp, Homo sapien
cctcacagtgaaagctttggtaatc

SEQ ID NO: 3723602 - DNA, 25 bp, Homo sapien
catggtatcgtctactcaggaggta

SEQ ID NO: 3723603 - DNA, 25 bp, Homo sapien
tgaaaattggtacctacacagggcc

SEQ ID NO: 3723604 - DNA, 25 bp, Homo sapien
acagggcccctacagcatggtatcg

SEQ ID NO: 3723605 - DNA, 25 bp, Homo sapien
ctgggagctcccatcgaccatggca

SEQ ID NO: 3723606 - DNA, 25 bp, Homo sapien
tgatcttggtggatgcacggaaacc

SEQ ID NO: 3723607 - DNA, 25 bp, Homo sapien
tggcagtcctactttgacttgatct

SEQ ID NO: 3723608 - DNA, 25 bp, Homo sapien
tgcacggaaaccactcttttttgga

SEQ ID NO: 3723609 - DNA, 25 bp, Homo sapien
aattatgacttacctgtttgacttc

SEQ ID NO: 3723610 - DNA, 25 bp, Homo sapien
atgacttacctgtttgacttcccac

SEQ ID NO: 3723611 - DNA, 25 bp, Homo sapien
aaaattatgacttacctgtttgact

SEQ ID NO: 3723612 - DNA, 25 bp, Homo sapien
ttatgacttacctgtttgacttccc

SEQ ID NO: 3723613 - DNA, 25 bp, Homo sapien
tttcttgctaccaacagtgactata

SEQ ID NO: 3723614 - DNA, 25 bp, Homo sapien
cttctgagccggatgaaggaagtag

SEQ ID NO: 3723615 - DNA, 25 bp, Homo sapien
ttctgagccggatgaaggaagtagg

SEQ ID NO: 3723616 - DNA, 25 bp, Homo sapien
atttcttgctaccaacagtgactat

SEQ ID NO: 3723617 - DNA, 25 bp, Homo sapien
gctcccttaaggaaaagacagttga

SEQ ID NO: 3723618 - DNA, 25 bp, Homo sapien
agacagttgaaaatcttgagaagta

SEQ ID NO: 3723619 - DNA, 25 bp, Homo sapien
acagttgaaaatcttgagaagtatg

SEQ ID NO: 3723620 - DNA, 25 bp, Homo sapien
aaagacagttgaaaatcttgagaag

SEQ ID NO: 3723621 - DNA, 25 bp, Homo sapien
ggagtatgttccaggatgtaagaga

SEQ ID NO: 3723622 - DNA, 25 bp, Homo sapien
cttcatgtcctaccggagtatgttc

SEQ ID NO: 3723623 - DNA, 25 bp, Homo sapien
ttgtgaaacaggatttaaagatggg

SEQ ID NO: 3723624 - DNA, 25 bp, Homo sapien
aaagatggggacctcttcatgtcct

SEQ ID NO: 3723625 - DNA, 25 bp, Homo sapien
gaccattagtctgtattcaagggag

SEQ ID NO: 3723626 - DNA, 25 bp, Homo sapien
tcagagacctacctgttggcctgcc

SEQ ID NO: 3723627 - DNA, 25 bp, Homo sapien
tactaattgtcccagatataccagg

SEQ ID NO: 3723628 - DNA, 25 bp, Homo sapien
tctcctgggaatgaagacggccagc

SEQ ID NO: 3723629 - DNA, 25 bp, Homo sapien
gtgttggtgccactgtagtacagcc

SEQ ID NO: 3723630 - DNA, 25 bp, Homo sapien
tcattcaaatagcacttagcactgt

SEQ ID NO: 3723631 - DNA, 25 bp, Homo sapien
cactgtgcagtctttagagttaaac

SEQ ID NO: 3723632 - DNA, 25 bp, Homo sapien
agttagtactacgatcaaatttcca

SEQ ID NO: 3723633 - DNA, 25 bp, Homo sapien
gttggaacccaaactgacatatagt

SEQ ID NO: 3723634 - DNA, 25 bp, Homo sapien
ctcaggtagctgttcagaagaggta

SEQ ID NO: 3723635 - DNA, 25 bp, Homo sapien
tcatcattaaagagcaaattccctt

SEQ ID NO: 3723636 - DNA, 25 bp, Homo sapien
ttaagtgccttccaattatacagca

SEQ ID NO: 3723637 - DNA, 25 bp, Homo sapien
gggacttgtctttgacacactgtat

SEQ ID NO: 3723638 - DNA, 25 bp, Homo sapien
gtctgtgcacatggatttaacttta

SEQ ID NO: 3723639 - DNA, 25 bp, Homo sapien
tgcctatggaaacctcttggtctgt

SEQ ID NO: 3723640 - DNA, 25 bp, Homo sapien
tcttttgaaagtcgatgcctatgga

SEQ ID NO: 3723641 - DNA, 25 bp, Homo sapien
caggagttgctcagctttgcttatg

SEQ ID NO: 3723642 - DNA, 25 bp, Homo sapien
tctattggctatccccaggagttgc

SEQ ID NO: 3723643 - DNA, 25 bp, Homo sapien
tgtacaagtccccagagtatgagtc

SEQ ID NO: 3723644 - DNA, 25 bp, Homo sapien
cccttggttttgagcttactgtgga

SEQ ID NO: 3723645 - DNA, 25 bp, Homo sapien
tcaagactggagtgacacacactgc

SEQ ID NO: 3723646 - DNA, 25 bp, Homo sapien
cttcaagactggagtgacacacact

SEQ ID NO: 3723647 - DNA, 25 bp, Homo sapien
ttcaagactggagtgacacacactg

SEQ ID NO: 3723648 - DNA, 25 bp, Homo sapien
gctgaacttactattgatagcgtgt

SEQ ID NO: 3723649 - DNA, 25 bp, Homo sapien
tgtttaatgaaaccaatgacaatgt

SEQ ID NO: 3723650 - DNA, 25 bp, Homo sapien
tcttcttaaagaacgatgaaactct

SEQ ID NO: 3723651 - DNA, 25 bp, Homo sapien
taagatggaagattagctgagctga

SEQ ID NO: 3723652 - DNA, 25 bp, Homo sapien
tatttccccaatgaagtgtgtcaca

SEQ ID NO: 3723653 - DNA, 25 bp, Homo sapien
taacataatccattctgatgggagc

SEQ ID NO: 3723654 - DNA, 25 bp, Homo sapien
gcctggttgtcttgaacctaaatca

SEQ ID NO: 3723655 - DNA, 25 bp, Homo sapien
tgaagccagctgtgtatcggtttat

SEQ ID NO: 3723656 - DNA, 25 bp, Homo sapien
agccgccattgtcatcctggcccgt

SEQ ID NO: 3723657 - DNA, 25 bp, Homo sapien
aagccgccattgtcatcctggcccg

SEQ ID NO: 3723658 - DNA, 25 bp, Homo sapien
ggtcacttaattggcctggcgcggt

SEQ ID NO: 3723659 - DNA, 25 bp, Homo sapien
tgaaaaggtcacttaattggcctgg

SEQ ID NO: 3723660 - DNA, 25 bp, Homo sapien
aaaggtcacttaattggcctggcgc

SEQ ID NO: 3723661 - DNA, 25 bp, Homo sapien
aactgaggtgattatatattcccac

SEQ ID NO: 3723662 - DNA, 25 bp, Homo sapien
ctttcatagcttttattgctccttc

SEQ ID NO: 3723663 - DNA, 25 bp, Homo sapien
tcatagcttttattgctccttcccc

SEQ ID NO: 3723664 - DNA, 25 bp, Homo sapien
ttcatagcttttattgctccttccc

SEQ ID NO: 3723665 - DNA, 25 bp, Homo sapien
tagcttttattgctccttcccccat

SEQ ID NO: 3723666 - DNA, 25 bp, Homo sapien
cttgtctctcagtacagtggcgcgg

SEQ ID NO: 3723667 - DNA, 25 bp, Homo sapien
agtctttgctcttgtctctcagtac

SEQ ID NO: 3723668 - DNA, 25 bp, Homo sapien
acagagtctttgctcttgtctctca

SEQ ID NO: 3723669 - DNA, 25 bp, Homo sapien
gatatcaggtgatctacttgccttg

SEQ ID NO: 3723670 - DNA, 25 bp, Homo sapien
tgggttcaagcaattctcatgcctc

SEQ ID NO: 3723671 - DNA, 25 bp, Homo sapien
gagacagagttcattctgtcgccca

SEQ ID NO: 3723672 - DNA, 25 bp, Homo sapien
ggctggaatgcagtgatgcgatctc

SEQ ID NO: 3723673 - DNA, 25 bp, Homo sapien
agctcactgcaacctctgcctcctg

SEQ ID NO: 3723674 - DNA, 25 bp, Homo sapien
gtggccatcgtcttgtccgttggcc

SEQ ID NO: 3723675 - DNA, 25 bp, Homo sapien
tcacgtcttccgaggagccttggag

SEQ ID NO: 3723676 - DNA, 25 bp, Homo sapien
gcacctgccgcaaccttggtggtca

SEQ ID NO: 3723677 - DNA, 25 bp, Homo sapien
gtcttgtccgttggcctttgcaggg

SEQ ID NO: 3723678 - DNA, 25 bp, Homo sapien
ctgttcacagaggcaacactccttc

SEQ ID NO: 3723679 - DNA, 25 bp, Homo sapien
ttcacagaggcaacactccttcacc

SEQ ID NO: 3723680 - DNA, 25 bp, Homo sapien
gttcacagaggcaacactccttcac

SEQ ID NO: 3723681 - DNA, 25 bp, Homo sapien
tgttcacagaggcaacactccttca

SEQ ID NO: 3723682 - DNA, 25 bp, Homo sapien
ataggggatgctggctcaatggcat

SEQ ID NO: 3723683 - DNA, 25 bp, Homo sapien
gagaacttattaggggagactgccc

SEQ ID NO: 3723684 - DNA, 25 bp, Homo sapien
ccctggataggggatgctggctcaa

SEQ ID NO: 3723685 - DNA, 25 bp, Homo sapien
gagcagcctgctgaatttgaaagac

SEQ ID NO: 3723686 - DNA, 25 bp, Homo sapien
tgccccaagggagtggatgtctctg

SEQ ID NO: 3723687 - DNA, 25 bp, Homo sapien
cactctctgccccaagggagtggat

SEQ ID NO: 3723688 - DNA, 25 bp, Homo sapien
tgttgctacaggcaccttgctcctg

SEQ ID NO: 3723689 - DNA, 25 bp, Homo sapien
cccttgttgctacaggcaccttgct

SEQ ID NO: 3723690 - DNA, 25 bp, Homo sapien
aggacagcacggtttttgctgcccc

SEQ ID NO: 3723691 - DNA, 25 bp, Homo sapien
aaggacagcacggtttttgctgccc

SEQ ID NO: 3723692 - DNA, 25 bp, Homo sapien
cctatcttcagctggccttaagagg

SEQ ID NO: 3723693 - DNA, 25 bp, Homo sapien
gggcctatcttcagctggccttaag

SEQ ID NO: 3723694 - DNA, 25 bp, Homo sapien
aatgcaacagtttcaaggagccttc

SEQ ID NO: 3723695 - DNA, 25 bp, Homo sapien
caacagtttcaaggagccttctgga

SEQ ID NO: 3723696 - DNA, 25 bp, Homo sapien
ccaaaaacttatcatgaactattta

SEQ ID NO: 3723697 - DNA, 25 bp, Homo sapien
tagggggtacagttttggatatata

SEQ ID NO: 3723698 - DNA, 25 bp, Homo sapien
ggctcacgcaatctctgccttcccg

SEQ ID NO: 3723699 - DNA, 25 bp, Homo sapien
gctcacgcaatctctgccttcccgg

SEQ ID NO: 3723700 - DNA, 25 bp, Homo sapien
tcacgcaatctctgccttcccggct

SEQ ID NO: 3723701 - DNA, 25 bp, Homo sapien
cgcaatctctgccttcccggctcaa

SEQ ID NO: 3723702 - DNA, 25 bp, Homo sapien
ggtcgtgctctgaagtacagcgccc

SEQ ID NO: 3723703 - DNA, 25 bp, Homo sapien
tagaggctgctgtccgaatcgacgt

SEQ ID NO: 3723704 - DNA, 25 bp, Homo sapien
tacagcgccccgaaatgactagtca

SEQ ID NO: 3723705 - DNA, 25 bp, Homo sapien
gaatcgacgttttcctgggctttca

SEQ ID NO: 3723706 - DNA, 25 bp, Homo sapien
agcgcggccgttcgccgcgttccgc

SEQ ID NO: 3723707 - DNA, 25 bp, Homo sapien
tttcctcagtcctgctgacgtcctc

SEQ ID NO: 3723708 - DNA, 25 bp, Homo sapien
tcacgctcgcgccattgtttcccag

SEQ ID NO: 3723709 - DNA, 25 bp, Homo sapien
tcacgctggtggtagccctttcctc

SEQ ID NO: 3723710 - DNA, 25 bp, Homo sapien
ccaagaactttatcgcaggagtgca

SEQ ID NO: 3723711 - DNA, 25 bp, Homo sapien
gagtgcaaagcgataggtcccaaaa

SEQ ID NO: 3723712 - DNA, 25 bp, Homo sapien
tggctccaaggcatcgaatttcggc

SEQ ID NO: 3723713 - DNA, 25 bp, Homo sapien
catttgcgtgagagggataaagacc

SEQ ID NO: 3723714 - DNA, 25 bp, Homo sapien
ctcagtaccatagtgtttagacaca

SEQ ID NO: 3723715 - DNA, 25 bp, Homo sapien
aagaaaccaccccatcttatcactg

SEQ ID NO: 3723716 - DNA, 25 bp, Homo sapien
cctgtagtcttttgcgtgtgcagtt

SEQ ID NO: 3723717 - DNA, 25 bp, Homo sapien
ccaccccatcttatcactgagagaa

SEQ ID NO: 3723718 - DNA, 25 bp, Homo sapien
tatctgtgaatacgacaatctctga

SEQ ID NO: 3723719 - DNA, 25 bp, Homo sapien
tattccagttcagaccttattccag

SEQ ID NO: 3723720 - DNA, 25 bp, Homo sapien
cagagctagtatagaaagtttcaac

SEQ ID NO: 3723721 - DNA, 25 bp, Homo sapien
ccacattgcgtttagttatcagatc

SEQ ID NO: 3723722 - DNA, 25 bp, Homo sapien
aggcccaaaactcgttcactttgca

SEQ ID NO: 3723723 - DNA, 25 bp, Homo sapien
cccaaaactcgttcactttgcaggg

SEQ ID NO: 3723724 - DNA, 25 bp, Homo sapien
cggtgtgcggaatgctcagatcctg

SEQ ID NO: 3723725 - DNA, 25 bp, Homo sapien
cctcggtgtgcggaatgctcagatc

SEQ ID NO: 3723726 - DNA, 25 bp, Homo sapien
cttcctactatcaagtttttcttct

SEQ ID NO: 3723727 - DNA, 25 bp, Homo sapien
taggtggtactttacccctgtgctc

SEQ ID NO: 3723728 - DNA, 25 bp, Homo sapien
ggtggtactttacccctgtgctctc

SEQ ID NO: 3723729 - DNA, 25 bp, Homo sapien
ttctgagtagtaggtggtactttac

SEQ ID NO: 3723730 - DNA, 25 bp, Homo sapien
taaatcaatggatttccgcagttca

SEQ ID NO: 3723731 - DNA, 25 bp, Homo sapien
tgtgaataaatcaatggatttccgc

SEQ ID NO: 3723732 - DNA, 25 bp, Homo sapien
atcaatggatttccgcagttcacca

SEQ ID NO: 3723733 - DNA, 25 bp, Homo sapien
gaataaatcaatggatttccgcagt

SEQ ID NO: 3723734 - DNA, 25 bp, Homo sapien
tttgatgaagacactggccctctta

SEQ ID NO: 3723735 - DNA, 25 bp, Homo sapien
tgaagacactggccctcttagcata

SEQ ID NO: 3723736 - DNA, 25 bp, Homo sapien
aatggctctgtcacagtctcggatg

SEQ ID NO: 3723737 - DNA, 25 bp, Homo sapien
cacagtctcggatggcagcatttgg

SEQ ID NO: 3723738 - DNA, 25 bp, Homo sapien
ttaatcttgacctccaaatttggct

SEQ ID NO: 3723739 - DNA, 25 bp, Homo sapien
aagattcataacctttgtgttgctc

SEQ ID NO: 3723740 - DNA, 25 bp, Homo sapien
cataacctttgtgttgctctggtat

SEQ ID NO: 3723741 - DNA, 25 bp, Homo sapien
tactgataagattcataacctttgt

SEQ ID NO: 3723742 - DNA, 25 bp, Homo sapien
cagagtctagcatctggaggcactt

SEQ ID NO: 3723743 - DNA, 25 bp, Homo sapien
ccagagtctagcatctggaggcact

SEQ ID NO: 3723744 - DNA, 25 bp, Homo sapien
cgatcaagagaacgtttctgagcag

SEQ ID NO: 3723745 - DNA, 25 bp, Homo sapien
caatttcatgatgatttggtagtca

SEQ ID NO: 3723746 - DNA, 25 bp, Homo sapien
cttacttatagaggtgatttacaga

SEQ ID NO: 3723747 - DNA, 25 bp, Homo sapien
agtactttataactcacaaaaatat

SEQ ID NO: 3723748 - DNA, 25 bp, Homo sapien
gtactttataactcacaaaaatata

SEQ ID NO: 3723749 - DNA, 25 bp, Homo sapien
ccacttacttatagaggtgatttac

SEQ ID NO: 3723750 - DNA, 25 bp, Homo sapien
acccacttgcaagcttctaatatca

SEQ ID NO: 3723751 - DNA, 25 bp, Homo sapien
ctgtaatatgtacccacttgcaagc

SEQ ID NO: 3723752 - DNA, 25 bp, Homo sapien
tctgtaatatgtacccacttgcaag

SEQ ID NO: 3723753 - DNA, 25 bp, Homo sapien
gaatggaatctgaaaagatgaaggc

SEQ ID NO: 3723754 - DNA, 25 bp, Homo sapien
agaatggaatctgaaaagatgaagg

SEQ ID NO: 3723755 - DNA, 25 bp, Homo sapien
aagaatggaatctgaaaagatgaag

SEQ ID NO: 3723756 - DNA, 25 bp, Homo sapien
aaagaatggaatctgaaaagatgaa

SEQ ID NO: 3723757 - DNA, 25 bp, Homo sapien
tgagccggcctcttctgccacatgg

SEQ ID NO: 3723758 - DNA, 25 bp, Homo sapien
gccggcctcttctgccacatggtag

SEQ ID NO: 3723759 - DNA, 25 bp, Homo sapien
gctggtgactgagccggcctcttct

SEQ ID NO: 3723760 - DNA, 25 bp, Homo sapien
gggagagtgctggtgactgagccgg

SEQ ID NO: 3723761 - DNA, 25 bp, Homo sapien
gagccactccctgtgcagatctctt

SEQ ID NO: 3723762 - DNA, 25 bp, Homo sapien
tggcttcagagagccactccctgtg

SEQ ID NO: 3723763 - DNA, 25 bp, Homo sapien
gagagccactccctgtgcagatctc

SEQ ID NO: 3723764 - DNA, 25 bp, Homo sapien
gccactccctgtgcagatctctttt

SEQ ID NO: 3723765 - DNA, 25 bp, Homo sapien
gctccgggcggaaagatgttcagca

SEQ ID NO: 3723766 - DNA, 25 bp, Homo sapien
aaagtgaccccgagctgcggagagt

SEQ ID NO: 3723767 - DNA, 25 bp, Homo sapien
tgaggtgaggcgcacagaaagcctt

SEQ ID NO: 3723768 - DNA, 25 bp, Homo sapien
tagggcactaaagcatggcacaggc

SEQ ID NO: 3723769 - DNA, 25 bp, Homo sapien
gctctgtcgcatcccttgaccctat

SEQ ID NO: 3723770 - DNA, 25 bp, Homo sapien
gtgcctaaacgactgaggtttccca

SEQ ID NO: 3723771 - DNA, 25 bp, Homo sapien
ttctgggaggtgtcccctacaccca

SEQ ID NO: 3723772 - DNA, 25 bp, Homo sapien
caagaatcgactgcttcggaagtga

SEQ ID NO: 3723773 - DNA, 25 bp, Homo sapien
tgctcagagtctggccgggagaggg

SEQ ID NO: 3723774 - DNA, 25 bp, Homo sapien
agaaaggagaggtgcggcaggcagg

SEQ ID NO: 3723775 - DNA, 25 bp, Homo sapien
gaggcgcagtgactaccgcagctgc

SEQ ID NO: 3723776 - DNA, 25 bp, Homo sapien
caacgcgagctacagaagaaaggag

SEQ ID NO: 3723777 - DNA, 25 bp, Homo sapien
gtgccgggatcggggccggacgtgc

SEQ ID NO: 3723778 - DNA, 25 bp, Homo sapien
tgccgggatcggggccggacgtgcg

SEQ ID NO: 3723779 - DNA, 25 bp, Homo sapien
gcacaggtagtgctccgagccgaag

SEQ ID NO: 3723780 - DNA, 25 bp, Homo sapien
ggtagtgctccgagccgaagctcat

SEQ ID NO: 3723781 - DNA, 25 bp, Homo sapien
aggagcacaggtagtgctccgagcc

SEQ ID NO: 3723782 - DNA, 25 bp, Homo sapien
acaggtagtgctccgagccgaagct

SEQ ID NO: 3723783 - DNA, 25 bp, Homo sapien
cgcgccgccggccccagagaggcgg

SEQ ID NO: 3723784 - DNA, 25 bp, Homo sapien
gatcttgtactcgttggtgcgcgcc

SEQ ID NO: 3723785 - DNA, 25 bp, Homo sapien
ttctcgatgaacacggcgaagcggt

SEQ ID NO: 3723786 - DNA, 25 bp, Homo sapien
gatactcgtggatctcctcgcggct

SEQ ID NO: 3723787 - DNA, 25 bp, Homo sapien
tgtaccattcttccgcggactgcag

SEQ ID NO: 3723788 - DNA, 25 bp, Homo sapien
cagggacataaatgaggggcgttcc

SEQ ID NO: 3723789 - DNA, 25 bp, Homo sapien
gcagagttgggttttcgaacctcaa

SEQ ID NO: 3723790 - DNA, 25 bp, Homo sapien
actgttctccgggtcgccggtgtgt

SEQ ID NO: 3723791 - DNA, 25 bp, Homo sapien
gccggtgtgtgtaggcccgcttgct

SEQ ID NO: 3723792 - DNA, 25 bp, Homo sapien
gaactaggactctaatggtgccgaa

SEQ ID NO: 3723793 - DNA, 25 bp, Homo sapien
gatctgcaggtaagacttgagctcc

SEQ ID NO: 3723794 - DNA, 25 bp, Homo sapien
tctccctggagagcattaacctgcg

SEQ ID NO: 3723795 - DNA, 25 bp, Homo sapien
tagaacagtcagagacacccttgtg

SEQ ID NO: 3723796 - DNA, 25 bp, Homo sapien
ggaggcatataccttaaagcaccag

SEQ ID NO: 3723797 - DNA, 25 bp, Homo sapien
tctcatcagcaggttaattaggtcc

SEQ ID NO: 3723798 - DNA, 25 bp, Homo sapien
ttaggtcattcgaggtatatcaggc

SEQ ID NO: 3723799 - DNA, 25 bp, Homo sapien
cctaaatggccccaaagtgcggtgt

SEQ ID NO: 3723800 - DNA, 25 bp, Homo sapien
taaataactctgttgtagcatgtgc

SEQ ID NO: 3723801 - DNA, 25 bp, Homo sapien
gcagcttagattcagaaaattccga

SEQ ID NO: 3723802 - DNA, 25 bp, Homo sapien
tttaaaacaccgaggcatggaagag

SEQ ID NO: 3723803 - DNA, 25 bp, Homo sapien
aaaattccgaatgtggaaagcacag

SEQ ID NO: 3723804 - DNA, 25 bp, Homo sapien
gccacacggcatatagttctgaact

SEQ ID NO: 3723805 - DNA, 25 bp, Homo sapien
tagccacacggcatatagttctgaa

SEQ ID NO: 3723806 - DNA, 25 bp, Homo sapien
atagccacacggcatatagttctga

SEQ ID NO: 3723807 - DNA, 25 bp, Homo sapien
ccacacggcatatagttctgaactg

SEQ ID NO: 3723808 - DNA, 25 bp, Homo sapien
tattcccgaaggtggcgtgccatct

SEQ ID NO: 3723809 - DNA, 25 bp, Homo sapien
cctggtattcccgaaggtggcgtgc

SEQ ID NO: 3723810 - DNA, 25 bp, Homo sapien
cgaaggtggcgtgccatctcactct

SEQ ID NO: 3723811 - DNA, 25 bp, Homo sapien
gtggcgtgccatctcactcttggtg

SEQ ID NO: 3723812 - DNA, 25 bp, Homo sapien
ctgtaagctgctatctcaatgtcaa

SEQ ID NO: 3723813 - DNA, 25 bp, Homo sapien
tctcaatgtcaagagccattttgac

SEQ ID NO: 3723814 - DNA, 25 bp, Homo sapien
taagctgctatctcaatgtcaagag

SEQ ID NO: 3723815 - DNA, 25 bp, Homo sapien
atctcaatgtcaagagccattttga

SEQ ID NO: 3723816 - DNA, 25 bp, Homo sapien
tttatcagcgtgacgaaaacagtct

SEQ ID NO: 3723817 - DNA, 25 bp, Homo sapien
aactgtcttactcaacctggatttg

SEQ ID NO: 3723818 - DNA, 25 bp, Homo sapien
aagggaatagaaccagcaataacaa

SEQ ID NO: 3723819 - DNA, 25 bp, Homo sapien
cagtgtatacgggtacaaagggaat

SEQ ID NO: 3723820 - DNA, 25 bp, Homo sapien
gattctaggtgggagcaggtaactt

SEQ ID NO: 3723821 - DNA, 25 bp, Homo sapien
taacccactggtgctaaaacgtgtc

SEQ ID NO: 3723822 - DNA, 25 bp, Homo sapien
ttggaggttgtagcactgaggattc

SEQ ID NO: 3723823 - DNA, 25 bp, Homo sapien
acttggattgggaagtggattcagc

SEQ ID NO: 3723824 - DNA, 25 bp, Homo sapien
ctctttcttaagtgatagcccagtg

SEQ ID NO: 3723825 - DNA, 25 bp, Homo sapien
tttcttaagtgatagcccagtggat

SEQ ID NO: 3723826 - DNA, 25 bp, Homo sapien
tcctcctctttcttaagtgatagcc

SEQ ID NO: 3723827 - DNA, 25 bp, Homo sapien
tcctctttcttaagtgatagcccag

SEQ ID NO: 3723828 - DNA, 25 bp, Homo sapien
gatttctcggttttcttagtagata

SEQ ID NO: 3723829 - DNA, 25 bp, Homo sapien
gtagatattactgtctcctctaata

SEQ ID NO: 3723830 - DNA, 25 bp, Homo sapien
atatttgatttctcggttttcttag

SEQ ID NO: 3723831 - DNA, 25 bp, Homo sapien
tctgggaggttttcttagaggctac

SEQ ID NO: 3723832 - DNA, 25 bp, Homo sapien
taattttacccactgagcagagcgc

SEQ ID NO: 3723833 - DNA, 25 bp, Homo sapien
tgacgatgatcgcagatttagcacc

SEQ ID NO: 3723834 - DNA, 25 bp, Homo sapien
catcgatcactgtgaagcgtgagct

SEQ ID NO: 3723835 - DNA, 25 bp, Homo sapien
taaatctaaggtcggcttcatcaca

SEQ ID NO: 3723836 - DNA, 25 bp, Homo sapien
tacacttagcactcgtaaaaggcat

SEQ ID NO: 3723837 - DNA, 25 bp, Homo sapien
gcacaccccttctctggtctgagtg

SEQ ID NO: 3723838 - DNA, 25 bp, Homo sapien
tagcaagcgagtaggcgcatgcaca

SEQ ID NO: 3723839 - DNA, 25 bp, Homo sapien
tgtgttctggtgacaaaatatccta

SEQ ID NO: 3723840 - DNA, 25 bp, Homo sapien
cacacatgaaagactgggcaatgca

SEQ ID NO: 3723841 - DNA, 25 bp, Homo sapien
gggcaactcttcagctctggccgaa

SEQ ID NO: 3723842 - DNA, 25 bp, Homo sapien
gagaacaaatcctgcatcagccttg

SEQ ID NO: 3723843 - DNA, 25 bp, Homo sapien
caatgcagatgctacacagttgggc

SEQ ID NO: 3723844 - DNA, 25 bp, Homo sapien
ggcaggaaccacagaacacgaatta

SEQ ID NO: 3723845 - DNA, 25 bp, Homo sapien
gggcaggaaccacagaacacgaatt

SEQ ID NO: 3723846 - DNA, 25 bp, Homo sapien
gttttgagataccaccacctcctgg

SEQ ID NO: 3723847 - DNA, 25 bp, Homo sapien
cacctcctggcaatgcaggaaggca

SEQ ID NO: 3723848 - DNA, 25 bp, Homo sapien
tctgcgagtgcagcagtttgcctgg

SEQ ID NO: 3723849 - DNA, 25 bp, Homo sapien
aagcagaggtgatttgtggttgcct

SEQ ID NO: 3723850 - DNA, 25 bp, Homo sapien
gaaggtgcacaaggcccggatacat

SEQ ID NO: 3723851 - DNA, 25 bp, Homo sapien
gcccggatacatgtgttagtcttat

SEQ ID NO: 3723852 - DNA, 25 bp, Homo sapien
gcacaaggcccggatacatgtgtta

SEQ ID NO: 3723853 - DNA, 25 bp, Homo sapien
ctctgctgaaggtgcacaaggcccg

SEQ ID NO: 3723854 - DNA, 25 bp, Homo sapien
ttcctcaataaccatcccattcatt

SEQ ID NO: 3723855 - DNA, 25 bp, Homo sapien
cccattcattactgtaacatggcaa

SEQ ID NO: 3723856 - DNA, 25 bp, Homo sapien
tgtgatgagcaagttaagagtgtca

SEQ ID NO: 3723857 - DNA, 25 bp, Homo sapien
atggcaaaatacttatctccttaaa

SEQ ID NO: 3723858 - DNA, 25 bp, Homo sapien
gagactctgagtttatgatctgtgc

SEQ ID NO: 3723859 - DNA, 25 bp, Homo sapien
tactagcaacactacaaaggagaag

SEQ ID NO: 3723860 - DNA, 25 bp, Homo sapien
gaataagggtgtttgagctcacctc

SEQ ID NO: 3723861 - DNA, 25 bp, Homo sapien
taaactgcagggtgtactctcaaag

SEQ ID NO: 3723862 - DNA, 25 bp, Homo sapien
gggatggcatcagttgggcagtcat

SEQ ID NO: 3723863 - DNA, 25 bp, Homo sapien
tgggatggcatcagttgggcagtca

SEQ ID NO: 3723864 - DNA, 25 bp, Homo sapien
gaaagtgtaagtgtgttcaagtcca

SEQ ID NO: 3723865 - DNA, 25 bp, Homo sapien
cacagggttgtcctctgaagaatat

SEQ ID NO: 3723866 - DNA, 25 bp, Homo sapien
caggtatgcgctggctttcacaggg

SEQ ID NO: 3723867 - DNA, 25 bp, Homo sapien
tatgacccacgaattccacagctag

SEQ ID NO: 3723868 - DNA, 25 bp, Homo sapien
tctgctcctccgccagcgccgccat

SEQ ID NO: 3723869 - DNA, 25 bp, Homo sapien
ccgtctgctcctccgccagcgccgc

SEQ ID NO: 3723870 - DNA, 25 bp, Homo sapien
gtctgctcctccgccagcgccgcca

SEQ ID NO: 3723871 - DNA, 25 bp, Homo sapien
ctccgtctgctcctccgccagcgcc

SEQ ID NO: 3723872 - DNA, 25 bp, Homo sapien
gtcggtcatgcggagcgccggcgtc

SEQ ID NO: 3723873 - DNA, 25 bp, Homo sapien
agcggcggagacagccaccgtgggc

SEQ ID NO: 3723874 - DNA, 25 bp, Homo sapien
ccccgcctgcggaggtagcagcgtt

SEQ ID NO: 3723875 - DNA, 25 bp, Homo sapien
ccgttgttggtagtgccgccgctac

SEQ ID NO: 3723876 - DNA, 25 bp, Homo sapien
ttcggcctcgcggagtttgctctgc

SEQ ID NO: 3723877 - DNA, 25 bp, Homo sapien
ctcttcggcctcgcggagtttgctc

SEQ ID NO: 3723878 - DNA, 25 bp, Homo sapien
cgcggagtttgctctgccgtaggaa

SEQ ID NO: 3723879 - DNA, 25 bp, Homo sapien
gcctcgcggagtttgctctgccgta

SEQ ID NO: 3723880 - DNA, 25 bp, Homo sapien
gcgccggcgctgtccacctctcccg

SEQ ID NO: 3723881 - DNA, 25 bp, Homo sapien
agcagcccggcctcacggcgcagcg

SEQ ID NO: 3723882 - DNA, 25 bp, Homo sapien
ctcagcgccggcgctgtccacctct

SEQ ID NO: 3723883 - DNA, 25 bp, Homo sapien
cagcgccggcgctgtccacctctcc

SEQ ID NO: 3723884 - DNA, 25 bp, Homo sapien
ggctgaacctgagacgaccgtggcc

SEQ ID NO: 3723885 - DNA, 25 bp, Homo sapien
cgaagcgccagtgcccggagggtcg

SEQ ID NO: 3723886 - DNA, 25 bp, Homo sapien
aggacctgaggctgaacctgagacg

SEQ ID NO: 3723887 - DNA, 25 bp, Homo sapien
gaggcggtcacccggctgagaagcg

SEQ ID NO: 3723888 - DNA, 25 bp, Homo sapien
ttgctccccttcgcggcggccgtac

SEQ ID NO: 3723889 - DNA, 25 bp, Homo sapien
cttgctccccttcgcggcggccgta

SEQ ID NO: 3723890 - DNA, 25 bp, Homo sapien
ggcttgctccccttcgcggcggccg

SEQ ID NO: 3723891 - DNA, 25 bp, Homo sapien
cggcttgctccccttcgcggcggcc

SEQ ID NO: 3723892 - DNA, 25 bp, Homo sapien
agctcggaagggggtttgactgcgc

SEQ ID NO: 3723893 - DNA, 25 bp, Homo sapien
gctcggaagggggtttgactgcgca

SEQ ID NO: 3723894 - DNA, 25 bp, Homo sapien
cactggaactgacagctcggaaggg

SEQ ID NO: 3723895 - DNA, 25 bp, Homo sapien
tctcactggaactgacagctcggaa

SEQ ID NO: 3723896 - DNA, 25 bp, Homo sapien
ctcatgttgattgtagactagctcc

SEQ ID NO: 3723897 - DNA, 25 bp, Homo sapien
gcagtccagggaacattcaatgaag

SEQ ID NO: 3723898 - DNA, 25 bp, Homo sapien
caactctgcccgatggcagtccagg

SEQ ID NO: 3723899 - DNA, 25 bp, Homo sapien
tctccttgttggttgtaggctgaca

SEQ ID NO: 3723900 - DNA, 25 bp, Homo sapien
taagttctcatagcctcaggtacct

SEQ ID NO: 3723901 - DNA, 25 bp, Homo sapien
tccagctagatcaaaccccacattt

SEQ ID NO: 3723902 - DNA, 25 bp, Homo sapien
agcctctgtacctaccaggatcctt

SEQ ID NO: 3723903 - DNA, 25 bp, Homo sapien
tcacaacgtactttttaagttgcag

SEQ ID NO: 3723904 - DNA, 25 bp, Homo sapien
tatttggcattcactaaaaacagca

SEQ ID NO: 3723905 - DNA, 25 bp, Homo sapien
caaagtggaagtactcattgtttgg

SEQ ID NO: 3723906 - DNA, 25 bp, Homo sapien
agcctttagccttgataacaactag

SEQ ID NO: 3723907 - DNA, 25 bp, Homo sapien
gactaaacatattagggctccagct

SEQ ID NO: 3723908 - DNA, 25 bp, Homo sapien
cttcaagagttggtacgagtcacgg

SEQ ID NO: 3723909 - DNA, 25 bp, Homo sapien
cgagtcacgggaaatacgcagaaca

SEQ ID NO: 3723910 - DNA, 25 bp, Homo sapien
agaggtgctcctgaactatgttcca

SEQ ID NO: 3723911 - DNA, 25 bp, Homo sapien
gataatactcgtaggtcatcctggt

SEQ ID NO: 3723912 - DNA, 25 bp, Homo sapien
tcatccaaaggtacctcaatttctg

SEQ ID NO: 3723913 - DNA, 25 bp, Homo sapien
tgcttttggatccaatactatcttt

SEQ ID NO: 3723914 - DNA, 25 bp, Homo sapien
ttttgcttttggatccaatactatc

SEQ ID NO: 3723915 - DNA, 25 bp, Homo sapien
atcctcgtcatccaaaggtacctca

SEQ ID NO: 3723916 - DNA, 25 bp, Homo sapien
tgaatctttcaactcaggaagaggg

SEQ ID NO: 3723917 - DNA, 25 bp, Homo sapien
cgcactcgtttggtggtttctttca

SEQ ID NO: 3723918 - DNA, 25 bp, Homo sapien
cattatcttatccaacttatctgaa

SEQ ID NO: 3723919 - DNA, 25 bp, Homo sapien
caaatggagggtaagcagtccggcc

SEQ ID NO: 3723920 - DNA, 25 bp, Homo sapien
gcaaaacctccagcaatcagactag

SEQ ID NO: 3723921 - DNA, 25 bp, Homo sapien
ttgggtgttaccgaccacactctga

SEQ ID NO: 3723922 - DNA, 25 bp, Homo sapien
ttgacactacgaagctttttgggtg

SEQ ID NO: 3723923 - DNA, 25 bp, Homo sapien
cacactctgacagttgaatctgcaa

SEQ ID NO: 3723924 - DNA, 25 bp, Homo sapien
ttgctgttttctcatccatgattct

SEQ ID NO: 3723925 - DNA, 25 bp, Homo sapien
gacatcatctgattctttgtctata

SEQ ID NO: 3723926 - DNA, 25 bp, Homo sapien
ttctcatccatgattctttctaaga

SEQ ID NO: 3723927 - DNA, 25 bp, Homo sapien
tctaagacatcatctgattctttgt

SEQ ID NO: 3723928 - DNA, 25 bp, Homo sapien
aggcccactgtgaccatacaaaatc

SEQ ID NO: 3723929 - DNA, 25 bp, Homo sapien
ctgaagctggctccgtagacaggcc

SEQ ID NO: 3723930 - DNA, 25 bp, Homo sapien
ctatccggactgaagctggctccgt

SEQ ID NO: 3723931 - DNA, 25 bp, Homo sapien
tccggactgaagctggctccgtaga

SEQ ID NO: 3723932 - DNA, 25 bp, Homo sapien
ggatagttgtgtcctttatatccca

SEQ ID NO: 3723933 - DNA, 25 bp, Homo sapien
aaggctccacaatctaacagttccg

SEQ ID NO: 3723934 - DNA, 25 bp, Homo sapien
cagttccgtcctctgaagaggaaag

SEQ ID NO: 3723935 - DNA, 25 bp, Homo sapien
gagaaaattgtgtgtcccatactgg

SEQ ID NO: 3723936 - DNA, 25 bp, Homo sapien
gatggccggcaaatattcttaaagg

SEQ ID NO: 3723937 - DNA, 25 bp, Homo sapien
catcagcaagatggccggcaaatat

SEQ ID NO: 3723938 - DNA, 25 bp, Homo sapien
gcagagcccgtagcaacataattag

SEQ ID NO: 3723939 - DNA, 25 bp, Homo sapien
cattcaggacgtcccagagccgcac

SEQ ID NO: 3723940 - DNA, 25 bp, Homo sapien
tgtgtccagtgaagatccttacaca

SEQ ID NO: 3723941 - DNA, 25 bp, Homo sapien
tgtccagtgaagatccttacacagt

SEQ ID NO: 3723942 - DNA, 25 bp, Homo sapien
tccagtgaagatccttacacagtta

SEQ ID NO: 3723943 - DNA, 25 bp, Homo sapien
gtccagtgaagatccttacacagtt

SEQ ID NO: 3723944 - DNA, 25 bp, Homo sapien
tgtagccaggaatctcccattggga

SEQ ID NO: 3723945 - DNA, 25 bp, Homo sapien
tgccatctgttgctcctgtagccag

SEQ ID NO: 3723946 - DNA, 25 bp, Homo sapien
tatcagtgtggccttttaattctcc

SEQ ID NO: 3723947 - DNA, 25 bp, Homo sapien
tactaaacctaagtgaacagactgt

SEQ ID NO: 3723948 - DNA, 25 bp, Homo sapien
tcaggtaaatttatatgcccagtgg

SEQ ID NO: 3723949 - DNA, 25 bp, Homo sapien
agtcatcggtctctaaatcttcaaa

SEQ ID NO: 3723950 - DNA, 25 bp, Homo sapien
tgatagcatcccataatcgaactgt

SEQ ID NO: 3723951 - DNA, 25 bp, Homo sapien
cccagtggctgtagtaaagtcatcg

SEQ ID NO: 3723952 - DNA, 25 bp, Homo sapien
taagcaactgaaatgtctgtctgac

SEQ ID NO: 3723953 - DNA, 25 bp, Homo sapien
tgtttgggtgcactcaaaactcaac

SEQ ID NO: 3723954 - DNA, 25 bp, Homo sapien
tttgagtgccatacagtaactacgt

SEQ ID NO: 3723955 - DNA, 25 bp, Homo sapien
tgggtggctgtacttcctctagatc

SEQ ID NO: 3723956 - DNA, 25 bp, Homo sapien
cagccgggcctcctttaggtgcgct

SEQ ID NO: 3723957 - DNA, 25 bp, Homo sapien
tctatagacgatcagtgggaaggcc

SEQ ID NO: 3723958 - DNA, 25 bp, Homo sapien
tttcaaagcgagtgaatgtggcccg

SEQ ID NO: 3723959 - DNA, 25 bp, Homo sapien
caggcccgctgtaaaagggttagat

SEQ ID NO: 3723960 - DNA, 25 bp, Homo sapien
gtatgtccatagctgtttgttccca

SEQ ID NO: 3723961 - DNA, 25 bp, Homo sapien
tctgtatgtccatagctgtttgttc

SEQ ID NO: 3723962 - DNA, 25 bp, Homo sapien
tatgtccatagctgtttgttcccac

SEQ ID NO: 3723963 - DNA, 25 bp, Homo sapien
tgtatgtccatagctgtttgttccc

SEQ ID NO: 3723964 - DNA, 25 bp, Homo sapien
gcccgccgtttctggccgaggagca

SEQ ID NO: 3723965 - DNA, 25 bp, Homo sapien
ccgtttctggccgaggagcaactcg

SEQ ID NO: 3723966 - DNA, 25 bp, Homo sapien
gccgaggagcaactcgagttcttag

SEQ ID NO: 3723967 - DNA, 25 bp, Homo sapien
cgcctgcacgttgcaggaccgcccg

SEQ ID NO: 3723968 - DNA, 25 bp, Homo sapien
atttgcggctttggcaggtgggtga

SEQ ID NO: 3723969 - DNA, 25 bp, Homo sapien
agctgcggaatttgcggctttggca

SEQ ID NO: 3723970 - DNA, 25 bp, Homo sapien
aaggacaccagctgcggaatttgcg

SEQ ID NO: 3723971 - DNA, 25 bp, Homo sapien
acaccagctgcggaatttgcggctt

SEQ ID NO: 3723972 - DNA, 25 bp, Homo sapien
acgcgtgcgggggaggtggcttctt

SEQ ID NO: 3723973 - DNA, 25 bp, Homo sapien
ctaaacgcgtgcgggggaggtggct

SEQ ID NO: 3723974 - DNA, 25 bp, Homo sapien
gtggcttcttccggccgggccgaga

SEQ ID NO: 3723975 - DNA, 25 bp, Homo sapien
tgcgggggaggtggcttcttccggc

SEQ ID NO: 3723976 - DNA, 25 bp, Homo sapien
acctagagacaggaatcggaagggc

SEQ ID NO: 3723977 - DNA, 25 bp, Homo sapien
accctacttccgttgctgtgttgcg

SEQ ID NO: 3723978 - DNA, 25 bp, Homo sapien
tgtgggcgggctcaacaccctactt

SEQ ID NO: 3723979 - DNA, 25 bp, Homo sapien
gagaccaggatacccacagtccagt

SEQ ID NO: 3723980 - DNA, 25 bp, Homo sapien
gcgtctgcacccagctaccactaac

SEQ ID NO: 3723981 - DNA, 25 bp, Homo sapien
cggcgtctgcacccagctaccacta

SEQ ID NO: 3723982 - DNA, 25 bp, Homo sapien
ggcgtctgcacccagctaccactaa

SEQ ID NO: 3723983 - DNA, 25 bp, Homo sapien
tctctggtttgtggatctttcttgt

SEQ ID NO: 3723984 - DNA, 25 bp, Homo sapien
aaataagttgtcttgttcaactgac

SEQ ID NO: 3723985 - DNA, 25 bp, Homo sapien
tctggtttgtggatctttcttgtac

SEQ ID NO: 3723986 - DNA, 25 bp, Homo sapien
gtttgtggatctttcttgtacctcc

SEQ ID NO: 3723987 - DNA, 25 bp, Homo sapien
cttttggtggatccctcttcagtag

SEQ ID NO: 3723988 - DNA, 25 bp, Homo sapien
acactaaggatttcaaacttctctc

SEQ ID NO: 3723989 - DNA, 25 bp, Homo sapien
tctctcttgcggacttgctgctttc

SEQ ID NO: 3723990 - DNA, 25 bp, Homo sapien
ttggtggatccctcttcagtagaaa

SEQ ID NO: 3723991 - DNA, 25 bp, Homo sapien
tgtgtacaataaggatgggaacaac

SEQ ID NO: 3723992 - DNA, 25 bp, Homo sapien
tacaataaggatgggaacaacaata

SEQ ID NO: 3723993 - DNA, 25 bp, Homo sapien
tgtacaataaggatgggaacaacaa

SEQ ID NO: 3723994 - DNA, 25 bp, Homo sapien
aatgtgtacaataaggatgggaaca

SEQ ID NO: 3723995 - DNA, 25 bp, Homo sapien
cagaggttgttcttgtgtcacctgc

SEQ ID NO: 3723996 - DNA, 25 bp, Homo sapien
aaaatacgcattccctcacacaggg

SEQ ID NO: 3723997 - DNA, 25 bp, Homo sapien
gggagactaatcaccagttccagtt

SEQ ID NO: 3723998 - DNA, 25 bp, Homo sapien
gctcattcagctttttggtgtaggc

SEQ ID NO: 3723999 - DNA, 25 bp, Homo sapien
ggtgagaaaagttcaggcaagtgaa

SEQ ID NO: 3724000 - DNA, 25 bp, Homo sapien
agcttgacactcttcttgcccctgt

SEQ ID NO: 3724001 - DNA, 25 bp, Homo sapien
cacatcttaccagcattccaggtga

SEQ ID NO: 3724002 - DNA, 25 bp, Homo sapien
aaagttcaggcaagtgaagtaggtc

SEQ ID NO: 3724003 - DNA, 25 bp, Homo sapien
gaaaaagaaccactcctatgtgtca

SEQ ID NO: 3724004 - DNA, 25 bp, Homo sapien
cctatgtgtcacaattgagctgaaa

SEQ ID NO: 3724005 - DNA, 25 bp, Homo sapien
gctgaaagtaaaaggtggcctagac

SEQ ID NO: 3724006 - DNA, 25 bp, Homo sapien
gcagagagaaggcacattgccactc

SEQ ID NO: 3724007 - DNA, 25 bp, Homo sapien
tggcagaaaagctctggtcccatca

SEQ ID NO: 3724008 - DNA, 25 bp, Homo sapien
tgtccactaggtagccatggtcttc

SEQ ID NO: 3724009 - DNA, 25 bp, Homo sapien
cttccaggctggatacggtacctgt

SEQ ID NO: 3724010 - DNA, 25 bp, Homo sapien
ttctgtctgatgtactcctgggctt

SEQ ID NO: 3724011 - DNA, 25 bp, Homo sapien
gacagactaacaactcctccgttgc

SEQ ID NO: 3724012 - DNA, 25 bp, Homo sapien
ccagtcctggtagcaagttattaag

SEQ ID NO: 3724013 - DNA, 25 bp, Homo sapien
ctctgctgttcagtagcaatggccg

SEQ ID NO: 3724014 - DNA, 25 bp, Homo sapien
aacaatgcagttcaggtactgaccc

SEQ ID NO: 3724015 - DNA, 25 bp, Homo sapien
tgtgaggaagtttagcgtaaggcca

SEQ ID NO: 3724016 - DNA, 25 bp, Homo sapien
accacgcccgtgaagaatgtgagga

SEQ ID NO: 3724017 - DNA, 25 bp, Homo sapien
ttagcgtaaggccaaatggagtcac

SEQ ID NO: 3724018 - DNA, 25 bp, Homo sapien
ctttcttgggatccaggtgcataaa

SEQ ID NO: 3724019 - DNA, 25 bp, Homo sapien
caactctggttcgaggatggacgca

SEQ ID NO: 3724020 - DNA, 25 bp, Homo sapien
gcactgctccaaggttctggcaaga

SEQ ID NO: 3724021 - DNA, 25 bp, Homo sapien
gaaaaaaccctggacaggaacatca

SEQ ID NO: 3724022 - DNA, 25 bp, Homo sapien
gatggacgcaaaggatgcaggccct

SEQ ID NO: 3724023 - DNA, 25 bp, Homo sapien
gtgttccctggcttgaaggcctcag

SEQ ID NO: 3724024 - DNA, 25 bp, Homo sapien
ggcctcaggattgaagacgttctta

SEQ ID NO: 3724025 - DNA, 25 bp, Homo sapien
attctacacttgtgagtgttccctg

SEQ ID NO: 3724026 - DNA, 25 bp, Homo sapien
gagagcaaggccagttcatccattt

SEQ ID NO: 3724027 - DNA, 25 bp, Homo sapien
tgtcatgatatctaaggtactgagc

SEQ ID NO: 3724028 - DNA, 25 bp, Homo sapien
cactgccccaggttcgatgtcatga

SEQ ID NO: 3724029 - DNA, 25 bp, Homo sapien
tgccccaggttcgatgtcatgatat

SEQ ID NO: 3724030 - DNA, 25 bp, Homo sapien
aaggtactgagcttcaataatagac

SEQ ID NO: 3724031 - DNA, 25 bp, Homo sapien
gacctcatccccgatgtggtacttc

SEQ ID NO: 3724032 - DNA, 25 bp, Homo sapien
tatgactttatggttagcactgtgc

SEQ ID NO: 3724033 - DNA, 25 bp, Homo sapien
tccggattcttcatcaggatgtcag

SEQ ID NO: 3724034 - DNA, 25 bp, Homo sapien
gtgcatgggaggtaccaggcccctc

SEQ ID NO: 3724035 - DNA, 25 bp, Homo sapien
tactgagctcatgcttgggcaccag

SEQ ID NO: 3724036 - DNA, 25 bp, Homo sapien
tggcatcggcatagcaggtaatgac

SEQ ID NO: 3724037 - DNA, 25 bp, Homo sapien
tggccagtgtaaaaaactctctccg

SEQ ID NO: 3724038 - DNA, 25 bp, Homo sapien
ccgggtcagggatatactcagtact

SEQ ID NO: 3724039 - DNA, 25 bp, Homo sapien
cagttcaatacgacaaccttcacca

SEQ ID NO: 3724040 - DNA, 25 bp, Homo sapien
gaaggataagagcatcctctctttg

SEQ ID NO: 3724041 - DNA, 25 bp, Homo sapien
ggctcacagttcaatacgacaacct

SEQ ID NO: 3724042 - DNA, 25 bp, Homo sapien
gcatcctctctttggatggctcaca

SEQ ID NO: 3724043 - DNA, 25 bp, Homo sapien
ggctctttctttggctctggatcac

SEQ ID NO: 3724044 - DNA, 25 bp, Homo sapien
cctttcttctgactgtgtcctgcag

SEQ ID NO: 3724045 - DNA, 25 bp, Homo sapien
tgcccaatgttaatggcttttcctt

SEQ ID NO: 3724046 - DNA, 25 bp, Homo sapien
tctgactgtgtcctgcaggctcttt

SEQ ID NO: 3724047 - DNA, 25 bp, Homo sapien
ccgttggcaacgtggtccgacagat

SEQ ID NO: 3724048 - DNA, 25 bp, Homo sapien
aacgtggtccgacagatgagatgtg

SEQ ID NO: 3724049 - DNA, 25 bp, Homo sapien
aatgatgtaacaatgggccgttggc

SEQ ID NO: 3724050 - DNA, 25 bp, Homo sapien
ggtcttctctaaaaccttcacatct

SEQ ID NO: 3724051 - DNA, 25 bp, Homo sapien
acacgcccctcgctctggctcagac

SEQ ID NO: 3724052 - DNA, 25 bp, Homo sapien
cagacacaggactcggtgaaggatg

SEQ ID NO: 3724053 - DNA, 25 bp, Homo sapien
cacgcccctcgctctggctcagaca

SEQ ID NO: 3724054 - DNA, 25 bp, Homo sapien
cacaggactcggtgaaggatgtcac

SEQ ID NO: 3724055 - DNA, 25 bp, Homo sapien
tctgaggtcaaatagctgtctaatt

SEQ ID NO: 3724056 - DNA, 25 bp, Homo sapien
caaatagctgtctaatttccccaga

SEQ ID NO: 3724057 - DNA, 25 bp, Homo sapien
tttctgaggtcaaatagctgtctaa

SEQ ID NO: 3724058 - DNA, 25 bp, Homo sapien
ggtcaaatagctgtctaatttcccc

SEQ ID NO: 3724059 - DNA, 25 bp, Homo sapien
gggccagtccgctaagacctgaggg

SEQ ID NO: 3724060 - DNA, 25 bp, Homo sapien
tgaacacgccatagtccttgatgct

SEQ ID NO: 3724061 - DNA, 25 bp, Homo sapien
caaaaccaatgagcagcattccagg

SEQ ID NO: 3724062 - DNA, 25 bp, Homo sapien
tgagaagttcttgggatcctggcca

SEQ ID NO: 3724063 - DNA, 25 bp, Homo sapien
gccctcaacaaagtggtcacttgtg

SEQ ID NO: 3724064 - DNA, 25 bp, Homo sapien
ggaggctggtgatagccaagtcccc

SEQ ID NO: 3724065 - DNA, 25 bp, Homo sapien
acattggtcacctttgccgctactg

SEQ ID NO: 3724066 - DNA, 25 bp, Homo sapien
tcggttgctcataaggctgcgcacg

SEQ ID NO: 3724067 - DNA, 25 bp, Homo sapien
gaaacacggattagtaccatgaaag

SEQ ID NO: 3724068 - DNA, 25 bp, Homo sapien
gaccataattcatgggagtagccaa

SEQ ID NO: 3724069 - DNA, 25 bp, Homo sapien
tcctctggcagtgtgctatcaccac

SEQ ID NO: 3724070 - DNA, 25 bp, Homo sapien
ctatcaccacggaggacagtggagc

SEQ ID NO: 3724071 - DNA, 25 bp, Homo sapien
tcggccagcgtctggatcaacacag

SEQ ID NO: 3724072 - DNA, 25 bp, Homo sapien
aacattcctggggtcatctcggcca

SEQ ID NO: 3724073 - DNA, 25 bp, Homo sapien
gcaccactaggtcaaggaacattcc

SEQ ID NO: 3724074 - DNA, 25 bp, Homo sapien
tttcaggaccaggtcgggcactgga

SEQ ID NO: 3724075 - DNA, 25 bp, Homo sapien
caacatttaagataacaaccttctt

SEQ ID NO: 3724076 - DNA, 25 bp, Homo sapien
gcacttccaacttcaaaagatcaac

SEQ ID NO: 3724077 - DNA, 25 bp, Homo sapien
aacgtgcacttccaacttcaaaaga

SEQ ID NO: 3724078 - DNA, 25 bp, Homo sapien
ctggtgaagggaaacgtgcacttcc

SEQ ID NO: 3724079 - DNA, 25 bp, Homo sapien
catgggtaggcttaatggacttgac

SEQ ID NO: 3724080 - DNA, 25 bp, Homo sapien
caagtgctgcacaatcgcctggtgt

SEQ ID NO: 3724081 - DNA, 25 bp, Homo sapien
aatttctctgagtcaaagcggaagg

SEQ ID NO: 3724082 - DNA, 25 bp, Homo sapien
tccagagtcacaaccacatgggtag

SEQ ID NO: 3724083 - DNA, 25 bp, Homo sapien
caacaacaacaatctccctcgaagc

SEQ ID NO: 3724084 - DNA, 25 bp, Homo sapien
aacaatctccctcgaagccagccca

SEQ ID NO: 3724085 - DNA, 25 bp, Homo sapien
acaacaacaatctccctcgaagcca

SEQ ID NO: 3724086 - DNA, 25 bp, Homo sapien
caatctccctcgaagccagcccacc

SEQ ID NO: 3724087 - DNA, 25 bp, Homo sapien
agaatcttgcaaaataattctttgg

SEQ ID NO: 3724088 - DNA, 25 bp, Homo sapien
aagaatcttgcaaaataattctttg

SEQ ID NO: 3724089 - DNA, 25 bp, Homo sapien
aaagaatcttgcaaaataattcttt

SEQ ID NO: 3724090 - DNA, 25 bp, Homo sapien
aaaagaatcttgcaaaataattctt

SEQ ID NO: 3724091 - DNA, 25 bp, Homo sapien
tcaggttttccacctccctcatcgt

SEQ ID NO: 3724092 - DNA, 25 bp, Homo sapien
tattagtaaggagcaggctcatctg

SEQ ID NO: 3724093 - DNA, 25 bp, Homo sapien
taatctgtaggtcaggatttctccc

SEQ ID NO: 3724094 - DNA, 25 bp, Homo sapien
tctctgtaacacagtaatctgtagg

SEQ ID NO: 3724095 - DNA, 25 bp, Homo sapien
gaaacaaataagctgaatcatttct

SEQ ID NO: 3724096 - DNA, 25 bp, Homo sapien
acgaatctggggtgacttattggga

SEQ ID NO: 3724097 - DNA, 25 bp, Homo sapien
tcagctccgggatggttcgaacgaa

SEQ ID NO: 3724098 - DNA, 25 bp, Homo sapien
tccgggatggttcgaacgaatctgg

SEQ ID NO: 3724099 - DNA, 25 bp, Homo sapien
tctggggtgacttattgggagatac

SEQ ID NO: 3724100 - DNA, 25 bp, Homo sapien
taagatttacaacctggctggatcc

SEQ ID NO: 3724101 - DNA, 25 bp, Homo sapien
cagagtatctcatggaacacccttc

SEQ ID NO: 3724102 - DNA, 25 bp, Homo sapien
cacagtcgtctaggttgaaataaca

SEQ ID NO: 3724103 - DNA, 25 bp, Homo sapien
ctaagggtctatcaatctgagaggc

SEQ ID NO: 3724104 - DNA, 25 bp, Homo sapien
tcacaaagaggtatttgcacactca

SEQ ID NO: 3724105 - DNA, 25 bp, Homo sapien
gccaagaggcacaagcaacctaaat

SEQ ID NO: 3724106 - DNA, 25 bp, Homo sapien
acctaaatgtccgttgaccaatggg

SEQ ID NO: 3724107 - DNA, 25 bp, Homo sapien
gaaaagactggatatgccagacaca

SEQ ID NO: 3724108 - DNA, 25 bp, Homo sapien
cttaccccggcaggatggccactat

SEQ ID NO: 3724109 - DNA, 25 bp, Homo sapien
tgagatatcaccttaccccggcagg

SEQ ID NO: 3724110 - DNA, 25 bp, Homo sapien
agatatcaccttaccccggcaggat

SEQ ID NO: 3724111 - DNA, 25 bp, Homo sapien
gagatatcaccttaccccggcagga

SEQ ID NO: 3724112 - DNA, 25 bp, Homo sapien
tgttaagagcagtgtggccatcctc

SEQ ID NO: 3724113 - DNA, 25 bp, Homo sapien
taagaagcaagtaacagtctggccg

SEQ ID NO: 3724114 - DNA, 25 bp, Homo sapien
tttctttaagaagcaagtaacagtc

SEQ ID NO: 3724115 - DNA, 25 bp, Homo sapien
gccggcctggtactgtttaatcttc

SEQ ID NO: 3724116 - DNA, 25 bp, Homo sapien
aagtaacagtctggccggcctggta

SEQ ID NO: 3724117 - DNA, 25 bp, Homo sapien
agtgagcaataagggaattctcccc

SEQ ID NO: 3724118 - DNA, 25 bp, Homo sapien
tgtctggggcaatctccacctcaag

SEQ ID NO: 3724119 - DNA, 25 bp, Homo sapien
ccccggatgtctggggcaatctcca

SEQ ID NO: 3724120 - DNA, 25 bp, Homo sapien
gctcagagaagtgagcaataaggga

SEQ ID NO: 3724121 - DNA, 25 bp, Homo sapien
acttcttatctggatgcttcagaac

SEQ ID NO: 3724122 - DNA, 25 bp, Homo sapien
ggtcttggaggaatctgggccaaca

SEQ ID NO: 3724123 - DNA, 25 bp, Homo sapien
ggaatctgggccaacaacggtggcc

SEQ ID NO: 3724124 - DNA, 25 bp, Homo sapien
acagacataagagggtcttggagga

SEQ ID NO: 3724125 - DNA, 25 bp, Homo sapien
caagtggtggacaactctttcccag

SEQ ID NO: 3724126 - DNA, 25 bp, Homo sapien
cacctgtgtaggtaagggtaacctg

SEQ ID NO: 3724127 - DNA, 25 bp, Homo sapien
tgagatcaccctgccatgtagccaa

SEQ ID NO: 3724128 - DNA, 25 bp, Homo sapien
gagtaactgggccagagcaaagccc

SEQ ID NO: 3724129 - DNA, 25 bp, Homo sapien
aaggagacggtcagcccctcgttgg

SEQ ID NO: 3724130 - DNA, 25 bp, Homo sapien
tgaaatatactgactgttcctatct

SEQ ID NO: 3724131 - DNA, 25 bp, Homo sapien
tgacaaccttctgggggacgaagtc

SEQ ID NO: 3724132 - DNA, 25 bp, Homo sapien
ggcgtctcggagtaggagtcactca

SEQ ID NO: 3724133 - DNA, 25 bp, Homo sapien
cgcagcgacaaagtcaatacgttgt

SEQ ID NO: 3724134 - DNA, 25 bp, Homo sapien
ctggatgatcgcagcgacaaagtca

SEQ ID NO: 3724135 - DNA, 25 bp, Homo sapien
tgatcgcagcgacaaagtcaatacg

SEQ ID NO: 3724136 - DNA, 25 bp, Homo sapien
gatgatcgcagcgacaaagtcaata

SEQ ID NO: 3724137 - DNA, 25 bp, Homo sapien
gatggagttaatctctggatcttct

SEQ ID NO: 3724138 - DNA, 25 bp, Homo sapien
cccctcagaagctgcccttccttaa

SEQ ID NO: 3724139 - DNA, 25 bp, Homo sapien
cttctactttgcttttcgtctccgg

SEQ ID NO: 3724140 - DNA, 25 bp, Homo sapien
cctggatggagttaatctctggatc

SEQ ID NO: 3724141 - DNA, 25 bp, Homo sapien
gaaagaacacaccgtgtggctggat

SEQ ID NO: 3724142 - DNA, 25 bp, Homo sapien
cgaaagaacacaccgtgtggctgga

SEQ ID NO: 3724143 - DNA, 25 bp, Homo sapien
aagaacacaccgtgtggctggatgg

SEQ ID NO: 3724144 - DNA, 25 bp, Homo sapien
gaacacaccgtgtggctggatggac

SEQ ID NO: 3724145 - DNA, 25 bp, Homo sapien
tgggagtaccgagccaaacccacaa

SEQ ID NO: 3724146 - DNA, 25 bp, Homo sapien
ggagacatgggagtaccgagccaaa

SEQ ID NO: 3724147 - DNA, 25 bp, Homo sapien
ataaagggctttcttggacgggctg

SEQ ID NO: 3724148 - DNA, 25 bp, Homo sapien
tcccttcagggaggtgtttgttata

SEQ ID NO: 3724149 - DNA, 25 bp, Homo sapien
gaaagcacgtctggcttcccagtgt

SEQ ID NO: 3724150 - DNA, 25 bp, Homo sapien
gcttctggggctgttgcttctcctt

SEQ ID NO: 3724151 - DNA, 25 bp, Homo sapien
cgccccgcttctgcgcctgtggctt

SEQ ID NO: 3724152 - DNA, 25 bp, Homo sapien
tgctcactcccagactcccggcact

SEQ ID NO: 3724153 - DNA, 25 bp, Homo sapien
ggcttctggggctgttgcttctcct

SEQ ID NO: 3724154 - DNA, 25 bp, Homo sapien
tttccctcccgatagtacacgtcca

SEQ ID NO: 3724155 - DNA, 25 bp, Homo sapien
ctcccgatagtacacgtccacaagg

SEQ ID NO: 3724156 - DNA, 25 bp, Homo sapien
cttgggcagcacattcgtctcttct

SEQ ID NO: 3724157 - DNA, 25 bp, Homo sapien
gtacacgtccacaaggctgtcgtcc

SEQ ID NO: 3724158 - DNA, 25 bp, Homo sapien
gatgcaggctcagaacggctcagcc

SEQ ID NO: 3724159 - DNA, 25 bp, Homo sapien
gaggccctgcccagatggttataag

SEQ ID NO: 3724160 - DNA, 25 bp, Homo sapien
tggttataagccatcccatacccgg

SEQ ID NO: 3724161 - DNA, 25 bp, Homo sapien
gctgacggtcaatggaggcaactga

SEQ ID NO: 3724162 - DNA, 25 bp, Homo sapien
gagtctagtcccacattccaagcga

SEQ ID NO: 3724163 - DNA, 25 bp, Homo sapien
tagtcccacattccaagcgaagcct

SEQ ID NO: 3724164 - DNA, 25 bp, Homo sapien
gggtcagagagtctagtcccacatt

SEQ ID NO: 3724165 - DNA, 25 bp, Homo sapien
cccacattccaagcgaagcctgaag

SEQ ID NO: 3724166 - DNA, 25 bp, Homo sapien
agagcacaagagactgacaccaagg

SEQ ID NO: 3724167 - DNA, 25 bp, Homo sapien
tggaagtcacgagttggctgggcag

SEQ ID NO: 3724168 - DNA, 25 bp, Homo sapien
gacacccagtctaggaacagagcac

SEQ ID NO: 3724169 - DNA, 25 bp, Homo sapien
ggtccctgcaaaaaggacatgccct

SEQ ID NO: 3724170 - DNA, 25 bp, Homo sapien
ttctcgatctccgtggcctgcaggt

SEQ ID NO: 3724171 - DNA, 25 bp, Homo sapien
ggtcaaaatcatccgcggactctgg

SEQ ID NO: 3724172 - DNA, 25 bp, Homo sapien
tggaaagccatgtactgcagccaca

SEQ ID NO: 3724173 - DNA, 25 bp, Homo sapien
tcaatgcgggacagttccttctctg

SEQ ID NO: 3724174 - DNA, 25 bp, Homo sapien
tgagaggctcgttgtactgcacggc

SEQ ID NO: 3724175 - DNA, 25 bp, Homo sapien
ctggaatttctctgacttggcgtag

SEQ ID NO: 3724176 - DNA, 25 bp, Homo sapien
gcacggctcgctcaaagaccttggt

SEQ ID NO: 3724177 - DNA, 25 bp, Homo sapien
tcagggactcctgagagccgtacat

SEQ ID NO: 3724178 - DNA, 25 bp, Homo sapien
gaaacgcttcagcatccggttgtag

SEQ ID NO: 3724179 - DNA, 25 bp, Homo sapien
tccggttgtagagttcaccagcttc

SEQ ID NO: 3724180 - DNA, 25 bp, Homo sapien
aaggaaggcgccgtatttgatccac

SEQ ID NO: 3724181 - DNA, 25 bp, Homo sapien
tccttgctaggcaggcactccaggg

SEQ ID NO: 3724182 - DNA, 25 bp, Homo sapien
ggccaaatacacagatgggcactgc

SEQ ID NO: 3724183 - DNA, 25 bp, Homo sapien
aacacagtgttccgcagggtcagcg

SEQ ID NO: 3724184 - DNA, 25 bp, Homo sapien
gactcaggttgtgacaagagggaca

SEQ ID NO: 3724185 - DNA, 25 bp, Homo sapien
agggagaggactgctcagagaccca

SEQ ID NO: 3724186 - DNA, 25 bp, Homo sapien
aaaaatggctttggcccgctctgca

SEQ ID NO: 3724187 - DNA, 25 bp, Homo sapien
ggtcatgtcgatatagaccgaccag

SEQ ID NO: 3724188 - DNA, 25 bp, Homo sapien
ggtgctcagcgtgttctcaaaaatg

SEQ ID NO: 3724189 - DNA, 25 bp, Homo sapien
tctgtgcgctttgggtaggtgctca

SEQ ID NO: 3724190 - DNA, 25 bp, Homo sapien
caggtagcgcttgaagaagaacttc

SEQ ID NO: 3724191 - DNA, 25 bp, Homo sapien
tcagatgaatgacccgctcaaagat

SEQ ID NO: 3724192 - DNA, 25 bp, Homo sapien
tcttgggggccaagctcagatgaat

SEQ ID NO: 3724193 - DNA, 25 bp, Homo sapien
ccatgctgcttctcgtagtccaggt

SEQ ID NO: 3724194 - DNA, 25 bp, Homo sapien
tagtcctctagcactgagctcttgg

SEQ ID NO: 3724195 - DNA, 25 bp, Homo sapien
ctagtcctctagcactgagctcttg

SEQ ID NO: 3724196 - DNA, 25 bp, Homo sapien
gcactgagctcttggcctccacata

SEQ ID NO: 3724197 - DNA, 25 bp, Homo sapien
ctctagcactgagctcttggcctcc

SEQ ID NO: 3724198 - DNA, 25 bp, Homo sapien
acaggatttccccaagcgtgctgca

SEQ ID NO: 3724199 - DNA, 25 bp, Homo sapien
acagttttccgagtgcccaggcact

SEQ ID NO: 3724200 - DNA, 25 bp, Homo sapien
cccaggtagcctcagataaggaaaa

SEQ ID NO: 3724201 - DNA, 25 bp, Homo sapien
ctgaccacaggaccctcgggaatag

SEQ ID NO: 3724202 - DNA, 25 bp, Homo sapien
agttcacgccaacacccgtggcttt

SEQ ID NO: 3724203 - DNA, 25 bp, Homo sapien
ggcgtgggatgagacatcatcagtt

SEQ ID NO: 3724204 - DNA, 25 bp, Homo sapien
cttcaacaactagctgggtctgtgc

SEQ ID NO: 3724205 - DNA, 25 bp, Homo sapien
ctgtgctggcctccaagaccttgaa

SEQ ID NO: 3724206 - DNA, 25 bp, Homo sapien
acttgtaccgtgagaaccagggcct

SEQ ID NO: 3724207 - DNA, 25 bp, Homo sapien
tgtggacagacccagtagacaatgg

SEQ ID NO: 3724208 - DNA, 25 bp, Homo sapien
tgacagtgaagctcaccagtgggct

SEQ ID NO: 3724209 - DNA, 25 bp, Homo sapien
tatctagctgcatagggacacccag

SEQ ID NO: 3724210 - DNA, 25 bp, Homo sapien
gtggtgaaacaaggatgaccttgcc

SEQ ID NO: 3724211 - DNA, 25 bp, Homo sapien
tgacctccaaacaaggcagatggtg

SEQ ID NO: 3724212 - DNA, 25 bp, Homo sapien
cagatctctgtacaggagcaagtgg

SEQ ID NO: 3724213 - DNA, 25 bp, Homo sapien
aaaggctggagatagcaccagagcg

SEQ ID NO: 3724214 - DNA, 25 bp, Homo sapien
ggatgaacacattcctatcccagga

SEQ ID NO: 3724215 - DNA, 25 bp, Homo sapien
cagtctgggccttaattgcaatcac

SEQ ID NO: 3724216 - DNA, 25 bp, Homo sapien
gaagatgcagttgccgtcctgagcc

SEQ ID NO: 3724217 - DNA, 25 bp, Homo sapien
gcctcaagtgttgctgacctaaggg

SEQ ID NO: 3724218 - DNA, 25 bp, Homo sapien
tcatgaagtgtgatcagaccctgag

SEQ ID NO: 3724219 - DNA, 25 bp, Homo sapien
tcactttccctagtgcacggcgggc

SEQ ID NO: 3724220 - DNA, 25 bp, Homo sapien
taccccaggagaagctcgtggtggc

SEQ ID NO: 3724221 - DNA, 25 bp, Homo sapien
gataatgtccttgcgaactccaggg

SEQ ID NO: 3724222 - DNA, 25 bp, Homo sapien
tctggagttagattagtctgaagcc

SEQ ID NO: 3724223 - DNA, 25 bp, Homo sapien
gaacaggcatctcaacttcctctcg

SEQ ID NO: 3724224 - DNA, 25 bp, Homo sapien
tttccactcactggcgcgcagactc

SEQ ID NO: 3724225 - DNA, 25 bp, Homo sapien
gcgcagactccatcccactgttttc

SEQ ID NO: 3724226 - DNA, 25 bp, Homo sapien
tagcctgtccgtagactctcctgtg

SEQ ID NO: 3724227 - DNA, 25 bp, Homo sapien
cttcgtacatatggtcaagcccagc

SEQ ID NO: 3724228 - DNA, 25 bp, Homo sapien
taactttcacccaccagttggagct

SEQ ID NO: 3724229 - DNA, 25 bp, Homo sapien
tgtgcagcattcctgacccgtgacg

SEQ ID NO: 3724230 - DNA, 25 bp, Homo sapien
ctgggactgtgtttagcacatgctg

SEQ ID NO: 3724231 - DNA, 25 bp, Homo sapien
tgtggtaaggatagaggaagataac

SEQ ID NO: 3724232 - DNA, 25 bp, Homo sapien
attgtggtaaggatagaggaagata

SEQ ID NO: 3724233 - DNA, 25 bp, Homo sapien
ggatctgggactgtgtttagcacat

SEQ ID NO: 3724234 - DNA, 25 bp, Homo sapien
cacagtgagggaactaggagacatc

SEQ ID NO: 3724235 - DNA, 25 bp, Homo sapien
gttgatatacaacactgggccacag

SEQ ID NO: 3724236 - DNA, 25 bp, Homo sapien
tatccttgcagagtggaggtccagg

SEQ ID NO: 3724237 - DNA, 25 bp, Homo sapien
caagtctgagatgagtgtacctgag

SEQ ID NO: 3724238 - DNA, 25 bp, Homo sapien
ggcgagtgtacatcccacagtggtg

SEQ ID NO: 3724239 - DNA, 25 bp, Homo sapien
tgggtgcttggacaacagccccaag

SEQ ID NO: 3724240 - DNA, 25 bp, Homo sapien
ggtgcttggacaacagccccaaggc

SEQ ID NO: 3724241 - DNA, 25 bp, Homo sapien
agtgtacatcccacagtggtgacca

SEQ ID NO: 3724242 - DNA, 25 bp, Homo sapien
gcggcggcccagtctgcatgagtga

SEQ ID NO: 3724243 - DNA, 25 bp, Homo sapien
caaatgtcggaaatagtgctgggtt

SEQ ID NO: 3724244 - DNA, 25 bp, Homo sapien
tggctgcggtcaggccatgcaaatg

SEQ ID NO: 3724245 - DNA, 25 bp, Homo sapien
acctggtttaggcaaagctttagca

SEQ ID NO: 3724246 - DNA, 25 bp, Homo sapien
cggctccgaggcaggctcggttacc

SEQ ID NO: 3724247 - DNA, 25 bp, Homo sapien
caggcgctgaggtgcggtgtgcgag

SEQ ID NO: 3724248 - DNA, 25 bp, Homo sapien
catagagtcagggtcgctggcgtgg

SEQ ID NO: 3724249 - DNA, 25 bp, Homo sapien
ttctctggacttcgcggtccttggc

SEQ ID NO: 3724250 - DNA, 25 bp, Homo sapien
cggcgcgcggctcgggtttcctcgg

SEQ ID NO: 3724251 - DNA, 25 bp, Homo sapien
cgcggcgcgcggctcgggtttcctc

SEQ ID NO: 3724252 - DNA, 25 bp, Homo sapien
gcgcggctcgggtttcctcggggca

SEQ ID NO: 3724253 - DNA, 25 bp, Homo sapien
ctcgggtttcctcggggcagcgagg

SEQ ID NO: 3724254 - DNA, 25 bp, Homo sapien
gaaaggagacccatcgaggtgcctc

SEQ ID NO: 3724255 - DNA, 25 bp, Homo sapien
ttcaggctcgcctaagaccatggcc

SEQ ID NO: 3724256 - DNA, 25 bp, Homo sapien
gaaatgcaactagtgctcccagcct

SEQ ID NO: 3724257 - DNA, 25 bp, Homo sapien
tccagacacgcacaacaggtggcgt

SEQ ID NO: 3724258 - DNA, 25 bp, Homo sapien
ccaccgcaccctgccaacaaattga

SEQ ID NO: 3724259 - DNA, 25 bp, Homo sapien
caccgcaccctgccaacaaattgat

SEQ ID NO: 3724260 - DNA, 25 bp, Homo sapien
cttccatctgccagattcaagggat

SEQ ID NO: 3724261 - DNA, 25 bp, Homo sapien
caacttccatctgccagattcaagg

SEQ ID NO: 3724262 - DNA, 25 bp, Homo sapien
tcctgcctatgagcagtggtcctgc

SEQ ID NO: 3724263 - DNA, 25 bp, Homo sapien
tatttacatgaatacacctagcatc

SEQ ID NO: 3724264 - DNA, 25 bp, Homo sapien
tcagaacttgggcttcttaaaaatc

SEQ ID NO: 3724265 - DNA, 25 bp, Homo sapien
ttttttcctgcctatgagcagtggt

SEQ ID NO: 3724266 - DNA, 25 bp, Homo sapien
aggtcccaagtgtgcacaccctgac

SEQ ID NO: 3724267 - DNA, 25 bp, Homo sapien
gtcccaagtgtgcacaccctgacct

SEQ ID NO: 3724268 - DNA, 25 bp, Homo sapien
gtaaaacctcacacccacggcagga

SEQ ID NO: 3724269 - DNA, 25 bp, Homo sapien
ctgtaaaacctcacacccacggcag

SEQ ID NO: 3724270 - DNA, 25 bp, Homo sapien
cattggatgccaaagatcggtgaaa

SEQ ID NO: 3724271 - DNA, 25 bp, Homo sapien
tttccctgttggtgaagtggcctgg

SEQ ID NO: 3724272 - DNA, 25 bp, Homo sapien
gagcccataggcattgaactctcag

SEQ ID NO: 3724273 - DNA, 25 bp, Homo sapien
gcctgccaggcccaagtgttgggtc

SEQ ID NO: 3724274 - DNA, 25 bp, Homo sapien
acaagactggaacccgctagtgctc

SEQ ID NO: 3724275 - DNA, 25 bp, Homo sapien
gattgtccattaaaaatgctatcac

SEQ ID NO: 3724276 - DNA, 25 bp, Homo sapien
agagagagagacatgcagtttcgct

SEQ ID NO: 3724277 - DNA, 25 bp, Homo sapien
acactcgggaggagaacaagactgg

SEQ ID NO: 3724278 - DNA, 25 bp, Homo sapien
gcatggccagcgtagactggacaga

SEQ ID NO: 3724279 - DNA, 25 bp, Homo sapien
atggccagcgtagactggacagaag

SEQ ID NO: 3724280 - DNA, 25 bp, Homo sapien
cagcatggccagcgtagactggaca

SEQ ID NO: 3724281 - DNA, 25 bp, Homo sapien
catggccagcgtagactggacagaa

SEQ ID NO: 3724282 - DNA, 25 bp, Homo sapien
tccgctaacaggtgacccagacaga

SEQ ID NO: 3724283 - DNA, 25 bp, Homo sapien
gtaaggctggacttctcatccgcta

SEQ ID NO: 3724284 - DNA, 25 bp, Homo sapien
aagacagaaggtgacattccaggga

SEQ ID NO: 3724285 - DNA, 25 bp, Homo sapien
gaagcctaaatgcaggtggagaaca

SEQ ID NO: 3724286 - DNA, 25 bp, Homo sapien
caagacaaacgaggcttcaaaccca

SEQ ID NO: 3724287 - DNA, 25 bp, Homo sapien
tcccttcaggagttataatcacccc

SEQ ID NO: 3724288 - DNA, 25 bp, Homo sapien
ggacagtggaccgtctccttaagga

SEQ ID NO: 3724289 - DNA, 25 bp, Homo sapien
cattttcgggctataaaactgaggc

SEQ ID NO: 3724290 - DNA, 25 bp, Homo sapien
agagtgctccgggtgatctgtcccc

SEQ ID NO: 3724291 - DNA, 25 bp, Homo sapien
cggagaccggcatggcagggccgag

SEQ ID NO: 3724292 - DNA, 25 bp, Homo sapien
ccatctccggcgacgggcagtgcag

SEQ ID NO: 3724293 - DNA, 25 bp, Homo sapien
tgggccggccggctggtcaccgagt

SEQ ID NO: 3724294 - DNA, 25 bp, Homo sapien
agaaaagataatacaatcaaggacc

SEQ ID NO: 3724295 - DNA, 25 bp, Homo sapien
ggcccgaatcaagccgaaagtccaa

SEQ ID NO: 3724296 - DNA, 25 bp, Homo sapien
tgtttggcccgaatcaagccgaaag

SEQ ID NO: 3724297 - DNA, 25 bp, Homo sapien
caaaatgtttggcccgaatcaagcc

SEQ ID NO: 3724298 - DNA, 25 bp, Homo sapien
gaatcaagccgaaagtccaaggccc

SEQ ID NO: 3724299 - DNA, 25 bp, Homo sapien
gtcagagaacttggcgggtccaaga

SEQ ID NO: 3724300 - DNA, 25 bp, Homo sapien
gaacaggccacggtgtcagagaact

SEQ ID NO: 3724301 - DNA, 25 bp, Homo sapien
ggtccaagagccagaccagagtccc

SEQ ID NO: 3724302 - DNA, 25 bp, Homo sapien
acttggcgggtccaagagccagacc

SEQ ID NO: 3724303 - DNA, 25 bp, Homo sapien
ccgctgggcagcactgccggacagt

SEQ ID NO: 3724304 - DNA, 25 bp, Homo sapien
aagagcagcggcgtggctgggagcc

SEQ ID NO: 3724305 - DNA, 25 bp, Homo sapien
tggtggcatcggtgagaagtgacgg

SEQ ID NO: 3724306 - DNA, 25 bp, Homo sapien
cactgccggacagtgcttctgcttg

SEQ ID NO: 3724307 - DNA, 25 bp, Homo sapien
cagcctgacttgctcgtagatgagg

SEQ ID NO: 3724308 - DNA, 25 bp, Homo sapien
tggctgaggtccatgaggatctggg

SEQ ID NO: 3724309 - DNA, 25 bp, Homo sapien
tgatggcgttgcagaagctggcctg

SEQ ID NO: 3724310 - DNA, 25 bp, Homo sapien
gaaggtgatggcgttgcagaagctg

SEQ ID NO: 3724311 - DNA, 25 bp, Homo sapien
tccttgtcacacagggaggttgaga

SEQ ID NO: 3724312 - DNA, 25 bp, Homo sapien
agggcagcctccctgcggtggactc

SEQ ID NO: 3724313 - DNA, 25 bp, Homo sapien
gcctgcccaccattccagcacagtt

SEQ ID NO: 3724314 - DNA, 25 bp, Homo sapien
cttggtcaatcagaccaagggcagc

SEQ ID NO: 3724315 - DNA, 25 bp, Homo sapien
gcggaccccgctgaagaacagcata

SEQ ID NO: 3724316 - DNA, 25 bp, Homo sapien
cataacagccgagtcgttgatgcgg

SEQ ID NO: 3724317 - DNA, 25 bp, Homo sapien
ttgatgcggtggaagacacggccct

SEQ ID NO: 3724318 - DNA, 25 bp, Homo sapien
tcttgtccacccagaatgcgatgat

SEQ ID NO: 3724319 - DNA, 25 bp, Homo sapien
agccagtttgccgatggcctgattt

SEQ ID NO: 3724320 - DNA, 25 bp, Homo sapien
tttgccgatggcctgatttgtaccc

SEQ ID NO: 3724321 - DNA, 25 bp, Homo sapien
ctgatttgtacccagagtctatgtg

SEQ ID NO: 3724322 - DNA, 25 bp, Homo sapien
gatggcctgatttgtacccagagtc

SEQ ID NO: 3724323 - DNA, 25 bp, Homo sapien
tttcacagctgaggaagctgaggct

SEQ ID NO: 3724324 - DNA, 25 bp, Homo sapien
catttcacagctgaggaagctgagg

SEQ ID NO: 3724325 - DNA, 25 bp, Homo sapien
accaacccatttcacagctgaggaa

SEQ ID NO: 3724326 - DNA, 25 bp, Homo sapien
tcacagctgaggaagctgaggcttg

SEQ ID NO: 3724327 - DNA, 25 bp, Homo sapien
ctccacgtcctctgcaggtcaggca

SEQ ID NO: 3724328 - DNA, 25 bp, Homo sapien
tccacgtcctctgcaggtcaggcag

SEQ ID NO: 3724329 - DNA, 25 bp, Homo sapien
aggaagctgttattcttgacgatac

SEQ ID NO: 3724330 - DNA, 25 bp, Homo sapien
gctgttattcttgacgataccagcc

SEQ ID NO: 3724331 - DNA, 25 bp, Homo sapien
gaagctgttattcttgacgatacca

SEQ ID NO: 3724332 - DNA, 25 bp, Homo sapien
ttattcttgacgataccagcctggg

SEQ ID NO: 3724333 - DNA, 25 bp, Homo sapien
caaggagaccttgagatactgggat

SEQ ID NO: 3724334 - DNA, 25 bp, Homo sapien
tatttagttgctggcgggtccttct

SEQ ID NO: 3724335 - DNA, 25 bp, Homo sapien
aaaacctgtgtttatttagttgctg

SEQ ID NO: 3724336 - DNA, 25 bp, Homo sapien
tactgggataggagcttctttttcc

SEQ ID NO: 3724337 - DNA, 25 bp, Homo sapien
cttgggccaccttgcatcagttata

SEQ ID NO: 3724338 - DNA, 25 bp, Homo sapien
cccgcttagtgcctaggcagtggta

SEQ ID NO: 3724339 - DNA, 25 bp, Homo sapien
tcacacttgattgcagaattgaact

SEQ ID NO: 3724340 - DNA, 25 bp, Homo sapien
gttttactcttcaggtcacacttga

SEQ ID NO: 3724341 - DNA, 25 bp, Homo sapien
tccccgctcttgtcgggtatccaga

SEQ ID NO: 3724342 - DNA, 25 bp, Homo sapien
ccactgtccccgctcttgtcgggta

SEQ ID NO: 3724343 - DNA, 25 bp, Homo sapien
tgtccccgctcttgtcgggtatcca

SEQ ID NO: 3724344 - DNA, 25 bp, Homo sapien
actgtccccgctcttgtcgggtatc

SEQ ID NO: 3724345 - DNA, 25 bp, Homo sapien
tgaatctggcatcctgggcgctgca

SEQ ID NO: 3724346 - DNA, 25 bp, Homo sapien
gccttgagctcttgtaagctcgact

SEQ ID NO: 3724347 - DNA, 25 bp, Homo sapien
gcccaacatgtgcagttgatccttg

SEQ ID NO: 3724348 - DNA, 25 bp, Homo sapien
gttgatccttgatgccttgagctct

SEQ ID NO: 3724349 - DNA, 25 bp, Homo sapien
cctccggggaactataaggcaggca

SEQ ID NO: 3724350 - DNA, 25 bp, Homo sapien
tagaaaactagagtgcacaggaata

SEQ ID NO: 3724351 - DNA, 25 bp, Homo sapien
aactagagtgcacaggaataactga

SEQ ID NO: 3724352 - DNA, 25 bp, Homo sapien
gaataactgaaccagacaaagccct

SEQ ID NO: 3724353 - DNA, 25 bp, Homo sapien
gaacctctccaagggagaatctgtg

SEQ ID NO: 3724354 - DNA, 25 bp, Homo sapien
aatatgcctggtgccactgtaagcc

SEQ ID NO: 3724355 - DNA, 25 bp, Homo sapien
tgtagacatggtcactaaacctccc

SEQ ID NO: 3724356 - DNA, 25 bp, Homo sapien
actgtaagccgcaccatggaccgat

SEQ ID NO: 3724357 - DNA, 25 bp, Homo sapien
tctgtcgagtgcactgacgaaggcc

SEQ ID NO: 3724358 - DNA, 25 bp, Homo sapien
gacgaaggcctaacatcctggaaag

SEQ ID NO: 3724359 - DNA, 25 bp, Homo sapien
gcttaacagggaatcaaactcatcg

SEQ ID NO: 3724360 - DNA, 25 bp, Homo sapien
gaaacgactcttgcaggacatctgt

SEQ ID NO: 3724361 - DNA, 25 bp, Homo sapien
cgtgcaggccgaagagcatccaaag

SEQ ID NO: 3724362 - DNA, 25 bp, Homo sapien
cacacggcccagaattccttgcggt

SEQ ID NO: 3724363 - DNA, 25 bp, Homo sapien
cggatctgcgtgatggtcccgtgca

SEQ ID NO: 3724364 - DNA, 25 bp, Homo sapien
tgaggtcgcataggctcaccgagag

SEQ ID NO: 3724365 - DNA, 25 bp, Homo sapien
gtctgtgattccttagcaacaccat

SEQ ID NO: 3724366 - DNA, 25 bp, Homo sapien
gcctccaggaaaggcatacgcccag

SEQ ID NO: 3724367 - DNA, 25 bp, Homo sapien
gggagctcgccctttgtctcctacc

SEQ ID NO: 3724368 - DNA, 25 bp, Homo sapien
aggcatacgcccaggcgcagctgcg

SEQ ID NO: 3724369 - DNA, 25 bp, Homo sapien
tataagggccactgacaagatgacc

SEQ ID NO: 3724370 - DNA, 25 bp, Homo sapien
ctatgggttgatctgattctgggca

SEQ ID NO: 3724371 - DNA, 25 bp, Homo sapien
tcagtgggttgtgtgcttctggact

SEQ ID NO: 3724372 - DNA, 25 bp, Homo sapien
tgggcatcaaactcaataatccgcg

SEQ ID NO: 3724373 - DNA, 25 bp, Homo sapien
gaatattcaatagatgcccacaggg

SEQ ID NO: 3724374 - DNA, 25 bp, Homo sapien
cattggccagaattttcagaacaac

SEQ ID NO: 3724375 - DNA, 25 bp, Homo sapien
tgcacacacctaagtgcccaatgag

SEQ ID NO: 3724376 - DNA, 25 bp, Homo sapien
gaacaacatctgtaagccatctcta

SEQ ID NO: 3724377 - DNA, 25 bp, Homo sapien
tcctctcctttttaacaatcctcgc

SEQ ID NO: 3724378 - DNA, 25 bp, Homo sapien
tcaacaaatccttaccaaggaccta

SEQ ID NO: 3724379 - DNA, 25 bp, Homo sapien
tctcctttttaacaatcctcgcctc

SEQ ID NO: 3724380 - DNA, 25 bp, Homo sapien
cttaccaaggacctaccaggcatca

SEQ ID NO: 3724381 - DNA, 25 bp, Homo sapien
gcactgggcgaggttggcgtggagg

SEQ ID NO: 3724382 - DNA, 25 bp, Homo sapien
ggataccccgctcggccaggatagt

SEQ ID NO: 3724383 - DNA, 25 bp, Homo sapien
ggccagagctgcacgtgctgagcaa

SEQ ID NO: 3724384 - DNA, 25 bp, Homo sapien
gagtgatgggataccccgctcggcc

SEQ ID NO: 3724385 - DNA, 25 bp, Homo sapien
cagagccttcttgaggcgcaggcca

SEQ ID NO: 3724386 - DNA, 25 bp, Homo sapien
aatggtgcactcatcgctccactgg

SEQ ID NO: 3724387 - DNA, 25 bp, Homo sapien
actcgggcaggctcactggcgaatt

SEQ ID NO: 3724388 - DNA, 25 bp, Homo sapien
cgcgtgttcatagcaaatggtgcac

SEQ ID NO: 3724389 - DNA, 25 bp, Homo sapien
gggtatgcgggatgggccaccgcaa

SEQ ID NO: 3724390 - DNA, 25 bp, Homo sapien
gcccgagaagatgggtatgcgggat

SEQ ID NO: 3724391 - DNA, 25 bp, Homo sapien
tatgcgggatgggccaccgcaacgg

SEQ ID NO: 3724392 - DNA, 25 bp, Homo sapien
aagcccgagaagatgggtatgcggg

SEQ ID NO: 3724393 - DNA, 25 bp, Homo sapien
caaaggtgccacatggactacagac

SEQ ID NO: 3724394 - DNA, 25 bp, Homo sapien
tgtccatgtgcccatcaggtagtgg

SEQ ID NO: 3724395 - DNA, 25 bp, Homo sapien
cagtggccaggactaaaacccatgc

SEQ ID NO: 3724396 - DNA, 25 bp, Homo sapien
tattcacaatcacagcgacccaagt

SEQ ID NO: 3724397 - DNA, 25 bp, Homo sapien
tttagaacaaaaggatggctcgagc

SEQ ID NO: 3724398 - DNA, 25 bp, Homo sapien
taagtttagtcccaactgcagggcc

SEQ ID NO: 3724399 - DNA, 25 bp, Homo sapien
tgccactgggaatagaaacactgag

SEQ ID NO: 3724400 - DNA, 25 bp, Homo sapien
taggaaaaaactgccactcattggg

SEQ ID NO: 3724401 - DNA, 25 bp, Homo sapien
tggtgagacaccaattcccacaagc

SEQ ID NO: 3724402 - DNA, 25 bp, Homo sapien
tctgcccctcaaggtgacagggacg

SEQ ID NO: 3724403 - DNA, 25 bp, Homo sapien
tacaaattctgctccgggaagagtc

SEQ ID NO: 3724404 - DNA, 25 bp, Homo sapien
gcaggaagcctagaagtcaccagat

SEQ ID NO: 3724405 - DNA, 25 bp, Homo sapien
gagttgctcaggcatccaggaaaag

SEQ ID NO: 3724406 - DNA, 25 bp, Homo sapien
tccaatgactgtagacgggctgtct

SEQ ID NO: 3724407 - DNA, 25 bp, Homo sapien
tgatgctgaaggatactgccggcag

SEQ ID NO: 3724408 - DNA, 25 bp, Homo sapien
aaatctccgcagtgtccaaacctag

SEQ ID NO: 3724409 - DNA, 25 bp, Homo sapien
cccagtgctgtaagtaatagagtca

SEQ ID NO: 3724410 - DNA, 25 bp, Homo sapien
ttaaaatgcaggactgaaagagacc

SEQ ID NO: 3724411 - DNA, 25 bp, Homo sapien
ttcctgttactgcggcccaaggaca

SEQ ID NO: 3724412 - DNA, 25 bp, Homo sapien
gttactgcggcccaaggacaggaaa

SEQ ID NO: 3724413 - DNA, 25 bp, Homo sapien
tgagccagttcagtcactagtgcgc

SEQ ID NO: 3724414 - DNA, 25 bp, Homo sapien
tctgctggacagtattaaatagagc

SEQ ID NO: 3724415 - DNA, 25 bp, Homo sapien
tgcagagcatgtctgccaagcacag

SEQ ID NO: 3724416 - DNA, 25 bp, Homo sapien
ccaagcacagagcatctcagttgga

SEQ ID NO: 3724417 - DNA, 25 bp, Homo sapien
ctgcaaaacagggtgatagatcctg

SEQ ID NO: 3724418 - DNA, 25 bp, Homo sapien
caaggatgtcactgggagtgtcacc

SEQ ID NO: 3724419 - DNA, 25 bp, Homo sapien
ccagagcctaggatacaaggatgtc

SEQ ID NO: 3724420 - DNA, 25 bp, Homo sapien
tttaaatcacatgcctggaacttgc

SEQ ID NO: 3724421 - DNA, 25 bp, Homo sapien
caagtcttccgtgagtcctgagtat

SEQ ID NO: 3724422 - DNA, 25 bp, Homo sapien
aagcctcatcagagtagtcccctgg

SEQ ID NO: 3724423 - DNA, 25 bp, Homo sapien
gaattttgatagctcagacaagtct

SEQ ID NO: 3724424 - DNA, 25 bp, Homo sapien
gtattattagaaagcctcatcagag

SEQ ID NO: 3724425 - DNA, 25 bp, Homo sapien
ccaaagcactacgattacaggagat

SEQ ID NO: 3724426 - DNA, 25 bp, Homo sapien
ctattgaggcatctgaaaactagac

SEQ ID NO: 3724427 - DNA, 25 bp, Homo sapien
cattttgagattcagctattgaggc

SEQ ID NO: 3724428 - DNA, 25 bp, Homo sapien
gacctccagagatgtaagattagaa

SEQ ID NO: 3724429 - DNA, 25 bp, Homo sapien
gaacccctttgcatgagggaggaca

SEQ ID NO: 3724430 - DNA, 25 bp, Homo sapien
ttcagagacgtcaagggctttgccc

SEQ ID NO: 3724431 - DNA, 25 bp, Homo sapien
tcgctgggcccaaagtgatgtatgt

SEQ ID NO: 3724432 - DNA, 25 bp, Homo sapien
catttggtttcctactgggcgctcg

SEQ ID NO: 3724433 - DNA, 25 bp, Homo sapien
catggcctggctgcgggaattcttt

SEQ ID NO: 3724434 - DNA, 25 bp, Homo sapien
gggattgaggccaccacccggtgct

SEQ ID NO: 3724435 - DNA, 25 bp, Homo sapien
ggccaaagtaagcagccgccaagtg

SEQ ID NO: 3724436 - DNA, 25 bp, Homo sapien
gctgcctgctcctaatggcttccaa

SEQ ID NO: 3724437 - DNA, 25 bp, Homo sapien
acagaatctgtgggctgtccaggca

SEQ ID NO: 3724438 - DNA, 25 bp, Homo sapien
cagaatctgtgggctgtccaggcag

SEQ ID NO: 3724439 - DNA, 25 bp, Homo sapien
gggacagaatctgtgggctgtccag

SEQ ID NO: 3724440 - DNA, 25 bp, Homo sapien
gacagaatctgtgggctgtccaggc

SEQ ID NO: 3724441 - DNA, 25 bp, Homo sapien
gggttctccggaagtgatcctgtta

SEQ ID NO: 3724442 - DNA, 25 bp, Homo sapien
cgggggttctccggaagtgatcctg

SEQ ID NO: 3724443 - DNA, 25 bp, Homo sapien
ggttctccggaagtgatcctgttac

SEQ ID NO: 3724444 - DNA, 25 bp, Homo sapien
cataagagaaggttgtggtctccag

SEQ ID NO: 3724445 - DNA, 25 bp, Homo sapien
tcaggtgtgtatgggttgtgtcata

SEQ ID NO: 3724446 - DNA, 25 bp, Homo sapien
ttttcaggtgtgtatgggttgtgtc

SEQ ID NO: 3724447 - DNA, 25 bp, Homo sapien
tgtgtatgggttgtgtcataagaga

SEQ ID NO: 3724448 - DNA, 25 bp, Homo sapien
tgcttaggctccaatcaaggctctg

SEQ ID NO: 3724449 - DNA, 25 bp, Homo sapien
aatgtccccagcgtaggaggtctca

SEQ ID NO: 3724450 - DNA, 25 bp, Homo sapien
aataaacgtggcagtaagtggcccg

SEQ ID NO: 3724451 - DNA, 25 bp, Homo sapien
tggagattgcctgcctatcctggtc

SEQ ID NO: 3724452 - DNA, 25 bp, Homo sapien
gcttctgagcaaccaaaccatggtg

SEQ ID NO: 3724453 - DNA, 25 bp, Homo sapien
cagactaatcaggagatgagtggcc

SEQ ID NO: 3724454 - DNA, 25 bp, Homo sapien
cccctgagtggctttgcttggaacc

SEQ ID NO: 3724455 - DNA, 25 bp, Homo sapien
gactcaggttttagatcatcaaagc

SEQ ID NO: 3724456 - DNA, 25 bp, Homo sapien
tgttcaaatgattgaaacccagctc

SEQ ID NO: 3724457 - DNA, 25 bp, Homo sapien
ttcctcagatttggctcacgatggg

SEQ ID NO: 3724458 - DNA, 25 bp, Homo sapien
tatttagaggcagtcttgccctgtc

SEQ ID NO: 3724459 - DNA, 25 bp, Homo sapien
tggtttcagctacctgaggttaacc

SEQ ID NO: 3724460 - DNA, 25 bp, Homo sapien
gcctctcgagttacttgggactaca

SEQ ID NO: 3724461 - DNA, 25 bp, Homo sapien
gctggggctgagacttttatcctca

SEQ ID NO: 3724462 - DNA, 25 bp, Homo sapien
tcaggtccttcctgtgtcagactct

SEQ ID NO: 3724463 - DNA, 25 bp, Homo sapien
tcatctctagcatgtgcagagtggg

SEQ ID NO: 3724464 - DNA, 25 bp, Homo sapien
gcctttcactggtcttaaaggcaca

SEQ ID NO: 3724465 - DNA, 25 bp, Homo sapien
cagcactcgcagacagcctgcattt

SEQ ID NO: 3724466 - DNA, 25 bp, Homo sapien
tcactggtcttaaaggcacagcact

SEQ ID NO: 3724467 - DNA, 25 bp, Homo sapien
gggtgggcagcctttcactggtctt

SEQ ID NO: 3724468 - DNA, 25 bp, Homo sapien
actggattcttagcaggccacccct

SEQ ID NO: 3724469 - DNA, 25 bp, Homo sapien
cttaataatggcactgagagagggc

SEQ ID NO: 3724470 - DNA, 25 bp, Homo sapien
caccagcttgaggtgagtgcctcat

SEQ ID NO: 3724471 - DNA, 25 bp, Homo sapien
tcatgtttaggaatctgggcacagg

SEQ ID NO: 3724472 - DNA, 25 bp, Homo sapien
ctcatctattatctcagagtaactc

SEQ ID NO: 3724473 - DNA, 25 bp, Homo sapien
ctctctaagggtaagtagggcaggt

SEQ ID NO: 3724474 - DNA, 25 bp, Homo sapien
catctattatctcagagtaactctc

SEQ ID NO: 3724475 - DNA, 25 bp, Homo sapien
tcagagtaactctctaagggtaagt

SEQ ID NO: 3724476 - DNA, 25 bp, Homo sapien
ctggcattctctgagtgcttgccat

SEQ ID NO: 3724477 - DNA, 25 bp, Homo sapien
caccagcccgtgtcctggcattctc

SEQ ID NO: 3724478 - DNA, 25 bp, Homo sapien
tggcattctctgagtgcttgccatg

SEQ ID NO: 3724479 - DNA, 25 bp, Homo sapien
gtgtcgtgcccaccagcccgtgtcc

SEQ ID NO: 3724480 - DNA, 25 bp, Homo sapien
gacctgaaaacgggccagtttcagc

SEQ ID NO: 3724481 - DNA, 25 bp, Homo sapien
cctgaaaacgggccagtttcagctc

SEQ ID NO: 3724482 - DNA, 25 bp, Homo sapien
tgaaaacgggccagtttcagctcag

SEQ ID NO: 3724483 - DNA, 25 bp, Homo sapien
gggagcaggcgaggggaatttgacc

SEQ ID NO: 3724484 - DNA, 25 bp, Homo sapien
tgaggtcttcgaagtgcctgctccc

SEQ ID NO: 3724485 - DNA, 25 bp, Homo sapien
gatgctaaggaaatcccagtgggcc

SEQ ID NO: 3724486 - DNA, 25 bp, Homo sapien
tccgtagagacaggaatcgagacac

SEQ ID NO: 3724487 - DNA, 25 bp, Homo sapien
cagtggctccagagaacagggctgt

SEQ ID NO: 3724488 - DNA, 25 bp, Homo sapien
ctgctcacaggccatgtccggcccc

SEQ ID NO: 3724489 - DNA, 25 bp, Homo sapien
gagtagtctcaacagagaccatctg

SEQ ID NO: 3724490 - DNA, 25 bp, Homo sapien
cacagcccactcattcttttatgta

SEQ ID NO: 3724491 - DNA, 25 bp, Homo sapien
ataagaatagagttgagtagtctca

SEQ ID NO: 3724492 - DNA, 25 bp, Homo sapien
ttacggagagatacgggaaggcctg

SEQ ID NO: 3724493 - DNA, 25 bp, Homo sapien
cattttcctttacggagagatacgg

SEQ ID NO: 3724494 - DNA, 25 bp, Homo sapien
agagatacgggaaggcctgcttatg

SEQ ID NO: 3724495 - DNA, 25 bp, Homo sapien
tcccattttcctttacggagagata

SEQ ID NO: 3724496 - DNA, 25 bp, Homo sapien
tattgcgagcaatgccaggacggac

SEQ ID NO: 3724497 - DNA, 25 bp, Homo sapien
tgtatttggccggaatctccaggcc

SEQ ID NO: 3724498 - DNA, 25 bp, Homo sapien
tgggtccctgtatttggccggaatc

SEQ ID NO: 3724499 - DNA, 25 bp, Homo sapien
tcttgctggtattgcgagcaatgcc

SEQ ID NO: 3724500 - DNA, 25 bp, Homo sapien
tcactgggaacagttgagatactca

SEQ ID NO: 3724501 - DNA, 25 bp, Homo sapien
tgacgtgtaattcactgggaacagt

SEQ ID NO: 3724502 - DNA, 25 bp, Homo sapien
tggaagaagaagtttgacgtgtaat

SEQ ID NO: 3724503 - DNA, 25 bp, Homo sapien
gatactcaccatcttcagagcagcc

SEQ ID NO: 3724504 - DNA, 25 bp, Homo sapien
gcctgaaagtggtggccgaatttcc

SEQ ID NO: 3724505 - DNA, 25 bp, Homo sapien
ttatttgatggcctgaaagtggtgg

SEQ ID NO: 3724506 - DNA, 25 bp, Homo sapien
atttgatggcctgaaagtggtggcc

SEQ ID NO: 3724507 - DNA, 25 bp, Homo sapien
tggcctgaaagtggtggccgaattt

SEQ ID NO: 3724508 - DNA, 25 bp, Homo sapien
ttttcccagatgacattcacgtggc

SEQ ID NO: 3724509 - DNA, 25 bp, Homo sapien
ggctttcactgttacgcctcagctt

SEQ ID NO: 3724510 - DNA, 25 bp, Homo sapien
ccagatgacattcacgtggctttca

SEQ ID NO: 3724511 - DNA, 25 bp, Homo sapien
gaattacgaattggccatccgtgtt

SEQ ID NO: 3724512 - DNA, 25 bp, Homo sapien
catgaacgggtcgttcctgctccgg

SEQ ID NO: 3724513 - DNA, 25 bp, Homo sapien
tgtagcgtccatcctgccagagact

SEQ ID NO: 3724514 - DNA, 25 bp, Homo sapien
ggagccaacgcccttcagggtgttc

SEQ ID NO: 3724515 - DNA, 25 bp, Homo sapien
cctgtatgtggttccggaggccaag

SEQ ID NO: 3724516 - DNA, 25 bp, Homo sapien
tgccctgggcctcagacgtatagtg

SEQ ID NO: 3724517 - DNA, 25 bp, Homo sapien
aatgctaatgttatctgcctcacac

SEQ ID NO: 3724518 - DNA, 25 bp, Homo sapien
cgtatagtgtcctggttgaacctgg

SEQ ID NO: 3724519 - DNA, 25 bp, Homo sapien
tgtgttctgtcaccgcccacacagg

SEQ ID NO: 3724520 - DNA, 25 bp, Homo sapien
gtaggaggtaacacgtggctcctgt

SEQ ID NO: 3724521 - DNA, 25 bp, Homo sapien
taggaggtaacacgtggctcctgtg

SEQ ID NO: 3724522 - DNA, 25 bp, Homo sapien
aggaggtaacacgtggctcctgtga

SEQ ID NO: 3724523 - DNA, 25 bp, Homo sapien
ggaggtaacacgtggctcctgtgaa

SEQ ID NO: 3724524 - DNA, 25 bp, Homo sapien
tttggcagctgagacgcacttggga

SEQ ID NO: 3724525 - DNA, 25 bp, Homo sapien
tccctctcgcggtgcagcggtgatg

SEQ ID NO: 3724526 - DNA, 25 bp, Homo sapien
ggtgaaattgagaaccgggactgaa

SEQ ID NO: 3724527 - DNA, 25 bp, Homo sapien
gacttgagtttttagcgcctgcacc

SEQ ID NO: 3724528 - DNA, 25 bp, Homo sapien
cagccagcccgagggcgcccctgca

SEQ ID NO: 3724529 - DNA, 25 bp, Homo sapien
cgcagccagcccgagggcgcccctg

SEQ ID NO: 3724530 - DNA, 25 bp, Homo sapien
cgcgctcgcgcccggccctaaccat

SEQ ID NO: 3724531 - DNA, 25 bp, Homo sapien
agctgcagccccgcgctcgcgcccg

SEQ ID NO: 3724532 - DNA, 25 bp, Homo sapien
agaagctccttttgtttcaggggct

SEQ ID NO: 3724533 - DNA, 25 bp, Homo sapien
cagcatcgtggtgaggtccttaagg

SEQ ID NO: 3724534 - DNA, 25 bp, Homo sapien
ggcactgtctgccagcatcgtggtg

SEQ ID NO: 3724535 - DNA, 25 bp, Homo sapien
catcgtggtgaggtccttaaggaga

SEQ ID NO: 3724536 - DNA, 25 bp, Homo sapien
atggaggtggcggcccacggctggc

SEQ ID NO: 3724537 - DNA, 25 bp, Homo sapien
tcaggagaggttgcttggtggagga

SEQ ID NO: 3724538 - DNA, 25 bp, Homo sapien
agctcaggagaggttgcttggtgga

SEQ ID NO: 3724539 - DNA, 25 bp, Homo sapien
tgtagaagctcaggagaggttgctt

SEQ ID NO: 3724540 - DNA, 25 bp, Homo sapien
cccactgtgcgggtcaccagccagg

SEQ ID NO: 3724541 - DNA, 25 bp, Homo sapien
gtgacccactgtgcgggtcaccagc

SEQ ID NO: 3724542 - DNA, 25 bp, Homo sapien
gacccactgtgcgggtcaccagcca

SEQ ID NO: 3724543 - DNA, 25 bp, Homo sapien
ccactgtgcgggtcaccagccaggt

SEQ ID NO: 3724544 - DNA, 25 bp, Homo sapien
cggaaaccacagtgcatctcttgag

SEQ ID NO: 3724545 - DNA, 25 bp, Homo sapien
tctagaggggatgctccatcaccat

SEQ ID NO: 3724546 - DNA, 25 bp, Homo sapien
caggtgctctagaggggatgctcca

SEQ ID NO: 3724547 - DNA, 25 bp, Homo sapien
catcaccatcggaaaccacagtgca

SEQ ID NO: 3724548 - DNA, 25 bp, Homo sapien
ccaacaaaggttatcaggaaggcct

SEQ ID NO: 3724549 - DNA, 25 bp, Homo sapien
tcaaggcctgaggtcggcgccaaca

SEQ ID NO: 3724550 - DNA, 25 bp, Homo sapien
cagtcattgagcttaaggaggccag

SEQ ID NO: 3724551 - DNA, 25 bp, Homo sapien
ttccagaagagccagatcagggtac

SEQ ID NO: 3724552 - DNA, 25 bp, Homo sapien
agaacaatgccccaatgttccgagg

SEQ ID NO: 3724553 - DNA, 25 bp, Homo sapien
ttgtacagtagaacaatgccccaat

SEQ ID NO: 3724554 - DNA, 25 bp, Homo sapien
acaatgccccaatgttccgagggac

SEQ ID NO: 3724555 - DNA, 25 bp, Homo sapien
gccaccctctgttgtacagtagaac

SEQ ID NO: 3724556 - DNA, 25 bp, Homo sapien
tttccggaacctgcatgtgcccact

SEQ ID NO: 3724557 - DNA, 25 bp, Homo sapien
ggattgtgtctttccggaacctgca

SEQ ID NO: 3724558 - DNA, 25 bp, Homo sapien
ggaacctgcatgtgcccactgcttc

SEQ ID NO: 3724559 - DNA, 25 bp, Homo sapien
tgtgtctttccggaacctgcatgtg

SEQ ID NO: 3724560 - DNA, 25 bp, Homo sapien
ggaaacaacggaggccggagagaga

SEQ ID NO: 3724561 - DNA, 25 bp, Homo sapien
caatggtggcagattctgggaggga

SEQ ID NO: 3724562 - DNA, 25 bp, Homo sapien
tgtaaagaggcaggttcagaagatc

SEQ ID NO: 3724563 - DNA, 25 bp, Homo sapien
caaaggcctcccaatgagggatgca

SEQ ID NO: 3724564 - DNA, 25 bp, Homo sapien
gcttgcattctgtccttagggaacg

SEQ ID NO: 3724565 - DNA, 25 bp, Homo sapien
gggtccctgtgtgcccgtccttgtg

SEQ ID NO: 3724566 - DNA, 25 bp, Homo sapien
cctgaggatacgttcgtgggcttca

SEQ ID NO: 3724567 - DNA, 25 bp, Homo sapien
tcgtgggcttcactggctgcaagaa

SEQ ID NO: 3724568 - DNA, 25 bp, Homo sapien
tctcgctggcagactggcgctggct

SEQ ID NO: 3724569 - DNA, 25 bp, Homo sapien
tgcttcagcatccttacaacatgga

SEQ ID NO: 3724570 - DNA, 25 bp, Homo sapien
tgccacatggatctccacagtgctg

SEQ ID NO: 3724571 - DNA, 25 bp, Homo sapien
caagacggcttgctcatctcgctgg

SEQ ID NO: 3724572 - DNA, 25 bp, Homo sapien
caatgtttgaaggtccatcagagcc

SEQ ID NO: 3724573 - DNA, 25 bp, Homo sapien
catcagagcccttctacaggaggtc

SEQ ID NO: 3724574 - DNA, 25 bp, Homo sapien
tgaatgcagcctcctagaatccctt

SEQ ID NO: 3724575 - DNA, 25 bp, Homo sapien
agtaagccctcagcacacgattgtg

SEQ ID NO: 3724576 - DNA, 25 bp, Homo sapien
taatgcatggaaagcgctgtgtggc

SEQ ID NO: 3724577 - DNA, 25 bp, Homo sapien
taggtttggatcatcagggcccagg

SEQ ID NO: 3724578 - DNA, 25 bp, Homo sapien
caatttccaagagtgatgagtgcca

SEQ ID NO: 3724579 - DNA, 25 bp, Homo sapien
gctttgccgcaggacacagatgtgg

SEQ ID NO: 3724580 - DNA, 25 bp, Homo sapien
tccacttcagaggctcaatctgtcc

SEQ ID NO: 3724581 - DNA, 25 bp, Homo sapien
ccacttcagaggctcaatctgtcct

SEQ ID NO: 3724582 - DNA, 25 bp, Homo sapien
cctgggcgcgtgttgctgggcccac

SEQ ID NO: 3724583 - DNA, 25 bp, Homo sapien
ggcgcgtgttgctgggcccacctct

SEQ ID NO: 3724584 - DNA, 25 bp, Homo sapien
acctgggcgcgtgttgctgggccca

SEQ ID NO: 3724585 - DNA, 25 bp, Homo sapien
tgggcgcgtgttgctgggcccacct

SEQ ID NO: 3724586 - DNA, 25 bp, Homo sapien
cacttgtggtggaatagcgggtcac

SEQ ID NO: 3724587 - DNA, 25 bp, Homo sapien
gcgggtcaccttgtttcaggagaca

SEQ ID NO: 3724588 - DNA, 25 bp, Homo sapien
gtggaatagcgggtcaccttgtttc

SEQ ID NO: 3724589 - DNA, 25 bp, Homo sapien
ggtcaccttgtttcaggagacaggt

SEQ ID NO: 3724590 - DNA, 25 bp, Homo sapien
tttgcaagtacaagccccacacaga

SEQ ID NO: 3724591 - DNA, 25 bp, Homo sapien
gaactcttacttggtttgctctgga

SEQ ID NO: 3724592 - DNA, 25 bp, Homo sapien
gagatttgctttcgttgaaagctga

SEQ ID NO: 3724593 - DNA, 25 bp, Homo sapien
tctgacgtattgagggccaagatgc

SEQ ID NO: 3724594 - DNA, 25 bp, Homo sapien
agttagggttagatgggcttggcag

SEQ ID NO: 3724595 - DNA, 25 bp, Homo sapien
tggaagttagggttagatgggcttg

SEQ ID NO: 3724596 - DNA, 25 bp, Homo sapien
gaagttagggttagatgggcttggc

SEQ ID NO: 3724597 - DNA, 25 bp, Homo sapien
ttagggttagatgggcttggcaggt

SEQ ID NO: 3724598 - DNA, 25 bp, Homo sapien
ctaggccatttggaggatgagaaga

SEQ ID NO: 3724599 - DNA, 25 bp, Homo sapien
aggatgagaagaatcaagaacaatt

SEQ ID NO: 3724600 - DNA, 25 bp, Homo sapien
gatgagaagaatcaagaacaattgg

SEQ ID NO: 3724601 - DNA, 25 bp, Homo sapien
tgagaagaatcaagaacaattgggg

SEQ ID NO: 3724602 - DNA, 25 bp, Homo sapien
tttgatcccgtagtggccagggcac

SEQ ID NO: 3724603 - DNA, 25 bp, Homo sapien
gtgctctctttgtcccagatttcag

SEQ ID NO: 3724604 - DNA, 25 bp, Homo sapien
tcagtctgaatttgatcccgtagtg

SEQ ID NO: 3724605 - DNA, 25 bp, Homo sapien
tctgaatttgatcccgtagtggcca

SEQ ID NO: 3724606 - DNA, 25 bp, Homo sapien
ctggaaaagggcaggcctgcacaca

SEQ ID NO: 3724607 - DNA, 25 bp, Homo sapien
gggcagctcccctgtttgaaaggag

SEQ ID NO: 3724608 - DNA, 25 bp, Homo sapien
gaaaggagcccatcacctgggtcag

SEQ ID NO: 3724609 - DNA, 25 bp, Homo sapien
tgccacctggagaagtagcctgcag

SEQ ID NO: 3724610 - DNA, 25 bp, Homo sapien
tgatgtctaatgtcctgcaggcgaa

SEQ ID NO: 3724611 - DNA, 25 bp, Homo sapien
cacatgtggctaactccagagtctg

SEQ ID NO: 3724612 - DNA, 25 bp, Homo sapien
tgttaagcctcagttaagcccttcc

SEQ ID NO: 3724613 - DNA, 25 bp, Homo sapien
cagccaataaggagggtgctgcacc

SEQ ID NO: 3724614 - DNA, 25 bp, Homo sapien
ccacacgtgaactccctttttctgg

SEQ ID NO: 3724615 - DNA, 25 bp, Homo sapien
gaagccagagcggtgatcgtgtccc

SEQ ID NO: 3724616 - DNA, 25 bp, Homo sapien
tttctggctgctcaatcgtgttcat

SEQ ID NO: 3724617 - DNA, 25 bp, Homo sapien
ggtaagagcctgacaatgatgaact

SEQ ID NO: 3724618 - DNA, 25 bp, Homo sapien
ctgtgctctgggaaactcttgctgt

SEQ ID NO: 3724619 - DNA, 25 bp, Homo sapien
ccattttggaaagattgtactggga

SEQ ID NO: 3724620 - DNA, 25 bp, Homo sapien
ctgggaaactcttgctgtctttggc

SEQ ID NO: 3724621 - DNA, 25 bp, Homo sapien
tgggaacccccattagaacatccaa

SEQ ID NO: 3724622 - DNA, 25 bp, Homo sapien
gacacaattgctgttctcctgacct

SEQ ID NO: 3724623 - DNA, 25 bp, Homo sapien
gacttttgggtctgtactaccgagc

SEQ ID NO: 3724624 - DNA, 25 bp, Homo sapien
tatgctctccgtcagagaaggcgga

SEQ ID NO: 3724625 - DNA, 25 bp, Homo sapien
gctaatttgcttggcctcgtgtcga

SEQ ID NO: 3724626 - DNA, 25 bp, Homo sapien
taagtagtaactgtgctccaagtcc

SEQ ID NO: 3724627 - DNA, 25 bp, Homo sapien
gtagttacacaagcccagatcgatg

SEQ ID NO: 3724628 - DNA, 25 bp, Homo sapien
gcaacgaatcgatcacttttccggg

SEQ ID NO: 3724629 - DNA, 25 bp, Homo sapien
cagatcgatggacgactcaggcaac

SEQ ID NO: 3724630 - DNA, 25 bp, Homo sapien
tttttactcaccagaatctaagagg

SEQ ID NO: 3724631 - DNA, 25 bp, Homo sapien
ccaccatgccagcttttcgtgttca

SEQ ID NO: 3724632 - DNA, 25 bp, Homo sapien
tccagaactcaagcaatgctgagta

SEQ ID NO: 3724633 - DNA, 25 bp, Homo sapien
tgaggtatcacatctgtacattgaa

SEQ ID NO: 3724634 - DNA, 25 bp, Homo sapien
tacacagcgttctgagcagagacac

SEQ ID NO: 3724635 - DNA, 25 bp, Homo sapien
gaggacaaagataaggtggcattca

SEQ ID NO: 3724636 - DNA, 25 bp, Homo sapien
cattgtcagcacaatggagcactac

SEQ ID NO: 3724637 - DNA, 25 bp, Homo sapien
cagagacacgcagaccagctgagga

SEQ ID NO: 3724638 - DNA, 25 bp, Homo sapien
tgactcatcccgcagctgaaacaag

SEQ ID NO: 3724639 - DNA, 25 bp, Homo sapien
ccaggcggtactgtgtagctgctga

SEQ ID NO: 3724640 - DNA, 25 bp, Homo sapien
gctgaggacattgtgcagcactgca

SEQ ID NO: 3724641 - DNA, 25 bp, Homo sapien
gtgcttcctgctcgcactgactcat

SEQ ID NO: 3724642 - DNA, 25 bp, Homo sapien
tcggtccctgacgattgtttctcat

SEQ ID NO: 3724643 - DNA, 25 bp, Homo sapien
ccgagggttcgcgtgagcggagcac

SEQ ID NO: 3724644 - DNA, 25 bp, Homo sapien
ttgttcttcggtccctgacgattgt

SEQ ID NO: 3724645 - DNA, 25 bp, Homo sapien
gacgcatttgttcttcggtccctga

SEQ ID NO: 3724646 - DNA, 25 bp, Homo sapien
aggcccgcgcgtcccctcgggtctg

SEQ ID NO: 3724647 - DNA, 25 bp, Homo sapien
gggcagtcgagaagccgagccctcc

SEQ ID NO: 3724648 - DNA, 25 bp, Homo sapien
gcctcgggccgcgagcctagggtct

SEQ ID NO: 3724649 - DNA, 25 bp, Homo sapien
ctcccgcggcgcaaggcccgcgcgt

SEQ ID NO: 3724650 - DNA, 25 bp, Homo sapien
cacccggcctgatccgacgggtccg

SEQ ID NO: 3724651 - DNA, 25 bp, Homo sapien
gcggcggcggcttaggcccgtgtca

SEQ ID NO: 3724652 - DNA, 25 bp, Homo sapien
taggcccgtgtcacggcgagtctcc

SEQ ID NO: 3724653 - DNA, 25 bp, Homo sapien
agcggtcaggactcccgcggcggcg

SEQ ID NO: 3724654 - DNA, 25 bp, Homo sapien
ggcgcggcgtccctcggcccccgca

SEQ ID NO: 3724655 - DNA, 25 bp, Homo sapien
cgcgcggtgggcgcctcgcctccgg

SEQ ID NO: 3724656 - DNA, 25 bp, Homo sapien
tcttccctgctctcccgcgcgagcc

SEQ ID NO: 3724657 - DNA, 25 bp, Homo sapien
tccggcccaccctccgggagcggca

SEQ ID NO: 3724658 - DNA, 25 bp, Homo sapien
caacacagagttccttgcacttaag

SEQ ID NO: 3724659 - DNA, 25 bp, Homo sapien
ccaacacagagttccttgcacttaa

SEQ ID NO: 3724660 - DNA, 25 bp, Homo sapien
cctcttcacgtgttcgtactgcttc

SEQ ID NO: 3724661 - DNA, 25 bp, Homo sapien
cagttctcctataatctcccaaaag

SEQ ID NO: 3724662 - DNA, 25 bp, Homo sapien
cccaaaggctccgtcgcccagttct

SEQ ID NO: 3724663 - DNA, 25 bp, Homo sapien
tcttcggggttcaggtccctcttca

SEQ ID NO: 3724664 - DNA, 25 bp, Homo sapien
gatacccaaatattgaataagcaca

SEQ ID NO: 3724665 - DNA, 25 bp, Homo sapien
cacttatactcaacagaatggctaa

SEQ ID NO: 3724666 - DNA, 25 bp, Homo sapien
ccataccctactgatgggagtgtaa

SEQ ID NO: 3724667 - DNA, 25 bp, Homo sapien
taccaagtgtaagtgaagacacaga

SEQ ID NO: 3724668 - DNA, 25 bp, Homo sapien
atcacttttgcagcagctaaaacac

SEQ ID NO: 3724669 - DNA, 25 bp, Homo sapien
gcttgactatatttgggtgatcaca

SEQ ID NO: 3724670 - DNA, 25 bp, Homo sapien
ggtgatcacaagatgctaatatgtc

SEQ ID NO: 3724671 - DNA, 25 bp, Homo sapien
tgttctcataatagaaggcatctag

SEQ ID NO: 3724672 - DNA, 25 bp, Homo sapien
aatttgggaggtagatcattactca

SEQ ID NO: 3724673 - DNA, 25 bp, Homo sapien
tagacctttaggcatccagtcaggt

SEQ ID NO: 3724674 - DNA, 25 bp, Homo sapien
tatccaagttccgtaagtggcagca

SEQ ID NO: 3724675 - DNA, 25 bp, Homo sapien
gccatcacatcatgcactaaagttg

SEQ ID NO: 3724676 - DNA, 25 bp, Homo sapien
caagcatcacagcatctactgctcc

SEQ ID NO: 3724677 - DNA, 25 bp, Homo sapien
agcatcacagcatctactgctccac

SEQ ID NO: 3724678 - DNA, 25 bp, Homo sapien
aagcatcacagcatctactgctcca

SEQ ID NO: 3724679 - DNA, 25 bp, Homo sapien
atctctgtggatgatcttattatca

SEQ ID NO: 3724680 - DNA, 25 bp, Homo sapien
gcatctaaagtctgcttgcaaacta

SEQ ID NO: 3724681 - DNA, 25 bp, Homo sapien
catctaaggtaaagagaatgttgcc

SEQ ID NO: 3724682 - DNA, 25 bp, Homo sapien
ggactcagttaatggtctctcaagt

SEQ ID NO: 3724683 - DNA, 25 bp, Homo sapien
tttgaattgtcctcgtgtttttagc

SEQ ID NO: 3724684 - DNA, 25 bp, Homo sapien
tttttagctgatactccaaaatccg

SEQ ID NO: 3724685 - DNA, 25 bp, Homo sapien
ggtgtaccaataaaggaatctcttc

SEQ ID NO: 3724686 - DNA, 25 bp, Homo sapien
caatatggtgtaccaataaaggaat

SEQ ID NO: 3724687 - DNA, 25 bp, Homo sapien
ttctattaaagtgatacccagggac

SEQ ID NO: 3724688 - DNA, 25 bp, Homo sapien
tggctgtgctaatgtaggtggctca

SEQ ID NO: 3724689 - DNA, 25 bp, Homo sapien
tatttttagcagcactcgcattgga

SEQ ID NO: 3724690 - DNA, 25 bp, Homo sapien
gtttcacacatgactacttcaggag

SEQ ID NO: 3724691 - DNA, 25 bp, Homo sapien
gagatgtagtccacctggcatccac

SEQ ID NO: 3724692 - DNA, 25 bp, Homo sapien
gctgagatgtagtccacctggcatc

SEQ ID NO: 3724693 - DNA, 25 bp, Homo sapien
tgagatgtagtccacctggcatcca

SEQ ID NO: 3724694 - DNA, 25 bp, Homo sapien
ctgagatgtagtccacctggcatcc

SEQ ID NO: 3724695 - DNA, 25 bp, Homo sapien
tgcaatcaattctcggatgggtttg

SEQ ID NO: 3724696 - DNA, 25 bp, Homo sapien
acttcttctgttacttcagccttcg

SEQ ID NO: 3724697 - DNA, 25 bp, Homo sapien
ctcggatgggtttgttggaatcaac

SEQ ID NO: 3724698 - DNA, 25 bp, Homo sapien
tcagccttcgcctctgcaatcaatt

SEQ ID NO: 3724699 - DNA, 25 bp, Homo sapien
gatgcacgcttacttgcaggtattg

SEQ ID NO: 3724700 - DNA, 25 bp, Homo sapien
ggtcagaagatgcacgcttacttgc

SEQ ID NO: 3724701 - DNA, 25 bp, Homo sapien
gaagatgcacgcttacttgcaggta

SEQ ID NO: 3724702 - DNA, 25 bp, Homo sapien
ctaaggtcagaagatgcacgcttac

SEQ ID NO: 3724703 - DNA, 25 bp, Homo sapien
tttgtgaaagtttatcttcttcaga

SEQ ID NO: 3724704 - DNA, 25 bp, Homo sapien
aagcattttgtgaaagtttatcttc

SEQ ID NO: 3724705 - DNA, 25 bp, Homo sapien
gaaagtttatcttcttcagagctgg

SEQ ID NO: 3724706 - DNA, 25 bp, Homo sapien
tttatcttcttcagagctggcgata

SEQ ID NO: 3724707 - DNA, 25 bp, Homo sapien
caggttcatcagtggtgggtttttc

SEQ ID NO: 3724708 - DNA, 25 bp, Homo sapien
tatcaactgcctgaatatttgcctc

SEQ ID NO: 3724709 - DNA, 25 bp, Homo sapien
cattgcttctaactgagcatcggta

SEQ ID NO: 3724710 - DNA, 25 bp, Homo sapien
tcctaaagccttttggtcagtatca

SEQ ID NO: 3724711 - DNA, 25 bp, Homo sapien
gcagtggaaccagtgcctgaatcat

SEQ ID NO: 3724712 - DNA, 25 bp, Homo sapien
tacttagaaagctagagatggataa

SEQ ID NO: 3724713 - DNA, 25 bp, Homo sapien
caagtcaatactgctagtatcagca

SEQ ID NO: 3724714 - DNA, 25 bp, Homo sapien
taatactgggtattagaacaggctg

SEQ ID NO: 3724715 - DNA, 25 bp, Homo sapien
caaacaatgactcatgtacacttac

SEQ ID NO: 3724716 - DNA, 25 bp, Homo sapien
catctgtggaaccagttataacacc

SEQ ID NO: 3724717 - DNA, 25 bp, Homo sapien
tctgagggtagctggaaatctcttt

SEQ ID NO: 3724718 - DNA, 25 bp, Homo sapien
gcagttcacatagctaatcagtaga

SEQ ID NO: 3724719 - DNA, 25 bp, Homo sapien
tataaagcaatagactcatctgtgg

SEQ ID NO: 3724720 - DNA, 25 bp, Homo sapien
cttcagttttggaatcactatctgt

SEQ ID NO: 3724721 - DNA, 25 bp, Homo sapien
tcactatctgtaactatctttgatg

SEQ ID NO: 3724722 - DNA, 25 bp, Homo sapien
gttacactcacttctacaccatcaa

SEQ ID NO: 3724723 - DNA, 25 bp, Homo sapien
cttctacaccatcaacaataaattt

SEQ ID NO: 3724724 - DNA, 25 bp, Homo sapien
caataatttacccttgtttctctat

SEQ ID NO: 3724725 - DNA, 25 bp, Homo sapien
ctgaagaaatcttaattcccgaagt

SEQ ID NO: 3724726 - DNA, 25 bp, Homo sapien
gctgttgttgggctctttgctcttc

SEQ ID NO: 3724727 - DNA, 25 bp, Homo sapien
cggaaaatttgttctcgttgttgct

SEQ ID NO: 3724728 - DNA, 25 bp, Homo sapien
gctgtagtttgctattgagctgttg

SEQ ID NO: 3724729 - DNA, 25 bp, Homo sapien
atttcctgctcaaagcgccggaaaa

SEQ ID NO: 3724730 - DNA, 25 bp, Homo sapien
tcaaagagcttatttgaggtctact

SEQ ID NO: 3724731 - DNA, 25 bp, Homo sapien
tattctattggaacagatcttttgg

SEQ ID NO: 3724732 - DNA, 25 bp, Homo sapien
catgtgacatcctgcctagctaatt

SEQ ID NO: 3724733 - DNA, 25 bp, Homo sapien
acaggaataaggcactgcgcccgac

SEQ ID NO: 3724734 - DNA, 25 bp, Homo sapien
ctgtaaaacaatatagctcaagatg

SEQ ID NO: 3724735 - DNA, 25 bp, Homo sapien
tcaagatgataacttttccatcacc

SEQ ID NO: 3724736 - DNA, 25 bp, Homo sapien
atatagctcaagatgataacttttc

SEQ ID NO: 3724737 - DNA, 25 bp, Homo sapien
agctcaagatgataacttttccatc

SEQ ID NO: 3724738 - DNA, 25 bp, Homo sapien
tcctggtcatattgtcgctttttac

SEQ ID NO: 3724739 - DNA, 25 bp, Homo sapien
gtgtgctcttgttccaggcgttcga

SEQ ID NO: 3724740 - DNA, 25 bp, Homo sapien
cttgttctcctttgatgcgtttggc

SEQ ID NO: 3724741 - DNA, 25 bp, Homo sapien
tctcgcaagcgatttgtgtgctctt

SEQ ID NO: 3724742 - DNA, 25 bp, Homo sapien
tctttcctgcgtttcatgagctctt

SEQ ID NO: 3724743 - DNA, 25 bp, Homo sapien
ttcctgcgtttcatgagctcttttc

SEQ ID NO: 3724744 - DNA, 25 bp, Homo sapien
aagctcctctttcctgcgtttcatg

SEQ ID NO: 3724745 - DNA, 25 bp, Homo sapien
gctcctctttcctgcgtttcatgag

SEQ ID NO: 3724746 - DNA, 25 bp, Homo sapien
taaatgctgcgtttgctattaacca

SEQ ID NO: 3724747 - DNA, 25 bp, Homo sapien
gcagcatggtgcagcgaatcagtgt

SEQ ID NO: 3724748 - DNA, 25 bp, Homo sapien
taagttgcagcacaagtaggtagct

SEQ ID NO: 3724749 - DNA, 25 bp, Homo sapien
caagaaccactgagtcaagctgacg

SEQ ID NO: 3724750 - DNA, 25 bp, Homo sapien
tcagaatagaatgcacctcccaggt

SEQ ID NO: 3724751 - DNA, 25 bp, Homo sapien
ttgagtttcttgaggcctggaacaa

SEQ ID NO: 3724752 - DNA, 25 bp, Homo sapien
acttaacagatggacctctttctca

SEQ ID NO: 3724753 - DNA, 25 bp, Homo sapien
tgaaggatttgaactagatcagtgg

SEQ ID NO: 3724754 - DNA, 25 bp, Homo sapien
gaagactgcacaagatgacaactga

SEQ ID NO: 3724755 - DNA, 25 bp, Homo sapien
tcctgcatttgggcgttgaagactg

SEQ ID NO: 3724756 - DNA, 25 bp, Homo sapien
tttgggcgttgaagactgcacaaga

SEQ ID NO: 3724757 - DNA, 25 bp, Homo sapien
gcgttgaagactgcacaagatgaca

SEQ ID NO: 3724758 - DNA, 25 bp, Homo sapien
catgtgaaaaggcaggtaaaacagg

SEQ ID NO: 3724759 - DNA, 25 bp, Homo sapien
gtgttaaatgagctagttatttccc

SEQ ID NO: 3724760 - DNA, 25 bp, Homo sapien
tcaagctgtattctatctactcctg

SEQ ID NO: 3724761 - DNA, 25 bp, Homo sapien
aaggctaaaaatggtaatgatcaga

SEQ ID NO: 3724762 - DNA, 25 bp, Homo sapien
cctgttgtatatatcagacgtcaca

SEQ ID NO: 3724763 - DNA, 25 bp, Homo sapien
cacttagtaaatggtggacactata

SEQ ID NO: 3724764 - DNA, 25 bp, Homo sapien
tagtaaatggtggacactatactac

SEQ ID NO: 3724765 - DNA, 25 bp, Homo sapien
cttagtaaatggtggacactatact

SEQ ID NO: 3724766 - DNA, 25 bp, Homo sapien
acttagtaaatggtggacactatac

SEQ ID NO: 3724767 - DNA, 25 bp, Homo sapien
gggtctaaattaactagcataaata

SEQ ID NO: 3724768 - DNA, 25 bp, Homo sapien
aaatctgtgtagacagaaacaatgg

SEQ ID NO: 3724769 - DNA, 25 bp, Homo sapien
tgttcaataaacaacataacctgca

SEQ ID NO: 3724770 - DNA, 25 bp, Homo sapien
cccagcctcaactgtaaaatttcta

SEQ ID NO: 3724771 - DNA, 25 bp, Homo sapien
gatgaggtctggatcactgccaggc

SEQ ID NO: 3724772 - DNA, 25 bp, Homo sapien
cagttacagcaggtggtgattggct

SEQ ID NO: 3724773 - DNA, 25 bp, Homo sapien
cactcctcaggatggttggcttgct

SEQ ID NO: 3724774 - DNA, 25 bp, Homo sapien
tggaactattcttgaggcctcagag

SEQ ID NO: 3724775 - DNA, 25 bp, Homo sapien
gagagccatctaattcttgctgttg

SEQ ID NO: 3724776 - DNA, 25 bp, Homo sapien
ctcatgagctgttgcttgttattca

SEQ ID NO: 3724777 - DNA, 25 bp, Homo sapien
ctttttcagagagccatctaattct

SEQ ID NO: 3724778 - DNA, 25 bp, Homo sapien
gctgttgcttgttattcaggcactc

SEQ ID NO: 3724779 - DNA, 25 bp, Homo sapien
tgtcgtataaacagagaatgtccta

SEQ ID NO: 3724780 - DNA, 25 bp, Homo sapien
gaatgtcctactccgaacaccaaaa

SEQ ID NO: 3724781 - DNA, 25 bp, Homo sapien
agtgcaactgtaaccaatgtaaggc

SEQ ID NO: 3724782 - DNA, 25 bp, Homo sapien
cattctgagctgtccaagtgcaact

SEQ ID NO: 3724783 - DNA, 25 bp, Homo sapien
aagtagctgatgtctttgcatgaaa

SEQ ID NO: 3724784 - DNA, 25 bp, Homo sapien
tctcgtggcgcttaagtagctgatg

SEQ ID NO: 3724785 - DNA, 25 bp, Homo sapien
ttcttgtaagtgtcgttcttcgagc

SEQ ID NO: 3724786 - DNA, 25 bp, Homo sapien
taagtgtcgttcttcgagctcccaa

SEQ ID NO: 3724787 - DNA, 25 bp, Homo sapien
aaatagctacctttgagagccgaga

SEQ ID NO: 3724788 - DNA, 25 bp, Homo sapien
tagaatccagtgacgcagaaacaat

SEQ ID NO: 3724789 - DNA, 25 bp, Homo sapien
cagtgaccagcaaaatactaggcac

SEQ ID NO: 3724790 - DNA, 25 bp, Homo sapien
aaacaatagtcagtacccacatgca

SEQ ID NO: 3724791 - DNA, 25 bp, Homo sapien
taagtctttgattgtaacgctgcat

SEQ ID NO: 3724792 - DNA, 25 bp, Homo sapien
taaacatggccattcgagtcttggc

SEQ ID NO: 3724793 - DNA, 25 bp, Homo sapien
gagtcttggcttcactgcgctgaat

SEQ ID NO: 3724794 - DNA, 25 bp, Homo sapien
tttatcacggtcctgatctggtgtg

SEQ ID NO: 3724795 - DNA, 25 bp, Homo sapien
gatctcgcatttgattctcatgttt

SEQ ID NO: 3724796 - DNA, 25 bp, Homo sapien
actgcaactgaagatctcgcatttg

SEQ ID NO: 3724797 - DNA, 25 bp, Homo sapien
tgcagctgatgcagttcgcggacat

SEQ ID NO: 3724798 - DNA, 25 bp, Homo sapien
gacattggcttcacactgcaactga

SEQ ID NO: 3724799 - DNA, 25 bp, Homo sapien
tggctatgttcctcatctaactcct

SEQ ID NO: 3724800 - DNA, 25 bp, Homo sapien
tccactcctttaattcttggctatg

SEQ ID NO: 3724801 - DNA, 25 bp, Homo sapien
tcagtttctgagtctcatgctcaac

SEQ ID NO: 3724802 - DNA, 25 bp, Homo sapien
tgctcaaccaacaagtggcattttt

SEQ ID NO: 3724803 - DNA, 25 bp, Homo sapien
taaatcctccggtgatggcaggcga

SEQ ID NO: 3724804 - DNA, 25 bp, Homo sapien
tactatgcatagaaggtgggacctc

SEQ ID NO: 3724805 - DNA, 25 bp, Homo sapien
gagagttgttattccgccctgtgag

SEQ ID NO: 3724806 - DNA, 25 bp, Homo sapien
tgtacagccctatgtgcaagtccag

SEQ ID NO: 3724807 - DNA, 25 bp, Homo sapien
ggaatgcaagctgggaataggataa

SEQ ID NO: 3724808 - DNA, 25 bp, Homo sapien
tatgatccggtggaatgcaagctgg

SEQ ID NO: 3724809 - DNA, 25 bp, Homo sapien
ggttaaggcattcagactccccagt

SEQ ID NO: 3724810 - DNA, 25 bp, Homo sapien
ctgtagtttcctggcaaactcttct

SEQ ID NO: 3724811 - DNA, 25 bp, Homo sapien
acagttttcaggtagcagtgtctaa

SEQ ID NO: 3724812 - DNA, 25 bp, Homo sapien
tagtcaccaagatgctactttgcca

SEQ ID NO: 3724813 - DNA, 25 bp, Homo sapien
gacatactgaaagagccaaacccac

SEQ ID NO: 3724814 - DNA, 25 bp, Homo sapien
tgccaacatggcctagcgtctgtct

SEQ ID NO: 3724815 - DNA, 25 bp, Homo sapien
cactatttagcgcacagggtatcaa

SEQ ID NO: 3724816 - DNA, 25 bp, Homo sapien
taaggctacctacgaagttgtccaa

SEQ ID NO: 3724817 - DNA, 25 bp, Homo sapien
taatactgtctgacctgacacgtgg

SEQ ID NO: 3724818 - DNA, 25 bp, Homo sapien
gatttcaaagaagtctgcgcccctc

SEQ ID NO: 3724819 - DNA, 25 bp, Homo sapien
cattaaggtgggtctcatatgcctg

SEQ ID NO: 3724820 - DNA, 25 bp, Homo sapien
gctcaagaaatcagagacccttcat

SEQ ID NO: 3724821 - DNA, 25 bp, Homo sapien
aaaaatagtcacttctgaaactcgc

SEQ ID NO: 3724822 - DNA, 25 bp, Homo sapien
aacatgtcagcaacggaatagcaac

SEQ ID NO: 3724823 - DNA, 25 bp, Homo sapien
cagcccacattgaaacctggcaaac

SEQ ID NO: 3724824 - DNA, 25 bp, Homo sapien
gaaaagacatgttgctctcaagtag

SEQ ID NO: 3724825 - DNA, 25 bp, Homo sapien
tacactgcaaaccagagaaggagca

SEQ ID NO: 3724826 - DNA, 25 bp, Homo sapien
ggcaaacactctccgccaaaattag

SEQ ID NO: 3724827 - DNA, 25 bp, Homo sapien
tacggtgtcagcttgttctcgtcct

SEQ ID NO: 3724828 - DNA, 25 bp, Homo sapien
ctgctaagcaggtaacctgaggttt

SEQ ID NO: 3724829 - DNA, 25 bp, Homo sapien
gctaagcaggtaacctgaggttttc

SEQ ID NO: 3724830 - DNA, 25 bp, Homo sapien
acagcttcggggtacggtgtcagct

SEQ ID NO: 3724831 - DNA, 25 bp, Homo sapien
gaattcataataatcgggccactgg

SEQ ID NO: 3724832 - DNA, 25 bp, Homo sapien
ggtctgtccagattcagggcggcca

SEQ ID NO: 3724833 - DNA, 25 bp, Homo sapien
gctggagagacaccgagtgagcctt

SEQ ID NO: 3724834 - DNA, 25 bp, Homo sapien
tgggatacagtgtcaacaagggtct

SEQ ID NO: 3724835 - DNA, 25 bp, Homo sapien
tcacaccacaccttgcatgtgctca

SEQ ID NO: 3724836 - DNA, 25 bp, Homo sapien
gccctcatgggccacttgacccagc

SEQ ID NO: 3724837 - DNA, 25 bp, Homo sapien
cagccctcatgggccacttgaccca

SEQ ID NO: 3724838 - DNA, 25 bp, Homo sapien
ttgctggcccacagccctcatgggc

SEQ ID NO: 3724839 - DNA, 25 bp, Homo sapien
acaggacacaggaacagaggacgaa

SEQ ID NO: 3724840 - DNA, 25 bp, Homo sapien
tgggattccagtacccatggcactg

SEQ ID NO: 3724841 - DNA, 25 bp, Homo sapien
tgtgcctagaccatgctcatccatg

SEQ ID NO: 3724842 - DNA, 25 bp, Homo sapien
tccacgtgcctagactcatgaatca

SEQ ID NO: 3724843 - DNA, 25 bp, Homo sapien
gaaatgaaggtccaagagtcaagtg

SEQ ID NO: 3724844 - DNA, 25 bp, Homo sapien
tagttgtaatttgccctcagcctga

SEQ ID NO: 3724845 - DNA, 25 bp, Homo sapien
tatgagatggaagacccttggcctg

SEQ ID NO: 3724846 - DNA, 25 bp, Homo sapien
taatggtacacacctctcggagtcg

SEQ ID NO: 3724847 - DNA, 25 bp, Homo sapien
caggtgtagctgaaagggtctttga

SEQ ID NO: 3724848 - DNA, 25 bp, Homo sapien
taaatcatgacctgtgcattcaggt

SEQ ID NO: 3724849 - DNA, 25 bp, Homo sapien
tcaggtgtagctgaaagggtctttg

SEQ ID NO: 3724850 - DNA, 25 bp, Homo sapien
ctgatggtaaatcatgacctgtgca

SEQ ID NO: 3724851 - DNA, 25 bp, Homo sapien
catgatcaaagacgggcaaggtggc

SEQ ID NO: 3724852 - DNA, 25 bp, Homo sapien
cctgcaagattgtgtcgagtgctca

SEQ ID NO: 3724853 - DNA, 25 bp, Homo sapien
tttaggagcagcgtcaaacctgctg

SEQ ID NO: 3724854 - DNA, 25 bp, Homo sapien
gaccaggtggagaggcatgatcaaa

SEQ ID NO: 3724855 - DNA, 25 bp, Homo sapien
ttttggctgccgcaaactcggcggt

SEQ ID NO: 3724856 - DNA, 25 bp, Homo sapien
gttagaaatctatccgagagtcccg

SEQ ID NO: 3724857 - DNA, 25 bp, Homo sapien
gagagtcccggcactttagctgagc

SEQ ID NO: 3724858 - DNA, 25 bp, Homo sapien
aattcacgtttgagaccgacagggc

SEQ ID NO: 3724859 - DNA, 25 bp, Homo sapien
gttggttgggttccagcctattcca

SEQ ID NO: 3724860 - DNA, 25 bp, Homo sapien
gatttacagcttgtggactccccag

SEQ ID NO: 3724861 - DNA, 25 bp, Homo sapien
tccagcgtggtggttccagagacca

SEQ ID NO: 3724862 - DNA, 25 bp, Homo sapien
ccacaaaagaacagcgttggttggg

SEQ ID NO: 3724863 - DNA, 25 bp, Homo sapien
gggcggccagaagccgcacggctgg

SEQ ID NO: 3724864 - DNA, 25 bp, Homo sapien
agtgaaggctttactcagacgtggg

SEQ ID NO: 3724865 - DNA, 25 bp, Homo sapien
ccagaagccgcacggctggctgcat

SEQ ID NO: 3724866 - DNA, 25 bp, Homo sapien
tcctctccctgctagtcacagtgaa

SEQ ID NO: 3724867 - DNA, 25 bp, Homo sapien
aattggccagattgcctgacgcgcg

SEQ ID NO: 3724868 - DNA, 25 bp, Homo sapien
gaggcccagacgcatgattggcaga

SEQ ID NO: 3724869 - DNA, 25 bp, Homo sapien
gcttcactcagcgactcagagcggt

SEQ ID NO: 3724870 - DNA, 25 bp, Homo sapien
gattggcagaattaaccggtgcgcg

SEQ ID NO: 3724871 - DNA, 25 bp, Homo sapien
caagctgtgactagaacccgttacc

SEQ ID NO: 3724872 - DNA, 25 bp, Homo sapien
cccggaaagggagctcaactcgact

SEQ ID NO: 3724873 - DNA, 25 bp, Homo sapien
gtttaagcggccaacagggactgaa

SEQ ID NO: 3724874 - DNA, 25 bp, Homo sapien
gcataagaaacacagcggagacgca

SEQ ID NO: 3724875 - DNA, 25 bp, Homo sapien
tctatagtcgacttttatcaaataa

SEQ ID NO: 3724876 - DNA, 25 bp, Homo sapien
aataatcgaattaaccacacctctc

SEQ ID NO: 3724877 - DNA, 25 bp, Homo sapien
tattgtattggtgtacaaagcatcc

SEQ ID NO: 3724878 - DNA, 25 bp, Homo sapien
caaagcatccacaagtaagccagat

SEQ ID NO: 3724879 - DNA, 25 bp, Homo sapien
gaactatttgtatagggagatgatg

SEQ ID NO: 3724880 - DNA, 25 bp, Homo sapien
actatttgtatagggagatgatgga

SEQ ID NO: 3724881 - DNA, 25 bp, Homo sapien
aggagtgctaggtaaaaccacagct

SEQ ID NO: 3724882 - DNA, 25 bp, Homo sapien
ctgaggagtgctaggtaaaaccaca

SEQ ID NO: 3724883 - DNA, 25 bp, Homo sapien
tatgctagacaccactagatggctt

SEQ ID NO: 3724884 - DNA, 25 bp, Homo sapien
taatggatccactggaagaacaaag

SEQ ID NO: 3724885 - DNA, 25 bp, Homo sapien
tgttcagtaacaagcacatgcctga

SEQ ID NO: 3724886 - DNA, 25 bp, Homo sapien
tacttcagcaagatcaacacctttc

SEQ ID NO: 3724887 - DNA, 25 bp, Homo sapien
tttggagagcactgcatgatccaga

SEQ ID NO: 3724888 - DNA, 25 bp, Homo sapien
gacgtttcaccacattgtaagagga

SEQ ID NO: 3724889 - DNA, 25 bp, Homo sapien
ttaagacgtttcaccacattgtaag

SEQ ID NO: 3724890 - DNA, 25 bp, Homo sapien
catgatccagaatcaagtgactgag

SEQ ID NO: 3724891 - DNA, 25 bp, Homo sapien
tgatctatacattttgactagtttt

SEQ ID NO: 3724892 - DNA, 25 bp, Homo sapien
tagcctccgaagaaggtcttctttc

SEQ ID NO: 3724893 - DNA, 25 bp, Homo sapien
ctttgatctatacattttgactagt

SEQ ID NO: 3724894 - DNA, 25 bp, Homo sapien
tttgactagttttagcctccgaaga

SEQ ID NO: 3724895 - DNA, 25 bp, Homo sapien
ttctcttcagacacagctgactgca

SEQ ID NO: 3724896 - DNA, 25 bp, Homo sapien
attgagtaaggcttagtttcttgtt

SEQ ID NO: 3724897 - DNA, 25 bp, Homo sapien
cagctgactgcaactcataaagcaa

SEQ ID NO: 3724898 - DNA, 25 bp, Homo sapien
tcaattgagtaaggcttagtttctt

SEQ ID NO: 3724899 - DNA, 25 bp, Homo sapien
gtttaattacctgctagactatcag

SEQ ID NO: 3724900 - DNA, 25 bp, Homo sapien
gataccttcctctgagccctaatgg

SEQ ID NO: 3724901 - DNA, 25 bp, Homo sapien
aagatattctggagcaaaaatcagg

SEQ ID NO: 3724902 - DNA, 25 bp, Homo sapien
caaggtacataaacttaggaggcag

SEQ ID NO: 3724903 - DNA, 25 bp, Homo sapien
tgctcccgcctgaggaaaacactgc

SEQ ID NO: 3724904 - DNA, 25 bp, Homo sapien
tccgggatacgggtgtacacagcag

SEQ ID NO: 3724905 - DNA, 25 bp, Homo sapien
ggtctccgggatacgggtgtacaca

SEQ ID NO: 3724906 - DNA, 25 bp, Homo sapien
gcctgctcccgcctgaggaaaacac

SEQ ID NO: 3724907 - DNA, 25 bp, Homo sapien
gatctgaggccaattctccaagtgg

SEQ ID NO: 3724908 - DNA, 25 bp, Homo sapien
aagatctgaggccaattctccaagt

SEQ ID NO: 3724909 - DNA, 25 bp, Homo sapien
ctttacagggacagttgcagacaag

SEQ ID NO: 3724910 - DNA, 25 bp, Homo sapien
acagttgcagacaagatctgaggcc

SEQ ID NO: 3724911 - DNA, 25 bp, Homo sapien
cctctcgctggagaaaaatgcaatt

SEQ ID NO: 3724912 - DNA, 25 bp, Homo sapien
tgttggcccgcaagatctttactct

SEQ ID NO: 3724913 - DNA, 25 bp, Homo sapien
gacaggtctaggagtcatccttcct

SEQ ID NO: 3724914 - DNA, 25 bp, Homo sapien
catcttggcaatgtaaactaacagc

SEQ ID NO: 3724915 - DNA, 25 bp, Homo sapien
tccagagcgttctctccaaaggctc

SEQ ID NO: 3724916 - DNA, 25 bp, Homo sapien
gcgttctctccaaaggctcctgttc

SEQ ID NO: 3724917 - DNA, 25 bp, Homo sapien
gttctctccaaaggctcctgttcag

SEQ ID NO: 3724918 - DNA, 25 bp, Homo sapien
cggtccagagcgttctctccaaagg

SEQ ID NO: 3724919 - DNA, 25 bp, Homo sapien
cttcacgacttcagagcctgtggcc

SEQ ID NO: 3724920 - DNA, 25 bp, Homo sapien
ctcgaagcaccacccgctccgtccc

SEQ ID NO: 3724921 - DNA, 25 bp, Homo sapien
gctccgtcccaaggcttcacgactt

SEQ ID NO: 3724922 - DNA, 25 bp, Homo sapien
gcctgtggcccgacctcatggctca

SEQ ID NO: 3724923 - DNA, 25 bp, Homo sapien
aacgaaggggtcaccactccgcact

SEQ ID NO: 3724924 - DNA, 25 bp, Homo sapien
gtcaaagcatctcgctggccaaggg

SEQ ID NO: 3724925 - DNA, 25 bp, Homo sapien
aaagttataaatgctcagtcatccc

SEQ ID NO: 3724926 - DNA, 25 bp, Homo sapien
cacccacggggagatacacaaaagt

SEQ ID NO: 3724927 - DNA, 25 bp, Homo sapien
tcaggaagtaggtggcgcgtccttc

SEQ ID NO: 3724928 - DNA, 25 bp, Homo sapien
ttagctcaaaagtgcctgcccccgg

SEQ ID NO: 3724929 - DNA, 25 bp, Homo sapien
ccgcttcctccttagctcaaaagtg

SEQ ID NO: 3724930 - DNA, 25 bp, Homo sapien
gtggcgcagcgcaggccgagctcct

SEQ ID NO: 3724931 - DNA, 25 bp, Homo sapien
caagctcctggctgactccccggac

SEQ ID NO: 3724932 - DNA, 25 bp, Homo sapien
agctcctggctgactccccggacat

SEQ ID NO: 3724933 - DNA, 25 bp, Homo sapien
cccaagctcctggctgactccccgg

SEQ ID NO: 3724934 - DNA, 25 bp, Homo sapien
cttccccaagctcctggctgactcc

SEQ ID NO: 3724935 - DNA, 25 bp, Homo sapien
gagatcaccccctcttcgcggcggg

SEQ ID NO: 3724936 - DNA, 25 bp, Homo sapien
gagcagcctcgaacatgccgccggg

SEQ ID NO: 3724937 - DNA, 25 bp, Homo sapien
tcccggagcagcctcgaacatgccg

SEQ ID NO: 3724938 - DNA, 25 bp, Homo sapien
gggtcgccgagatcaccccctcttc

SEQ ID NO: 3724939 - DNA, 25 bp, Homo sapien
agcgaaggcgattacggcccagaga

SEQ ID NO: 3724940 - DNA, 25 bp, Homo sapien
cgattacggcccagagaggtgtcga

SEQ ID NO: 3724941 - DNA, 25 bp, Homo sapien
ttacggcccagagaggtgtcgagac

SEQ ID NO: 3724942 - DNA, 25 bp, Homo sapien
gggagaagcgaaggcgattacggcc

SEQ ID NO: 3724943 - DNA, 25 bp, Homo sapien
gctgtagatgcggatcgagccctcc

SEQ ID NO: 3724944 - DNA, 25 bp, Homo sapien
agatgcggatcgagccctccgggac

SEQ ID NO: 3724945 - DNA, 25 bp, Homo sapien
cttggccttcaggactagacgcgtc

SEQ ID NO: 3724946 - DNA, 25 bp, Homo sapien
aggactagacgcgtcctctcagcaa

SEQ ID NO: 3724947 - DNA, 25 bp, Homo sapien
tatagtcagattgtatttaggtcta

SEQ ID NO: 3724948 - DNA, 25 bp, Homo sapien
aggtgaagtccaggctatagtcaga

SEQ ID NO: 3724949 - DNA, 25 bp, Homo sapien
aataagctttcagattaaatctcca

SEQ ID NO: 3724950 - DNA, 25 bp, Homo sapien
ccaggctatagtcagattgtattta

SEQ ID NO: 3724951 - DNA, 25 bp, Homo sapien
cacaggtgatggcagactcgtagat

SEQ ID NO: 3724952 - DNA, 25 bp, Homo sapien
gactcgtagatcagctgaccctgac

SEQ ID NO: 3724953 - DNA, 25 bp, Homo sapien
tatgcttcatccaggtactcacagg

SEQ ID NO: 3724954 - DNA, 25 bp, Homo sapien
gggtcatccggcaacagcttcttcc

SEQ ID NO: 3724955 - DNA, 25 bp, Homo sapien
tttaccaatgatgaacggagaggca

SEQ ID NO: 3724956 - DNA, 25 bp, Homo sapien
cagagtcacaagaaagtagcagagc

SEQ ID NO: 3724957 - DNA, 25 bp, Homo sapien
gaagctagagcactaaccagcctgc

SEQ ID NO: 3724958 - DNA, 25 bp, Homo sapien
caggcaaaagttcacacggatggga

SEQ ID NO: 3724959 - DNA, 25 bp, Homo sapien
ataaagcttcctaccaaggatggca

SEQ ID NO: 3724960 - DNA, 25 bp, Homo sapien
tcttttaggccagcatagtcttctt

SEQ ID NO: 3724961 - DNA, 25 bp, Homo sapien
ttaggccagcatagtcttctttatt

SEQ ID NO: 3724962 - DNA, 25 bp, Homo sapien
taataaagcttcctaccaaggatgg

SEQ ID NO: 3724963 - DNA, 25 bp, Homo sapien
tgcaataacactatacacccaagag

SEQ ID NO: 3724964 - DNA, 25 bp, Homo sapien
tatggaaccactgtcgtagaggtgt

SEQ ID NO: 3724965 - DNA, 25 bp, Homo sapien
gaaaggtgttcaactgcattagtca

SEQ ID NO: 3724966 - DNA, 25 bp, Homo sapien
caaacgacccattggaaaaatgagc

SEQ ID NO: 3724967 - DNA, 25 bp, Homo sapien
tactccgatgtatccaagttgggtt

SEQ ID NO: 3724968 - DNA, 25 bp, Homo sapien
gaaataagtagagcaggtgagagaa

SEQ ID NO: 3724969 - DNA, 25 bp, Homo sapien
tagtaagactcactagaaatgctga

SEQ ID NO: 3724970 - DNA, 25 bp, Homo sapien
agcagtttttactccgatgtatcca

SEQ ID NO: 3724971 - DNA, 25 bp, Homo sapien
ctgaacattaaacagcataaaagta

SEQ ID NO: 3724972 - DNA, 25 bp, Homo sapien
cattaaacagcataaaagtatttct

SEQ ID NO: 3724973 - DNA, 25 bp, Homo sapien
gaacattaaacagcataaaagtatt

SEQ ID NO: 3724974 - DNA, 25 bp, Homo sapien
tgaacattaaacagcataaaagtat

SEQ ID NO: 3724975 - DNA, 25 bp, Homo sapien
gaaggtcgtcttcttattagtcaga

SEQ ID NO: 3724976 - DNA, 25 bp, Homo sapien
ttgccaccaaagaaggtcgtcttct

SEQ ID NO: 3724977 - DNA, 25 bp, Homo sapien
ccaccaaagaaggtcgtcttcttat

SEQ ID NO: 3724978 - DNA, 25 bp, Homo sapien
ccaaagaaggtcgtcttcttattag

SEQ ID NO: 3724979 - DNA, 25 bp, Homo sapien
cttcattgcttccagccgttcaaac

SEQ ID NO: 3724980 - DNA, 25 bp, Homo sapien
aacttcattgcttccagccgttcaa

SEQ ID NO: 3724981 - DNA, 25 bp, Homo sapien
acttcattgcttccagccgttcaaa

SEQ ID NO: 3724982 - DNA, 25 bp, Homo sapien
agagtagttagtgtaggtatatgac

SEQ ID NO: 3724983 - DNA, 25 bp, Homo sapien
ggtatatgacatgcctgggatagtc

SEQ ID NO: 3724984 - DNA, 25 bp, Homo sapien
ccctgccccattgcagtgatggaga

SEQ ID NO: 3724985 - DNA, 25 bp, Homo sapien
tactacatgtctcagaaatcccctg

SEQ ID NO: 3724986 - DNA, 25 bp, Homo sapien
gtttcagttttggagtgtggtctac

SEQ ID NO: 3724987 - DNA, 25 bp, Homo sapien
ccacagtttcagttttggagtgtgg

SEQ ID NO: 3724988 - DNA, 25 bp, Homo sapien
cagttttggagtgtggtctacacac

SEQ ID NO: 3724989 - DNA, 25 bp, Homo sapien
ggctgagactgtgggatcttccttc

SEQ ID NO: 3724990 - DNA, 25 bp, Homo sapien
ctcagggctgttctgtaagtagagc

SEQ ID NO: 3724991 - DNA, 25 bp, Homo sapien
gagctctaggaaaccttgccagtct

SEQ ID NO: 3724992 - DNA, 25 bp, Homo sapien
aggaaaccttgccagtctttctcac

SEQ ID NO: 3724993 - DNA, 25 bp, Homo sapien
tctaggaaaccttgccagtctttct

SEQ ID NO: 3724994 - DNA, 25 bp, Homo sapien
gctttattgctgactcctgccccct

SEQ ID NO: 3724995 - DNA, 25 bp, Homo sapien
gagacccccaccgtttggctgttga

SEQ ID NO: 3724996 - DNA, 25 bp, Homo sapien
cagagtcgtttcagcatcctgagac

SEQ ID NO: 3724997 - DNA, 25 bp, Homo sapien
gattttgctaaagatgataatttgg

SEQ ID NO: 3724998 - DNA, 25 bp, Homo sapien
tgatcccatgcaacctgaaccttgg

SEQ ID NO: 3724999 - DNA, 25 bp, Homo sapien
caacaatagagagaatgtgaaatta

SEQ ID NO: 3725000 - DNA, 25 bp, Homo sapien
ggaattgaaagcttctcaactaaga

SEQ ID NO: 3725001 - DNA, 25 bp, Homo sapien
ttctcaactaagaaaccagaagaca

SEQ ID NO: 3725002 - DNA, 25 bp, Homo sapien
agaaggaggaattgaaagcttctca

SEQ ID NO: 3725003 - DNA, 25 bp, Homo sapien
cctgaggggaaatccgctggaaagc

SEQ ID NO: 3725004 - DNA, 25 bp, Homo sapien
tggaaagcactagggccaagcggct

SEQ ID NO: 3725005 - DNA, 25 bp, Homo sapien
cctggagatcgggattcgcgggtcc

SEQ ID NO: 3725006 - DNA, 25 bp, Homo sapien
tggctgacgaaagaggaaccggtag

SEQ ID NO: 3725007 - DNA, 25 bp, Homo sapien
gagcatcagccaatcctcaaagctt

SEQ ID NO: 3725008 - DNA, 25 bp, Homo sapien
tgagagaggtcccgcgagagacctc

SEQ ID NO: 3725009 - DNA, 25 bp, Homo sapien
ctcgggcaaccggaccaggattggc

SEQ ID NO: 3725010 - DNA, 25 bp, Homo sapien
ctgcccagcagtgcggctgagccaa

SEQ ID NO: 3725011 - DNA, 25 bp, Homo sapien
ctcttcccttccaatacaacgcagg

SEQ ID NO: 3725012 - DNA, 25 bp, Homo sapien
tcttcccttccaatacaacgcaggc

SEQ ID NO: 3725013 - DNA, 25 bp, Homo sapien
caatacaacgcaggccgaacggacc

SEQ ID NO: 3725014 - DNA, 25 bp, Homo sapien
cttccaatacaacgcaggccgaacg

SEQ ID NO: 3725015 - DNA, 25 bp, Homo sapien
cctgcttgccagtgccttaaacacg

SEQ ID NO: 3725016 - DNA, 25 bp, Homo sapien
tgggcaaatgacaacaactttcggg

SEQ ID NO: 3725017 - DNA, 25 bp, Homo sapien
ggtgtcccacgcaaggctgagaact

SEQ ID NO: 3725018 - DNA, 25 bp, Homo sapien
taaacacgtgggactcgtggtgtcc

SEQ ID NO: 3725019 - DNA, 25 bp, Homo sapien
gtatcgaatcaaatagtccagggca

SEQ ID NO: 3725020 - DNA, 25 bp, Homo sapien
gagacccagctttggcacttaggca

SEQ ID NO: 3725021 - DNA, 25 bp, Homo sapien
ggcatcgtcagtatagtaagagctc

SEQ ID NO: 3725022 - DNA, 25 bp, Homo sapien
caatctagtgtcaaggttctcagaa

SEQ ID NO: 3725023 - DNA, 25 bp, Homo sapien
ccgcacatgcacagtctcttccact

SEQ ID NO: 3725024 - DNA, 25 bp, Homo sapien
catataccctgtgcccccgcacatg

SEQ ID NO: 3725025 - DNA, 25 bp, Homo sapien
taccctgtgcccccgcacatgcaca

SEQ ID NO: 3725026 - DNA, 25 bp, Homo sapien
cgcacatgcacagtctcttccacta

SEQ ID NO: 3725027 - DNA, 25 bp, Homo sapien
aaaaaagcagatttcaagatagttg

SEQ ID NO: 3725028 - DNA, 25 bp, Homo sapien
tagttgagaaaaatatatccatagc

SEQ ID NO: 3725029 - DNA, 25 bp, Homo sapien
aagatagttgagaaaaatatatcca

SEQ ID NO: 3725030 - DNA, 25 bp, Homo sapien
aagcagatttcaagatagttgagaa

SEQ ID NO: 3725031 - DNA, 25 bp, Homo sapien
ggcttgctacgctgacaacttttca

SEQ ID NO: 3725032 - DNA, 25 bp, Homo sapien
tggagaagacatattggttcccggc

SEQ ID NO: 3725033 - DNA, 25 bp, Homo sapien
cagggaatggcaaaaatgtttgaat

SEQ ID NO: 3725034 - DNA, 25 bp, Homo sapien
gagtaacttctactactttggagct

SEQ ID NO: 3725035 - DNA, 25 bp, Homo sapien
caggagctagggtaatttaacctgg

SEQ ID NO: 3725036 - DNA, 25 bp, Homo sapien
gtaatttaacctggggagacatcgc

SEQ ID NO: 3725037 - DNA, 25 bp, Homo sapien
cccagatttggaagcccgagagtag

SEQ ID NO: 3725038 - DNA, 25 bp, Homo sapien
gagacatcgccccagatttggaagc

SEQ ID NO: 3725039 - DNA, 25 bp, Homo sapien
tccaggtggtttgcgcagctcccgg

SEQ ID NO: 3725040 - DNA, 25 bp, Homo sapien
tcccggagctcacggtcgccgccct

SEQ ID NO: 3725041 - DNA, 25 bp, Homo sapien
gccgccctgtggctcgccaccgctg

SEQ ID NO: 3725042 - DNA, 25 bp, Homo sapien
tctccaggtggtttgcgcagctccc

SEQ ID NO: 3725043 - DNA, 25 bp, Homo sapien
agggtcctggtcgcatccccagaca

SEQ ID NO: 3725044 - DNA, 25 bp, Homo sapien
cagggtcctggtcgcatccccagac

SEQ ID NO: 3725045 - DNA, 25 bp, Homo sapien
gggtcctggtcgcatccccagacat

SEQ ID NO: 3725046 - DNA, 25 bp, Homo sapien
cccagggtcctggtcgcatccccag

SEQ ID NO: 3725047 - DNA, 25 bp, Homo sapien
tagtcagcccggtgaggaaggagct

SEQ ID NO: 3725048 - DNA, 25 bp, Homo sapien
ggaaggagctcgctcacttgcccag

SEQ ID NO: 3725049 - DNA, 25 bp, Homo sapien
gaaaggagaggctagtcagcccggt

SEQ ID NO: 3725050 - DNA, 25 bp, Homo sapien
aaggagctcgctcacttgcccagat

SEQ ID NO: 3725051 - DNA, 25 bp, Homo sapien
ctgtagatgcggatcagcccctccg

SEQ ID NO: 3725052 - DNA, 25 bp, Homo sapien
agatgcggatcagcccctccgggac

SEQ ID NO: 3725053 - DNA, 25 bp, Homo sapien
gctgtagatgcggatcagcccctcc

SEQ ID NO: 3725054 - DNA, 25 bp, Homo sapien
ctgtgagaataggggcagaacctca

SEQ ID NO: 3725055 - DNA, 25 bp, Homo sapien
tgtgagaataggggcagaacctcat

SEQ ID NO: 3725056 - DNA, 25 bp, Homo sapien
tctttggccttgaggacgaggcggg

SEQ ID NO: 3725057 - DNA, 25 bp, Homo sapien
tgtctttggccttgaggacgaggcg

SEQ ID NO: 3725058 - DNA, 25 bp, Homo sapien
atgtctttggccttgaggacgaggc

SEQ ID NO: 3725059 - DNA, 25 bp, Homo sapien
tttggccttgaggacgaggcgggtc

SEQ ID NO: 3725060 - DNA, 25 bp, Homo sapien
gatcagttgacattggctggtctcc

SEQ ID NO: 3725061 - DNA, 25 bp, Homo sapien
ggtgctttgtatagtaccattcagg

SEQ ID NO: 3725062 - DNA, 25 bp, Homo sapien
tccaggtactcacaagcaataacag

SEQ ID NO: 3725063 - DNA, 25 bp, Homo sapien
ggcgagctcgttcataagggtcata

SEQ ID NO: 3725064 - DNA, 25 bp, Homo sapien
tattcctgcttcaagttacacggtc

SEQ ID NO: 3725065 - DNA, 25 bp, Homo sapien
tggagaagcgcctagcagttaagcc

SEQ ID NO: 3725066 - DNA, 25 bp, Homo sapien
gtcataaccatacctcctgagcctg

SEQ ID NO: 3725067 - DNA, 25 bp, Homo sapien
tacacggtcattgccatgtcataac

SEQ ID NO: 3725068 - DNA, 25 bp, Homo sapien
aggcactccttggtcaaatgtggga

SEQ ID NO: 3725069 - DNA, 25 bp, Homo sapien
gctaccaggcactccttggtcaaat

SEQ ID NO: 3725070 - DNA, 25 bp, Homo sapien
tcaacgctaccaggcactccttggt

SEQ ID NO: 3725071 - DNA, 25 bp, Homo sapien
tctcccacatctcaacgctaccagg

SEQ ID NO: 3725072 - DNA, 25 bp, Homo sapien
tcctccactgtagctgaccaggaga

SEQ ID NO: 3725073 - DNA, 25 bp, Homo sapien
cctccactgtagctgaccaggagag

SEQ ID NO: 3725074 - DNA, 25 bp, Homo sapien
tcagggtatcccagctaaaagactg

SEQ ID NO: 3725075 - DNA, 25 bp, Homo sapien
agttgtgctaaggatgacagagccc

SEQ ID NO: 3725076 - DNA, 25 bp, Homo sapien
ttatgaccccacaactaagttctgg

SEQ ID NO: 3725077 - DNA, 25 bp, Homo sapien
cagagcctggaacttggatgtgatg

SEQ ID NO: 3725078 - DNA, 25 bp, Homo sapien
taattcatcctaagagtcaacagag

SEQ ID NO: 3725079 - DNA, 25 bp, Homo sapien
tcttgtatgcatgtctccagcctag

SEQ ID NO: 3725080 - DNA, 25 bp, Homo sapien
tgtttgccgaacacaccaggctctc

SEQ ID NO: 3725081 - DNA, 25 bp, Homo sapien
tccctgggcacagtggaaaaggcct

SEQ ID NO: 3725082 - DNA, 25 bp, Homo sapien
tttaaagagatggaggtttgccatg

SEQ ID NO: 3725083 - DNA, 25 bp, Homo sapien
actgtgctcagctgggctgaatact

SEQ ID NO: 3725084 - DNA, 25 bp, Homo sapien
tcagctgggctgaatactttttctt

SEQ ID NO: 3725085 - DNA, 25 bp, Homo sapien
cgatcctaccgtcttggcttctcaa

SEQ ID NO: 3725086 - DNA, 25 bp, Homo sapien
caatgcgggaaactctgcgtggaaa

SEQ ID NO: 3725087 - DNA, 25 bp, Homo sapien
caggtggttgaatgacaagaagcaa

SEQ ID NO: 3725088 - DNA, 25 bp, Homo sapien
gacgaaggcttcagttgctgggcca

SEQ ID NO: 3725089 - DNA, 25 bp, Homo sapien
catgatcaagtttggcaatgcggga

SEQ ID NO: 3725090 - DNA, 25 bp, Homo sapien
aggagctcaagacgacagtgagcca

SEQ ID NO: 3725091 - DNA, 25 bp, Homo sapien
gctcaagacgacagtgagccatgac

SEQ ID NO: 3725092 - DNA, 25 bp, Homo sapien
gcaatagagagagaccccaatctct

SEQ ID NO: 3725093 - DNA, 25 bp, Homo sapien
gaggcaggctcggtggcttcagcct

SEQ ID NO: 3725094 - DNA, 25 bp, Homo sapien
attgttttcagtgacgaattaacca

SEQ ID NO: 3725095 - DNA, 25 bp, Homo sapien
gggtacatattttggtccaggcatg

SEQ ID NO: 3725096 - DNA, 25 bp, Homo sapien
gtacatattttggtccaggcatgca

SEQ ID NO: 3725097 - DNA, 25 bp, Homo sapien
ggtccaggcatgcagtatgcaataa

SEQ ID NO: 3725098 - DNA, 25 bp, Homo sapien
tccaggcatgcagtatgcaataagc

SEQ ID NO: 3725099 - DNA, 25 bp, Homo sapien
tccaaaccaggcattcgagagagct

SEQ ID NO: 3725100 - DNA, 25 bp, Homo sapien
ccaagaacgttcaaccggaggatga

SEQ ID NO: 3725101 - DNA, 25 bp, Homo sapien
taggagaagcgaatcccagacatct

SEQ ID NO: 3725102 - DNA, 25 bp, Homo sapien
aatctgcagttttcgcgagagaagc

SEQ ID NO: 3725103 - DNA, 25 bp, Homo sapien
gacgaaggagaacgtcagcgttttg

SEQ ID NO: 3725104 - DNA, 25 bp, Homo sapien
aggagaacgtcagcgttttgaagtg

SEQ ID NO: 3725105 - DNA, 25 bp, Homo sapien
cccagagggacgaaggagaacgtca

SEQ ID NO: 3725106 - DNA, 25 bp, Homo sapien
gaacgtcagcgttttgaagtgcgcc

SEQ ID NO: 3725107 - DNA, 25 bp, Homo sapien
gaagagctcctttctaatgcaaaca

SEQ ID NO: 3725108 - DNA, 25 bp, Homo sapien
gaaaaataagactacggacgcgatg

SEQ ID NO: 3725109 - DNA, 25 bp, Homo sapien
cctgcacgcgagaagcctggctgga

SEQ ID NO: 3725110 - DNA, 25 bp, Homo sapien
gactttagtacaatagaagagctcc

SEQ ID NO: 3725111 - DNA, 25 bp, Homo sapien
tttactcaaagtaggagcatgcctc

SEQ ID NO: 3725112 - DNA, 25 bp, Homo sapien
gagccccatcccagacaggtatttt

SEQ ID NO: 3725113 - DNA, 25 bp, Homo sapien
ggtactcggcacaataaaaagctga

SEQ ID NO: 3725114 - DNA, 25 bp, Homo sapien
tacagctgcagattattgagcccca

SEQ ID NO: 3725115 - DNA, 25 bp, Homo sapien
tggctttgaaatgtgtgcctccagt

SEQ ID NO: 3725116 - DNA, 25 bp, Homo sapien
tgggcttcacggcacaaatcagaac

SEQ ID NO: 3725117 - DNA, 25 bp, Homo sapien
tggaacatctacacagctcttctgc

SEQ ID NO: 3725118 - DNA, 25 bp, Homo sapien
tacaccaagcgactctggaacatct

SEQ ID NO: 3725119 - DNA, 25 bp, Homo sapien
gaaggctagcattaggaaccccgct

SEQ ID NO: 3725120 - DNA, 25 bp, Homo sapien
tgttagcacgcaccacggaggttat

SEQ ID NO: 3725121 - DNA, 25 bp, Homo sapien
tgagacaaatcaacccggagggact

SEQ ID NO: 3725122 - DNA, 25 bp, Homo sapien
tatagatcttgattgctgggcccag

SEQ ID NO: 3725123 - DNA, 25 bp, Homo sapien
aaagaaggtggtgttctgatactca

SEQ ID NO: 3725124 - DNA, 25 bp, Homo sapien
gatatacaggttccaccaaagaagg

SEQ ID NO: 3725125 - DNA, 25 bp, Homo sapien
gaaggtggtgttctgatactcaaga

SEQ ID NO: 3725126 - DNA, 25 bp, Homo sapien
gaggaggtaatcaatcatggatata

SEQ ID NO: 3725127 - DNA, 25 bp, Homo sapien
ctccgggaatttaacaccacaatgt

SEQ ID NO: 3725128 - DNA, 25 bp, Homo sapien
tgtgactccgggaatttaacaccac

SEQ ID NO: 3725129 - DNA, 25 bp, Homo sapien
tgttactcagtgtgactccgggaat

SEQ ID NO: 3725130 - DNA, 25 bp, Homo sapien
ctcagtgtgactccgggaatttaac

SEQ ID NO: 3725131 - DNA, 25 bp, Homo sapien
cacttcacagacatcctgaaacatg

SEQ ID NO: 3725132 - DNA, 25 bp, Homo sapien
tcacttcacagacatcctgaaacat

SEQ ID NO: 3725133 - DNA, 25 bp, Homo sapien
agcacatatgtttttaacaaggaag

SEQ ID NO: 3725134 - DNA, 25 bp, Homo sapien
catatgtttttaacaaggaagcaca

SEQ ID NO: 3725135 - DNA, 25 bp, Homo sapien
atatgtttttaacaaggaagcacac

SEQ ID NO: 3725136 - DNA, 25 bp, Homo sapien
cacatatgtttttaacaaggaagca

SEQ ID NO: 3725137 - DNA, 25 bp, Homo sapien
gctctgaagtctgcgggaggctcct

SEQ ID NO: 3725138 - DNA, 25 bp, Homo sapien
ggaggcgttgggcactgtgactgtg

SEQ ID NO: 3725139 - DNA, 25 bp, Homo sapien
aggtggaggcgttgggcactgtgac

SEQ ID NO: 3725140 - DNA, 25 bp, Homo sapien
ggcgttgggcactgtgactgtgact

SEQ ID NO: 3725141 - DNA, 25 bp, Homo sapien
gcgttgggcactgtgactgtgactg

SEQ ID NO: 3725142 - DNA, 25 bp, Homo sapien
tatgaatgggttgtcgggaatccag

SEQ ID NO: 3725143 - DNA, 25 bp, Homo sapien
ttgaagtcatggagccgacagggct

SEQ ID NO: 3725144 - DNA, 25 bp, Homo sapien
ggtttcctaacctgtgactccatgc

SEQ ID NO: 3725145 - DNA, 25 bp, Homo sapien
ccagcccacgggttatgaaggtgca

SEQ ID NO: 3725146 - DNA, 25 bp, Homo sapien
aaagaagcgtcagcacagtgcaggg

SEQ ID NO: 3725147 - DNA, 25 bp, Homo sapien
gaatgataacttactggaggaaaat

SEQ ID NO: 3725148 - DNA, 25 bp, Homo sapien
agtgagaatgataacttactggagg

SEQ ID NO: 3725149 - DNA, 25 bp, Homo sapien
tgggaagttatcttagttatcttat

SEQ ID NO: 3725150 - DNA, 25 bp, Homo sapien
ctcttatccatgagaagagcacaga

SEQ ID NO: 3725151 - DNA, 25 bp, Homo sapien
tagagattcaagaagccctggaaaa

SEQ ID NO: 3725152 - DNA, 25 bp, Homo sapien
agccgcagggctggcgtgtggctca

SEQ ID NO: 3725153 - DNA, 25 bp, Homo sapien
aagtcaaaggcattagggttgttct

SEQ ID NO: 3725154 - DNA, 25 bp, Homo sapien
ggattggttcccaagacaagccgtg

SEQ ID NO: 3725155 - DNA, 25 bp, Homo sapien
gtgacgtagactcccaacaagctgg

SEQ ID NO: 3725156 - DNA, 25 bp, Homo sapien
gaaagagagacggattggttcccaa

SEQ ID NO: 3725157 - DNA, 25 bp, Homo sapien
caagacaagccgtgacgtagactcc

SEQ ID NO: 3725158 - DNA, 25 bp, Homo sapien
tcctgggtgataaaccggtgtttca

SEQ ID NO: 3725159 - DNA, 25 bp, Homo sapien
aaattctgacgtagttagtcctggg

SEQ ID NO: 3725160 - DNA, 25 bp, Homo sapien
cgcccacgtggacagcgacattcat

SEQ ID NO: 3725161 - DNA, 25 bp, Homo sapien
gaattacactcatactcgcccacgt

SEQ ID NO: 3725162 - DNA, 25 bp, Homo sapien
aagtgtaaggatgtgcaggtgacca

SEQ ID NO: 3725163 - DNA, 25 bp, Homo sapien
gggctataggccaccaggctgcaaa

SEQ ID NO: 3725164 - DNA, 25 bp, Homo sapien
ttctaaattagtgtgcggagcccca

SEQ ID NO: 3725165 - DNA, 25 bp, Homo sapien
gaggcactcaaatcccaaactgggc

SEQ ID NO: 3725166 - DNA, 25 bp, Homo sapien
atctgcaaaagatagagaatggctc

SEQ ID NO: 3725167 - DNA, 25 bp, Homo sapien
ttctgatgttaacatcatctatgac

SEQ ID NO: 3725168 - DNA, 25 bp, Homo sapien
tagattgtaactggactgagtccag

SEQ ID NO: 3725169 - DNA, 25 bp, Homo sapien
ggctgtagctcagaacctccaagga

SEQ ID NO: 3725170 - DNA, 25 bp, Homo sapien
accagcaccacgaccatagccagct

SEQ ID NO: 3725171 - DNA, 25 bp, Homo sapien
ccagcaccacgaccatagccagctg

SEQ ID NO: 3725172 - DNA, 25 bp, Homo sapien
caccagcaccacgaccatagccagc

SEQ ID NO: 3725173 - DNA, 25 bp, Homo sapien
gctcaagagcgctaacaggccagat

SEQ ID NO: 3725174 - DNA, 25 bp, Homo sapien
taaaccacagggcagtcaagcttgc

SEQ ID NO: 3725175 - DNA, 25 bp, Homo sapien
tgaaataggtacttagccgtcccat

SEQ ID NO: 3725176 - DNA, 25 bp, Homo sapien
gaatcaagccatgtgcaacgtagga

SEQ ID NO: 3725177 - DNA, 25 bp, Homo sapien
aatggcagggcagagtattgcacag

SEQ ID NO: 3725178 - DNA, 25 bp, Homo sapien
tgtccctggagcacatgtgtaacca

SEQ ID NO: 3725179 - DNA, 25 bp, Homo sapien
ctgattggtaactgggcaggcctgc

SEQ ID NO: 3725180 - DNA, 25 bp, Homo sapien
tgtaaccatcctgtctatgcgcagc

SEQ ID NO: 3725181 - DNA, 25 bp, Homo sapien
gttgctgctcaactgctccctctgg

SEQ ID NO: 3725182 - DNA, 25 bp, Homo sapien
actggaaatggctcttcgtattggc

SEQ ID NO: 3725183 - DNA, 25 bp, Homo sapien
tctatagcagggagctgactgttgc

SEQ ID NO: 3725184 - DNA, 25 bp, Homo sapien
gctttgtccatcttagccccaggac

SEQ ID NO: 3725185 - DNA, 25 bp, Homo sapien
ccgggctatgttagaccaaaggtct

SEQ ID NO: 3725186 - DNA, 25 bp, Homo sapien
ctgaagaaaggaccgggctatgtta

SEQ ID NO: 3725187 - DNA, 25 bp, Homo sapien
gtctcctgggacgatggccttgcat

SEQ ID NO: 3725188 - DNA, 25 bp, Homo sapien
tatgttagaccaaaggtctcctggg

SEQ ID NO: 3725189 - DNA, 25 bp, Homo sapien
tgcccagagatgacgcccatagccc

SEQ ID NO: 3725190 - DNA, 25 bp, Homo sapien
ttgctgccacgaagaaggctttctt

SEQ ID NO: 3725191 - DNA, 25 bp, Homo sapien
ccacagccttgctgccacgaagaag

SEQ ID NO: 3725192 - DNA, 25 bp, Homo sapien
aactgcccagagatgacgcccatag

SEQ ID NO: 3725193 - DNA, 25 bp, Homo sapien
tacttctggatcaccatgaatggcc

SEQ ID NO: 3725194 - DNA, 25 bp, Homo sapien
tggtggcagaacacgctgtggaccc

SEQ ID NO: 3725195 - DNA, 25 bp, Homo sapien
tggaccctgagttagagacaatgca

SEQ ID NO: 3725196 - DNA, 25 bp, Homo sapien
gcagccaaagcactaacagggacag

SEQ ID NO: 3725197 - DNA, 25 bp, Homo sapien
cttgcagtgtgacttcttccacttc

SEQ ID NO: 3725198 - DNA, 25 bp, Homo sapien
ttgcagtgtgacttcttccacttca

SEQ ID NO: 3725199 - DNA, 25 bp, Homo sapien
tgcagtgtgacttcttccacttcat

SEQ ID NO: 3725200 - DNA, 25 bp, Homo sapien
gaatgaggatgtagcaagtagcacc

SEQ ID NO: 3725201 - DNA, 25 bp, Homo sapien
caccatgaagtgtggcgtagacaca

SEQ ID NO: 3725202 - DNA, 25 bp, Homo sapien
ccagccatagggcttggccgtggcc

SEQ ID NO: 3725203 - DNA, 25 bp, Homo sapien
agcaccatgaagtgtggcgtagaca

SEQ ID NO: 3725204 - DNA, 25 bp, Homo sapien
gaccacagccctattatctgcctcg

SEQ ID NO: 3725205 - DNA, 25 bp, Homo sapien
atctggtgggccctgagcgaccaca

SEQ ID NO: 3725206 - DNA, 25 bp, Homo sapien
tatcccatagggtgctgcagacaga

SEQ ID NO: 3725207 - DNA, 25 bp, Homo sapien
accagaggcttcaaactgaacccca

SEQ ID NO: 3725208 - DNA, 25 bp, Homo sapien
ctgatgtctcagaccacaggtgcgg

SEQ ID NO: 3725209 - DNA, 25 bp, Homo sapien
ccagcgttgccaggctaagtttagc

SEQ ID NO: 3725210 - DNA, 25 bp, Homo sapien
ctgttgccccgtgactccagcgttg

SEQ ID NO: 3725211 - DNA, 25 bp, Homo sapien
aaagccaaacccaccagctgatgtc

SEQ ID NO: 3725212 - DNA, 25 bp, Homo sapien
cccgcgtggattgtaatgcttttgc

SEQ ID NO: 3725213 - DNA, 25 bp, Homo sapien
ggtcaggccatactcatcactgcag

SEQ ID NO: 3725214 - DNA, 25 bp, Homo sapien
gcaggccctgaagcatccatcatgt

SEQ ID NO: 3725215 - DNA, 25 bp, Homo sapien
tccatcatgttcctcgagctcagta

SEQ ID NO: 3725216 - DNA, 25 bp, Homo sapien
tgctaagcacgttgagaaccactgt

SEQ ID NO: 3725217 - DNA, 25 bp, Homo sapien
ttgagacacagatactgggcccagc

SEQ ID NO: 3725218 - DNA, 25 bp, Homo sapien
tttgtaacaagttgccaggtggcac

SEQ ID NO: 3725219 - DNA, 25 bp, Homo sapien
taccaggtggccaagaaatgggtcc

SEQ ID NO: 3725220 - DNA, 25 bp, Homo sapien
cagttttccatcagtcccttgaggg

SEQ ID NO: 3725221 - DNA, 25 bp, Homo sapien
cagactcaggaatcctagaggccac

SEQ ID NO: 3725222 - DNA, 25 bp, Homo sapien
ggtccacgggatgatacccagcctg

SEQ ID NO: 3725223 - DNA, 25 bp, Homo sapien
caggcctagcatgtcttctcttgag

SEQ ID NO: 3725224 - DNA, 25 bp, Homo sapien
gaactcatgctcctttctcaaagtc

SEQ ID NO: 3725225 - DNA, 25 bp, Homo sapien
tcagggtagaactcatgctcctttc

SEQ ID NO: 3725226 - DNA, 25 bp, Homo sapien
ctgggaagctcgggagacagccaac

SEQ ID NO: 3725227 - DNA, 25 bp, Homo sapien
aggcctgggaagctcgggagacagc

SEQ ID NO: 3725228 - DNA, 25 bp, Homo sapien
gcagggaccggtgggtgacacagta

SEQ ID NO: 3725229 - DNA, 25 bp, Homo sapien
tgacacagtaaagagcaggaaggtg

SEQ ID NO: 3725230 - DNA, 25 bp, Homo sapien
gggtgacacagtaaagagcaggaag

SEQ ID NO: 3725231 - DNA, 25 bp, Homo sapien
ctgtaggtaggaaggcagggaccgg

SEQ ID NO: 3725232 - DNA, 25 bp, Homo sapien
ccagccccgtgcgtggtaccctggg

SEQ ID NO: 3725233 - DNA, 25 bp, Homo sapien
accttgcacttgctggagcaaagcc

SEQ ID NO: 3725234 - DNA, 25 bp, Homo sapien
tgtccccatttggagtgcaagtgaa

SEQ ID NO: 3725235 - DNA, 25 bp, Homo sapien
cccatttggagtgcaagtgaagagg

SEQ ID NO: 3725236 - DNA, 25 bp, Homo sapien
gcagctctgagaccttgcacttgct

SEQ ID NO: 3725237 - DNA, 25 bp, Homo sapien
aagaaaaggaagtgcggcaagccca

SEQ ID NO: 3725238 - DNA, 25 bp, Homo sapien
cagacacttgattttacaacccggg

SEQ ID NO: 3725239 - DNA, 25 bp, Homo sapien
gccaacatgatggtcctgcccagtg

SEQ ID NO: 3725240 - DNA, 25 bp, Homo sapien
atgtgccatccagtcgaccagtgtc

SEQ ID NO: 3725241 - DNA, 25 bp, Homo sapien
tcgaagcattaagtgtcctcaaggc

SEQ ID NO: 3725242 - DNA, 25 bp, Homo sapien
accattaggcctttttgcttaggcg

SEQ ID NO: 3725243 - DNA, 25 bp, Homo sapien
ttaggcgagcctctgctgtccgcgt

SEQ ID NO: 3725244 - DNA, 25 bp, Homo sapien
cgcgtgtgcacacgctggctggact

SEQ ID NO: 3725245 - DNA, 25 bp, Homo sapien
gaggacgtatattttgagggctgcc

SEQ ID NO: 3725246 - DNA, 25 bp, Homo sapien
gtgatttctatgatgtcctgctgga

SEQ ID NO: 3725247 - DNA, 25 bp, Homo sapien
tctggagaccaggatcaaggtatca

SEQ ID NO: 3725248 - DNA, 25 bp, Homo sapien
caacccagccatagagatcaggcgt

SEQ ID NO: 3725249 - DNA, 25 bp, Homo sapien
tttatccagagctttccacttcact

SEQ ID NO: 3725250 - DNA, 25 bp, Homo sapien
tccagagctttccacttcactccag

SEQ ID NO: 3725251 - DNA, 25 bp, Homo sapien
cagagctttccacttcactccagga

SEQ ID NO: 3725252 - DNA, 25 bp, Homo sapien
cactccaggaatttcaaattcctgc

SEQ ID NO: 3725253 - DNA, 25 bp, Homo sapien
gcccagagcgggaccacatttttgt

SEQ ID NO: 3725254 - DNA, 25 bp, Homo sapien
ttcctagtggccaggtgacccgtta

SEQ ID NO: 3725255 - DNA, 25 bp, Homo sapien
caagccaatcgtaagtcccagggca

SEQ ID NO: 3725256 - DNA, 25 bp, Homo sapien
tgacccgttacttctcacatctgag

SEQ ID NO: 3725257 - DNA, 25 bp, Homo sapien
gagttactgccctacgctgcactcc

SEQ ID NO: 3725258 - DNA, 25 bp, Homo sapien
gttactgccctacgctgcactccag

SEQ ID NO: 3725259 - DNA, 25 bp, Homo sapien
cagagttactgccctacgctgcact

SEQ ID NO: 3725260 - DNA, 25 bp, Homo sapien
tactgccctacgctgcactccagtg

SEQ ID NO: 3725261 - DNA, 25 bp, Homo sapien
aggcgcgacgcgctgtctctatcgc

SEQ ID NO: 3725262 - DNA, 25 bp, Homo sapien
gaaagaagctaaaggcgcgacgcgc

SEQ ID NO: 3725263 - DNA, 25 bp, Homo sapien
ctgatgctctctgggggcggcctca

SEQ ID NO: 3725264 - DNA, 25 bp, Homo sapien
ctgtggagatcgcaggagctgggcc

SEQ ID NO: 3725265 - DNA, 25 bp, Homo sapien
gaacccacagaaagagaattattcc

SEQ ID NO: 3725266 - DNA, 25 bp, Homo sapien
gctggtgggatatgaatgcagttaa

SEQ ID NO: 3725267 - DNA, 25 bp, Homo sapien
ctatgatggattgggaataaacagc

SEQ ID NO: 3725268 - DNA, 25 bp, Homo sapien
tccacaagatgagtaataaacagct

SEQ ID NO: 3725269 - DNA, 25 bp, Homo sapien
tatgcacttatctcccaaaagagat

SEQ ID NO: 3725270 - DNA, 25 bp, Homo sapien
tcatcctgagagagcttaagggcag

SEQ ID NO: 3725271 - DNA, 25 bp, Homo sapien
gcatttggccatcagacgcttttca

SEQ ID NO: 3725272 - DNA, 25 bp, Homo sapien
cttctttagggatgcaatggtggtc

SEQ ID NO: 3725273 - DNA, 25 bp, Homo sapien
aagggcagtggcgaccttcgcagaa

SEQ ID NO: 3725274 - DNA, 25 bp, Homo sapien
ggtccattgacagtccagacccctg

SEQ ID NO: 3725275 - DNA, 25 bp, Homo sapien
tgctctttgtcataggctgagtcca

SEQ ID NO: 3725276 - DNA, 25 bp, Homo sapien
tcagagcaagaatcgtctccttggc

SEQ ID NO: 3725277 - DNA, 25 bp, Homo sapien
gctccactagtttggtcaggttcac

SEQ ID NO: 3725278 - DNA, 25 bp, Homo sapien
tcttccaatgcttgtctcgtatctg

SEQ ID NO: 3725279 - DNA, 25 bp, Homo sapien
gttccctcgcattcctcttcagtag

SEQ ID NO: 3725280 - DNA, 25 bp, Homo sapien
gtatctgaatcagttccctcgcatt

SEQ ID NO: 3725281 - DNA, 25 bp, Homo sapien
gcattcctcttcagtagttgctctg

SEQ ID NO: 3725282 - DNA, 25 bp, Homo sapien
cagcctcctcttttgatcgctctgt

SEQ ID NO: 3725283 - DNA, 25 bp, Homo sapien
cacttctgataagagctggtctctc

SEQ ID NO: 3725284 - DNA, 25 bp, Homo sapien
tttgaacctcagtaaatctcggatg

SEQ ID NO: 3725285 - DNA, 25 bp, Homo sapien
tcagtggtctgagctagggattctc

SEQ ID NO: 3725286 - DNA, 25 bp, Homo sapien
ggaagcttcgttctgacgttgctgg

SEQ ID NO: 3725287 - DNA, 25 bp, Homo sapien
cgttctgacgttgctggatttcttg

SEQ ID NO: 3725288 - DNA, 25 bp, Homo sapien
tgcctgaatctgcttgagctctttc

SEQ ID NO: 3725289 - DNA, 25 bp, Homo sapien
cctgaatctgcttgagctctttctc

SEQ ID NO: 3725290 - DNA, 25 bp, Homo sapien
aattgctcgagttcctttgcagctc

SEQ ID NO: 3725291 - DNA, 25 bp, Homo sapien
catctgaaattgctcgagttccttt

SEQ ID NO: 3725292 - DNA, 25 bp, Homo sapien
tctcatctgaaattgctcgagttcc

SEQ ID NO: 3725293 - DNA, 25 bp, Homo sapien
ctgaaattgctcgagttcctttgca

SEQ ID NO: 3725294 - DNA, 25 bp, Homo sapien
agctccaacgccttctgttggtttt

SEQ ID NO: 3725295 - DNA, 25 bp, Homo sapien
gagctccaacgccttctgttggttt

SEQ ID NO: 3725296 - DNA, 25 bp, Homo sapien
tgagctccaacgccttctgttggtt

SEQ ID NO: 3725297 - DNA, 25 bp, Homo sapien
tttgagctccaacgccttctgttgg

SEQ ID NO: 3725298 - DNA, 25 bp, Homo sapien
tgcctctgatgtgtcaatgtactca

SEQ ID NO: 3725299 - DNA, 25 bp, Homo sapien
atgtactcagtagagccaacacagg

SEQ ID NO: 3725300 - DNA, 25 bp, Homo sapien
tccaactgagggctccaattgccaa

SEQ ID NO: 3725301 - DNA, 25 bp, Homo sapien
gagggctccaattgccaaggcaaac

SEQ ID NO: 3725302 - DNA, 25 bp, Homo sapien
tgatacaaactaagtctcacgagat

SEQ ID NO: 3725303 - DNA, 25 bp, Homo sapien
tctcctgatacaaactaagtctcac

SEQ ID NO: 3725304 - DNA, 25 bp, Homo sapien
tcctgatacaaactaagtctcacga

SEQ ID NO: 3725305 - DNA, 25 bp, Homo sapien
cctgatacaaactaagtctcacgag

SEQ ID NO: 3725306 - DNA, 25 bp, Homo sapien
tagggtttctttgtgctgttcgact

SEQ ID NO: 3725307 - DNA, 25 bp, Homo sapien
gagcttcccgatgtcaaggcgcatt

SEQ ID NO: 3725308 - DNA, 25 bp, Homo sapien
aaggcgcatttgatggacttcttcc

SEQ ID NO: 3725309 - DNA, 25 bp, Homo sapien
ccttttgatcttcggtgtggtgcaa

SEQ ID NO: 3725310 - DNA, 25 bp, Homo sapien
ggttggattgtcatttttgccaatg

SEQ ID NO: 3725311 - DNA, 25 bp, Homo sapien
tcaggttggattgtcatttttgcca

SEQ ID NO: 3725312 - DNA, 25 bp, Homo sapien
ttggattgtcatttttgccaatgga

SEQ ID NO: 3725313 - DNA, 25 bp, Homo sapien
tggattgtcatttttgccaatggaa

SEQ ID NO: 3725314 - DNA, 25 bp, Homo sapien
ataataataaacgtagagtcgacct

SEQ ID NO: 3725315 - DNA, 25 bp, Homo sapien
taaacgtagagtcgacctaagagaa

SEQ ID NO: 3725316 - DNA, 25 bp, Homo sapien
taataaacgtagagtcgacctaaga

SEQ ID NO: 3725317 - DNA, 25 bp, Homo sapien
aaacgtagagtcgacctaagagaat

SEQ ID NO: 3725318 - DNA, 25 bp, Homo sapien
gcttgtttctttgaagcctctacct

SEQ ID NO: 3725319 - DNA, 25 bp, Homo sapien
tgcctttctgtcaagttctgcttgt

SEQ ID NO: 3725320 - DNA, 25 bp, Homo sapien
ttctgtcaagttctgcttgtttctt

SEQ ID NO: 3725321 - DNA, 25 bp, Homo sapien
tgcttgtttctttgaagcctctacc

SEQ ID NO: 3725322 - DNA, 25 bp, Homo sapien
tccctttctcttagaagctcgtcca

SEQ ID NO: 3725323 - DNA, 25 bp, Homo sapien
gtccctttctcttagaagctcgtcc

SEQ ID NO: 3725324 - DNA, 25 bp, Homo sapien
tgtccctttctcttagaagctcgtc

SEQ ID NO: 3725325 - DNA, 25 bp, Homo sapien
ccctttctcttagaagctcgtccat

SEQ ID NO: 3725326 - DNA, 25 bp, Homo sapien
ctgagcctcatccttgtagttctgg

SEQ ID NO: 3725327 - DNA, 25 bp, Homo sapien
tggagctttaccaagtctgtctgct

SEQ ID NO: 3725328 - DNA, 25 bp, Homo sapien
cttggttgatgtaccggtcacgctc

SEQ ID NO: 3725329 - DNA, 25 bp, Homo sapien
tctgggtcgcattgaccgccttaag

SEQ ID NO: 3725330 - DNA, 25 bp, Homo sapien
agagaaatatgctctgctccaatgg

SEQ ID NO: 3725331 - DNA, 25 bp, Homo sapien
gtgcgagtccaagctcgataatacc

SEQ ID NO: 3725332 - DNA, 25 bp, Homo sapien
gtcctcagagtcagtaaatcaatca

SEQ ID NO: 3725333 - DNA, 25 bp, Homo sapien
taccagggcctaaattgacaacgag

SEQ ID NO: 3725334 - DNA, 25 bp, Homo sapien
aatatgagtgggtaggatctgtgcc

SEQ ID NO: 3725335 - DNA, 25 bp, Homo sapien
aggatgtccggcacagccctgtgac

SEQ ID NO: 3725336 - DNA, 25 bp, Homo sapien
gtgcccttcccttgtcagcagaggc

SEQ ID NO: 3725337 - DNA, 25 bp, Homo sapien
taaggaggaccacactcctgcccag

SEQ ID NO: 3725338 - DNA, 25 bp, Homo sapien
gggagccaagtacagaggaattaga

SEQ ID NO: 3725339 - DNA, 25 bp, Homo sapien
gtacagaggaattagagatcacttt

SEQ ID NO: 3725340 - DNA, 25 bp, Homo sapien
cagaggaattagagatcacttttaa

SEQ ID NO: 3725341 - DNA, 25 bp, Homo sapien
gccaagtacagaggaattagagatc

SEQ ID NO: 3725342 - DNA, 25 bp, Homo sapien
ctgagcctcaaccagatttttgcta

SEQ ID NO: 3725343 - DNA, 25 bp, Homo sapien
gcttcatataggttctgttgctgtt

SEQ ID NO: 3725344 - DNA, 25 bp, Homo sapien
ttttcctgtagtcaaaaatctgtgt

SEQ ID NO: 3725345 - DNA, 25 bp, Homo sapien
caaccagatttttgctatacagatt

SEQ ID NO: 3725346 - DNA, 25 bp, Homo sapien
cttttctattcgctgctgttccagg

SEQ ID NO: 3725347 - DNA, 25 bp, Homo sapien
agcttcacaagtgcggactctttgg

SEQ ID NO: 3725348 - DNA, 25 bp, Homo sapien
ggtgcagcttcacaagtgcggactc

SEQ ID NO: 3725349 - DNA, 25 bp, Homo sapien
tacctgatggatcataatctttaac

SEQ ID NO: 3725350 - DNA, 25 bp, Homo sapien
gcaaaattaaactagtcaaagataa

SEQ ID NO: 3725351 - DNA, 25 bp, Homo sapien
agctcctgtaatggccctaccacca

SEQ ID NO: 3725352 - DNA, 25 bp, Homo sapien
accaccagcacacgaactgcaaagg

SEQ ID NO: 3725353 - DNA, 25 bp, Homo sapien
tgcaaaggtaaagccctttgtaagc

SEQ ID NO: 3725354 - DNA, 25 bp, Homo sapien
gcctcagcaattattcgcaggagtt

SEQ ID NO: 3725355 - DNA, 25 bp, Homo sapien
cagcctcagcaattattcgcaggag

SEQ ID NO: 3725356 - DNA, 25 bp, Homo sapien
tcagcctcagcaattattcgcagga

SEQ ID NO: 3725357 - DNA, 25 bp, Homo sapien
tcagcaattattcgcaggagttttc

SEQ ID NO: 3725358 - DNA, 25 bp, Homo sapien
tcattgcgccgaacaagctgagacc

SEQ ID NO: 3725359 - DNA, 25 bp, Homo sapien
cccggcgaagcttcttgatctcaag

SEQ ID NO: 3725360 - DNA, 25 bp, Homo sapien
cagcacagactgttggatcttgatc

SEQ ID NO: 3725361 - DNA, 25 bp, Homo sapien
caacctctggttgtactggctctcc

SEQ ID NO: 3725362 - DNA, 25 bp, Homo sapien
tccagggctcggcagcgtgtcctct

SEQ ID NO: 3725363 - DNA, 25 bp, Homo sapien
gggctcggcagcgtgtcctctcctt

SEQ ID NO: 3725364 - DNA, 25 bp, Homo sapien
tcctccagggctcggcagcgtgtcc

SEQ ID NO: 3725365 - DNA, 25 bp, Homo sapien
agggctcggcagcgtgtcctctcct

SEQ ID NO: 3725366 - DNA, 25 bp, Homo sapien
agagggcagttcacaaaaccgtatt

SEQ ID NO: 3725367 - DNA, 25 bp, Homo sapien
tgtccccagattctaagagaaaggg

SEQ ID NO: 3725368 - DNA, 25 bp, Homo sapien
aaagggcttggctaacgcaatgctt

SEQ ID NO: 3725369 - DNA, 25 bp, Homo sapien
gcttggctaacgcaatgctttcaaa

SEQ ID NO: 3725370 - DNA, 25 bp, Homo sapien
agctgagatatcatcagcttcaaag

SEQ ID NO: 3725371 - DNA, 25 bp, Homo sapien
tccaaggggaacaacaatagcagct

SEQ ID NO: 3725372 - DNA, 25 bp, Homo sapien
caaggggaacaacaatagcagctga

SEQ ID NO: 3725373 - DNA, 25 bp, Homo sapien
atagcagctgagatatcatcagctt

SEQ ID NO: 3725374 - DNA, 25 bp, Homo sapien
ttgctgatgagacgcttctgcaggg

SEQ ID NO: 3725375 - DNA, 25 bp, Homo sapien
gaggagcagctctttttcaaccacc

SEQ ID NO: 3725376 - DNA, 25 bp, Homo sapien
tggaggagcagctctttttcaacca

SEQ ID NO: 3725377 - DNA, 25 bp, Homo sapien
cagtcttgctgatgagacgcttctg

SEQ ID NO: 3725378 - DNA, 25 bp, Homo sapien
tcatgtcatctggttcctggcaggt

SEQ ID NO: 3725379 - DNA, 25 bp, Homo sapien
atgtcatctggttcctggcaggtaa

SEQ ID NO: 3725380 - DNA, 25 bp, Homo sapien
catgtcatctggttcctggcaggta

SEQ ID NO: 3725381 - DNA, 25 bp, Homo sapien
tccctcaaattctggttgcattcag

SEQ ID NO: 3725382 - DNA, 25 bp, Homo sapien
tcagttgtctgattactcctagata

SEQ ID NO: 3725383 - DNA, 25 bp, Homo sapien
gactttcatacgaatgtcaatagcc

SEQ ID NO: 3725384 - DNA, 25 bp, Homo sapien
ccttcaagagtttgtgggatgctaa

SEQ ID NO: 3725385 - DNA, 25 bp, Homo sapien
tgtcagctaaactgaactctgggcc

SEQ ID NO: 3725386 - DNA, 25 bp, Homo sapien
gaagatgtcagctaaactgaactct

SEQ ID NO: 3725387 - DNA, 25 bp, Homo sapien
aacgaagatgtcagctaaactgaac

SEQ ID NO: 3725388 - DNA, 25 bp, Homo sapien
ttataacgaagatgtcagctaaact

SEQ ID NO: 3725389 - DNA, 25 bp, Homo sapien
aaatcctaattgcacacataactct

SEQ ID NO: 3725390 - DNA, 25 bp, Homo sapien
gcaaaattacttccctctgtatata

SEQ ID NO: 3725391 - DNA, 25 bp, Homo sapien
cattcctcaactaaataatgtgttg

SEQ ID NO: 3725392 - DNA, 25 bp, Homo sapien
tgcacccagccgtaagcataattct

SEQ ID NO: 3725393 - DNA, 25 bp, Homo sapien
tgcaacagagactcattagctgtcc

SEQ ID NO: 3725394 - DNA, 25 bp, Homo sapien
tacaagggccaaccaagctcttcaa

SEQ ID NO: 3725395 - DNA, 25 bp, Homo sapien
tattgtctccataagccagcagtgg

SEQ ID NO: 3725396 - DNA, 25 bp, Homo sapien
tgtgcaatggtgtgtataataaccc

SEQ ID NO: 3725397 - DNA, 25 bp, Homo sapien
ctgacacagagtgaatgatgttgtc

SEQ ID NO: 3725398 - DNA, 25 bp, Homo sapien
gacacagagtgaatgatgttgtcat

SEQ ID NO: 3725399 - DNA, 25 bp, Homo sapien
tgacacagagtgaatgatgttgtca

SEQ ID NO: 3725400 - DNA, 25 bp, Homo sapien
tctgaataagccctgccatgtcctc

SEQ ID NO: 3725401 - DNA, 25 bp, Homo sapien
ctccccatctacaccatctgaataa

SEQ ID NO: 3725402 - DNA, 25 bp, Homo sapien
accatctgaataagccctgccatgt

SEQ ID NO: 3725403 - DNA, 25 bp, Homo sapien
catctacaccatctgaataagccct

SEQ ID NO: 3725404 - DNA, 25 bp, Homo sapien
aggctggcgggccaagacgtgcttt

SEQ ID NO: 3725405 - DNA, 25 bp, Homo sapien
gttccatgtagagtttctccttttc

SEQ ID NO: 3725406 - DNA, 25 bp, Homo sapien
gcgtgcgtcggtacagcttcagctg

SEQ ID NO: 3725407 - DNA, 25 bp, Homo sapien
tgcttcttgtcatgcagcgtgcgtc

SEQ ID NO: 3725408 - DNA, 25 bp, Homo sapien
ctcttcaaagcctgactatctgctt

SEQ ID NO: 3725409 - DNA, 25 bp, Homo sapien
ttgctgtgttcggtagctgctgctg

SEQ ID NO: 3725410 - DNA, 25 bp, Homo sapien
cttccttccattgctgtgttcggta

SEQ ID NO: 3725411 - DNA, 25 bp, Homo sapien
tccattgctgtgttcggtagctgct

SEQ ID NO: 3725412 - DNA, 25 bp, Homo sapien
tcaatttatgtgttttccagggttg

SEQ ID NO: 3725413 - DNA, 25 bp, Homo sapien
atgctgctgaatgcctatcccctct

SEQ ID NO: 3725414 - DNA, 25 bp, Homo sapien
tgctgaatgcctatcccctctttac

SEQ ID NO: 3725415 - DNA, 25 bp, Homo sapien
caatttatgtgttttccagggttgt

SEQ ID NO: 3725416 - DNA, 25 bp, Homo sapien
tttacgtttctgagcgaggtatttc

SEQ ID NO: 3725417 - DNA, 25 bp, Homo sapien
tgctctgtacttcatacatattcaa

SEQ ID NO: 3725418 - DNA, 25 bp, Homo sapien
ttctgagcgaggtatttcttcttta

SEQ ID NO: 3725419 - DNA, 25 bp, Homo sapien
gaagttgttctttacgtttctgagc

SEQ ID NO: 3725420 - DNA, 25 bp, Homo sapien
ccatttggtttgaccattaagaagg

SEQ ID NO: 3725421 - DNA, 25 bp, Homo sapien
gaccattaagaaggtgttatccatg

SEQ ID NO: 3725422 - DNA, 25 bp, Homo sapien
tggtttgaccattaagaaggtgtta

SEQ ID NO: 3725423 - DNA, 25 bp, Homo sapien
aaccaggaccatttggtttgaccat

SEQ ID NO: 3725424 - DNA, 25 bp, Homo sapien
gatctgttaatatcaacgtgaacca

SEQ ID NO: 3725425 - DNA, 25 bp, Homo sapien
tgtcccagagcagatttcatgagtt

SEQ ID NO: 3725426 - DNA, 25 bp, Homo sapien
tgatccaaggactttgagattcccc

SEQ ID NO: 3725427 - DNA, 25 bp, Homo sapien
tttgcttcatgcaataggtcagcct

SEQ ID NO: 3725428 - DNA, 25 bp, Homo sapien
cttttgtctaaccaaagtatggttg

SEQ ID NO: 3725429 - DNA, 25 bp, Homo sapien
aagtcttttgtctaaccaaagtatg

SEQ ID NO: 3725430 - DNA, 25 bp, Homo sapien
ttgtctaaccaaagtatggttggct

SEQ ID NO: 3725431 - DNA, 25 bp, Homo sapien
tgcaaaagtcttttgtctaaccaaa

SEQ ID NO: 3725432 - DNA, 25 bp, Homo sapien
cctgctctgttacatggagagacac

SEQ ID NO: 3725433 - DNA, 25 bp, Homo sapien
gaagatggaggatcaacttgttccc

SEQ ID NO: 3725434 - DNA, 25 bp, Homo sapien
agacacaggaaggagacggcagcca

SEQ ID NO: 3725435 - DNA, 25 bp, Homo sapien
gaaggctgaaagctctgactttgaa

SEQ ID NO: 3725436 - DNA, 25 bp, Homo sapien
gacgtgatggtactttggagaagaa

SEQ ID NO: 3725437 - DNA, 25 bp, Homo sapien
taacaagaggatttggatacacact

SEQ ID NO: 3725438 - DNA, 25 bp, Homo sapien
tcaaattgcactgagcaacgttctt

SEQ ID NO: 3725439 - DNA, 25 bp, Homo sapien
tccatagaagttaagaagacgtgat

SEQ ID NO: 3725440 - DNA, 25 bp, Homo sapien
taatagcaccataaaaggcccattg

SEQ ID NO: 3725441 - DNA, 25 bp, Homo sapien
gctccctgagggctaatttctcgga

SEQ ID NO: 3725442 - DNA, 25 bp, Homo sapien
gaaagctgcattaaactaatagcac

SEQ ID NO: 3725443 - DNA, 25 bp, Homo sapien
agatgtaattggtttgcaggacttc

SEQ ID NO: 3725444 - DNA, 25 bp, Homo sapien
tggccgatgaccacatgacacagag

SEQ ID NO: 3725445 - DNA, 25 bp, Homo sapien
gtacctggccgatgaccacatgaca

SEQ ID NO: 3725446 - DNA, 25 bp, Homo sapien
ccgatgaccacatgacacagaggag

SEQ ID NO: 3725447 - DNA, 25 bp, Homo sapien
cagtgtacctggccgatgaccacat

SEQ ID NO: 3725448 - DNA, 25 bp, Homo sapien
tctattcatgtctcccttaaaaatg

SEQ ID NO: 3725449 - DNA, 25 bp, Homo sapien
ctttctattcatgtctcccttaaaa

SEQ ID NO: 3725450 - DNA, 25 bp, Homo sapien
tatattctgcctaagatgtggccct

SEQ ID NO: 3725451 - DNA, 25 bp, Homo sapien
cagtcccagtatcctccagagaaac

SEQ ID NO: 3725452 - DNA, 25 bp, Homo sapien
gttttatctttatctgtctggaaca

SEQ ID NO: 3725453 - DNA, 25 bp, Homo sapien
ggctgttttatctttatctgtctgg

SEQ ID NO: 3725454 - DNA, 25 bp, Homo sapien
ctcggctgttttatctttatctgtc

SEQ ID NO: 3725455 - DNA, 25 bp, Homo sapien
ctgttttatctttatctgtctggaa

SEQ ID NO: 3725456 - DNA, 25 bp, Homo sapien
tcagatcatttgccagcgacactcc

SEQ ID NO: 3725457 - DNA, 25 bp, Homo sapien
agatcatttgccagcgacactccat

SEQ ID NO: 3725458 - DNA, 25 bp, Homo sapien
cagatcatttgccagcgacactcca

SEQ ID NO: 3725459 - DNA, 25 bp, Homo sapien
atcatttgccagcgacactccatct

SEQ ID NO: 3725460 - DNA, 25 bp, Homo sapien
cccaaggacactgccggcatattca

SEQ ID NO: 3725461 - DNA, 25 bp, Homo sapien
tgagcaaaccaaagaggtctcccgg

SEQ ID NO: 3725462 - DNA, 25 bp, Homo sapien
acccgatcccgcctgtatctgtgca

SEQ ID NO: 3725463 - DNA, 25 bp, Homo sapien
aaagtaccaggttcctagaatccat

SEQ ID NO: 3725464 - DNA, 25 bp, Homo sapien
aatgtagcactggattgtatcctac

SEQ ID NO: 3725465 - DNA, 25 bp, Homo sapien
tgagtgatttcatgggtagcagtca

SEQ ID NO: 3725466 - DNA, 25 bp, Homo sapien
ccagagtcacatatagtctgggcca

SEQ ID NO: 3725467 - DNA, 25 bp, Homo sapien
gtctgggccaccaaatgtagcactg

SEQ ID NO: 3725468 - DNA, 25 bp, Homo sapien
gagcggtcctcttctaaccctgagt

SEQ ID NO: 3725469 - DNA, 25 bp, Homo sapien
tcacatagtcctctggcaaagagac

SEQ ID NO: 3725470 - DNA, 25 bp, Homo sapien
caactcatggctggagagcggtcct

SEQ ID NO: 3725471 - DNA, 25 bp, Homo sapien
gagatctaaacccagccaactcatg

SEQ ID NO: 3725472 - DNA, 25 bp, Homo sapien
ataattccctggcaatcagacccca

SEQ ID NO: 3725473 - DNA, 25 bp, Homo sapien
taattccctggcaatcagaccccag

SEQ ID NO: 3725474 - DNA, 25 bp, Homo sapien
agactggacattgcataattccctg

SEQ ID NO: 3725475 - DNA, 25 bp, Homo sapien
tgcataattccctggcaatcagacc

SEQ ID NO: 3725476 - DNA, 25 bp, Homo sapien
ctgccacaaagacgggctgggttgt

SEQ ID NO: 3725477 - DNA, 25 bp, Homo sapien
tctgagcacttcttgtctgggagct

SEQ ID NO: 3725478 - DNA, 25 bp, Homo sapien
taaagccacaaccaaactggcagat

SEQ ID NO: 3725479 - DNA, 25 bp, Homo sapien
gcagatacctttgccaagccagtaa

SEQ ID NO: 3725480 - DNA, 25 bp, Homo sapien
gagatcactgtccagaaaaaggccc

SEQ ID NO: 3725481 - DNA, 25 bp, Homo sapien
agatcactgtccagaaaaaggccct

SEQ ID NO: 3725482 - DNA, 25 bp, Homo sapien
agagagatcactgtccagaaaaagg

SEQ ID NO: 3725483 - DNA, 25 bp, Homo sapien
cctggacacgcccagagaggatctg

SEQ ID NO: 3725484 - DNA, 25 bp, Homo sapien
ggtatgtccaagaacacttgatggg

SEQ ID NO: 3725485 - DNA, 25 bp, Homo sapien
cctgcagatgtggtgatatccagca

SEQ ID NO: 3725486 - DNA, 25 bp, Homo sapien
caggcttgcttgtaagctcacacgg

SEQ ID NO: 3725487 - DNA, 25 bp, Homo sapien
gctcacacggcatactctctgggta

SEQ ID NO: 3725488 - DNA, 25 bp, Homo sapien
tgaatactacttcgggcagcagctg

SEQ ID NO: 3725489 - DNA, 25 bp, Homo sapien
cctggcacctggaaagttcgtgggc

SEQ ID NO: 3725490 - DNA, 25 bp, Homo sapien
cattcatgatgcctcagtgggaggg

SEQ ID NO: 3725491 - DNA, 25 bp, Homo sapien
gctggcattgttggagggagttctt

SEQ ID NO: 3725492 - DNA, 25 bp, Homo sapien
gaagagttcaaagcctaattgaaca

SEQ ID NO: 3725493 - DNA, 25 bp, Homo sapien
agcctaattgaacaatgagggaacc

SEQ ID NO: 3725494 - DNA, 25 bp, Homo sapien
catttgaagagttcaaagcctaatt

SEQ ID NO: 3725495 - DNA, 25 bp, Homo sapien
ttcaaagcctaattgaacaatgagg

SEQ ID NO: 3725496 - DNA, 25 bp, Homo sapien
tctcctcctcagcaaaatcttggct

SEQ ID NO: 3725497 - DNA, 25 bp, Homo sapien
catactccatggatctccccactgt

SEQ ID NO: 3725498 - DNA, 25 bp, Homo sapien
cattttgtccagcaatggaggaaac

SEQ ID NO: 3725499 - DNA, 25 bp, Homo sapien
gctcatcacagggatctgtcaagtc

SEQ ID NO: 3725500 - DNA, 25 bp, Homo sapien
ttgtctgtgtttgcgaaggcctgga

SEQ ID NO: 3725501 - DNA, 25 bp, Homo sapien
ccttgtctgtgtttgcgaaggcctg

SEQ ID NO: 3725502 - DNA, 25 bp, Homo sapien
ctccttgtctgtgtttgcgaaggcc

SEQ ID NO: 3725503 - DNA, 25 bp, Homo sapien
tttctttataggtggcatctggctg

SEQ ID NO: 3725504 - DNA, 25 bp, Homo sapien
ctggggattgatgggctagtgcggg

SEQ ID NO: 3725505 - DNA, 25 bp, Homo sapien
ggattgatgggctagtgcggggagc

SEQ ID NO: 3725506 - DNA, 25 bp, Homo sapien
attgatgggctagtgcggggagcag

SEQ ID NO: 3725507 - DNA, 25 bp, Homo sapien
tgatgggctagtgcggggagcaggg

SEQ ID NO: 3725508 - DNA, 25 bp, Homo sapien
tcctgctttcaactaatacttaagg

SEQ ID NO: 3725509 - DNA, 25 bp, Homo sapien
tttcaactaatacttaaggagcgcc

SEQ ID NO: 3725510 - DNA, 25 bp, Homo sapien
tgctttcaactaatacttaaggagc

SEQ ID NO: 3725511 - DNA, 25 bp, Homo sapien
cccttcctgctttcaactaatactt

SEQ ID NO: 3725512 - DNA, 25 bp, Homo sapien
ttaatgctgacgatttggagactgg

SEQ ID NO: 3725513 - DNA, 25 bp, Homo sapien
cttcaggtaggacaatctgtacatc

SEQ ID NO: 3725514 - DNA, 25 bp, Homo sapien
caggtaggacaatctgtacatcatc

SEQ ID NO: 3725515 - DNA, 25 bp, Homo sapien
taatgctgacgatttggagactggg

SEQ ID NO: 3725516 - DNA, 25 bp, Homo sapien
gtgaaggcaattcctgatgcagacc

SEQ ID NO: 3725517 - DNA, 25 bp, Homo sapien
aatagcatgtcaatgcttcctgtcc

SEQ ID NO: 3725518 - DNA, 25 bp, Homo sapien
aagatgctgctccagcaatgacgcc

SEQ ID NO: 3725519 - DNA, 25 bp, Homo sapien
cagacctgcagcacaaatagcatgt

SEQ ID NO: 3725520 - DNA, 25 bp, Homo sapien
taacactgccgaacttaagcttgac

SEQ ID NO: 3725521 - DNA, 25 bp, Homo sapien
tataggaacatggacagttggtctc

SEQ ID NO: 3725522 - DNA, 25 bp, Homo sapien
ggtctcattggtcaaactccccatg

SEQ ID NO: 3725523 - DNA, 25 bp, Homo sapien
ggctgaaattcacgttcccatggat

SEQ ID NO: 3725524 - DNA, 25 bp, Homo sapien
cgaaaattaaccctaatctcctgag

SEQ ID NO: 3725525 - DNA, 25 bp, Homo sapien
ctttgcacccaagcctaccgaagtg

SEQ ID NO: 3725526 - DNA, 25 bp, Homo sapien
caaggaaaggttggcgacgtctaca

SEQ ID NO: 3725527 - DNA, 25 bp, Homo sapien
gccgggtgaaaagtcaagtatctgt

SEQ ID NO: 3725528 - DNA, 25 bp, Homo sapien
tgccagcgatggctttagcgacaag

SEQ ID NO: 3725529 - DNA, 25 bp, Homo sapien
ggaaatgccagcgatggctttagcg

SEQ ID NO: 3725530 - DNA, 25 bp, Homo sapien
aatgccagcgatggctttagcgaca

SEQ ID NO: 3725531 - DNA, 25 bp, Homo sapien
gccagcgatggctttagcgacaagc

SEQ ID NO: 3725532 - DNA, 25 bp, Homo sapien
tataatcagttgtctagcaagcatg

SEQ ID NO: 3725533 - DNA, 25 bp, Homo sapien
tagtccagtagatattgacaatgtc

SEQ ID NO: 3725534 - DNA, 25 bp, Homo sapien
actctgacagcattggctcctctga

SEQ ID NO: 3725535 - DNA, 25 bp, Homo sapien
aatggtccttggatgcactctgaca

SEQ ID NO: 3725536 - DNA, 25 bp, Homo sapien
ctagctcccgctcgcccgttctctt

SEQ ID NO: 3725537 - DNA, 25 bp, Homo sapien
ggctggcgcgcctcgccggtcctct

SEQ ID NO: 3725538 - DNA, 25 bp, Homo sapien
cgggaaggaggtggctccggctggc

SEQ ID NO: 3725539 - DNA, 25 bp, Homo sapien
tgccgagtgtgtggcgcccgccgag

SEQ ID NO: 3725540 - DNA, 25 bp, Homo sapien
cccgctgcggctaccgcggctcggg

SEQ ID NO: 3725541 - DNA, 25 bp, Homo sapien
ctctggaaccatcggccggagcagt

SEQ ID NO: 3725542 - DNA, 25 bp, Homo sapien
tgtcgcgtcccaagtgatctcggcg

SEQ ID NO: 3725543 - DNA, 25 bp, Homo sapien
ttgtgtcccgaccagtgcaccatgg

SEQ ID NO: 3725544 - DNA, 25 bp, Homo sapien
caggacccacgtcgacaagagtagg

SEQ ID NO: 3725545 - DNA, 25 bp, Homo sapien
aggctgggggccgacttggccgagc

SEQ ID NO: 3725546 - DNA, 25 bp, Homo sapien
ggccgacttggccgagcctccctct

SEQ ID NO: 3725547 - DNA, 25 bp, Homo sapien
ggcctctgctacggctttccagggc

SEQ ID NO: 3725548 - DNA, 25 bp, Homo sapien
tctgctacggctttccagggccgct

SEQ ID NO: 3725549 - DNA, 25 bp, Homo sapien
gcatgagcgctggatgggtgtggaa

SEQ ID NO: 3725550 - DNA, 25 bp, Homo sapien
ctggatgggtgtggaatttcgcttc

SEQ ID NO: 3725551 - DNA, 25 bp, Homo sapien
tggaatttcgcttcacgctttaaac

SEQ ID NO: 3725552 - DNA, 25 bp, Homo sapien
tgagggcgagcggtgtggcatgagc

SEQ ID NO: 3725553 - DNA, 25 bp, Homo sapien
actccgctcagggagccgtttgtgg

SEQ ID NO: 3725554 - DNA, 25 bp, Homo sapien
gacgcaatggtgaagtcgagagttt

SEQ ID NO: 3725555 - DNA, 25 bp, Homo sapien
ccgtttgtggcgcaggacgcaatgg

SEQ ID NO: 3725556 - DNA, 25 bp, Homo sapien
tctcggtacatccttgtccaggaga

SEQ ID NO: 3725557 - DNA, 25 bp, Homo sapien
gccagaccgggctcaacgacgccac

SEQ ID NO: 3725558 - DNA, 25 bp, Homo sapien
gcgcccagttcggaatgccggagta

SEQ ID NO: 3725559 - DNA, 25 bp, Homo sapien
cagtcgggcgcccagttcggaatgc

SEQ ID NO: 3725560 - DNA, 25 bp, Homo sapien
ttcggaatgccggagtaggccagac

SEQ ID NO: 3725561 - DNA, 25 bp, Homo sapien
aatctggctctagtagggaccgcgg

SEQ ID NO: 3725562 - DNA, 25 bp, Homo sapien
aggttctgatctgaaccatggagcc

SEQ ID NO: 3725563 - DNA, 25 bp, Homo sapien
ccaacgccaggttctgatctgaacc

SEQ ID NO: 3725564 - DNA, 25 bp, Homo sapien
caaatctggctctagtagggaccgc

SEQ ID NO: 3725565 - DNA, 25 bp, Homo sapien
cagggagcacgggccagacctgccc

SEQ ID NO: 3725566 - DNA, 25 bp, Homo sapien
agggagcacgggccagacctgcccc

SEQ ID NO: 3725567 - DNA, 25 bp, Homo sapien
gaggcagttattccccagattggag

SEQ ID NO: 3725568 - DNA, 25 bp, Homo sapien
cacctgtggtgctcttgcatgggca

SEQ ID NO: 3725569 - DNA, 25 bp, Homo sapien
tggccaagagcacaaccaataagtc

SEQ ID NO: 3725570 - DNA, 25 bp, Homo sapien
gcccctttggccgtcatttgactga

SEQ ID NO: 3725571 - DNA, 25 bp, Homo sapien
tgtttttgaaacactctctaaccca

SEQ ID NO: 3725572 - DNA, 25 bp, Homo sapien
cctctgggtgtttttgaaacactct

SEQ ID NO: 3725573 - DNA, 25 bp, Homo sapien
ctctaacccattaatcaccaggatt

SEQ ID NO: 3725574 - DNA, 25 bp, Homo sapien
tctaacccattaatcaccaggattc

SEQ ID NO: 3725575 - DNA, 25 bp, Homo sapien
aatcgctgccacttcgagtgcgctg

SEQ ID NO: 3725576 - DNA, 25 bp, Homo sapien
ctgcaaatcgctgccacttcgagtg

SEQ ID NO: 3725577 - DNA, 25 bp, Homo sapien
gcctgcaaatcgctgccacttcgag

SEQ ID NO: 3725578 - DNA, 25 bp, Homo sapien
gcaaatcgctgccacttcgagtgcg

SEQ ID NO: 3725579 - DNA, 25 bp, Homo sapien
ttcaaacttactgcagaatcctcct

SEQ ID NO: 3725580 - DNA, 25 bp, Homo sapien
tcaaacttactgcagaatcctcctt

SEQ ID NO: 3725581 - DNA, 25 bp, Homo sapien
ctatggtgaaatagcatattcttta

SEQ ID NO: 3725582 - DNA, 25 bp, Homo sapien
atggtgaaatagcatattctttatc

SEQ ID NO: 3725583 - DNA, 25 bp, Homo sapien
tggtgaaatagcatattctttatct

SEQ ID NO: 3725584 - DNA, 25 bp, Homo sapien
gtgaaatagcatattctttatcttc

SEQ ID NO: 3725585 - DNA, 25 bp, Homo sapien
gccctggtcacctctaattgggttg

SEQ ID NO: 3725586 - DNA, 25 bp, Homo sapien
cagaagccaaaaggccaatgccttt

SEQ ID NO: 3725587 - DNA, 25 bp, Homo sapien
ccaagaaagccaagggttagatgtt

SEQ ID NO: 3725588 - DNA, 25 bp, Homo sapien
taataactgggtaattgctgaccgg

SEQ ID NO: 3725589 - DNA, 25 bp, Homo sapien
gaagccactgcaccacgtggaaaag

SEQ ID NO: 3725590 - DNA, 25 bp, Homo sapien
tagtcaccgggaggtacaggcagct

SEQ ID NO: 3725591 - DNA, 25 bp, Homo sapien
gccactgcaccacgtggaaaaggag

SEQ ID NO: 3725592 - DNA, 25 bp, Homo sapien
atcctcatagtcaccgggaggtaca

SEQ ID NO: 3725593 - DNA, 25 bp, Homo sapien
gtctttcccatccacagcggccact

SEQ ID NO: 3725594 - DNA, 25 bp, Homo sapien
tcataatagaaaaagccccagccat

SEQ ID NO: 3725595 - DNA, 25 bp, Homo sapien
ggctcttcatcactttggcttcata

SEQ ID NO: 3725596 - DNA, 25 bp, Homo sapien
cactccctgtattgctgtttgtctt

SEQ ID NO: 3725597 - DNA, 25 bp, Homo sapien
catctacactgaaccgcaatgcatc

SEQ ID NO: 3725598 - DNA, 25 bp, Homo sapien
gatcccatctacactgaaccgcaat

SEQ ID NO: 3725599 - DNA, 25 bp, Homo sapien
cactgaaccgcaatgcatcattcat

SEQ ID NO: 3725600 - DNA, 25 bp, Homo sapien
cttcaaagatcccatctacactgaa

SEQ ID NO: 3725601 - DNA, 25 bp, Homo sapien
catgggcctcataatgcagaccagg

SEQ ID NO: 3725602 - DNA, 25 bp, Homo sapien
aacacttgctccattccatgggcct

SEQ ID NO: 3725603 - DNA, 25 bp, Homo sapien
attccatgggcctcataatgcagac

SEQ ID NO: 3725604 - DNA, 25 bp, Homo sapien
tgggcctcataatgcagaccaggat

SEQ ID NO: 3725605 - DNA, 25 bp, Homo sapien
aagatggctgatagagcttcttcat

SEQ ID NO: 3725606 - DNA, 25 bp, Homo sapien
cataagatggctgatagagcttctt

SEQ ID NO: 3725607 - DNA, 25 bp, Homo sapien
taagatggctgatagagcttcttca

SEQ ID NO: 3725608 - DNA, 25 bp, Homo sapien
ttcataagatggctgatagagcttc

SEQ ID NO: 3725609 - DNA, 25 bp, Homo sapien
tccaagttggtgaaagtactgaggc

SEQ ID NO: 3725610 - DNA, 25 bp, Homo sapien
tgggccccttcaagatgactgtaga

SEQ ID NO: 3725611 - DNA, 25 bp, Homo sapien
ctctgggcatggtgaattcttgggt

SEQ ID NO: 3725612 - DNA, 25 bp, Homo sapien
tgtgctcataagtagtgtgggcccc

SEQ ID NO: 3725613 - DNA, 25 bp, Homo sapien
tgctcatggcctaggttctccctgt

SEQ ID NO: 3725614 - DNA, 25 bp, Homo sapien
gagaggctcctttcctagattacta

SEQ ID NO: 3725615 - DNA, 25 bp, Homo sapien
tactcatctgcctattggccctgca

SEQ ID NO: 3725616 - DNA, 25 bp, Homo sapien
tctccctgtgccctattttgtcgtt

SEQ ID NO: 3725617 - DNA, 25 bp, Homo sapien
gcaggcacacacacttccctttctt

SEQ ID NO: 3725618 - DNA, 25 bp, Homo sapien
cacacttccctttcttctggagctt

SEQ ID NO: 3725619 - DNA, 25 bp, Homo sapien
acacacacttccctttcttctggag

SEQ ID NO: 3725620 - DNA, 25 bp, Homo sapien
ggcacacacacttccctttcttctg

SEQ ID NO: 3725621 - DNA, 25 bp, Homo sapien
tcaggggctgtctctgctgatcctg

SEQ ID NO: 3725622 - DNA, 25 bp, Homo sapien
caggggctgtctctgctgatcctgc

SEQ ID NO: 3725623 - DNA, 25 bp, Homo sapien
ttcaggggctgtctctgctgatcct

SEQ ID NO: 3725624 - DNA, 25 bp, Homo sapien
ccatccaagttcattttgcctggtg

SEQ ID NO: 3725625 - DNA, 25 bp, Homo sapien
tttgtgtggacacgcactgacagcc

SEQ ID NO: 3725626 - DNA, 25 bp, Homo sapien
ggtgtgtgatccaaccctcttgtct

SEQ ID NO: 3725627 - DNA, 25 bp, Homo sapien
tccctgcatgccaatgcttgctttg

SEQ ID NO: 3725628 - DNA, 25 bp, Homo sapien
tttctgcctgtccattactccatcc

SEQ ID NO: 3725629 - DNA, 25 bp, Homo sapien
cagaccacggcttaattctctccaa

SEQ ID NO: 3725630 - DNA, 25 bp, Homo sapien
ttaggtaggagtctgagctcatacc

SEQ ID NO: 3725631 - DNA, 25 bp, Homo sapien
tctccaaaggtgtaccattaggtag

SEQ ID NO: 3725632 - DNA, 25 bp, Homo sapien
cttgatagagagtgacagtatcctc

SEQ ID NO: 3725633 - DNA, 25 bp, Homo sapien
attacccagagaaggtttagcaact

SEQ ID NO: 3725634 - DNA, 25 bp, Homo sapien
tctttcttgatagagagtgacagta

SEQ ID NO: 3725635 - DNA, 25 bp, Homo sapien
atggaacttcatgaatctctttctt

SEQ ID NO: 3725636 - DNA, 25 bp, Homo sapien
gagtccagaacccaactgacccaca

SEQ ID NO: 3725637 - DNA, 25 bp, Homo sapien
gcccattgcacagcatgagtttaca

SEQ ID NO: 3725638 - DNA, 25 bp, Homo sapien
cagtgcccattgcacagcatgagtt

SEQ ID NO: 3725639 - DNA, 25 bp, Homo sapien
actgacccacagtacgagaatgtct

SEQ ID NO: 3725640 - DNA, 25 bp, Homo sapien
tgtgtagccctccttaacctgctgc

SEQ ID NO: 3725641 - DNA, 25 bp, Homo sapien
tgctgccttccaagattatccgtat

SEQ ID NO: 3725642 - DNA, 25 bp, Homo sapien
tatccgtattggaactaacaagtcc

SEQ ID NO: 3725643 - DNA, 25 bp, Homo sapien
tgctgtggtctttaaatgtgtagcc

SEQ ID NO: 3725644 - DNA, 25 bp, Homo sapien
tccatagtgaactctcagtcacgct

SEQ ID NO: 3725645 - DNA, 25 bp, Homo sapien
tctcagtcacgctgcccaggttgaa

SEQ ID NO: 3725646 - DNA, 25 bp, Homo sapien
caggttgaagtcatacagcttcgtc

SEQ ID NO: 3725647 - DNA, 25 bp, Homo sapien
tacagcttcgtcaggataagtatga

SEQ ID NO: 3725648 - DNA, 25 bp, Homo sapien
tctcttagataggatggccaggtaa

SEQ ID NO: 3725649 - DNA, 25 bp, Homo sapien
gaggaaccatgctgtgtgagaaaaa

SEQ ID NO: 3725650 - DNA, 25 bp, Homo sapien
taaaatggctgcaagtggtactatt

SEQ ID NO: 3725651 - DNA, 25 bp, Homo sapien
tataacaagtgctcaacaagggact

SEQ ID NO: 3725652 - DNA, 25 bp, Homo sapien
cattaaatatgggtttcctgatgtt

SEQ ID NO: 3725653 - DNA, 25 bp, Homo sapien
cagtggaaccagtatgctagcatct

SEQ ID NO: 3725654 - DNA, 25 bp, Homo sapien
gatgttatcggggaatgtaattcct

SEQ ID NO: 3725655 - DNA, 25 bp, Homo sapien
tcagtggaaccagtatgctagcatc

SEQ ID NO: 3725656 - DNA, 25 bp, Homo sapien
gagagcatcgtatcggctttctggg

SEQ ID NO: 3725657 - DNA, 25 bp, Homo sapien
cactctcagagagcatcgtatcggc

SEQ ID NO: 3725658 - DNA, 25 bp, Homo sapien
tttgtcactctcagagagcatcgta

SEQ ID NO: 3725659 - DNA, 25 bp, Homo sapien
tcgtatcggctttctgggaccacat

SEQ ID NO: 3725660 - DNA, 25 bp, Homo sapien
ttttgttggttggattgacatagag

SEQ ID NO: 3725661 - DNA, 25 bp, Homo sapien
cataggtggtgccataatctgtcga

SEQ ID NO: 3725662 - DNA, 25 bp, Homo sapien
caaacccactttgtcattcagcttt

SEQ ID NO: 3725663 - DNA, 25 bp, Homo sapien
ggattgacatagaggtaactgagga

SEQ ID NO: 3725664 - DNA, 25 bp, Homo sapien
cacttgaatatgccacatgctgcca

SEQ ID NO: 3725665 - DNA, 25 bp, Homo sapien
acttgaatatgccacatgctgccaa

SEQ ID NO: 3725666 - DNA, 25 bp, Homo sapien
catcccagtagtaacaatctttctg

SEQ ID NO: 3725667 - DNA, 25 bp, Homo sapien
ccagcagccactgcggtcagcacta

SEQ ID NO: 3725668 - DNA, 25 bp, Homo sapien
tccatcccagtagtaacaatctttc

SEQ ID NO: 3725669 - DNA, 25 bp, Homo sapien
tgcggtcagcactaaaggcacagcc

SEQ ID NO: 3725670 - DNA, 25 bp, Homo sapien
gaaactcctagaccggtgtctgccc

SEQ ID NO: 3725671 - DNA, 25 bp, Homo sapien
gctttcttagccctaatgggatctg

SEQ ID NO: 3725672 - DNA, 25 bp, Homo sapien
gaagcacattcgcagccattccatt

SEQ ID NO: 3725673 - DNA, 25 bp, Homo sapien
gctgggtcacacttgcgaaggcaga

SEQ ID NO: 3725674 - DNA, 25 bp, Homo sapien
tggaccaggaaagcagatctgggaa

SEQ ID NO: 3725675 - DNA, 25 bp, Homo sapien
ctggaccaggaaagcagatctggga

SEQ ID NO: 3725676 - DNA, 25 bp, Homo sapien
cagatctgggaagctgggataaaac

SEQ ID NO: 3725677 - DNA, 25 bp, Homo sapien
aagcagatctgggaagctgggataa

SEQ ID NO: 3725678 - DNA, 25 bp, Homo sapien
aaggtgggtccagaatgcagtagcc

SEQ ID NO: 3725679 - DNA, 25 bp, Homo sapien
taatcctatagcagtgacaggagag

SEQ ID NO: 3725680 - DNA, 25 bp, Homo sapien
gtataactatcacagctggaagcca

SEQ ID NO: 3725681 - DNA, 25 bp, Homo sapien
cctccagccagaggtactagactct

SEQ ID NO: 3725682 - DNA, 25 bp, Homo sapien
caagagtgcgatgaaagcatcaaaa

SEQ ID NO: 3725683 - DNA, 25 bp, Homo sapien
ggtaaacaagagtgcgatgaaagca

SEQ ID NO: 3725684 - DNA, 25 bp, Homo sapien
ggaggtaaacaagagtgcgatgaaa

SEQ ID NO: 3725685 - DNA, 25 bp, Homo sapien
cgatgaaagcatcaaaaagggagta

SEQ ID NO: 3725686 - DNA, 25 bp, Homo sapien
tggaatatgtaattcagcagagcct

SEQ ID NO: 3725687 - DNA, 25 bp, Homo sapien
tccttgcagaatggaggaaactgcc

SEQ ID NO: 3725688 - DNA, 25 bp, Homo sapien
cagagagtgtggaagactcacagta

SEQ ID NO: 3725689 - DNA, 25 bp, Homo sapien
ggaaactgccagtgcctggtagccc

SEQ ID NO: 3725690 - DNA, 25 bp, Homo sapien
gccacagcccactgttgccatttat

SEQ ID NO: 3725691 - DNA, 25 bp, Homo sapien
ccacagcccactgttgccatttata

SEQ ID NO: 3725692 - DNA, 25 bp, Homo sapien
acagcccactgttgccatttataat

SEQ ID NO: 3725693 - DNA, 25 bp, Homo sapien
cacagcccactgttgccatttataa

SEQ ID NO: 3725694 - DNA, 25 bp, Homo sapien
gcatccaagttgctactgtgcacat

SEQ ID NO: 3725695 - DNA, 25 bp, Homo sapien
gggaccccagaattaagaatcactg

SEQ ID NO: 3725696 - DNA, 25 bp, Homo sapien
aaggcgtttgttgcttcaagcatcc

SEQ ID NO: 3725697 - DNA, 25 bp, Homo sapien
gcttcaagcatccaagttgctactg

SEQ ID NO: 3725698 - DNA, 25 bp, Homo sapien
gccagccaaggcattaccagttgca

SEQ ID NO: 3725699 - DNA, 25 bp, Homo sapien
tctgccagccaaggcattaccagtt

SEQ ID NO: 3725700 - DNA, 25 bp, Homo sapien
cagccaaggcattaccagttgcata

SEQ ID NO: 3725701 - DNA, 25 bp, Homo sapien
agccaaggcattaccagttgcatat

SEQ ID NO: 3725702 - DNA, 25 bp, Homo sapien
aggtcgccccttcgtctgagctgat

SEQ ID NO: 3725703 - DNA, 25 bp, Homo sapien
aggctctggatatagaaggtgagcc

SEQ ID NO: 3725704 - DNA, 25 bp, Homo sapien
aaactgtaggccagcacccagtcct

SEQ ID NO: 3725705 - DNA, 25 bp, Homo sapien
aaggtgagccgatacttctgatagg

SEQ ID NO: 3725706 - DNA, 25 bp, Homo sapien
tggatgacaagaagtaaatgaaaat

SEQ ID NO: 3725707 - DNA, 25 bp, Homo sapien
gacaagaagtaaatgaaaatagtat

SEQ ID NO: 3725708 - DNA, 25 bp, Homo sapien
tgacaagaagtaaatgaaaatagta

SEQ ID NO: 3725709 - DNA, 25 bp, Homo sapien
gatgacaagaagtaaatgaaaatag

SEQ ID NO: 3725710 - DNA, 25 bp, Homo sapien
acattattacataatagtttggcat

SEQ ID NO: 3725711 - DNA, 25 bp, Homo sapien
atttcaaccaaggttgttctgtgga

SEQ ID NO: 3725712 - DNA, 25 bp, Homo sapien
caaggttgttctgtggatatctcta

SEQ ID NO: 3725713 - DNA, 25 bp, Homo sapien
tggatatctctatgtaagacagtgc

SEQ ID NO: 3725714 - DNA, 25 bp, Homo sapien
ttcatacaatatccacttgatgcca

SEQ ID NO: 3725715 - DNA, 25 bp, Homo sapien
tcatacaatatccacttgatgccat

SEQ ID NO: 3725716 - DNA, 25 bp, Homo sapien
tttgatgctgcagttaccttaatac

SEQ ID NO: 3725717 - DNA, 25 bp, Homo sapien
cttaatactagcacttttcattttc

SEQ ID NO: 3725718 - DNA, 25 bp, Homo sapien
gcagttaccttaatactagcacttt

SEQ ID NO: 3725719 - DNA, 25 bp, Homo sapien
gccttcatgcatgcacatcagagaa

SEQ ID NO: 3725720 - DNA, 25 bp, Homo sapien
atctcacacctcttccagggatcat

SEQ ID NO: 3725721 - DNA, 25 bp, Homo sapien
atccccgctggatctccctccactg

SEQ ID NO: 3725722 - DNA, 25 bp, Homo sapien
tcaacatccacacatccccgctgga

SEQ ID NO: 3725723 - DNA, 25 bp, Homo sapien
gtgagggcagaagtttgtacttgct

SEQ ID NO: 3725724 - DNA, 25 bp, Homo sapien
tatttgtctgtattcatagttctcc

SEQ ID NO: 3725725 - DNA, 25 bp, Homo sapien
atttgtctgtattcatagttctcct

SEQ ID NO: 3725726 - DNA, 25 bp, Homo sapien
gtctgtgtgcactggttgctattac

SEQ ID NO: 3725727 - DNA, 25 bp, Homo sapien
ggttgctattacagtgcaatctctc

SEQ ID NO: 3725728 - DNA, 25 bp, Homo sapien
gatgtattcctttaattaaagtgtg

SEQ ID NO: 3725729 - DNA, 25 bp, Homo sapien
cagtgcaatctctcatgtttattga

SEQ ID NO: 3725730 - DNA, 25 bp, Homo sapien
tctttgcattgactaaaatgctgaa

SEQ ID NO: 3725731 - DNA, 25 bp, Homo sapien
ctttgcattgactaaaatgctgaaa

SEQ ID NO: 3725732 - DNA, 25 bp, Homo sapien
aaatacagaattgccaagatggcat

SEQ ID NO: 3725733 - DNA, 25 bp, Homo sapien
tgaaaatacagaattgccaagatgg

SEQ ID NO: 3725734 - DNA, 25 bp, Homo sapien
cccatcatttggatgtgctcactct

SEQ ID NO: 3725735 - DNA, 25 bp, Homo sapien
cacaagtttctattggacccatcat

SEQ ID NO: 3725736 - DNA, 25 bp, Homo sapien
attgtccccaggcgaggaacacaag

SEQ ID NO: 3725737 - DNA, 25 bp, Homo sapien
gcgaggaacacaagtttctattgga

SEQ ID NO: 3725738 - DNA, 25 bp, Homo sapien
agacatggcaagactggagatcagc

SEQ ID NO: 3725739 - DNA, 25 bp, Homo sapien
acatggcaagactggagatcagcat

SEQ ID NO: 3725740 - DNA, 25 bp, Homo sapien
tttgcaaagacatggcaagactgga

SEQ ID NO: 3725741 - DNA, 25 bp, Homo sapien
gcaaagacatggcaagactggagat

SEQ ID NO: 3725742 - DNA, 25 bp, Homo sapien
ctcaaaaccattctaactgccaatg

SEQ ID NO: 3725743 - DNA, 25 bp, Homo sapien
cttggccttaagacagagatctttt

SEQ ID NO: 3725744 - DNA, 25 bp, Homo sapien
gactgtttccactcaaaaccattct

SEQ ID NO: 3725745 - DNA, 25 bp, Homo sapien
agaagccacggctttgacaaaggag

SEQ ID NO: 3725746 - DNA, 25 bp, Homo sapien
gtttcatcacggacgacctggtggt

SEQ ID NO: 3725747 - DNA, 25 bp, Homo sapien
tgctgggtcacccttgagagcagca

SEQ ID NO: 3725748 - DNA, 25 bp, Homo sapien
aaaaccatgagggtcacactgacac

SEQ ID NO: 3725749 - DNA, 25 bp, Homo sapien
tgaaacaggccaggtaaaaaccatg

SEQ ID NO: 3725750 - DNA, 25 bp, Homo sapien
aaacccaacatgattgtgtcttcct

SEQ ID NO: 3725751 - DNA, 25 bp, Homo sapien
aacccaacatgattgtgtcttcctc

SEQ ID NO: 3725752 - DNA, 25 bp, Homo sapien
caataaaacctgttgggtgtgatgc

SEQ ID NO: 3725753 - DNA, 25 bp, Homo sapien
ggtgtgatgcgttcatgcatgagtt

SEQ ID NO: 3725754 - DNA, 25 bp, Homo sapien
ccgtcttccaaagtccatggagctg

SEQ ID NO: 3725755 - DNA, 25 bp, Homo sapien
catgcatgagttgccaccgtcttcc

SEQ ID NO: 3725756 - DNA, 25 bp, Homo sapien
atgcaaattacaatttcggaagcag

SEQ ID NO: 3725757 - DNA, 25 bp, Homo sapien
catgcaaattacaatttcggaagca

SEQ ID NO: 3725758 - DNA, 25 bp, Homo sapien
caagggtccggcatgtcttgacttc

SEQ ID NO: 3725759 - DNA, 25 bp, Homo sapien
cagtgccatggctaactaccacgtg

SEQ ID NO: 3725760 - DNA, 25 bp, Homo sapien
taccacgtgcaccatatgaacactg

SEQ ID NO: 3725761 - DNA, 25 bp, Homo sapien
aggtactcagcataatcatcaaggg

SEQ ID NO: 3725762 - DNA, 25 bp, Homo sapien
ccatccaaaatgctaagtctgcaga

SEQ ID NO: 3725763 - DNA, 25 bp, Homo sapien
ctccttgcatccatccaaaatgcta

SEQ ID NO: 3725764 - DNA, 25 bp, Homo sapien
tgcatccatccaaaatgctaagtct

SEQ ID NO: 3725765 - DNA, 25 bp, Homo sapien
catccatccaaaatgctaagtctgc

SEQ ID NO: 3725766 - DNA, 25 bp, Homo sapien
taatagctgttccatcacatgagag

SEQ ID NO: 3725767 - DNA, 25 bp, Homo sapien
tccaaggagcaggtcaagatggacc

SEQ ID NO: 3725768 - DNA, 25 bp, Homo sapien
cacatgagagtagtgacagcctttc

SEQ ID NO: 3725769 - DNA, 25 bp, Homo sapien
ggaccaataccaggaagctcgtgtg

SEQ ID NO: 3725770 - DNA, 25 bp, Homo sapien
gcccagtcttcctggtgtagaaagc

SEQ ID NO: 3725771 - DNA, 25 bp, Homo sapien
tcctggtgtagaaagctaaacctgg

SEQ ID NO: 3725772 - DNA, 25 bp, Homo sapien
acatagagctcatgtcacaagccca

SEQ ID NO: 3725773 - DNA, 25 bp, Homo sapien
ctggaacctgcacatagagctcatg

SEQ ID NO: 3725774 - DNA, 25 bp, Homo sapien
ccagccacgacagtcctcaagagag

SEQ ID NO: 3725775 - DNA, 25 bp, Homo sapien
gagctggacgctacaacctcagaaa

SEQ ID NO: 3725776 - DNA, 25 bp, Homo sapien
acttcttgggaaccataaccgctca

SEQ ID NO: 3725777 - DNA, 25 bp, Homo sapien
ttgggaaccataaccgctcacccag

SEQ ID NO: 3725778 - DNA, 25 bp, Homo sapien
atgtgcaccaggtccgcctccttat

SEQ ID NO: 3725779 - DNA, 25 bp, Homo sapien
tccatgtgcaccaggtccgcctcct

SEQ ID NO: 3725780 - DNA, 25 bp, Homo sapien
aggtccgcctccttatccaatccgg

SEQ ID NO: 3725781 - DNA, 25 bp, Homo sapien
ctccttatccaatccggccaccgac

SEQ ID NO: 3725782 - DNA, 25 bp, Homo sapien
cactggtaatcaaaggtacacacag

SEQ ID NO: 3725783 - DNA, 25 bp, Homo sapien
gacaccttcttattcccacacactg

SEQ ID NO: 3725784 - DNA, 25 bp, Homo sapien
gccctttgcactggtaatcaaaggt

SEQ ID NO: 3725785 - DNA, 25 bp, Homo sapien
acacacagggggacaccttcttatt

SEQ ID NO: 3725786 - DNA, 25 bp, Homo sapien
tcggcacattcctggatcctgcagg

SEQ ID NO: 3725787 - DNA, 25 bp, Homo sapien
ggcaaaaggcccacttctagttgtc

SEQ ID NO: 3725788 - DNA, 25 bp, Homo sapien
atgtcaatggagcgggcaaaaggcc

SEQ ID NO: 3725789 - DNA, 25 bp, Homo sapien
gaagatatattcatcctggacaacc

SEQ ID NO: 3725790 - DNA, 25 bp, Homo sapien
atggcaatccaatggaaggattcag

SEQ ID NO: 3725791 - DNA, 25 bp, Homo sapien
cagacagctcctgtgctataaaatg

SEQ ID NO: 3725792 - DNA, 25 bp, Homo sapien
agacagctcctgtgctataaaatgg

SEQ ID NO: 3725793 - DNA, 25 bp, Homo sapien
ggattcagtgcatcactaaaaccag

SEQ ID NO: 3725794 - DNA, 25 bp, Homo sapien
cagaccaagtgcttgtacagcagct

SEQ ID NO: 3725795 - DNA, 25 bp, Homo sapien
gcttgggctgtggagctattctctg

SEQ ID NO: 3725796 - DNA, 25 bp, Homo sapien
ctctgtgccattgatcacaaagaca

SEQ ID NO: 3725797 - DNA, 25 bp, Homo sapien
ttgggctgtggagctattctctgtg

SEQ ID NO: 3725798 - DNA, 25 bp, Homo sapien
aatgttcttttcaatagacatggag

SEQ ID NO: 3725799 - DNA, 25 bp, Homo sapien
tcttttcaatagacatggagctgac

SEQ ID NO: 3725800 - DNA, 25 bp, Homo sapien
tgttcttttcaatagacatggagct

SEQ ID NO: 3725801 - DNA, 25 bp, Homo sapien
ttcttttcaatagacatggagctga

SEQ ID NO: 3725802 - DNA, 25 bp, Homo sapien
attatttgctctgggcccatccgtc

SEQ ID NO: 3725803 - DNA, 25 bp, Homo sapien
gatgaatgtcatccaattatttgct

SEQ ID NO: 3725804 - DNA, 25 bp, Homo sapien
catccaattatttgctctgggccca

SEQ ID NO: 3725805 - DNA, 25 bp, Homo sapien
ttgctggcattgtaaatcccaaaga

SEQ ID NO: 3725806 - DNA, 25 bp, Homo sapien
catgggaaagcagaccagcatccga

SEQ ID NO: 3725807 - DNA, 25 bp, Homo sapien
agcagaccagcatccgagaaggcaa

SEQ ID NO: 3725808 - DNA, 25 bp, Homo sapien
ggaaagcagaccagcatccgagaag

SEQ ID NO: 3725809 - DNA, 25 bp, Homo sapien
gaccagcatccgagaaggcaagtcc

SEQ ID NO: 3725810 - DNA, 25 bp, Homo sapien
tttggcaacgagtacttaggcagct

SEQ ID NO: 3725811 - DNA, 25 bp, Homo sapien
cgataagacacgtagtagctggctc

SEQ ID NO: 3725812 - DNA, 25 bp, Homo sapien
ggcctctcttcgataagacacgtag

SEQ ID NO: 3725813 - DNA, 25 bp, Homo sapien
tgagcaaaggcctctcttcgataag

SEQ ID NO: 3725814 - DNA, 25 bp, Homo sapien
gagggacccaggaccgctagtggtg

SEQ ID NO: 3725815 - DNA, 25 bp, Homo sapien
acccaggaccgctagtggtgcatgc

SEQ ID NO: 3725816 - DNA, 25 bp, Homo sapien
agggacccaggaccgctagtggtgc

SEQ ID NO: 3725817 - DNA, 25 bp, Homo sapien
ggacccaggaccgctagtggtgcat

SEQ ID NO: 3725818 - DNA, 25 bp, Homo sapien
agccacactgtccaggggagtgaat

SEQ ID NO: 3725819 - DNA, 25 bp, Homo sapien
tgtccaggggagtgaatggttggtt

SEQ ID NO: 3725820 - DNA, 25 bp, Homo sapien
ctgcagccacactgtccaggggagt

SEQ ID NO: 3725821 - DNA, 25 bp, Homo sapien
tgcagccacactgtccaggggagtg

SEQ ID NO: 3725822 - DNA, 25 bp, Homo sapien
tggtgtggaatgaatgccgaagaac

SEQ ID NO: 3725823 - DNA, 25 bp, Homo sapien
gaagtcgtgttgtgttggtgtggaa

SEQ ID NO: 3725824 - DNA, 25 bp, Homo sapien
aatgccgaagaacccagtaggaggg

SEQ ID NO: 3725825 - DNA, 25 bp, Homo sapien
tcttaaaaaccgtgtgatgaagtcg

SEQ ID NO: 3725826 - DNA, 25 bp, Homo sapien
gttcctgctgagctgcttgaaaatg

SEQ ID NO: 3725827 - DNA, 25 bp, Homo sapien
cttgtagaattacaggttcctgctg

SEQ ID NO: 3725828 - DNA, 25 bp, Homo sapien
tgctgagctgcttgaaaatgggaaa

SEQ ID NO: 3725829 - DNA, 25 bp, Homo sapien
cctgctgagctgcttgaaaatggga

SEQ ID NO: 3725830 - DNA, 25 bp, Homo sapien
ggagtaaacccatttgatttggaca

SEQ ID NO: 3725831 - DNA, 25 bp, Homo sapien
gagtaaacccatttgatttggacaa

SEQ ID NO: 3725832 - DNA, 25 bp, Homo sapien
aaagaagatggaaggcttgtaaggc

SEQ ID NO: 3725833 - DNA, 25 bp, Homo sapien
ctgaaagaagatggaaggcttgtaa

SEQ ID NO: 3725834 - DNA, 25 bp, Homo sapien
aagaagatggaaggcttgtaaggca

SEQ ID NO: 3725835 - DNA, 25 bp, Homo sapien
aagatggaaggcttgtaaggcagca

SEQ ID NO: 3725836 - DNA, 25 bp, Homo sapien
tcttggaccgcagcaaatacttggt

SEQ ID NO: 3725837 - DNA, 25 bp, Homo sapien
aagtaaatcccacgcgtgtctgaga

SEQ ID NO: 3725838 - DNA, 25 bp, Homo sapien
gctcttgatgttctccatggccaga

SEQ ID NO: 3725839 - DNA, 25 bp, Homo sapien
gatgttccccattagacctctgctg

SEQ ID NO: 3725840 - DNA, 25 bp, Homo sapien
tagatgtcggcatctggtggaatct

SEQ ID NO: 3725841 - DNA, 25 bp, Homo sapien
ccaccactgatattcgcttttattt

SEQ ID NO: 3725842 - DNA, 25 bp, Homo sapien
cctgcatagatgtcggcatctggtg

SEQ ID NO: 3725843 - DNA, 25 bp, Homo sapien
catagatgtcggcatctggtggaat

SEQ ID NO: 3725844 - DNA, 25 bp, Homo sapien
ttctggcccgataaaggtcactgaa

SEQ ID NO: 3725845 - DNA, 25 bp, Homo sapien
aaagaccctgtggagtctctaagca

SEQ ID NO: 3725846 - DNA, 25 bp, Homo sapien
ggagtctctaagcagctgtccttct

SEQ ID NO: 3725847 - DNA, 25 bp, Homo sapien
tccttctggcccgataaaggtcact

SEQ ID NO: 3725848 - DNA, 25 bp, Homo sapien
agaggactcactcccctaaaccagt

SEQ ID NO: 3725849 - DNA, 25 bp, Homo sapien
agctggtgccttttctgctagacca

SEQ ID NO: 3725850 - DNA, 25 bp, Homo sapien
cacctaatgattccagaggactcac

SEQ ID NO: 3725851 - DNA, 25 bp, Homo sapien
gtacccagggccttgctatccactt

SEQ ID NO: 3725852 - DNA, 25 bp, Homo sapien
ttgttgtaagtgatgtatgtcttca

SEQ ID NO: 3725853 - DNA, 25 bp, Homo sapien
tcacctggtcgtccaccttcttgtt

SEQ ID NO: 3725854 - DNA, 25 bp, Homo sapien
ctctcaggtccacatccggagcttg

SEQ ID NO: 3725855 - DNA, 25 bp, Homo sapien
gcaggcgccaatccctgcctttgtt

SEQ ID NO: 3725856 - DNA, 25 bp, Homo sapien
tgagttcctaagaccctttgacgaa

SEQ ID NO: 3725857 - DNA, 25 bp, Homo sapien
gaaacaaagccctcgacacagcttc

SEQ ID NO: 3725858 - DNA, 25 bp, Homo sapien
ctgagttcctaagaccctttgacga

SEQ ID NO: 3725859 - DNA, 25 bp, Homo sapien
ctttgacgaaacaaagccctcgaca

SEQ ID NO: 3725860 - DNA, 25 bp, Homo sapien
ttagaaaattactgctctgcaccac

SEQ ID NO: 3725861 - DNA, 25 bp, Homo sapien
tgccctgcaagttttagaaaattac

SEQ ID NO: 3725862 - DNA, 25 bp, Homo sapien
caagttttagaaaattactgctctg

SEQ ID NO: 3725863 - DNA, 25 bp, Homo sapien
gttttagaaaattactgctctgcac

SEQ ID NO: 3725864 - DNA, 25 bp, Homo sapien
gtagatcctcattaaatgcctgcat

SEQ ID NO: 3725865 - DNA, 25 bp, Homo sapien
caattggtgctgcactctgagtcca

SEQ ID NO: 3725866 - DNA, 25 bp, Homo sapien
tcaactgggcctttcacccaattgg

SEQ ID NO: 3725867 - DNA, 25 bp, Homo sapien
tggtgctgcactctgagtccacaca

SEQ ID NO: 3725868 - DNA, 25 bp, Homo sapien
cactaacattctcgcatttctgatc

SEQ ID NO: 3725869 - DNA, 25 bp, Homo sapien
gacactaacattctcgcatttctga

SEQ ID NO: 3725870 - DNA, 25 bp, Homo sapien
gatgacactaacattctcgcatttc

SEQ ID NO: 3725871 - DNA, 25 bp, Homo sapien
tgacactaacattctcgcatttctg

SEQ ID NO: 3725872 - DNA, 25 bp, Homo sapien
cttgctagagattcttcctgaggaa

SEQ ID NO: 3725873 - DNA, 25 bp, Homo sapien
ttgctagagattcttcctgaggaat

SEQ ID NO: 3725874 - DNA, 25 bp, Homo sapien
ggtgcagatgtaaggaacagaaggg

SEQ ID NO: 3725875 - DNA, 25 bp, Homo sapien
gcaggtgcagatgtaaggaacagaa

SEQ ID NO: 3725876 - DNA, 25 bp, Homo sapien
tcaaagctcgactagatggattttg

SEQ ID NO: 3725877 - DNA, 25 bp, Homo sapien
ctttcaaagctcgactagatggatt

SEQ ID NO: 3725878 - DNA, 25 bp, Homo sapien
tctctttcaaagctcgactagatgg

SEQ ID NO: 3725879 - DNA, 25 bp, Homo sapien
cctctctttcaaagctcgactagat

SEQ ID NO: 3725880 - DNA, 25 bp, Homo sapien
gatgaacacaccaatatcagtatat

SEQ ID NO: 3725881 - DNA, 25 bp, Homo sapien
cacaccaatatcagtatatgagagc

SEQ ID NO: 3725882 - DNA, 25 bp, Homo sapien
tatatgagagctccgggccaatgtt

SEQ ID NO: 3725883 - DNA, 25 bp, Homo sapien
tatcagtatatgagagctccgggcc

SEQ ID NO: 3725884 - DNA, 25 bp, Homo sapien
acgagggcaccaccccagtctagga

SEQ ID NO: 3725885 - DNA, 25 bp, Homo sapien
tgtgtgtttcatggccacgagggca

SEQ ID NO: 3725886 - DNA, 25 bp, Homo sapien
cagacattgtactcttcatcaaaga

SEQ ID NO: 3725887 - DNA, 25 bp, Homo sapien
caccccagtctaggaaccagacatt

SEQ ID NO: 3725888 - DNA, 25 bp, Homo sapien
gagaggaaccgaagtgaaaccatac

SEQ ID NO: 3725889 - DNA, 25 bp, Homo sapien
caagagtggccctcatcaaaactca

SEQ ID NO: 3725890 - DNA, 25 bp, Homo sapien
gaaaccatacttgtcccaagagtgg

SEQ ID NO: 3725891 - DNA, 25 bp, Homo sapien
cagagccccgtcaacaaagagagga

SEQ ID NO: 3725892 - DNA, 25 bp, Homo sapien
cttcaacgaacaaggagtgaaacgg

SEQ ID NO: 3725893 - DNA, 25 bp, Homo sapien
ggcaacttcaacgaacaaggagtga

SEQ ID NO: 3725894 - DNA, 25 bp, Homo sapien
aggagggcaacttcaacgaacaagg

SEQ ID NO: 3725895 - DNA, 25 bp, Homo sapien
gtgaaacgggacagccggagaggac

SEQ ID NO: 3725896 - DNA, 25 bp, Homo sapien
gcagggtgaagccgactctgccagc

SEQ ID NO: 3725897 - DNA, 25 bp, Homo sapien
agcagggtgaagccgactctgccag

SEQ ID NO: 3725898 - DNA, 25 bp, Homo sapien
ctttctgttactgccttgactggac

SEQ ID NO: 3725899 - DNA, 25 bp, Homo sapien
tctgttactgccttgactggactgt

SEQ ID NO: 3725900 - DNA, 25 bp, Homo sapien
gagttcttctaaccaccaactgtcc

SEQ ID NO: 3725901 - DNA, 25 bp, Homo sapien
cagagactccagtgcctgcaactcg

SEQ ID NO: 3725902 - DNA, 25 bp, Homo sapien
ccagtgcctgcaactcgagttcttc

SEQ ID NO: 3725903 - DNA, 25 bp, Homo sapien
gcaactcgagttcttctaaccacca

SEQ ID NO: 3725904 - DNA, 25 bp, Homo sapien
tgagtttgatttgccattgactcac

SEQ ID NO: 3725905 - DNA, 25 bp, Homo sapien
actaagataatattgttgagtttga

SEQ ID NO: 3725906 - DNA, 25 bp, Homo sapien
ttgttgagtttgatttgccattgac

SEQ ID NO: 3725907 - DNA, 25 bp, Homo sapien
tcaactaagataatattgttgagtt

SEQ ID NO: 3725908 - DNA, 25 bp, Homo sapien
cctttaatccaccattcaggcctga

SEQ ID NO: 3725909 - DNA, 25 bp, Homo sapien
ctttaatccaccattcaggcctgag

SEQ ID NO: 3725910 - DNA, 25 bp, Homo sapien
ctcctttaatccaccattcaggcct

SEQ ID NO: 3725911 - DNA, 25 bp, Homo sapien
tcctttaatccaccattcaggcctg

SEQ ID NO: 3725912 - DNA, 25 bp, Homo sapien
tagtcctccttggtgcaatgccggc

SEQ ID NO: 3725913 - DNA, 25 bp, Homo sapien
caatgccggctgaagatagatttgt

SEQ ID NO: 3725914 - DNA, 25 bp, Homo sapien
gatagatttgtagtccactttcacc

SEQ ID NO: 3725915 - DNA, 25 bp, Homo sapien
caccaattgccattcggagcggagg

SEQ ID NO: 3725916 - DNA, 25 bp, Homo sapien
atcctcagatgacccactaccttcc

SEQ ID NO: 3725917 - DNA, 25 bp, Homo sapien
tcagatgacccactaccttcctccc

SEQ ID NO: 3725918 - DNA, 25 bp, Homo sapien
cctcagatgacccactaccttcctc

SEQ ID NO: 3725919 - DNA, 25 bp, Homo sapien
acatcctcagatgacccactacctt

SEQ ID NO: 3725920 - DNA, 25 bp, Homo sapien
tgtctacatcatcccgtttctgctc

SEQ ID NO: 3725921 - DNA, 25 bp, Homo sapien
ccatagagaatgtaaggactccagg

SEQ ID NO: 3725922 - DNA, 25 bp, Homo sapien
tgatgtctacatcatcccgtttctg

SEQ ID NO: 3725923 - DNA, 25 bp, Homo sapien
catagagaatgtaaggactccaggc

SEQ ID NO: 3725924 - DNA, 25 bp, Homo sapien
cgaagtcccaattggcacagacaca

SEQ ID NO: 3725925 - DNA, 25 bp, Homo sapien
cactcgaagtcccaattggcacaga

SEQ ID NO: 3725926 - DNA, 25 bp, Homo sapien
gctcctggcttacgtttcttgaata

SEQ ID NO: 3725927 - DNA, 25 bp, Homo sapien
actgatcctgagtggtctcggccca

SEQ ID NO: 3725928 - DNA, 25 bp, Homo sapien
ccagtgctgttaaggtagctttgac

SEQ ID NO: 3725929 - DNA, 25 bp, Homo sapien
ggattgtaccagaaagctgggacac

SEQ ID NO: 3725930 - DNA, 25 bp, Homo sapien
ttgaccaaggctgcagtcctttgat

SEQ ID NO: 3725931 - DNA, 25 bp, Homo sapien
gggatgctggattgtaccagaaagc

SEQ ID NO: 3725932 - DNA, 25 bp, Homo sapien
cactatgaccttctgtgacaaggac

SEQ ID NO: 3725933 - DNA, 25 bp, Homo sapien
tatcttatagaggaggtcggcatgg

SEQ ID NO: 3725934 - DNA, 25 bp, Homo sapien
tacaaccctgatctgcatgatgggc

SEQ ID NO: 3725935 - DNA, 25 bp, Homo sapien
caaccccagcatatgaagtcaagcc

SEQ ID NO: 3725936 - DNA, 25 bp, Homo sapien
catctgggccttggcggtgtacttc

SEQ ID NO: 3725937 - DNA, 25 bp, Homo sapien
gttgttggacacaatccgccgatac

SEQ ID NO: 3725938 - DNA, 25 bp, Homo sapien
ctgtgcagttgttggacacaatccg

SEQ ID NO: 3725939 - DNA, 25 bp, Homo sapien
gatgaaagttgcattgtgcccctgc

SEQ ID NO: 3725940 - DNA, 25 bp, Homo sapien
gctgaagtttgcgtaggacacagca

SEQ ID NO: 3725941 - DNA, 25 bp, Homo sapien
gaagatccccgcactcttatacacg

SEQ ID NO: 3725942 - DNA, 25 bp, Homo sapien
cacgtgcttgatgccgtcctcgatg

SEQ ID NO: 3725943 - DNA, 25 bp, Homo sapien
ggttgttctctgcataggctgtcac

SEQ ID NO: 3725944 - DNA, 25 bp, Homo sapien
tgggccacacgactgcactgatgtt

SEQ ID NO: 3725945 - DNA, 25 bp, Homo sapien
tattgccgaaccaccagaaataggt

SEQ ID NO: 3725946 - DNA, 25 bp, Homo sapien
tcttatggcaacaaatggaactcgg

SEQ ID NO: 3725947 - DNA, 25 bp, Homo sapien
ggaactcggagatgaacatgctcca

SEQ ID NO: 3725948 - DNA, 25 bp, Homo sapien
cagtacagatctaatttgacatcaa

SEQ ID NO: 3725949 - DNA, 25 bp, Homo sapien
agtacagatctaatttgacatcaat

SEQ ID NO: 3725950 - DNA, 25 bp, Homo sapien
actttggctgaattagtctatcatc

SEQ ID NO: 3725951 - DNA, 25 bp, Homo sapien
caacttctgcccaaatgaatccttt

SEQ ID NO: 3725952 - DNA, 25 bp, Homo sapien
gaattagtctatcatccccaaagcc

SEQ ID NO: 3725953 - DNA, 25 bp, Homo sapien
ggctgaattagtctatcatccccaa

SEQ ID NO: 3725954 - DNA, 25 bp, Homo sapien
ccaaagggtcaatagtggctgttta

SEQ ID NO: 3725955 - DNA, 25 bp, Homo sapien
gcaggttctgacatgcatataaaat

SEQ ID NO: 3725956 - DNA, 25 bp, Homo sapien
aaatgaggtgtaagcaggttctgac

SEQ ID NO: 3725957 - DNA, 25 bp, Homo sapien
gggtgtgaccttctgaattaatcga

SEQ ID NO: 3725958 - DNA, 25 bp, Homo sapien
ggaaatgctgctgtccaaagtgatg

SEQ ID NO: 3725959 - DNA, 25 bp, Homo sapien
aggaatgtgaaggaaatgctgctgt

SEQ ID NO: 3725960 - DNA, 25 bp, Homo sapien
atgtgaaggaaatgctgctgtccaa

SEQ ID NO: 3725961 - DNA, 25 bp, Homo sapien
ctgcaaggaatgtgaaggaaatgct

SEQ ID NO: 3725962 - DNA, 25 bp, Homo sapien
catgaactgcaatctcttttgtgtc

SEQ ID NO: 3725963 - DNA, 25 bp, Homo sapien
attcccagcagccacctggactgtg

SEQ ID NO: 3725964 - DNA, 25 bp, Homo sapien
tttgtgtcctggatgagggcattcc

SEQ ID NO: 3725965 - DNA, 25 bp, Homo sapien
cctggactgtgatggtgtcggttcc

SEQ ID NO: 3725966 - DNA, 25 bp, Homo sapien
tttaaccagagctcgcttgatgaca

SEQ ID NO: 3725967 - DNA, 25 bp, Homo sapien
tgtggtaatccagattaggagagaa

SEQ ID NO: 3725968 - DNA, 25 bp, Homo sapien
gaatgtcaggattgtggtaatccag

SEQ ID NO: 3725969 - DNA, 25 bp, Homo sapien
tcgcttgatgacattgccaatatct

SEQ ID NO: 3725970 - DNA, 25 bp, Homo sapien
ccaacggtagtcttgtgagtataaa

SEQ ID NO: 3725971 - DNA, 25 bp, Homo sapien
tggaacgctctgtttcctggcctgt

SEQ ID NO: 3725972 - DNA, 25 bp, Homo sapien
tgagtgcaatctgtggccaacggta

SEQ ID NO: 3725973 - DNA, 25 bp, Homo sapien
gagtataaatgtttggttgagaaga

SEQ ID NO: 3725974 - DNA, 25 bp, Homo sapien
ccaggaaacacggcaatgaggatct

SEQ ID NO: 3725975 - DNA, 25 bp, Homo sapien
caggaaacacggcaatgaggatctg

SEQ ID NO: 3725976 - DNA, 25 bp, Homo sapien
tacacaatgacttgtacccccggct

SEQ ID NO: 3725977 - DNA, 25 bp, Homo sapien
gagcattaaacagtgtttctacaat

SEQ ID NO: 3725978 - DNA, 25 bp, Homo sapien
actggaccaaattttggttgagagc

SEQ ID NO: 3725979 - DNA, 25 bp, Homo sapien
caaattttggttgagagcattaaac

SEQ ID NO: 3725980 - DNA, 25 bp, Homo sapien
ccagcactggagtccaccaatggag

SEQ ID NO: 3725981 - DNA, 25 bp, Homo sapien
gataatagcataagcatggctgagc

SEQ ID NO: 3725982 - DNA, 25 bp, Homo sapien
taaacttgtagatcaaaaacacagc

SEQ ID NO: 3725983 - DNA, 25 bp, Homo sapien
aaaacacagccaggccaacaaatac

SEQ ID NO: 3725984 - DNA, 25 bp, Homo sapien
tgcccagggaagatgtaaaccatag

SEQ ID NO: 3725985 - DNA, 25 bp, Homo sapien
acaaagccagctaggaacccagatg

SEQ ID NO: 3725986 - DNA, 25 bp, Homo sapien
tagaactccctgaggaatgcacctt

SEQ ID NO: 3725987 - DNA, 25 bp, Homo sapien
caatgaggctacaaggtcaaggaac

SEQ ID NO: 3725988 - DNA, 25 bp, Homo sapien
ctccttgtcgtgttggacttgagca

SEQ ID NO: 3725989 - DNA, 25 bp, Homo sapien
ggctccgtaaagtcactgagtgtga

SEQ ID NO: 3725990 - DNA, 25 bp, Homo sapien
tatgacccgcgtgtccagctctttg

SEQ ID NO: 3725991 - DNA, 25 bp, Homo sapien
gggcgttttcactttggctcactga

SEQ ID NO: 3725992 - DNA, 25 bp, Homo sapien
gtgctttcgctgtttgcaatagtgg

SEQ ID NO: 3725993 - DNA, 25 bp, Homo sapien
tggggatctcctttgtgctttcgct

SEQ ID NO: 3725994 - DNA, 25 bp, Homo sapien
agtgcagttggggatctcctttgtg

SEQ ID NO: 3725995 - DNA, 25 bp, Homo sapien
ctgtttgcaatagtggcaatgcctc

SEQ ID NO: 3725996 - DNA, 25 bp, Homo sapien
tctgagggccagtgcgtaagccaac

SEQ ID NO: 3725997 - DNA, 25 bp, Homo sapien
tacagcatggcttaacgtgacccta

SEQ ID NO: 3725998 - DNA, 25 bp, Homo sapien
tacttcctgcggatctaactgggaa

SEQ ID NO: 3725999 - DNA, 25 bp, Homo sapien
tatggacatgcacaaggcagggcct

SEQ ID NO: 3726000 - DNA, 25 bp, Homo sapien
aggctctccgctgttgcccagtgat

SEQ ID NO: 3726001 - DNA, 25 bp, Homo sapien
tatgactggcattaccgtcaggctc

SEQ ID NO: 3726002 - DNA, 25 bp, Homo sapien
ggcgtcaggccatgggctgctaaac

SEQ ID NO: 3726003 - DNA, 25 bp, Homo sapien
gcccagtgatatgcagttcaatctg

SEQ ID NO: 3726004 - DNA, 25 bp, Homo sapien
catgctcccctgagactgatggctc

SEQ ID NO: 3726005 - DNA, 25 bp, Homo sapien
gatggctcccaaatcattgaacctg

SEQ ID NO: 3726006 - DNA, 25 bp, Homo sapien
gaagttcatctgcttatcgtttagg

SEQ ID NO: 3726007 - DNA, 25 bp, Homo sapien
tttcttcatgcaggatatgcccttc

SEQ ID NO: 3726008 - DNA, 25 bp, Homo sapien
cctaacaacactttgtatgccacaa

SEQ ID NO: 3726009 - DNA, 25 bp, Homo sapien
ttcagtactgctaagagaatatatt

SEQ ID NO: 3726010 - DNA, 25 bp, Homo sapien
aaagttacatatttgacgtgataaa

SEQ ID NO: 3726011 - DNA, 25 bp, Homo sapien
tgtaaccaattaactctaaatcaag

SEQ ID NO: 3726012 - DNA, 25 bp, Homo sapien
agtcctcagtgacctacaaagagac

SEQ ID NO: 3726013 - DNA, 25 bp, Homo sapien
aagtcctcagtgacctacaaagaga

SEQ ID NO: 3726014 - DNA, 25 bp, Homo sapien
cataaagcaagtcctcagtgaccta

SEQ ID NO: 3726015 - DNA, 25 bp, Homo sapien
aagcaagtcctcagtgacctacaaa

SEQ ID NO: 3726016 - DNA, 25 bp, Homo sapien
acacggcagggtattccaacagact

SEQ ID NO: 3726017 - DNA, 25 bp, Homo sapien
cctcacacggcagggtattccaaca

SEQ ID NO: 3726018 - DNA, 25 bp, Homo sapien
acaaccagaaaggacatctacaccg

SEQ ID NO: 3726019 - DNA, 25 bp, Homo sapien
cggcagggtattccaacagacttgc

SEQ ID NO: 3726020 - DNA, 25 bp, Homo sapien
taacagaagcatggtgcatctctta

SEQ ID NO: 3726021 - DNA, 25 bp, Homo sapien
gcaaggtaacagaagcatggtgcat

SEQ ID NO: 3726022 - DNA, 25 bp, Homo sapien
tctacacatcccttcactgtcatag

SEQ ID NO: 3726023 - DNA, 25 bp, Homo sapien
tctcttacactttctacacatccct

SEQ ID NO: 3726024 - DNA, 25 bp, Homo sapien
acatgaagtaccattgcaaaggaag

SEQ ID NO: 3726025 - DNA, 25 bp, Homo sapien
catgaagtaccattgcaaaggaagc

SEQ ID NO: 3726026 - DNA, 25 bp, Homo sapien
cactcccatggcatcaccttggagg

SEQ ID NO: 3726027 - DNA, 25 bp, Homo sapien
cttcagtaataatattcaaccactc

SEQ ID NO: 3726028 - DNA, 25 bp, Homo sapien
taatattcaaccactcccatggcat

SEQ ID NO: 3726029 - DNA, 25 bp, Homo sapien
actcccatggcatcaccttggaggt

SEQ ID NO: 3726030 - DNA, 25 bp, Homo sapien
tcagggctcttctgctatctctgaa

SEQ ID NO: 3726031 - DNA, 25 bp, Homo sapien
tcttctgctatctctgaagaccttc

SEQ ID NO: 3726032 - DNA, 25 bp, Homo sapien
gctcttctgctatctctgaagacct

SEQ ID NO: 3726033 - DNA, 25 bp, Homo sapien
gggctcttctgctatctctgaagac

SEQ ID NO: 3726034 - DNA, 25 bp, Homo sapien
tattctgattatcacagttgcacat

SEQ ID NO: 3726035 - DNA, 25 bp, Homo sapien
tcaaaatcatattctgattatcaca

SEQ ID NO: 3726036 - DNA, 25 bp, Homo sapien
tctctttcaaaatcatattctgatt

SEQ ID NO: 3726037 - DNA, 25 bp, Homo sapien
atattctgattatcacagttgcaca

SEQ ID NO: 3726038 - DNA, 25 bp, Homo sapien
gctttggatgaagggaagtacctac

SEQ ID NO: 3726039 - DNA, 25 bp, Homo sapien
gaggaaaggtactatagattctcct

SEQ ID NO: 3726040 - DNA, 25 bp, Homo sapien
tacaccctccatggaaaggaggaaa

SEQ ID NO: 3726041 - DNA, 25 bp, Homo sapien
tccccagtctggtagcaggtatgga

SEQ ID NO: 3726042 - DNA, 25 bp, Homo sapien
tagctgagtaatctagcagaaaggg

SEQ ID NO: 3726043 - DNA, 25 bp, Homo sapien
tgtcagcatgtcctttttgtagaca

SEQ ID NO: 3726044 - DNA, 25 bp, Homo sapien
tcatttgtagaggttggacccccca

SEQ ID NO: 3726045 - DNA, 25 bp, Homo sapien
cagattccatagctgagtaatctag

SEQ ID NO: 3726046 - DNA, 25 bp, Homo sapien
gaatgagttcccattaagccatcaa

SEQ ID NO: 3726047 - DNA, 25 bp, Homo sapien
cctgagaatgagttcccattaagcc

SEQ ID NO: 3726048 - DNA, 25 bp, Homo sapien
tgagaatgagttcccattaagccat

SEQ ID NO: 3726049 - DNA, 25 bp, Homo sapien
tgagttcccattaagccatcaatgt

SEQ ID NO: 3726050 - DNA, 25 bp, Homo sapien
tggaagggagaataaaggaggatat

SEQ ID NO: 3726051 - DNA, 25 bp, Homo sapien
tggtggaagggagaataaaggagga

SEQ ID NO: 3726052 - DNA, 25 bp, Homo sapien
aagggagaataaaggaggatattgc

SEQ ID NO: 3726053 - DNA, 25 bp, Homo sapien
gtggaagggagaataaaggaggata

SEQ ID NO: 3726054 - DNA, 25 bp, Homo sapien
ctcccattccggtgccagctgagaa

SEQ ID NO: 3726055 - DNA, 25 bp, Homo sapien
tcccaaaacgagtcagggagttcca

SEQ ID NO: 3726056 - DNA, 25 bp, Homo sapien
tccatttggataataacggagtaaa

SEQ ID NO: 3726057 - DNA, 25 bp, Homo sapien
tgtgggccaatcaacagcttcccaa

SEQ ID NO: 3726058 - DNA, 25 bp, Homo sapien
tcacttgaaaatagctcacaccttc

SEQ ID NO: 3726059 - DNA, 25 bp, Homo sapien
cttgaaaatagctcacaccttcctt

SEQ ID NO: 3726060 - DNA, 25 bp, Homo sapien
cacttgaaaatagctcacaccttcc

SEQ ID NO: 3726061 - DNA, 25 bp, Homo sapien
cctcacttgaaaatagctcacacct

SEQ ID NO: 3726062 - DNA, 25 bp, Homo sapien
atattaaatacttttggaagggctg

SEQ ID NO: 3726063 - DNA, 25 bp, Homo sapien
agggctgggactacatctaatttct

SEQ ID NO: 3726064 - DNA, 25 bp, Homo sapien
atctaatttcttgaaaagtctggtg

SEQ ID NO: 3726065 - DNA, 25 bp, Homo sapien
tgtttcataggtggctgattttcca

SEQ ID NO: 3726066 - DNA, 25 bp, Homo sapien
ggttgaaattctacaatagctatca

SEQ ID NO: 3726067 - DNA, 25 bp, Homo sapien
catcaccaatataggtgcccagaac

SEQ ID NO: 3726068 - DNA, 25 bp, Homo sapien
gaatgggtaataagttcctcatcac

SEQ ID NO: 3726069 - DNA, 25 bp, Homo sapien
ttcttgctaccattgcttgtggtca

SEQ ID NO: 3726070 - DNA, 25 bp, Homo sapien
aaaggggcactgtgagactttgcgt

SEQ ID NO: 3726071 - DNA, 25 bp, Homo sapien
ggcactgtgagactttgcgtggacc

SEQ ID NO: 3726072 - DNA, 25 bp, Homo sapien
ggggcactgtgagactttgcgtgga

SEQ ID NO: 3726073 - DNA, 25 bp, Homo sapien
cactgtgagactttgcgtggacccc

SEQ ID NO: 3726074 - DNA, 25 bp, Homo sapien
tgtccttctgcatgaagggaaaacc

SEQ ID NO: 3726075 - DNA, 25 bp, Homo sapien
gaaaacccaacagcatctcacctcc

SEQ ID NO: 3726076 - DNA, 25 bp, Homo sapien
gaaagtgcagaatatgagcctcatg

SEQ ID NO: 3726077 - DNA, 25 bp, Homo sapien
aagtgcagaatatgagcctcatgtt

SEQ ID NO: 3726078 - DNA, 25 bp, Homo sapien
ctgtggaaagtgcagaatatgagcc

SEQ ID NO: 3726079 - DNA, 25 bp, Homo sapien
tggaaagtgcagaatatgagcctca

SEQ ID NO: 3726080 - DNA, 25 bp, Homo sapien
tgccagagcagtttatgcacatcct

SEQ ID NO: 3726081 - DNA, 25 bp, Homo sapien
ggtactgccttcaaattgatgttca

SEQ ID NO: 3726082 - DNA, 25 bp, Homo sapien
attcaggtcccttaagaatagtggg

SEQ ID NO: 3726083 - DNA, 25 bp, Homo sapien
caacatcctttgtggtcctgattgg

SEQ ID NO: 3726084 - DNA, 25 bp, Homo sapien
ttagtatatgtcttaccgaagtgag

SEQ ID NO: 3726085 - DNA, 25 bp, Homo sapien
aattttagtatatgtcttaccgaag

SEQ ID NO: 3726086 - DNA, 25 bp, Homo sapien
tatatgtcttaccgaagtgagcaca

SEQ ID NO: 3726087 - DNA, 25 bp, Homo sapien
tccaattttagtatatgtcttaccg

SEQ ID NO: 3726088 - DNA, 25 bp, Homo sapien
aaggtttatgttatcgagtgtactg

SEQ ID NO: 3726089 - DNA, 25 bp, Homo sapien
ttatgttatcgagtgtactgaccat

SEQ ID NO: 3726090 - DNA, 25 bp, Homo sapien
ggtttatgttatcgagtgtactgac

SEQ ID NO: 3726091 - DNA, 25 bp, Homo sapien
gtttatgttatcgagtgtactgacc

SEQ ID NO: 3726092 - DNA, 25 bp, Homo sapien
aatacgtttgattacagttgctata

SEQ ID NO: 3726093 - DNA, 25 bp, Homo sapien
tatacacaactccattaacaacttc

SEQ ID NO: 3726094 - DNA, 25 bp, Homo sapien
ggattcatttaattcatatggcttg

SEQ ID NO: 3726095 - DNA, 25 bp, Homo sapien
tccagcactggaaggacggctttca

SEQ ID NO: 3726096 - DNA, 25 bp, Homo sapien
ctcttgagttcattataggctgtga

SEQ ID NO: 3726097 - DNA, 25 bp, Homo sapien
gatttccccaattgagtgagtgccc

SEQ ID NO: 3726098 - DNA, 25 bp, Homo sapien
ggacttcctcaaaccatctatcatg

SEQ ID NO: 3726099 - DNA, 25 bp, Homo sapien
ctatcatgctttactacctgtgtca

SEQ ID NO: 3726100 - DNA, 25 bp, Homo sapien
tcaaattgctagagtcctcagtgga

SEQ ID NO: 3726101 - DNA, 25 bp, Homo sapien
ctcagtggataagctgatttctctt

SEQ ID NO: 3726102 - DNA, 25 bp, Homo sapien
gactgccccaagtgttttagatggc

SEQ ID NO: 3726103 - DNA, 25 bp, Homo sapien
tggcaaaaggcctgtaccaaacttg

SEQ ID NO: 3726104 - DNA, 25 bp, Homo sapien
gggagtattagagcttggatgctca

SEQ ID NO: 3726105 - DNA, 25 bp, Homo sapien
cgccatggatctgatgtcaaaaagt

SEQ ID NO: 3726106 - DNA, 25 bp, Homo sapien
gtcaaaaagttttagagtgacagca

SEQ ID NO: 3726107 - DNA, 25 bp, Homo sapien
atattatcgatccaacatcaaaaag

SEQ ID NO: 3726108 - DNA, 25 bp, Homo sapien
gtaaaccaatgatgtaagtccaaaa

SEQ ID NO: 3726109 - DNA, 25 bp, Homo sapien
taaaccaatgatgtaagtccaaaag

SEQ ID NO: 3726110 - DNA, 25 bp, Homo sapien
caaaggctgaaggtccctgcctggt

SEQ ID NO: 3726111 - DNA, 25 bp, Homo sapien
ggtaaaccaatgatgtaagtccaaa

SEQ ID NO: 3726112 - DNA, 25 bp, Homo sapien
ggatggtagtaatgagggtctgagg

SEQ ID NO: 3726113 - DNA, 25 bp, Homo sapien
ctggtagcagcacggaggagaaaga

SEQ ID NO: 3726114 - DNA, 25 bp, Homo sapien
cacaggaagatggatatagagtatc

SEQ ID NO: 3726115 - DNA, 25 bp, Homo sapien
aggagaaagacacaactcagctttc

SEQ ID NO: 3726116 - DNA, 25 bp, Homo sapien
tttatttcatggcttgtattagtct

SEQ ID NO: 3726117 - DNA, 25 bp, Homo sapien
tttctaagagctcatttttgctttt

SEQ ID NO: 3726118 - DNA, 25 bp, Homo sapien
atataaaaactagcctagccgggca

SEQ ID NO: 3726119 - DNA, 25 bp, Homo sapien
aaatcttatgtcatttatagcatcc

SEQ ID NO: 3726120 - DNA, 25 bp, Homo sapien
gggataccttagtgcactcttcagt

SEQ ID NO: 3726121 - DNA, 25 bp, Homo sapien
gataccttagtgcactcttcagtca

SEQ ID NO: 3726122 - DNA, 25 bp, Homo sapien
tgggggataccttagtgcactcttc

SEQ ID NO: 3726123 - DNA, 25 bp, Homo sapien
cttagtgggggataccttagtgcac

SEQ ID NO: 3726124 - DNA, 25 bp, Homo sapien
ctccctccatgaaatcctggggcat

SEQ ID NO: 3726125 - DNA, 25 bp, Homo sapien
gctccctccatgaaatcctggggca

SEQ ID NO: 3726126 - DNA, 25 bp, Homo sapien
tgctccctccatgaaatcctggggc

SEQ ID NO: 3726127 - DNA, 25 bp, Homo sapien
taagactagcaagtagatcaccatt

SEQ ID NO: 3726128 - DNA, 25 bp, Homo sapien
tggtaagactagcaagtagatcacc

SEQ ID NO: 3726129 - DNA, 25 bp, Homo sapien
aatggtaagactagcaagtagatca

SEQ ID NO: 3726130 - DNA, 25 bp, Homo sapien
ggaatggtaagactagcaagtagat

SEQ ID NO: 3726131 - DNA, 25 bp, Homo sapien
cagtttccagtgtttcatctgcaca

SEQ ID NO: 3726132 - DNA, 25 bp, Homo sapien
tttgatgatgagaatcctgaaacat

SEQ ID NO: 3726133 - DNA, 25 bp, Homo sapien
tgatgatgagaatcctgaaacatac

SEQ ID NO: 3726134 - DNA, 25 bp, Homo sapien
gagaaatttgatgatgagaatcctg

SEQ ID NO: 3726135 - DNA, 25 bp, Homo sapien
aaatttgatgatgagaatcctgaaa

SEQ ID NO: 3726136 - DNA, 25 bp, Homo sapien
tgttcttcaacaacgctattgctgg

SEQ ID NO: 3726137 - DNA, 25 bp, Homo sapien
tcttcaacaacgctattgctggtga

SEQ ID NO: 3726138 - DNA, 25 bp, Homo sapien
caacaacgctattgctggtgagccc

SEQ ID NO: 3726139 - DNA, 25 bp, Homo sapien
tgtgttcttcaacaacgctattgct

SEQ ID NO: 3726140 - DNA, 25 bp, Homo sapien
gctttgcagatgccaacactgcctg

SEQ ID NO: 3726141 - DNA, 25 bp, Homo sapien
ggctttgcagatgccaacactgcct

SEQ ID NO: 3726142 - DNA, 25 bp, Homo sapien
ctttgcagatgccaacactgcctgg

SEQ ID NO: 3726143 - DNA, 25 bp, Homo sapien
gatggataggggttcagcagtctct

SEQ ID NO: 3726144 - DNA, 25 bp, Homo sapien
cagcagtctctggacggtggtggca

SEQ ID NO: 3726145 - DNA, 25 bp, Homo sapien
agtctctggacggtggtggcagcag

SEQ ID NO: 3726146 - DNA, 25 bp, Homo sapien
gggtggtggtagcagatggataggg

SEQ ID NO: 3726147 - DNA, 25 bp, Homo sapien
gagatagtacatcattggagatatc

SEQ ID NO: 3726148 - DNA, 25 bp, Homo sapien
aagagatagtacatcattggagata

SEQ ID NO: 3726149 - DNA, 25 bp, Homo sapien
gttatcatattgctcagcctgctca

SEQ ID NO: 3726150 - DNA, 25 bp, Homo sapien
caaaagagatagtacatcattggag

SEQ ID NO: 3726151 - DNA, 25 bp, Homo sapien
gcggcaacctcagccaagtaacggt

SEQ ID NO: 3726152 - DNA, 25 bp, Homo sapien
aatccctttcttgccatcaccagcg

SEQ ID NO: 3726153 - DNA, 25 bp, Homo sapien
tgccatcaccagcggcaacctcagc

SEQ ID NO: 3726154 - DNA, 25 bp, Homo sapien
tttcttgccatcaccagcggcaacc

SEQ ID NO: 3726155 - DNA, 25 bp, Homo sapien
gctgatttcaaaagcttcttggtat

SEQ ID NO: 3726156 - DNA, 25 bp, Homo sapien
agtatgtgttggttgcatttccttt

SEQ ID NO: 3726157 - DNA, 25 bp, Homo sapien
tcttggtatgcttgttgtgactgac

SEQ ID NO: 3726158 - DNA, 25 bp, Homo sapien
tcaaaagcttcttggtatgcttgtt

SEQ ID NO: 3726159 - DNA, 25 bp, Homo sapien
agaacaagagaagttaagggccaga

SEQ ID NO: 3726160 - DNA, 25 bp, Homo sapien
tcagaatctcataatagaacaagag

SEQ ID NO: 3726161 - DNA, 25 bp, Homo sapien
gaatctcataatagaacaagagaag

SEQ ID NO: 3726162 - DNA, 25 bp, Homo sapien
gaacaagagaagttaagggccagac

SEQ ID NO: 3726163 - DNA, 25 bp, Homo sapien
caatgccttcatcaaaagccatctt

SEQ ID NO: 3726164 - DNA, 25 bp, Homo sapien
gggtatccagtgtccacaatgtcaa

SEQ ID NO: 3726165 - DNA, 25 bp, Homo sapien
tgccttcatcaaaagccatctttgc

SEQ ID NO: 3726166 - DNA, 25 bp, Homo sapien
agcaatgccttcatcaaaagccatc

SEQ ID NO: 3726167 - DNA, 25 bp, Homo sapien
taaagagcctcgtgcactgtgtcga

SEQ ID NO: 3726168 - DNA, 25 bp, Homo sapien
gatttggtacaaacaccatggctat

SEQ ID NO: 3726169 - DNA, 25 bp, Homo sapien
cattacacatgccacgtagtctctt

SEQ ID NO: 3726170 - DNA, 25 bp, Homo sapien
actgtgtcgatcctctccatttcta

SEQ ID NO: 3726171 - DNA, 25 bp, Homo sapien
gaaacttcctgtgcccgagaatgga

SEQ ID NO: 3726172 - DNA, 25 bp, Homo sapien
ttcctgtgcccgagaatggaagtct

SEQ ID NO: 3726173 - DNA, 25 bp, Homo sapien
ggaaacttcctgtgcccgagaatgg

SEQ ID NO: 3726174 - DNA, 25 bp, Homo sapien
gtgcccgagaatggaagtctcttac

SEQ ID NO: 3726175 - DNA, 25 bp, Homo sapien
catttctgccaagttagcttccctt

SEQ ID NO: 3726176 - DNA, 25 bp, Homo sapien
tccctttgaaggtcaaggctaaagc

SEQ ID NO: 3726177 - DNA, 25 bp, Homo sapien
ttagcacctttccaaacctcctgga

SEQ ID NO: 3726178 - DNA, 25 bp, Homo sapien
aagctcttattttacctcctcttag

SEQ ID NO: 3726179 - DNA, 25 bp, Homo sapien
cacaaggagatgatacacagatgtt

SEQ ID NO: 3726180 - DNA, 25 bp, Homo sapien
cgccaaatggctgtaatagggaaac

SEQ ID NO: 3726181 - DNA, 25 bp, Homo sapien
cacagatgttaatgaaagctctggg

SEQ ID NO: 3726182 - DNA, 25 bp, Homo sapien
tgtaatttctcacatcgccaaatgg

SEQ ID NO: 3726183 - DNA, 25 bp, Homo sapien
aaaagcacagagatctcatagctcc

SEQ ID NO: 3726184 - DNA, 25 bp, Homo sapien
ggttgtatacgttgaaaaagcacag

SEQ ID NO: 3726185 - DNA, 25 bp, Homo sapien
ggatcactttccaggtctccttcag

SEQ ID NO: 3726186 - DNA, 25 bp, Homo sapien
tccttcagggtccagtacatagtaa

SEQ ID NO: 3726187 - DNA, 25 bp, Homo sapien
aaagcacagagatcataggaggcca

SEQ ID NO: 3726188 - DNA, 25 bp, Homo sapien
ctaaagcacagagatcataggaggc

SEQ ID NO: 3726189 - DNA, 25 bp, Homo sapien
aagcacagagatcataggaggccat

SEQ ID NO: 3726190 - DNA, 25 bp, Homo sapien
taaagcacagagatcataggaggcc

SEQ ID NO: 3726191 - DNA, 25 bp, Homo sapien
gcatacaacatattctgcatgtctg

SEQ ID NO: 3726192 - DNA, 25 bp, Homo sapien
accatggtccgccttcagtccaata

SEQ ID NO: 3726193 - DNA, 25 bp, Homo sapien
cattcataccatggtccgccttcag

SEQ ID NO: 3726194 - DNA, 25 bp, Homo sapien
aaattaggctaatctgtattgaaac

SEQ ID NO: 3726195 - DNA, 25 bp, Homo sapien
gccttcagtccaataagccgagagg

SEQ ID NO: 3726196 - DNA, 25 bp, Homo sapien
ggattttacgatagctaaagtcagc

SEQ ID NO: 3726197 - DNA, 25 bp, Homo sapien
tcaagcacactagtttgctgacctt

SEQ ID NO: 3726198 - DNA, 25 bp, Homo sapien
gctaaagtcagctgctcaagcacac

SEQ ID NO: 3726199 - DNA, 25 bp, Homo sapien
aatgcaaatggattttacgatagct

SEQ ID NO: 3726200 - DNA, 25 bp, Homo sapien
cagcatggtcacctggtcttccatg

SEQ ID NO: 3726201 - DNA, 25 bp, Homo sapien
agcatggtcacctggtcttccatgt

SEQ ID NO: 3726202 - DNA, 25 bp, Homo sapien
acagcatggtcacctggtcttccat

SEQ ID NO: 3726203 - DNA, 25 bp, Homo sapien
tgtttgggttggataacttcaccat

SEQ ID NO: 3726204 - DNA, 25 bp, Homo sapien
tgggttggataacttcaccatatct

SEQ ID NO: 3726205 - DNA, 25 bp, Homo sapien
ggttggataacttcaccatatctcc

SEQ ID NO: 3726206 - DNA, 25 bp, Homo sapien
gtttgggttggataacttcaccata

SEQ ID NO: 3726207 - DNA, 25 bp, Homo sapien
tataaatggactaaattctgcaatt

SEQ ID NO: 3726208 - DNA, 25 bp, Homo sapien
ttaaatataaatggactaaattctg

SEQ ID NO: 3726209 - DNA, 25 bp, Homo sapien
aatataaatggactaaattctgcaa

SEQ ID NO: 3726210 - DNA, 25 bp, Homo sapien
taaatataaatggactaaattctgc

SEQ ID NO: 3726211 - DNA, 25 bp, Homo sapien
ggttctcccagcacgcagctggaga

SEQ ID NO: 3726212 - DNA, 25 bp, Homo sapien
agcacgcagctggagatctgagaac

SEQ ID NO: 3726213 - DNA, 25 bp, Homo sapien
cacgcagctggagatctgagaacgg

SEQ ID NO: 3726214 - DNA, 25 bp, Homo sapien
cgcagctggagatctgagaacgggc

SEQ ID NO: 3726215 - DNA, 25 bp, Homo sapien
acacctccttattatagacactgcc

SEQ ID NO: 3726216 - DNA, 25 bp, Homo sapien
tatagacactgccataagacttgat

SEQ ID NO: 3726217 - DNA, 25 bp, Homo sapien
caatggtatacacctccttattata

SEQ ID NO: 3726218 - DNA, 25 bp, Homo sapien
gccataagacttgatgctaccttct

SEQ ID NO: 3726219 - DNA, 25 bp, Homo sapien
ctgggtcttcaacctgaagatccca

SEQ ID NO: 3726220 - DNA, 25 bp, Homo sapien
gtcttcaacctgaagatcccagcag

SEQ ID NO: 3726221 - DNA, 25 bp, Homo sapien
gggtcttcaacctgaagatcccagc

SEQ ID NO: 3726222 - DNA, 25 bp, Homo sapien
ggtcttcaacctgaagatcccagca

SEQ ID NO: 3726223 - DNA, 25 bp, Homo sapien
aagaattcactgcttacggtcctgt

SEQ ID NO: 3726224 - DNA, 25 bp, Homo sapien
agaattcactgcttacggtcctgtg

SEQ ID NO: 3726225 - DNA, 25 bp, Homo sapien
gaattcactgcttacggtcctgtgc

SEQ ID NO: 3726226 - DNA, 25 bp, Homo sapien
aattcactgcttacggtcctgtgca

SEQ ID NO: 3726227 - DNA, 25 bp, Homo sapien
ggcacaagttctgtcttttggcttt

SEQ ID NO: 3726228 - DNA, 25 bp, Homo sapien
taatttgtagggagtagtactctcc

SEQ ID NO: 3726229 - DNA, 25 bp, Homo sapien
tcactagtatataatttgtagggag

SEQ ID NO: 3726230 - DNA, 25 bp, Homo sapien
atataatttgtagggagtagtactc

SEQ ID NO: 3726231 - DNA, 25 bp, Homo sapien
tcagggttgatacgcattgtggaca

SEQ ID NO: 3726232 - DNA, 25 bp, Homo sapien
ctgaacccagttgaagacaagtggc

SEQ ID NO: 3726233 - DNA, 25 bp, Homo sapien
ggacatcatattggcatgaagctga

SEQ ID NO: 3726234 - DNA, 25 bp, Homo sapien
ttgaagacaagtggcagcaccctga

SEQ ID NO: 3726235 - DNA, 25 bp, Homo sapien
ttgtgttggttttgaatccatccgg

SEQ ID NO: 3726236 - DNA, 25 bp, Homo sapien
tggttttgaatccatccggtgctcc

SEQ ID NO: 3726237 - DNA, 25 bp, Homo sapien
agttggctgactcccttttgtgttg

SEQ ID NO: 3726238 - DNA, 25 bp, Homo sapien
gggcattttgagttggctgactccc

SEQ ID NO: 3726239 - DNA, 25 bp, Homo sapien
ttggttcgtttataaataatttgca

SEQ ID NO: 3726240 - DNA, 25 bp, Homo sapien
tggttcgtttataaataatttgcat

SEQ ID NO: 3726241 - DNA, 25 bp, Homo sapien
tcatttgacaacttcatacaaactc

SEQ ID NO: 3726242 - DNA, 25 bp, Homo sapien
tttgacaacttcatacaaactcagt

SEQ ID NO: 3726243 - DNA, 25 bp, Homo sapien
atttgacaacttcatacaaactcag

SEQ ID NO: 3726244 - DNA, 25 bp, Homo sapien
ttgacaacttcatacaaactcagtt

SEQ ID NO: 3726245 - DNA, 25 bp, Homo sapien
tctaatgtgagtattccaggccaca

SEQ ID NO: 3726246 - DNA, 25 bp, Homo sapien
ggtctgcctatagggcgaaaatgtg

SEQ ID NO: 3726247 - DNA, 25 bp, Homo sapien
cagggtgcctgcatttctcattgta

SEQ ID NO: 3726248 - DNA, 25 bp, Homo sapien
ggcgaaaatgtgctggccattctaa

SEQ ID NO: 3726249 - DNA, 25 bp, Homo sapien
ctgaagagcctgtagaggattagag

SEQ ID NO: 3726250 - DNA, 25 bp, Homo sapien
gagcctgtagaggattagagaagct

SEQ ID NO: 3726251 - DNA, 25 bp, Homo sapien
gaagagcctgtagaggattagagaa

SEQ ID NO: 3726252 - DNA, 25 bp, Homo sapien
agagcctgtagaggattagagaagc

SEQ ID NO: 3726253 - DNA, 25 bp, Homo sapien
gcagcccaggattttttagcttcac

SEQ ID NO: 3726254 - DNA, 25 bp, Homo sapien
ctgcagcccaggattttttagcttc

SEQ ID NO: 3726255 - DNA, 25 bp, Homo sapien
ctcctgctttgactcatgctgttta

SEQ ID NO: 3726256 - DNA, 25 bp, Homo sapien
tcctcctgctttgactcatgctgtt

SEQ ID NO: 3726257 - DNA, 25 bp, Homo sapien
attcttgtccagaacaacactgggg

SEQ ID NO: 3726258 - DNA, 25 bp, Homo sapien
ttcttgtccagaacaacactggggt

SEQ ID NO: 3726259 - DNA, 25 bp, Homo sapien
cacgatttgaaagtgagcatattct

SEQ ID NO: 3726260 - DNA, 25 bp, Homo sapien
tcatagagtaatccacgatttgaaa

SEQ ID NO: 3726261 - DNA, 25 bp, Homo sapien
tatctcaattatattaactgaccag

SEQ ID NO: 3726262 - DNA, 25 bp, Homo sapien
tgtatcactgacagctgttccaagt

SEQ ID NO: 3726263 - DNA, 25 bp, Homo sapien
ttggatcccatggaccctcatcatg

SEQ ID NO: 3726264 - DNA, 25 bp, Homo sapien
tacaactaggacagggatgtcttgt

SEQ ID NO: 3726265 - DNA, 25 bp, Homo sapien
tatttccgtgtagcacatgaggctt

SEQ ID NO: 3726266 - DNA, 25 bp, Homo sapien
ttgacctccggcaagagccagatgg

SEQ ID NO: 3726267 - DNA, 25 bp, Homo sapien
ttaatctctgggctggaccgtactg

SEQ ID NO: 3726268 - DNA, 25 bp, Homo sapien
gaaacatccatgtcaagcagtcact

SEQ ID NO: 3726269 - DNA, 25 bp, Homo sapien
gctgcctagttgagtacccatcaca

SEQ ID NO: 3726270 - DNA, 25 bp, Homo sapien
cattttcttctttcgtctgtaaata

SEQ ID NO: 3726271 - DNA, 25 bp, Homo sapien
tgtaaaattaatccacacttcctca

SEQ ID NO: 3726272 - DNA, 25 bp, Homo sapien
cttctttcgtctgtaaatagagata

SEQ ID NO: 3726273 - DNA, 25 bp, Homo sapien
cgtctgtaaatagagatatcgaaat

SEQ ID NO: 3726274 - DNA, 25 bp, Homo sapien
tctgtgcatctagtagaagagttac

SEQ ID NO: 3726275 - DNA, 25 bp, Homo sapien
agtgatgtgatctttatgcagttgc

SEQ ID NO: 3726276 - DNA, 25 bp, Homo sapien
gatgcctgtgattgcctcagtggcc

SEQ ID NO: 3726277 - DNA, 25 bp, Homo sapien
caagtgggtatcatgcattggctgt

SEQ ID NO: 3726278 - DNA, 25 bp, Homo sapien
tggttttagaaacagattgcaactt

SEQ ID NO: 3726279 - DNA, 25 bp, Homo sapien
cagattgcaacttccaaagttgggc

SEQ ID NO: 3726280 - DNA, 25 bp, Homo sapien
agaaacagattgcaacttccaaagt

SEQ ID NO: 3726281 - DNA, 25 bp, Homo sapien
gattgcaacttccaaagttgggcat

SEQ ID NO: 3726282 - DNA, 25 bp, Homo sapien
tgctccgtaaatgccacagtcttga

SEQ ID NO: 3726283 - DNA, 25 bp, Homo sapien
aactaagcatgttcttgtcagcaga

SEQ ID NO: 3726284 - DNA, 25 bp, Homo sapien
tgattttcgctgatctcatagtgag

SEQ ID NO: 3726285 - DNA, 25 bp, Homo sapien
gttgtcacaaactcgtaggttcctg

SEQ ID NO: 3726286 - DNA, 25 bp, Homo sapien
tgtattgtctgtcctgcaccacagg

SEQ ID NO: 3726287 - DNA, 25 bp, Homo sapien
ttgtctgtcctgcaccacaggatat

SEQ ID NO: 3726288 - DNA, 25 bp, Homo sapien
gtcctgcaccacaggatattgctct

SEQ ID NO: 3726289 - DNA, 25 bp, Homo sapien
cacaggatattgctctggtgtgcca

SEQ ID NO: 3726290 - DNA, 25 bp, Homo sapien
tttctctgcacaccctatcctcatc

SEQ ID NO: 3726291 - DNA, 25 bp, Homo sapien
catttgcacgcagaggaggcaatct

SEQ ID NO: 3726292 - DNA, 25 bp, Homo sapien
tctttacattctagctcttgatcgc

SEQ ID NO: 3726293 - DNA, 25 bp, Homo sapien
tttcacacagttttcataatgggca

SEQ ID NO: 3726294 - DNA, 25 bp, Homo sapien
cataatgggcattagtctgtattgc

SEQ ID NO: 3726295 - DNA, 25 bp, Homo sapien
caagaggttcatcaagggttcattt

SEQ ID NO: 3726296 - DNA, 25 bp, Homo sapien
ttcattttcagggcaccagtccaga

SEQ ID NO: 3726297 - DNA, 25 bp, Homo sapien
cattaatgccgcatttgatatttta

SEQ ID NO: 3726298 - DNA, 25 bp, Homo sapien
ccagagcaagaggttcatcaagggt

SEQ ID NO: 3726299 - DNA, 25 bp, Homo sapien
ccaagtgtatactgattttccagaa

SEQ ID NO: 3726300 - DNA, 25 bp, Homo sapien
cagagcatgaatagtatacagatgt

SEQ ID NO: 3726301 - DNA, 25 bp, Homo sapien
ggtatcggggcatgaccaagtgtat

SEQ ID NO: 3726302 - DNA, 25 bp, Homo sapien
aatctgttgggcttgagcactgtaa

SEQ ID NO: 3726303 - DNA, 25 bp, Homo sapien
tcaggtaccgtcaggatcctccatg

SEQ ID NO: 3726304 - DNA, 25 bp, Homo sapien
acacagtcaggtaccgtcaggatcc

SEQ ID NO: 3726305 - DNA, 25 bp, Homo sapien
agtcaggtaccgtcaggatcctcca

SEQ ID NO: 3726306 - DNA, 25 bp, Homo sapien
cacagtcaggtaccgtcaggatcct

SEQ ID NO: 3726307 - DNA, 25 bp, Homo sapien
catatagttgcaagggatctaccgg

SEQ ID NO: 3726308 - DNA, 25 bp, Homo sapien
accaggaatttcagtaagccagacc

SEQ ID NO: 3726309 - DNA, 25 bp, Homo sapien
acctgggtcgggcacactgtttctc

SEQ ID NO: 3726310 - DNA, 25 bp, Homo sapien
gactaaacattctcgggaagtggga

SEQ ID NO: 3726311 - DNA, 25 bp, Homo sapien
tatgggtatcagagagctacaagtc

SEQ ID NO: 3726312 - DNA, 25 bp, Homo sapien
tactcaacaagtggtactctgggca

SEQ ID NO: 3726313 - DNA, 25 bp, Homo sapien
gctctgaacccatgaaggctcttat

SEQ ID NO: 3726314 - DNA, 25 bp, Homo sapien
tgaacctctaccctaagcaagttgg

SEQ ID NO: 3726315 - DNA, 25 bp, Homo sapien
tggcttttctcctgctctgaatttc

SEQ ID NO: 3726316 - DNA, 25 bp, Homo sapien
gcttttctcctgctctgaatttctt

SEQ ID NO: 3726317 - DNA, 25 bp, Homo sapien
cacctcctttactggcttttctcct

SEQ ID NO: 3726318 - DNA, 25 bp, Homo sapien
tactggcttttctcctgctctgaat

SEQ ID NO: 3726319 - DNA, 25 bp, Homo sapien
atttcttcctccatgagtacatcat

SEQ ID NO: 3726320 - DNA, 25 bp, Homo sapien
ttcttcctccatgagtacatcattc

SEQ ID NO: 3726321 - DNA, 25 bp, Homo sapien
ttcctccatgagtacatcattcttc

SEQ ID NO: 3726322 - DNA, 25 bp, Homo sapien
tcttcctccatgagtacatcattct

SEQ ID NO: 3726323 - DNA, 25 bp, Homo sapien
tactagaatggctatgtctggtctt

SEQ ID NO: 3726324 - DNA, 25 bp, Homo sapien
cttccatccaggtctgacattcaga

SEQ ID NO: 3726325 - DNA, 25 bp, Homo sapien
atctgcctatagacactggaagccg

SEQ ID NO: 3726326 - DNA, 25 bp, Homo sapien
ttcatgccgatgtgttttactacga

SEQ ID NO: 3726327 - DNA, 25 bp, Homo sapien
cgatgtccactttatggcattttca

SEQ ID NO: 3726328 - DNA, 25 bp, Homo sapien
tcaacaggccaagccgatgtccact

SEQ ID NO: 3726329 - DNA, 25 bp, Homo sapien
tatatccttggaatgttgtgcctcc

SEQ ID NO: 3726330 - DNA, 25 bp, Homo sapien
cagccttcaacaggccaagccgatg

SEQ ID NO: 3726331 - DNA, 25 bp, Homo sapien
aagacagagtcattgaagagccatc

SEQ ID NO: 3726332 - DNA, 25 bp, Homo sapien
tattgaatcaattaacatatggtca

SEQ ID NO: 3726333 - DNA, 25 bp, Homo sapien
acatatggtcaaatgtgaagacaga

SEQ ID NO: 3726334 - DNA, 25 bp, Homo sapien
gtgaagacagagtcattgaagagcc

SEQ ID NO: 3726335 - DNA, 25 bp, Homo sapien
tgaacactggtgaaggcaacataga

SEQ ID NO: 3726336 - DNA, 25 bp, Homo sapien
aacactggtgaaggcaacatagact

SEQ ID NO: 3726337 - DNA, 25 bp, Homo sapien
cactggtgaaggcaacatagacttt

SEQ ID NO: 3726338 - DNA, 25 bp, Homo sapien
tggtgaaggcaacatagactttgct

SEQ ID NO: 3726339 - DNA, 25 bp, Homo sapien
gctgtctgctgatacctgaactggg

SEQ ID NO: 3726340 - DNA, 25 bp, Homo sapien
aagtaactatggagagcattaaggc

SEQ ID NO: 3726341 - DNA, 25 bp, Homo sapien
gggtgtctagcagtcaagatctggt

SEQ ID NO: 3726342 - DNA, 25 bp, Homo sapien
tcaacgagacttcttgctgtgctgt

SEQ ID NO: 3726343 - DNA, 25 bp, Homo sapien
ctgttgggtaaaaatggtctccatc

SEQ ID NO: 3726344 - DNA, 25 bp, Homo sapien
tgttgggtaaaaatggtctccatct

SEQ ID NO: 3726345 - DNA, 25 bp, Homo sapien
catgctgtgttataatcacaagaat

SEQ ID NO: 3726346 - DNA, 25 bp, Homo sapien
gctgttgggtaaaaatggtctccat

SEQ ID NO: 3726347 - DNA, 25 bp, Homo sapien
actgtcagacttagcgtctggtgag

SEQ ID NO: 3726348 - DNA, 25 bp, Homo sapien
tgtcagacttagcgtctggtgaggg

SEQ ID NO: 3726349 - DNA, 25 bp, Homo sapien
ctgtcagacttagcgtctggtgagg

SEQ ID NO: 3726350 - DNA, 25 bp, Homo sapien
atggcagaaggcaaaaggcactgcc

SEQ ID NO: 3726351 - DNA, 25 bp, Homo sapien
cttgttttattagccctggcagaat

SEQ ID NO: 3726352 - DNA, 25 bp, Homo sapien
atttctatcagtttggctttttcat

SEQ ID NO: 3726353 - DNA, 25 bp, Homo sapien
tggacaatcaaaataaggcattcat

SEQ ID NO: 3726354 - DNA, 25 bp, Homo sapien
tcattactttcagcttggacaatca

SEQ ID NO: 3726355 - DNA, 25 bp, Homo sapien
cttacaatatctggactttgggcac

SEQ ID NO: 3726356 - DNA, 25 bp, Homo sapien
ctgtcttacaatatctggactttgg

SEQ ID NO: 3726357 - DNA, 25 bp, Homo sapien
tgaagtagttgtaggaaagcagaat

SEQ ID NO: 3726358 - DNA, 25 bp, Homo sapien
atgaagtagttgtaggaaagcagaa

SEQ ID NO: 3726359 - DNA, 25 bp, Homo sapien
tctgtttcaatgtgtccagggccat

SEQ ID NO: 3726360 - DNA, 25 bp, Homo sapien
tttctgctccagttggatggaggta

SEQ ID NO: 3726361 - DNA, 25 bp, Homo sapien
agggaaaggattttctgtttcaatg

SEQ ID NO: 3726362 - DNA, 25 bp, Homo sapien
cagttggatggaggtaagggaaagg

SEQ ID NO: 3726363 - DNA, 25 bp, Homo sapien
gaggatgagagatcaactgtgcatg

SEQ ID NO: 3726364 - DNA, 25 bp, Homo sapien
aaaagagtgcatcagatttttcccc

SEQ ID NO: 3726365 - DNA, 25 bp, Homo sapien
gctagatatgaaccacgtgtgagaa

SEQ ID NO: 3726366 - DNA, 25 bp, Homo sapien
ctctggtattgttggagagagctgc

SEQ ID NO: 3726367 - DNA, 25 bp, Homo sapien
gctggcttgttataatgtggtggac

SEQ ID NO: 3726368 - DNA, 25 bp, Homo sapien
cttgtgccttgatatccagggttgg

SEQ ID NO: 3726369 - DNA, 25 bp, Homo sapien
tggactggtagcctccaagccctgt

SEQ ID NO: 3726370 - DNA, 25 bp, Homo sapien
ggcagtactgatcggcctgatgaaa

SEQ ID NO: 3726371 - DNA, 25 bp, Homo sapien
tgttttgctggcgaatacatgactc

SEQ ID NO: 3726372 - DNA, 25 bp, Homo sapien
gctggcgaatacatgactcctgatt

SEQ ID NO: 3726373 - DNA, 25 bp, Homo sapien
atgactcctgattcttgctctttga

SEQ ID NO: 3726374 - DNA, 25 bp, Homo sapien
tcaggatgttttgctggcgaataca

SEQ ID NO: 3726375 - DNA, 25 bp, Homo sapien
tgttcaagtccatgtgtttcctgga

SEQ ID NO: 3726376 - DNA, 25 bp, Homo sapien
tcctgtcatggttattgctgctggc

SEQ ID NO: 3726377 - DNA, 25 bp, Homo sapien
catgacacgtgatggcatgtgattc

SEQ ID NO: 3726378 - DNA, 25 bp, Homo sapien
aaattctagtctccatcctgtcatg

SEQ ID NO: 3726379 - DNA, 25 bp, Homo sapien
catctggcatgagagccattggacc

SEQ ID NO: 3726380 - DNA, 25 bp, Homo sapien
ttggaccacatgaggagagtctatg

SEQ ID NO: 3726381 - DNA, 25 bp, Homo sapien
cttcatctggcatgagagccattgg

SEQ ID NO: 3726382 - DNA, 25 bp, Homo sapien
gagccattggaccacatgaggagag

SEQ ID NO: 3726383 - DNA, 25 bp, Homo sapien
caagtaatgcttccgttggctctcc

SEQ ID NO: 3726384 - DNA, 25 bp, Homo sapien
aatgcttccgttggctctccctgct

SEQ ID NO: 3726385 - DNA, 25 bp, Homo sapien
ccaagtaatgcttccgttggctctc

SEQ ID NO: 3726386 - DNA, 25 bp, Homo sapien
gtaatgcttccgttggctctccctg

SEQ ID NO: 3726387 - DNA, 25 bp, Homo sapien
cagatgctgtccagagtattgtaca

SEQ ID NO: 3726388 - DNA, 25 bp, Homo sapien
tattgtacactgattgtagtctgtg

SEQ ID NO: 3726389 - DNA, 25 bp, Homo sapien
tggcaatgtctgacgctgagagttt

SEQ ID NO: 3726390 - DNA, 25 bp, Homo sapien
tctgtggtggcggttggcaatgtct

SEQ ID NO: 3726391 - DNA, 25 bp, Homo sapien
ttctattcttgtttccatgtctctc

SEQ ID NO: 3726392 - DNA, 25 bp, Homo sapien
tctattcttgtttccatgtctctca

SEQ ID NO: 3726393 - DNA, 25 bp, Homo sapien
tgctgtagggaaattaattcattat

SEQ ID NO: 3726394 - DNA, 25 bp, Homo sapien
tcaatcataagaatgctgtagggaa

SEQ ID NO: 3726395 - DNA, 25 bp, Homo sapien
aatgctgtagggaaattaattcatt

SEQ ID NO: 3726396 - DNA, 25 bp, Homo sapien
atgctgtagggaaattaattcatta

SEQ ID NO: 3726397 - DNA, 25 bp, Homo sapien
cagatggcttggtttacctaatcaa

SEQ ID NO: 3726398 - DNA, 25 bp, Homo sapien
cctgagacttcgctgaagctttgaa

SEQ ID NO: 3726399 - DNA, 25 bp, Homo sapien
gcctcaccctgcttccgcttggtgc

SEQ ID NO: 3726400 - DNA, 25 bp, Homo sapien
cctgcttccgcttggtgcgctgcat

SEQ ID NO: 3726401 - DNA, 25 bp, Homo sapien
atagccttttggctcgaattctaaa

SEQ ID NO: 3726402 - DNA, 25 bp, Homo sapien
gccttttggctcgaattctaaagat

SEQ ID NO: 3726403 - DNA, 25 bp, Homo sapien
tagccttttggctcgaattctaaag

SEQ ID NO: 3726404 - DNA, 25 bp, Homo sapien
caatagccttttggctcgaattcta

SEQ ID NO: 3726405 - DNA, 25 bp, Homo sapien
ttagtatttccccacgctctgaatc

SEQ ID NO: 3726406 - DNA, 25 bp, Homo sapien
cacgctctgaatcaggactacccat

SEQ ID NO: 3726407 - DNA, 25 bp, Homo sapien
tttccccacgctctgaatcaggact

SEQ ID NO: 3726408 - DNA, 25 bp, Homo sapien
tatttccccacgctctgaatcagga

SEQ ID NO: 3726409 - DNA, 25 bp, Homo sapien
tccatggcaacagggtcagactcat

SEQ ID NO: 3726410 - DNA, 25 bp, Homo sapien
gccaagaagataaagcgggatttct

SEQ ID NO: 3726411 - DNA, 25 bp, Homo sapien
taaagcgggatttctccgagctgaa

SEQ ID NO: 3726412 - DNA, 25 bp, Homo sapien
tttctccgagctgaaagccgtcctc

SEQ ID NO: 3726413 - DNA, 25 bp, Homo sapien
ggaaatacagatctatagatttctg

SEQ ID NO: 3726414 - DNA, 25 bp, Homo sapien
gcttgcttagatttgcaaaatacgg

SEQ ID NO: 3726415 - DNA, 25 bp, Homo sapien
tctatagatttctgttgtatgtgcc

SEQ ID NO: 3726416 - DNA, 25 bp, Homo sapien
caaaatacggtgaacttacagtcct

SEQ ID NO: 3726417 - DNA, 25 bp, Homo sapien
tgtttccgggtgttgccagcagaga

SEQ ID NO: 3726418 - DNA, 25 bp, Homo sapien
gctgtttccgggtgttgccagcaga

SEQ ID NO: 3726419 - DNA, 25 bp, Homo sapien
gtttccgggtgttgccagcagagat

SEQ ID NO: 3726420 - DNA, 25 bp, Homo sapien
ctgtttccgggtgttgccagcagag

SEQ ID NO: 3726421 - DNA, 25 bp, Homo sapien
taggcaggagatttctcatggcccg

SEQ ID NO: 3726422 - DNA, 25 bp, Homo sapien
ctttgtccagcaagatccgataggg

SEQ ID NO: 3726423 - DNA, 25 bp, Homo sapien
gccttgttccggtgggatgtcatca

SEQ ID NO: 3726424 - DNA, 25 bp, Homo sapien
tccatgatgaagtggttctgggcct

SEQ ID NO: 3726425 - DNA, 25 bp, Homo sapien
ggtgactagctcgtatttctgctcc

SEQ ID NO: 3726426 - DNA, 25 bp, Homo sapien
tcttgtcgttcttggttgaagccct

SEQ ID NO: 3726427 - DNA, 25 bp, Homo sapien
caagtgggaaaatctggtgactagc

SEQ ID NO: 3726428 - DNA, 25 bp, Homo sapien
gataagcaccgaaatcaagtgggaa

SEQ ID NO: 3726429 - DNA, 25 bp, Homo sapien
gaatgggagtcttgacatcctcttt

SEQ ID NO: 3726430 - DNA, 25 bp, Homo sapien
aaccagggttagaatactcaggagc

SEQ ID NO: 3726431 - DNA, 25 bp, Homo sapien
aaattttcgaatgggagtcttgaca

SEQ ID NO: 3726432 - DNA, 25 bp, Homo sapien
tgttcatgtgatccaaaccaatgtt

SEQ ID NO: 3726433 - DNA, 25 bp, Homo sapien
gagtgcctccactttttctgacgta

SEQ ID NO: 3726434 - DNA, 25 bp, Homo sapien
cttcttccaaaggtgctaaggattc

SEQ ID NO: 3726435 - DNA, 25 bp, Homo sapien
gctaaggattctctgcagatcctct

SEQ ID NO: 3726436 - DNA, 25 bp, Homo sapien
agctggtgagaaggtctctggattt

SEQ ID NO: 3726437 - DNA, 25 bp, Homo sapien
gcctctgtatatttgaacacaaagt

SEQ ID NO: 3726438 - DNA, 25 bp, Homo sapien
tgagaatcagtagatccgcaacaat

SEQ ID NO: 3726439 - DNA, 25 bp, Homo sapien
cttcctagggaagcctctgtatatt

SEQ ID NO: 3726440 - DNA, 25 bp, Homo sapien
tcagtagatccgcaacaatgctcat

SEQ ID NO: 3726441 - DNA, 25 bp, Homo sapien
aattgatggatcaatggcaatctga

SEQ ID NO: 3726442 - DNA, 25 bp, Homo sapien
aactgatggatcaatttcaattctt

SEQ ID NO: 3726443 - DNA, 25 bp, Homo sapien
ttgatggatcaatttcaattcaatg

SEQ ID NO: 3726444 - DNA, 25 bp, Homo sapien
caatggcaatctgaagaattgatga

SEQ ID NO: 3726445 - DNA, 25 bp, Homo sapien
gatgctccaagagcacaaatagcct

SEQ ID NO: 3726446 - DNA, 25 bp, Homo sapien
gacacgatgctccaagagcacaaat

SEQ ID NO: 3726447 - DNA, 25 bp, Homo sapien
ttggcaagacacgatgctccaagag

SEQ ID NO: 3726448 - DNA, 25 bp, Homo sapien
caagacacgatgctccaagagcaca

SEQ ID NO: 3726449 - DNA, 25 bp, Homo sapien
ttataatgattcttctgtggaagtc

SEQ ID NO: 3726450 - DNA, 25 bp, Homo sapien
ataatgattcttctgtggaagtcat

SEQ ID NO: 3726451 - DNA, 25 bp, Homo sapien
tataatgattcttctgtggaagtca

SEQ ID NO: 3726452 - DNA, 25 bp, Homo sapien
gtactaggtgatttgttaacatgat

SEQ ID NO: 3726453 - DNA, 25 bp, Homo sapien
tggagtaagtactaggtgatttgtt

SEQ ID NO: 3726454 - DNA, 25 bp, Homo sapien
ctggagtaagtactaggtgatttgt

SEQ ID NO: 3726455 - DNA, 25 bp, Homo sapien
taagtactaggtgatttgttaacat

SEQ ID NO: 3726456 - DNA, 25 bp, Homo sapien
agcaagcttggcatatgtggacttt

SEQ ID NO: 3726457 - DNA, 25 bp, Homo sapien
tagcaagcttggcatatgtggactt

SEQ ID NO: 3726458 - DNA, 25 bp, Homo sapien
ctagcaagcttggcatatgtggact

SEQ ID NO: 3726459 - DNA, 25 bp, Homo sapien
gtacccagtctaccctggaactcaa

SEQ ID NO: 3726460 - DNA, 25 bp, Homo sapien
ggaactcaactccaattttgcataa

SEQ ID NO: 3726461 - DNA, 25 bp, Homo sapien
ttaaaccagcgactttccatgtggg

SEQ ID NO: 3726462 - DNA, 25 bp, Homo sapien
ccagtgaggatgaggtccgtaccca

SEQ ID NO: 3726463 - DNA, 25 bp, Homo sapien
ttcagaatccagataccttttagca

SEQ ID NO: 3726464 - DNA, 25 bp, Homo sapien
gaatccagataccttttagcaaaat

SEQ ID NO: 3726465 - DNA, 25 bp, Homo sapien
ttttcagaatccagataccttttag

SEQ ID NO: 3726466 - DNA, 25 bp, Homo sapien
cagaatccagataccttttagcaaa

SEQ ID NO: 3726467 - DNA, 25 bp, Homo sapien
atctcacgtccaaaacctgaattca

SEQ ID NO: 3726468 - DNA, 25 bp, Homo sapien
aacctgaattcagtgtaagaaccat

SEQ ID NO: 3726469 - DNA, 25 bp, Homo sapien
ctcacgtccaaaacctgaattcagt

SEQ ID NO: 3726470 - DNA, 25 bp, Homo sapien
ccaaaacctgaattcagtgtaagaa

SEQ ID NO: 3726471 - DNA, 25 bp, Homo sapien
tgctccgaagatggcactggattca

SEQ ID NO: 3726472 - DNA, 25 bp, Homo sapien
tgaagtctgacaaggcagaatttgg

SEQ ID NO: 3726473 - DNA, 25 bp, Homo sapien
gatggcactggattcatgaagtctg

SEQ ID NO: 3726474 - DNA, 25 bp, Homo sapien
tggtcattaactgctccgaagatgg

SEQ ID NO: 3726475 - DNA, 25 bp, Homo sapien
gacatacacattgccagtaattact

SEQ ID NO: 3726476 - DNA, 25 bp, Homo sapien
tccctgtagctctgagtgtctgttt

SEQ ID NO: 3726477 - DNA, 25 bp, Homo sapien
gtgggtagaaggtctcactgctctt

SEQ ID NO: 3726478 - DNA, 25 bp, Homo sapien
actgctcttcagaatgacatacaca

SEQ ID NO: 3726479 - DNA, 25 bp, Homo sapien
tgtgtgtgggagacaatttagtgat

SEQ ID NO: 3726480 - DNA, 25 bp, Homo sapien
taactttcaaagaagtgcattgtgt

SEQ ID NO: 3726481 - DNA, 25 bp, Homo sapien
gctcagctgcaagggaatggtagcc

SEQ ID NO: 3726482 - DNA, 25 bp, Homo sapien
tgcattgtgttctttgaagacagcc

SEQ ID NO: 3726483 - DNA, 25 bp, Homo sapien
tgttctctccaagaactcgtaagga

SEQ ID NO: 3726484 - DNA, 25 bp, Homo sapien
ttctctccaagaactcgtaaggaca

SEQ ID NO: 3726485 - DNA, 25 bp, Homo sapien
tctctccaagaactcgtaaggacac

SEQ ID NO: 3726486 - DNA, 25 bp, Homo sapien
tctccaagaactcgtaaggacacat

SEQ ID NO: 3726487 - DNA, 25 bp, Homo sapien
acgccatcatatttctcaccaaata

SEQ ID NO: 3726488 - DNA, 25 bp, Homo sapien
cgccatcatatttctcaccaaatac

SEQ ID NO: 3726489 - DNA, 25 bp, Homo sapien
gccatcatatttctcaccaaatact

SEQ ID NO: 3726490 - DNA, 25 bp, Homo sapien
gctgtggacatcttttagcactgcc

SEQ ID NO: 3726491 - DNA, 25 bp, Homo sapien
tttcttgtggctgtggacatctttt

SEQ ID NO: 3726492 - DNA, 25 bp, Homo sapien
tttttttcttgtggctgtggacatc

SEQ ID NO: 3726493 - DNA, 25 bp, Homo sapien
cttgtggctgtggacatcttttagc

SEQ ID NO: 3726494 - DNA, 25 bp, Homo sapien
cttcgggagtcatagtgtcttgggc

SEQ ID NO: 3726495 - DNA, 25 bp, Homo sapien
gggcttcgggagtcatagtgtcttg

SEQ ID NO: 3726496 - DNA, 25 bp, Homo sapien
ggggggcttcgggagtcatagtgtc

SEQ ID NO: 3726497 - DNA, 25 bp, Homo sapien
gcttcgggagtcatagtgtcttggg

SEQ ID NO: 3726498 - DNA, 25 bp, Homo sapien
tcttcgtggtagacttagtggtcag

SEQ ID NO: 3726499 - DNA, 25 bp, Homo sapien
ttcgtggtagacttagtggtcagtg

SEQ ID NO: 3726500 - DNA, 25 bp, Homo sapien
ctatcttcttcgtggtagacttagt

SEQ ID NO: 3726501 - DNA, 25 bp, Homo sapien
tcttcttcgtggtagacttagtggt

SEQ ID NO: 3726502 - DNA, 25 bp, Homo sapien
tgactccaatttggtgacaacatcc

SEQ ID NO: 3726503 - DNA, 25 bp, Homo sapien
agatgactccaatttggtgacaaca

SEQ ID NO: 3726504 - DNA, 25 bp, Homo sapien
gatgactccaatttggtgacaacat

SEQ ID NO: 3726505 - DNA, 25 bp, Homo sapien
gactccaatttggtgacaacatcca

SEQ ID NO: 3726506 - DNA, 25 bp, Homo sapien
aacaaatcagaagtctggtgcaatg

SEQ ID NO: 3726507 - DNA, 25 bp, Homo sapien
aagaggccaaacaaggagacctcag

SEQ ID NO: 3726508 - DNA, 25 bp, Homo sapien
ggtgcaatggtaaagaggccaaaca

SEQ ID NO: 3726509 - DNA, 25 bp, Homo sapien
gtctggtgcaatggtaaagaggcca

SEQ ID NO: 3726510 - DNA, 25 bp, Homo sapien
tctggtctagtctctacccgttcac

SEQ ID NO: 3726511 - DNA, 25 bp, Homo sapien
tattgtgtaaatcagtttagattgc

SEQ ID NO: 3726512 - DNA, 25 bp, Homo sapien
gtctctacccgttcacctgattctt

SEQ ID NO: 3726513 - DNA, 25 bp, Homo sapien
gattgctgcttaaatctactctctg

SEQ ID NO: 3726514 - DNA, 25 bp, Homo sapien
tcagagcttctttgacagtccctca

SEQ ID NO: 3726515 - DNA, 25 bp, Homo sapien
tccaaattctctggggattgattag

SEQ ID NO: 3726516 - DNA, 25 bp, Homo sapien
actggttctgggacacagtggattc

SEQ ID NO: 3726517 - DNA, 25 bp, Homo sapien
ttaatctttggtggcactggttctg

SEQ ID NO: 3726518 - DNA, 25 bp, Homo sapien
attgaactggtgactcgtaacatac

SEQ ID NO: 3726519 - DNA, 25 bp, Homo sapien
ctcccagattgaactggtgactcgt

SEQ ID NO: 3726520 - DNA, 25 bp, Homo sapien
cccagattgaactggtgactcgtaa

SEQ ID NO: 3726521 - DNA, 25 bp, Homo sapien
cagattgaactggtgactcgtaaca

SEQ ID NO: 3726522 - DNA, 25 bp, Homo sapien
acagttgtccttagtgacatgcgca

SEQ ID NO: 3726523 - DNA, 25 bp, Homo sapien
cgcagccaagtttctgtctggaaga

SEQ ID NO: 3726524 - DNA, 25 bp, Homo sapien
tctgtctggaagaatgcccagaaaa

SEQ ID NO: 3726525 - DNA, 25 bp, Homo sapien
tagtgacatgcgcagccaagtttct

SEQ ID NO: 3726526 - DNA, 25 bp, Homo sapien
caaggctagggcacagaagcaatgc

SEQ ID NO: 3726527 - DNA, 25 bp, Homo sapien
caagtgtctgccgaataactggagg

SEQ ID NO: 3726528 - DNA, 25 bp, Homo sapien
aagtctcagtgaaaagtccagggcc

SEQ ID NO: 3726529 - DNA, 25 bp, Homo sapien
gaggttctcattggccaaggctagg

SEQ ID NO: 3726530 - DNA, 25 bp, Homo sapien
ctggggtaagcaagagaagtgaagg

SEQ ID NO: 3726531 - DNA, 25 bp, Homo sapien
tggggtaagcaagagaagtgaaggc

SEQ ID NO: 3726532 - DNA, 25 bp, Homo sapien
gggtaagcaagagaagtgaaggcag

SEQ ID NO: 3726533 - DNA, 25 bp, Homo sapien
gtaagcaagagaagtgaaggcagaa

SEQ ID NO: 3726534 - DNA, 25 bp, Homo sapien
gactgtgtgttgagtatcgcaaacc

SEQ ID NO: 3726535 - DNA, 25 bp, Homo sapien
ttttgttgttcctcggtaatcatga

SEQ ID NO: 3726536 - DNA, 25 bp, Homo sapien
tcgcaaaccaatactgtctgaagat

SEQ ID NO: 3726537 - DNA, 25 bp, Homo sapien
ctagacccattgcttgactgtgtgt

SEQ ID NO: 3726538 - DNA, 25 bp, Homo sapien
acatacagaaacatgtgctattaat

SEQ ID NO: 3726539 - DNA, 25 bp, Homo sapien
acagaaacatgtgctattaatgggc

SEQ ID NO: 3726540 - DNA, 25 bp, Homo sapien
tcataaacatacagaaacatgtgct

SEQ ID NO: 3726541 - DNA, 25 bp, Homo sapien
tacagaaacatgtgctattaatggg

SEQ ID NO: 3726542 - DNA, 25 bp, Homo sapien
aagttagcagaaaataacgtggtag

SEQ ID NO: 3726543 - DNA, 25 bp, Homo sapien
taacgtggtagactggatccatctt

SEQ ID NO: 3726544 - DNA, 25 bp, Homo sapien
ctttccaaatactatgggtgagtca

SEQ ID NO: 3726545 - DNA, 25 bp, Homo sapien
gggtgagtcattccccaagagtccc

SEQ ID NO: 3726546 - DNA, 25 bp, Homo sapien
ctcatctctccgattgcaaagagca

SEQ ID NO: 3726547 - DNA, 25 bp, Homo sapien
tactcaacctggtgactcatctctc

SEQ ID NO: 3726548 - DNA, 25 bp, Homo sapien
caaagagcaagacacgccactccgc

SEQ ID NO: 3726549 - DNA, 25 bp, Homo sapien
ccttcaacgccaaagcggggatctg

SEQ ID NO: 3726550 - DNA, 25 bp, Homo sapien
cagaattgctgatccacacgctcaa

SEQ ID NO: 3726551 - DNA, 25 bp, Homo sapien
acttaacagcgggtcagtgtccatg

SEQ ID NO: 3726552 - DNA, 25 bp, Homo sapien
ttttggtgtcactaactatgcttct

SEQ ID NO: 3726553 - DNA, 25 bp, Homo sapien
caggagtccgagtccttgtccatgc

SEQ ID NO: 3726554 - DNA, 25 bp, Homo sapien
aaaatcacatggtttgggaaataga

SEQ ID NO: 3726555 - DNA, 25 bp, Homo sapien
gcctgaggaacagtttagataatat

SEQ ID NO: 3726556 - DNA, 25 bp, Homo sapien
taatcttatcggaatgtgtaaattg

SEQ ID NO: 3726557 - DNA, 25 bp, Homo sapien
caatttgttacttacgttgtggctg

SEQ ID NO: 3726558 - DNA, 25 bp, Homo sapien
tctactctaaacagacgaaccattt

SEQ ID NO: 3726559 - DNA, 25 bp, Homo sapien
tgaagttatttgccccgtgcttggg

SEQ ID NO: 3726560 - DNA, 25 bp, Homo sapien
cacagcaaatggagctaggttttct

SEQ ID NO: 3726561 - DNA, 25 bp, Homo sapien
gaaattcctcaacattataaaggac

SEQ ID NO: 3726562 - DNA, 25 bp, Homo sapien
tgtttccaaactaagccatcaggcc

SEQ ID NO: 3726563 - DNA, 25 bp, Homo sapien
tcaggccctgcttaacaaataaagg

SEQ ID NO: 3726564 - DNA, 25 bp, Homo sapien
taaggctagcagaccagataaaagt

SEQ ID NO: 3726565 - DNA, 25 bp, Homo sapien
caggtgctcaacgactgggcagtga

SEQ ID NO: 3726566 - DNA, 25 bp, Homo sapien
tatgcaatctgtgttagaaatccac

SEQ ID NO: 3726567 - DNA, 25 bp, Homo sapien
tgtctgattcctataaagactctgc

SEQ ID NO: 3726568 - DNA, 25 bp, Homo sapien
cacagaggaaaaccattgtatgcaa

SEQ ID NO: 3726569 - DNA, 25 bp, Homo sapien
tctgattcctataaagactctgcca

SEQ ID NO: 3726570 - DNA, 25 bp, Homo sapien
cccagctaaactccgtataggatag

SEQ ID NO: 3726571 - DNA, 25 bp, Homo sapien
gttttccactggagtccggccactc

SEQ ID NO: 3726572 - DNA, 25 bp, Homo sapien
atagttctcctggtcggtggcctgc

SEQ ID NO: 3726573 - DNA, 25 bp, Homo sapien
taaactccgtataggatagttctcc

SEQ ID NO: 3726574 - DNA, 25 bp, Homo sapien
ctcccagaggagttatcaataggct

SEQ ID NO: 3726575 - DNA, 25 bp, Homo sapien
tattctctcagcacgattacaggta

SEQ ID NO: 3726576 - DNA, 25 bp, Homo sapien
gaaagtggttctctccgtatatgag

SEQ ID NO: 3726577 - DNA, 25 bp, Homo sapien
caattctgcctgtgcgtgtcccaca

SEQ ID NO: 3726578 - DNA, 25 bp, Homo sapien
ggaatgctcttcactccttctgtcc

SEQ ID NO: 3726579 - DNA, 25 bp, Homo sapien
tcatttactccaaagggttcctgga

SEQ ID NO: 3726580 - DNA, 25 bp, Homo sapien
gcatatacttgaagatttgattcat

SEQ ID NO: 3726581 - DNA, 25 bp, Homo sapien
cattgatcctattgctgcatatact

SEQ ID NO: 3726582 - DNA, 25 bp, Homo sapien
tcctttctttgagctagggccccag

SEQ ID NO: 3726583 - DNA, 25 bp, Homo sapien
tttctttgagctagggccccagtac

SEQ ID NO: 3726584 - DNA, 25 bp, Homo sapien
ggtcatcctttctttgagctagggc

SEQ ID NO: 3726585 - DNA, 25 bp, Homo sapien
catcctttctttgagctagggcccc

SEQ ID NO: 3726586 - DNA, 25 bp, Homo sapien
catggcttttaggatcaaatacaaa

SEQ ID NO: 3726587 - DNA, 25 bp, Homo sapien
catctcatggcttttaggatcaaat

SEQ ID NO: 3726588 - DNA, 25 bp, Homo sapien
tggcttttaggatcaaatacaaaac

SEQ ID NO: 3726589 - DNA, 25 bp, Homo sapien
tctcatggcttttaggatcaaatac

SEQ ID NO: 3726590 - DNA, 25 bp, Homo sapien
catggactttgtttatgaagagggg

SEQ ID NO: 3726591 - DNA, 25 bp, Homo sapien
tcatggactttgtttatgaagaggg

SEQ ID NO: 3726592 - DNA, 25 bp, Homo sapien
actgagctgtccgtgtaaaaactga

SEQ ID NO: 3726593 - DNA, 25 bp, Homo sapien
ggcactgagctgtccgtgtaaaaac

SEQ ID NO: 3726594 - DNA, 25 bp, Homo sapien
ccaggcactgagctgtccgtgtaaa

SEQ ID NO: 3726595 - DNA, 25 bp, Homo sapien
tgagctgtccgtgtaaaaactgaca

SEQ ID NO: 3726596 - DNA, 25 bp, Homo sapien
agaataaataagaacgctggctgtc

SEQ ID NO: 3726597 - DNA, 25 bp, Homo sapien
tctgtctgtggtaaccagggaagcc

SEQ ID NO: 3726598 - DNA, 25 bp, Homo sapien
gcagctcctggacccaacatcttta

SEQ ID NO: 3726599 - DNA, 25 bp, Homo sapien
tgtcatctgctatcaggttctgtct

SEQ ID NO: 3726600 - DNA, 25 bp, Homo sapien
tctgctgcaaacctagattgggagc

SEQ ID NO: 3726601 - DNA, 25 bp, Homo sapien
tcttataagtgtggtcaagtgccct

SEQ ID NO: 3726602 - DNA, 25 bp, Homo sapien
gattacctgtggcttgcccaactga

SEQ ID NO: 3726603 - DNA, 25 bp, Homo sapien
caatatataagctggagagacacca

SEQ ID NO: 3726604 - DNA, 25 bp, Homo sapien
cttgctgtaattctggctcgatgcc

SEQ ID NO: 3726605 - DNA, 25 bp, Homo sapien
ttgctgtaattctggctcgatgccc

SEQ ID NO: 3726606 - DNA, 25 bp, Homo sapien
tgctgtaattctggctcgatgccca

SEQ ID NO: 3726607 - DNA, 25 bp, Homo sapien
tcagcatccagatttcaccgggatg

SEQ ID NO: 3726608 - DNA, 25 bp, Homo sapien
taattaaagtgtttggattccaggc

SEQ ID NO: 3726609 - DNA, 25 bp, Homo sapien
tggatgtagcttttcttaggagcca

SEQ ID NO: 3726610 - DNA, 25 bp, Homo sapien
caaacccatccaacttgactcaaat

SEQ ID NO: 3726611 - DNA, 25 bp, Homo sapien
ggtaactctcagcattcccggaaac

SEQ ID NO: 3726612 - DNA, 25 bp, Homo sapien
gcggacaagagcagttcttcaatca

SEQ ID NO: 3726613 - DNA, 25 bp, Homo sapien
tttcacgctagtgggagcaactgga

SEQ ID NO: 3726614 - DNA, 25 bp, Homo sapien
ttagccatttgtgcggacaagagca

SEQ ID NO: 3726615 - DNA, 25 bp, Homo sapien
gaaatattggaggacgatgaacgtc

SEQ ID NO: 3726616 - DNA, 25 bp, Homo sapien
gttcttaagacttgacacaccctag

SEQ ID NO: 3726617 - DNA, 25 bp, Homo sapien
taaaagggcatttagccatgggcat

SEQ ID NO: 3726618 - DNA, 25 bp, Homo sapien
caaaaagagaagtccctgtgcatga

SEQ ID NO: 3726619 - DNA, 25 bp, Homo sapien
attgaccaatggctaaagctgagag

SEQ ID NO: 3726620 - DNA, 25 bp, Homo sapien
ttattgaccaatggctaaagctgag

SEQ ID NO: 3726621 - DNA, 25 bp, Homo sapien
gaccaatggctaaagctgagaggct

SEQ ID NO: 3726622 - DNA, 25 bp, Homo sapien
tgaccaatggctaaagctgagaggc

SEQ ID NO: 3726623 - DNA, 25 bp, Homo sapien
taactgcagatttctcccggtggct

SEQ ID NO: 3726624 - DNA, 25 bp, Homo sapien
ggcttttgacagaggcatggcagta

SEQ ID NO: 3726625 - DNA, 25 bp, Homo sapien
gacgtattggcattgcactgggcaa

SEQ ID NO: 3726626 - DNA, 25 bp, Homo sapien
aacataagtgggctaggagtccaac

SEQ ID NO: 3726627 - DNA, 25 bp, Homo sapien
taaaggacgtgtgtatgtatgccat

SEQ ID NO: 3726628 - DNA, 25 bp, Homo sapien
caactgagtaccgtgtgagaagaga

SEQ ID NO: 3726629 - DNA, 25 bp, Homo sapien
tgcatattcttaagtcgggacaata

SEQ ID NO: 3726630 - DNA, 25 bp, Homo sapien
taacactgcgtcttcagccaactga

SEQ ID NO: 3726631 - DNA, 25 bp, Homo sapien
gctggaatgcattctctgtaagcac

SEQ ID NO: 3726632 - DNA, 25 bp, Homo sapien
tgggaatcactacatgcagactgga

SEQ ID NO: 3726633 - DNA, 25 bp, Homo sapien
gatggtgcatattagagcgccaccc

SEQ ID NO: 3726634 - DNA, 25 bp, Homo sapien
tcttgggacttgtgggcaaatgtca

SEQ ID NO: 3726635 - DNA, 25 bp, Homo sapien
ctgtgcaagatcagaaacatcatcg

SEQ ID NO: 3726636 - DNA, 25 bp, Homo sapien
aacatcatcgttttcttttccctgg

SEQ ID NO: 3726637 - DNA, 25 bp, Homo sapien
caagatcagaaacatcatcgttttc

SEQ ID NO: 3726638 - DNA, 25 bp, Homo sapien
tcttttccctggtgagtcagagaag

SEQ ID NO: 3726639 - DNA, 25 bp, Homo sapien
ctatcgcctccacatgaaaatccat

SEQ ID NO: 3726640 - DNA, 25 bp, Homo sapien
gcataactgagaaagccgtagagta

SEQ ID NO: 3726641 - DNA, 25 bp, Homo sapien
ttcaggaatccccaatagccagcat

SEQ ID NO: 3726642 - DNA, 25 bp, Homo sapien
ggcttttgagatgtaaatactatcg

SEQ ID NO: 3726643 - DNA, 25 bp, Homo sapien
ttctcatcatcaaggccatacctga

SEQ ID NO: 3726644 - DNA, 25 bp, Homo sapien
tctcatcatcaaggccatacctgat

SEQ ID NO: 3726645 - DNA, 25 bp, Homo sapien
tcattttgacaaagctctatgacta

SEQ ID NO: 3726646 - DNA, 25 bp, Homo sapien
tttgacaaagctctatgactataac

SEQ ID NO: 3726647 - DNA, 25 bp, Homo sapien
cttcttttgccttcaggtgattctc

SEQ ID NO: 3726648 - DNA, 25 bp, Homo sapien
tcaggtgattctcattttgacaaag

SEQ ID NO: 3726649 - DNA, 25 bp, Homo sapien
ctgcaggagcaggtaacccttgctg

SEQ ID NO: 3726650 - DNA, 25 bp, Homo sapien
aggagcaggtaacccttgctgcagg

SEQ ID NO: 3726651 - DNA, 25 bp, Homo sapien
tgtgtgcatatttggcagctctgcc

SEQ ID NO: 3726652 - DNA, 25 bp, Homo sapien
gttgtgtgcatatttggcagctctg

SEQ ID NO: 3726653 - DNA, 25 bp, Homo sapien
ctgtcttccggagcagctgtaacgg

SEQ ID NO: 3726654 - DNA, 25 bp, Homo sapien
taaccaggtggactctgttcattgc

SEQ ID NO: 3726655 - DNA, 25 bp, Homo sapien
tgttcattgctgcagacaccaaaag

SEQ ID NO: 3726656 - DNA, 25 bp, Homo sapien
aatcttcgcaagtgtgcttgggctc

SEQ ID NO: 3726657 - DNA, 25 bp, Homo sapien
aaaattgtactgaggtggagtagga

SEQ ID NO: 3726658 - DNA, 25 bp, Homo sapien
ttgtactgaggtggagtaggaacat

SEQ ID NO: 3726659 - DNA, 25 bp, Homo sapien
aattgtactgaggtggagtaggaac

SEQ ID NO: 3726660 - DNA, 25 bp, Homo sapien
tgtactgaggtggagtaggaacatc

SEQ ID NO: 3726661 - DNA, 25 bp, Homo sapien
tgtatacctctcgtctttatcagaa

SEQ ID NO: 3726662 - DNA, 25 bp, Homo sapien
ccttgcagtaccctttgtatacctc

SEQ ID NO: 3726663 - DNA, 25 bp, Homo sapien
cacactcatcttctgggatttgtct

SEQ ID NO: 3726664 - DNA, 25 bp, Homo sapien
agaagacttgaccttttcttaatgc

SEQ ID NO: 3726665 - DNA, 25 bp, Homo sapien
cgttcagggtggtatggccatagag

SEQ ID NO: 3726666 - DNA, 25 bp, Homo sapien
cgcgttcagggtggtatggccatag

SEQ ID NO: 3726667 - DNA, 25 bp, Homo sapien
cgagatcagacgagaacggacgcgt

SEQ ID NO: 3726668 - DNA, 25 bp, Homo sapien
gacgcgttcagggtggtatggccat

SEQ ID NO: 3726669 - DNA, 25 bp, Homo sapien
gcataagtcagattagttagtatca

SEQ ID NO: 3726670 - DNA, 25 bp, Homo sapien
cataagtcagattagttagtatcat

SEQ ID NO: 3726671 - DNA, 25 bp, Homo sapien
taagtcagattagttagtatcatgg

SEQ ID NO: 3726672 - DNA, 25 bp, Homo sapien
aagcataagtcagattagttagtat

SEQ ID NO: 3726673 - DNA, 25 bp, Homo sapien
tgtgtaatttaaggccagggactaa

SEQ ID NO: 3726674 - DNA, 25 bp, Homo sapien
gaaacagtttgtcttgtaagtcaac

SEQ ID NO: 3726675 - DNA, 25 bp, Homo sapien
gaaaaaatgtgtaccctgaactcca

SEQ ID NO: 3726676 - DNA, 25 bp, Homo sapien
tattgtttgccagagccaagcttct

SEQ ID NO: 3726677 - DNA, 25 bp, Homo sapien
tatttttagttccaatacggtctga

SEQ ID NO: 3726678 - DNA, 25 bp, Homo sapien
tacggtctgaccttactaattcaga

SEQ ID NO: 3726679 - DNA, 25 bp, Homo sapien
tgagagagatattagtttggcttaa

SEQ ID NO: 3726680 - DNA, 25 bp, Homo sapien
aggctcctggtctgacacagtaatt

SEQ ID NO: 3726681 - DNA, 25 bp, Homo sapien
aagactcccgtggttcctactgcct

SEQ ID NO: 3726682 - DNA, 25 bp, Homo sapien
tgactgccgttgtcagatgcacctt

SEQ ID NO: 3726683 - DNA, 25 bp, Homo sapien
gaagttaacctttgcctgaccatct

SEQ ID NO: 3726684 - DNA, 25 bp, Homo sapien
tctctttggagtacccttgaaacag

SEQ ID NO: 3726685 - DNA, 25 bp, Homo sapien
aaaattcccattgctatgtcctcct

SEQ ID NO: 3726686 - DNA, 25 bp, Homo sapien
gagaacccgtgacagaaaagtcttg

SEQ ID NO: 3726687 - DNA, 25 bp, Homo sapien
cataaaacctgcaggttgaatgaga

SEQ ID NO: 3726688 - DNA, 25 bp, Homo sapien
gttgaatgagaacccgtgacagaaa

SEQ ID NO: 3726689 - DNA, 25 bp, Homo sapien
tgaaaatgatccttgatttggactg

SEQ ID NO: 3726690 - DNA, 25 bp, Homo sapien
tgatccttgatttggactggagtgt

SEQ ID NO: 3726691 - DNA, 25 bp, Homo sapien
ctgagatgcaacttgattagacata

SEQ ID NO: 3726692 - DNA, 25 bp, Homo sapien
aaatgatccttgatttggactggag

SEQ ID NO: 3726693 - DNA, 25 bp, Homo sapien
atgttaaagccaatcaggaaagtct

SEQ ID NO: 3726694 - DNA, 25 bp, Homo sapien
ggaaagtctccgtgcacacggtgac

SEQ ID NO: 3726695 - DNA, 25 bp, Homo sapien
tgaggatttagaaagcgggaactgg

SEQ ID NO: 3726696 - DNA, 25 bp, Homo sapien
tgcacacggtgacaagaaagccatc

SEQ ID NO: 3726697 - DNA, 25 bp, Homo sapien
ttcacatttcaagatgcagtatcct

SEQ ID NO: 3726698 - DNA, 25 bp, Homo sapien
gacttcacatttcaagatgcagtat

SEQ ID NO: 3726699 - DNA, 25 bp, Homo sapien
cagtatccttgatcttgttgagtta

SEQ ID NO: 3726700 - DNA, 25 bp, Homo sapien
atgcagtatccttgatcttgttgag

SEQ ID NO: 3726701 - DNA, 25 bp, Homo sapien
ggtgctgcggaggacaaccagtttt

SEQ ID NO: 3726702 - DNA, 25 bp, Homo sapien
ttttttctgccgtaaaggctggtgc

SEQ ID NO: 3726703 - DNA, 25 bp, Homo sapien
ctggtgctgcggaggacaaccagtt

SEQ ID NO: 3726704 - DNA, 25 bp, Homo sapien
ttctgccgtaaaggctggtgctgcg

SEQ ID NO: 3726705 - DNA, 25 bp, Homo sapien
tgagtgccctactaggaaagtggcc

SEQ ID NO: 3726706 - DNA, 25 bp, Homo sapien
tagaaggagatctggtgtcccgagc

SEQ ID NO: 3726707 - DNA, 25 bp, Homo sapien
atcagtgtcattgaatatcgctgag

SEQ ID NO: 3726708 - DNA, 25 bp, Homo sapien
aagtggcctttttagaaggagatct

SEQ ID NO: 3726709 - DNA, 25 bp, Homo sapien
gggtcctcgagatagagtgatttag

SEQ ID NO: 3726710 - DNA, 25 bp, Homo sapien
agggtcctcgagatagagtgattta

SEQ ID NO: 3726711 - DNA, 25 bp, Homo sapien
ggtcctcgagatagagtgatttagg

SEQ ID NO: 3726712 - DNA, 25 bp, Homo sapien
tatgcctactttgttacatcgttgg

SEQ ID NO: 3726713 - DNA, 25 bp, Homo sapien
ggcctgccgtatccatttgcgttat

SEQ ID NO: 3726714 - DNA, 25 bp, Homo sapien
aaggtgggtgaaacaactgaacaat

SEQ ID NO: 3726715 - DNA, 25 bp, Homo sapien
gcgttatttcccctgtgaactggaa

SEQ ID NO: 3726716 - DNA, 25 bp, Homo sapien
aaggtaatgttcgtgaagccgtgac

SEQ ID NO: 3726717 - DNA, 25 bp, Homo sapien
ctcatgaggaaggtaatgttcgtga

SEQ ID NO: 3726718 - DNA, 25 bp, Homo sapien
gccgtgacccaacctgaattacaag

SEQ ID NO: 3726719 - DNA, 25 bp, Homo sapien
gtgaagccgtgacccaacctgaatt

SEQ ID NO: 3726720 - DNA, 25 bp, Homo sapien
ccatgttccagaagatcaggcaatg

SEQ ID NO: 3726721 - DNA, 25 bp, Homo sapien
caatgagtttctcttgccgacagat

SEQ ID NO: 3726722 - DNA, 25 bp, Homo sapien
cccgcgttggtgagagacactctga

SEQ ID NO: 3726723 - DNA, 25 bp, Homo sapien
taatgaccagccagtgctcttaggt

SEQ ID NO: 3726724 - DNA, 25 bp, Homo sapien
aacaacaaagcctgatagctttcct

SEQ ID NO: 3726725 - DNA, 25 bp, Homo sapien
caaagcctgatagctttccttcatt

SEQ ID NO: 3726726 - DNA, 25 bp, Homo sapien
ggtggattaagttcatagttcacac

SEQ ID NO: 3726727 - DNA, 25 bp, Homo sapien
tgcttgggtggtggattaagttcat

SEQ ID NO: 3726728 - DNA, 25 bp, Homo sapien
gcgctttcctgggtactcatgacct

SEQ ID NO: 3726729 - DNA, 25 bp, Homo sapien
cagcgctttcctgggtactcatgac

SEQ ID NO: 3726730 - DNA, 25 bp, Homo sapien
tttcctgggtactcatgacctcaca

SEQ ID NO: 3726731 - DNA, 25 bp, Homo sapien
gctttcctgggtactcatgacctca

SEQ ID NO: 3726732 - DNA, 25 bp, Homo sapien
cagtcgtgctttgcctttcaagtta

SEQ ID NO: 3726733 - DNA, 25 bp, Homo sapien
catggccggtttaagcagtcgtgct

SEQ ID NO: 3726734 - DNA, 25 bp, Homo sapien
gatagcctgctttccgcattttcag

SEQ ID NO: 3726735 - DNA, 25 bp, Homo sapien
tttggtttcatggaaagagtcctcc

SEQ ID NO: 3726736 - DNA, 25 bp, Homo sapien
cattttataatgacacagaggtgcc

SEQ ID NO: 3726737 - DNA, 25 bp, Homo sapien
cctgcttttagtccgtaaggagatg

SEQ ID NO: 3726738 - DNA, 25 bp, Homo sapien
gaggtgccatcatgctattgtgcca

SEQ ID NO: 3726739 - DNA, 25 bp, Homo sapien
tgctaaatcggtgcctcactttgga

SEQ ID NO: 3726740 - DNA, 25 bp, Homo sapien
gctgtatcctgtaggtaaaagaaaa

SEQ ID NO: 3726741 - DNA, 25 bp, Homo sapien
caaagcatagatttagacccttatt

SEQ ID NO: 3726742 - DNA, 25 bp, Homo sapien
caagtcccctagctagtaaatgaca

SEQ ID NO: 3726743 - DNA, 25 bp, Homo sapien
tccagtaggtaatatgttcaagtcc

SEQ ID NO: 3726744 - DNA, 25 bp, Homo sapien
cctttccaaatctcttccttgtgtg

SEQ ID NO: 3726745 - DNA, 25 bp, Homo sapien
ctttccaaatctcttccttgtgtgt

SEQ ID NO: 3726746 - DNA, 25 bp, Homo sapien
tttctcacacaaaactccatcttac

SEQ ID NO: 3726747 - DNA, 25 bp, Homo sapien
aatcagtcactagtaggaactctgc

SEQ ID NO: 3726748 - DNA, 25 bp, Homo sapien
actctgctagaatctgcatctcctg

SEQ ID NO: 3726749 - DNA, 25 bp, Homo sapien
aaaggctgcacttggaaaccacaag

SEQ ID NO: 3726750 - DNA, 25 bp, Homo sapien
cacaagctggcgtttgtaaaaatca

SEQ ID NO: 3726751 - DNA, 25 bp, Homo sapien
ctgttatataaggatgcaataaaac

SEQ ID NO: 3726752 - DNA, 25 bp, Homo sapien
tatataaggatgcaataaaactgtg

SEQ ID NO: 3726753 - DNA, 25 bp, Homo sapien
attctgttatataaggatgcaataa

SEQ ID NO: 3726754 - DNA, 25 bp, Homo sapien
aggatgcaataaaactgtggagcta

SEQ ID NO: 3726755 - DNA, 25 bp, Homo sapien
cagccagtgagtagttgaagagata

SEQ ID NO: 3726756 - DNA, 25 bp, Homo sapien
gatgatgttacaaggtcccgatctg

SEQ ID NO: 3726757 - DNA, 25 bp, Homo sapien
gagataccttcgtggtctttcagtt

SEQ ID NO: 3726758 - DNA, 25 bp, Homo sapien
tctttccttgcacgtaagtctcagc

SEQ ID NO: 3726759 - DNA, 25 bp, Homo sapien
ggcaataacccgctccatgatgctg

SEQ ID NO: 3726760 - DNA, 25 bp, Homo sapien
gtgtccatccccacaagtggcttct

SEQ ID NO: 3726761 - DNA, 25 bp, Homo sapien
tgtttggtttctccctgctgactaa

SEQ ID NO: 3726762 - DNA, 25 bp, Homo sapien
tgtgtgtcatcttgttatcctggga

SEQ ID NO: 3726763 - DNA, 25 bp, Homo sapien
caaggattataactgagttaccaga

SEQ ID NO: 3726764 - DNA, 25 bp, Homo sapien
tcaacattttggagcagcagtagtc

SEQ ID NO: 3726765 - DNA, 25 bp, Homo sapien
aaggactgcctgttgatgctaatgg

SEQ ID NO: 3726766 - DNA, 25 bp, Homo sapien
gggttttacttgctcaaggattata

SEQ ID NO: 3726767 - DNA, 25 bp, Homo sapien
catgcaacgtgcttaggctaatgag

SEQ ID NO: 3726768 - DNA, 25 bp, Homo sapien
ttaggctaatgagatgatagcatat

SEQ ID NO: 3726769 - DNA, 25 bp, Homo sapien
aatgagatgatagcatataagaaac

SEQ ID NO: 3726770 - DNA, 25 bp, Homo sapien
ggctaatgagatgatagcatataag

SEQ ID NO: 3726771 - DNA, 25 bp, Homo sapien
gagcgtagagtgagctttttagatt

SEQ ID NO: 3726772 - DNA, 25 bp, Homo sapien
tcgtggagcgtagagtgagcttttt

SEQ ID NO: 3726773 - DNA, 25 bp, Homo sapien
tggagcgtagagtgagctttttaga

SEQ ID NO: 3726774 - DNA, 25 bp, Homo sapien
tttgatctcgtggagcgtagagtga

SEQ ID NO: 3726775 - DNA, 25 bp, Homo sapien
ggcacaaggtcactgaatcacacga

SEQ ID NO: 3726776 - DNA, 25 bp, Homo sapien
cacaaggtcactgaatcacacgagg

SEQ ID NO: 3726777 - DNA, 25 bp, Homo sapien
attatggcacaaggtcactgaatca

SEQ ID NO: 3726778 - DNA, 25 bp, Homo sapien
aaggtcactgaatcacacgaggtca

SEQ ID NO: 3726779 - DNA, 25 bp, Homo sapien
tattgccagaacttttggtgctaga

SEQ ID NO: 3726780 - DNA, 25 bp, Homo sapien
ggtggtccccagtgtgataattata

SEQ ID NO: 3726781 - DNA, 25 bp, Homo sapien
taaaatggtaactccatgaagcagg

SEQ ID NO: 3726782 - DNA, 25 bp, Homo sapien
tggtgctagaagtagagaagtctcc

SEQ ID NO: 3726783 - DNA, 25 bp, Homo sapien
tccagacttcctactacgatgacca

SEQ ID NO: 3726784 - DNA, 25 bp, Homo sapien
ggctggccagtttcacgttgttgtt

SEQ ID NO: 3726785 - DNA, 25 bp, Homo sapien
accattatgtgaatatgggtcattg

SEQ ID NO: 3726786 - DNA, 25 bp, Homo sapien
acgttgttgttgtgctccagacttc

SEQ ID NO: 3726787 - DNA, 25 bp, Homo sapien
ctctttctctcttatttcagtaaga

SEQ ID NO: 3726788 - DNA, 25 bp, Homo sapien
ctctcttatttcagtaagaaatgtg

SEQ ID NO: 3726789 - DNA, 25 bp, Homo sapien
cttatttcagtaagaaatgtgtcca

SEQ ID NO: 3726790 - DNA, 25 bp, Homo sapien
ctcttatttcagtaagaaatgtgtc

SEQ ID NO: 3726791 - DNA, 25 bp, Homo sapien
tgtcttccaggttgctttcacagaa

SEQ ID NO: 3726792 - DNA, 25 bp, Homo sapien
gtcttccaggttgctttcacagaat

SEQ ID NO: 3726793 - DNA, 25 bp, Homo sapien
tcttccaggttgctttcacagaatt

SEQ ID NO: 3726794 - DNA, 25 bp, Homo sapien
tgaaacttaatccaggacctctctt

SEQ ID NO: 3726795 - DNA, 25 bp, Homo sapien
cctgggcataaagatcataaagctg

SEQ ID NO: 3726796 - DNA, 25 bp, Homo sapien
gctgcaggatcaggatattgcagaa

SEQ ID NO: 3726797 - DNA, 25 bp, Homo sapien
tcgctccgcagggtggtccccatgg

SEQ ID NO: 3726798 - DNA, 25 bp, Homo sapien
tacagcactagctagttggcaacat

SEQ ID NO: 3726799 - DNA, 25 bp, Homo sapien
ttcagttacagcactagctagttgg

SEQ ID NO: 3726800 - DNA, 25 bp, Homo sapien
cactagctagttggcaacatatttc

SEQ ID NO: 3726801 - DNA, 25 bp, Homo sapien
catccaatttatggtgctgtttctt

SEQ ID NO: 3726802 - DNA, 25 bp, Homo sapien
gacagcagattcaatgcagcaatca

SEQ ID NO: 3726803 - DNA, 25 bp, Homo sapien
gttggctagttaatcctggtgtttc

SEQ ID NO: 3726804 - DNA, 25 bp, Homo sapien
ggaagcccactcaatttttacttga

SEQ ID NO: 3726805 - DNA, 25 bp, Homo sapien
catgcagacctatggtgttggctag

SEQ ID NO: 3726806 - DNA, 25 bp, Homo sapien
cagtgagaagaccaacctgagtttc

SEQ ID NO: 3726807 - DNA, 25 bp, Homo sapien
ttgggtctttctccacgatacagag

SEQ ID NO: 3726808 - DNA, 25 bp, Homo sapien
agcaggatcacaatgtgctcattcc

SEQ ID NO: 3726809 - DNA, 25 bp, Homo sapien
caatgtgctcattcctttaagaagc

SEQ ID NO: 3726810 - DNA, 25 bp, Homo sapien
ctaaacaggagatatttaaagcgat

SEQ ID NO: 3726811 - DNA, 25 bp, Homo sapien
atttaaagcgatatctgtttctcct

SEQ ID NO: 3726812 - DNA, 25 bp, Homo sapien
caggagatatttaaagcgatatctg

SEQ ID NO: 3726813 - DNA, 25 bp, Homo sapien
aatctaaacaggagatatttaaagc

SEQ ID NO: 3726814 - DNA, 25 bp, Homo sapien
gaatcaaaactaaacatcgcctctt

SEQ ID NO: 3726815 - DNA, 25 bp, Homo sapien
cttggattcttctattttaaccaca

SEQ ID NO: 3726816 - DNA, 25 bp, Homo sapien
taaccacagaatcaaaactaaacat

SEQ ID NO: 3726817 - DNA, 25 bp, Homo sapien
aaacacttcgcagatcctccttgga

SEQ ID NO: 3726818 - DNA, 25 bp, Homo sapien
ggtccatgtagctgttgatgccgct

SEQ ID NO: 3726819 - DNA, 25 bp, Homo sapien
tgttgatgccgctattccaaaagca

SEQ ID NO: 3726820 - DNA, 25 bp, Homo sapien
ttgatgccgctattccaaaagcaga

SEQ ID NO: 3726821 - DNA, 25 bp, Homo sapien
gtagctgttgatgccgctattccaa

SEQ ID NO: 3726822 - DNA, 25 bp, Homo sapien
tccaaaaccaggcaatatagatggc

SEQ ID NO: 3726823 - DNA, 25 bp, Homo sapien
tgtaattattatgctctgtcagctc

SEQ ID NO: 3726824 - DNA, 25 bp, Homo sapien
ggctttgagaaagcggaatcttgta

SEQ ID NO: 3726825 - DNA, 25 bp, Homo sapien
cggaatcttgtattctttgacaatg

SEQ ID NO: 3726826 - DNA, 25 bp, Homo sapien
acttctcactgaagtccatctcagc

SEQ ID NO: 3726827 - DNA, 25 bp, Homo sapien
cttctcactgaagtccatctcagca

SEQ ID NO: 3726828 - DNA, 25 bp, Homo sapien
ttctcactgaagtccatctcagcat

SEQ ID NO: 3726829 - DNA, 25 bp, Homo sapien
tgaagtaaccaacctcacatcttct

SEQ ID NO: 3726830 - DNA, 25 bp, Homo sapien
cggtccgtgtctctgaagtaaccaa

SEQ ID NO: 3726831 - DNA, 25 bp, Homo sapien
gtctctgaagtaaccaacctcacat

SEQ ID NO: 3726832 - DNA, 25 bp, Homo sapien
ctgcacggtccgtgtctctgaagta

SEQ ID NO: 3726833 - DNA, 25 bp, Homo sapien
gaccagctggcaaatttctccagag

SEQ ID NO: 3726834 - DNA, 25 bp, Homo sapien
gcaaatatccaaataacctgagtgg

SEQ ID NO: 3726835 - DNA, 25 bp, Homo sapien
cttctagccataatagaccagctgg

SEQ ID NO: 3726836 - DNA, 25 bp, Homo sapien
tcagtaatagaaacgttacttgtcc

SEQ ID NO: 3726837 - DNA, 25 bp, Homo sapien
gttgaccatggtgaacctgagtgga

SEQ ID NO: 3726838 - DNA, 25 bp, Homo sapien
catggtgaacctgagtggactgtga

SEQ ID NO: 3726839 - DNA, 25 bp, Homo sapien
ttctggtaaaagctcctctctattc

SEQ ID NO: 3726840 - DNA, 25 bp, Homo sapien
ggtgaacctgagtggactgtgattt

SEQ ID NO: 3726841 - DNA, 25 bp, Homo sapien
tttcaatgggattcaggcagctgac

SEQ ID NO: 3726842 - DNA, 25 bp, Homo sapien
ccggagagcaaccagggcaatgtct

SEQ ID NO: 3726843 - DNA, 25 bp, Homo sapien
ggcaatgtctgagcatccaaaagtg

SEQ ID NO: 3726844 - DNA, 25 bp, Homo sapien
tcctatgcagaataaaagtctccct

SEQ ID NO: 3726845 - DNA, 25 bp, Homo sapien
caaagactgtaccaattgcagcctt

SEQ ID NO: 3726846 - DNA, 25 bp, Homo sapien
aaaaatggccacaaagactgtacca

SEQ ID NO: 3726847 - DNA, 25 bp, Homo sapien
agactgtaccaattgcagccttgtc

SEQ ID NO: 3726848 - DNA, 25 bp, Homo sapien
ctaaaaaatggccacaaagactgta

SEQ ID NO: 3726849 - DNA, 25 bp, Homo sapien
gagtccttgactaacactagttttg

SEQ ID NO: 3726850 - DNA, 25 bp, Homo sapien
aaatgtggtcatcctgtttctatca

SEQ ID NO: 3726851 - DNA, 25 bp, Homo sapien
tgcttaagatgggaaatcggcctca

SEQ ID NO: 3726852 - DNA, 25 bp, Homo sapien
gagccgctatgcttggccaagagca

SEQ ID NO: 3726853 - DNA, 25 bp, Homo sapien
ccacccaagtaccaagcaggcccaa

SEQ ID NO: 3726854 - DNA, 25 bp, Homo sapien
cccacccaagtaccaagcaggccca

SEQ ID NO: 3726855 - DNA, 25 bp, Homo sapien
agtaccaagcaggcccaaccttgct

SEQ ID NO: 3726856 - DNA, 25 bp, Homo sapien
tctgtacgtgggctccactttcttc

SEQ ID NO: 3726857 - DNA, 25 bp, Homo sapien
atgtatcatctctctgtacgtgggc

SEQ ID NO: 3726858 - DNA, 25 bp, Homo sapien
aatctaggacacatgatatcatcaa

SEQ ID NO: 3726859 - DNA, 25 bp, Homo sapien
tctaggacacatgatatcatcaatg

SEQ ID NO: 3726860 - DNA, 25 bp, Homo sapien
ggattgcacaatcattgaggacaag

SEQ ID NO: 3726861 - DNA, 25 bp, Homo sapien
tgaatcttgagtcatagtcctccac

SEQ ID NO: 3726862 - DNA, 25 bp, Homo sapien
cattgcctttttgcaatcggattgc

SEQ ID NO: 3726863 - DNA, 25 bp, Homo sapien
tagaggcatagcatacagtaggtgc

SEQ ID NO: 3726864 - DNA, 25 bp, Homo sapien
ttctttcacttctttcccttgccat

SEQ ID NO: 3726865 - DNA, 25 bp, Homo sapien
tgtagtgttttctaagagtagggcc

SEQ ID NO: 3726866 - DNA, 25 bp, Homo sapien
ttctaagagtagggcctgtttcttc

SEQ ID NO: 3726867 - DNA, 25 bp, Homo sapien
cagtgtagtgttttctaagagtagg

SEQ ID NO: 3726868 - DNA, 25 bp, Homo sapien
cctactgccggatgatgcttcacca

SEQ ID NO: 3726869 - DNA, 25 bp, Homo sapien
cagtaagcatccacggaagaagccg

SEQ ID NO: 3726870 - DNA, 25 bp, Homo sapien
gaagaagccgcttggcaaaattggg

SEQ ID NO: 3726871 - DNA, 25 bp, Homo sapien
ctaggctttcctaaggttgtgtgat

SEQ ID NO: 3726872 - DNA, 25 bp, Homo sapien
gttcttcttggtgaacagccatccc

SEQ ID NO: 3726873 - DNA, 25 bp, Homo sapien
ttggtgaacagccatccctttgcaa

SEQ ID NO: 3726874 - DNA, 25 bp, Homo sapien
gcagcttctctaagttctgctgaca

SEQ ID NO: 3726875 - DNA, 25 bp, Homo sapien
tctaagttctgctgacacgtctcca

SEQ ID NO: 3726876 - DNA, 25 bp, Homo sapien
tgtccctctagcacaatatagatgc

SEQ ID NO: 3726877 - DNA, 25 bp, Homo sapien
ttttagtactggaacacatgaggtg

SEQ ID NO: 3726878 - DNA, 25 bp, Homo sapien
gaggtctttaaccattctacttgta

SEQ ID NO: 3726879 - DNA, 25 bp, Homo sapien
catgaggtgattgcaaattgctcag

SEQ ID NO: 3726880 - DNA, 25 bp, Homo sapien
tcatagaactcttaacgttccccat

SEQ ID NO: 3726881 - DNA, 25 bp, Homo sapien
gatcatagaactcttaacgttcccc

SEQ ID NO: 3726882 - DNA, 25 bp, Homo sapien
gaagctctcactgatcatagaactc

SEQ ID NO: 3726883 - DNA, 25 bp, Homo sapien
aagctctcactgatcatagaactct

SEQ ID NO: 3726884 - DNA, 25 bp, Homo sapien
tatgtgactcatgattaaactgttt

SEQ ID NO: 3726885 - DNA, 25 bp, Homo sapien
ctgtgctgagcatcttatgtgactc

SEQ ID NO: 3726886 - DNA, 25 bp, Homo sapien
tcttttgccaataatccttctctga

SEQ ID NO: 3726887 - DNA, 25 bp, Homo sapien
tggaatatattcaccctgagaacag

SEQ ID NO: 3726888 - DNA, 25 bp, Homo sapien
ctagaaatagatcccgaatcctata

SEQ ID NO: 3726889 - DNA, 25 bp, Homo sapien
gaaatagatcccgaatcctataggc

SEQ ID NO: 3726890 - DNA, 25 bp, Homo sapien
gatcccgaatcctataggcattagg

SEQ ID NO: 3726891 - DNA, 25 bp, Homo sapien
ccgaatcctataggcattaggtttg

SEQ ID NO: 3726892 - DNA, 25 bp, Homo sapien
gcagtcctggagaacaattgtgaga

SEQ ID NO: 3726893 - DNA, 25 bp, Homo sapien
ataatggtgacagctatagacaggc

SEQ ID NO: 3726894 - DNA, 25 bp, Homo sapien
gtgacagctatagacaggcagtcct

SEQ ID NO: 3726895 - DNA, 25 bp, Homo sapien
caggcagtcctggagaacaattgtg

SEQ ID NO: 3726896 - DNA, 25 bp, Homo sapien
aattacagttgacaggttgggcaca

SEQ ID NO: 3726897 - DNA, 25 bp, Homo sapien
tacagttgacaggttgggcacagaa

SEQ ID NO: 3726898 - DNA, 25 bp, Homo sapien
ttacagttgacaggttgggcacaga

SEQ ID NO: 3726899 - DNA, 25 bp, Homo sapien
agaaatctgcaagtcgtctatttct

SEQ ID NO: 3726900 - DNA, 25 bp, Homo sapien
cctgccttggcttttagtgatctaa

SEQ ID NO: 3726901 - DNA, 25 bp, Homo sapien
cgtacagatgtaccaaggtgttcat

SEQ ID NO: 3726902 - DNA, 25 bp, Homo sapien
ataccaagaggaagattgctagatc

SEQ ID NO: 3726903 - DNA, 25 bp, Homo sapien
taataggtgtgtagttgcacctcat

SEQ ID NO: 3726904 - DNA, 25 bp, Homo sapien
tgagctgcgagttttctgggagaat

SEQ ID NO: 3726905 - DNA, 25 bp, Homo sapien
tttcttccatcattccccttgactt

SEQ ID NO: 3726906 - DNA, 25 bp, Homo sapien
gacttcatgagctgcgagttttctg

SEQ ID NO: 3726907 - DNA, 25 bp, Homo sapien
tgtgcttggttctcctcgagagttc

SEQ ID NO: 3726908 - DNA, 25 bp, Homo sapien
gaacaagcctgtctattgctacatt

SEQ ID NO: 3726909 - DNA, 25 bp, Homo sapien
tatattgaacaagcctgtctattgc

SEQ ID NO: 3726910 - DNA, 25 bp, Homo sapien
taattttatattgaacaagcctgtc

SEQ ID NO: 3726911 - DNA, 25 bp, Homo sapien
agcctgtctattgctacatttctca

SEQ ID NO: 3726912 - DNA, 25 bp, Homo sapien
taagtctccgttgtcagcatattcc

SEQ ID NO: 3726913 - DNA, 25 bp, Homo sapien
ttcaaaaagtaagtctccgttgtca

SEQ ID NO: 3726914 - DNA, 25 bp, Homo sapien
tctccgttgtcagcatattcctcac

SEQ ID NO: 3726915 - DNA, 25 bp, Homo sapien
aaaaagtaagtctccgttgtcagca

SEQ ID NO: 3726916 - DNA, 25 bp, Homo sapien
gttcacctgaaatacataccactgg

SEQ ID NO: 3726917 - DNA, 25 bp, Homo sapien
tacataccactggtatgaagccctc

SEQ ID NO: 3726918 - DNA, 25 bp, Homo sapien
gggtgttcacctgaaatacatacca

SEQ ID NO: 3726919 - DNA, 25 bp, Homo sapien
atgaagccctccgatccccaggaaa

SEQ ID NO: 3726920 - DNA, 25 bp, Homo sapien
tcttcttcagcccatgggcatgtgg

SEQ ID NO: 3726921 - DNA, 25 bp, Homo sapien
catgtggagctgtgtgttcaaggac

SEQ ID NO: 3726922 - DNA, 25 bp, Homo sapien
ttcttcagcccatgggcatgtggag

SEQ ID NO: 3726923 - DNA, 25 bp, Homo sapien
gctgtgtgttcaaggacaatatcca

SEQ ID NO: 3726924 - DNA, 25 bp, Homo sapien
cttggataaagttgctattcaacag

SEQ ID NO: 3726925 - DNA, 25 bp, Homo sapien
ttggataaagttgctattcaacagg

SEQ ID NO: 3726926 - DNA, 25 bp, Homo sapien
tgagggcacagtaaaagagggattc

SEQ ID NO: 3726927 - DNA, 25 bp, Homo sapien
cagaagtgagaaaaaacacgggaca

SEQ ID NO: 3726928 - DNA, 25 bp, Homo sapien
tgtctgctgcagtcaagcatgatga

SEQ ID NO: 3726929 - DNA, 25 bp, Homo sapien
cacgggacagcaattctgaacagct

SEQ ID NO: 3726930 - DNA, 25 bp, Homo sapien
aactccagtcattaatggttccgaa

SEQ ID NO: 3726931 - DNA, 25 bp, Homo sapien
tgggtcaatcctctttagcatgcat

SEQ ID NO: 3726932 - DNA, 25 bp, Homo sapien
atgcattgtcccctacgcttaactc

SEQ ID NO: 3726933 - DNA, 25 bp, Homo sapien
tctggtcgagatccaaaattgggtc

SEQ ID NO: 3726934 - DNA, 25 bp, Homo sapien
ccagcttattatagtgatgtttttc

SEQ ID NO: 3726935 - DNA, 25 bp, Homo sapien
agtgatgtttttcctacgcagatgc

SEQ ID NO: 3726936 - DNA, 25 bp, Homo sapien
gtgatgtttttcctacgcagatgca

SEQ ID NO: 3726937 - DNA, 25 bp, Homo sapien
atgtttttcctacgcagatgcatat

SEQ ID NO: 3726938 - DNA, 25 bp, Homo sapien
gacaaatatacgtcccctccatgga

SEQ ID NO: 3726939 - DNA, 25 bp, Homo sapien
acaaatatacgtcccctccatggag

SEQ ID NO: 3726940 - DNA, 25 bp, Homo sapien
ggacaaatatacgtcccctccatgg

SEQ ID NO: 3726941 - DNA, 25 bp, Homo sapien
aggacaaatatacgtcccctccatg

SEQ ID NO: 3726942 - DNA, 25 bp, Homo sapien
gaactcccttcacttgttatatcaa

SEQ ID NO: 3726943 - DNA, 25 bp, Homo sapien
tttgaaccagaactcccttcacttg

SEQ ID NO: 3726944 - DNA, 25 bp, Homo sapien
cacttgttatatcaaggttggagac

SEQ ID NO: 3726945 - DNA, 25 bp, Homo sapien
tatatcaaggttggagactctcaga

SEQ ID NO: 3726946 - DNA, 25 bp, Homo sapien
gggcttcctgcaagtcacctgaagg

SEQ ID NO: 3726947 - DNA, 25 bp, Homo sapien
cctcagtgagtcaggctgagcacaa

SEQ ID NO: 3726948 - DNA, 25 bp, Homo sapien
cacctgaaggccttctttgaaggga

SEQ ID NO: 3726949 - DNA, 25 bp, Homo sapien
ctgagcacaaaagattgtaatttca

SEQ ID NO: 3726950 - DNA, 25 bp, Homo sapien
aggtgagagaatcatgtggttctga

SEQ ID NO: 3726951 - DNA, 25 bp, Homo sapien
cttgttctggaggtgagagaatcat

SEQ ID NO: 3726952 - DNA, 25 bp, Homo sapien
tgttctggaggtgagagaatcatgt

SEQ ID NO: 3726953 - DNA, 25 bp, Homo sapien
gagaatcatgtggttctgagttcat

SEQ ID NO: 3726954 - DNA, 25 bp, Homo sapien
cagagttgagtactgacacactgct

SEQ ID NO: 3726955 - DNA, 25 bp, Homo sapien
ggggattcctgaacactagctgctg

SEQ ID NO: 3726956 - DNA, 25 bp, Homo sapien
gggattcctgaacactagctgctgc

SEQ ID NO: 3726957 - DNA, 25 bp, Homo sapien
caggggattcctgaacactagctgc

SEQ ID NO: 3726958 - DNA, 25 bp, Homo sapien
aggggattcctgaacactagctgct

SEQ ID NO: 3726959 - DNA, 25 bp, Homo sapien
aggtggccctgatagagaattggct

SEQ ID NO: 3726960 - DNA, 25 bp, Homo sapien
atggatacgggtattgatctggctt

SEQ ID NO: 3726961 - DNA, 25 bp, Homo sapien
tcctgcctataggtgaaggtggccc

SEQ ID NO: 3726962 - DNA, 25 bp, Homo sapien
tgggatccctctcattgccaagatg

SEQ ID NO: 3726963 - DNA, 25 bp, Homo sapien
cattacagtagctacaccccctttt

SEQ ID NO: 3726964 - DNA, 25 bp, Homo sapien
aaatcagactgttctgattgcttct

SEQ ID NO: 3726965 - DNA, 25 bp, Homo sapien
atcagactgttctgattgcttcttt

SEQ ID NO: 3726966 - DNA, 25 bp, Homo sapien
tgttagacctggcatacagagaaaa

SEQ ID NO: 3726967 - DNA, 25 bp, Homo sapien
ccaattgttgcaggcctggacaagg

SEQ ID NO: 3726968 - DNA, 25 bp, Homo sapien
ttcacttggagaagtctttccacag

SEQ ID NO: 3726969 - DNA, 25 bp, Homo sapien
caaggacaaggaacgagtctcctga

SEQ ID NO: 3726970 - DNA, 25 bp, Homo sapien
tggagccaagtgctccattcacttg

SEQ ID NO: 3726971 - DNA, 25 bp, Homo sapien
tacccctcctacaagcagcagttgg

SEQ ID NO: 3726972 - DNA, 25 bp, Homo sapien
gacataatcagaatctagtctctca

SEQ ID NO: 3726973 - DNA, 25 bp, Homo sapien
tatcatgccacagaaatccacagac

SEQ ID NO: 3726974 - DNA, 25 bp, Homo sapien
tctgacgttttatgcaggctttttg

SEQ ID NO: 3726975 - DNA, 25 bp, Homo sapien
tggtctctttcataacccaagtcat

SEQ ID NO: 3726976 - DNA, 25 bp, Homo sapien
ggtggtctctttcataacccaagtc

SEQ ID NO: 3726977 - DNA, 25 bp, Homo sapien
gtggtctctttcataacccaagtca

SEQ ID NO: 3726978 - DNA, 25 bp, Homo sapien
gctccaagggaccatcctccagagt

SEQ ID NO: 3726979 - DNA, 25 bp, Homo sapien
aattctccataatgaagctccaagg

SEQ ID NO: 3726980 - DNA, 25 bp, Homo sapien
gggctagagattcagcagtgtcagc

SEQ ID NO: 3726981 - DNA, 25 bp, Homo sapien
cagagtcagggctagagattcagca

SEQ ID NO: 3726982 - DNA, 25 bp, Homo sapien
agtcctctgcaggttttctgcctca

SEQ ID NO: 3726983 - DNA, 25 bp, Homo sapien
tcctctgcaggttttctgcctcatg

SEQ ID NO: 3726984 - DNA, 25 bp, Homo sapien
gcaggttttctgcctcatgtattac

SEQ ID NO: 3726985 - DNA, 25 bp, Homo sapien
ctgcaggttttctgcctcatgtatt

SEQ ID NO: 3726986 - DNA, 25 bp, Homo sapien
aatctttgatttgtgaagttgtttt

SEQ ID NO: 3726987 - DNA, 25 bp, Homo sapien
gaatctttgatttgtgaagttgttt

SEQ ID NO: 3726988 - DNA, 25 bp, Homo sapien
taagcgtgtcaggattccgtagatt

SEQ ID NO: 3726989 - DNA, 25 bp, Homo sapien
gcgtgtcaggattccgtagattctt

SEQ ID NO: 3726990 - DNA, 25 bp, Homo sapien
tcaggattccgtagattcttggagg

SEQ ID NO: 3726991 - DNA, 25 bp, Homo sapien
ctgaactaagcgtgtcaggattccg

SEQ ID NO: 3726992 - DNA, 25 bp, Homo sapien
cactcttagaacctgtgcccgagag

SEQ ID NO: 3726993 - DNA, 25 bp, Homo sapien
actcttagaacctgtgcccgagagt

SEQ ID NO: 3726994 - DNA, 25 bp, Homo sapien
tcttagaacctgtgcccgagagtac

SEQ ID NO: 3726995 - DNA, 25 bp, Homo sapien
ctcttagaacctgtgcccgagagta

SEQ ID NO: 3726996 - DNA, 25 bp, Homo sapien
taacacaatctcctttcgggtggac

SEQ ID NO: 3726997 - DNA, 25 bp, Homo sapien
caaagccaactggtatcctggtgaa

SEQ ID NO: 3726998 - DNA, 25 bp, Homo sapien
tccctgtccagtaggcaaagccaac

SEQ ID NO: 3726999 - DNA, 25 bp, Homo sapien
tcctggtgaagaaagatcccaattc

SEQ ID NO: 3727000 - DNA, 25 bp, Homo sapien
gagcaaagtatttgctcctggtgca

SEQ ID NO: 3727001 - DNA, 25 bp, Homo sapien
tgaatgtctgctttaggagcaaagt

SEQ ID NO: 3727002 - DNA, 25 bp, Homo sapien
tttgctcctggtgcaaggcctttgg

SEQ ID NO: 3727003 - DNA, 25 bp, Homo sapien
tctgaatgtctgctttaggagcaaa

SEQ ID NO: 3727004 - DNA, 25 bp, Homo sapien
cattctttataaggccttctgaagt

SEQ ID NO: 3727005 - DNA, 25 bp, Homo sapien
tgtcaagaagcatccaagctgcctg

SEQ ID NO: 3727006 - DNA, 25 bp, Homo sapien
atgtcaagaagcatccaagctgcct

SEQ ID NO: 3727007 - DNA, 25 bp, Homo sapien
gcatccaagctgcctgttgaggctt

SEQ ID NO: 3727008 - DNA, 25 bp, Homo sapien
aagcatccaagctgcctgttgaggc

SEQ ID NO: 3727009 - DNA, 25 bp, Homo sapien
gtgatacaatctacagttgaggcag

SEQ ID NO: 3727010 - DNA, 25 bp, Homo sapien
tacaatctacagttgaggcagatac

SEQ ID NO: 3727011 - DNA, 25 bp, Homo sapien
caatctacagttgaggcagatacag

SEQ ID NO: 3727012 - DNA, 25 bp, Homo sapien
gatacaatctacagttgaggcagat

SEQ ID NO: 3727013 - DNA, 25 bp, Homo sapien
ttttgctgctggttgcacctgtaag

SEQ ID NO: 3727014 - DNA, 25 bp, Homo sapien
ggatagaaaccagggtcaaaaatgc

SEQ ID NO: 3727015 - DNA, 25 bp, Homo sapien
tctctgtagaataaatttcctcctg

SEQ ID NO: 3727016 - DNA, 25 bp, Homo sapien
cctctaagtctaaagggtctcatta

SEQ ID NO: 3727017 - DNA, 25 bp, Homo sapien
tagcagctagtttctggtggccacg

SEQ ID NO: 3727018 - DNA, 25 bp, Homo sapien
aattccccatgagagtagcagctag

SEQ ID NO: 3727019 - DNA, 25 bp, Homo sapien
taaagcttccacgaacattgaacca

SEQ ID NO: 3727020 - DNA, 25 bp, Homo sapien
tgctctctttgatggctgctctgtg

SEQ ID NO: 3727021 - DNA, 25 bp, Homo sapien
gggcaccaagactcatcatccgcgt

SEQ ID NO: 3727022 - DNA, 25 bp, Homo sapien
gctgaggggcaccaagactcatcat

SEQ ID NO: 3727023 - DNA, 25 bp, Homo sapien
ggcaccaagactcatcatccgcgtt

SEQ ID NO: 3727024 - DNA, 25 bp, Homo sapien
ttattgctgaggggcaccaagactc

SEQ ID NO: 3727025 - DNA, 25 bp, Homo sapien
tttcacaagacttcttctttgtccc

SEQ ID NO: 3727026 - DNA, 25 bp, Homo sapien
tatttcacaagacttcttctttgtc

SEQ ID NO: 3727027 - DNA, 25 bp, Homo sapien
atttcacaagacttcttctttgtcc

SEQ ID NO: 3727028 - DNA, 25 bp, Homo sapien
cagatgggcgcaaaatgacagagtt

SEQ ID NO: 3727029 - DNA, 25 bp, Homo sapien
tttgccattcccacagatgggcgca

SEQ ID NO: 3727030 - DNA, 25 bp, Homo sapien
cttgcttgtgggctctttgccattc

SEQ ID NO: 3727031 - DNA, 25 bp, Homo sapien
tgggctctttgccattcccacagat

SEQ ID NO: 3727032 - DNA, 25 bp, Homo sapien
tgctgtctctaaaaggatcagtgaa

SEQ ID NO: 3727033 - DNA, 25 bp, Homo sapien
ctagaacttgagagtgactgaatgc

SEQ ID NO: 3727034 - DNA, 25 bp, Homo sapien
tacagcttatgagtgttgagcacat

SEQ ID NO: 3727035 - DNA, 25 bp, Homo sapien
ggattccaggcctagaaaagctatt

SEQ ID NO: 3727036 - DNA, 25 bp, Homo sapien
atttcttgaaactttgaaagcttga

SEQ ID NO: 3727037 - DNA, 25 bp, Homo sapien
tgaaactttgaaagcttgaagcttt

SEQ ID NO: 3727038 - DNA, 25 bp, Homo sapien
ccaataaccacaaaagaatttcttg

SEQ ID NO: 3727039 - DNA, 25 bp, Homo sapien
tcttgaaactttgaaagcttgaagc

SEQ ID NO: 3727040 - DNA, 25 bp, Homo sapien
tggcccatgctgtctgtccactcct

SEQ ID NO: 3727041 - DNA, 25 bp, Homo sapien
ggcccatgctgtctgtccactcctc

SEQ ID NO: 3727042 - DNA, 25 bp, Homo sapien
cttttggcccatgctgtctgtccac

SEQ ID NO: 3727043 - DNA, 25 bp, Homo sapien
tttggcccatgctgtctgtccactc

SEQ ID NO: 3727044 - DNA, 25 bp, Homo sapien
tatctgagagatctccacggagtgt

SEQ ID NO: 3727045 - DNA, 25 bp, Homo sapien
tctcatccgtactgcaaatggagtc

SEQ ID NO: 3727046 - DNA, 25 bp, Homo sapien
agaattcaaatcctcagtatctgag

SEQ ID NO: 3727047 - DNA, 25 bp, Homo sapien
ggtttagtaaaaagtcagcagccag

SEQ ID NO: 3727048 - DNA, 25 bp, Homo sapien
gtctatcttacttaagccagtgttt

SEQ ID NO: 3727049 - DNA, 25 bp, Homo sapien
tgtgtctatcttacttaagccagtg

SEQ ID NO: 3727050 - DNA, 25 bp, Homo sapien
ttctagcttattgccttgcaattcc

SEQ ID NO: 3727051 - DNA, 25 bp, Homo sapien
gcttattgccttgcaattccatctt

SEQ ID NO: 3727052 - DNA, 25 bp, Homo sapien
gtgcctatatctggtaggcagagcc

SEQ ID NO: 3727053 - DNA, 25 bp, Homo sapien
ggtagtgagagtgcctatatctggt

SEQ ID NO: 3727054 - DNA, 25 bp, Homo sapien
ggtcttggtagtgagagtgcctata

SEQ ID NO: 3727055 - DNA, 25 bp, Homo sapien
aagatgaccccctggtcttggtagt

SEQ ID NO: 3727056 - DNA, 25 bp, Homo sapien
gtggaagtacatggcctttcccttc

SEQ ID NO: 3727057 - DNA, 25 bp, Homo sapien
tcctcactcagggaatcaggtgttg

SEQ ID NO: 3727058 - DNA, 25 bp, Homo sapien
gctttcatacagcagactcatttcc

SEQ ID NO: 3727059 - DNA, 25 bp, Homo sapien
actcagggaatcaggtgttgcttca

SEQ ID NO: 3727060 - DNA, 25 bp, Homo sapien
ccagaggtagaaggttcctgctttc

SEQ ID NO: 3727061 - DNA, 25 bp, Homo sapien
ctgggtagcagagcaacagcaacta

SEQ ID NO: 3727062 - DNA, 25 bp, Homo sapien
gtagcagagcaacagcaactacagc

SEQ ID NO: 3727063 - DNA, 25 bp, Homo sapien
gcaacagcaactacagcaaggccaa

SEQ ID NO: 3727064 - DNA, 25 bp, Homo sapien
caacagcaactacagcaaggccaaa

SEQ ID NO: 3727065 - DNA, 25 bp, Homo sapien
ctgacttgtttttctcttttgttct

SEQ ID NO: 3727066 - DNA, 25 bp, Homo sapien
cattctgagcagaagtacaggagta

SEQ ID NO: 3727067 - DNA, 25 bp, Homo sapien
aatgatgaccatacagaagcccctg

SEQ ID NO: 3727068 - DNA, 25 bp, Homo sapien
tgtctgccctggatgtcaaataaca

SEQ ID NO: 3727069 - DNA, 25 bp, Homo sapien
agtcctgtgtgctgaataaccttgg

SEQ ID NO: 3727070 - DNA, 25 bp, Homo sapien
tagctatctaaaaagtggcagagca

SEQ ID NO: 3727071 - DNA, 25 bp, Homo sapien
ttcctaagcccattgagagggatag

SEQ ID NO: 3727072 - DNA, 25 bp, Homo sapien
tgcccttcgtctatccctatgagta

SEQ ID NO: 3727073 - DNA, 25 bp, Homo sapien
tctccatgcaaactgttgaaactgg

SEQ ID NO: 3727074 - DNA, 25 bp, Homo sapien
ttgcgagtagcagagtggtgatggg

SEQ ID NO: 3727075 - DNA, 25 bp, Homo sapien
gatggttcctgggtgcgaccaggca

SEQ ID NO: 3727076 - DNA, 25 bp, Homo sapien
ctgtccgcggagacgaggaacccca

SEQ ID NO: 3727077 - DNA, 25 bp, Homo sapien
accaggcagcgttgcgagtagcaga

SEQ ID NO: 3727078 - DNA, 25 bp, Homo sapien
tccgcggcaagatgaagatccctgg

SEQ ID NO: 3727079 - DNA, 25 bp, Homo sapien
accagcgcccaacgatgggagaggt

SEQ ID NO: 3727080 - DNA, 25 bp, Homo sapien
agagtactgtccgtgccggcactgc

SEQ ID NO: 3727081 - DNA, 25 bp, Homo sapien
aatttggcgccggtgagcgcgttcc

SEQ ID NO: 3727082 - DNA, 25 bp, Homo sapien
ccacagccgcccgcgcagagccccg

SEQ ID NO: 3727083 - DNA, 25 bp, Homo sapien
tccagcacccacagccgcccgcgca

SEQ ID NO: 3727084 - DNA, 25 bp, Homo sapien
cctgagctccagcacccacagccgc

SEQ ID NO: 3727085 - DNA, 25 bp, Homo sapien
ggtcctgagctccagcacccacagc

SEQ ID NO: 3727086 - DNA, 25 bp, Homo sapien
gtggggagagcggagctgaggcccc

SEQ ID NO: 3727087 - DNA, 25 bp, Homo sapien
tgtggcggcgcctcactccgcacct

SEQ ID NO: 3727088 - DNA, 25 bp, Homo sapien
tcccggtcccgcaccgggctctgct

SEQ ID NO: 3727089 - DNA, 25 bp, Homo sapien
gcggctgccgagttcctgagactcc

SEQ ID NO: 3727090 - DNA, 25 bp, Homo sapien
tgtgggtttacaccaaggtgccaat

SEQ ID NO: 3727091 - DNA, 25 bp, Homo sapien
agtctccagtgaaaacgcagtaaac

SEQ ID NO: 3727092 - DNA, 25 bp, Homo sapien
caatgtagagactaaaatggacaga

SEQ ID NO: 3727093 - DNA, 25 bp, Homo sapien
gcgcttgcagttcgacctcaacctg

SEQ ID NO: 3727094 - DNA, 25 bp, Homo sapien
gagtgagtgctacagaaggtcaaga

SEQ ID NO: 3727095 - DNA, 25 bp, Homo sapien
tcaaatgggattacgcaagactggc

SEQ ID NO: 3727096 - DNA, 25 bp, Homo sapien
tagataagtctccaatagatgtccg

SEQ ID NO: 3727097 - DNA, 25 bp, Homo sapien
taaaccctgggactaattggtgtgc

SEQ ID NO: 3727098 - DNA, 25 bp, Homo sapien
ctttattggattgaaggacacaaag

SEQ ID NO: 3727099 - DNA, 25 bp, Homo sapien
gtcaactttattggattgaaggaca

SEQ ID NO: 3727100 - DNA, 25 bp, Homo sapien
tattggattgaaggacacaaagttt

SEQ ID NO: 3727101 - DNA, 25 bp, Homo sapien
tcaactttattggattgaaggacac

SEQ ID NO: 3727102 - DNA, 25 bp, Homo sapien
aatagtattgaaggatcatgcaccc

SEQ ID NO: 3727103 - DNA, 25 bp, Homo sapien
tgcggaaatcaaccaagatgctctc

SEQ ID NO: 3727104 - DNA, 25 bp, Homo sapien
ccagcagcaatagtgggtgactcag

SEQ ID NO: 3727105 - DNA, 25 bp, Homo sapien
gatgtagtaacctgaataaccaccc

SEQ ID NO: 3727106 - DNA, 25 bp, Homo sapien
ggtctctaagtccggggcagtctct

SEQ ID NO: 3727107 - DNA, 25 bp, Homo sapien
ggcagtctcttcatgaacagtgaag

SEQ ID NO: 3727108 - DNA, 25 bp, Homo sapien
tgtggtctctaagtccggggcagtc

SEQ ID NO: 3727109 - DNA, 25 bp, Homo sapien
gcagtctcttcatgaacagtgaagt

SEQ ID NO: 3727110 - DNA, 25 bp, Homo sapien
ccaaggatacttaggagagttagga

SEQ ID NO: 3727111 - DNA, 25 bp, Homo sapien
caaggatacttaggagagttaggaa

SEQ ID NO: 3727112 - DNA, 25 bp, Homo sapien
ctttccaaggatacttaggagagtt

SEQ ID NO: 3727113 - DNA, 25 bp, Homo sapien
ttccaaggatacttaggagagttag

SEQ ID NO: 3727114 - DNA, 25 bp, Homo sapien
tctatcctatactcatagtctgttt

SEQ ID NO: 3727115 - DNA, 25 bp, Homo sapien
ctttttttgatgtctgccactttac

SEQ ID NO: 3727116 - DNA, 25 bp, Homo sapien
ctaccactctatcctatactcatag

SEQ ID NO: 3727117 - DNA, 25 bp, Homo sapien
ttttgactctgccaagtttacaact

SEQ ID NO: 3727118 - DNA, 25 bp, Homo sapien
agctgaataggtttgcctgatgaaa

SEQ ID NO: 3727119 - DNA, 25 bp, Homo sapien
tataccaagcaaatgtagctgaata

SEQ ID NO: 3727120 - DNA, 25 bp, Homo sapien
aatgtagctgaataggtttgcctga

SEQ ID NO: 3727121 - DNA, 25 bp, Homo sapien
tgtagctgaataggtttgcctgatg

SEQ ID NO: 3727122 - DNA, 25 bp, Homo sapien
gaacactcaatggattcaacacgga

SEQ ID NO: 3727123 - DNA, 25 bp, Homo sapien
tcagtccaggtactccagaggtaaa

SEQ ID NO: 3727124 - DNA, 25 bp, Homo sapien
tcgcttttaaggagagttgaacact

SEQ ID NO: 3727125 - DNA, 25 bp, Homo sapien
gccttgtcactgtgcgatgacttcg

SEQ ID NO: 3727126 - DNA, 25 bp, Homo sapien
cccaattctattgtagtatggccag

SEQ ID NO: 3727127 - DNA, 25 bp, Homo sapien
caattctattgtagtatggccagaa

SEQ ID NO: 3727128 - DNA, 25 bp, Homo sapien
tagtatggccagaatttttgataag

SEQ ID NO: 3727129 - DNA, 25 bp, Homo sapien
ctattgtagtatggccagaattttt

SEQ ID NO: 3727130 - DNA, 25 bp, Homo sapien
taagcgtcccttttgactggtcagt

SEQ ID NO: 3727131 - DNA, 25 bp, Homo sapien
tcctcttcagggttgtaccatccta

SEQ ID NO: 3727132 - DNA, 25 bp, Homo sapien
gaacatgggcctgagtttgccataa

SEQ ID NO: 3727133 - DNA, 25 bp, Homo sapien
cagtgcttctattcctgatgtgctc

SEQ ID NO: 3727134 - DNA, 25 bp, Homo sapien
ctcttttctcgactggaatacaggt

SEQ ID NO: 3727135 - DNA, 25 bp, Homo sapien
tgtcctcttttctcgactggaatac

SEQ ID NO: 3727136 - DNA, 25 bp, Homo sapien
tcctcttttctcgactggaatacag

SEQ ID NO: 3727137 - DNA, 25 bp, Homo sapien
ctgtcctcttttctcgactggaata

SEQ ID NO: 3727138 - DNA, 25 bp, Homo sapien
ctttgtcaaattgcactgtattttt

SEQ ID NO: 3727139 - DNA, 25 bp, Homo sapien
tgtcaaattgcactgtattttttct

SEQ ID NO: 3727140 - DNA, 25 bp, Homo sapien
gtcaaattgcactgtattttttctt

SEQ ID NO: 3727141 - DNA, 25 bp, Homo sapien
ttgtcaaattgcactgtattttttc

SEQ ID NO: 3727142 - DNA, 25 bp, Homo sapien
ccaccaaatctgctgaaaatccaga

SEQ ID NO: 3727143 - DNA, 25 bp, Homo sapien
caccaaatctgctgaaaatccagat

SEQ ID NO: 3727144 - DNA, 25 bp, Homo sapien
gaccaccaaatctgctgaaaatcca

SEQ ID NO: 3727145 - DNA, 25 bp, Homo sapien
aagaccaccaaatctgctgaaaatc

SEQ ID NO: 3727146 - DNA, 25 bp, Homo sapien
tcttttgcttaaggcccaaatgtgg

SEQ ID NO: 3727147 - DNA, 25 bp, Homo sapien
tctctgctgccatacctcagaattt

SEQ ID NO: 3727148 - DNA, 25 bp, Homo sapien
atcatggccttttgacgctatagtc

SEQ ID NO: 3727149 - DNA, 25 bp, Homo sapien
cagagtgaacaactggcctggatca

SEQ ID NO: 3727150 - DNA, 25 bp, Homo sapien
atccagcagccatatgccagtctgg

SEQ ID NO: 3727151 - DNA, 25 bp, Homo sapien
ttaggcctctagtatctgtcttctc

SEQ ID NO: 3727152 - DNA, 25 bp, Homo sapien
tgcattttaggcctctagtatctgt

SEQ ID NO: 3727153 - DNA, 25 bp, Homo sapien
gcagccatatgccagtctggtaagt

SEQ ID NO: 3727154 - DNA, 25 bp, Homo sapien
tatgcatctgaaggtctttcttctt

SEQ ID NO: 3727155 - DNA, 25 bp, Homo sapien
atgcatctgaaggtctttcttcttc

SEQ ID NO: 3727156 - DNA, 25 bp, Homo sapien
ctatgcatctgaaggtctttcttct

SEQ ID NO: 3727157 - DNA, 25 bp, Homo sapien
tgcatctgaaggtctttcttcttct

SEQ ID NO: 3727158 - DNA, 25 bp, Homo sapien
ctaattgctcctctggcaaaaatgt

SEQ ID NO: 3727159 - DNA, 25 bp, Homo sapien
aaagtgaggactatagctgaagagc

SEQ ID NO: 3727160 - DNA, 25 bp, Homo sapien
ctatagctgaagagctgaaatcact

SEQ ID NO: 3727161 - DNA, 25 bp, Homo sapien
aaacttcctcaaagtgaggactata

SEQ ID NO: 3727162 - DNA, 25 bp, Homo sapien
cctcaaagtgaggactatagctgaa

SEQ ID NO: 3727163 - DNA, 25 bp, Homo sapien
ccataagggtgagctttaggatgtc

SEQ ID NO: 3727164 - DNA, 25 bp, Homo sapien
gatgaagttcattggactggaactc

SEQ ID NO: 3727165 - DNA, 25 bp, Homo sapien
catttctatacagcgatgagggtca

SEQ ID NO: 3727166 - DNA, 25 bp, Homo sapien
taggatgtctagcataatgactgag

SEQ ID NO: 3727167 - DNA, 25 bp, Homo sapien
caaattggaccaattttcagtctgt

SEQ ID NO: 3727168 - DNA, 25 bp, Homo sapien
ttcagtctgtatgccaggtccattg

SEQ ID NO: 3727169 - DNA, 25 bp, Homo sapien
ttaggcagtccttctcttgttccac

SEQ ID NO: 3727170 - DNA, 25 bp, Homo sapien
gtaatacagcattcgggagccccat

SEQ ID NO: 3727171 - DNA, 25 bp, Homo sapien
tattcgaaaatgataggagcagtcc

SEQ ID NO: 3727172 - DNA, 25 bp, Homo sapien
agtccattggtattcgaaaatgata

SEQ ID NO: 3727173 - DNA, 25 bp, Homo sapien
gctgggattgcaatttgcatgcaaa

SEQ ID NO: 3727174 - DNA, 25 bp, Homo sapien
attggtattcgaaaatgataggagc

SEQ ID NO: 3727175 - DNA, 25 bp, Homo sapien
ctttacatagttatcagtgaaatct

SEQ ID NO: 3727176 - DNA, 25 bp, Homo sapien
catctttacatagttatcagtgaaa

SEQ ID NO: 3727177 - DNA, 25 bp, Homo sapien
tcatctttacatagttatcagtgaa

SEQ ID NO: 3727178 - DNA, 25 bp, Homo sapien
tctttacatagttatcagtgaaatc

SEQ ID NO: 3727179 - DNA, 25 bp, Homo sapien
caggcattttccaagctatttggat

SEQ ID NO: 3727180 - DNA, 25 bp, Homo sapien
tcgagggtattggagaatatctcaa

SEQ ID NO: 3727181 - DNA, 25 bp, Homo sapien
gactgtttactctcgcagctggccc

SEQ ID NO: 3727182 - DNA, 25 bp, Homo sapien
cagctggccccgatccaggcatttt

SEQ ID NO: 3727183 - DNA, 25 bp, Homo sapien
gaaaatggtctccagctttgttaga

SEQ ID NO: 3727184 - DNA, 25 bp, Homo sapien
tgtcataagtaagacaacttccagg

SEQ ID NO: 3727185 - DNA, 25 bp, Homo sapien
cacacagcgatcacattcatgatac

SEQ ID NO: 3727186 - DNA, 25 bp, Homo sapien
gggactcatggacgaataaatgtca

SEQ ID NO: 3727187 - DNA, 25 bp, Homo sapien
agtaatgaacccagatcttgactct

SEQ ID NO: 3727188 - DNA, 25 bp, Homo sapien
tcttgactctgtctcacgaactact

SEQ ID NO: 3727189 - DNA, 25 bp, Homo sapien
tcacgaactacttcagacaaattct

SEQ ID NO: 3727190 - DNA, 25 bp, Homo sapien
cagtaatgaacccagatcttgactc

SEQ ID NO: 3727191 - DNA, 25 bp, Homo sapien
tccttacaaggagactcccgatgta

SEQ ID NO: 3727192 - DNA, 25 bp, Homo sapien
gggacaaatccggtcagcccattca

SEQ ID NO: 3727193 - DNA, 25 bp, Homo sapien
caacaatatgtaggggtaaaagcca

SEQ ID NO: 3727194 - DNA, 25 bp, Homo sapien
cgatgtaaattagggagttcagagg

SEQ ID NO: 3727195 - DNA, 25 bp, Homo sapien
tcaactcatgagaatatggagctgt

SEQ ID NO: 3727196 - DNA, 25 bp, Homo sapien
aaagaggttagatggatatgttgac

SEQ ID NO: 3727197 - DNA, 25 bp, Homo sapien
gctgtggactccagtacaatttcta

SEQ ID NO: 3727198 - DNA, 25 bp, Homo sapien
tccaaagaggttagatggatatgtt

SEQ ID NO: 3727199 - DNA, 25 bp, Homo sapien
tctttcgaccatccaatccattcag

SEQ ID NO: 3727200 - DNA, 25 bp, Homo sapien
tcatatctttcgaccatccaatcca

SEQ ID NO: 3727201 - DNA, 25 bp, Homo sapien
tatctttcgaccatccaatccattc

SEQ ID NO: 3727202 - DNA, 25 bp, Homo sapien
ttcgaccatccaatccattcagtct

SEQ ID NO: 3727203 - DNA, 25 bp, Homo sapien
caagcaacctgggataaggctttta

SEQ ID NO: 3727204 - DNA, 25 bp, Homo sapien
gaagtgtcatttagccaagcaacct

SEQ ID NO: 3727205 - DNA, 25 bp, Homo sapien
ctgaggaataccataggcagagttc

SEQ ID NO: 3727206 - DNA, 25 bp, Homo sapien
ccatggtagagaaccttctgaggaa

SEQ ID NO: 3727207 - DNA, 25 bp, Homo sapien
gtccagtcagacatttctcaccctg

SEQ ID NO: 3727208 - DNA, 25 bp, Homo sapien
tgacatgccatgaaatctggacttc

SEQ ID NO: 3727209 - DNA, 25 bp, Homo sapien
gacatgccatgaaatctggacttcc

SEQ ID NO: 3727210 - DNA, 25 bp, Homo sapien
tgttggtggtccagtcagacatttc

SEQ ID NO: 3727211 - DNA, 25 bp, Homo sapien
ttcaggctgccactgtttaaacatg

SEQ ID NO: 3727212 - DNA, 25 bp, Homo sapien
tcagtgccactgtgactcaagagct

SEQ ID NO: 3727213 - DNA, 25 bp, Homo sapien
tgtagtcaaatttaatatgcctctc

SEQ ID NO: 3727214 - DNA, 25 bp, Homo sapien
tgcctctccctgacagatttaatgt

SEQ ID NO: 3727215 - DNA, 25 bp, Homo sapien
cctgcttgcagggaacagtccaagt

SEQ ID NO: 3727216 - DNA, 25 bp, Homo sapien
tacttttggcagtatcctgatatac

SEQ ID NO: 3727217 - DNA, 25 bp, Homo sapien
caagtttttggagcaggttataaag

SEQ ID NO: 3727218 - DNA, 25 bp, Homo sapien
aacagtccaagtttttggagcaggt

SEQ ID NO: 3727219 - DNA, 25 bp, Homo sapien
agggtatctaaaacatcaggattga

SEQ ID NO: 3727220 - DNA, 25 bp, Homo sapien
caggattgaaggataggacaatctc

SEQ ID NO: 3727221 - DNA, 25 bp, Homo sapien
taaaacatcaggattgaaggatagg

SEQ ID NO: 3727222 - DNA, 25 bp, Homo sapien
ccaggctgaagggtatctaaaacat

SEQ ID NO: 3727223 - DNA, 25 bp, Homo sapien
tatagacatagacttatgaactgct

SEQ ID NO: 3727224 - DNA, 25 bp, Homo sapien
atagacatagacttatgaactgctt

SEQ ID NO: 3727225 - DNA, 25 bp, Homo sapien
tagacatagacttatgaactgcttt

SEQ ID NO: 3727226 - DNA, 25 bp, Homo sapien
ttatgaactgcttttgccagaccaa

SEQ ID NO: 3727227 - DNA, 25 bp, Homo sapien
gcagaacacccattataggaatctc

SEQ ID NO: 3727228 - DNA, 25 bp, Homo sapien
cacccattataggaatctcaccagg

SEQ ID NO: 3727229 - DNA, 25 bp, Homo sapien
aggaatctcaccaggtcgttctgtg

SEQ ID NO: 3727230 - DNA, 25 bp, Homo sapien
ctagatgctatctaaactgtacagc

SEQ ID NO: 3727231 - DNA, 25 bp, Homo sapien
caacactaagccaaacatgctttgc

SEQ ID NO: 3727232 - DNA, 25 bp, Homo sapien
tccttatcaccacccatgtttatcg

SEQ ID NO: 3727233 - DNA, 25 bp, Homo sapien
tttccaattatgtgagtcaacacta

SEQ ID NO: 3727234 - DNA, 25 bp, Homo sapien
cgtctcagagaaatggtcagaatta

SEQ ID NO: 3727235 - DNA, 25 bp, Homo sapien
tacggaatcttgcagaaaatttgct

SEQ ID NO: 3727236 - DNA, 25 bp, Homo sapien
attacggaatcttgcagaaaatttg

SEQ ID NO: 3727237 - DNA, 25 bp, Homo sapien
ggaatcttgcagaaaatttgcttct

SEQ ID NO: 3727238 - DNA, 25 bp, Homo sapien
tcaattacggaatcttgcagaaaat

SEQ ID NO: 3727239 - DNA, 25 bp, Homo sapien
ttccattgctgcattaacaatgcct

SEQ ID NO: 3727240 - DNA, 25 bp, Homo sapien
ctagaatcacagactccttcaactt

SEQ ID NO: 3727241 - DNA, 25 bp, Homo sapien
caatgcctctagttccatactccat

SEQ ID NO: 3727242 - DNA, 25 bp, Homo sapien
taacaatgcctctagttccatactc

SEQ ID NO: 3727243 - DNA, 25 bp, Homo sapien
actaaattccaggtatgaaggtcca

SEQ ID NO: 3727244 - DNA, 25 bp, Homo sapien
tgttttactaaattccaggtatgaa

SEQ ID NO: 3727245 - DNA, 25 bp, Homo sapien
ctaaattccaggtatgaaggtccat

SEQ ID NO: 3727246 - DNA, 25 bp, Homo sapien
cattgttttactaaattccaggtat

SEQ ID NO: 3727247 - DNA, 25 bp, Homo sapien
tcatatgtctactgcattgccctgg

SEQ ID NO: 3727248 - DNA, 25 bp, Homo sapien
ctactgcattgccctggtggatggc

SEQ ID NO: 3727249 - DNA, 25 bp, Homo sapien
ttgccctggtggatggcaatctcac

SEQ ID NO: 3727250 - DNA, 25 bp, Homo sapien
tgcattgccctggtggatggcaatc

SEQ ID NO: 3727251 - DNA, 25 bp, Homo sapien
ctgttacgttgttgttagattctgt

SEQ ID NO: 3727252 - DNA, 25 bp, Homo sapien
cgttgttgttagattctgtgtcttt

SEQ ID NO: 3727253 - DNA, 25 bp, Homo sapien
tacgttgttgttagattctgtgtct

SEQ ID NO: 3727254 - DNA, 25 bp, Homo sapien
ttacgttgttgttagattctgtgtc

SEQ ID NO: 3727255 - DNA, 25 bp, Homo sapien
cagaagctccctctcctcgagtaag

SEQ ID NO: 3727256 - DNA, 25 bp, Homo sapien
tcgagtaagggagctaaatgacaat

SEQ ID NO: 3727257 - DNA, 25 bp, Homo sapien
tcgtgtgcactgaattcggaaacca

SEQ ID NO: 3727258 - DNA, 25 bp, Homo sapien
tgattgctgcccgtaaccacagcca

SEQ ID NO: 3727259 - DNA, 25 bp, Homo sapien
ttcctttgctgtgtgtagcttcaaa

SEQ ID NO: 3727260 - DNA, 25 bp, Homo sapien
ctgactgtccatggagaaatttatt

SEQ ID NO: 3727261 - DNA, 25 bp, Homo sapien
cctttgctgtgtgtagcttcaaagc

SEQ ID NO: 3727262 - DNA, 25 bp, Homo sapien
tgtccatggagaaatttattcttcc

SEQ ID NO: 3727263 - DNA, 25 bp, Homo sapien
tagtgtccccaaggatcctccaaat

SEQ ID NO: 3727264 - DNA, 25 bp, Homo sapien
gggtatataaggatcttccttctca

SEQ ID NO: 3727265 - DNA, 25 bp, Homo sapien
tcttccatctaagctcttgcttgaa

SEQ ID NO: 3727266 - DNA, 25 bp, Homo sapien
tctcatggtaacagaagatttagtg

SEQ ID NO: 3727267 - DNA, 25 bp, Homo sapien
tggtaatattgtagttgattcctga

SEQ ID NO: 3727268 - DNA, 25 bp, Homo sapien
taatattgtagttgattcctgaacc

SEQ ID NO: 3727269 - DNA, 25 bp, Homo sapien
tctttgtccacattaccaatggtaa

SEQ ID NO: 3727270 - DNA, 25 bp, Homo sapien
caatggtaatattgtagttgattcc

SEQ ID NO: 3727271 - DNA, 25 bp, Homo sapien
tatctgcccttttgatattgcccac

SEQ ID NO: 3727272 - DNA, 25 bp, Homo sapien
ccttttgatattgcccactgagacc

SEQ ID NO: 3727273 - DNA, 25 bp, Homo sapien
tagtatctgcccttttgatattgcc

SEQ ID NO: 3727274 - DNA, 25 bp, Homo sapien
tgcccttttgatattgcccactgag

SEQ ID NO: 3727275 - DNA, 25 bp, Homo sapien
tgctggttggaaaaatatctggaag

SEQ ID NO: 3727276 - DNA, 25 bp, Homo sapien
gattcatatgaaagatgctggttgg

SEQ ID NO: 3727277 - DNA, 25 bp, Homo sapien
tacaggggataacattgtagattca

SEQ ID NO: 3727278 - DNA, 25 bp, Homo sapien
aagatgggagactcttacaggaaaa

SEQ ID NO: 3727279 - DNA, 25 bp, Homo sapien
ccttgttaagagaagctcaatactt

SEQ ID NO: 3727280 - DNA, 25 bp, Homo sapien
tgaagatgtcactaagcaatgcact

SEQ ID NO: 3727281 - DNA, 25 bp, Homo sapien
ggtttgttaccagctgatgatcata

SEQ ID NO: 3727282 - DNA, 25 bp, Homo sapien
tactgtacagtcatatgggctctag

SEQ ID NO: 3727283 - DNA, 25 bp, Homo sapien
ccatcactggatcttggggagatca

SEQ ID NO: 3727284 - DNA, 25 bp, Homo sapien
gaccatcactggatcttggggagat

SEQ ID NO: 3727285 - DNA, 25 bp, Homo sapien
ctctggaccatcactggatcttggg

SEQ ID NO: 3727286 - DNA, 25 bp, Homo sapien
tcactctggaccatcactggatctt

SEQ ID NO: 3727287 - DNA, 25 bp, Homo sapien
aagcattaaggggagtgtcgttaca

SEQ ID NO: 3727288 - DNA, 25 bp, Homo sapien
taaggggagtgtcgttacagtccaa

SEQ ID NO: 3727289 - DNA, 25 bp, Homo sapien
gagtgtcgttacagtccaagaaggg

SEQ ID NO: 3727290 - DNA, 25 bp, Homo sapien
gggagtgtcgttacagtccaagaag

SEQ ID NO: 3727291 - DNA, 25 bp, Homo sapien
gctccaggtcccctttgtgtttgat

SEQ ID NO: 3727292 - DNA, 25 bp, Homo sapien
catcttctataggctccaggtcccc

SEQ ID NO: 3727293 - DNA, 25 bp, Homo sapien
ccatcttctataggctccaggtccc

SEQ ID NO: 3727294 - DNA, 25 bp, Homo sapien
tccatcttctataggctccaggtcc

SEQ ID NO: 3727295 - DNA, 25 bp, Homo sapien
gatgcttcgaatccttcttatggga

SEQ ID NO: 3727296 - DNA, 25 bp, Homo sapien
tactgacagtctagagctgccacct

SEQ ID NO: 3727297 - DNA, 25 bp, Homo sapien
tcactagaaacgctgttactgacag

SEQ ID NO: 3727298 - DNA, 25 bp, Homo sapien
aagaacatgttgcttggtcactaga

SEQ ID NO: 3727299 - DNA, 25 bp, Homo sapien
gatgtgtgtgggttcaagttgacaa

SEQ ID NO: 3727300 - DNA, 25 bp, Homo sapien
ctctggagatgtgtgtgggttcaag

SEQ ID NO: 3727301 - DNA, 25 bp, Homo sapien
gttgacaaggggtggccttgtgatg

SEQ ID NO: 3727302 - DNA, 25 bp, Homo sapien
ttcaagttgacaaggggtggccttg

SEQ ID NO: 3727303 - DNA, 25 bp, Homo sapien
ggtatgtttagtaccatatctcgga

SEQ ID NO: 3727304 - DNA, 25 bp, Homo sapien
accatatctcggatcccatcagtct

SEQ ID NO: 3727305 - DNA, 25 bp, Homo sapien
ctcctccagcaggtatgtttagtac

SEQ ID NO: 3727306 - DNA, 25 bp, Homo sapien
tctcggatcccatcagtctgttttc

SEQ ID NO: 3727307 - DNA, 25 bp, Homo sapien
ctgcaaactccctagaggaaaattt

SEQ ID NO: 3727308 - DNA, 25 bp, Homo sapien
ggtctgcaaactccctagaggaaaa

SEQ ID NO: 3727309 - DNA, 25 bp, Homo sapien
gtctgcaaactccctagaggaaaat

SEQ ID NO: 3727310 - DNA, 25 bp, Homo sapien
tctgcaaactccctagaggaaaatt

SEQ ID NO: 3727311 - DNA, 25 bp, Homo sapien
cagactcgcgctcggcacaaaccca

SEQ ID NO: 3727312 - DNA, 25 bp, Homo sapien
ttcagttcggctccacccccgcgcg

SEQ ID NO: 3727313 - DNA, 25 bp, Homo sapien
gcgctcggcacaaacccagccccag

SEQ ID NO: 3727314 - DNA, 25 bp, Homo sapien
gctccttccagactcgcgctcggca

SEQ ID NO: 3727315 - DNA, 25 bp, Homo sapien
atggtggaatatgcaccattttgca

SEQ ID NO: 3727316 - DNA, 25 bp, Homo sapien
ccaaaatggtggaatatgcaccatt

SEQ ID NO: 3727317 - DNA, 25 bp, Homo sapien
ggtggaatatgcaccattttgcata

SEQ ID NO: 3727318 - DNA, 25 bp, Homo sapien
aaatggtggaatatgcaccattttg

SEQ ID NO: 3727319 - DNA, 25 bp, Homo sapien
tgagaaccaacactcttcccagtac

SEQ ID NO: 3727320 - DNA, 25 bp, Homo sapien
gtactgcaccaagaggaacctaatg

SEQ ID NO: 3727321 - DNA, 25 bp, Homo sapien
ttgcaggtactgctagaaccagtgt

SEQ ID NO: 3727322 - DNA, 25 bp, Homo sapien
gaaccagtgttactagtactgccac

SEQ ID NO: 3727323 - DNA, 25 bp, Homo sapien
cccctcacagcaagaagcttctgta

SEQ ID NO: 3727324 - DNA, 25 bp, Homo sapien
acccctcacagcaagaagcttctgt

SEQ ID NO: 3727325 - DNA, 25 bp, Homo sapien
gaacccctcacagcaagaagcttct

SEQ ID NO: 3727326 - DNA, 25 bp, Homo sapien
aacccctcacagcaagaagcttctg

SEQ ID NO: 3727327 - DNA, 25 bp, Homo sapien
ttacaaatgtcgctgcacagtattg

SEQ ID NO: 3727328 - DNA, 25 bp, Homo sapien
tgtccgtaaaccacatatccaagga

SEQ ID NO: 3727329 - DNA, 25 bp, Homo sapien
ccactgtcttgagttgttttacaaa

SEQ ID NO: 3727330 - DNA, 25 bp, Homo sapien
tgcacagtattgtccgtaaaccaca

SEQ ID NO: 3727331 - DNA, 25 bp, Homo sapien
tagattcacacccttaggagcccag

SEQ ID NO: 3727332 - DNA, 25 bp, Homo sapien
ggcaatttgaaggtgactgtcctgc

SEQ ID NO: 3727333 - DNA, 25 bp, Homo sapien
tcacctcatagcatctcggcaattt

SEQ ID NO: 3727334 - DNA, 25 bp, Homo sapien
gactgtcctgccttccatagattca

SEQ ID NO: 3727335 - DNA, 25 bp, Homo sapien
tagactctagtgtatgttgttacct

SEQ ID NO: 3727336 - DNA, 25 bp, Homo sapien
accctcagtagactctagtgtatgt

SEQ ID NO: 3727337 - DNA, 25 bp, Homo sapien
cagtagactctagtgtatgttgtta

SEQ ID NO: 3727338 - DNA, 25 bp, Homo sapien
gactctagtgtatgttgttaccttc

SEQ ID NO: 3727339 - DNA, 25 bp, Homo sapien
gattcatgacatcggaactcttgtg

SEQ ID NO: 3727340 - DNA, 25 bp, Homo sapien
tctcctctcataaactcttgatggg

SEQ ID NO: 3727341 - DNA, 25 bp, Homo sapien
tcttgtgtcattgtggcatcatgca

SEQ ID NO: 3727342 - DNA, 25 bp, Homo sapien
cttgatgggactgggccttcaccac

SEQ ID NO: 3727343 - DNA, 25 bp, Homo sapien
aaggatgagttatttattctactga

SEQ ID NO: 3727344 - DNA, 25 bp, Homo sapien
ggatgagttatttattctactgagg

SEQ ID NO: 3727345 - DNA, 25 bp, Homo sapien
aggatgagttatttattctactgag

SEQ ID NO: 3727346 - DNA, 25 bp, Homo sapien
gaactgtcttccagtgaagcatcct

SEQ ID NO: 3727347 - DNA, 25 bp, Homo sapien
caaacgtccattgttactgcatgaa

SEQ ID NO: 3727348 - DNA, 25 bp, Homo sapien
taaacaagcatctatcaaacgtcca

SEQ ID NO: 3727349 - DNA, 25 bp, Homo sapien
catttgcagaaactaaacaagcatc

SEQ ID NO: 3727350 - DNA, 25 bp, Homo sapien
caccgtgcgctatactcagtgtatc

SEQ ID NO: 3727351 - DNA, 25 bp, Homo sapien
accgtgcgctatactcagtgtatcc

SEQ ID NO: 3727352 - DNA, 25 bp, Homo sapien
ccgtgcgctatactcagtgtatccc

SEQ ID NO: 3727353 - DNA, 25 bp, Homo sapien
tcaacataagttgcaggagctacga

SEQ ID NO: 3727354 - DNA, 25 bp, Homo sapien
aggagctacgattcatttcatctgc

SEQ ID NO: 3727355 - DNA, 25 bp, Homo sapien
ggagttacagaaacagcctgtccat

SEQ ID NO: 3727356 - DNA, 25 bp, Homo sapien
gagttacagaaacagcctgtccatg

SEQ ID NO: 3727357 - DNA, 25 bp, Homo sapien
gaactttcttggaaaatccaatgtg

SEQ ID NO: 3727358 - DNA, 25 bp, Homo sapien
ctttcttggaaaatccaatgtgtac

SEQ ID NO: 3727359 - DNA, 25 bp, Homo sapien
gaaaatccaatgtgtacattggcca

SEQ ID NO: 3727360 - DNA, 25 bp, Homo sapien
cttggaaaatccaatgtgtacattg

SEQ ID NO: 3727361 - DNA, 25 bp, Homo sapien
gaaagtcgttataagactgaactga

SEQ ID NO: 3727362 - DNA, 25 bp, Homo sapien
gtcgttataagactgaactgactag

SEQ ID NO: 3727363 - DNA, 25 bp, Homo sapien
gttataagactgaactgactagtcc

SEQ ID NO: 3727364 - DNA, 25 bp, Homo sapien
cattttgaaagtcgttataagactg

SEQ ID NO: 3727365 - DNA, 25 bp, Homo sapien
gactaaatttatgttggcgccgtta

SEQ ID NO: 3727366 - DNA, 25 bp, Homo sapien
taaatttatgttggcgccgttacta

SEQ ID NO: 3727367 - DNA, 25 bp, Homo sapien
gttggcgccgttactacctgaagca

SEQ ID NO: 3727368 - DNA, 25 bp, Homo sapien
tatgttggcgccgttactacctgaa

SEQ ID NO: 3727369 - DNA, 25 bp, Homo sapien
gtctcaggggaccatcgtaaatatt

SEQ ID NO: 3727370 - DNA, 25 bp, Homo sapien
ggtggtgtctcaggggaccatcgta

SEQ ID NO: 3727371 - DNA, 25 bp, Homo sapien
ggtgtctcaggggaccatcgtaaat

SEQ ID NO: 3727372 - DNA, 25 bp, Homo sapien
caggggaccatcgtaaatatttgaa

SEQ ID NO: 3727373 - DNA, 25 bp, Homo sapien
gggttttgtacagacctgtcatgga

SEQ ID NO: 3727374 - DNA, 25 bp, Homo sapien
ggtgactcaacatcgtgctttgtgg

SEQ ID NO: 3727375 - DNA, 25 bp, Homo sapien
atggactctgagagcaggtgactca

SEQ ID NO: 3727376 - DNA, 25 bp, Homo sapien
tttgtacagacctgtcatggactct

SEQ ID NO: 3727377 - DNA, 25 bp, Homo sapien
aattagtctactgtcagaggcatag

SEQ ID NO: 3727378 - DNA, 25 bp, Homo sapien
tttacagtttcaggacttacactga

SEQ ID NO: 3727379 - DNA, 25 bp, Homo sapien
attatctgcctcaaacaatgtcttg

SEQ ID NO: 3727380 - DNA, 25 bp, Homo sapien
tatggctagacagctttccccacac

SEQ ID NO: 3727381 - DNA, 25 bp, Homo sapien
caaggacattgttcaacttgttttc

SEQ ID NO: 3727382 - DNA, 25 bp, Homo sapien
aaggacattgttcaacttgttttca

SEQ ID NO: 3727383 - DNA, 25 bp, Homo sapien
ctcaaggacattgttcaacttgttt

SEQ ID NO: 3727384 - DNA, 25 bp, Homo sapien
tcaaggacattgttcaacttgtttt

SEQ ID NO: 3727385 - DNA, 25 bp, Homo sapien
tcctaagcgtggtggtggaagaaac

SEQ ID NO: 3727386 - DNA, 25 bp, Homo sapien
tgtcttgagtgaaggataatttagc

SEQ ID NO: 3727387 - DNA, 25 bp, Homo sapien
ggaagaaacatttgcccttgcactt

SEQ ID NO: 3727388 - DNA, 25 bp, Homo sapien
tgtgtcaacagctcctaagcgtggt

SEQ ID NO: 3727389 - DNA, 25 bp, Homo sapien
gaaccagcgacagcatgaggcccat

SEQ ID NO: 3727390 - DNA, 25 bp, Homo sapien
catcagaacccctgccagggttgtc

SEQ ID NO: 3727391 - DNA, 25 bp, Homo sapien
agcatgaggcccatcagaacccctg

SEQ ID NO: 3727392 - DNA, 25 bp, Homo sapien
gcagccaagcatcctgaaccagcga

SEQ ID NO: 3727393 - DNA, 25 bp, Homo sapien
catattgagggtcaccatgcaccat

SEQ ID NO: 3727394 - DNA, 25 bp, Homo sapien
ctcatattgagggtcaccatgcacc

SEQ ID NO: 3727395 - DNA, 25 bp, Homo sapien
cttgtatctcatattgagggtcacc

SEQ ID NO: 3727396 - DNA, 25 bp, Homo sapien
tatctcatattgagggtcaccatgc

SEQ ID NO: 3727397 - DNA, 25 bp, Homo sapien
caagcaaagggctcgtgctgctgca

SEQ ID NO: 3727398 - DNA, 25 bp, Homo sapien
aatcccaagcaaagggctcgtgctg

SEQ ID NO: 3727399 - DNA, 25 bp, Homo sapien
cagaaatcccaagcaaagggctcgt

SEQ ID NO: 3727400 - DNA, 25 bp, Homo sapien
gggcagaaatcccaagcaaagggct

SEQ ID NO: 3727401 - DNA, 25 bp, Homo sapien
gacactctgagaccgagtgtctgga

SEQ ID NO: 3727402 - DNA, 25 bp, Homo sapien
cactctgagaccgagtgtctggaag

SEQ ID NO: 3727403 - DNA, 25 bp, Homo sapien
atgacactctgagaccgagtgtctg

SEQ ID NO: 3727404 - DNA, 25 bp, Homo sapien
ctctgagaccgagtgtctggaagga

SEQ ID NO: 3727405 - DNA, 25 bp, Homo sapien
gacattatgcccaatgaacccaact

SEQ ID NO: 3727406 - DNA, 25 bp, Homo sapien
tgtgaatctcgttcaagtatttcaa

SEQ ID NO: 3727407 - DNA, 25 bp, Homo sapien
ctgcctgtgaatctcgttcaagtat

SEQ ID NO: 3727408 - DNA, 25 bp, Homo sapien
aaaactgagacattatgcccaatga

SEQ ID NO: 3727409 - DNA, 25 bp, Homo sapien
tgtttgacctctaaaaacccttgca

SEQ ID NO: 3727410 - DNA, 25 bp, Homo sapien
tttcctagctcccttcccatgtctc

SEQ ID NO: 3727411 - DNA, 25 bp, Homo sapien
ccatgtctctgtttctttacttgtt

SEQ ID NO: 3727412 - DNA, 25 bp, Homo sapien
cctagctcccttcccatgtctctgt

SEQ ID NO: 3727413 - DNA, 25 bp, Homo sapien
gaagcagacacccttctcatagaag

SEQ ID NO: 3727414 - DNA, 25 bp, Homo sapien
tctggtaacaatcccaatggcaatg

SEQ ID NO: 3727415 - DNA, 25 bp, Homo sapien
tggcaatgtcagacacatgtttgaa

SEQ ID NO: 3727416 - DNA, 25 bp, Homo sapien
tgtcagacacatgtttgaagcagac

SEQ ID NO: 3727417 - DNA, 25 bp, Homo sapien
cctgcactgggctcttgtaaatctt

SEQ ID NO: 3727418 - DNA, 25 bp, Homo sapien
ctttcctgcactgggctcttgtaaa

SEQ ID NO: 3727419 - DNA, 25 bp, Homo sapien
gtaaatcttgatcaattacattatt

SEQ ID NO: 3727420 - DNA, 25 bp, Homo sapien
ttattttgtacttccacatctctga

SEQ ID NO: 3727421 - DNA, 25 bp, Homo sapien
gaagatgactgtgttggcagactac

SEQ ID NO: 3727422 - DNA, 25 bp, Homo sapien
gatgactgtgttggcagactactca

SEQ ID NO: 3727423 - DNA, 25 bp, Homo sapien
agatgactgtgttggcagactactc

SEQ ID NO: 3727424 - DNA, 25 bp, Homo sapien
atgactgtgttggcagactactcat

SEQ ID NO: 3727425 - DNA, 25 bp, Homo sapien
agaaacaagaggctcttgctggtag

SEQ ID NO: 3727426 - DNA, 25 bp, Homo sapien
ctgtagaaacaagaggctcttgctg

SEQ ID NO: 3727427 - DNA, 25 bp, Homo sapien
gtagaaacaagaggctcttgctggt

SEQ ID NO: 3727428 - DNA, 25 bp, Homo sapien
gaaacaagaggctcttgctggtagg

SEQ ID NO: 3727429 - DNA, 25 bp, Homo sapien
catcgcctcggcagatggtagtgct

SEQ ID NO: 3727430 - DNA, 25 bp, Homo sapien
gccagatacagataagtcctgcctg

SEQ ID NO: 3727431 - DNA, 25 bp, Homo sapien
gtggttagcagggacccatcgcctc

SEQ ID NO: 3727432 - DNA, 25 bp, Homo sapien
cagcaacgtctgtgcctttatccag

SEQ ID NO: 3727433 - DNA, 25 bp, Homo sapien
ggcctcttcagttcttgtgtggtgg

SEQ ID NO: 3727434 - DNA, 25 bp, Homo sapien
gccagatacactagcctttaggtta

SEQ ID NO: 3727435 - DNA, 25 bp, Homo sapien
ggtgaaagcctattagcagtactcc

SEQ ID NO: 3727436 - DNA, 25 bp, Homo sapien
aaagcttttaatcttctatgagagg

SEQ ID NO: 3727437 - DNA, 25 bp, Homo sapien
ggaattctcgcatctcctgaggtgc

SEQ ID NO: 3727438 - DNA, 25 bp, Homo sapien
tgaactggcgttttggtcatgtcgc

SEQ ID NO: 3727439 - DNA, 25 bp, Homo sapien
tgctgcctaataaagggtgaactgg

SEQ ID NO: 3727440 - DNA, 25 bp, Homo sapien
tcaagggcagattgtcaggcataag

SEQ ID NO: 3727441 - DNA, 25 bp, Homo sapien
ctccgggaaatgggtaacttgctga

SEQ ID NO: 3727442 - DNA, 25 bp, Homo sapien
tgcctccgggaaatgggtaacttgc

SEQ ID NO: 3727443 - DNA, 25 bp, Homo sapien
cctccgggaaatgggtaacttgctg

SEQ ID NO: 3727444 - DNA, 25 bp, Homo sapien
tggaggctgtcacattgtgacaccc

SEQ ID NO: 3727445 - DNA, 25 bp, Homo sapien
cctttcttgggatagaatggcataa

SEQ ID NO: 3727446 - DNA, 25 bp, Homo sapien
gttgactgggagagtcatagaggtg

SEQ ID NO: 3727447 - DNA, 25 bp, Homo sapien
ggctgtcacattgtgacacccttgc

SEQ ID NO: 3727448 - DNA, 25 bp, Homo sapien
ggaacctgggtggagaagcttttca

SEQ ID NO: 3727449 - DNA, 25 bp, Homo sapien
gaacctgggtggagaagcttttcat

SEQ ID NO: 3727450 - DNA, 25 bp, Homo sapien
ctgaagtatgggaaagggaattctg

SEQ ID NO: 3727451 - DNA, 25 bp, Homo sapien
ttctgaagtatgggaaagggaattc

SEQ ID NO: 3727452 - DNA, 25 bp, Homo sapien
ggagcagccattgctattgtcttct

SEQ ID NO: 3727453 - DNA, 25 bp, Homo sapien
tctggctcagactcaggatccctgg

SEQ ID NO: 3727454 - DNA, 25 bp, Homo sapien
ggtataaataagtctggtggcagga

SEQ ID NO: 3727455 - DNA, 25 bp, Homo sapien
gctttcattatctgatggagcagcc

SEQ ID NO: 3727456 - DNA, 25 bp, Homo sapien
tcagtacaaatacaatggctgatgc

SEQ ID NO: 3727457 - DNA, 25 bp, Homo sapien
gcactggcagtctattggtgtacag

SEQ ID NO: 3727458 - DNA, 25 bp, Homo sapien
gcctttggttaagcaataattcagt

SEQ ID NO: 3727459 - DNA, 25 bp, Homo sapien
gtacagcctttggttaagcaataat

SEQ ID NO: 3727460 - DNA, 25 bp, Homo sapien
tgtaattcagctccattgcacccat

SEQ ID NO: 3727461 - DNA, 25 bp, Homo sapien
tgttgtaattcagctccattgcacc

SEQ ID NO: 3727462 - DNA, 25 bp, Homo sapien
taattcagctccattgcacccattt

SEQ ID NO: 3727463 - DNA, 25 bp, Homo sapien
agctccattgcacccatttgggtta

SEQ ID NO: 3727464 - DNA, 25 bp, Homo sapien
caacagctgggtaacttgctggcaa

SEQ ID NO: 3727465 - DNA, 25 bp, Homo sapien
acagctgggtaacttgctggcaaga

SEQ ID NO: 3727466 - DNA, 25 bp, Homo sapien
aacagctgggtaacttgctggcaag

SEQ ID NO: 3727467 - DNA, 25 bp, Homo sapien
gcttgagcaggttctaagggcacaa

SEQ ID NO: 3727468 - DNA, 25 bp, Homo sapien
taaagttgggcgtgcacagcagcat

SEQ ID NO: 3727469 - DNA, 25 bp, Homo sapien
tataacccctttctgggacatcgct

SEQ ID NO: 3727470 - DNA, 25 bp, Homo sapien
gacagtggcaccgttgtggcaccat

SEQ ID NO: 3727471 - DNA, 25 bp, Homo sapien
ttgtgctgtgagagattgctattgt

SEQ ID NO: 3727472 - DNA, 25 bp, Homo sapien
gtgctgtgagagattgctattgttt

SEQ ID NO: 3727473 - DNA, 25 bp, Homo sapien
tgtgctgtgagagattgctattgtt

SEQ ID NO: 3727474 - DNA, 25 bp, Homo sapien
ctccataaagcctttccaggacagc

SEQ ID NO: 3727475 - DNA, 25 bp, Homo sapien
tccactcataagtacaagggagcct

SEQ ID NO: 3727476 - DNA, 25 bp, Homo sapien
cccaggttctgactgagtggtccta

SEQ ID NO: 3727477 - DNA, 25 bp, Homo sapien
ggtcctattcactggaccctcctgg

SEQ ID NO: 3727478 - DNA, 25 bp, Homo sapien
aagggagcctgatgtcttggtgacc

SEQ ID NO: 3727479 - DNA, 25 bp, Homo sapien
gagtctctgtttctttatcggtcca

SEQ ID NO: 3727480 - DNA, 25 bp, Homo sapien
tcccacatgtggtaaagtctatgcc

SEQ ID NO: 3727481 - DNA, 25 bp, Homo sapien
caggaatctaggaagatgctgtgca

SEQ ID NO: 3727482 - DNA, 25 bp, Homo sapien
gaccatgaccataactgcaactgag

SEQ ID NO: 3727483 - DNA, 25 bp, Homo sapien
ttcagaccgtgaaaggaggttagca

SEQ ID NO: 3727484 - DNA, 25 bp, Homo sapien
ttagagaccacagctagtcaggtgg

SEQ ID NO: 3727485 - DNA, 25 bp, Homo sapien
ttttatactagtgtacaggcctggg

SEQ ID NO: 3727486 - DNA, 25 bp, Homo sapien
tagacaagggtaacaaagaagctca

SEQ ID NO: 3727487 - DNA, 25 bp, Homo sapien
tttagaatggaagcctgcagtaggg

SEQ ID NO: 3727488 - DNA, 25 bp, Homo sapien
agaatggaagcctgcagtagggaag

SEQ ID NO: 3727489 - DNA, 25 bp, Homo sapien
ctttagaatggaagcctgcagtagg

SEQ ID NO: 3727490 - DNA, 25 bp, Homo sapien
tagaatggaagcctgcagtagggaa

SEQ ID NO: 3727491 - DNA, 25 bp, Homo sapien
ttagtggagggtattgtttcttcac

SEQ ID NO: 3727492 - DNA, 25 bp, Homo sapien
ctcttagtggagggtattgtttctt

SEQ ID NO: 3727493 - DNA, 25 bp, Homo sapien
cttagtggagggtattgtttcttca

SEQ ID NO: 3727494 - DNA, 25 bp, Homo sapien
tcttagtggagggtattgtttcttc

SEQ ID NO: 3727495 - DNA, 25 bp, Homo sapien
tgtgtccccacatgttccattctca

SEQ ID NO: 3727496 - DNA, 25 bp, Homo sapien
tcaacattgggcaggtatttttcct

SEQ ID NO: 3727497 - DNA, 25 bp, Homo sapien
tgtagtttacgatataagtaatgga

SEQ ID NO: 3727498 - DNA, 25 bp, Homo sapien
aagtaatggagttaatcaggtatac

SEQ ID NO: 3727499 - DNA, 25 bp, Homo sapien
gttgagcatctcaataaactgtgtt

SEQ ID NO: 3727500 - DNA, 25 bp, Homo sapien
aatgtaatctccattgaagttgggc

SEQ ID NO: 3727501 - DNA, 25 bp, Homo sapien
gcatctggaaatactgagagtctcc

SEQ ID NO: 3727502 - DNA, 25 bp, Homo sapien
tgtgttatgtcaaccagcccgtgca

SEQ ID NO: 3727503 - DNA, 25 bp, Homo sapien
aatgccgatcagtcctacagtgaag

SEQ ID NO: 3727504 - DNA, 25 bp, Homo sapien
tccaatgccgatcagtcctacagtg

SEQ ID NO: 3727505 - DNA, 25 bp, Homo sapien
caatgccgatcagtcctacagtgaa

SEQ ID NO: 3727506 - DNA, 25 bp, Homo sapien
tgccgatcagtcctacagtgaagac

SEQ ID NO: 3727507 - DNA, 25 bp, Homo sapien
tgggcactaccacaagaaggttcat

SEQ ID NO: 3727508 - DNA, 25 bp, Homo sapien
tcctattgggcactaccacaagaag

SEQ ID NO: 3727509 - DNA, 25 bp, Homo sapien
atggagggagtcctattgggcacta

SEQ ID NO: 3727510 - DNA, 25 bp, Homo sapien
gggagtcctattgggcactaccaca

SEQ ID NO: 3727511 - DNA, 25 bp, Homo sapien
aggacagcactaggttgcttttcaa

SEQ ID NO: 3727512 - DNA, 25 bp, Homo sapien
ggacagcactaggttgcttttcaaa

SEQ ID NO: 3727513 - DNA, 25 bp, Homo sapien
catctttgcgatgagccctgcttga

SEQ ID NO: 3727514 - DNA, 25 bp, Homo sapien
gagcaatagccagttgcatctgcac

SEQ ID NO: 3727515 - DNA, 25 bp, Homo sapien
taaacccggtgggtgtgctctgcca

SEQ ID NO: 3727516 - DNA, 25 bp, Homo sapien
tctgccatagctgtactgctgttcc

SEQ ID NO: 3727517 - DNA, 25 bp, Homo sapien
tcttgtctaaaagttgggagtggct

SEQ ID NO: 3727518 - DNA, 25 bp, Homo sapien
cactagttattgtcttgcaccatgg

SEQ ID NO: 3727519 - DNA, 25 bp, Homo sapien
gacccaggcattaagacgctttgtt

SEQ ID NO: 3727520 - DNA, 25 bp, Homo sapien
gatttgaggccagattaggatttac

SEQ ID NO: 3727521 - DNA, 25 bp, Homo sapien
aatgtagcactccttttcttacatt

SEQ ID NO: 3727522 - DNA, 25 bp, Homo sapien
tttttgtgctccttaacgacttgtg

SEQ ID NO: 3727523 - DNA, 25 bp, Homo sapien
aatacatttttgtgctccttaacga

SEQ ID NO: 3727524 - DNA, 25 bp, Homo sapien
cttaacgacttgtgttctggaagct

SEQ ID NO: 3727525 - DNA, 25 bp, Homo sapien
ggcaattgctaggttccttaagtcc

SEQ ID NO: 3727526 - DNA, 25 bp, Homo sapien
aattgctaggttccttaagtcctgc

SEQ ID NO: 3727527 - DNA, 25 bp, Homo sapien
taggcaattgctaggttccttaagt

SEQ ID NO: 3727528 - DNA, 25 bp, Homo sapien
gactttaggcaattgctaggttcct

SEQ ID NO: 3727529 - DNA, 25 bp, Homo sapien
gaacagctggcttcctatgagaaca

SEQ ID NO: 3727530 - DNA, 25 bp, Homo sapien
caacaagtcaaccaggtaaagattc

SEQ ID NO: 3727531 - DNA, 25 bp, Homo sapien
aaaaactttgtgttctggcattcta

SEQ ID NO: 3727532 - DNA, 25 bp, Homo sapien
ggcaacttgcttccatcgttttcct

SEQ ID NO: 3727533 - DNA, 25 bp, Homo sapien
taatcatggggctgaagtgtttgtc

SEQ ID NO: 3727534 - DNA, 25 bp, Homo sapien
tcatgtaatcatggggctgaagtgt

SEQ ID NO: 3727535 - DNA, 25 bp, Homo sapien
tgtaatcatggggctgaagtgtttg

SEQ ID NO: 3727536 - DNA, 25 bp, Homo sapien
catcatgtaatcatggggctgaagt

SEQ ID NO: 3727537 - DNA, 25 bp, Homo sapien
ctatggactagttgctgacttaact

SEQ ID NO: 3727538 - DNA, 25 bp, Homo sapien
gctgacttaactggcagctggcctt

SEQ ID NO: 3727539 - DNA, 25 bp, Homo sapien
gggaggacatagtgggacatggctt

SEQ ID NO: 3727540 - DNA, 25 bp, Homo sapien
agtgggacatggcttgccgggcctg

SEQ ID NO: 3727541 - DNA, 25 bp, Homo sapien
aagagcaggtgttcccaatggttga

SEQ ID NO: 3727542 - DNA, 25 bp, Homo sapien
tttggtcctctctagaaggtagtgg

SEQ ID NO: 3727543 - DNA, 25 bp, Homo sapien
tcaggcagagcctcgttttgaccag

SEQ ID NO: 3727544 - DNA, 25 bp, Homo sapien
caatggttgagcaactggcacttct

SEQ ID NO: 3727545 - DNA, 25 bp, Homo sapien
gcacactcttttcttgcgttttgga

SEQ ID NO: 3727546 - DNA, 25 bp, Homo sapien
cttttcttgcgttttggagtgttgc

SEQ ID NO: 3727547 - DNA, 25 bp, Homo sapien
gtgttgcactccagacatccgtggg

SEQ ID NO: 3727548 - DNA, 25 bp, Homo sapien
ttggagtgttgcactccagacatcc

SEQ ID NO: 3727549 - DNA, 25 bp, Homo sapien
tcagaagctatcagggagagagaac

SEQ ID NO: 3727550 - DNA, 25 bp, Homo sapien
agtcatgtatgaggaattaagttcc

SEQ ID NO: 3727551 - DNA, 25 bp, Homo sapien
tgaaaagtcagcactatctgagtta

SEQ ID NO: 3727552 - DNA, 25 bp, Homo sapien
tgcagagaatcccttgacatgggtt

SEQ ID NO: 3727553 - DNA, 25 bp, Homo sapien
tgaagagatcgaggatatctcctcc

SEQ ID NO: 3727554 - DNA, 25 bp, Homo sapien
agatcgaggatatctcctccagtca

SEQ ID NO: 3727555 - DNA, 25 bp, Homo sapien
cagtgaagagatcgaggatatctcc

SEQ ID NO: 3727556 - DNA, 25 bp, Homo sapien
ttatcagtgaagagatcgaggatat

SEQ ID NO: 3727557 - DNA, 25 bp, Homo sapien
ctgcaacctgtttagaggaccaccc

SEQ ID NO: 3727558 - DNA, 25 bp, Homo sapien
tgtaaggtcaggggaaacacagaca

SEQ ID NO: 3727559 - DNA, 25 bp, Homo sapien
gtaaggtcaggggaaacacagacat

SEQ ID NO: 3727560 - DNA, 25 bp, Homo sapien
aatgtaaggtcaggggaaacacaga

SEQ ID NO: 3727561 - DNA, 25 bp, Homo sapien
taaatgtaaggtcaggggaaacaca

SEQ ID NO: 3727562 - DNA, 25 bp, Homo sapien
ggcagaccttccatggagctggcaa

SEQ ID NO: 3727563 - DNA, 25 bp, Homo sapien
tgttgctgccagaggtctttgtcac

SEQ ID NO: 3727564 - DNA, 25 bp, Homo sapien
tactcaaaggttctgggatacccga

SEQ ID NO: 3727565 - DNA, 25 bp, Homo sapien
gcagttctgagacccggcagttctg

SEQ ID NO: 3727566 - DNA, 25 bp, Homo sapien
caacgatgccaaaaatccccaagta

SEQ ID NO: 3727567 - DNA, 25 bp, Homo sapien
gctaatgctaaaggttctagcagct

SEQ ID NO: 3727568 - DNA, 25 bp, Homo sapien
tgagcaggctggcacggaaggactt

SEQ ID NO: 3727569 - DNA, 25 bp, Homo sapien
ggcatggcttggtggtctttagcta

SEQ ID NO: 3727570 - DNA, 25 bp, Homo sapien
cattatcacagatgggcccaatatg

SEQ ID NO: 3727571 - DNA, 25 bp, Homo sapien
gactggccctgaattatggtaatta

SEQ ID NO: 3727572 - DNA, 25 bp, Homo sapien
cccatagccatgcaaggtgtaaagg

SEQ ID NO: 3727573 - DNA, 25 bp, Homo sapien
catttggtggtctccaataagccac

SEQ ID NO: 3727574 - DNA, 25 bp, Homo sapien
gtgtatctgccgaaccttcctgagg

SEQ ID NO: 3727575 - DNA, 25 bp, Homo sapien
taagccacagagtccatagccatgc

SEQ ID NO: 3727576 - DNA, 25 bp, Homo sapien
agtagagaaagacctgtcctttcat

SEQ ID NO: 3727577 - DNA, 25 bp, Homo sapien
gtttcctctaagaagaatgccctct

SEQ ID NO: 3727578 - DNA, 25 bp, Homo sapien
tcttccctcaccgtgcagtagagaa

SEQ ID NO: 3727579 - DNA, 25 bp, Homo sapien
ctgtttcctctaagaagaatgccct

SEQ ID NO: 3727580 - DNA, 25 bp, Homo sapien
cattatccatctagcttttggtatg

SEQ ID NO: 3727581 - DNA, 25 bp, Homo sapien
atgtcaccagtgagcaagtttaaca

SEQ ID NO: 3727582 - DNA, 25 bp, Homo sapien
gcttttggtatgtcaccagtgagca

SEQ ID NO: 3727583 - DNA, 25 bp, Homo sapien
ccatctagcttttggtatgtcacca

SEQ ID NO: 3727584 - DNA, 25 bp, Homo sapien
caaacgtgagggaaaacaatctgct

SEQ ID NO: 3727585 - DNA, 25 bp, Homo sapien
atcttcaatttcaaacgtgagggaa

SEQ ID NO: 3727586 - DNA, 25 bp, Homo sapien
acaatctgcttgctgtaatcagagc

SEQ ID NO: 3727587 - DNA, 25 bp, Homo sapien
tccttccctgtcatatcttcaattt

SEQ ID NO: 3727588 - DNA, 25 bp, Homo sapien
tgtcccctgacaaacctgaatcttg

SEQ ID NO: 3727589 - DNA, 25 bp, Homo sapien
tagcgtctgtgtccctgaattaatg

SEQ ID NO: 3727590 - DNA, 25 bp, Homo sapien
aggtatttctttagccacgtattgg

SEQ ID NO: 3727591 - DNA, 25 bp, Homo sapien
gccaaaggtatctttctgtagcgtc

SEQ ID NO: 3727592 - DNA, 25 bp, Homo sapien
agtatatgtgctgtctaactgaaca

SEQ ID NO: 3727593 - DNA, 25 bp, Homo sapien
tatatgtgctgtctaactgaacacc

SEQ ID NO: 3727594 - DNA, 25 bp, Homo sapien
ttcctgtcatctttgctcaggggca

SEQ ID NO: 3727595 - DNA, 25 bp, Homo sapien
ttgctcaggggcaaatgctgatctt

SEQ ID NO: 3727596 - DNA, 25 bp, Homo sapien
cttttcgaaaagtggatattacagc

SEQ ID NO: 3727597 - DNA, 25 bp, Homo sapien
tcacctctgttgttttgggagaagt

SEQ ID NO: 3727598 - DNA, 25 bp, Homo sapien
tatacttacaagttggggccgcgaa

SEQ ID NO: 3727599 - DNA, 25 bp, Homo sapien
ggattctcttggtgacacaggatga

SEQ ID NO: 3727600 - DNA, 25 bp, Homo sapien
tctgcattgctgtcatcctccggaa

SEQ ID NO: 3727601 - DNA, 25 bp, Homo sapien
tcctagattctcaaaagcatggcct

SEQ ID NO: 3727602 - DNA, 25 bp, Homo sapien
tctcaaaagcatggcctgcacacgc

SEQ ID NO: 3727603 - DNA, 25 bp, Homo sapien
aaaagcatggcctgcacacgctctg

SEQ ID NO: 3727604 - DNA, 25 bp, Homo sapien
tagattctcaaaagcatggcctgca

SEQ ID NO: 3727605 - DNA, 25 bp, Homo sapien
tggtcaggcaaaacctggtatccag

SEQ ID NO: 3727606 - DNA, 25 bp, Homo sapien
accagaggagaacggggtccagcaa

SEQ ID NO: 3727607 - DNA, 25 bp, Homo sapien
ctgacctccattactagtgagtgaa

SEQ ID NO: 3727608 - DNA, 25 bp, Homo sapien
ttggatggcatttcaggtgacatga

SEQ ID NO: 3727609 - DNA, 25 bp, Homo sapien
gaaagtgtggtacagagagctgact

SEQ ID NO: 3727610 - DNA, 25 bp, Homo sapien
tcaaggttatgaatagtattactaa

SEQ ID NO: 3727611 - DNA, 25 bp, Homo sapien
tgagatgcttatgcataatgcggct

SEQ ID NO: 3727612 - DNA, 25 bp, Homo sapien
tactaatggctgaatagttgcggaa

SEQ ID NO: 3727613 - DNA, 25 bp, Homo sapien
tactgctatcatccattccgctgtc

SEQ ID NO: 3727614 - DNA, 25 bp, Homo sapien
ctatcatccattccgctgtccatcc

SEQ ID NO: 3727615 - DNA, 25 bp, Homo sapien
ctactgctatcatccattccgctgt

SEQ ID NO: 3727616 - DNA, 25 bp, Homo sapien
tgctatcatccattccgctgtccat

SEQ ID NO: 3727617 - DNA, 25 bp, Homo sapien
caagcatcactttatggaagaagcc

SEQ ID NO: 3727618 - DNA, 25 bp, Homo sapien
gctcaactgtagagactaacctata

SEQ ID NO: 3727619 - DNA, 25 bp, Homo sapien
tatacagggccaggtaaacagagct

SEQ ID NO: 3727620 - DNA, 25 bp, Homo sapien
gaagaagccaagctcaactgtagag

SEQ ID NO: 3727621 - DNA, 25 bp, Homo sapien
tgggattgtaaagccttatgcacca

SEQ ID NO: 3727622 - DNA, 25 bp, Homo sapien
ctgggattgtaaagccttatgcacc

SEQ ID NO: 3727623 - DNA, 25 bp, Homo sapien
gggattgtaaagccttatgcaccat

SEQ ID NO: 3727624 - DNA, 25 bp, Homo sapien
caacctcttcagactaaatgtctgg

SEQ ID NO: 3727625 - DNA, 25 bp, Homo sapien
tgtggatctctgtttgcacccatat

SEQ ID NO: 3727626 - DNA, 25 bp, Homo sapien
gtgtacccacagctgaaaaacctgg

SEQ ID NO: 3727627 - DNA, 25 bp, Homo sapien
ttaagaatgaacagggaagggccag

SEQ ID NO: 3727628 - DNA, 25 bp, Homo sapien
tccgaaggtgagagaccacatcctt

SEQ ID NO: 3727629 - DNA, 25 bp, Homo sapien
actgtcacctggctccgaaggtgag

SEQ ID NO: 3727630 - DNA, 25 bp, Homo sapien
gggctctttaggtgtcactgtcacc

SEQ ID NO: 3727631 - DNA, 25 bp, Homo sapien
tctttaggtgtcactgtcacctggc

SEQ ID NO: 3727632 - DNA, 25 bp, Homo sapien
tttcctcctggatgacattttttac

SEQ ID NO: 3727633 - DNA, 25 bp, Homo sapien
ctctgctttcctcctggatgacatt

SEQ ID NO: 3727634 - DNA, 25 bp, Homo sapien
agctctgctttcctcctggatgaca

SEQ ID NO: 3727635 - DNA, 25 bp, Homo sapien
ttagctctgctttcctcctggatga

SEQ ID NO: 3727636 - DNA, 25 bp, Homo sapien
tgtgggacgggatgaaaatgagctg

SEQ ID NO: 3727637 - DNA, 25 bp, Homo sapien
atatacctgggagcttgtgggacgg

SEQ ID NO: 3727638 - DNA, 25 bp, Homo sapien
tcactcagcagcaagggacgagggg

SEQ ID NO: 3727639 - DNA, 25 bp, Homo sapien
gcagggagcagaatttcactcagca

SEQ ID NO: 3727640 - DNA, 25 bp, Homo sapien
cacattctcatggtttggcctggta

SEQ ID NO: 3727641 - DNA, 25 bp, Homo sapien
ggcctggtactgtctaaattgactg

SEQ ID NO: 3727642 - DNA, 25 bp, Homo sapien
gacacagacttgagggtcaagcaac

SEQ ID NO: 3727643 - DNA, 25 bp, Homo sapien
gcagatacctgacacaatccattag

SEQ ID NO: 3727644 - DNA, 25 bp, Homo sapien
ctccttttccggagctttctggtga

SEQ ID NO: 3727645 - DNA, 25 bp, Homo sapien
ctctcttgccttcttaagactgaag

SEQ ID NO: 3727646 - DNA, 25 bp, Homo sapien
ctttctggtgagtaggtttgagtca

SEQ ID NO: 3727647 - DNA, 25 bp, Homo sapien
tgaagtcattggaacctccttttcc

SEQ ID NO: 3727648 - DNA, 25 bp, Homo sapien
tcttttagttggctgagagagccct

SEQ ID NO: 3727649 - DNA, 25 bp, Homo sapien
cttttagttggctgagagagccctc

SEQ ID NO: 3727650 - DNA, 25 bp, Homo sapien
ttcttttagttggctgagagagccc

SEQ ID NO: 3727651 - DNA, 25 bp, Homo sapien
gaaagttggcaactcccaaaagcat

SEQ ID NO: 3727652 - DNA, 25 bp, Homo sapien
gctcctctggtgagaaagttggcaa

SEQ ID NO: 3727653 - DNA, 25 bp, Homo sapien
aggagggctcctctggtgagaaagt

SEQ ID NO: 3727654 - DNA, 25 bp, Homo sapien
agaaagttggcaactcccaaaagca

SEQ ID NO: 3727655 - DNA, 25 bp, Homo sapien
gggtatggtgtgtcggagataaccg

SEQ ID NO: 3727656 - DNA, 25 bp, Homo sapien
cagtgggtggcagcctgttgctttc

SEQ ID NO: 3727657 - DNA, 25 bp, Homo sapien
ctgttgctttcaagggagacagcca

SEQ ID NO: 3727658 - DNA, 25 bp, Homo sapien
tatggtgtgtcggagataaccggga

SEQ ID NO: 3727659 - DNA, 25 bp, Homo sapien
caagagggctcccaagagctggatc

SEQ ID NO: 3727660 - DNA, 25 bp, Homo sapien
ctgagctctgttcccaaacaatggg

SEQ ID NO: 3727661 - DNA, 25 bp, Homo sapien
agaccctttgaggagcttgtcattt

SEQ ID NO: 3727662 - DNA, 25 bp, Homo sapien
catttgacttgattgatgtctgccc

SEQ ID NO: 3727663 - DNA, 25 bp, Homo sapien
gagacaggaaaaacttatgtgcact

SEQ ID NO: 3727664 - DNA, 25 bp, Homo sapien
cttccttgccttcagaaaaacacat

SEQ ID NO: 3727665 - DNA, 25 bp, Homo sapien
tcataatcgtgaacccagagcaaca

SEQ ID NO: 3727666 - DNA, 25 bp, Homo sapien
catccttgcattgcttcaaatcata

SEQ ID NO: 3727667 - DNA, 25 bp, Homo sapien
tccttgcatacttgctgctgacatt

SEQ ID NO: 3727668 - DNA, 25 bp, Homo sapien
tataggtagcatccagaaaggagag

SEQ ID NO: 3727669 - DNA, 25 bp, Homo sapien
tggggtgctcttcttatcgattcct

SEQ ID NO: 3727670 - DNA, 25 bp, Homo sapien
gccagatcttgagttataggtagca

SEQ ID NO: 3727671 - DNA, 25 bp, Homo sapien
caatttcatgcacccaagcacctga

SEQ ID NO: 3727672 - DNA, 25 bp, Homo sapien
tctttccaatagctccagtttcggg

SEQ ID NO: 3727673 - DNA, 25 bp, Homo sapien
gaaaggtagctctttgcaggtctga

SEQ ID NO: 3727674 - DNA, 25 bp, Homo sapien
cagtttcgggagcatgacacctgca

SEQ ID NO: 3727675 - DNA, 25 bp, Homo sapien
aggatgctcgtgcaatgatgcagca

SEQ ID NO: 3727676 - DNA, 25 bp, Homo sapien
gagcagcaaggatgctcgtgcaatg

SEQ ID NO: 3727677 - DNA, 25 bp, Homo sapien
tcaaacatagggtgtagagcagcaa

SEQ ID NO: 3727678 - DNA, 25 bp, Homo sapien
aacatagggtgtagagcagcaagga

SEQ ID NO: 3727679 - DNA, 25 bp, Homo sapien
tcctggttcattatctcaactggtc

SEQ ID NO: 3727680 - DNA, 25 bp, Homo sapien
cattgaatgtctcaactgtgacagc

SEQ ID NO: 3727681 - DNA, 25 bp, Homo sapien
caactggtctcattgaatgtctcaa

SEQ ID NO: 3727682 - DNA, 25 bp, Homo sapien
tctcaactgtgacagcataagagag

SEQ ID NO: 3727683 - DNA, 25 bp, Homo sapien
ctgcatggccatagtctgagagctt

SEQ ID NO: 3727684 - DNA, 25 bp, Homo sapien
catggccatagtctgagagctttcc

SEQ ID NO: 3727685 - DNA, 25 bp, Homo sapien
ctgggaagtcaacagcgggtctcca

SEQ ID NO: 3727686 - DNA, 25 bp, Homo sapien
gtcaacagcgggtctccaagaacca

SEQ ID NO: 3727687 - DNA, 25 bp, Homo sapien
cccctagcagcagcttcagtgccat

SEQ ID NO: 3727688 - DNA, 25 bp, Homo sapien
ttcagtgccatgactatgtcccagg

SEQ ID NO: 3727689 - DNA, 25 bp, Homo sapien
cagccattcctctaagtccttcaag

SEQ ID NO: 3727690 - DNA, 25 bp, Homo sapien
tatgtcccaggagtcagtatgcagc

SEQ ID NO: 3727691 - DNA, 25 bp, Homo sapien
gaaatgaagcctttggccaggatag

SEQ ID NO: 3727692 - DNA, 25 bp, Homo sapien
gagaccagggaatcctgaaatgaag

SEQ ID NO: 3727693 - DNA, 25 bp, Homo sapien
tagtgtcttgctgcatgccaccgat

SEQ ID NO: 3727694 - DNA, 25 bp, Homo sapien
gcatgccaccgatataattgaagaa

SEQ ID NO: 3727695 - DNA, 25 bp, Homo sapien
cattctttgttgtctagccctaggt

SEQ ID NO: 3727696 - DNA, 25 bp, Homo sapien
tcttttgacaatggatggcaacact

SEQ ID NO: 3727697 - DNA, 25 bp, Homo sapien
gacaccatgtacagggatatgttca

SEQ ID NO: 3727698 - DNA, 25 bp, Homo sapien
taggtgcttgtgcatgctaggaagc

SEQ ID NO: 3727699 - DNA, 25 bp, Homo sapien
tgtgatggctacatcatccaagata

SEQ ID NO: 3727700 - DNA, 25 bp, Homo sapien
tcatccaagataagactgaagtcct

SEQ ID NO: 3727701 - DNA, 25 bp, Homo sapien
ctcccaatgaatcaacagggatacc

SEQ ID NO: 3727702 - DNA, 25 bp, Homo sapien
ggctacatcatccaagataagactg

SEQ ID NO: 3727703 - DNA, 25 bp, Homo sapien
accacttgtttggcctctacagtag

SEQ ID NO: 3727704 - DNA, 25 bp, Homo sapien
gctggaccacttgtttggcctctac

SEQ ID NO: 3727705 - DNA, 25 bp, Homo sapien
tggaccacttgtttggcctctacag

SEQ ID NO: 3727706 - DNA, 25 bp, Homo sapien
gaccacttgtttggcctctacagta

SEQ ID NO: 3727707 - DNA, 25 bp, Homo sapien
acagcctttggattcccctgaagct

SEQ ID NO: 3727708 - DNA, 25 bp, Homo sapien
aaacagcctttggattcccctgaag

SEQ ID NO: 3727709 - DNA, 25 bp, Homo sapien
agcctttggattcccctgaagctgg

SEQ ID NO: 3727710 - DNA, 25 bp, Homo sapien
aacagcctttggattcccctgaagc

SEQ ID NO: 3727711 - DNA, 25 bp, Homo sapien
ctgtgtcagcaatgttggaatgtct

SEQ ID NO: 3727712 - DNA, 25 bp, Homo sapien
tcatcaagaaggcagtagggtaaag

SEQ ID NO: 3727713 - DNA, 25 bp, Homo sapien
gaaagctagccttccagggagtgag

SEQ ID NO: 3727714 - DNA, 25 bp, Homo sapien
tcatcagtctgagtaacctgcacct

SEQ ID NO: 3727715 - DNA, 25 bp, Homo sapien
caccttctgaaatacaggtagcagg

SEQ ID NO: 3727716 - DNA, 25 bp, Homo sapien
acaaacttgtgggaataatggcaat

SEQ ID NO: 3727717 - DNA, 25 bp, Homo sapien
tggaacaaacttgtgggaataatgg

SEQ ID NO: 3727718 - DNA, 25 bp, Homo sapien
gaacaaacttgtgggaataatggca

SEQ ID NO: 3727719 - DNA, 25 bp, Homo sapien
caaacttgtgggaataatggcaata

SEQ ID NO: 3727720 - DNA, 25 bp, Homo sapien
cacaaaggcccttgacagacttttt

SEQ ID NO: 3727721 - DNA, 25 bp, Homo sapien
cctgcttcatcagagttgcccttgc

SEQ ID NO: 3727722 - DNA, 25 bp, Homo sapien
tgcacaaaggcccttgacagacttt

SEQ ID NO: 3727723 - DNA, 25 bp, Homo sapien
cagagttgcccttgccaaaagcttt

SEQ ID NO: 3727724 - DNA, 25 bp, Homo sapien
gatgaagacttggagaaggaggaca

SEQ ID NO: 3727725 - DNA, 25 bp, Homo sapien
caaagagtcttctaatacatatctc

SEQ ID NO: 3727726 - DNA, 25 bp, Homo sapien
tcttctaatacatatctctttgtag

SEQ ID NO: 3727727 - DNA, 25 bp, Homo sapien
tctctttgtagatgaagacttggag

SEQ ID NO: 3727728 - DNA, 25 bp, Homo sapien
tggtaaggcaatgatggaggcacaa

SEQ ID NO: 3727729 - DNA, 25 bp, Homo sapien
aaccttgatgttaaagacctcgctg

SEQ ID NO: 3727730 - DNA, 25 bp, Homo sapien
tgggtcggcgggagtggtaaggcaa

SEQ ID NO: 3727731 - DNA, 25 bp, Homo sapien
caatgatggaggcacaaccttgatg

SEQ ID NO: 3727732 - DNA, 25 bp, Homo sapien
ctagttggagccttcacagtcattg

SEQ ID NO: 3727733 - DNA, 25 bp, Homo sapien
ttggagccttcacagtcattgaatg

SEQ ID NO: 3727734 - DNA, 25 bp, Homo sapien
tagttggagccttcacagtcattga

SEQ ID NO: 3727735 - DNA, 25 bp, Homo sapien
agttggagccttcacagtcattgaa

SEQ ID NO: 3727736 - DNA, 25 bp, Homo sapien
actgttgggtcctagtctcaggaag

SEQ ID NO: 3727737 - DNA, 25 bp, Homo sapien
gttgggtcctagtctcaggaagaac

SEQ ID NO: 3727738 - DNA, 25 bp, Homo sapien
tgttgggtcctagtctcaggaagaa

SEQ ID NO: 3727739 - DNA, 25 bp, Homo sapien
ctgttgggtcctagtctcaggaaga

SEQ ID NO: 3727740 - DNA, 25 bp, Homo sapien
caagcacgcattttgaatcattgaa

SEQ ID NO: 3727741 - DNA, 25 bp, Homo sapien
ctataatggcgggaacaagttccac

SEQ ID NO: 3727742 - DNA, 25 bp, Homo sapien
aacatcatgacttgcaagcacgcat

SEQ ID NO: 3727743 - DNA, 25 bp, Homo sapien
gaaatgcatcacatcgtcggtggcc

SEQ ID NO: 3727744 - DNA, 25 bp, Homo sapien
gccacagcatgccacggggacaagg

SEQ ID NO: 3727745 - DNA, 25 bp, Homo sapien
aggctgacgtggctaggtgggagtg

SEQ ID NO: 3727746 - DNA, 25 bp, Homo sapien
gatctgccacagagctttgtggaaa

SEQ ID NO: 3727747 - DNA, 25 bp, Homo sapien
ggagggcagatctgccacagagctt

SEQ ID NO: 3727748 - DNA, 25 bp, Homo sapien
atcgttctcccaatcactcctgcgg

SEQ ID NO: 3727749 - DNA, 25 bp, Homo sapien
tgcatcgttctcccaatcactcctg

SEQ ID NO: 3727750 - DNA, 25 bp, Homo sapien
tcgttctcccaatcactcctgcggc

SEQ ID NO: 3727751 - DNA, 25 bp, Homo sapien
catcgttctcccaatcactcctgcg

SEQ ID NO: 3727752 - DNA, 25 bp, Homo sapien
atttctcttctttgccagatggaca

SEQ ID NO: 3727753 - DNA, 25 bp, Homo sapien
ttctcttctttgccagatggacacc

SEQ ID NO: 3727754 - DNA, 25 bp, Homo sapien
ttatttctcttctttgccagatgga

SEQ ID NO: 3727755 - DNA, 25 bp, Homo sapien
ctcttctttgccagatggacaccat

SEQ ID NO: 3727756 - DNA, 25 bp, Homo sapien
accagatggcaatctattttcgaac

SEQ ID NO: 3727757 - DNA, 25 bp, Homo sapien
caaccagatggcaatctattttcga

SEQ ID NO: 3727758 - DNA, 25 bp, Homo sapien
aaccagatggcaatctattttcgaa

SEQ ID NO: 3727759 - DNA, 25 bp, Homo sapien
ttagaaaaccataaatcattttcat

SEQ ID NO: 3727760 - DNA, 25 bp, Homo sapien
atggttccaccaattgtcaatgaca

SEQ ID NO: 3727761 - DNA, 25 bp, Homo sapien
ggcaatggttccaccaattgtcaat

SEQ ID NO: 3727762 - DNA, 25 bp, Homo sapien
caatggttccaccaattgtcaatga

SEQ ID NO: 3727763 - DNA, 25 bp, Homo sapien
taacccagtcctagtgactctagct

SEQ ID NO: 3727764 - DNA, 25 bp, Homo sapien
tagtgactctagctctattctctct

SEQ ID NO: 3727765 - DNA, 25 bp, Homo sapien
cagctttcaatggagtgtggtaaac

SEQ ID NO: 3727766 - DNA, 25 bp, Homo sapien
aaactgggatggatgagcttagttc

SEQ ID NO: 3727767 - DNA, 25 bp, Homo sapien
tgcagtgaagtaggatttgacacta

SEQ ID NO: 3727768 - DNA, 25 bp, Homo sapien
ctgcagtgaagtaggatttgacact

SEQ ID NO: 3727769 - DNA, 25 bp, Homo sapien
gcagtgaagtaggatttgacactat

SEQ ID NO: 3727770 - DNA, 25 bp, Homo sapien
agtgaaagcactttatcactttcac

SEQ ID NO: 3727771 - DNA, 25 bp, Homo sapien
aaagtaatgactgtgtagcacatgg

SEQ ID NO: 3727772 - DNA, 25 bp, Homo sapien
accacgtgcaccatgtcatcagctg

SEQ ID NO: 3727773 - DNA, 25 bp, Homo sapien
agctgccttgtggtggaagctttct

SEQ ID NO: 3727774 - DNA, 25 bp, Homo sapien
ttgtagatgcatcctggtaatcccc

SEQ ID NO: 3727775 - DNA, 25 bp, Homo sapien
caggtgctcatacagctggctcatg

SEQ ID NO: 3727776 - DNA, 25 bp, Homo sapien
gaaaagcctgaagtgaatccttggg

SEQ ID NO: 3727777 - DNA, 25 bp, Homo sapien
cattttgcacagtctcccattaagg

SEQ ID NO: 3727778 - DNA, 25 bp, Homo sapien
taagctgtcaggtttctctatggcg

SEQ ID NO: 3727779 - DNA, 25 bp, Homo sapien
cccattaaggagtgaggatctatgc

SEQ ID NO: 3727780 - DNA, 25 bp, Homo sapien
caatttctcagactttccatatttt

SEQ ID NO: 3727781 - DNA, 25 bp, Homo sapien
atttctcagactttccatatttttg

SEQ ID NO: 3727782 - DNA, 25 bp, Homo sapien
aatttctcagactttccatattttt

SEQ ID NO: 3727783 - DNA, 25 bp, Homo sapien
ggcttccctagcaggcgaactctgt

SEQ ID NO: 3727784 - DNA, 25 bp, Homo sapien
ccttggaagcacaacagaaagatat

SEQ ID NO: 3727785 - DNA, 25 bp, Homo sapien
cattgcagagataaaacgatggact

SEQ ID NO: 3727786 - DNA, 25 bp, Homo sapien
gatgcacaggtgtaacctatgagca

SEQ ID NO: 3727787 - DNA, 25 bp, Homo sapien
ctccacttgcaaggttctgatacat

SEQ ID NO: 3727788 - DNA, 25 bp, Homo sapien
tttacttgaacttccacgtaagcga

SEQ ID NO: 3727789 - DNA, 25 bp, Homo sapien
agtgctccctccatctttacttgaa

SEQ ID NO: 3727790 - DNA, 25 bp, Homo sapien
ggaaagagcagtgctccctccatct

SEQ ID NO: 3727791 - DNA, 25 bp, Homo sapien
cgtaagcgatcatctcagagagcat

SEQ ID NO: 3727792 - DNA, 25 bp, Homo sapien
ggtttgtcaatgttagagcttgcat

SEQ ID NO: 3727793 - DNA, 25 bp, Homo sapien
gttgagagttatagaagtcctctgg

SEQ ID NO: 3727794 - DNA, 25 bp, Homo sapien
ctggtttgtcaatgttagagcttgc

SEQ ID NO: 3727795 - DNA, 25 bp, Homo sapien
tgcggttgagagttatagaagtcct

SEQ ID NO: 3727796 - DNA, 25 bp, Homo sapien
tgtgtctgtttaagagctgggcctc

SEQ ID NO: 3727797 - DNA, 25 bp, Homo sapien
ttgcaagaggatactgtttgctgcc

SEQ ID NO: 3727798 - DNA, 25 bp, Homo sapien
tttgcaagaggatactgtttgctgc

SEQ ID NO: 3727799 - DNA, 25 bp, Homo sapien
ctgcttgtgtctgtttaagagctgg

SEQ ID NO: 3727800 - DNA, 25 bp, Homo sapien
gaatgctggcttacaaagtaataga

SEQ ID NO: 3727801 - DNA, 25 bp, Homo sapien
tctccattgtacctctgagggcagt

SEQ ID NO: 3727802 - DNA, 25 bp, Homo sapien
caaacagaaccagtgtcatctccat

SEQ ID NO: 3727803 - DNA, 25 bp, Homo sapien
ctctgctgttgaatgctggcttaca

SEQ ID NO: 3727804 - DNA, 25 bp, Homo sapien
tacagagactcttgccaaggcccat

SEQ ID NO: 3727805 - DNA, 25 bp, Homo sapien
gatacagagactcttgccaaggccc

SEQ ID NO: 3727806 - DNA, 25 bp, Homo sapien
ggactgcatctttcaggatacagag

SEQ ID NO: 3727807 - DNA, 25 bp, Homo sapien
ttcaggatacagagactcttgccaa

SEQ ID NO: 3727808 - DNA, 25 bp, Homo sapien
agttagaagtgcaaacccagttggg

SEQ ID NO: 3727809 - DNA, 25 bp, Homo sapien
tcatcagaggatggagaatggtctt

SEQ ID NO: 3727810 - DNA, 25 bp, Homo sapien
ttcaattggacagtcacatattcct

SEQ ID NO: 3727811 - DNA, 25 bp, Homo sapien
gttgggtttcaattggacagtcaca

SEQ ID NO: 3727812 - DNA, 25 bp, Homo sapien
accaataacaggatctgaaattgtg

SEQ ID NO: 3727813 - DNA, 25 bp, Homo sapien
gaccaataacaggatctgaaattgt

SEQ ID NO: 3727814 - DNA, 25 bp, Homo sapien
tttgctaaaaagaattgcttcttgg

SEQ ID NO: 3727815 - DNA, 25 bp, Homo sapien
ctttgctaaaaagaattgcttcttg

SEQ ID NO: 3727816 - DNA, 25 bp, Homo sapien
ttgctaaaaagaattgcttcttggt

SEQ ID NO: 3727817 - DNA, 25 bp, Homo sapien
ttggcaagaatcttgcccttaactt

SEQ ID NO: 3727818 - DNA, 25 bp, Homo sapien
cttggcaagaatcttgcccttaact

SEQ ID NO: 3727819 - DNA, 25 bp, Homo sapien
cttaatatgctcaatatgaacatta

SEQ ID NO: 3727820 - DNA, 25 bp, Homo sapien
atgctcaatatgaacattaattcac

SEQ ID NO: 3727821 - DNA, 25 bp, Homo sapien
gtgtttcaggaagctatcttggctc

SEQ ID NO: 3727822 - DNA, 25 bp, Homo sapien
ggaagctatcttggctcttagagtg

SEQ ID NO: 3727823 - DNA, 25 bp, Homo sapien
ttcaggaagctatcttggctcttag

SEQ ID NO: 3727824 - DNA, 25 bp, Homo sapien
caggaagctatcttggctcttagag

SEQ ID NO: 3727825 - DNA, 25 bp, Homo sapien
tggcatttcagttgaaccctggtac

SEQ ID NO: 3727826 - DNA, 25 bp, Homo sapien
gctggcatttcagttgaaccctggt

SEQ ID NO: 3727827 - DNA, 25 bp, Homo sapien
ggctggcatttcagttgaaccctgg

SEQ ID NO: 3727828 - DNA, 25 bp, Homo sapien
aggctggcatttcagttgaaccctg

SEQ ID NO: 3727829 - DNA, 25 bp, Homo sapien
agcccaggctccttctcattggttc

SEQ ID NO: 3727830 - DNA, 25 bp, Homo sapien
tatacatgaatcataaggaagagtt

SEQ ID NO: 3727831 - DNA, 25 bp, Homo sapien
ccaggctccttctcattggttctta

SEQ ID NO: 3727832 - DNA, 25 bp, Homo sapien
aggaagagtttccagcagcccaggc

SEQ ID NO: 3727833 - DNA, 25 bp, Homo sapien
aaaatcccatcttattgcgagtcag

SEQ ID NO: 3727834 - DNA, 25 bp, Homo sapien
tcccatcttattgcgagtcagaaag

SEQ ID NO: 3727835 - DNA, 25 bp, Homo sapien
ccatcttattgcgagtcagaaaggg

SEQ ID NO: 3727836 - DNA, 25 bp, Homo sapien
aatcccatcttattgcgagtcagaa

SEQ ID NO: 3727837 - DNA, 25 bp, Homo sapien
aggtctctgagaatgcaaggctcct

SEQ ID NO: 3727838 - DNA, 25 bp, Homo sapien
acaaggagaatctgggtgagaaatc

SEQ ID NO: 3727839 - DNA, 25 bp, Homo sapien
caggtgtgtgccgatccaggtctct

SEQ ID NO: 3727840 - DNA, 25 bp, Homo sapien
gcaggtgcgctcagaaacacagcag

SEQ ID NO: 3727841 - DNA, 25 bp, Homo sapien
gttattccgtaatggtcatcctggg

SEQ ID NO: 3727842 - DNA, 25 bp, Homo sapien
gacaggggctgttattccgtaatgg

SEQ ID NO: 3727843 - DNA, 25 bp, Homo sapien
ctaggatattttgtaggagtgaggt

SEQ ID NO: 3727844 - DNA, 25 bp, Homo sapien
ctatggccctaagtcgtagctagga

SEQ ID NO: 3727845 - DNA, 25 bp, Homo sapien
gctgttattggcttccatgctcact

SEQ ID NO: 3727846 - DNA, 25 bp, Homo sapien
gttttcagactttttgaggtcgcca

SEQ ID NO: 3727847 - DNA, 25 bp, Homo sapien
gaggtcgccaagttcgtcttcattt

SEQ ID NO: 3727848 - DNA, 25 bp, Homo sapien
tgccgccctccacaagttattttta

SEQ ID NO: 3727849 - DNA, 25 bp, Homo sapien
agcccagttacaccagcagggccca

SEQ ID NO: 3727850 - DNA, 25 bp, Homo sapien
ccaaattcctggacaatataattta

SEQ ID NO: 3727851 - DNA, 25 bp, Homo sapien
ccagttacaccagcagggcccacgt

SEQ ID NO: 3727852 - DNA, 25 bp, Homo sapien
acatccttgcataacctggttgtag

SEQ ID NO: 3727853 - DNA, 25 bp, Homo sapien
gattatacatcaaggaatggcatcc

SEQ ID NO: 3727854 - DNA, 25 bp, Homo sapien
gaaattggatttgccatgattatac

SEQ ID NO: 3727855 - DNA, 25 bp, Homo sapien
cttgatggttttgttatgagggaaa

SEQ ID NO: 3727856 - DNA, 25 bp, Homo sapien
acctggttcatggagcatttggcaa

SEQ ID NO: 3727857 - DNA, 25 bp, Homo sapien
tgaattagagcagcccattaccatc

SEQ ID NO: 3727858 - DNA, 25 bp, Homo sapien
tagcaccggattaggtggcagccag

SEQ ID NO: 3727859 - DNA, 25 bp, Homo sapien
agcatttggcaaggcaagtgggtgg

SEQ ID NO: 3727860 - DNA, 25 bp, Homo sapien
ggtttcttgctcagccctctggtag

SEQ ID NO: 3727861 - DNA, 25 bp, Homo sapien
cttgctcagccctctggtagcttct

SEQ ID NO: 3727862 - DNA, 25 bp, Homo sapien
gctttggtttcttgctcagccctct

SEQ ID NO: 3727863 - DNA, 25 bp, Homo sapien
tttggtttcttgctcagccctctgg

SEQ ID NO: 3727864 - DNA, 25 bp, Homo sapien
ctctccagccccaaaatgatctcct

SEQ ID NO: 3727865 - DNA, 25 bp, Homo sapien
cttggccctgttgacatgatgtcct

SEQ ID NO: 3727866 - DNA, 25 bp, Homo sapien
ctggctttacttcctgcatccccat

SEQ ID NO: 3727867 - DNA, 25 bp, Homo sapien
gccctgttgacatgatgtcctggct

SEQ ID NO: 3727868 - DNA, 25 bp, Homo sapien
gttgacatgatgtcctggctttact

SEQ ID NO: 3727869 - DNA, 25 bp, Homo sapien
tgtcttcagtgtcaacgatctcacc

SEQ ID NO: 3727870 - DNA, 25 bp, Homo sapien
tcttccgatggatccctctgtgact

SEQ ID NO: 3727871 - DNA, 25 bp, Homo sapien
caggaaacctaatgaggattctatt

SEQ ID NO: 3727872 - DNA, 25 bp, Homo sapien
tttccctctgggactcttccgatgg

SEQ ID NO: 3727873 - DNA, 25 bp, Homo sapien
ctggcctctgtgtaaggcggctcac

SEQ ID NO: 3727874 - DNA, 25 bp, Homo sapien
tctggcctctgtgtaaggcggctca

SEQ ID NO: 3727875 - DNA, 25 bp, Homo sapien
gtggagagagtggagacggccagcc

SEQ ID NO: 3727876 - DNA, 25 bp, Homo sapien
ggagagagtggagacggccagccag

SEQ ID NO: 3727877 - DNA, 25 bp, Homo sapien
tgtggagagagtggagacggccagc

SEQ ID NO: 3727878 - DNA, 25 bp, Homo sapien
ctgtggagagagtggagacggccag

SEQ ID NO: 3727879 - DNA, 25 bp, Homo sapien
gcatcaggcattgggaattgctgca

SEQ ID NO: 3727880 - DNA, 25 bp, Homo sapien
gcgttgagatgctcctgtgccttct

SEQ ID NO: 3727881 - DNA, 25 bp, Homo sapien
gcattgggaattgctgcacgccctg

SEQ ID NO: 3727882 - DNA, 25 bp, Homo sapien
ggcacagcggcgttgagatgctcct

SEQ ID NO: 3727883 - DNA, 25 bp, Homo sapien
atgccaagggttaggagggcattac

SEQ ID NO: 3727884 - DNA, 25 bp, Homo sapien
catgccaagggttaggagggcatta

SEQ ID NO: 3727885 - DNA, 25 bp, Homo sapien
gccaggatccccttcctggcagcct

SEQ ID NO: 3727886 - DNA, 25 bp, Homo sapien
cactgcaagctctgtaaggacaggt

SEQ ID NO: 3727887 - DNA, 25 bp, Homo sapien
ccagggaaaggttggcggctgagca

SEQ ID NO: 3727888 - DNA, 25 bp, Homo sapien
taaggacaggtacccagccaggatc

SEQ ID NO: 3727889 - DNA, 25 bp, Homo sapien
gctggagcagtcagcgtcccaggaa

SEQ ID NO: 3727890 - DNA, 25 bp, Homo sapien
gagtatgagaggtttttggtaaggc

SEQ ID NO: 3727891 - DNA, 25 bp, Homo sapien
caggaactcccacgaccaagcccca

SEQ ID NO: 3727892 - DNA, 25 bp, Homo sapien
tccagtgggtgagtatgagaggttt

SEQ ID NO: 3727893 - DNA, 25 bp, Homo sapien
cagcgtattatcagcatctgtgcag

SEQ ID NO: 3727894 - DNA, 25 bp, Homo sapien
aagagcacgtgaagactaaccagcg

SEQ ID NO: 3727895 - DNA, 25 bp, Homo sapien
gaagactaaccagcgtattatcagc

SEQ ID NO: 3727896 - DNA, 25 bp, Homo sapien
tctccacaaacccttaataagagca

SEQ ID NO: 3727897 - DNA, 25 bp, Homo sapien
aacgtggcagatccctgacatcttt

SEQ ID NO: 3727898 - DNA, 25 bp, Homo sapien
gaagaaacgtggcagatccctgaca

SEQ ID NO: 3727899 - DNA, 25 bp, Homo sapien
tccctccaaagttgaacacttggtg

SEQ ID NO: 3727900 - DNA, 25 bp, Homo sapien
attgctgcaccagaaggagggtccc

SEQ ID NO: 3727901 - DNA, 25 bp, Homo sapien
aataatcacgcctcggatagacctc

SEQ ID NO: 3727902 - DNA, 25 bp, Homo sapien
tagcaataatcacgcctcggataga

SEQ ID NO: 3727903 - DNA, 25 bp, Homo sapien
ttctattagcaataatcacgcctcg

SEQ ID NO: 3727904 - DNA, 25 bp, Homo sapien
gcaataatcacgcctcggatagacc

SEQ ID NO: 3727905 - DNA, 25 bp, Homo sapien
tgtctctcgtgaaacagcccttatg

SEQ ID NO: 3727906 - DNA, 25 bp, Homo sapien
ggactatggctaagggaggacctaa

SEQ ID NO: 3727907 - DNA, 25 bp, Homo sapien
tgcccagccgagcaagaccttttag

SEQ ID NO: 3727908 - DNA, 25 bp, Homo sapien
taaccccagtgatagtgtctctcgt

SEQ ID NO: 3727909 - DNA, 25 bp, Homo sapien
gacgaataggaccttgtccctggat

SEQ ID NO: 3727910 - DNA, 25 bp, Homo sapien
taatttcaggcttatgtaagttgca

SEQ ID NO: 3727911 - DNA, 25 bp, Homo sapien
agaatagtacaaagagctcttgtgt

SEQ ID NO: 3727912 - DNA, 25 bp, Homo sapien
taggccagtccctgagacgaatagg

SEQ ID NO: 3727913 - DNA, 25 bp, Homo sapien
aagatatcctttgtcctgtaccctg

SEQ ID NO: 3727914 - DNA, 25 bp, Homo sapien
gaaatcagagctgagtaggagctgc

SEQ ID NO: 3727915 - DNA, 25 bp, Homo sapien
taactggatgtagggaaaagcttca

SEQ ID NO: 3727916 - DNA, 25 bp, Homo sapien
tggttctggaagtctgaagtctaaa

SEQ ID NO: 3727917 - DNA, 25 bp, Homo sapien
ccactaggtgtgattgagcatcttg

SEQ ID NO: 3727918 - DNA, 25 bp, Homo sapien
tctcatccactaggtgtgattgagc

SEQ ID NO: 3727919 - DNA, 25 bp, Homo sapien
tcatccactaggtgtgattgagcat

SEQ ID NO: 3727920 - DNA, 25 bp, Homo sapien
catccactaggtgtgattgagcatc

SEQ ID NO: 3727921 - DNA, 25 bp, Homo sapien
ttgttaagggtgagcagaaaaccag

SEQ ID NO: 3727922 - DNA, 25 bp, Homo sapien
tttgccgttgccacagcttgttaag

SEQ ID NO: 3727923 - DNA, 25 bp, Homo sapien
cttgacctggatttgccgttgccac

SEQ ID NO: 3727924 - DNA, 25 bp, Homo sapien
acagcttgttaagggtgagcagaaa

SEQ ID NO: 3727925 - DNA, 25 bp, Homo sapien
caccgcgagtaaggtgagggcactc

SEQ ID NO: 3727926 - DNA, 25 bp, Homo sapien
gttcctggacgcgtatgcccgcgga

SEQ ID NO: 3727927 - DNA, 25 bp, Homo sapien
gcgcgtgttgcacctcggcgggcag

SEQ ID NO: 3727928 - DNA, 25 bp, Homo sapien
tgaggccgggcgagatccggttcgt

SEQ ID NO: 3727929 - DNA, 25 bp, Homo sapien
cctctttgaggaatgacgacaaaaa

SEQ ID NO: 3727930 - DNA, 25 bp, Homo sapien
gaagacactcagcagcactgcgtcc

SEQ ID NO: 3727931 - DNA, 25 bp, Homo sapien
tgcagggagaggcaatgcggactgg

SEQ ID NO: 3727932 - DNA, 25 bp, Homo sapien
tgaggaatgacgacaaaaacgaaca

SEQ ID NO: 3727933 - DNA, 25 bp, Homo sapien
gaccagatattaaatgataccattt

SEQ ID NO: 3727934 - DNA, 25 bp, Homo sapien
ctgtacgatggaattttaattggca

SEQ ID NO: 3727935 - DNA, 25 bp, Homo sapien
agaccagatattaaatgataccatt

SEQ ID NO: 3727936 - DNA, 25 bp, Homo sapien
ttctgtacgatggaattttaattgg

SEQ ID NO: 3727937 - DNA, 25 bp, Homo sapien
cagtatcttctgaacaagccaagtt

SEQ ID NO: 3727938 - DNA, 25 bp, Homo sapien
tgtcttatgcacagtatcttctgaa

SEQ ID NO: 3727939 - DNA, 25 bp, Homo sapien
tatcttctgaacaagccaagtttct

SEQ ID NO: 3727940 - DNA, 25 bp, Homo sapien
ctcatgtcttatgcacagtatcttc

SEQ ID NO: 3727941 - DNA, 25 bp, Homo sapien
cctcttctgagataggggctgaccc

SEQ ID NO: 3727942 - DNA, 25 bp, Homo sapien
ctcttctgagataggggctgacccc

SEQ ID NO: 3727943 - DNA, 25 bp, Homo sapien
ccctcttctgagataggggctgacc

SEQ ID NO: 3727944 - DNA, 25 bp, Homo sapien
taggtgtggattctgcaatgctgca

SEQ ID NO: 3727945 - DNA, 25 bp, Homo sapien
gagaggaggcggaatctttcttaaa

SEQ ID NO: 3727946 - DNA, 25 bp, Homo sapien
ctaacaagggtagtagacgtacgtg

SEQ ID NO: 3727947 - DNA, 25 bp, Homo sapien
cattaggcgcttgcttatgagagga

SEQ ID NO: 3727948 - DNA, 25 bp, Homo sapien
aggggcgcctcggaaatgtctcccg

SEQ ID NO: 3727949 - DNA, 25 bp, Homo sapien
tcaagctctaagtccgtgaagccgc

SEQ ID NO: 3727950 - DNA, 25 bp, Homo sapien
gcctggcgccttttcaacgtcctct

SEQ ID NO: 3727951 - DNA, 25 bp, Homo sapien
gactgtgcagctcgaatccgcggcg

SEQ ID NO: 3727952 - DNA, 25 bp, Homo sapien
gagggacctgtacgccgagccctgt

SEQ ID NO: 3727953 - DNA, 25 bp, Homo sapien
tcacactggcgaccgttacgggctg

SEQ ID NO: 3727954 - DNA, 25 bp, Homo sapien
gcgcgtagccggctttgtgtttccc

SEQ ID NO: 3727955 - DNA, 25 bp, Homo sapien
tctggcgcttgctctgtgttttaaa

SEQ ID NO: 3727956 - DNA, 25 bp, Homo sapien
aagaggctggacgtgccccaaacac

SEQ ID NO: 3727957 - DNA, 25 bp, Homo sapien
gaggctggacgtgccccaaacacca

SEQ ID NO: 3727958 - DNA, 25 bp, Homo sapien
caaagaggctggacgtgccccaaac

SEQ ID NO: 3727959 - DNA, 25 bp, Homo sapien
ctccaaagaggctggacgtgcccca

SEQ ID NO: 3727960 - DNA, 25 bp, Homo sapien
catcaataaccaaccagacctgcta

SEQ ID NO: 3727961 - DNA, 25 bp, Homo sapien
ttgtttgctgattctaagcccaagc

SEQ ID NO: 3727962 - DNA, 25 bp, Homo sapien
gacctgctattgaaagactgctctc

SEQ ID NO: 3727963 - DNA, 25 bp, Homo sapien
ccagttaggcaaatgatttgtttgc

SEQ ID NO: 3727964 - DNA, 25 bp, Homo sapien
atattttaagcacacgccccagggt

SEQ ID NO: 3727965 - DNA, 25 bp, Homo sapien
gctgctaccacagtaagtttttgga

SEQ ID NO: 3727966 - DNA, 25 bp, Homo sapien
gctctgccctttgttaacggtacga

SEQ ID NO: 3727967 - DNA, 25 bp, Homo sapien
gcatagtgcttaagggtattagccc

SEQ ID NO: 3727968 - DNA, 25 bp, Homo sapien
catttagatttcgaccctcagtgac

SEQ ID NO: 3727969 - DNA, 25 bp, Homo sapien
cctctgtcataaatcagagtattgg

SEQ ID NO: 3727970 - DNA, 25 bp, Homo sapien
atttctaagtagtacaagtgttctc

SEQ ID NO: 3727971 - DNA, 25 bp, Homo sapien
ttggaaatggagtcaaatgccacat

SEQ ID NO: 3727972 - DNA, 25 bp, Homo sapien
tatcacccaggaagtaagcattgtg

SEQ ID NO: 3727973 - DNA, 25 bp, Homo sapien
tagtccccagtgtcgactgttctgt

SEQ ID NO: 3727974 - DNA, 25 bp, Homo sapien
taaagactggacgattgggtaacac

SEQ ID NO: 3727975 - DNA, 25 bp, Homo sapien
gggtaacacttgagcagtaaagcag

SEQ ID NO: 3727976 - DNA, 25 bp, Homo sapien
tgagtctagatctgccacaagcaac

SEQ ID NO: 3727977 - DNA, 25 bp, Homo sapien
ctctagggaaggtcaggtggaattc

SEQ ID NO: 3727978 - DNA, 25 bp, Homo sapien
ttaccccagaattgcatgaatggag

SEQ ID NO: 3727979 - DNA, 25 bp, Homo sapien
gcaacatgttgccttaaacacggaa

SEQ ID NO: 3727980 - DNA, 25 bp, Homo sapien
ggatccaccctttaagagcactcat

SEQ ID NO: 3727981 - DNA, 25 bp, Homo sapien
catggactatttctccgagctctca

SEQ ID NO: 3727982 - DNA, 25 bp, Homo sapien
tagagactagcatgccaacacatgg

SEQ ID NO: 3727983 - DNA, 25 bp, Homo sapien
cctggcatttagcaaaggagactct

SEQ ID NO: 3727984 - DNA, 25 bp, Homo sapien
gaagttgaagaccataagcctcaga

SEQ ID NO: 3727985 - DNA, 25 bp, Homo sapien
gcagcccttcactaacttggtcaga

SEQ ID NO: 3727986 - DNA, 25 bp, Homo sapien
tgttggcatctaacactggatcaga

SEQ ID NO: 3727987 - DNA, 25 bp, Homo sapien
tcagaaaagactgccatctggtagt

SEQ ID NO: 3727988 - DNA, 25 bp, Homo sapien
ttcaaactcccaacctcaggtgatc

SEQ ID NO: 3727989 - DNA, 25 bp, Homo sapien
agccacagcgcccagcctgtatttt

SEQ ID NO: 3727990 - DNA, 25 bp, Homo sapien
ctccatgttgatctggctggtttca

SEQ ID NO: 3727991 - DNA, 25 bp, Homo sapien
cacagcgcccagcctgtattttcca

SEQ ID NO: 3727992 - DNA, 25 bp, Homo sapien
ccagtcttggcaaaggttttacata

SEQ ID NO: 3727993 - DNA, 25 bp, Homo sapien
tatctccactaagttgataagaaag

SEQ ID NO: 3727994 - DNA, 25 bp, Homo sapien
gctgcatcacatgttccactaagta

SEQ ID NO: 3727995 - DNA, 25 bp, Homo sapien
tcattcaaactagcaatgtctaaca

SEQ ID NO: 3727996 - DNA, 25 bp, Homo sapien
tgagacttaaggacaaccacaagaa

SEQ ID NO: 3727997 - DNA, 25 bp, Homo sapien
tctcgtgagacttaaggacaaccac

SEQ ID NO: 3727998 - DNA, 25 bp, Homo sapien
aggacaaccacaagaacaggatgag

SEQ ID NO: 3727999 - DNA, 25 bp, Homo sapien
gacaagagagaatgatcaagcgaaa

SEQ ID NO: 3728000 - DNA, 25 bp, Homo sapien
gacagaggtgatatgaaagatccct

SEQ ID NO: 3728001 - DNA, 25 bp, Homo sapien
tagacagaggtgatatgaaagatcc

SEQ ID NO: 3728002 - DNA, 25 bp, Homo sapien
aggtagacagaggtgatatgaaaga

SEQ ID NO: 3728003 - DNA, 25 bp, Homo sapien
tttccaggtagacagaggtgatatg

SEQ ID NO: 3728004 - DNA, 25 bp, Homo sapien
taggctcagacagagtgcaaaatcc

SEQ ID NO: 3728005 - DNA, 25 bp, Homo sapien
aaatgtcccgaagttgtcctcaagc

SEQ ID NO: 3728006 - DNA, 25 bp, Homo sapien
gaatgtgcgtaacctaacttcaggc

SEQ ID NO: 3728007 - DNA, 25 bp, Homo sapien
tatctaaggtcatacagaatgtgcg

SEQ ID NO: 3728008 - DNA, 25 bp, Homo sapien
taagttaggtctctgtgcaaatgga

SEQ ID NO: 3728009 - DNA, 25 bp, Homo sapien
tacaaggatgattatggtacccaga

SEQ ID NO: 3728010 - DNA, 25 bp, Homo sapien
acttatgggcactgcagaagtgtct

SEQ ID NO: 3728011 - DNA, 25 bp, Homo sapien
aatgagaggactgaattagatgccc

SEQ ID NO: 3728012 - DNA, 25 bp, Homo sapien
tgggccacacccatagagagctatg

SEQ ID NO: 3728013 - DNA, 25 bp, Homo sapien
ggattagttctaggacctcccatgg

SEQ ID NO: 3728014 - DNA, 25 bp, Homo sapien
taagaaacgctcatggaaatactcg

SEQ ID NO: 3728015 - DNA, 25 bp, Homo sapien
taagcaatactgtgactcctgtggg

SEQ ID NO: 3728016 - DNA, 25 bp, Homo sapien
cagttggttattatagtagaagaat

SEQ ID NO: 3728017 - DNA, 25 bp, Homo sapien
aatgtgttttcaagccaaacttcac

SEQ ID NO: 3728018 - DNA, 25 bp, Homo sapien
ggttattatagtagaagaatcctgt

SEQ ID NO: 3728019 - DNA, 25 bp, Homo sapien
gaatgtgttttcaagccaaacttca

SEQ ID NO: 3728020 - DNA, 25 bp, Homo sapien
tgtacatttcttaagctggtttttg

SEQ ID NO: 3728021 - DNA, 25 bp, Homo sapien
tgttgcaatactgccctaacaatga

SEQ ID NO: 3728022 - DNA, 25 bp, Homo sapien
gtggcaattctgttgcaatactgcc

SEQ ID NO: 3728023 - DNA, 25 bp, Homo sapien
aatactgccctaacaatgaactttg

SEQ ID NO: 3728024 - DNA, 25 bp, Homo sapien
aaaggaaattccacggagctctggg

SEQ ID NO: 3728025 - DNA, 25 bp, Homo sapien
gagaaaggaaattccacggagctct

SEQ ID NO: 3728026 - DNA, 25 bp, Homo sapien
agaaaggaaattccacggagctctg

SEQ ID NO: 3728027 - DNA, 25 bp, Homo sapien
gaaaggaaattccacggagctctgg

SEQ ID NO: 3728028 - DNA, 25 bp, Homo sapien
catatctcatacatttggactgttt

SEQ ID NO: 3728029 - DNA, 25 bp, Homo sapien
tgtcatagtctgtattgccttttaa

SEQ ID NO: 3728030 - DNA, 25 bp, Homo sapien
tctccccgcaaccttagtgttcaaa

SEQ ID NO: 3728031 - DNA, 25 bp, Homo sapien
gttcaaatcactttgtcatagtctg

SEQ ID NO: 3728032 - DNA, 25 bp, Homo sapien
taatcattaaattctgagccactcc

SEQ ID NO: 3728033 - DNA, 25 bp, Homo sapien
cactctcaagcagcctaattcactt

SEQ ID NO: 3728034 - DNA, 25 bp, Homo sapien
tagctcacatctttgcatatggcag

SEQ ID NO: 3728035 - DNA, 25 bp, Homo sapien
tagggcccacgtctcagtcttagac

SEQ ID NO: 3728036 - DNA, 25 bp, Homo sapien
ggcatgacctttgccaactaccctg

SEQ ID NO: 3728037 - DNA, 25 bp, Homo sapien
cataagtacaatgcaacattctggt

SEQ ID NO: 3728038 - DNA, 25 bp, Homo sapien
caagacatctgatatacataagtac

SEQ ID NO: 3728039 - DNA, 25 bp, Homo sapien
ctttgccaactaccctgtcagtcag

SEQ ID NO: 3728040 - DNA, 25 bp, Homo sapien
taagtctgtggattactcttgttat

SEQ ID NO: 3728041 - DNA, 25 bp, Homo sapien
ctgggaggaggaggagtggtaatca

SEQ ID NO: 3728042 - DNA, 25 bp, Homo sapien
gggaggaggaggagtggtaatcacg

SEQ ID NO: 3728043 - DNA, 25 bp, Homo sapien
ggaggaggaggagtggtaatcacgc

SEQ ID NO: 3728044 - DNA, 25 bp, Homo sapien
tgggaggaggaggagtggtaatcac

SEQ ID NO: 3728045 - DNA, 25 bp, Homo sapien
aaaatatctctctttgtgaggcatg

SEQ ID NO: 3728046 - DNA, 25 bp, Homo sapien
tgaagtcttgtcgtagatcaggaga

SEQ ID NO: 3728047 - DNA, 25 bp, Homo sapien
gactttgcaggatctgagtaactcg

SEQ ID NO: 3728048 - DNA, 25 bp, Homo sapien
gatcaggagacatgttcctctccct

SEQ ID NO: 3728049 - DNA, 25 bp, Homo sapien
tactaggttgtcattaaggctctgc

SEQ ID NO: 3728050 - DNA, 25 bp, Homo sapien
tgagcgtcaaggtacccaaaggaag

SEQ ID NO: 3728051 - DNA, 25 bp, Homo sapien
gactggaagcaactggtcaccactc

SEQ ID NO: 3728052 - DNA, 25 bp, Homo sapien
gaaaatacgtgcatgggatatacct

SEQ ID NO: 3728053 - DNA, 25 bp, Homo sapien
tactcatttggaaatagaataccac

SEQ ID NO: 3728054 - DNA, 25 bp, Homo sapien
actcatttggaaatagaataccact

SEQ ID NO: 3728055 - DNA, 25 bp, Homo sapien
ctcatttggaaatagaataccactg

SEQ ID NO: 3728056 - DNA, 25 bp, Homo sapien
tcatttggaaatagaataccactgg

SEQ ID NO: 3728057 - DNA, 25 bp, Homo sapien
tatacagatgcatggatacacgacc

SEQ ID NO: 3728058 - DNA, 25 bp, Homo sapien
ctaagttcatggagcagtttgcacc

SEQ ID NO: 3728059 - DNA, 25 bp, Homo sapien
gaagatccctccctgatgcactgtg

SEQ ID NO: 3728060 - DNA, 25 bp, Homo sapien
cataaaggaccgagcttagcaccgg

SEQ ID NO: 3728061 - DNA, 25 bp, Homo sapien
cttgaactcgggaggaggaggatgt

SEQ ID NO: 3728062 - DNA, 25 bp, Homo sapien
aacatggagaatcctcgtctttact

SEQ ID NO: 3728063 - DNA, 25 bp, Homo sapien
catggagaatcctcgtctttactaa

SEQ ID NO: 3728064 - DNA, 25 bp, Homo sapien
gaccaacatggagaatcctcgtctt

SEQ ID NO: 3728065 - DNA, 25 bp, Homo sapien
catctgttcttgaataaggcattcc

SEQ ID NO: 3728066 - DNA, 25 bp, Homo sapien
tggccatgatgtaatctgcaatctg

SEQ ID NO: 3728067 - DNA, 25 bp, Homo sapien
tgtaatgctagtaatccagttgggt

SEQ ID NO: 3728068 - DNA, 25 bp, Homo sapien
aaaacccgagaaagaattggccatg

SEQ ID NO: 3728069 - DNA, 25 bp, Homo sapien
caaagtgtagtaaatgcctggttga

SEQ ID NO: 3728070 - DNA, 25 bp, Homo sapien
gtcccagcccagaatcatgtcttat

SEQ ID NO: 3728071 - DNA, 25 bp, Homo sapien
ggtaggagggtctaacactatgtta

SEQ ID NO: 3728072 - DNA, 25 bp, Homo sapien
ggactgaacccgagcagaatatgct

SEQ ID NO: 3728073 - DNA, 25 bp, Homo sapien
tttattattttagaaaatagagaca

SEQ ID NO: 3728074 - DNA, 25 bp, Homo sapien
aatagagacagggtgggcctggtgc

SEQ ID NO: 3728075 - DNA, 25 bp, Homo sapien
ccagccacattaaaatcagatttat

SEQ ID NO: 3728076 - DNA, 25 bp, Homo sapien
cagccacattaaaatcagatttatt

SEQ ID NO: 3728077 - DNA, 25 bp, Homo sapien
tattgatattaccattcctataggc

SEQ ID NO: 3728078 - DNA, 25 bp, Homo sapien
caaactctgggtttcagtaacctct

SEQ ID NO: 3728079 - DNA, 25 bp, Homo sapien
tttccaagtgcctacaacgcaataa

SEQ ID NO: 3728080 - DNA, 25 bp, Homo sapien
cagcctagcctgctatttccaagtg

SEQ ID NO: 3728081 - DNA, 25 bp, Homo sapien
tacaagtctgtacaggctggcaagt

SEQ ID NO: 3728082 - DNA, 25 bp, Homo sapien
tctgcaccaggaaggtcattgatag

SEQ ID NO: 3728083 - DNA, 25 bp, Homo sapien
tcattgataggtgtgaccatgccaa

SEQ ID NO: 3728084 - DNA, 25 bp, Homo sapien
cacatatgaggatgtatctgcacca

SEQ ID NO: 3728085 - DNA, 25 bp, Homo sapien
ccaaaggaacttggaacaacataga

SEQ ID NO: 3728086 - DNA, 25 bp, Homo sapien
ttatcatggagagggacaattttgc

SEQ ID NO: 3728087 - DNA, 25 bp, Homo sapien
ttctacagttggtctgaaccaaagg

SEQ ID NO: 3728088 - DNA, 25 bp, Homo sapien
tgatgctcagacataattatcatgg

SEQ ID NO: 3728089 - DNA, 25 bp, Homo sapien
agataggcctctgggaattattata

SEQ ID NO: 3728090 - DNA, 25 bp, Homo sapien
aagataggcctctgggaattattat

SEQ ID NO: 3728091 - DNA, 25 bp, Homo sapien
attctgtcctgtgctaaaagctaag

SEQ ID NO: 3728092 - DNA, 25 bp, Homo sapien
caggacgtgttgaatagattgcagc

SEQ ID NO: 3728093 - DNA, 25 bp, Homo sapien
ttgcaagggtatggatgtgtatcac

SEQ ID NO: 3728094 - DNA, 25 bp, Homo sapien
tggtacttccctggtcaaccacttc

SEQ ID NO: 3728095 - DNA, 25 bp, Homo sapien
catggggactgaatcctgtatggtc

SEQ ID NO: 3728096 - DNA, 25 bp, Homo sapien
cagttttggactttcattgacttac

SEQ ID NO: 3728097 - DNA, 25 bp, Homo sapien
agtaaagcatcctgttgagaaagcc

SEQ ID NO: 3728098 - DNA, 25 bp, Homo sapien
tcttccagcgtcctgtcagttttgg

SEQ ID NO: 3728099 - DNA, 25 bp, Homo sapien
gaatggtagcatttggtcccaaagg

SEQ ID NO: 3728100 - DNA, 25 bp, Homo sapien
gacccttggtagtcataataggcaa

SEQ ID NO: 3728101 - DNA, 25 bp, Homo sapien
tgttcttcaagtgacccttggtagt

SEQ ID NO: 3728102 - DNA, 25 bp, Homo sapien
cccttggtagtcataataggcaaca

SEQ ID NO: 3728103 - DNA, 25 bp, Homo sapien
gtagtcataataggcaacatctccc

SEQ ID NO: 3728104 - DNA, 25 bp, Homo sapien
tctccaagtgcaaccacaccatgat

SEQ ID NO: 3728105 - DNA, 25 bp, Homo sapien
tctaatgtttctccaagtgcaacca

SEQ ID NO: 3728106 - DNA, 25 bp, Homo sapien
tctcacaggctagttgcacattaaa

SEQ ID NO: 3728107 - DNA, 25 bp, Homo sapien
tgtttctccaagtgcaaccacacca

SEQ ID NO: 3728108 - DNA, 25 bp, Homo sapien
cacaaaatccaactaaacgagcaaa

SEQ ID NO: 3728109 - DNA, 25 bp, Homo sapien
ccactaactaatatgtatttgcaaa

SEQ ID NO: 3728110 - DNA, 25 bp, Homo sapien
gacaaaaagccactaactaatatgt

SEQ ID NO: 3728111 - DNA, 25 bp, Homo sapien
caactaaacgagcaaataacaaagc

SEQ ID NO: 3728112 - DNA, 25 bp, Homo sapien
ggcgatgcgggctctctagttcaac

SEQ ID NO: 3728113 - DNA, 25 bp, Homo sapien
gcgatgcgggctctctagttcaacc

SEQ ID NO: 3728114 - DNA, 25 bp, Homo sapien
aagatgacactcttgtgccagcaga

SEQ ID NO: 3728115 - DNA, 25 bp, Homo sapien
aagtatcttttccacctatctgaaa

SEQ ID NO: 3728116 - DNA, 25 bp, Homo sapien
tacttgctcaggctactaacaacaa

SEQ ID NO: 3728117 - DNA, 25 bp, Homo sapien
gactctgatcctccctgatggaaaa

SEQ ID NO: 3728118 - DNA, 25 bp, Homo sapien
tccaccagacgctgctacagtgtaa

SEQ ID NO: 3728119 - DNA, 25 bp, Homo sapien
cttctgaaagtccagtacatggaga

SEQ ID NO: 3728120 - DNA, 25 bp, Homo sapien
tacagtgtaagtgaaagctttatac

SEQ ID NO: 3728121 - DNA, 25 bp, Homo sapien
agattgtctactccacctgcacctg

SEQ ID NO: 3728122 - DNA, 25 bp, Homo sapien
cttcaaactcaatttcgccaacctt

SEQ ID NO: 3728123 - DNA, 25 bp, Homo sapien
ctcaatttcgccaaccttccatttt

SEQ ID NO: 3728124 - DNA, 25 bp, Homo sapien
ccagagtcctcataagcccttcaaa

SEQ ID NO: 3728125 - DNA, 25 bp, Homo sapien
agagtcctcataagcccttcaaact

SEQ ID NO: 3728126 - DNA, 25 bp, Homo sapien
tgagactgcaagtgagccctgattg

SEQ ID NO: 3728127 - DNA, 25 bp, Homo sapien
tgtgtcacggcactccaagcaagat

SEQ ID NO: 3728128 - DNA, 25 bp, Homo sapien
ttcctagggccaaactcagcttctg

SEQ ID NO: 3728129 - DNA, 25 bp, Homo sapien
taaagcacgagatggcatgtcctgt

SEQ ID NO: 3728130 - DNA, 25 bp, Homo sapien
gcactgtatcgtcttcaaaggaaaa

SEQ ID NO: 3728131 - DNA, 25 bp, Homo sapien
tttctccgttccgagactcctcagg

SEQ ID NO: 3728132 - DNA, 25 bp, Homo sapien
tgcctaggcttctctcgaatgagag

SEQ ID NO: 3728133 - DNA, 25 bp, Homo sapien
tgagaggatgcctgtaagcatagcc

SEQ ID NO: 3728134 - DNA, 25 bp, Homo sapien
caagaactgggctcaagagtcagac

SEQ ID NO: 3728135 - DNA, 25 bp, Homo sapien
gaatgtttggtggtatgcactccaa

SEQ ID NO: 3728136 - DNA, 25 bp, Homo sapien
tgggccatggactggacaagactga

SEQ ID NO: 3728137 - DNA, 25 bp, Homo sapien
tcttgcctaagggtagctatgtgca

SEQ ID NO: 3728138 - DNA, 25 bp, Homo sapien
aaattttctaaaatgaagctttgtg

SEQ ID NO: 3728139 - DNA, 25 bp, Homo sapien
atcaaaaattttctaaaatgaagct

SEQ ID NO: 3728140 - DNA, 25 bp, Homo sapien
tttctaaaatgaagctttgtgttaa

SEQ ID NO: 3728141 - DNA, 25 bp, Homo sapien
aattttctaaaatgaagctttgtgt

SEQ ID NO: 3728142 - DNA, 25 bp, Homo sapien
tccaccactaactttagatgagtct

SEQ ID NO: 3728143 - DNA, 25 bp, Homo sapien
gatttggatcttcaattttgatagg

SEQ ID NO: 3728144 - DNA, 25 bp, Homo sapien
caccactaactttagatgagtcttc

SEQ ID NO: 3728145 - DNA, 25 bp, Homo sapien
actgatttggatcttcaattttgat

SEQ ID NO: 3728146 - DNA, 25 bp, Homo sapien
gctgttttcaagtcatatcgatttt

SEQ ID NO: 3728147 - DNA, 25 bp, Homo sapien
aagtcatatcgattttgttcccgaa

SEQ ID NO: 3728148 - DNA, 25 bp, Homo sapien
caacaattccagcaagcaactgaga

SEQ ID NO: 3728149 - DNA, 25 bp, Homo sapien
gcaactgagattgtggtcctgctgt

SEQ ID NO: 3728150 - DNA, 25 bp, Homo sapien
aaagcagaagatgctctttagaaac

SEQ ID NO: 3728151 - DNA, 25 bp, Homo sapien
tcaggtgttcacgactatcctgggc

SEQ ID NO: 3728152 - DNA, 25 bp, Homo sapien
aggacgaggagcagtggtttatacc

SEQ ID NO: 3728153 - DNA, 25 bp, Homo sapien
ggtacttcttataacggataacaca

SEQ ID NO: 3728154 - DNA, 25 bp, Homo sapien
gctggtgggccatgatcatcatctt

SEQ ID NO: 3728155 - DNA, 25 bp, Homo sapien
atgactaaatgggttaggaggagct

SEQ ID NO: 3728156 - DNA, 25 bp, Homo sapien
tgttgtttacgttcgattgtcctct

SEQ ID NO: 3728157 - DNA, 25 bp, Homo sapien
gattgtcctcttatactcttcaagt

SEQ ID NO: 3728158 - DNA, 25 bp, Homo sapien
gtgaaacagatgaagcgtcatctga

SEQ ID NO: 3728159 - DNA, 25 bp, Homo sapien
catctgagagtaattcctgctcagc

SEQ ID NO: 3728160 - DNA, 25 bp, Homo sapien
tgagactgaatttgtgaaacagatg

SEQ ID NO: 3728161 - DNA, 25 bp, Homo sapien
gacattttgcggtgactgagtttga

SEQ ID NO: 3728162 - DNA, 25 bp, Homo sapien
aattcttaagaactgcgggttgcca

SEQ ID NO: 3728163 - DNA, 25 bp, Homo sapien
gaggtattcaacttcctcacgtgaa

SEQ ID NO: 3728164 - DNA, 25 bp, Homo sapien
agggacagactcaagactaactcag

SEQ ID NO: 3728165 - DNA, 25 bp, Homo sapien
gctgaacaaaagtagcgccccattt

SEQ ID NO: 3728166 - DNA, 25 bp, Homo sapien
atttttgctctactttacaaaactg

SEQ ID NO: 3728167 - DNA, 25 bp, Homo sapien
tacatacttaacatttttgctctac

SEQ ID NO: 3728168 - DNA, 25 bp, Homo sapien
tacttaacatttttgctctacttta

SEQ ID NO: 3728169 - DNA, 25 bp, Homo sapien
ttaacatttttgctctactttacaa

SEQ ID NO: 3728170 - DNA, 25 bp, Homo sapien
gttgtacttgtgcttaacctactca

SEQ ID NO: 3728171 - DNA, 25 bp, Homo sapien
tgacaggcacttccatggagatgaa

SEQ ID NO: 3728172 - DNA, 25 bp, Homo sapien
gcttagcaagctcatcttcaacatc

SEQ ID NO: 3728173 - DNA, 25 bp, Homo sapien
cagaaaagaaggagtgcggaatttc

SEQ ID NO: 3728174 - DNA, 25 bp, Homo sapien
ctaacagatattatggagaaggcct

SEQ ID NO: 3728175 - DNA, 25 bp, Homo sapien
tgttaatgcccactgaaacaatggg

SEQ ID NO: 3728176 - DNA, 25 bp, Homo sapien
tcttactggtgggattagacctgct

SEQ ID NO: 3728177 - DNA, 25 bp, Homo sapien
cacaggacacagaggttcattggct

SEQ ID NO: 3728178 - DNA, 25 bp, Homo sapien
aataacttaccaagtttcactgaag

SEQ ID NO: 3728179 - DNA, 25 bp, Homo sapien
tcaacagaccatgaataggctaagt

SEQ ID NO: 3728180 - DNA, 25 bp, Homo sapien
tgaataggctaagtaaccacctgtg

SEQ ID NO: 3728181 - DNA, 25 bp, Homo sapien
taaccacctgtgaatggaaacctca

SEQ ID NO: 3728182 - DNA, 25 bp, Homo sapien
tatggtctgacaagctctctgtaca

SEQ ID NO: 3728183 - DNA, 25 bp, Homo sapien
tacagatcaagaaaccgagactcaa

SEQ ID NO: 3728184 - DNA, 25 bp, Homo sapien
aagtcagttctttttcgtggcgagc

SEQ ID NO: 3728185 - DNA, 25 bp, Homo sapien
ggtgctgggcacagtaagacgcctt

SEQ ID NO: 3728186 - DNA, 25 bp, Homo sapien
tatcttctgtctgggtccatcctcg

SEQ ID NO: 3728187 - DNA, 25 bp, Homo sapien
aaggtctccacatcgtcttccaaaa

SEQ ID NO: 3728188 - DNA, 25 bp, Homo sapien
catcctcgttgcagctcaccaagag

SEQ ID NO: 3728189 - DNA, 25 bp, Homo sapien
tcttgccccttaacggttgcatcca

SEQ ID NO: 3728190 - DNA, 25 bp, Homo sapien
agcaccctggatgcacctgttcttt

SEQ ID NO: 3728191 - DNA, 25 bp, Homo sapien
tctcttaggtaatcctttcctaatc

SEQ ID NO: 3728192 - DNA, 25 bp, Homo sapien
aatttcacctgccattgagagtcca

SEQ ID NO: 3728193 - DNA, 25 bp, Homo sapien
gccattgagagtccactgttgtcat

SEQ ID NO: 3728194 - DNA, 25 bp, Homo sapien
tgggagaactattgtgaccacatcg

SEQ ID NO: 3728195 - DNA, 25 bp, Homo sapien
aacagcatgggagaactattgtgac

SEQ ID NO: 3728196 - DNA, 25 bp, Homo sapien
gcatgggagaactattgtgaccaca

SEQ ID NO: 3728197 - DNA, 25 bp, Homo sapien
ggagaactattgtgaccacatcgag

SEQ ID NO: 3728198 - DNA, 25 bp, Homo sapien
acaggacagacggaggcactctggc

SEQ ID NO: 3728199 - DNA, 25 bp, Homo sapien
tgtcggtctcgctgtgagtctgtgt

SEQ ID NO: 3728200 - DNA, 25 bp, Homo sapien
gtgtgtatgggagattgaatgaacc

SEQ ID NO: 3728201 - DNA, 25 bp, Homo sapien
tgtgtgtcggtctcgctgtgagtct

SEQ ID NO: 3728202 - DNA, 25 bp, Homo sapien
cctcgcagcgcgcctccttgcgcgg

SEQ ID NO: 3728203 - DNA, 25 bp, Homo sapien
tcgcagcgcgcctccttgcgcggcc

SEQ ID NO: 3728204 - DNA, 25 bp, Homo sapien
gcagcgcgcctccttgcgcggccgc

SEQ ID NO: 3728205 - DNA, 25 bp, Homo sapien
gcgccctcgcagcgcgcctccttgc

SEQ ID NO: 3728206 - DNA, 25 bp, Homo sapien
gtagctggcggcctcgagcagaatc

SEQ ID NO: 3728207 - DNA, 25 bp, Homo sapien
ggcggcctcgagcagaatctgcacg

SEQ ID NO: 3728208 - DNA, 25 bp, Homo sapien
tgcacgttctgcagaaaagtgttga

SEQ ID NO: 3728209 - DNA, 25 bp, Homo sapien
gcacgttctgcagaaaagtgttgat

SEQ ID NO: 3728210 - DNA, 25 bp, Homo sapien
cctttctccggtgtcatcggcttta

SEQ ID NO: 3728211 - DNA, 25 bp, Homo sapien
tttagcagctttgtgcgtgcgtgtc

SEQ ID NO: 3728212 - DNA, 25 bp, Homo sapien
ccctcgcccgtctttgttacatctt

SEQ ID NO: 3728213 - DNA, 25 bp, Homo sapien
tgtgcgtgcgtgtcctttctccggt

SEQ ID NO: 3728214 - DNA, 25 bp, Homo sapien
agctgctggcgttgcttggccccgc

SEQ ID NO: 3728215 - DNA, 25 bp, Homo sapien
tttcccgggctcaggacggcgtgtc

SEQ ID NO: 3728216 - DNA, 25 bp, Homo sapien
gactgtgtccgtagacgtgatggcc

SEQ ID NO: 3728217 - DNA, 25 bp, Homo sapien
accccacggcaacggacgtgcaggg

SEQ ID NO: 3728218 - DNA, 25 bp, Homo sapien
tcaaagatcccaaagtttccttcta

SEQ ID NO: 3728219 - DNA, 25 bp, Homo sapien
caaagatcccaaagtttccttctag

SEQ ID NO: 3728220 - DNA, 25 bp, Homo sapien
atcccaaagtttccttctagccgcg

SEQ ID NO: 3728221 - DNA, 25 bp, Homo sapien
agatcccaaagtttccttctagccg

SEQ ID NO: 3728222 - DNA, 25 bp, Homo sapien
ctccgattgtctgcgggtgcgaagt

SEQ ID NO: 3728223 - DNA, 25 bp, Homo sapien
cctccatacacctcgctggtgaggg

SEQ ID NO: 3728224 - DNA, 25 bp, Homo sapien
gggaggtctccgattgtctgcgggt

SEQ ID NO: 3728225 - DNA, 25 bp, Homo sapien
gacgctgaggaatctccgaccgcct

SEQ ID NO: 3728226 - DNA, 25 bp, Homo sapien
atttgcagggcggacgcctcgggcg

SEQ ID NO: 3728227 - DNA, 25 bp, Homo sapien
tgaagttgacttagacttgggtgct

SEQ ID NO: 3728228 - DNA, 25 bp, Homo sapien
tgacttagacttgggtgctaaggtt

SEQ ID NO: 3728229 - DNA, 25 bp, Homo sapien
tagacttgggtgctaaggttccaaa

SEQ ID NO: 3728230 - DNA, 25 bp, Homo sapien
tcacgtcatttagagccaaacagca

SEQ ID NO: 3728231 - DNA, 25 bp, Homo sapien
agagagctaaaaatactcccgccgg

SEQ ID NO: 3728232 - DNA, 25 bp, Homo sapien
cagcagcggcgaaaagaagcaagag

SEQ ID NO: 3728233 - DNA, 25 bp, Homo sapien
gggccgttggcatcacgtcatttag

SEQ ID NO: 3728234 - DNA, 25 bp, Homo sapien
agaaaacaacgacgagcgccgccag

SEQ ID NO: 3728235 - DNA, 25 bp, Homo sapien
tattgctgtgcacacgcggattgcc

SEQ ID NO: 3728236 - DNA, 25 bp, Homo sapien
aaaacgaggcagatgtagggcccgc

SEQ ID NO: 3728237 - DNA, 25 bp, Homo sapien
gtgcagcgagcagaaaacaacgacg

SEQ ID NO: 3728238 - DNA, 25 bp, Homo sapien
aaatgagaggtgttcgcaagccaca

SEQ ID NO: 3728239 - DNA, 25 bp, Homo sapien
gagaggtgttcgcaagccacagaag

SEQ ID NO: 3728240 - DNA, 25 bp, Homo sapien
gttcttttagctcttgactaggtcg

SEQ ID NO: 3728241 - DNA, 25 bp, Homo sapien
ttgactaggtcgttttggatctgga

SEQ ID NO: 3728242 - DNA, 25 bp, Homo sapien
tcagtaaatagaagcgatgatgatg

SEQ ID NO: 3728243 - DNA, 25 bp, Homo sapien
atgttttctcttatgctctcctctg

SEQ ID NO: 3728244 - DNA, 25 bp, Homo sapien
ttcgcaaaggtcgtcggaaggtgta

SEQ ID NO: 3728245 - DNA, 25 bp, Homo sapien
ggcgcctgcgttccgcaagattcgc

SEQ ID NO: 3728246 - DNA, 25 bp, Homo sapien
cggctgccgggaatcgtagtgcaca

SEQ ID NO: 3728247 - DNA, 25 bp, Homo sapien
tgcacacgccgtttcagggcgcctg

SEQ ID NO: 3728248 - DNA, 25 bp, Homo sapien
ccgggcgccgttccggaacatgtgc

SEQ ID NO: 3728249 - DNA, 25 bp, Homo sapien
cagcccgcgcgtggtttgtttacct

SEQ ID NO: 3728250 - DNA, 25 bp, Homo sapien
ggcagcccgcgcgtggtttgtttac

SEQ ID NO: 3728251 - DNA, 25 bp, Homo sapien
ccgttccggaacatgtgcgacgggc

SEQ ID NO: 3728252 - DNA, 25 bp, Homo sapien
ctcgggccgacaggaggcgccgcag

SEQ ID NO: 3728253 - DNA, 25 bp, Homo sapien
gggccgacaggaggcgccgcaggcg

SEQ ID NO: 3728254 - DNA, 25 bp, Homo sapien
tcgggccgacaggaggcgccgcagg

SEQ ID NO: 3728255 - DNA, 25 bp, Homo sapien
ggccgacaggaggcgccgcaggcgg

SEQ ID NO: 3728256 - DNA, 25 bp, Homo sapien
ggtggcgaccggcgcctctccgcac

SEQ ID NO: 3728257 - DNA, 25 bp, Homo sapien
gtggcgaccggcgcctctccgcact

SEQ ID NO: 3728258 - DNA, 25 bp, Homo sapien
gaccggcgcctctccgcactccctt

SEQ ID NO: 3728259 - DNA, 25 bp, Homo sapien
ggcgaccggcgcctctccgcactcc

SEQ ID NO: 3728260 - DNA, 25 bp, Homo sapien
cggcgctccaaaaactcggcagcct

SEQ ID NO: 3728261 - DNA, 25 bp, Homo sapien
cagacgctgcacgttgatcatcttc

SEQ ID NO: 3728262 - DNA, 25 bp, Homo sapien
cgttgatcatcttcacccgctccat

SEQ ID NO: 3728263 - DNA, 25 bp, Homo sapien
agcctccagcagacgctgcacgttg

SEQ ID NO: 3728264 - DNA, 25 bp, Homo sapien
tgccgaaaaagattagtagcgctcg

SEQ ID NO: 3728265 - DNA, 25 bp, Homo sapien
aaaagattagtagcgctcgggctca

SEQ ID NO: 3728266 - DNA, 25 bp, Homo sapien
caccgcactgccgaaaaagattagt

SEQ ID NO: 3728267 - DNA, 25 bp, Homo sapien
gccgcaccgcactgccgaaaaagat

SEQ ID NO: 3728268 - DNA, 25 bp, Homo sapien
tgtacttcgaacaagtcttagaaag

SEQ ID NO: 3728269 - DNA, 25 bp, Homo sapien
cattgacttcgcttgcctcaaaaat

SEQ ID NO: 3728270 - DNA, 25 bp, Homo sapien
tcatcaccccgcaggtattcaaagg

SEQ ID NO: 3728271 - DNA, 25 bp, Homo sapien
tcctggtctttctgcgccatctcta

SEQ ID NO: 3728272 - DNA, 25 bp, Homo sapien
cccaagaacttgagatttcagatgc

SEQ ID NO: 3728273 - DNA, 25 bp, Homo sapien
gaaaattaatgtccctcgcctggac

SEQ ID NO: 3728274 - DNA, 25 bp, Homo sapien
tggacatcaatcctgtgacacccca

SEQ ID NO: 3728275 - DNA, 25 bp, Homo sapien
aatccattgacccacaaatccgagg

SEQ ID NO: 3728276 - DNA, 25 bp, Homo sapien
ggaatgaagaggcgtagccatgttc

SEQ ID NO: 3728277 - DNA, 25 bp, Homo sapien
tgaagaggcgtagccatgttcacac

SEQ ID NO: 3728278 - DNA, 25 bp, Homo sapien
gaagaggcgtagccatgttcacact

SEQ ID NO: 3728279 - DNA, 25 bp, Homo sapien
aatgaagaggcgtagccatgttcac

SEQ ID NO: 3728280 - DNA, 25 bp, Homo sapien
cctccgtgggggctttgaatgctgc

SEQ ID NO: 3728281 - DNA, 25 bp, Homo sapien
ttctgtgcccggctcaacctccgtg

SEQ ID NO: 3728282 - DNA, 25 bp, Homo sapien
tgtgcccggctcaacctccgtgggg

SEQ ID NO: 3728283 - DNA, 25 bp, Homo sapien
gctcaacctccgtgggggctttgaa

SEQ ID NO: 3728284 - DNA, 25 bp, Homo sapien
catgcatggacacatgctgccaagt

SEQ ID NO: 3728285 - DNA, 25 bp, Homo sapien
tgattctgctttataccctgccaga

SEQ ID NO: 3728286 - DNA, 25 bp, Homo sapien
cacgattacttttagcaggtggctg

SEQ ID NO: 3728287 - DNA, 25 bp, Homo sapien
tattgaaagccagcccacgattact

SEQ ID NO: 3728288 - DNA, 25 bp, Homo sapien
gaatcctaggaattcactggctccc

SEQ ID NO: 3728289 - DNA, 25 bp, Homo sapien
gaaaacttcctatgagatgaatcct

SEQ ID NO: 3728290 - DNA, 25 bp, Homo sapien
cttatcaatggaaaaggcagccatc

SEQ ID NO: 3728291 - DNA, 25 bp, Homo sapien
taaaaacaccgaagagatagccaca

SEQ ID NO: 3728292 - DNA, 25 bp, Homo sapien
ttattatctgtagaagcctcaggct

SEQ ID NO: 3728293 - DNA, 25 bp, Homo sapien
aggaaacgtgcagctctatagagaa

SEQ ID NO: 3728294 - DNA, 25 bp, Homo sapien
tctgaaatacagagtgggatgatcc

SEQ ID NO: 3728295 - DNA, 25 bp, Homo sapien
tgactaaccaaccacctgactgaag

SEQ ID NO: 3728296 - DNA, 25 bp, Homo sapien
gattcttttccagctcattgtgtgt

SEQ ID NO: 3728297 - DNA, 25 bp, Homo sapien
cttttccagctcattgtgtgtagat

SEQ ID NO: 3728298 - DNA, 25 bp, Homo sapien
cgattcttttccagctcattgtgtg

SEQ ID NO: 3728299 - DNA, 25 bp, Homo sapien
ttcttttccagctcattgtgtgtag

SEQ ID NO: 3728300 - DNA, 25 bp, Homo sapien
caatcttttatagtcacactgaacc

SEQ ID NO: 3728301 - DNA, 25 bp, Homo sapien
ccttcaaaaaggtatcaggtgacct

SEQ ID NO: 3728302 - DNA, 25 bp, Homo sapien
ggtctcaggaagtctaaactcttgg

SEQ ID NO: 3728303 - DNA, 25 bp, Homo sapien
tagacaagactcttcaacacctggc

SEQ ID NO: 3728304 - DNA, 25 bp, Homo sapien
tctggtatcccttctcccaaccaac

SEQ ID NO: 3728305 - DNA, 25 bp, Homo sapien
gactccattccatactctttacttt

SEQ ID NO: 3728306 - DNA, 25 bp, Homo sapien
tccattccatactctttactttgtc

SEQ ID NO: 3728307 - DNA, 25 bp, Homo sapien
ctccattccatactctttactttgt

SEQ ID NO: 3728308 - DNA, 25 bp, Homo sapien
gatggagggcatctcactttgctgc

SEQ ID NO: 3728309 - DNA, 25 bp, Homo sapien
tgcctgaaaaactatgctaagcctt

SEQ ID NO: 3728310 - DNA, 25 bp, Homo sapien
tagagccattgtctcctatacatgc

SEQ ID NO: 3728311 - DNA, 25 bp, Homo sapien
ttaggagcctcagaagtttcatttc

SEQ ID NO: 3728312 - DNA, 25 bp, Homo sapien
taaacagaactggatgggggcctta

SEQ ID NO: 3728313 - DNA, 25 bp, Homo sapien
tcccctatcctaagtctaccagtat

SEQ ID NO: 3728314 - DNA, 25 bp, Homo sapien
cactggtaacttcccagaagtaggg

SEQ ID NO: 3728315 - DNA, 25 bp, Homo sapien
ttttttgccagaccaccactggtaa

SEQ ID NO: 3728316 - DNA, 25 bp, Homo sapien
tatatccaagatttcagaaccacgc

SEQ ID NO: 3728317 - DNA, 25 bp, Homo sapien
tgttccagcttatctaactcagaga

SEQ ID NO: 3728318 - DNA, 25 bp, Homo sapien
cagtaacaactgatactgaggtatc

SEQ ID NO: 3728319 - DNA, 25 bp, Homo sapien
catgaatatgttatacaaagtggca

SEQ ID NO: 3728320 - DNA, 25 bp, Homo sapien
caaagttataataaggataagcctt

SEQ ID NO: 3728321 - DNA, 25 bp, Homo sapien
taacagctatttaaggttaaatggc

SEQ ID NO: 3728322 - DNA, 25 bp, Homo sapien
gtcagcactaaggttcttgaccatc

SEQ ID NO: 3728323 - DNA, 25 bp, Homo sapien
gaccatcagagtcctgttaaagttg

SEQ ID NO: 3728324 - DNA, 25 bp, Homo sapien
taaatgctttgtacatgcctatctc

SEQ ID NO: 3728325 - DNA, 25 bp, Homo sapien
tctatcacctgagtgctgactcata

SEQ ID NO: 3728326 - DNA, 25 bp, Homo sapien
gctgcagtaggcactaagagaagat

SEQ ID NO: 3728327 - DNA, 25 bp, Homo sapien
tattatatggactacttcagaaagc

SEQ ID NO: 3728328 - DNA, 25 bp, Homo sapien
gcaacctgactttaatgcaagcaaa

SEQ ID NO: 3728329 - DNA, 25 bp, Homo sapien
gagacatactaataccctttgcatc

SEQ ID NO: 3728330 - DNA, 25 bp, Homo sapien
cctttgcatcttagtaaaaaccaag

SEQ ID NO: 3728331 - DNA, 25 bp, Homo sapien
taaagaaagttctgtcaaaccaatg

SEQ ID NO: 3728332 - DNA, 25 bp, Homo sapien
gaaaataagacccaacatatattct

SEQ ID NO: 3728333 - DNA, 25 bp, Homo sapien
cattgcaaatcagccaaacccatgc

SEQ ID NO: 3728334 - DNA, 25 bp, Homo sapien
aaggcatatgaaggacactttgaca

SEQ ID NO: 3728335 - DNA, 25 bp, Homo sapien
tatgctagcagtaaattccagctgt

SEQ ID NO: 3728336 - DNA, 25 bp, Homo sapien
ttggctgatttaatggtaccaaggg

SEQ ID NO: 3728337 - DNA, 25 bp, Homo sapien
gatttaatggtaccaaggggctgag

SEQ ID NO: 3728338 - DNA, 25 bp, Homo sapien
cccattggctgatttaatggtacca

SEQ ID NO: 3728339 - DNA, 25 bp, Homo sapien
cattggctgatttaatggtaccaag

SEQ ID NO: 3728340 - DNA, 25 bp, Homo sapien
gagacagtgcttatattttccgctc

SEQ ID NO: 3728341 - DNA, 25 bp, Homo sapien
caaacgatccactggctgatgcctt

SEQ ID NO: 3728342 - DNA, 25 bp, Homo sapien
cgctctgctgaatgttacgtaatga

SEQ ID NO: 3728343 - DNA, 25 bp, Homo sapien
tacgtaatgaactatgagtcctctc

SEQ ID NO: 3728344 - DNA, 25 bp, Homo sapien
gctttgttgagcaaaccaagtgttg

SEQ ID NO: 3728345 - DNA, 25 bp, Homo sapien
taaacaaaggcgcagatgagctcgt

SEQ ID NO: 3728346 - DNA, 25 bp, Homo sapien
ggtgcagtctggtcctagtggaatc

SEQ ID NO: 3728347 - DNA, 25 bp, Homo sapien
tcagaacttttaagcgttctaaaca

SEQ ID NO: 3728348 - DNA, 25 bp, Homo sapien
ccaaattctcgagctggtgctggct

SEQ ID NO: 3728349 - DNA, 25 bp, Homo sapien
cagctgttccagtcgccactttaaa

SEQ ID NO: 3728350 - DNA, 25 bp, Homo sapien
aatgctgtccattcgtattcgttcc

SEQ ID NO: 3728351 - DNA, 25 bp, Homo sapien
tattcgttccatctcctgaggaccc

SEQ ID NO: 3728352 - DNA, 25 bp, Homo sapien
agccaccgggcacaacatcatttct

SEQ ID NO: 3728353 - DNA, 25 bp, Homo sapien
gtgatattccttaccccaactgtat

SEQ ID NO: 3728354 - DNA, 25 bp, Homo sapien
gatattccttaccccaactgtatac

SEQ ID NO: 3728355 - DNA, 25 bp, Homo sapien
ctgtgatattccttaccccaactgt

SEQ ID NO: 3728356 - DNA, 25 bp, Homo sapien
ccaatactcggcaggctgctgtggt

SEQ ID NO: 3728357 - DNA, 25 bp, Homo sapien
gaatgaaagtttgacactggcactg

SEQ ID NO: 3728358 - DNA, 25 bp, Homo sapien
ggagtaaccctcgtcactcccaata

SEQ ID NO: 3728359 - DNA, 25 bp, Homo sapien
tcaatgtcactgatgctggtggtac

SEQ ID NO: 3728360 - DNA, 25 bp, Homo sapien
gaaagttgagctgcatgatgatccc

SEQ ID NO: 3728361 - DNA, 25 bp, Homo sapien
ggcttcatgataaactgtcccaggc

SEQ ID NO: 3728362 - DNA, 25 bp, Homo sapien
gtaacaatagcacctgcacagtggg

SEQ ID NO: 3728363 - DNA, 25 bp, Homo sapien
gcagctgggtgcctagtgctaacaa

SEQ ID NO: 3728364 - DNA, 25 bp, Homo sapien
tgatactgggcttctaaaggcatgc

SEQ ID NO: 3728365 - DNA, 25 bp, Homo sapien
taagtccctagcacctgaaacgtag

SEQ ID NO: 3728366 - DNA, 25 bp, Homo sapien
caagcgaaggccatgagaataacaa

SEQ ID NO: 3728367 - DNA, 25 bp, Homo sapien
aatgaaggcccaaataatgcaagcg

SEQ ID NO: 3728368 - DNA, 25 bp, Homo sapien
ctggcctacctgtaccttttaatat

SEQ ID NO: 3728369 - DNA, 25 bp, Homo sapien
aatataaatgtcactcaggtgttct

SEQ ID NO: 3728370 - DNA, 25 bp, Homo sapien
tagaaaagggagctcatcctaaggt

SEQ ID NO: 3728371 - DNA, 25 bp, Homo sapien
tatacagggaaattatcgtcagatt

SEQ ID NO: 3728372 - DNA, 25 bp, Homo sapien
tagtatctacactgtatacagggct

SEQ ID NO: 3728373 - DNA, 25 bp, Homo sapien
aataggcctgggaaacaagttattg

SEQ ID NO: 3728374 - DNA, 25 bp, Homo sapien
catggtaccactgccgtaaatggaa

SEQ ID NO: 3728375 - DNA, 25 bp, Homo sapien
aattttagagatggcctaataggcc

SEQ ID NO: 3728376 - DNA, 25 bp, Homo sapien
taagaaaccttaggatgagctccct

SEQ ID NO: 3728377 - DNA, 25 bp, Homo sapien
tagccctgtatacagtgtagatact

SEQ ID NO: 3728378 - DNA, 25 bp, Homo sapien
ggcctattaggccatctctaaaatt

SEQ ID NO: 3728379 - DNA, 25 bp, Homo sapien
ggtgtaagtgaacatcatcacagtt

SEQ ID NO: 3728380 - DNA, 25 bp, Homo sapien
tccatttacggcagtggtaccatgt

SEQ ID NO: 3728381 - DNA, 25 bp, Homo sapien
tcaataacttgtttcccaggcctat

SEQ ID NO: 3728382 - DNA, 25 bp, Homo sapien
gaaccgtggtactgataatgagaaa

SEQ ID NO: 3728383 - DNA, 25 bp, Homo sapien
caggttcctactccaactttaccag

SEQ ID NO: 3728384 - DNA, 25 bp, Homo sapien
ccaatgacgacaatggtatcttgct

SEQ ID NO: 3728385 - DNA, 25 bp, Homo sapien
tctgattattgaggcatcaaatgcc

SEQ ID NO: 3728386 - DNA, 25 bp, Homo sapien
gtttatcagcaattccacaggttcc

SEQ ID NO: 3728387 - DNA, 25 bp, Homo sapien
tgcagagatgaaatccaacagtttt

SEQ ID NO: 3728388 - DNA, 25 bp, Homo sapien
gagtaggaacctgtggaattgctga

SEQ ID NO: 3728389 - DNA, 25 bp, Homo sapien
tctcattatcagtaccacggttccc

SEQ ID NO: 3728390 - DNA, 25 bp, Homo sapien
gaattgctgataaacctatgacaca

SEQ ID NO: 3728391 - DNA, 25 bp, Homo sapien
gtaagcaagataccattgtcgtcat

SEQ ID NO: 3728392 - DNA, 25 bp, Homo sapien
aaaactgttggatttcatctctgca

SEQ ID NO: 3728393 - DNA, 25 bp, Homo sapien
gatacctctaaatacaatgtcaggc

SEQ ID NO: 3728394 - DNA, 25 bp, Homo sapien
ctgattaacatgaatggtgaaatgg

SEQ ID NO: 3728395 - DNA, 25 bp, Homo sapien
gagttgaggacaagatagtaactgc

SEQ ID NO: 3728396 - DNA, 25 bp, Homo sapien
tgtccccaggagtcactccactctc

SEQ ID NO: 3728397 - DNA, 25 bp, Homo sapien
gacaagatagtaactgctgattaac

SEQ ID NO: 3728398 - DNA, 25 bp, Homo sapien
ctggggaggtcgcatttgttttgct

SEQ ID NO: 3728399 - DNA, 25 bp, Homo sapien
tttgctttcaaaaatcagagactca

SEQ ID NO: 3728400 - DNA, 25 bp, Homo sapien
agctggggaggtcgcatttgttttg

SEQ ID NO: 3728401 - DNA, 25 bp, Homo sapien
tagctggggaggtcgcatttgtttt

SEQ ID NO: 3728402 - DNA, 25 bp, Homo sapien
ggaggctccatactggaaagccagg

SEQ ID NO: 3728403 - DNA, 25 bp, Homo sapien
ctggggaggctccatactggaaagc

SEQ ID NO: 3728404 - DNA, 25 bp, Homo sapien
ggaaagccaggacagctttcagcat

SEQ ID NO: 3728405 - DNA, 25 bp, Homo sapien
cgagggcaggagtgggaaaagggct

SEQ ID NO: 3728406 - DNA, 25 bp, Homo sapien
cctccactttgaaggcttgaccacc

SEQ ID NO: 3728407 - DNA, 25 bp, Homo sapien
gagcttaagaccattgacccaatcc

SEQ ID NO: 3728408 - DNA, 25 bp, Homo sapien
tcagtagctcgaccctatagcaggg

SEQ ID NO: 3728409 - DNA, 25 bp, Homo sapien
ccccgcatgggctggagcttaagac

SEQ ID NO: 3728410 - DNA, 25 bp, Homo sapien
gatgagcgatggtgagggttgacct

SEQ ID NO: 3728411 - DNA, 25 bp, Homo sapien
cattagaaggctcaggatgagcgat

SEQ ID NO: 3728412 - DNA, 25 bp, Homo sapien
cactcgggcaataggaggctcaggc

SEQ ID NO: 3728413 - DNA, 25 bp, Homo sapien
tgggcagcaaggcactcgggcatta

SEQ ID NO: 3728414 - DNA, 25 bp, Homo sapien
atgaaggccagcacgtgcttagaaa

SEQ ID NO: 3728415 - DNA, 25 bp, Homo sapien
tggtttggattcaccagagcccaag

SEQ ID NO: 3728416 - DNA, 25 bp, Homo sapien
tgagggcaacaggacatggtttgga

SEQ ID NO: 3728417 - DNA, 25 bp, Homo sapien
ccagcacgtgcttagaaaggtggca

SEQ ID NO: 3728418 - DNA, 25 bp, Homo sapien
ccaagccttgaaatctgagttgttg

SEQ ID NO: 3728419 - DNA, 25 bp, Homo sapien
ttaaaccaagccttgaaatctgagt

SEQ ID NO: 3728420 - DNA, 25 bp, Homo sapien
aaaccaagccttgaaatctgagttg

SEQ ID NO: 3728421 - DNA, 25 bp, Homo sapien
aaccaagccttgaaatctgagttgt

SEQ ID NO: 3728422 - DNA, 25 bp, Homo sapien
gttctgaagtcgtttccaatactga

SEQ ID NO: 3728423 - DNA, 25 bp, Homo sapien
acacatctcttcttccaaactatcc

SEQ ID NO: 3728424 - DNA, 25 bp, Homo sapien
tttccaatactgaggagggtttctc

SEQ ID NO: 3728425 - DNA, 25 bp, Homo sapien
gagccttcattaacgtgtccccgga

SEQ ID NO: 3728426 - DNA, 25 bp, Homo sapien
taattgcctctcgtgttgtgcatgc

SEQ ID NO: 3728427 - DNA, 25 bp, Homo sapien
tgtcttgaaagagccagttagccct

SEQ ID NO: 3728428 - DNA, 25 bp, Homo sapien
tcctgcatatgttcccgaggatcag

SEQ ID NO: 3728429 - DNA, 25 bp, Homo sapien
tcgcatctgccagcggaagtctcca

SEQ ID NO: 3728430 - DNA, 25 bp, Homo sapien
ctctcgcatctgccagcggaagtct

SEQ ID NO: 3728431 - DNA, 25 bp, Homo sapien
catctgccagcggaagtctccacct

SEQ ID NO: 3728432 - DNA, 25 bp, Homo sapien
atctgccagcggaagtctccacctc

SEQ ID NO: 3728433 - DNA, 25 bp, Homo sapien
tgagaaacagtgagacagaacagtc

SEQ ID NO: 3728434 - DNA, 25 bp, Homo sapien
ttgagaaacagtgagacagaacagt

SEQ ID NO: 3728435 - DNA, 25 bp, Homo sapien
agtgatccacgacaagccacacagg

SEQ ID NO: 3728436 - DNA, 25 bp, Homo sapien
caagtgatccacgacaagccacaca

SEQ ID NO: 3728437 - DNA, 25 bp, Homo sapien
agggaggcatgtggccaggttccaa

SEQ ID NO: 3728438 - DNA, 25 bp, Homo sapien
ttccaagtgatccacgacaagccac

SEQ ID NO: 3728439 - DNA, 25 bp, Homo sapien
gatgaggcttcactagagctagtgg

SEQ ID NO: 3728440 - DNA, 25 bp, Homo sapien
tgccggaattctcagcactgctctt

SEQ ID NO: 3728441 - DNA, 25 bp, Homo sapien
actaggtaactagccctgagatgag

SEQ ID NO: 3728442 - DNA, 25 bp, Homo sapien
tagagctagtggcagcgattttctg

SEQ ID NO: 3728443 - DNA, 25 bp, Homo sapien
tcagcccagggtcgggaagaacgct

SEQ ID NO: 3728444 - DNA, 25 bp, Homo sapien
tcccagggaactgcttcacaccatt

SEQ ID NO: 3728445 - DNA, 25 bp, Homo sapien
cgcctgccctgtggacgtgagtcag

SEQ ID NO: 3728446 - DNA, 25 bp, Homo sapien
tgatagcaataacacagcccctgga

SEQ ID NO: 3728447 - DNA, 25 bp, Homo sapien
tcttcgtgttcctggcaagtgctgg

SEQ ID NO: 3728448 - DNA, 25 bp, Homo sapien
agttctacttgtcttcgtgttcctg

SEQ ID NO: 3728449 - DNA, 25 bp, Homo sapien
tctacttgtcttcgtgttcctggca

SEQ ID NO: 3728450 - DNA, 25 bp, Homo sapien
tgttcctggcaagtgctgggaaaat

SEQ ID NO: 3728451 - DNA, 25 bp, Homo sapien
tccaggggctgtgagtcgggcacca

SEQ ID NO: 3728452 - DNA, 25 bp, Homo sapien
tggatccaggggctgtgagtcgggc

SEQ ID NO: 3728453 - DNA, 25 bp, Homo sapien
gatccaggggctgtgagtcgggcac

SEQ ID NO: 3728454 - DNA, 25 bp, Homo sapien
caggggctgtgagtcgggcaccaca

SEQ ID NO: 3728455 - DNA, 25 bp, Homo sapien
aaggcttcaccaaagtagggtgagg

SEQ ID NO: 3728456 - DNA, 25 bp, Homo sapien
gcttcaccaaagtagggtgagggcc

SEQ ID NO: 3728457 - DNA, 25 bp, Homo sapien
ctagaaaggcttcaccaaagtaggg

SEQ ID NO: 3728458 - DNA, 25 bp, Homo sapien
agaaaggcttcaccaaagtagggtg

SEQ ID NO: 3728459 - DNA, 25 bp, Homo sapien
ggggaggagcagagaggaacttcct

SEQ ID NO: 3728460 - DNA, 25 bp, Homo sapien
gaggaacttcctcaggctgaagagg

SEQ ID NO: 3728461 - DNA, 25 bp, Homo sapien
ctgaaggacggtccaggaggcagca

SEQ ID NO: 3728462 - DNA, 25 bp, Homo sapien
ggaacttcctcaggctgaagagggt

SEQ ID NO: 3728463 - DNA, 25 bp, Homo sapien
gtggcaggcaccattgaaggggtca

SEQ ID NO: 3728464 - DNA, 25 bp, Homo sapien
tggcaggcaccattgaaggggtcag

SEQ ID NO: 3728465 - DNA, 25 bp, Homo sapien
ggcaggcaccattgaaggggtcagc

SEQ ID NO: 3728466 - DNA, 25 bp, Homo sapien
ggtggcaggcaccattgaaggggtc

SEQ ID NO: 3728467 - DNA, 25 bp, Homo sapien
gccaggaatggcaggttaaaatgga

SEQ ID NO: 3728468 - DNA, 25 bp, Homo sapien
ccaggaatggcaggttaaaatggaa

SEQ ID NO: 3728469 - DNA, 25 bp, Homo sapien
tttactagctcgtgcagtggactct

SEQ ID NO: 3728470 - DNA, 25 bp, Homo sapien
gagctcggaatcaagaccttcagtt

SEQ ID NO: 3728471 - DNA, 25 bp, Homo sapien
tgcccctgaggcattcaatcctgca

SEQ ID NO: 3728472 - DNA, 25 bp, Homo sapien
tcagttttgtgaccctcaatgatgg

SEQ ID NO: 3728473 - DNA, 25 bp, Homo sapien
agtgctgattccaaatgcgtgctgc

SEQ ID NO: 3728474 - DNA, 25 bp, Homo sapien
cattcctggtattctaggattgtaa

SEQ ID NO: 3728475 - DNA, 25 bp, Homo sapien
gctgattccaaatgcgtgctgcact

SEQ ID NO: 3728476 - DNA, 25 bp, Homo sapien
taggattgtaatctcctgcaccaaa

SEQ ID NO: 3728477 - DNA, 25 bp, Homo sapien
cttgctggccgctgtgcacatggtt

SEQ ID NO: 3728478 - DNA, 25 bp, Homo sapien
ttccagctcatccttgggtttcccc

SEQ ID NO: 3728479 - DNA, 25 bp, Homo sapien
ccagctcatccttgggtttccccat

SEQ ID NO: 3728480 - DNA, 25 bp, Homo sapien
ttcttccagctcatccttgggtttc

SEQ ID NO: 3728481 - DNA, 25 bp, Homo sapien
tgttcttccagctcatccttgggtt

SEQ ID NO: 3728482 - DNA, 25 bp, Homo sapien
gaccaaaaagctatgatcgcccaga

SEQ ID NO: 3728483 - DNA, 25 bp, Homo sapien
ctggggaccaaaaagctatgatcgc

SEQ ID NO: 3728484 - DNA, 25 bp, Homo sapien
aaaagctatgatcgcccagacaggt

SEQ ID NO: 3728485 - DNA, 25 bp, Homo sapien
caaaaagctatgatcgcccagacag

SEQ ID NO: 3728486 - DNA, 25 bp, Homo sapien
gctctgtaggcaaacctggtgttcc

SEQ ID NO: 3728487 - DNA, 25 bp, Homo sapien
tccctcgctctgtaggcaaacctgg

SEQ ID NO: 3728488 - DNA, 25 bp, Homo sapien
ccaaaggtccctcgctctgtaggca

SEQ ID NO: 3728489 - DNA, 25 bp, Homo sapien
actggtgccccaaaggtccctcgct

SEQ ID NO: 3728490 - DNA, 25 bp, Homo sapien
tgtgccccttcgggcttcttcccca

SEQ ID NO: 3728491 - DNA, 25 bp, Homo sapien
taatgtgccccttcgggcttcttcc

SEQ ID NO: 3728492 - DNA, 25 bp, Homo sapien
ttaatgtgccccttcgggcttcttc

SEQ ID NO: 3728493 - DNA, 25 bp, Homo sapien
cagtgatgtgaaaatacggtgtcaa

SEQ ID NO: 3728494 - DNA, 25 bp, Homo sapien
gaatccacatgtgggtcgagggcct

SEQ ID NO: 3728495 - DNA, 25 bp, Homo sapien
tcaagtgtgagcccactgagtgggt

SEQ ID NO: 3728496 - DNA, 25 bp, Homo sapien
gggaatattgctgtctttgtgagtc

SEQ ID NO: 3728497 - DNA, 25 bp, Homo sapien
ggttctgtgtggtcattctgtgtgt

SEQ ID NO: 3728498 - DNA, 25 bp, Homo sapien
ctgctgcctatgggagctggttctg

SEQ ID NO: 3728499 - DNA, 25 bp, Homo sapien
ctgtgtggtcattctgtgtgtctgt

SEQ ID NO: 3728500 - DNA, 25 bp, Homo sapien
ctgcctatgggagctggttctgtgt

SEQ ID NO: 3728501 - DNA, 25 bp, Homo sapien
tggactcataagctcgggccagctc

SEQ ID NO: 3728502 - DNA, 25 bp, Homo sapien
tctggcatcgcattgcctgggcatc

SEQ ID NO: 3728503 - DNA, 25 bp, Homo sapien
gccagggcccaaggctgtttaagga

SEQ ID NO: 3728504 - DNA, 25 bp, Homo sapien
gcttttgctaggagctctggactca

SEQ ID NO: 3728505 - DNA, 25 bp, Homo sapien
cccaccctgggtgagacatatctgt

SEQ ID NO: 3728506 - DNA, 25 bp, Homo sapien
gagacatatctgttaacgataacca

SEQ ID NO: 3728507 - DNA, 25 bp, Homo sapien
cctgggtgagacatatctgttaacg

SEQ ID NO: 3728508 - DNA, 25 bp, Homo sapien
ggtgagacatatctgttaacgataa

SEQ ID NO: 3728509 - DNA, 25 bp, Homo sapien
cctggcccagaggtacagcgactcg

SEQ ID NO: 3728510 - DNA, 25 bp, Homo sapien
ctggtgcccggagaatatctctccc

SEQ ID NO: 3728511 - DNA, 25 bp, Homo sapien
tgcccggagaatatctctcccaggg

SEQ ID NO: 3728512 - DNA, 25 bp, Homo sapien
cgactcgagcttgggcagtgagtcc

SEQ ID NO: 3728513 - DNA, 25 bp, Homo sapien
agggaagtcttgtgtgggatggctc

SEQ ID NO: 3728514 - DNA, 25 bp, Homo sapien
gacaaatgccccctctgtaatctgt

SEQ ID NO: 3728515 - DNA, 25 bp, Homo sapien
taatctgtatggagggtggtccagt

SEQ ID NO: 3728516 - DNA, 25 bp, Homo sapien
gaagtcttgtgtgggatggctcttg

SEQ ID NO: 3728517 - DNA, 25 bp, Homo sapien
caagagaggggaacggtccaccctg

SEQ ID NO: 3728518 - DNA, 25 bp, Homo sapien
ggagacatggcatgtgtcccagcca

SEQ ID NO: 3728519 - DNA, 25 bp, Homo sapien
tgacaccacaatcccgatgcctaat

SEQ ID NO: 3728520 - DNA, 25 bp, Homo sapien
tcttgatagcaaagctgacaccaca

SEQ ID NO: 3728521 - DNA, 25 bp, Homo sapien
ggctgttggaatgcctcaggagaca

SEQ ID NO: 3728522 - DNA, 25 bp, Homo sapien
gtccagtgaggtcccatatcagaga

SEQ ID NO: 3728523 - DNA, 25 bp, Homo sapien
gcagactcgggagcgagtccagtga

SEQ ID NO: 3728524 - DNA, 25 bp, Homo sapien
gacacccgagggacttccagagatg

SEQ ID NO: 3728525 - DNA, 25 bp, Homo sapien
atgacttgggcagactcgggagcga

SEQ ID NO: 3728526 - DNA, 25 bp, Homo sapien
tagtgggcctcctcggtatctgttt

SEQ ID NO: 3728527 - DNA, 25 bp, Homo sapien
ttagtagtgggcctcctcggtatct

SEQ ID NO: 3728528 - DNA, 25 bp, Homo sapien
atctgtttgtatgagttaatttgca

SEQ ID NO: 3728529 - DNA, 25 bp, Homo sapien
gcctcctcggtatctgtttgtatga

SEQ ID NO: 3728530 - DNA, 25 bp, Homo sapien
tcttcctttgacaccttgctcaggg

SEQ ID NO: 3728531 - DNA, 25 bp, Homo sapien
caaatatttgtcctcctctagggcc

SEQ ID NO: 3728532 - DNA, 25 bp, Homo sapien
tagaccagagagtatgaaagaatcc

SEQ ID NO: 3728533 - DNA, 25 bp, Homo sapien
gagaattcctttaattgcagggaga

SEQ ID NO: 3728534 - DNA, 25 bp, Homo sapien
tctttggagacaccagggctatctg

SEQ ID NO: 3728535 - DNA, 25 bp, Homo sapien
gaggtcaacctttgctccagacggg

SEQ ID NO: 3728536 - DNA, 25 bp, Homo sapien
taatactgtggagacccagaacaga

SEQ ID NO: 3728537 - DNA, 25 bp, Homo sapien
tctccctttggtgatttaatactgt

SEQ ID NO: 3728538 - DNA, 25 bp, Homo sapien
ttgcaaaccatgctaaccaaaatct

SEQ ID NO: 3728539 - DNA, 25 bp, Homo sapien
ttggaatcctccagggattgcaaac

SEQ ID NO: 3728540 - DNA, 25 bp, Homo sapien
tggaatcctccagggattgcaaacc

SEQ ID NO: 3728541 - DNA, 25 bp, Homo sapien
aaaccatgctaaccaaaatcttggc

SEQ ID NO: 3728542 - DNA, 25 bp, Homo sapien
ccttggctacttgagagctgggcat

SEQ ID NO: 3728543 - DNA, 25 bp, Homo sapien
acgatgatccgcttggtccctgcag

SEQ ID NO: 3728544 - DNA, 25 bp, Homo sapien
atttgttcacacacgatgatccgct

SEQ ID NO: 3728545 - DNA, 25 bp, Homo sapien
acacacgatgatccgcttggtccct

SEQ ID NO: 3728546 - DNA, 25 bp, Homo sapien
gcctgacagaggaatccccacccgc

SEQ ID NO: 3728547 - DNA, 25 bp, Homo sapien
ggaatccccacccgctgggccctca

SEQ ID NO: 3728548 - DNA, 25 bp, Homo sapien
gaatccccacccgctgggccctcat

SEQ ID NO: 3728549 - DNA, 25 bp, Homo sapien
tgacagaggaatccccacccgctgg

SEQ ID NO: 3728550 - DNA, 25 bp, Homo sapien
aagaccccaccagcttcccgttgca

SEQ ID NO: 3728551 - DNA, 25 bp, Homo sapien
attccaatgacgtctctccaccaaa

SEQ ID NO: 3728552 - DNA, 25 bp, Homo sapien
agaccccaccagcttcccgttgcat

SEQ ID NO: 3728553 - DNA, 25 bp, Homo sapien
ccaatgacgtctctccaccaaagcc

SEQ ID NO: 3728554 - DNA, 25 bp, Homo sapien
cagcaccagggcgacggtacctgag

SEQ ID NO: 3728555 - DNA, 25 bp, Homo sapien
tgggccgaagggttgttgggtgctc

SEQ ID NO: 3728556 - DNA, 25 bp, Homo sapien
attagccagtcatggggtgcatccc

SEQ ID NO: 3728557 - DNA, 25 bp, Homo sapien
ggtgctaagggaccaattagccagt

SEQ ID NO: 3728558 - DNA, 25 bp, Homo sapien
gctccttgtgttgcaacaaatgcca

SEQ ID NO: 3728559 - DNA, 25 bp, Homo sapien
cagagtggtttggtcaaccaccacg

SEQ ID NO: 3728560 - DNA, 25 bp, Homo sapien
atcagagtggtttggtcaaccacca

SEQ ID NO: 3728561 - DNA, 25 bp, Homo sapien
gagtggtttggtcaaccaccacggc

SEQ ID NO: 3728562 - DNA, 25 bp, Homo sapien
ttggttttgtggggtcatctttagc

SEQ ID NO: 3728563 - DNA, 25 bp, Homo sapien
tgctctttggttttgtggggtcatc

SEQ ID NO: 3728564 - DNA, 25 bp, Homo sapien
acaaaaaggcagaagcagacatctt

SEQ ID NO: 3728565 - DNA, 25 bp, Homo sapien
ggttttgtggggtcatctttagcca

SEQ ID NO: 3728566 - DNA, 25 bp, Homo sapien
gcaaaattgacaggaacttctgggt

SEQ ID NO: 3728567 - DNA, 25 bp, Homo sapien
tgcaaaattgacaggaacttctggg

SEQ ID NO: 3728568 - DNA, 25 bp, Homo sapien
ttctgcaaaattgacaggaacttct

SEQ ID NO: 3728569 - DNA, 25 bp, Homo sapien
ccacccctcagagcacttcttggaa

SEQ ID NO: 3728570 - DNA, 25 bp, Homo sapien
caaatttagacttctctttcccata

SEQ ID NO: 3728571 - DNA, 25 bp, Homo sapien
catcaaatttagacttctctttccc

SEQ ID NO: 3728572 - DNA, 25 bp, Homo sapien
aatttagacttctctttcccataca

SEQ ID NO: 3728573 - DNA, 25 bp, Homo sapien
tcatcaaatttagacttctctttcc

SEQ ID NO: 3728574 - DNA, 25 bp, Homo sapien
atccttcttttcctgatcatagtgc

SEQ ID NO: 3728575 - DNA, 25 bp, Homo sapien
cctgatcatagtgcactttatccac

SEQ ID NO: 3728576 - DNA, 25 bp, Homo sapien
tcctgatcatagtgcactttatcca

SEQ ID NO: 3728577 - DNA, 25 bp, Homo sapien
tcttttcctgatcatagtgcacttt

SEQ ID NO: 3728578 - DNA, 25 bp, Homo sapien
gctaggttttgtggaattgatcttg

SEQ ID NO: 3728579 - DNA, 25 bp, Homo sapien
ttttgtggaattgatcttggagcgg

SEQ ID NO: 3728580 - DNA, 25 bp, Homo sapien
agatgctaggttttgtggaattgat

SEQ ID NO: 3728581 - DNA, 25 bp, Homo sapien
aatagagatgctaggttttgtggaa

SEQ ID NO: 3728582 - DNA, 25 bp, Homo sapien
gggtgctctggacacccatggccac

SEQ ID NO: 3728583 - DNA, 25 bp, Homo sapien
tttcagggtgctctggacacccatg

SEQ ID NO: 3728584 - DNA, 25 bp, Homo sapien
tacagtttcagggtgctctggacac

SEQ ID NO: 3728585 - DNA, 25 bp, Homo sapien
agtttcagggtgctctggacaccca

SEQ ID NO: 3728586 - DNA, 25 bp, Homo sapien
gactgccctaggagtgatgaaatag

SEQ ID NO: 3728587 - DNA, 25 bp, Homo sapien
cctaggagtgatgaaatagggtcaa

SEQ ID NO: 3728588 - DNA, 25 bp, Homo sapien
tgatgaaatagggtcaaaatgccaa

SEQ ID NO: 3728589 - DNA, 25 bp, Homo sapien
cagactgccctaggagtgatgaaat

SEQ ID NO: 3728590 - DNA, 25 bp, Homo sapien
tccagctgggaacaaggttcattcc

SEQ ID NO: 3728591 - DNA, 25 bp, Homo sapien
agctgggaacaaggttcattcctct

SEQ ID NO: 3728592 - DNA, 25 bp, Homo sapien
tgggaacaaggttcattcctctcct

SEQ ID NO: 3728593 - DNA, 25 bp, Homo sapien
ggttccagctgggaacaaggttcat

SEQ ID NO: 3728594 - DNA, 25 bp, Homo sapien
tctgtttatccaggccggacacttc

SEQ ID NO: 3728595 - DNA, 25 bp, Homo sapien
acttccggagcagatgggcgcctgt

SEQ ID NO: 3728596 - DNA, 25 bp, Homo sapien
caggaactgggctgacgtcctctca

SEQ ID NO: 3728597 - DNA, 25 bp, Homo sapien
gacgtcctctcattgccaagtggca

SEQ ID NO: 3728598 - DNA, 25 bp, Homo sapien
gggaagcagcgcaagttcctgggag

SEQ ID NO: 3728599 - DNA, 25 bp, Homo sapien
gaagcagcgcaagttcctgggagat

SEQ ID NO: 3728600 - DNA, 25 bp, Homo sapien
agcagcgcaagttcctgggagatgc

SEQ ID NO: 3728601 - DNA, 25 bp, Homo sapien
ctctgggaagcagcgcaagttcctg

SEQ ID NO: 3728602 - DNA, 25 bp, Homo sapien
agaagttgtacggaaacatgtactc

SEQ ID NO: 3728603 - DNA, 25 bp, Homo sapien
gttgtacggaaacatgtactctgat

SEQ ID NO: 3728604 - DNA, 25 bp, Homo sapien
cattctgaagaagttgtacggaaac

SEQ ID NO: 3728605 - DNA, 25 bp, Homo sapien
gtctatcattctgaagaagttgtac

SEQ ID NO: 3728606 - DNA, 25 bp, Homo sapien
gtcctagtatctgtggaggcagcca

SEQ ID NO: 3728607 - DNA, 25 bp, Homo sapien
tgctttccaccccactggctttgtg

SEQ ID NO: 3728608 - DNA, 25 bp, Homo sapien
tcttggcttccgacctgtgtacact

SEQ ID NO: 3728609 - DNA, 25 bp, Homo sapien
tgtgtacactgtcttgactgccaga

SEQ ID NO: 3728610 - DNA, 25 bp, Homo sapien
tgttagcattgtgttactactgatg

SEQ ID NO: 3728611 - DNA, 25 bp, Homo sapien
ctgtgttcttttcccaacctgcctc

SEQ ID NO: 3728612 - DNA, 25 bp, Homo sapien
ttgagtcagctccaggcctgtgtgg

SEQ ID NO: 3728613 - DNA, 25 bp, Homo sapien
cccttgatgttagcattgtgttact

SEQ ID NO: 3728614 - DNA, 25 bp, Homo sapien
ctctgcaccttgcaaagctctgctc

SEQ ID NO: 3728615 - DNA, 25 bp, Homo sapien
tctgcaccttgcaaagctctgctcc

SEQ ID NO: 3728616 - DNA, 25 bp, Homo sapien
gcccagtgtggtgcttccaagagaa

SEQ ID NO: 3728617 - DNA, 25 bp, Homo sapien
ttagctccagcagccagaacatcca

SEQ ID NO: 3728618 - DNA, 25 bp, Homo sapien
ccagcagccagaacatccacataag

SEQ ID NO: 3728619 - DNA, 25 bp, Homo sapien
cagcagccagaacatccacataagc

SEQ ID NO: 3728620 - DNA, 25 bp, Homo sapien
ttcatccttagctccagcagccaga

SEQ ID NO: 3728621 - DNA, 25 bp, Homo sapien
tccagccgctgttgtagccagcaca

SEQ ID NO: 3728622 - DNA, 25 bp, Homo sapien
tgaaggtagcacgtgaacaaatgag

SEQ ID NO: 3728623 - DNA, 25 bp, Homo sapien
aatggcagttcatcccaaggtttac

SEQ ID NO: 3728624 - DNA, 25 bp, Homo sapien
aatgagagtctaaacccgtccagcc

SEQ ID NO: 3728625 - DNA, 25 bp, Homo sapien
tgggtccaatccttaaggcacctaa

SEQ ID NO: 3728626 - DNA, 25 bp, Homo sapien
aaggcacctaaggagcccctgggct

SEQ ID NO: 3728627 - DNA, 25 bp, Homo sapien
tgagcgatgcatcctgggtccaatc

SEQ ID NO: 3728628 - DNA, 25 bp, Homo sapien
tggaaaatgagcgatgcatcctggg

SEQ ID NO: 3728629 - DNA, 25 bp, Homo sapien
gtttctcaccgaggccctcccatct

SEQ ID NO: 3728630 - DNA, 25 bp, Homo sapien
tgaatatgagtgtttctcaccgagg

SEQ ID NO: 3728631 - DNA, 25 bp, Homo sapien
ttgcccccgatcctggaatggacca

SEQ ID NO: 3728632 - DNA, 25 bp, Homo sapien
tggaatggaccaaataccttgttta

SEQ ID NO: 3728633 - DNA, 25 bp, Homo sapien
aagttggtaacagcacaaatcaggg

SEQ ID NO: 3728634 - DNA, 25 bp, Homo sapien
aatcagggccctagacactggataa

SEQ ID NO: 3728635 - DNA, 25 bp, Homo sapien
aggacctggagtccatcggccacag

SEQ ID NO: 3728636 - DNA, 25 bp, Homo sapien
gaggtgcacagtccatagattcagg

SEQ ID NO: 3728637 - DNA, 25 bp, Homo sapien
ttcagtgcttgctgagacatgagag

SEQ ID NO: 3728638 - DNA, 25 bp, Homo sapien
ggaattcagtgcttgctgagacatg

SEQ ID NO: 3728639 - DNA, 25 bp, Homo sapien
cttcacaacaccctcacatggtgag

SEQ ID NO: 3728640 - DNA, 25 bp, Homo sapien
gaatggaattcagtgcttgctgaga

SEQ ID NO: 3728641 - DNA, 25 bp, Homo sapien
tcatgggtaatctagacatgagctg

SEQ ID NO: 3728642 - DNA, 25 bp, Homo sapien
tgagctgatatggacttgccagaac

SEQ ID NO: 3728643 - DNA, 25 bp, Homo sapien
tagacatgagctgatatggacttgc

SEQ ID NO: 3728644 - DNA, 25 bp, Homo sapien
gatgggaggatttcatgggtaatct

SEQ ID NO: 3728645 - DNA, 25 bp, Homo sapien
tcagtgacaagatccggatagcatt

SEQ ID NO: 3728646 - DNA, 25 bp, Homo sapien
ctctgtgcgggatcggtgctttatt

SEQ ID NO: 3728647 - DNA, 25 bp, Homo sapien
gaacatcgctgaggcggctctgtgc

SEQ ID NO: 3728648 - DNA, 25 bp, Homo sapien
ccggatagcatttgggaacatcgct

SEQ ID NO: 3728649 - DNA, 25 bp, Homo sapien
tcgcggtgcggaccgaggaggaagc

SEQ ID NO: 3728650 - DNA, 25 bp, Homo sapien
cagaggagtccggaacggattcccg

SEQ ID NO: 3728651 - DNA, 25 bp, Homo sapien
cttcacggacgtgggctgagaaccc

SEQ ID NO: 3728652 - DNA, 25 bp, Homo sapien
tgccggtcgagtgtcccaggcgctc

SEQ ID NO: 3728653 - DNA, 25 bp, Homo sapien
ggaaggcgcctcttcgttctctctt

SEQ ID NO: 3728654 - DNA, 25 bp, Homo sapien
aatgagtgccgtccgtgacgcggct

SEQ ID NO: 3728655 - DNA, 25 bp, Homo sapien
ccatataaggccaaatatgggtgtt

SEQ ID NO: 3728656 - DNA, 25 bp, Homo sapien
tgccggcgttagagcgagaggaagt

SEQ ID NO: 3728657 - DNA, 25 bp, Homo sapien
cgcaactccgcgttcccgccccgct

SEQ ID NO: 3728658 - DNA, 25 bp, Homo sapien
gcgggcgaggcacgggagggcgacc

SEQ ID NO: 3728659 - DNA, 25 bp, Homo sapien
acggccagggtgtccgcgggcgagg

SEQ ID NO: 3728660 - DNA, 25 bp, Homo sapien
cccgctcgctcgatagccagcccgg

SEQ ID NO: 3728661 - DNA, 25 bp, Homo sapien
agctggcgcccgtcgagcgacgtga

SEQ ID NO: 3728662 - DNA, 25 bp, Homo sapien
gcgcccgtcgagcgacgtgaccttc

SEQ ID NO: 3728663 - DNA, 25 bp, Homo sapien
ggcgcccgtcgagcgacgtgacctt

SEQ ID NO: 3728664 - DNA, 25 bp, Homo sapien
gctggcgcccgtcgagcgacgtgac

SEQ ID NO: 3728665 - DNA, 25 bp, Homo sapien
gccggcagtcgagcaccacgcagcg

SEQ ID NO: 3728666 - DNA, 25 bp, Homo sapien
gcagcgaaggccagatagggccggc

SEQ ID NO: 3728667 - DNA, 25 bp, Homo sapien
ggccagatagggccggcagtcgagc

SEQ ID NO: 3728668 - DNA, 25 bp, Homo sapien
ggcagtcgagcaccacgcagcgcgc

SEQ ID NO: 3728669 - DNA, 25 bp, Homo sapien
cagcaccaccgagttgaggttgacg

SEQ ID NO: 3728670 - DNA, 25 bp, Homo sapien
tcgggcagcacgtagcgcgccgaca

SEQ ID NO: 3728671 - DNA, 25 bp, Homo sapien
accaccgagttgaggttgacgttga

SEQ ID NO: 3728672 - DNA, 25 bp, Homo sapien
gcaccaccgagttgaggttgacgtt

SEQ ID NO: 3728673 - DNA, 25 bp, Homo sapien
cgggccggcgggtaggcaagcgagt

SEQ ID NO: 3728674 - DNA, 25 bp, Homo sapien
gcgcggcgctctcctctcgcagctt

SEQ ID NO: 3728675 - DNA, 25 bp, Homo sapien
gtgaggacgacacgcgcggcgctct

SEQ ID NO: 3728676 - DNA, 25 bp, Homo sapien
caagcgagtagcgaggtgaggacga

SEQ ID NO: 3728677 - DNA, 25 bp, Homo sapien
ctgtaggctcagctcaggatgggtc

SEQ ID NO: 3728678 - DNA, 25 bp, Homo sapien
taggctcagctcaggatgggtccca

SEQ ID NO: 3728679 - DNA, 25 bp, Homo sapien
aggatgggtcccagggataatcctg

SEQ ID NO: 3728680 - DNA, 25 bp, Homo sapien
ctggctggctgtaggctcagctcag

SEQ ID NO: 3728681 - DNA, 25 bp, Homo sapien
ctttgggtgttgtgatgctggcttt

SEQ ID NO: 3728682 - DNA, 25 bp, Homo sapien
tgactttgggtgttgtgatgctggc

SEQ ID NO: 3728683 - DNA, 25 bp, Homo sapien
tctgactttgggtgttgtgatgctg

SEQ ID NO: 3728684 - DNA, 25 bp, Homo sapien
tgagaccatgaattttccaaagaac

SEQ ID NO: 3728685 - DNA, 25 bp, Homo sapien
tacgaggtttcatttcgactcaggg

SEQ ID NO: 3728686 - DNA, 25 bp, Homo sapien
taattggcgagaagacaggctcctg

SEQ ID NO: 3728687 - DNA, 25 bp, Homo sapien
taagcaggattctagctggaacctc

SEQ ID NO: 3728688 - DNA, 25 bp, Homo sapien
gactcagggcagtaaaacagcctca

SEQ ID NO: 3728689 - DNA, 25 bp, Homo sapien
gttttacatccacgcaacactcagg

SEQ ID NO: 3728690 - DNA, 25 bp, Homo sapien
tccgagtagaaagtctcatatcccc

SEQ ID NO: 3728691 - DNA, 25 bp, Homo sapien
cactcaggatattccgagtagaaag

SEQ ID NO: 3728692 - DNA, 25 bp, Homo sapien
taagctggcctgtagctgacattta

SEQ ID NO: 3728693 - DNA, 25 bp, Homo sapien
tgaaaggttactcccaccaggtcag

SEQ ID NO: 3728694 - DNA, 25 bp, Homo sapien
cttgaaccagctgtaggactctgca

SEQ ID NO: 3728695 - DNA, 25 bp, Homo sapien
caggtcaggtgtctagattagaggc

SEQ ID NO: 3728696 - DNA, 25 bp, Homo sapien
gattagaggccatgtggaaaacaga

SEQ ID NO: 3728697 - DNA, 25 bp, Homo sapien
gatgtccacagcttgaaagccacag

SEQ ID NO: 3728698 - DNA, 25 bp, Homo sapien
cacaggctcgtcatatactgtaagg

SEQ ID NO: 3728699 - DNA, 25 bp, Homo sapien
tgtgccgtgctttcgcaacattctg

SEQ ID NO: 3728700 - DNA, 25 bp, Homo sapien
tcctgaccaaggagcccgttcaaga

SEQ ID NO: 3728701 - DNA, 25 bp, Homo sapien
tcagccagatccctaacagggaagg

SEQ ID NO: 3728702 - DNA, 25 bp, Homo sapien
ctgccctggaataagaacggaatgg

SEQ ID NO: 3728703 - DNA, 25 bp, Homo sapien
tcccatgccaaccatctgcttcctg

SEQ ID NO: 3728704 - DNA, 25 bp, Homo sapien
tgtttcctgagaagtcaagtgttta

SEQ ID NO: 3728705 - DNA, 25 bp, Homo sapien
tgttgatcctaagatgcacccaggt

SEQ ID NO: 3728706 - DNA, 25 bp, Homo sapien
gaaccgctggttagactctggcagt

SEQ ID NO: 3728707 - DNA, 25 bp, Homo sapien
ttcctacgctgaagagatcctaccg

SEQ ID NO: 3728708 - DNA, 25 bp, Homo sapien
aaggtgctggtgagacccgcttaca

SEQ ID NO: 3728709 - DNA, 25 bp, Homo sapien
ctggatgcagggacaaaggacaatc

SEQ ID NO: 3728710 - DNA, 25 bp, Homo sapien
gatgcagggacaaaggacaatcagg

SEQ ID NO: 3728711 - DNA, 25 bp, Homo sapien
tgcagggacaaaggacaatcaggaa

SEQ ID NO: 3728712 - DNA, 25 bp, Homo sapien
tggatgcagggacaaaggacaatca

SEQ ID NO: 3728713 - DNA, 25 bp, Homo sapien
tcggaggtccgtcgggagacattca

SEQ ID NO: 3728714 - DNA, 25 bp, Homo sapien
tccatttgtagtgtaggtgggtcgc

SEQ ID NO: 3728715 - DNA, 25 bp, Homo sapien
gctgtcttccacagggatccatttg

SEQ ID NO: 3728716 - DNA, 25 bp, Homo sapien
gctgtgatgtgcaggttggcgagga

SEQ ID NO: 3728717 - DNA, 25 bp, Homo sapien
ctttcagtgaaggtagcttccatca

SEQ ID NO: 3728718 - DNA, 25 bp, Homo sapien
cacatgccccaaaggggctcccaaa

SEQ ID NO: 3728719 - DNA, 25 bp, Homo sapien
cttccatcagggcatcaaaagtcaa

SEQ ID NO: 3728720 - DNA, 25 bp, Homo sapien
ttcagtgaaggtagcttccatcagg

SEQ ID NO: 3728721 - DNA, 25 bp, Homo sapien
ctgatgagtttctcgtcagggtttc

SEQ ID NO: 3728722 - DNA, 25 bp, Homo sapien
gacaggctcggccttttgcctctga

SEQ ID NO: 3728723 - DNA, 25 bp, Homo sapien
gacaagcaggacaggctcggccttt

SEQ ID NO: 3728724 - DNA, 25 bp, Homo sapien
ttgcctctgatgagtttctcgtcag

SEQ ID NO: 3728725 - DNA, 25 bp, Homo sapien
ggaagaaaagatggtgggagtgagt

SEQ ID NO: 3728726 - DNA, 25 bp, Homo sapien
aagaaaagatggtgggagtgagttg

SEQ ID NO: 3728727 - DNA, 25 bp, Homo sapien
gaagaaaagatggtgggagtgagtt

SEQ ID NO: 3728728 - DNA, 25 bp, Homo sapien
tctcagattcgtactgcaggagctg

SEQ ID NO: 3728729 - DNA, 25 bp, Homo sapien
cagtgtctgcaaatggcctatcagt

SEQ ID NO: 3728730 - DNA, 25 bp, Homo sapien
caaagttgggcgagaccatgctcct

SEQ ID NO: 3728731 - DNA, 25 bp, Homo sapien
cttcataaggtaagccatgcagatg

SEQ ID NO: 3728732 - DNA, 25 bp, Homo sapien
cacatgctgtgctcccgtaatggct

SEQ ID NO: 3728733 - DNA, 25 bp, Homo sapien
tttcccaactagacggtgatcagct

SEQ ID NO: 3728734 - DNA, 25 bp, Homo sapien
agtagtaccacgttgcaaaatctgc

SEQ ID NO: 3728735 - DNA, 25 bp, Homo sapien
ggaaaccagtttgcaccgccactga

SEQ ID NO: 3728736 - DNA, 25 bp, Homo sapien
aacaacaaccagtaacatactgctt

SEQ ID NO: 3728737 - DNA, 25 bp, Homo sapien
caacaaccagtaacatactgctttt

SEQ ID NO: 3728738 - DNA, 25 bp, Homo sapien
acaacaacaaccagtaacatactgc

SEQ ID NO: 3728739 - DNA, 25 bp, Homo sapien
caaccagtaacatactgcttttctt

SEQ ID NO: 3728740 - DNA, 25 bp, Homo sapien
tggttctgactttcatcccaaatgc

SEQ ID NO: 3728741 - DNA, 25 bp, Homo sapien
ccagatgaaagacccggcagaagga

SEQ ID NO: 3728742 - DNA, 25 bp, Homo sapien
tgaatatgtgtttatggttctgact

SEQ ID NO: 3728743 - DNA, 25 bp, Homo sapien
atggttctgactttcatcccaaatg

SEQ ID NO: 3728744 - DNA, 25 bp, Homo sapien
tgtttcctcgtgcaaatttggcaga

SEQ ID NO: 3728745 - DNA, 25 bp, Homo sapien
gaagatattccgtcaatgtgggctg

SEQ ID NO: 3728746 - DNA, 25 bp, Homo sapien
tcatggtttaacaccccggagctgt

SEQ ID NO: 3728747 - DNA, 25 bp, Homo sapien
gctgttgtcgtgataggagttctcg

SEQ ID NO: 3728748 - DNA, 25 bp, Homo sapien
agctctagctcacaagacgtggaga

SEQ ID NO: 3728749 - DNA, 25 bp, Homo sapien
ggtacacaggccaatgcatcacagg

SEQ ID NO: 3728750 - DNA, 25 bp, Homo sapien
ttgtggagcctttgccgtgggaccc

SEQ ID NO: 3728751 - DNA, 25 bp, Homo sapien
ggcaggaactgtctatacccaacca

SEQ ID NO: 3728752 - DNA, 25 bp, Homo sapien
ctccttagaaggatgaactatggtg

SEQ ID NO: 3728753 - DNA, 25 bp, Homo sapien
gaaggatgaactatggtgtgtgcca

SEQ ID NO: 3728754 - DNA, 25 bp, Homo sapien
ccttagaaggatgaactatggtgtg

SEQ ID NO: 3728755 - DNA, 25 bp, Homo sapien
gatgaactatggtgtgtgccacaat

SEQ ID NO: 3728756 - DNA, 25 bp, Homo sapien
tttaaaaaagcggacctcgcgcgca

SEQ ID NO: 3728757 - DNA, 25 bp, Homo sapien
cgtgattccgcgctgtttaaaaaag

SEQ ID NO: 3728758 - DNA, 25 bp, Homo sapien
gcgcgcactgtgctagccttggaac

SEQ ID NO: 3728759 - DNA, 25 bp, Homo sapien
aggttccgcgccaaagccaagaggg

SEQ ID NO: 3728760 - DNA, 25 bp, Homo sapien
gccgcagggtcaggtgaggcgccta

SEQ ID NO: 3728761 - DNA, 25 bp, Homo sapien
ctggaaggagacctgccccggagca

SEQ ID NO: 3728762 - DNA, 25 bp, Homo sapien
agcagcaaccgcacggccgcagggt

SEQ ID NO: 3728763 - DNA, 25 bp, Homo sapien
aggtgaggcgcctacgcgacccctc

SEQ ID NO: 3728764 - DNA, 25 bp, Homo sapien
cagccggggcactagcgggacccgg

SEQ ID NO: 3728765 - DNA, 25 bp, Homo sapien
ccggggctgcaaaggagtgccccaa

SEQ ID NO: 3728766 - DNA, 25 bp, Homo sapien
tctcccagacaagcgccagcaggga

SEQ ID NO: 3728767 - DNA, 25 bp, Homo sapien
tctcggagatcctgcctctcccaga

SEQ ID NO: 3728768 - DNA, 25 bp, Homo sapien
tccaaagaaggagtgctcagagccc

SEQ ID NO: 3728769 - DNA, 25 bp, Homo sapien
gtctataaaagcaggccgacgggcc

SEQ ID NO: 3728770 - DNA, 25 bp, Homo sapien
tcccgcgcgggaagaccattttgac

SEQ ID NO: 3728771 - DNA, 25 bp, Homo sapien
tcatctttgtggtggagtcccgcgc

SEQ ID NO: 3728772 - DNA, 25 bp, Homo sapien
tctgtaacttcgaaaaccctggata

SEQ ID NO: 3728773 - DNA, 25 bp, Homo sapien
actgaagggatctacaattgtttga

SEQ ID NO: 3728774 - DNA, 25 bp, Homo sapien
gatctctgtaacttcgaaaaccctg

SEQ ID NO: 3728775 - DNA, 25 bp, Homo sapien
ttatgttttgaactgaagggatcta

SEQ ID NO: 3728776 - DNA, 25 bp, Homo sapien
tactttttccagatccatttctgcc

SEQ ID NO: 3728777 - DNA, 25 bp, Homo sapien
gttactttttccagatccatttctg

SEQ ID NO: 3728778 - DNA, 25 bp, Homo sapien
agttactttttccagatccatttct

SEQ ID NO: 3728779 - DNA, 25 bp, Homo sapien
ctttttccagatccatttctgccca

SEQ ID NO: 3728780 - DNA, 25 bp, Homo sapien
gccaaccgctgttctggacgaagat

SEQ ID NO: 3728781 - DNA, 25 bp, Homo sapien
aagccaaccgctgttctggacgaag

SEQ ID NO: 3728782 - DNA, 25 bp, Homo sapien
agccaaccgctgttctggacgaaga

SEQ ID NO: 3728783 - DNA, 25 bp, Homo sapien
ccaaccgctgttctggacgaagatg

SEQ ID NO: 3728784 - DNA, 25 bp, Homo sapien
catcgtgcttatgcattacaaaagg

SEQ ID NO: 3728785 - DNA, 25 bp, Homo sapien
atgactcacatgaacacgaaaaccc

SEQ ID NO: 3728786 - DNA, 25 bp, Homo sapien
cccaatcatcgtgcttatgcattac

SEQ ID NO: 3728787 - DNA, 25 bp, Homo sapien
gggaggcatgactcacatgaacacg

SEQ ID NO: 3728788 - DNA, 25 bp, Homo sapien
accggttgtctgaattatcaaaaat

SEQ ID NO: 3728789 - DNA, 25 bp, Homo sapien
ggtaaccggttgtctgaattatcaa

SEQ ID NO: 3728790 - DNA, 25 bp, Homo sapien
tggtaaccggttgtctgaattatca

SEQ ID NO: 3728791 - DNA, 25 bp, Homo sapien
taaccggttgtctgaattatcaaaa

SEQ ID NO: 3728792 - DNA, 25 bp, Homo sapien
tgtctaagaaatactgatccttttt

SEQ ID NO: 3728793 - DNA, 25 bp, Homo sapien
ttttggcaccaataactcttcgaag

SEQ ID NO: 3728794 - DNA, 25 bp, Homo sapien
taactcttcgaagtgaaacttcctc

SEQ ID NO: 3728795 - DNA, 25 bp, Homo sapien
tactgatcctttttggcaccaataa

SEQ ID NO: 3728796 - DNA, 25 bp, Homo sapien
taaggattgcttcgagaaaaaccag

SEQ ID NO: 3728797 - DNA, 25 bp, Homo sapien
caatataataaggattgcttcgaga

SEQ ID NO: 3728798 - DNA, 25 bp, Homo sapien
tttcaaggaggttcatcacatcatt

SEQ ID NO: 3728799 - DNA, 25 bp, Homo sapien
cgagaaaaaccagcgctttcaagga

SEQ ID NO: 3728800 - DNA, 25 bp, Homo sapien
cgtcatacactctagtaccagctac

SEQ ID NO: 3728801 - DNA, 25 bp, Homo sapien
ctttcgttcgtcatacactctagta

SEQ ID NO: 3728802 - DNA, 25 bp, Homo sapien
ttcttcctttcgttcgtcatacact

SEQ ID NO: 3728803 - DNA, 25 bp, Homo sapien
cgttcgtcatacactctagtaccag

SEQ ID NO: 3728804 - DNA, 25 bp, Homo sapien
tctgatactgagctagttcttcctt

SEQ ID NO: 3728805 - DNA, 25 bp, Homo sapien
catcaagtttggcacgagtctcgtt

SEQ ID NO: 3728806 - DNA, 25 bp, Homo sapien
aatggtatattccagggctcgtctc

SEQ ID NO: 3728807 - DNA, 25 bp, Homo sapien
cctctagagtatgtaatctctcttc

SEQ ID NO: 3728808 - DNA, 25 bp, Homo sapien
ttttatctcttgcatcctgctgagc

SEQ ID NO: 3728809 - DNA, 25 bp, Homo sapien
gctgagcatctcttaattgtctgga

SEQ ID NO: 3728810 - DNA, 25 bp, Homo sapien
ccactagtctctcgcttagcagaaa

SEQ ID NO: 3728811 - DNA, 25 bp, Homo sapien
ttttctccactagtctctcgcttag

SEQ ID NO: 3728812 - DNA, 25 bp, Homo sapien
tattgcctgctagttcatcttgtaa

SEQ ID NO: 3728813 - DNA, 25 bp, Homo sapien
ttgtaaatccttggctttaagctcc

SEQ ID NO: 3728814 - DNA, 25 bp, Homo sapien
gctccaacttagtcctctgcttaat

SEQ ID NO: 3728815 - DNA, 25 bp, Homo sapien
caattctctaacttggcgttcgata

SEQ ID NO: 3728816 - DNA, 25 bp, Homo sapien
ttcacactgttgaatttgggttctg

SEQ ID NO: 3728817 - DNA, 25 bp, Homo sapien
ctagcaattcctcgttcttctttct

SEQ ID NO: 3728818 - DNA, 25 bp, Homo sapien
agcaattcctcgttcttctttctct

SEQ ID NO: 3728819 - DNA, 25 bp, Homo sapien
cacactgttgaatttgggttctgtt

SEQ ID NO: 3728820 - DNA, 25 bp, Homo sapien
tttgatgtaaactggcttcctcgac

SEQ ID NO: 3728821 - DNA, 25 bp, Homo sapien
taatagcctgatctaaagacttgag

SEQ ID NO: 3728822 - DNA, 25 bp, Homo sapien
cctgctttgcataaagatccgttct

SEQ ID NO: 3728823 - DNA, 25 bp, Homo sapien
tccttatgtatagcagcaatctgtc

SEQ ID NO: 3728824 - DNA, 25 bp, Homo sapien
caaaagcctatttacaccgggcgcg

SEQ ID NO: 3728825 - DNA, 25 bp, Homo sapien
tttacataacaaaatcagcgccata

SEQ ID NO: 3728826 - DNA, 25 bp, Homo sapien
gattataccaagaggcaaaagccta

SEQ ID NO: 3728827 - DNA, 25 bp, Homo sapien
taatttaggattataccaagaggca

SEQ ID NO: 3728828 - DNA, 25 bp, Homo sapien
tacttcgtaatattttctgtccagt

SEQ ID NO: 3728829 - DNA, 25 bp, Homo sapien
tttacttcgtaatattttctgtcca

SEQ ID NO: 3728830 - DNA, 25 bp, Homo sapien
ttacttcgtaatattttctgtccag

SEQ ID NO: 3728831 - DNA, 25 bp, Homo sapien
tttagcagcaagtgcttgctgttct

SEQ ID NO: 3728832 - DNA, 25 bp, Homo sapien
cttttagcagcaagtgcttgctgtt

SEQ ID NO: 3728833 - DNA, 25 bp, Homo sapien
ttttagcagcaagtgcttgctgttc

SEQ ID NO: 3728834 - DNA, 25 bp, Homo sapien
tcttttagcagcaagtgcttgctgt

SEQ ID NO: 3728835 - DNA, 25 bp, Homo sapien
gctggttcacattcaaagttattca

SEQ ID NO: 3728836 - DNA, 25 bp, Homo sapien
gtgtagaaagctggttcacattcaa

SEQ ID NO: 3728837 - DNA, 25 bp, Homo sapien
tccttttcgacggaagtggtctagc

SEQ ID NO: 3728838 - DNA, 25 bp, Homo sapien
ttacaataccatgatagccattttg

SEQ ID NO: 3728839 - DNA, 25 bp, Homo sapien
tatgttgcccaaacttatcaatcct

SEQ ID NO: 3728840 - DNA, 25 bp, Homo sapien
tctttattggtactcagggtctccc

SEQ ID NO: 3728841 - DNA, 25 bp, Homo sapien
gataatggaagatatgttgtacaaa

SEQ ID NO: 3728842 - DNA, 25 bp, Homo sapien
taaacacttaagcatcaaacagttt

SEQ ID NO: 3728843 - DNA, 25 bp, Homo sapien
tgacatctaacttgttaagaggcag

SEQ ID NO: 3728844 - DNA, 25 bp, Homo sapien
cctctccaggaagattcattttatt

SEQ ID NO: 3728845 - DNA, 25 bp, Homo sapien
aaaatcttcgtgctgacttcatctg

SEQ ID NO: 3728846 - DNA, 25 bp, Homo sapien
ggtttcaggataggctgtatccctg

SEQ ID NO: 3728847 - DNA, 25 bp, Homo sapien
cactcagcactaaggtccatgggaa

SEQ ID NO: 3728848 - DNA, 25 bp, Homo sapien
actgaatcccagtgtatagtgcctg

SEQ ID NO: 3728849 - DNA, 25 bp, Homo sapien
cactagcatgtgttagattatgtga

SEQ ID NO: 3728850 - DNA, 25 bp, Homo sapien
tatttttatctcatacaccactgaa

SEQ ID NO: 3728851 - DNA, 25 bp, Homo sapien
tacagtccatagtgaaagcacgggc

SEQ ID NO: 3728852 - DNA, 25 bp, Homo sapien
tctgggattgtacctcagtttgctg

SEQ ID NO: 3728853 - DNA, 25 bp, Homo sapien
gctacgacaaataagagtctttcca

SEQ ID NO: 3728854 - DNA, 25 bp, Homo sapien
cacgggccagctgggttgaaacttc

SEQ ID NO: 3728855 - DNA, 25 bp, Homo sapien
gcaccccgatggctgacttggtcac

SEQ ID NO: 3728856 - DNA, 25 bp, Homo sapien
aagtcgagacttccttgtgtcataa

SEQ ID NO: 3728857 - DNA, 25 bp, Homo sapien
cattgagctttgcttcaagttcacc

SEQ ID NO: 3728858 - DNA, 25 bp, Homo sapien
atttctgcgcaggttttcattgagc

SEQ ID NO: 3728859 - DNA, 25 bp, Homo sapien
aatatgctatctctagatgctttaa

SEQ ID NO: 3728860 - DNA, 25 bp, Homo sapien
atatgctatctctagatgctttaaa

SEQ ID NO: 3728861 - DNA, 25 bp, Homo sapien
atgctatctctagatgctttaaatt

SEQ ID NO: 3728862 - DNA, 25 bp, Homo sapien
tatgctatctctagatgctttaaat

SEQ ID NO: 3728863 - DNA, 25 bp, Homo sapien
ctgactgctgcctcttctcttttag

SEQ ID NO: 3728864 - DNA, 25 bp, Homo sapien
gactgctgcctcttctcttttagca

SEQ ID NO: 3728865 - DNA, 25 bp, Homo sapien
cttaggcatgaaggttttctctgac

SEQ ID NO: 3728866 - DNA, 25 bp, Homo sapien
taggcatgaaggttttctctgactg

SEQ ID NO: 3728867 - DNA, 25 bp, Homo sapien
tacaatctggacaaaacggaatcaa

SEQ ID NO: 3728868 - DNA, 25 bp, Homo sapien
cagaatatggttgggatggtacaac

SEQ ID NO: 3728869 - DNA, 25 bp, Homo sapien
caacaataggagactttgggtatcc

SEQ ID NO: 3728870 - DNA, 25 bp, Homo sapien
gaaagtttgaacgtgccaacaatag

SEQ ID NO: 3728871 - DNA, 25 bp, Homo sapien
aatcagttcccagttctgctttcaa

SEQ ID NO: 3728872 - DNA, 25 bp, Homo sapien
cattcagtgcatctactctcttctg

SEQ ID NO: 3728873 - DNA, 25 bp, Homo sapien
gacgaatctcatcattcagtgcatc

SEQ ID NO: 3728874 - DNA, 25 bp, Homo sapien
tcaatgactctctggtagactccat

SEQ ID NO: 3728875 - DNA, 25 bp, Homo sapien
taaatatggtaaggctaacaagctc

SEQ ID NO: 3728876 - DNA, 25 bp, Homo sapien
tggctggccctttttataacgcatg

SEQ ID NO: 3728877 - DNA, 25 bp, Homo sapien
tataatcctaacctagctagattgg

SEQ ID NO: 3728878 - DNA, 25 bp, Homo sapien
caggaatggtgctcatttgctgtcc

SEQ ID NO: 3728879 - DNA, 25 bp, Homo sapien
aagtctctactcgagtaataatacc

SEQ ID NO: 3728880 - DNA, 25 bp, Homo sapien
tgttctacttggtccaagcgttttc

SEQ ID NO: 3728881 - DNA, 25 bp, Homo sapien
tactcgagtaataataccttctaat

SEQ ID NO: 3728882 - DNA, 25 bp, Homo sapien
cattgagataagtctctactcgagt

SEQ ID NO: 3728883 - DNA, 25 bp, Homo sapien
tttactcttttattgatggcttcaa

SEQ ID NO: 3728884 - DNA, 25 bp, Homo sapien
cttctgatcgtgccatagtgtcttt

SEQ ID NO: 3728885 - DNA, 25 bp, Homo sapien
tggcttcaagttctgatgttgtggc

SEQ ID NO: 3728886 - DNA, 25 bp, Homo sapien
gttgtggctgtgagaacagtacccc

SEQ ID NO: 3728887 - DNA, 25 bp, Homo sapien
tcttcttcaatagcatgccttgccg

SEQ ID NO: 3728888 - DNA, 25 bp, Homo sapien
tccagcgctccatactcttctgaag

SEQ ID NO: 3728889 - DNA, 25 bp, Homo sapien
catgatttatagcatccatatgttc

SEQ ID NO: 3728890 - DNA, 25 bp, Homo sapien
gggaagtgatccaagttctcgaatt

SEQ ID NO: 3728891 - DNA, 25 bp, Homo sapien
attctgtgttgcactgctcaagttt

SEQ ID NO: 3728892 - DNA, 25 bp, Homo sapien
tctgtgttgcactgctcaagttttc

SEQ ID NO: 3728893 - DNA, 25 bp, Homo sapien
tgcactgctcaagttttcgaaacaa

SEQ ID NO: 3728894 - DNA, 25 bp, Homo sapien
gtgttgcactgctcaagttttcgaa

SEQ ID NO: 3728895 - DNA, 25 bp, Homo sapien
cctatatgctaggtttgttcacatg

SEQ ID NO: 3728896 - DNA, 25 bp, Homo sapien
gaacaaggataacagactagatcct

SEQ ID NO: 3728897 - DNA, 25 bp, Homo sapien
caagttactgtaaacctatatgcta

SEQ ID NO: 3728898 - DNA, 25 bp, Homo sapien
tccttctaagggctgtgtaaaacat

SEQ ID NO: 3728899 - DNA, 25 bp, Homo sapien
tttgccaccaggtactaacttctgg

SEQ ID NO: 3728900 - DNA, 25 bp, Homo sapien
gctttgccaccaggtactaacttct

SEQ ID NO: 3728901 - DNA, 25 bp, Homo sapien
agctttgccaccaggtactaacttc

SEQ ID NO: 3728902 - DNA, 25 bp, Homo sapien
tgccaccaggtactaacttctggaa

SEQ ID NO: 3728903 - DNA, 25 bp, Homo sapien
tgatgggacactgctttgtgagcca

SEQ ID NO: 3728904 - DNA, 25 bp, Homo sapien
ctaattccaactccagtaaactggt

SEQ ID NO: 3728905 - DNA, 25 bp, Homo sapien
tgtgagccagaacccctctcactct

SEQ ID NO: 3728906 - DNA, 25 bp, Homo sapien
tccagtaaactggtcaactgatggg

SEQ ID NO: 3728907 - DNA, 25 bp, Homo sapien
gatactataaattctattatggtaa

SEQ ID NO: 3728908 - DNA, 25 bp, Homo sapien
tataaattctattatggtaatgctc

SEQ ID NO: 3728909 - DNA, 25 bp, Homo sapien
attctattatggtaatgctctgagg

SEQ ID NO: 3728910 - DNA, 25 bp, Homo sapien
tattatggtaatgctctgaggaaaa

SEQ ID NO: 3728911 - DNA, 25 bp, Homo sapien
acaagtaaaatggagccgggtcaca

SEQ ID NO: 3728912 - DNA, 25 bp, Homo sapien
ggctaccaaggatttctgtccacct

SEQ ID NO: 3728913 - DNA, 25 bp, Homo sapien
caaggatttctgtccacctgaaagc

SEQ ID NO: 3728914 - DNA, 25 bp, Homo sapien
gcaaaaatcagagcaagggctacca

SEQ ID NO: 3728915 - DNA, 25 bp, Homo sapien
gtgctttaacaaatttcttttcagc

SEQ ID NO: 3728916 - DNA, 25 bp, Homo sapien
ttgtgctttaacaaatttcttttca

SEQ ID NO: 3728917 - DNA, 25 bp, Homo sapien
gctttaacaaatttcttttcagcag

SEQ ID NO: 3728918 - DNA, 25 bp, Homo sapien
ctttaacaaatttcttttcagcaga

SEQ ID NO: 3728919 - DNA, 25 bp, Homo sapien
tcaagcagttcaggcctaaaagtag

SEQ ID NO: 3728920 - DNA, 25 bp, Homo sapien
tgagcatgtacagcaagttccataa

SEQ ID NO: 3728921 - DNA, 25 bp, Homo sapien
tgaactttacaccatagaatttgtc

SEQ ID NO: 3728922 - DNA, 25 bp, Homo sapien
tttgtcagctgactcaagcagttca

SEQ ID NO: 3728923 - DNA, 25 bp, Homo sapien
gcctatcaactacatttaactacat

SEQ ID NO: 3728924 - DNA, 25 bp, Homo sapien
tacagcctatcaactacatttaact

SEQ ID NO: 3728925 - DNA, 25 bp, Homo sapien
tatatacagcctatcaactacattt

SEQ ID NO: 3728926 - DNA, 25 bp, Homo sapien
tgtatagggtaaatatatacagcct

SEQ ID NO: 3728927 - DNA, 25 bp, Homo sapien
gctgtgatcacatcaatatgactaa

SEQ ID NO: 3728928 - DNA, 25 bp, Homo sapien
ggtatcatcttctacaaagtctttg

SEQ ID NO: 3728929 - DNA, 25 bp, Homo sapien
gtggtatcatcttctacaaagtctt

SEQ ID NO: 3728930 - DNA, 25 bp, Homo sapien
tatcatcttctacaaagtctttggc

SEQ ID NO: 3728931 - DNA, 25 bp, Homo sapien
tacatctcccaaaccagtaggtagt

SEQ ID NO: 3728932 - DNA, 25 bp, Homo sapien
ttcttaaactatcagtacaaacatg

SEQ ID NO: 3728933 - DNA, 25 bp, Homo sapien
ttaaactatcagtacaaacatgaca

SEQ ID NO: 3728934 - DNA, 25 bp, Homo sapien
tatacatctcccaaaccagtaggta

SEQ ID NO: 3728935 - DNA, 25 bp, Homo sapien
aatgaaaagccacataaaacactat

SEQ ID NO: 3728936 - DNA, 25 bp, Homo sapien
atgaaaagccacataaaacactata

SEQ ID NO: 3728937 - DNA, 25 bp, Homo sapien
ctggaagagactatgacaaatgaaa

SEQ ID NO: 3728938 - DNA, 25 bp, Homo sapien
tagctcctaacaaattctcctgcag

SEQ ID NO: 3728939 - DNA, 25 bp, Homo sapien
aacctggcaagtacaatgttgggta

SEQ ID NO: 3728940 - DNA, 25 bp, Homo sapien
gaatctacaaaaagctacgaggact

SEQ ID NO: 3728941 - DNA, 25 bp, Homo sapien
taacatcccttgaattgaatcctgg

SEQ ID NO: 3728942 - DNA, 25 bp, Homo sapien
tctcagaggatgagatttagcctgc

SEQ ID NO: 3728943 - DNA, 25 bp, Homo sapien
ctgagaagacctgtttggcaccagc

SEQ ID NO: 3728944 - DNA, 25 bp, Homo sapien
caaggccatgctccacggtcatgcc

SEQ ID NO: 3728945 - DNA, 25 bp, Homo sapien
cagaatctcacaaatgagatgagct

SEQ ID NO: 3728946 - DNA, 25 bp, Homo sapien
ctgccctaatgtgtctgacagcttg

SEQ ID NO: 3728947 - DNA, 25 bp, Homo sapien
gcttggctacctggaactgttttga

SEQ ID NO: 3728948 - DNA, 25 bp, Homo sapien
tgacagcttggctacctggaactgt

SEQ ID NO: 3728949 - DNA, 25 bp, Homo sapien
aactgttttgagttgtcaacatcca

SEQ ID NO: 3728950 - DNA, 25 bp, Homo sapien
ggctccacagagtgcagcttctctc

SEQ ID NO: 3728951 - DNA, 25 bp, Homo sapien
gatgaactgggctccacagagtgca

SEQ ID NO: 3728952 - DNA, 25 bp, Homo sapien
ggagatcgggggcagatgaactggg

SEQ ID NO: 3728953 - DNA, 25 bp, Homo sapien
aactgggctccacagagtgcagctt

SEQ ID NO: 3728954 - DNA, 25 bp, Homo sapien
tcctcaggtccaggaatgaaggcag

SEQ ID NO: 3728955 - DNA, 25 bp, Homo sapien
tccagaagtcttggtgatacgagtt

SEQ ID NO: 3728956 - DNA, 25 bp, Homo sapien
tcatgtagtaaaaggaacgttccag

SEQ ID NO: 3728957 - DNA, 25 bp, Homo sapien
ctgtgacagactgaccagacctggg

SEQ ID NO: 3728958 - DNA, 25 bp, Homo sapien
tcctcctccttccagtccacaggag

SEQ ID NO: 3728959 - DNA, 25 bp, Homo sapien
tcctccttccagtccacaggagggc

SEQ ID NO: 3728960 - DNA, 25 bp, Homo sapien
cagtccacaggagggcagagaccca

SEQ ID NO: 3728961 - DNA, 25 bp, Homo sapien
tccttccagtccacaggagggcaga

SEQ ID NO: 3728962 - DNA, 25 bp, Homo sapien
acagagtcatagcaactgatcagca

SEQ ID NO: 3728963 - DNA, 25 bp, Homo sapien
ttctggctccagaaatagcacgcat

SEQ ID NO: 3728964 - DNA, 25 bp, Homo sapien
taagaaaaacacaggtcttggctgg

SEQ ID NO: 3728965 - DNA, 25 bp, Homo sapien
tcagcaccacgaaggttattcctgc

SEQ ID NO: 3728966 - DNA, 25 bp, Homo sapien
ctgcatgccagagtgacgccaggaa

SEQ ID NO: 3728967 - DNA, 25 bp, Homo sapien
gagcctgcaatgtgctgacctcact

SEQ ID NO: 3728968 - DNA, 25 bp, Homo sapien
aggatcaggtgaccattatggaagg

SEQ ID NO: 3728969 - DNA, 25 bp, Homo sapien
accattatggaaggcaacaccggag

SEQ ID NO: 3728970 - DNA, 25 bp, Homo sapien
tgtgaatataaaatgccacctgcat

SEQ ID NO: 3728971 - DNA, 25 bp, Homo sapien
cttttgctgtgatgctgctgtgaat

SEQ ID NO: 3728972 - DNA, 25 bp, Homo sapien
cttcttttgctgtgatgctgctgtg

SEQ ID NO: 3728973 - DNA, 25 bp, Homo sapien
tgctgctgtgaatataaaatgccac

SEQ ID NO: 3728974 - DNA, 25 bp, Homo sapien
gaagtagagaaaagcgtgccttgcg

SEQ ID NO: 3728975 - DNA, 25 bp, Homo sapien
agcgtgccttgcgtgcctgggaaac

SEQ ID NO: 3728976 - DNA, 25 bp, Homo sapien
aaccagagcccaggatgccgcatgg

SEQ ID NO: 3728977 - DNA, 25 bp, Homo sapien
cggctgtccggcatacaggagttct

SEQ ID NO: 3728978 - DNA, 25 bp, Homo sapien
tcctgcggcctttcaaggctgagag

SEQ ID NO: 3728979 - DNA, 25 bp, Homo sapien
gaatatgcgaggcacctgacacaga

SEQ ID NO: 3728980 - DNA, 25 bp, Homo sapien
gttcggcttaatgccctggcgcgtg

SEQ ID NO: 3728981 - DNA, 25 bp, Homo sapien
cacagctgtggacgcggacatcctg

SEQ ID NO: 3728982 - DNA, 25 bp, Homo sapien
agttccagctgctgatttcaggtgt

SEQ ID NO: 3728983 - DNA, 25 bp, Homo sapien
gacttgtattgtaacccaggtctca

SEQ ID NO: 3728984 - DNA, 25 bp, Homo sapien
aggtgtccccggaagcagccggtgg

SEQ ID NO: 3728985 - DNA, 25 bp, Homo sapien
tggactcgccccgaggtcagacttg

SEQ ID NO: 3728986 - DNA, 25 bp, Homo sapien
ctggggacggtgcgcgcggcctctc

SEQ ID NO: 3728987 - DNA, 25 bp, Homo sapien
gggacggtgcgcgcggcctctcgca

SEQ ID NO: 3728988 - DNA, 25 bp, Homo sapien
acggtgcgcgcggcctctcgcagct

SEQ ID NO: 3728989 - DNA, 25 bp, Homo sapien
cggtgcgcgcggcctctcgcagctc

SEQ ID NO: 3728990 - DNA, 25 bp, Homo sapien
gttccacggcgcagcataccgcgtg

SEQ ID NO: 3728991 - DNA, 25 bp, Homo sapien
gtgaggaaggcgacacacgcagccc

SEQ ID NO: 3728992 - DNA, 25 bp, Homo sapien
tcagggtccgtagcccagcgttcca

SEQ ID NO: 3728993 - DNA, 25 bp, Homo sapien
ataccgcgtgaggaaggcgacacac

SEQ ID NO: 3728994 - DNA, 25 bp, Homo sapien
gtggcgcggggaggagacgcgaggg

SEQ ID NO: 3728995 - DNA, 25 bp, Homo sapien
tcccggtggcgcggggaggagacgc

SEQ ID NO: 3728996 - DNA, 25 bp, Homo sapien
ggaggcagtcctggcggcgccgcct

SEQ ID NO: 3728997 - DNA, 25 bp, Homo sapien
gggaggaggcagtcctggcggcgcc

SEQ ID NO: 3728998 - DNA, 25 bp, Homo sapien
cactgcaggcaactctgtccggctg

SEQ ID NO: 3728999 - DNA, 25 bp, Homo sapien
tgctgcatccctcgcgggccggagg

SEQ ID NO: 3729000 - DNA, 25 bp, Homo sapien
tgcaggcaactctgtccggctgctc

SEQ ID NO: 3729001 - DNA, 25 bp, Homo sapien
cgctggggtccgcgtcctggctcat

SEQ ID NO: 3729002 - DNA, 25 bp, Homo sapien
taaggagagcacaagctccaaatca

SEQ ID NO: 3729003 - DNA, 25 bp, Homo sapien
aaggagagcacaagctccaaatcat

SEQ ID NO: 3729004 - DNA, 25 bp, Homo sapien
ctaaggagagcacaagctccaaatc

SEQ ID NO: 3729005 - DNA, 25 bp, Homo sapien
gaagatggacctacaaagcgtttgc

SEQ ID NO: 3729006 - DNA, 25 bp, Homo sapien
tcagatggacttatgcaaatgcagt

SEQ ID NO: 3729007 - DNA, 25 bp, Homo sapien
aataacctgctcaaatttcggcgca

SEQ ID NO: 3729008 - DNA, 25 bp, Homo sapien
ggttccagcggaatttcagtgggta

SEQ ID NO: 3729009 - DNA, 25 bp, Homo sapien
agcttgaaggtgttaagaggacgtt

SEQ ID NO: 3729010 - DNA, 25 bp, Homo sapien
tctcaaaaggttcatctttaaacca

SEQ ID NO: 3729011 - DNA, 25 bp, Homo sapien
catctcaaaaggttcatctttaaac

SEQ ID NO: 3729012 - DNA, 25 bp, Homo sapien
ttacatctcaaaaggttcatcttta

SEQ ID NO: 3729013 - DNA, 25 bp, Homo sapien
tccaggtgtcaggaattgctcctag

SEQ ID NO: 3729014 - DNA, 25 bp, Homo sapien
agttcatatcctaggtgggctcaga

SEQ ID NO: 3729015 - DNA, 25 bp, Homo sapien
gaatcacaaaactcagaccctgaag

SEQ ID NO: 3729016 - DNA, 25 bp, Homo sapien
tgggctcagagagggaacaaatgcc

SEQ ID NO: 3729017 - DNA, 25 bp, Homo sapien
ccgactctgatgttttggtggcagt

SEQ ID NO: 3729018 - DNA, 25 bp, Homo sapien
caatcctacaatagtttgagcccca

SEQ ID NO: 3729019 - DNA, 25 bp, Homo sapien
gccctcaaaggaagaccgactctga

SEQ ID NO: 3729020 - DNA, 25 bp, Homo sapien
gatgtgagttaggatctcagcctcc

SEQ ID NO: 3729021 - DNA, 25 bp, Homo sapien
cacagggaactgtcctaagaagttc

SEQ ID NO: 3729022 - DNA, 25 bp, Homo sapien
aaaaaagaacttcgtcagtctctgc

SEQ ID NO: 3729023 - DNA, 25 bp, Homo sapien
tctctgggcaggaacgacacttgtt

SEQ ID NO: 3729024 - DNA, 25 bp, Homo sapien
tggcactctcatcactcatcgcaaa

SEQ ID NO: 3729025 - DNA, 25 bp, Homo sapien
tatccgcggacggaagcatcttcag

SEQ ID NO: 3729026 - DNA, 25 bp, Homo sapien
aggacggcagcagcccggagagaag

SEQ ID NO: 3729027 - DNA, 25 bp, Homo sapien
cagcttccgcgaacacccgggaaga

SEQ ID NO: 3729028 - DNA, 25 bp, Homo sapien
ggctttggctgacgatcacggaagc

SEQ ID NO: 3729029 - DNA, 25 bp, Homo sapien
ccaatggtgtctttacagggcttaa

SEQ ID NO: 3729030 - DNA, 25 bp, Homo sapien
ctttacagggcttaaaagcaactgc

SEQ ID NO: 3729031 - DNA, 25 bp, Homo sapien
tcaaccttccaatggtgtctttaca

SEQ ID NO: 3729032 - DNA, 25 bp, Homo sapien
taaaagcaactgcaaaaataattcc

SEQ ID NO: 3729033 - DNA, 25 bp, Homo sapien
aaaccatacatgaactcacaattaa

SEQ ID NO: 3729034 - DNA, 25 bp, Homo sapien
actgtaactgagcaccttgtttggt

SEQ ID NO: 3729035 - DNA, 25 bp, Homo sapien
gaactcacaattaactaactgtaac

SEQ ID NO: 3729036 - DNA, 25 bp, Homo sapien
gagcaccttgtttggtctgatgcat

SEQ ID NO: 3729037 - DNA, 25 bp, Homo sapien
ggtgactcctgttgggcatgggcca

SEQ ID NO: 3729038 - DNA, 25 bp, Homo sapien
tgactcctgttgggcatgggccacc

SEQ ID NO: 3729039 - DNA, 25 bp, Homo sapien
gtgactcctgttgggcatgggccac

SEQ ID NO: 3729040 - DNA, 25 bp, Homo sapien
gaccaggagacaattcaagccagct

SEQ ID NO: 3729041 - DNA, 25 bp, Homo sapien
caggtcaactactagggaaggattc

SEQ ID NO: 3729042 - DNA, 25 bp, Homo sapien
aggacaaccaggaaggactgcctca

SEQ ID NO: 3729043 - DNA, 25 bp, Homo sapien
tcttggaagatggaccatgttgccc

SEQ ID NO: 3729044 - DNA, 25 bp, Homo sapien
gcagtaacttggcaatccacacgtt

SEQ ID NO: 3729045 - DNA, 25 bp, Homo sapien
gacctgacacatggtaggcatgcag

SEQ ID NO: 3729046 - DNA, 25 bp, Homo sapien
tcacagtccactttgcagtaacttg

SEQ ID NO: 3729047 - DNA, 25 bp, Homo sapien
ttggcaatccacacgtttctctacc

SEQ ID NO: 3729048 - DNA, 25 bp, Homo sapien
gatacctcgacagtggacctgctca

SEQ ID NO: 3729049 - DNA, 25 bp, Homo sapien
cactggaagaaggatgattaacgtc

SEQ ID NO: 3729050 - DNA, 25 bp, Homo sapien
taggagatttcatcacgccactcag

SEQ ID NO: 3729051 - DNA, 25 bp, Homo sapien
tctgggtatactaaggacactctca

SEQ ID NO: 3729052 - DNA, 25 bp, Homo sapien
gaacatcaaggtggccataaacttg

SEQ ID NO: 3729053 - DNA, 25 bp, Homo sapien
catcaaggtggccataaacttgctt

SEQ ID NO: 3729054 - DNA, 25 bp, Homo sapien
gtgaacatcaaggtggccataaact

SEQ ID NO: 3729055 - DNA, 25 bp, Homo sapien
cagtgaacatcaaggtggccataaa

SEQ ID NO: 3729056 - DNA, 25 bp, Homo sapien
tgggcattctagaggagcaggatcc

SEQ ID NO: 3729057 - DNA, 25 bp, Homo sapien
gggaggcaggcacgtaaactgatca

SEQ ID NO: 3729058 - DNA, 25 bp, Homo sapien
gcaggatcctggaagaggtactgca

SEQ ID NO: 3729059 - DNA, 25 bp, Homo sapien
cactgggtgggaagtgggcattcta

SEQ ID NO: 3729060 - DNA, 25 bp, Homo sapien
atgagatcagacatattcaaggtag

SEQ ID NO: 3729061 - DNA, 25 bp, Homo sapien
tgagatcagacatattcaaggtagt

SEQ ID NO: 3729062 - DNA, 25 bp, Homo sapien
tgcggctatcgaagcctggagtcat

SEQ ID NO: 3729063 - DNA, 25 bp, Homo sapien
ctgcggctatcgaagcctggagtca

SEQ ID NO: 3729064 - DNA, 25 bp, Homo sapien
ttctgaaacataccagggtgcctgg

SEQ ID NO: 3729065 - DNA, 25 bp, Homo sapien
ctgaaacataccagggtgcctggca

SEQ ID NO: 3729066 - DNA, 25 bp, Homo sapien
cagggtgcctggcacgacgggctga

SEQ ID NO: 3729067 - DNA, 25 bp, Homo sapien
tttctgaaacataccagggtgcctg

SEQ ID NO: 3729068 - DNA, 25 bp, Homo sapien
cagtagccttgcgacttttctttaa

SEQ ID NO: 3729069 - DNA, 25 bp, Homo sapien
gagcatctagacttcctgacattag

SEQ ID NO: 3729070 - DNA, 25 bp, Homo sapien
tagacttcctgacattaggatcgct

SEQ ID NO: 3729071 - DNA, 25 bp, Homo sapien
taaccagcgtaaaaagagcatctag

SEQ ID NO: 3729072 - DNA, 25 bp, Homo sapien
ctctttcttgataacaatagggctg

SEQ ID NO: 3729073 - DNA, 25 bp, Homo sapien
gcttggcctctgtgactaatttcga

SEQ ID NO: 3729074 - DNA, 25 bp, Homo sapien
aatttcgagactactgggtcaatgc

SEQ ID NO: 3729075 - DNA, 25 bp, Homo sapien
tgctgggtcttcactagcttggcct

SEQ ID NO: 3729076 - DNA, 25 bp, Homo sapien
tctgtggcccacattgacttgaagg

SEQ ID NO: 3729077 - DNA, 25 bp, Homo sapien
gcccacattgacttgaaggttcctg

SEQ ID NO: 3729078 - DNA, 25 bp, Homo sapien
tggcccacattgacttgaaggttcc

SEQ ID NO: 3729079 - DNA, 25 bp, Homo sapien
cccacattgacttgaaggttcctgg

SEQ ID NO: 3729080 - DNA, 25 bp, Homo sapien
gcagaaagggtgtccgtctgacatg

SEQ ID NO: 3729081 - DNA, 25 bp, Homo sapien
tctggaccaaaaatcagtgtgcatg

SEQ ID NO: 3729082 - DNA, 25 bp, Homo sapien
gtgtgcatggtctggaaactggaaa

SEQ ID NO: 3729083 - DNA, 25 bp, Homo sapien
ctttcatgtgacctatattggttgg

SEQ ID NO: 3729084 - DNA, 25 bp, Homo sapien
ccttccccgtgattgccaatggtaa

SEQ ID NO: 3729085 - DNA, 25 bp, Homo sapien
ttgccaatggtaaacattatcttga

SEQ ID NO: 3729086 - DNA, 25 bp, Homo sapien
tgattgccaatggtaaacattatct

SEQ ID NO: 3729087 - DNA, 25 bp, Homo sapien
ccccgtgattgccaatggtaaacat

SEQ ID NO: 3729088 - DNA, 25 bp, Homo sapien
gaaaggatgcatcaccatggcactg

SEQ ID NO: 3729089 - DNA, 25 bp, Homo sapien
caattgcattagagggaaaccgggt

SEQ ID NO: 3729090 - DNA, 25 bp, Homo sapien
tggaaatccgctggccacatgtgaa

SEQ ID NO: 3729091 - DNA, 25 bp, Homo sapien
cataggtcacactgcccgaggttga

SEQ ID NO: 3729092 - DNA, 25 bp, Homo sapien
cagagaagaccaggcatttctgagc

SEQ ID NO: 3729093 - DNA, 25 bp, Homo sapien
tctgagcgtgcagcttccctttcac

SEQ ID NO: 3729094 - DNA, 25 bp, Homo sapien
gaccaggcatttctgagcgtgcagc

SEQ ID NO: 3729095 - DNA, 25 bp, Homo sapien
gcatttctgagcgtgcagcttccct

SEQ ID NO: 3729096 - DNA, 25 bp, Homo sapien
tcccagcagggttataaacagctgt

SEQ ID NO: 3729097 - DNA, 25 bp, Homo sapien
aaacagctgtgctgttgggagaagc

SEQ ID NO: 3729098 - DNA, 25 bp, Homo sapien
aagcacacaatgttccctctgccga

SEQ ID NO: 3729099 - DNA, 25 bp, Homo sapien
gaaccaagtatacaccggatgccag

SEQ ID NO: 3729100 - DNA, 25 bp, Homo sapien
acataatgtgcctgtgggtagccca

SEQ ID NO: 3729101 - DNA, 25 bp, Homo sapien
cagagaatactgatgggcccagaca

SEQ ID NO: 3729102 - DNA, 25 bp, Homo sapien
gctttacgtctcaagtatctcagag

SEQ ID NO: 3729103 - DNA, 25 bp, Homo sapien
ctgtttgctttctacatccgtgaga

SEQ ID NO: 3729104 - DNA, 25 bp, Homo sapien
tcacatattattagtgattggcatg

SEQ ID NO: 3729105 - DNA, 25 bp, Homo sapien
cacatattattagtgattggcatga

SEQ ID NO: 3729106 - DNA, 25 bp, Homo sapien
ttattagtgattggcatgattgtac

SEQ ID NO: 3729107 - DNA, 25 bp, Homo sapien
atattattagtgattggcatgattg

SEQ ID NO: 3729108 - DNA, 25 bp, Homo sapien
aaatgtggggcttgactgagtgaat

SEQ ID NO: 3729109 - DNA, 25 bp, Homo sapien
gccaaaggaaatgtggggcttgact

SEQ ID NO: 3729110 - DNA, 25 bp, Homo sapien
gatgttccaagatttgaggcataat

SEQ ID NO: 3729111 - DNA, 25 bp, Homo sapien
gagtgaatgaccttgctggaatggg

SEQ ID NO: 3729112 - DNA, 25 bp, Homo sapien
ttgcaatgccaacacgtagagggga

SEQ ID NO: 3729113 - DNA, 25 bp, Homo sapien
gagacatgctcttgtgagcttgtgt

SEQ ID NO: 3729114 - DNA, 25 bp, Homo sapien
ccaacacgtagaggggacagcacgt

SEQ ID NO: 3729115 - DNA, 25 bp, Homo sapien
acagcttactggcctgatgctttgc

SEQ ID NO: 3729116 - DNA, 25 bp, Homo sapien
tgcattcaattccatatgctggcaa

SEQ ID NO: 3729117 - DNA, 25 bp, Homo sapien
acatcaagccactgacaatgtaggg

SEQ ID NO: 3729118 - DNA, 25 bp, Homo sapien
cctcagataggcttgaggaggctca

SEQ ID NO: 3729119 - DNA, 25 bp, Homo sapien
ggaccagcgtctgacagaaggatgt

SEQ ID NO: 3729120 - DNA, 25 bp, Homo sapien
gtcaatgttctcgcatttcaggttt

SEQ ID NO: 3729121 - DNA, 25 bp, Homo sapien
ctcacttgtggaggaaaatgggatc

SEQ ID NO: 3729122 - DNA, 25 bp, Homo sapien
gtggaggaaaatgggatctctgtga

SEQ ID NO: 3729123 - DNA, 25 bp, Homo sapien
gaggaaaatgggatctctgtgaggg

SEQ ID NO: 3729124 - DNA, 25 bp, Homo sapien
tcacttgtggaggaaaatgggatct

SEQ ID NO: 3729125 - DNA, 25 bp, Homo sapien
tctcaactgaccctcaactcttttg

SEQ ID NO: 3729126 - DNA, 25 bp, Homo sapien
caactgaccctcaactcttttgtag

SEQ ID NO: 3729127 - DNA, 25 bp, Homo sapien
ggctgggtcccagacctctcaactg

SEQ ID NO: 3729128 - DNA, 25 bp, Homo sapien
atggctgggtcccagacctctcaac

SEQ ID NO: 3729129 - DNA, 25 bp, Homo sapien
tgcattttcacatgcgggggctgca

SEQ ID NO: 3729130 - DNA, 25 bp, Homo sapien
ggctgcacctttaaaaccagatggt

SEQ ID NO: 3729131 - DNA, 25 bp, Homo sapien
ttgagtgcccccacatgggatcggg

SEQ ID NO: 3729132 - DNA, 25 bp, Homo sapien
acctttaaaaccagatggtgctcct

SEQ ID NO: 3729133 - DNA, 25 bp, Homo sapien
gattagtcgacttcatgaggatgta

SEQ ID NO: 3729134 - DNA, 25 bp, Homo sapien
aggttaatgacgtcattctcagtgc

SEQ ID NO: 3729135 - DNA, 25 bp, Homo sapien
gggcagccccaggttaatgacgtca

SEQ ID NO: 3729136 - DNA, 25 bp, Homo sapien
gcttccttcagggagattgcagatg

SEQ ID NO: 3729137 - DNA, 25 bp, Homo sapien
acttctcaccattgatcacagcaga

SEQ ID NO: 3729138 - DNA, 25 bp, Homo sapien
taatactggaccatggcctgtgcag

SEQ ID NO: 3729139 - DNA, 25 bp, Homo sapien
gcagcttctgtgtaagccatctcta

SEQ ID NO: 3729140 - DNA, 25 bp, Homo sapien
tcttggacatccgaatgagcaactt

SEQ ID NO: 3729141 - DNA, 25 bp, Homo sapien
ccttgaaggtggattaaggcctgtg

SEQ ID NO: 3729142 - DNA, 25 bp, Homo sapien
gcctgtgggtcttagacaaaatgga

SEQ ID NO: 3729143 - DNA, 25 bp, Homo sapien
tccactaagcctttgtcttctaact

SEQ ID NO: 3729144 - DNA, 25 bp, Homo sapien
ctagccagaaacatccactaagcct

SEQ ID NO: 3729145 - DNA, 25 bp, Homo sapien
tgtctgcttcccggaacatgtccct

SEQ ID NO: 3729146 - DNA, 25 bp, Homo sapien
tctgggaatggatgtcctggatgat

SEQ ID NO: 3729147 - DNA, 25 bp, Homo sapien
tctccctctgggaatggatgtcctg

SEQ ID NO: 3729148 - DNA, 25 bp, Homo sapien
tgcttcccggaacatgtccctctcc

SEQ ID NO: 3729149 - DNA, 25 bp, Homo sapien
tacgagaccgcggcctttctgggcc

SEQ ID NO: 3729150 - DNA, 25 bp, Homo sapien
acgagaccgcggcctttctgggcca

SEQ ID NO: 3729151 - DNA, 25 bp, Homo sapien
cggactacgagaccgcggcctttct

SEQ ID NO: 3729152 - DNA, 25 bp, Homo sapien
actacgagaccgcggcctttctggg

SEQ ID NO: 3729153 - DNA, 25 bp, Homo sapien
agctgggagtgtgggacctcgggga

SEQ ID NO: 3729154 - DNA, 25 bp, Homo sapien
acctcggggagagtgaccggctcac

SEQ ID NO: 3729155 - DNA, 25 bp, Homo sapien
aagctgggagtgtgggacctcgggg

SEQ ID NO: 3729156 - DNA, 25 bp, Homo sapien
ggacctcggggagagtgaccggctc

SEQ ID NO: 3729157 - DNA, 25 bp, Homo sapien
cattgccccagtcagcccgggaggg

SEQ ID NO: 3729158 - DNA, 25 bp, Homo sapien
gccattgccccagtcagcccgggag

SEQ ID NO: 3729159 - DNA, 25 bp, Homo sapien
ccggccattgccccagtcagcccgg

SEQ ID NO: 3729160 - DNA, 25 bp, Homo sapien
attgccccagtcagcccgggagggg

SEQ ID NO: 3729161 - DNA, 25 bp, Homo sapien
ggtcgctcgtccaactcagccttgt

SEQ ID NO: 3729162 - DNA, 25 bp, Homo sapien
tggctttgggctctttccggtagta

SEQ ID NO: 3729163 - DNA, 25 bp, Homo sapien
gtcatctccgttgtccctccaggga

SEQ ID NO: 3729164 - DNA, 25 bp, Homo sapien
tcttcacggcttttgtagctggaca

SEQ ID NO: 3729165 - DNA, 25 bp, Homo sapien
ccagtaggatgtagcagtgtttctt

SEQ ID NO: 3729166 - DNA, 25 bp, Homo sapien
tgggcctgccactctcgaaccctcc

SEQ ID NO: 3729167 - DNA, 25 bp, Homo sapien
taggatgtagcagtgtttcttcccc

SEQ ID NO: 3729168 - DNA, 25 bp, Homo sapien
gtagcagtgtttcttccccatgttt

SEQ ID NO: 3729169 - DNA, 25 bp, Homo sapien
ccctgcaggcaaaggaaacaacctt

SEQ ID NO: 3729170 - DNA, 25 bp, Homo sapien
cagggacagtcttgctagccgggct

SEQ ID NO: 3729171 - DNA, 25 bp, Homo sapien
ccttcagttcgagttgggagaggca

SEQ ID NO: 3729172 - DNA, 25 bp, Homo sapien
gctgtgggatcacttccaggagaga

SEQ ID NO: 3729173 - DNA, 25 bp, Homo sapien
cccaaatcaggaccctcacagtagt

SEQ ID NO: 3729174 - DNA, 25 bp, Homo sapien
ccttgagtgatagcccaaactaaca

SEQ ID NO: 3729175 - DNA, 25 bp, Homo sapien
ccctcacagtagtgcgcatgtctgt

SEQ ID NO: 3729176 - DNA, 25 bp, Homo sapien
cctctgtccttgagtgatagcccaa

SEQ ID NO: 3729177 - DNA, 25 bp, Homo sapien
tgtccttgtgttttccggatcagag

SEQ ID NO: 3729178 - DNA, 25 bp, Homo sapien
gttttccggatcagagaactctgct

SEQ ID NO: 3729179 - DNA, 25 bp, Homo sapien
ctgtctgcccactgattgagggctt

SEQ ID NO: 3729180 - DNA, 25 bp, Homo sapien
gtctgcccactgattgagggctttc

SEQ ID NO: 3729181 - DNA, 25 bp, Homo sapien
tgcaatcatccacaaatgggcttgg

SEQ ID NO: 3729182 - DNA, 25 bp, Homo sapien
catgttagtgggataccagctctcc

SEQ ID NO: 3729183 - DNA, 25 bp, Homo sapien
gctcagcatccagatttaggccagg

SEQ ID NO: 3729184 - DNA, 25 bp, Homo sapien
caggtctaagtctaaggtggttgtc

SEQ ID NO: 3729185 - DNA, 25 bp, Homo sapien
cacccgtgaggaaaggggagatagt

SEQ ID NO: 3729186 - DNA, 25 bp, Homo sapien
ctctggttcccaagagggcaaagaa

SEQ ID NO: 3729187 - DNA, 25 bp, Homo sapien
ttcagtgtactctggtgacctcacc

SEQ ID NO: 3729188 - DNA, 25 bp, Homo sapien
ggaatgctaagttcactgaacacat

SEQ ID NO: 3729189 - DNA, 25 bp, Homo sapien
gctaagttcactgaacacatcctct

SEQ ID NO: 3729190 - DNA, 25 bp, Homo sapien
caggctgcggggcaagcctctcttc

SEQ ID NO: 3729191 - DNA, 25 bp, Homo sapien
tgagggctgtgagaagcaggaccca

SEQ ID NO: 3729192 - DNA, 25 bp, Homo sapien
ggacccatcagggaactaagaaaga

SEQ ID NO: 3729193 - DNA, 25 bp, Homo sapien
tggaacacccaatcccacttgcagg

SEQ ID NO: 3729194 - DNA, 25 bp, Homo sapien
tgctgtgaccgggactctcgaagaa

SEQ ID NO: 3729195 - DNA, 25 bp, Homo sapien
tgtgaccgggactctcgaagaattc

SEQ ID NO: 3729196 - DNA, 25 bp, Homo sapien
gggactctcgaagaattctctcgtt

SEQ ID NO: 3729197 - DNA, 25 bp, Homo sapien
gaccgggactctcgaagaattctct

SEQ ID NO: 3729198 - DNA, 25 bp, Homo sapien
taaaagccagtcctgggaaccacga

SEQ ID NO: 3729199 - DNA, 25 bp, Homo sapien
ttgctgtctcctcgctcgtgtagaa

SEQ ID NO: 3729200 - DNA, 25 bp, Homo sapien
cgctgcggcagtggctcatctttgc

SEQ ID NO: 3729201 - DNA, 25 bp, Homo sapien
tcctgtagtggacagcgctgcggca

SEQ ID NO: 3729202 - DNA, 25 bp, Homo sapien
gacatgtgctaggagcaacacagga

SEQ ID NO: 3729203 - DNA, 25 bp, Homo sapien
gaggtagccaccatgtcgagagcag

SEQ ID NO: 3729204 - DNA, 25 bp, Homo sapien
tagaacatccgagtcttgtgggaag

SEQ ID NO: 3729205 - DNA, 25 bp, Homo sapien
tcgagagcagcctgatggaatcaag

SEQ ID NO: 3729206 - DNA, 25 bp, Homo sapien
ctggcacgaggggcttaaccaatgt

SEQ ID NO: 3729207 - DNA, 25 bp, Homo sapien
agcaggtgcaccaggtaaagctaca

SEQ ID NO: 3729208 - DNA, 25 bp, Homo sapien
agaaatcctatctgggaagcctgtg

SEQ ID NO: 3729209 - DNA, 25 bp, Homo sapien
tgtcaaagccgctgacagaaatcct

SEQ ID NO: 3729210 - DNA, 25 bp, Homo sapien
gcaggtgcaccaggtaaagctacac

SEQ ID NO: 3729211 - DNA, 25 bp, Homo sapien
ctatctgccccctcggtctccttga

SEQ ID NO: 3729212 - DNA, 25 bp, Homo sapien
cctcggccagctgggacaaatattt

SEQ ID NO: 3729213 - DNA, 25 bp, Homo sapien
tatctgccccctcggtctccttgag

SEQ ID NO: 3729214 - DNA, 25 bp, Homo sapien
cctcctcggccagctgggacaaata

SEQ ID NO: 3729215 - DNA, 25 bp, Homo sapien
gattccgctgtcctctggcctcggg

SEQ ID NO: 3729216 - DNA, 25 bp, Homo sapien
gctttttcctttcgaagcgtggcac

SEQ ID NO: 3729217 - DNA, 25 bp, Homo sapien
agctttttcctttcgaagcgtggca

SEQ ID NO: 3729218 - DNA, 25 bp, Homo sapien
agagctttttcctttcgaagcgtgg

SEQ ID NO: 3729219 - DNA, 25 bp, Homo sapien
tcagagctttttcctttcgaagcgt

SEQ ID NO: 3729220 - DNA, 25 bp, Homo sapien
tcaggaaggccccacttcagcaagc

SEQ ID NO: 3729221 - DNA, 25 bp, Homo sapien
caggaaggccccacttcagcaagct

SEQ ID NO: 3729222 - DNA, 25 bp, Homo sapien
gggcatttcactgagtctctgggaa

SEQ ID NO: 3729223 - DNA, 25 bp, Homo sapien
tgagtctctgggaacaagcccaagc

SEQ ID NO: 3729224 - DNA, 25 bp, Homo sapien
acttgctcctggagacatatcaggg

SEQ ID NO: 3729225 - DNA, 25 bp, Homo sapien
caagcaatgtgccctgcttggtttt

SEQ ID NO: 3729226 - DNA, 25 bp, Homo sapien
tagctctccaatatgaaggccagtc

SEQ ID NO: 3729227 - DNA, 25 bp, Homo sapien
gactgtccaagaatgggaaaccctg

SEQ ID NO: 3729228 - DNA, 25 bp, Homo sapien
gaaaccctgatactaacggctgctg

SEQ ID NO: 3729229 - DNA, 25 bp, Homo sapien
tgtgcctctcgagccaaagctgtgc

SEQ ID NO: 3729230 - DNA, 25 bp, Homo sapien
ccagcccctccctgttgactcagga

SEQ ID NO: 3729231 - DNA, 25 bp, Homo sapien
ccaggaattgcaggcggccccctca

SEQ ID NO: 3729232 - DNA, 25 bp, Homo sapien
gcccctccctgttgactcaggagca

SEQ ID NO: 3729233 - DNA, 25 bp, Homo sapien
ggaattgcaggcggccccctcactt

SEQ ID NO: 3729234 - DNA, 25 bp, Homo sapien
aggctcagcaggaactttcctcaga

SEQ ID NO: 3729235 - DNA, 25 bp, Homo sapien
ctgagcttggtccaccatggccaca

SEQ ID NO: 3729236 - DNA, 25 bp, Homo sapien
ctcagcaggaactttcctcagacct

SEQ ID NO: 3729237 - DNA, 25 bp, Homo sapien
tggggcgcagacagcaacaggctca

SEQ ID NO: 3729238 - DNA, 25 bp, Homo sapien
atagcagttgcagaaaaggaggttt

SEQ ID NO: 3729239 - DNA, 25 bp, Homo sapien
ggccatctggggcatagatagcagt

SEQ ID NO: 3729240 - DNA, 25 bp, Homo sapien
gggcatagatagcagttgcagaaaa

SEQ ID NO: 3729241 - DNA, 25 bp, Homo sapien
catagatagcagttgcagaaaagga

SEQ ID NO: 3729242 - DNA, 25 bp, Homo sapien
cagctgccaccagccccttctgcca

SEQ ID NO: 3729243 - DNA, 25 bp, Homo sapien
caccagccccttctgccatggccat

SEQ ID NO: 3729244 - DNA, 25 bp, Homo sapien
tgccaccagccccttctgccatggc

SEQ ID NO: 3729245 - DNA, 25 bp, Homo sapien
gctgccaccagccccttctgccatg

SEQ ID NO: 3729246 - DNA, 25 bp, Homo sapien
cctcatggtacttgggcagaggtac

SEQ ID NO: 3729247 - DNA, 25 bp, Homo sapien
tgtgccagtcctcatggtacttggg

SEQ ID NO: 3729248 - DNA, 25 bp, Homo sapien
ctgctcctagagccagccagctgtg

SEQ ID NO: 3729249 - DNA, 25 bp, Homo sapien
gccagctgtgccagtcctcatggta

SEQ ID NO: 3729250 - DNA, 25 bp, Homo sapien
tgacaggatcatgcaagaagccagt

SEQ ID NO: 3729251 - DNA, 25 bp, Homo sapien
gctcaggaagaaatcgtgtgtcaac

SEQ ID NO: 3729252 - DNA, 25 bp, Homo sapien
tgtgtcaacacaggtgcagctgaag

SEQ ID NO: 3729253 - DNA, 25 bp, Homo sapien
tgagtgtgccatgccctttgctggg

SEQ ID NO: 3729254 - DNA, 25 bp, Homo sapien
cacaaaaaccgctgggaagggcttg

SEQ ID NO: 3729255 - DNA, 25 bp, Homo sapien
aaaccacagaagaagggcggcctca

SEQ ID NO: 3729256 - DNA, 25 bp, Homo sapien
tcagagctgctaaaggcctttcctt

SEQ ID NO: 3729257 - DNA, 25 bp, Homo sapien
ggcttcgttatttcccaactgagca

SEQ ID NO: 3729258 - DNA, 25 bp, Homo sapien
aagaaggaaacacaagtctgagcct

SEQ ID NO: 3729259 - DNA, 25 bp, Homo sapien
agaaggaaacacaagtctgagcctg

SEQ ID NO: 3729260 - DNA, 25 bp, Homo sapien
ttgtcttatccacagattttctgag

SEQ ID NO: 3729261 - DNA, 25 bp, Homo sapien
ctctgtaccgtttcctcagtggtaa

SEQ ID NO: 3729262 - DNA, 25 bp, Homo sapien
ttctgagaggacaaaaggcgattac

SEQ ID NO: 3729263 - DNA, 25 bp, Homo sapien
tagtcactgagtgatctagattgcc

SEQ ID NO: 3729264 - DNA, 25 bp, Homo sapien
ttctgcagcatgatgcctactgtct

SEQ ID NO: 3729265 - DNA, 25 bp, Homo sapien
tggatgaaaccgttcaagatttgca

SEQ ID NO: 3729266 - DNA, 25 bp, Homo sapien
gcagctgtcaatggctgccctttgt

SEQ ID NO: 3729267 - DNA, 25 bp, Homo sapien
aatgtgcagctgtcaatggctgccc

SEQ ID NO: 3729268 - DNA, 25 bp, Homo sapien
ccagtgtaggcaatgcaaacttctc

SEQ ID NO: 3729269 - DNA, 25 bp, Homo sapien
taaatactgccgaggccatttccct

SEQ ID NO: 3729270 - DNA, 25 bp, Homo sapien
tccctctgggagcagactcctgctg

SEQ ID NO: 3729271 - DNA, 25 bp, Homo sapien
cctctcgagtttccacttgggtcct

SEQ ID NO: 3729272 - DNA, 25 bp, Homo sapien
tatggttctctgcatgtgtcttgtc

SEQ ID NO: 3729273 - DNA, 25 bp, Homo sapien
catatggttctctgcatgtgtcttg

SEQ ID NO: 3729274 - DNA, 25 bp, Homo sapien
ccatatggttctctgcatgtgtctt

SEQ ID NO: 3729275 - DNA, 25 bp, Homo sapien
tggttctctgcatgtgtcttgtcct

SEQ ID NO: 3729276 - DNA, 25 bp, Homo sapien
ggtaggcatcccgagttctatgaga

SEQ ID NO: 3729277 - DNA, 25 bp, Homo sapien
tctcaagcagtacccatgatggctg

SEQ ID NO: 3729278 - DNA, 25 bp, Homo sapien
cccattagggaggaaaacgttcatg

SEQ ID NO: 3729279 - DNA, 25 bp, Homo sapien
cactcaggaaatagggttgtcgtcc

SEQ ID NO: 3729280 - DNA, 25 bp, Homo sapien
tcgcccaggttcctggtcagccggc

SEQ ID NO: 3729281 - DNA, 25 bp, Homo sapien
accccgctcttctgtctctgccgcc

SEQ ID NO: 3729282 - DNA, 25 bp, Homo sapien
tctacccagtaacacgggggcgaga

SEQ ID NO: 3729283 - DNA, 25 bp, Homo sapien
gagagggcggcgcttattggccgag

SEQ ID NO: 3729284 - DNA, 25 bp, Homo sapien
tggctacgtagcgagttctcacaag

SEQ ID NO: 3729285 - DNA, 25 bp, Homo sapien
tattatacagaaggcattccgtcag

SEQ ID NO: 3729286 - DNA, 25 bp, Homo sapien
tttaggcaatgataacccgatcagg

SEQ ID NO: 3729287 - DNA, 25 bp, Homo sapien
cctgggactcaaaggtgaaactgac

SEQ ID NO: 3729288 - DNA, 25 bp, Homo sapien
acctaatggaaatcttccttcagaa

SEQ ID NO: 3729289 - DNA, 25 bp, Homo sapien
ctgcagggtttacattcagtatctg

SEQ ID NO: 3729290 - DNA, 25 bp, Homo sapien
ttcagtatctgctcattttctacat

SEQ ID NO: 3729291 - DNA, 25 bp, Homo sapien
cagtatctgctcattttctacatcc

SEQ ID NO: 3729292 - DNA, 25 bp, Homo sapien
gtatctgctcattttctacatccat

SEQ ID NO: 3729293 - DNA, 25 bp, Homo sapien
ataccaaagataccagtaagtttat

SEQ ID NO: 3729294 - DNA, 25 bp, Homo sapien
tatattacagaaatcactaactagc

SEQ ID NO: 3729295 - DNA, 25 bp, Homo sapien
caaagataccagtaagtttatatta

SEQ ID NO: 3729296 - DNA, 25 bp, Homo sapien
ttatattacagaaatcactaactag

SEQ ID NO: 3729297 - DNA, 25 bp, Homo sapien
tattgaagcaccatggagaattagg

SEQ ID NO: 3729298 - DNA, 25 bp, Homo sapien
gataataacatgctattgaagcacc

SEQ ID NO: 3729299 - DNA, 25 bp, Homo sapien
catgctattgaagcaccatggagaa

SEQ ID NO: 3729300 - DNA, 25 bp, Homo sapien
ataacatgctattgaagcaccatgg

SEQ ID NO: 3729301 - DNA, 25 bp, Homo sapien
taaccctaaagcatactcatacagc

SEQ ID NO: 3729302 - DNA, 25 bp, Homo sapien
cagctattgtatacagcagcacaga

SEQ ID NO: 3729303 - DNA, 25 bp, Homo sapien
tccccatctcaattaagtaggtaca

SEQ ID NO: 3729304 - DNA, 25 bp, Homo sapien
catgtggctaagcacagtggtgcac

SEQ ID NO: 3729305 - DNA, 25 bp, Homo sapien
tccaattgtatatgaccacagcacc

SEQ ID NO: 3729306 - DNA, 25 bp, Homo sapien
gatatctcaatagtaaccactccaa

SEQ ID NO: 3729307 - DNA, 25 bp, Homo sapien
catacctagtatgtgcttcacagac

SEQ ID NO: 3729308 - DNA, 25 bp, Homo sapien
caattactggtgtccaatgagtggc

SEQ ID NO: 3729309 - DNA, 25 bp, Homo sapien
taaggtcctttatgatcttgcccct

SEQ ID NO: 3729310 - DNA, 25 bp, Homo sapien
ggtgtgtttgggacatcatcataac

SEQ ID NO: 3729311 - DNA, 25 bp, Homo sapien
tcatctattagataccaggttccac

SEQ ID NO: 3729312 - DNA, 25 bp, Homo sapien
tcaaactggtaagaagccggtgtta

SEQ ID NO: 3729313 - DNA, 25 bp, Homo sapien
ggagaaaccacaactagactgtatg

SEQ ID NO: 3729314 - DNA, 25 bp, Homo sapien
ggagttcccagtagaatgtcgccct

SEQ ID NO: 3729315 - DNA, 25 bp, Homo sapien
ggtacaggaacactaattgctcaca

SEQ ID NO: 3729316 - DNA, 25 bp, Homo sapien
gatatagcccaagtcttactccctg

SEQ ID NO: 3729317 - DNA, 25 bp, Homo sapien
gctgaactgctgatgctttactgcc

SEQ ID NO: 3729318 - DNA, 25 bp, Homo sapien
gatttgccaaacgtcccataactag

SEQ ID NO: 3729319 - DNA, 25 bp, Homo sapien
caaagtcctaattcatctccctaaa

SEQ ID NO: 3729320 - DNA, 25 bp, Homo sapien
tttactgcctcaagacaaagtttgc

SEQ ID NO: 3729321 - DNA, 25 bp, Homo sapien
accggaaaagagagagtcacttaag

SEQ ID NO: 3729322 - DNA, 25 bp, Homo sapien
cggaaaagagagagtcacttaagtt

SEQ ID NO: 3729323 - DNA, 25 bp, Homo sapien
ccggaaaagagagagtcacttaagt

SEQ ID NO: 3729324 - DNA, 25 bp, Homo sapien
ttctagcttcgttaatggaggatgc

SEQ ID NO: 3729325 - DNA, 25 bp, Homo sapien
ccttccctttggactggttggcaca

SEQ ID NO: 3729326 - DNA, 25 bp, Homo sapien
aatccacttctaagggcgtcactcc

SEQ ID NO: 3729327 - DNA, 25 bp, Homo sapien
tcccagatctggatcgcctatccag

SEQ ID NO: 3729328 - DNA, 25 bp, Homo sapien
cacctgtccaggtgtaccccagaca

SEQ ID NO: 3729329 - DNA, 25 bp, Homo sapien
catcatagttaggatctttcacatc

SEQ ID NO: 3729330 - DNA, 25 bp, Homo sapien
caggtgtaccccagacacctttgcc

SEQ ID NO: 3729331 - DNA, 25 bp, Homo sapien
tcatcatagttaggatctttcacat

SEQ ID NO: 3729332 - DNA, 25 bp, Homo sapien
cagacatggtagcttgcccctgtag

SEQ ID NO: 3729333 - DNA, 25 bp, Homo sapien
caacttgtgactggcttcagcctaa

SEQ ID NO: 3729334 - DNA, 25 bp, Homo sapien
tacacgctggacaacggaatggctc

SEQ ID NO: 3729335 - DNA, 25 bp, Homo sapien
cagctaccatgtgacgaatgcacga

SEQ ID NO: 3729336 - DNA, 25 bp, Homo sapien
caaaatattcctgtatgattggtgt

SEQ ID NO: 3729337 - DNA, 25 bp, Homo sapien
tgattggtgttaaagtcttctcaaa

SEQ ID NO: 3729338 - DNA, 25 bp, Homo sapien
cgcaacttcattagtatctccatgc

SEQ ID NO: 3729339 - DNA, 25 bp, Homo sapien
tatctccatgctcaaaatattcctg

SEQ ID NO: 3729340 - DNA, 25 bp, Homo sapien
gtcatctctctatgactagccttcc

SEQ ID NO: 3729341 - DNA, 25 bp, Homo sapien
caacactggtactccacttttcatt

SEQ ID NO: 3729342 - DNA, 25 bp, Homo sapien
ctccaatgctaaggatactgccaac

SEQ ID NO: 3729343 - DNA, 25 bp, Homo sapien
cagttgtgctcattactgtcccaca

SEQ ID NO: 3729344 - DNA, 25 bp, Homo sapien
ggtagatctttcaacaatttatcaa

SEQ ID NO: 3729345 - DNA, 25 bp, Homo sapien
ctgtggtgctctaggagtatccagt

SEQ ID NO: 3729346 - DNA, 25 bp, Homo sapien
gctaattcaggtagatctttcaaca

SEQ ID NO: 3729347 - DNA, 25 bp, Homo sapien
gagtatccagtgctaattcaggtag

SEQ ID NO: 3729348 - DNA, 25 bp, Homo sapien
gctctagcaataaactggcccacca

SEQ ID NO: 3729349 - DNA, 25 bp, Homo sapien
gttcctttgtaactatcaatatagg

SEQ ID NO: 3729350 - DNA, 25 bp, Homo sapien
tacataaaattccatctccaacagc

SEQ ID NO: 3729351 - DNA, 25 bp, Homo sapien
tagcctgcacacaatctacagttcc

SEQ ID NO: 3729352 - DNA, 25 bp, Homo sapien
gggacaccattccactatgatgtga

SEQ ID NO: 3729353 - DNA, 25 bp, Homo sapien
gaggaaaactaagacatggctgagt

SEQ ID NO: 3729354 - DNA, 25 bp, Homo sapien
agtccaagtctccaagaagttaaga

SEQ ID NO: 3729355 - DNA, 25 bp, Homo sapien
ttaagtttgatagctggacatacct

SEQ ID NO: 3729356 - DNA, 25 bp, Homo sapien
tttagacatactcagaagcacggta

SEQ ID NO: 3729357 - DNA, 25 bp, Homo sapien
tagacatactcagaagcacggtagc

SEQ ID NO: 3729358 - DNA, 25 bp, Homo sapien
ttagacatactcagaagcacggtag

SEQ ID NO: 3729359 - DNA, 25 bp, Homo sapien
ctttagacatactcagaagcacggt

SEQ ID NO: 3729360 - DNA, 25 bp, Homo sapien
attgacagattgctgcccacctcca

SEQ ID NO: 3729361 - DNA, 25 bp, Homo sapien
tctttaacaaggtgattgacagatt

SEQ ID NO: 3729362 - DNA, 25 bp, Homo sapien
cacacactatctttacgctttccac

SEQ ID NO: 3729363 - DNA, 25 bp, Homo sapien
agccccacacactatctttacgctt

SEQ ID NO: 3729364 - DNA, 25 bp, Homo sapien
tccaattgcagctgtaagaccgaac

SEQ ID NO: 3729365 - DNA, 25 bp, Homo sapien
tgtccataaaaataccagctagtag

SEQ ID NO: 3729366 - DNA, 25 bp, Homo sapien
gatctgctctagtgctcataattca

SEQ ID NO: 3729367 - DNA, 25 bp, Homo sapien
cctttgaagttcatagatggcttgc

SEQ ID NO: 3729368 - DNA, 25 bp, Homo sapien
ttcttgttataggacaccacattgc

SEQ ID NO: 3729369 - DNA, 25 bp, Homo sapien
aaaatcagaagcacatgaactacaa

SEQ ID NO: 3729370 - DNA, 25 bp, Homo sapien
aaaatccatagggaataaatctggc

SEQ ID NO: 3729371 - DNA, 25 bp, Homo sapien
agatctgcagataaggagttttttc

SEQ ID NO: 3729372 - DNA, 25 bp, Homo sapien
gaccataatgctctagtgtgccact

SEQ ID NO: 3729373 - DNA, 25 bp, Homo sapien
cattactagagagggcaaagatttc

SEQ ID NO: 3729374 - DNA, 25 bp, Homo sapien
catagtcatgcatcgtttaacaggg

SEQ ID NO: 3729375 - DNA, 25 bp, Homo sapien
taaaatatcgtgcttgcctacagga

SEQ ID NO: 3729376 - DNA, 25 bp, Homo sapien
atgttcagcttcagatatgtctcca

SEQ ID NO: 3729377 - DNA, 25 bp, Homo sapien
aatgaggtacttccagttccttaag

SEQ ID NO: 3729378 - DNA, 25 bp, Homo sapien
caagctcatggtgaaaatgaggtac

SEQ ID NO: 3729379 - DNA, 25 bp, Homo sapien
ttcagcttcagatatgtctccagag

SEQ ID NO: 3729380 - DNA, 25 bp, Homo sapien
tctacagtaatggtagaagacttcc

SEQ ID NO: 3729381 - DNA, 25 bp, Homo sapien
atttggtctacagtaatggtagaag

SEQ ID NO: 3729382 - DNA, 25 bp, Homo sapien
taatggtagaagacttccaaaggga

SEQ ID NO: 3729383 - DNA, 25 bp, Homo sapien
cagtaatggtagaagacttccaaag

SEQ ID NO: 3729384 - DNA, 25 bp, Homo sapien
tactatatttactacctgagggaca

SEQ ID NO: 3729385 - DNA, 25 bp, Homo sapien
gctgtaagcagacatcagacattgg

SEQ ID NO: 3729386 - DNA, 25 bp, Homo sapien
acatcttagaaaccgaacccttgag

SEQ ID NO: 3729387 - DNA, 25 bp, Homo sapien
aacctgtacatatacccctctgata

SEQ ID NO: 3729388 - DNA, 25 bp, Homo sapien
cctgtagaaagtggttcggagattt

SEQ ID NO: 3729389 - DNA, 25 bp, Homo sapien
agaaagtggttcggagatttctcaa

SEQ ID NO: 3729390 - DNA, 25 bp, Homo sapien
tagaaagtggttcggagatttctca

SEQ ID NO: 3729391 - DNA, 25 bp, Homo sapien
ctgtagaaagtggttcggagatttc

SEQ ID NO: 3729392 - DNA, 25 bp, Homo sapien
tctacaaaccgctccagcacagagt

SEQ ID NO: 3729393 - DNA, 25 bp, Homo sapien
catccagattaatgtccggaatttc

SEQ ID NO: 3729394 - DNA, 25 bp, Homo sapien
gagttgtttggaaattattccagcc

SEQ ID NO: 3729395 - DNA, 25 bp, Homo sapien
cagagtatgaatgtgggacatccag

SEQ ID NO: 3729396 - DNA, 25 bp, Homo sapien
tcatgtgacccttgagaataaagcc

SEQ ID NO: 3729397 - DNA, 25 bp, Homo sapien
cctacatgtagtggcaatagcccag

SEQ ID NO: 3729398 - DNA, 25 bp, Homo sapien
tggccagtggcctaaagcagtaagt

SEQ ID NO: 3729399 - DNA, 25 bp, Homo sapien
gatgaaggacccaagtcaaagctgt

SEQ ID NO: 3729400 - DNA, 25 bp, Homo sapien
ttctgactatagtcaatatataaaa

SEQ ID NO: 3729401 - DNA, 25 bp, Homo sapien
aacagatacaaattctgactatagt

SEQ ID NO: 3729402 - DNA, 25 bp, Homo sapien
aaacagatacaaattctgactatag

SEQ ID NO: 3729403 - DNA, 25 bp, Homo sapien
catctccttcgcttacaaaacgctt

SEQ ID NO: 3729404 - DNA, 25 bp, Homo sapien
tggtttaagacgacctccatctcct

SEQ ID NO: 3729405 - DNA, 25 bp, Homo sapien
ctctctggtttaagacgacctccat

SEQ ID NO: 3729406 - DNA, 25 bp, Homo sapien
tctccttcgcttacaaaacgctttc

SEQ ID NO: 3729407 - DNA, 25 bp, Homo sapien
catggcacttacaaaaggtagctta

SEQ ID NO: 3729408 - DNA, 25 bp, Homo sapien
ggtgtacattcttctagaaccaggt

SEQ ID NO: 3729409 - DNA, 25 bp, Homo sapien
aagcacagtatctcaacagcagcag

SEQ ID NO: 3729410 - DNA, 25 bp, Homo sapien
taagaccaatcagtatgttccctgg

SEQ ID NO: 3729411 - DNA, 25 bp, Homo sapien
tcatacattaggtaaatgtcaagct

SEQ ID NO: 3729412 - DNA, 25 bp, Homo sapien
ctctaggtcagataacaatggagta

SEQ ID NO: 3729413 - DNA, 25 bp, Homo sapien
ttgactaggttcaaatatgcttcct

SEQ ID NO: 3729414 - DNA, 25 bp, Homo sapien
ggtctctggagtataactttttgta

SEQ ID NO: 3729415 - DNA, 25 bp, Homo sapien
taaattagcacagacgttgaggcct

SEQ ID NO: 3729416 - DNA, 25 bp, Homo sapien
tatcttgtgtgaccagatcccacca

SEQ ID NO: 3729417 - DNA, 25 bp, Homo sapien
tcacctattctgtagtcagctaagc

SEQ ID NO: 3729418 - DNA, 25 bp, Homo sapien
gcccaaacgagagcaatggcaccat

SEQ ID NO: 3729419 - DNA, 25 bp, Homo sapien
gcactttagggaacaacctgcctta

SEQ ID NO: 3729420 - DNA, 25 bp, Homo sapien
tacaattcgccaacaagaaatggca

SEQ ID NO: 3729421 - DNA, 25 bp, Homo sapien
tcaagcagcacagaatacaattcgc

SEQ ID NO: 3729422 - DNA, 25 bp, Homo sapien
gaaatggcagaaaaggatcaacggc

SEQ ID NO: 3729423 - DNA, 25 bp, Homo sapien
tgttctaggcaatactggtcccatg

SEQ ID NO: 3729424 - DNA, 25 bp, Homo sapien
cattgccctaggaatacaaagtgtg

SEQ ID NO: 3729425 - DNA, 25 bp, Homo sapien
tgccatattgaaagtgacattgccc

SEQ ID NO: 3729426 - DNA, 25 bp, Homo sapien
caagaaagactaagggcttcgctaa

SEQ ID NO: 3729427 - DNA, 25 bp, Homo sapien
tctgtacctgacacaattgctccct

SEQ ID NO: 3729428 - DNA, 25 bp, Homo sapien
ggatcctcaagcctagagactatgc

SEQ ID NO: 3729429 - DNA, 25 bp, Homo sapien
tgttgttacctgcacctaaagttcc

SEQ ID NO: 3729430 - DNA, 25 bp, Homo sapien
tatgcttcttcgcttatgtgcctgt

SEQ ID NO: 3729431 - DNA, 25 bp, Homo sapien
cagtcgtctgtgatcatttccttat

SEQ ID NO: 3729432 - DNA, 25 bp, Homo sapien
gaaggtggaggatgtttgaatctca

SEQ ID NO: 3729433 - DNA, 25 bp, Homo sapien
gttagctcacttcagtcgtctgtga

SEQ ID NO: 3729434 - DNA, 25 bp, Homo sapien
gctcacttcagtcgtctgtgatcat

SEQ ID NO: 3729435 - DNA, 25 bp, Homo sapien
ttccggtatgaattaatatgggtat

SEQ ID NO: 3729436 - DNA, 25 bp, Homo sapien
ttaatatgggtatatccacaatcat

SEQ ID NO: 3729437 - DNA, 25 bp, Homo sapien
ctcatctgtgtttccggtatgaatt

SEQ ID NO: 3729438 - DNA, 25 bp, Homo sapien
tccggtatgaattaatatgggtata

SEQ ID NO: 3729439 - DNA, 25 bp, Homo sapien
tcttgcagttgaaacgaaggctcag

SEQ ID NO: 3729440 - DNA, 25 bp, Homo sapien
tttgagtaaggcagacccgagttca

SEQ ID NO: 3729441 - DNA, 25 bp, Homo sapien
actactgtacagttgactctgggcc

SEQ ID NO: 3729442 - DNA, 25 bp, Homo sapien
gaatggcatcaaacatgacaactgg

SEQ ID NO: 3729443 - DNA, 25 bp, Homo sapien
cacacggaatcctaggatatgctca

SEQ ID NO: 3729444 - DNA, 25 bp, Homo sapien
caaatactagattaaggagacttag

SEQ ID NO: 3729445 - DNA, 25 bp, Homo sapien
gacaggttaggagtagtaggcacat

SEQ ID NO: 3729446 - DNA, 25 bp, Homo sapien
ggtctgtacaattagcataagctga

SEQ ID NO: 3729447 - DNA, 25 bp, Homo sapien
tgcacataagggagcagaagaaaat

SEQ ID NO: 3729448 - DNA, 25 bp, Homo sapien
tagttgcttcctttgtgtagaaggg

SEQ ID NO: 3729449 - DNA, 25 bp, Homo sapien
taccaattaagatcacaggttttag

SEQ ID NO: 3729450 - DNA, 25 bp, Homo sapien
gatgaccttggacagcctactcact

SEQ ID NO: 3729451 - DNA, 25 bp, Homo sapien
tgttaggcaagacacccttaagatt

SEQ ID NO: 3729452 - DNA, 25 bp, Homo sapien
gcagacacttattgttaggcaagac

SEQ ID NO: 3729453 - DNA, 25 bp, Homo sapien
cacttattgttaggcaagacaccct

SEQ ID NO: 3729454 - DNA, 25 bp, Homo sapien
tattgttaggcaagacacccttaag

SEQ ID NO: 3729455 - DNA, 25 bp, Homo sapien
cccctgtgaagtctttctgacatga

SEQ ID NO: 3729456 - DNA, 25 bp, Homo sapien
tgaaagtgttcatatatttaaaagc

SEQ ID NO: 3729457 - DNA, 25 bp, Homo sapien
tccccagtgttttattatgaaagtg

SEQ ID NO: 3729458 - DNA, 25 bp, Homo sapien
gtgaagtctttctgacatgattttt

SEQ ID NO: 3729459 - DNA, 25 bp, Homo sapien
ttacccgtggagatgtgtttccaga

SEQ ID NO: 3729460 - DNA, 25 bp, Homo sapien
tctgttacccgtggagatgtgtttc

SEQ ID NO: 3729461 - DNA, 25 bp, Homo sapien
atctgattctgttacccgtggagat

SEQ ID NO: 3729462 - DNA, 25 bp, Homo sapien
agatgtgtttccagattcttcccag

SEQ ID NO: 3729463 - DNA, 25 bp, Homo sapien
cacgccagccaaaatgaactactct

SEQ ID NO: 3729464 - DNA, 25 bp, Homo sapien
ttagtacttacacgccagccaaaat

SEQ ID NO: 3729465 - DNA, 25 bp, Homo sapien
tttctgcttccttagtacttacacg

SEQ ID NO: 3729466 - DNA, 25 bp, Homo sapien
tgcttccttagtacttacacgccag

SEQ ID NO: 3729467 - DNA, 25 bp, Homo sapien
gggattcctgcaggtctacagtttc

SEQ ID NO: 3729468 - DNA, 25 bp, Homo sapien
tcttctgtatgcttgagtcaagaac

SEQ ID NO: 3729469 - DNA, 25 bp, Homo sapien
gtcatcttggtaataccgggttgga

SEQ ID NO: 3729470 - DNA, 25 bp, Homo sapien
tacaaagttatcatacattatcttg

SEQ ID NO: 3729471 - DNA, 25 bp, Homo sapien
gctaaggcggccataactgataatg

SEQ ID NO: 3729472 - DNA, 25 bp, Homo sapien
ttttccttcgccagtctcaccgtta

SEQ ID NO: 3729473 - DNA, 25 bp, Homo sapien
tccccgatcggaagttactgttgaa

SEQ ID NO: 3729474 - DNA, 25 bp, Homo sapien
agggtagagtgacaactccccgatc

SEQ ID NO: 3729475 - DNA, 25 bp, Homo sapien
cctcctcctaagaagcgacgctgcc

SEQ ID NO: 3729476 - DNA, 25 bp, Homo sapien
cctaagaagcgacgctgcccaaccg

SEQ ID NO: 3729477 - DNA, 25 bp, Homo sapien
tcctcctaagaagcgacgctgccca

SEQ ID NO: 3729478 - DNA, 25 bp, Homo sapien
tccgccatcctcctcgctcgccctc

SEQ ID NO: 3729479 - DNA, 25 bp, Homo sapien
tgcgcccgggccctcgccaacgatt

SEQ ID NO: 3729480 - DNA, 25 bp, Homo sapien
ggagagagactgtccgccgggggcc

SEQ ID NO: 3729481 - DNA, 25 bp, Homo sapien
tcgccaacgatttacacgactcggg

SEQ ID NO: 3729482 - DNA, 25 bp, Homo sapien
atttacacgactcggggcgccctgc

SEQ ID NO: 3729483 - DNA, 25 bp, Homo sapien
ggaataccgttaacaacacactgat

SEQ ID NO: 3729484 - DNA, 25 bp, Homo sapien
caatgtgacctaggcaaaagctaca

SEQ ID NO: 3729485 - DNA, 25 bp, Homo sapien
caagagataggagctacagtgagcc

SEQ ID NO: 3729486 - DNA, 25 bp, Homo sapien
tcgggagggctacaagatttccaaa

SEQ ID NO: 3729487 - DNA, 25 bp, Homo sapien
caggtcttcctttgagacgagcaag

SEQ ID NO: 3729488 - DNA, 25 bp, Homo sapien
gcagaaggagcacacataaaggtag

SEQ ID NO: 3729489 - DNA, 25 bp, Homo sapien
cagggagataataggcaggtcttcc

SEQ ID NO: 3729490 - DNA, 25 bp, Homo sapien
taagagggcctggataagtaccaac

SEQ ID NO: 3729491 - DNA, 25 bp, Homo sapien
tcttccatcaatgaagacataggtt

SEQ ID NO: 3729492 - DNA, 25 bp, Homo sapien
tcaccaatatcaggatttcctagat

SEQ ID NO: 3729493 - DNA, 25 bp, Homo sapien
tttgaaggctgaacgtcacattttc

SEQ ID NO: 3729494 - DNA, 25 bp, Homo sapien
atcagatcatgtcaccaatatcagg

SEQ ID NO: 3729495 - DNA, 25 bp, Homo sapien
taaaagcactatgcccatttctgat

SEQ ID NO: 3729496 - DNA, 25 bp, Homo sapien
agtactggcttgaagaagtaatcag

SEQ ID NO: 3729497 - DNA, 25 bp, Homo sapien
gagacaaagatcctacacaatcaaa

SEQ ID NO: 3729498 - DNA, 25 bp, Homo sapien
taacatccatctgttacatgttgga

SEQ ID NO: 3729499 - DNA, 25 bp, Homo sapien
gccgtttgatcgtattgtcaactga

SEQ ID NO: 3729500 - DNA, 25 bp, Homo sapien
tcccaaaacctccagaggcttttgc

SEQ ID NO: 3729501 - DNA, 25 bp, Homo sapien
ctgaaaatgccacccctggttgggc

SEQ ID NO: 3729502 - DNA, 25 bp, Homo sapien
ccaggtgctgggtttggccgtttga

SEQ ID NO: 3729503 - DNA, 25 bp, Homo sapien
ggagggactgcaatttgttactgta

SEQ ID NO: 3729504 - DNA, 25 bp, Homo sapien
aaagttctgttaattgagtcaactc

SEQ ID NO: 3729505 - DNA, 25 bp, Homo sapien
tcttggataagtccaaacgcattga

SEQ ID NO: 3729506 - DNA, 25 bp, Homo sapien
gcaatatgtgtatagatctcttgga

SEQ ID NO: 3729507 - DNA, 25 bp, Homo sapien
gaatccagcctatacaccactgaag

SEQ ID NO: 3729508 - DNA, 25 bp, Homo sapien
ttcaagttatcaagagagtcaggca

SEQ ID NO: 3729509 - DNA, 25 bp, Homo sapien
gaattttcacttagagccagtgtca

SEQ ID NO: 3729510 - DNA, 25 bp, Homo sapien
tgccgtaaatcaagcatccgcagct

SEQ ID NO: 3729511 - DNA, 25 bp, Homo sapien
taacagtgctgcattcactacaggt

SEQ ID NO: 3729512 - DNA, 25 bp, Homo sapien
tgtttttaggcaagtatcaggcatt

SEQ ID NO: 3729513 - DNA, 25 bp, Homo sapien
cactacaggtgacgtttcttctacc

SEQ ID NO: 3729514 - DNA, 25 bp, Homo sapien
tttgtaaggctctgatttgtcaacc

SEQ ID NO: 3729515 - DNA, 25 bp, Homo sapien
ttcaaacaagaagaataagcatcta

SEQ ID NO: 3729516 - DNA, 25 bp, Homo sapien
cttgatcattgagcacaggtcttat

SEQ ID NO: 3729517 - DNA, 25 bp, Homo sapien
aattccctgttatgggtttctgcag

SEQ ID NO: 3729518 - DNA, 25 bp, Homo sapien
aactggatggcatgatttaaagtga

SEQ ID NO: 3729519 - DNA, 25 bp, Homo sapien
ggttcttgactgtctttgtatagag

SEQ ID NO: 3729520 - DNA, 25 bp, Homo sapien
tctttgtatagagtgaagagtcttt

SEQ ID NO: 3729521 - DNA, 25 bp, Homo sapien
ctctgaaaacatgggttcttgactg

SEQ ID NO: 3729522 - DNA, 25 bp, Homo sapien
catgggttcttgactgtctttgtat

SEQ ID NO: 3729523 - DNA, 25 bp, Homo sapien
tcacattgtaaaccacaaataggta

SEQ ID NO: 3729524 - DNA, 25 bp, Homo sapien
tattttgacaactagacccacatga

SEQ ID NO: 3729525 - DNA, 25 bp, Homo sapien
ggttattttgacaactagacccaca

SEQ ID NO: 3729526 - DNA, 25 bp, Homo sapien
ttgacaactagacccacatgaaatt

SEQ ID NO: 3729527 - DNA, 25 bp, Homo sapien
tactgagcttgggttgatagagaag

SEQ ID NO: 3729528 - DNA, 25 bp, Homo sapien
actcacacacttggatgtctcagca

SEQ ID NO: 3729529 - DNA, 25 bp, Homo sapien
gcccagtacctgtctagtgagtagg

SEQ ID NO: 3729530 - DNA, 25 bp, Homo sapien
tctctgatccgaagatactgagctt

SEQ ID NO: 3729531 - DNA, 25 bp, Homo sapien
tatgtcaggaacttaagacacaaaa

SEQ ID NO: 3729532 - DNA, 25 bp, Homo sapien
gaaatgaattaacaccgattttatg

SEQ ID NO: 3729533 - DNA, 25 bp, Homo sapien
gtctctcatgagatttctatgtcag

SEQ ID NO: 3729534 - DNA, 25 bp, Homo sapien
caccgattttatgcaatgtcttcca

SEQ ID NO: 3729535 - DNA, 25 bp, Homo sapien
tggttgaaagctctgtattggcaat

SEQ ID NO: 3729536 - DNA, 25 bp, Homo sapien
gcttctcaatttactaggactctaa

SEQ ID NO: 3729537 - DNA, 25 bp, Homo sapien
cagaaaagcacaaactacagaactc

SEQ ID NO: 3729538 - DNA, 25 bp, Homo sapien
taggaggtctagcagttcactgtgt

SEQ ID NO: 3729539 - DNA, 25 bp, Homo sapien
tacatccagcgtaatgaggttacat

SEQ ID NO: 3729540 - DNA, 25 bp, Homo sapien
agttgattgtgagctacatccagcg

SEQ ID NO: 3729541 - DNA, 25 bp, Homo sapien
tgggaggtctagcagttcattgtgc

SEQ ID NO: 3729542 - DNA, 25 bp, Homo sapien
gctgcaagtcaaggttggttatctg

SEQ ID NO: 3729543 - DNA, 25 bp, Homo sapien
tcaatatctcctttctcctctcata

SEQ ID NO: 3729544 - DNA, 25 bp, Homo sapien
caatatctcctttctcctctcatac

SEQ ID NO: 3729545 - DNA, 25 bp, Homo sapien
aaaatagtcctattaatatccagtt

SEQ ID NO: 3729546 - DNA, 25 bp, Homo sapien
taatatccagttagctattaacagc

SEQ ID NO: 3729547 - DNA, 25 bp, Homo sapien
aatatccagttagctattaacagct

SEQ ID NO: 3729548 - DNA, 25 bp, Homo sapien
tggatcaaaaatagtcctattaata

SEQ ID NO: 3729549 - DNA, 25 bp, Homo sapien
ggtataaatttatgggcaatcggaa

SEQ ID NO: 3729550 - DNA, 25 bp, Homo sapien
taaacattatagtatccttatacca

SEQ ID NO: 3729551 - DNA, 25 bp, Homo sapien
gcaatttggctaagtctataaaaca

SEQ ID NO: 3729552 - DNA, 25 bp, Homo sapien
catatcacagctcaattcaattttt

SEQ ID NO: 3729553 - DNA, 25 bp, Homo sapien
gaagtgatcccctctctactaggta

SEQ ID NO: 3729554 - DNA, 25 bp, Homo sapien
tagtaatacgatagtgtcatgggcc

SEQ ID NO: 3729555 - DNA, 25 bp, Homo sapien
gagtcaaaatctagggcctgccaag

SEQ ID NO: 3729556 - DNA, 25 bp, Homo sapien
tactaggtacccaacagaggcagac

SEQ ID NO: 3729557 - DNA, 25 bp, Homo sapien
ccgagtggcctgttttgtcagggcg

SEQ ID NO: 3729558 - DNA, 25 bp, Homo sapien
acgtccccaccagagcacctagata

SEQ ID NO: 3729559 - DNA, 25 bp, Homo sapien
cgagtgggttgccaatgctggctcc

SEQ ID NO: 3729560 - DNA, 25 bp, Homo sapien
agttagatacagagtttcgacacac

SEQ ID NO: 3729561 - DNA, 25 bp, Homo sapien
ttcttccatactgagtccaatgcat

SEQ ID NO: 3729562 - DNA, 25 bp, Homo sapien
ttttcttccatactgagtccaatgc

SEQ ID NO: 3729563 - DNA, 25 bp, Homo sapien
tttcttccatactgagtccaatgca

SEQ ID NO: 3729564 - DNA, 25 bp, Homo sapien
cttcatgctgtttgactgtcctcac

SEQ ID NO: 3729565 - DNA, 25 bp, Homo sapien
tcactgttgtgctcatggactgcat

SEQ ID NO: 3729566 - DNA, 25 bp, Homo sapien
ttcatgctgtttgactgtcctcact

SEQ ID NO: 3729567 - DNA, 25 bp, Homo sapien
gactgtcctcactgttgtgctcatg

SEQ ID NO: 3729568 - DNA, 25 bp, Homo sapien
tgttatatctcagaccaagacgact

SEQ ID NO: 3729569 - DNA, 25 bp, Homo sapien
caagacgacttaaactggacaggtt

SEQ ID NO: 3729570 - DNA, 25 bp, Homo sapien
tgatctgggtattgctgacagtctg

SEQ ID NO: 3729571 - DNA, 25 bp, Homo sapien
cactgcattttgctaatgatctggg

SEQ ID NO: 3729572 - DNA, 25 bp, Homo sapien
gaccacccactggatacaactggaa

SEQ ID NO: 3729573 - DNA, 25 bp, Homo sapien
tctagctaaggtcaaactattcagt

SEQ ID NO: 3729574 - DNA, 25 bp, Homo sapien
gtttcacaagacttgataaaagact

SEQ ID NO: 3729575 - DNA, 25 bp, Homo sapien
gaaaactgagatggaccacccactg

SEQ ID NO: 3729576 - DNA, 25 bp, Homo sapien
gaattttgttgattcgattgtgttc

SEQ ID NO: 3729577 - DNA, 25 bp, Homo sapien
atacttttgctctggagaaaattcc

SEQ ID NO: 3729578 - DNA, 25 bp, Homo sapien
tggaattttgttgattcgattgtgt

SEQ ID NO: 3729579 - DNA, 25 bp, Homo sapien
ggaattttgttgattcgattgtgtt

SEQ ID NO: 3729580 - DNA, 25 bp, Homo sapien
aaattcaattctaccatactggtcc

SEQ ID NO: 3729581 - DNA, 25 bp, Homo sapien
cgagaccagacacatcctcagggat

SEQ ID NO: 3729582 - DNA, 25 bp, Homo sapien
tctttgtgagctgattagtggctaa

SEQ ID NO: 3729583 - DNA, 25 bp, Homo sapien
ctggtccaagttccaaaatccaagg

SEQ ID NO: 3729584 - DNA, 25 bp, Homo sapien
tgttctcttctagatccaactctct

SEQ ID NO: 3729585 - DNA, 25 bp, Homo sapien
tcttctagatccaactctcttaact

SEQ ID NO: 3729586 - DNA, 25 bp, Homo sapien
tagaagattgtttgataagataaga

SEQ ID NO: 3729587 - DNA, 25 bp, Homo sapien
gaagattgtttgataagataagaac

SEQ ID NO: 3729588 - DNA, 25 bp, Homo sapien
tgtgtgagattagtaaggtgaccaa

SEQ ID NO: 3729589 - DNA, 25 bp, Homo sapien
tggtcaactggttgtttgtcaagac

SEQ ID NO: 3729590 - DNA, 25 bp, Homo sapien
tgagtaagtaggttctctccaaggc

SEQ ID NO: 3729591 - DNA, 25 bp, Homo sapien
tccaaggcccagatgtgtgagatta

SEQ ID NO: 3729592 - DNA, 25 bp, Homo sapien
aatattgcttgaatgcacaagagca

SEQ ID NO: 3729593 - DNA, 25 bp, Homo sapien
caaattattagtacagagtcaagca

SEQ ID NO: 3729594 - DNA, 25 bp, Homo sapien
caatcaacaatcaaccatcggtgct

SEQ ID NO: 3729595 - DNA, 25 bp, Homo sapien
gagtcaagcattcacagggttcata

SEQ ID NO: 3729596 - DNA, 25 bp, Homo sapien
acctattggaaatgtaagtattcca

SEQ ID NO: 3729597 - DNA, 25 bp, Homo sapien
cattctcaaatacagtactaatttt

SEQ ID NO: 3729598 - DNA, 25 bp, Homo sapien
tgtaagtattccaaaacattctcaa

SEQ ID NO: 3729599 - DNA, 25 bp, Homo sapien
acattctcaaatacagtactaattt

SEQ ID NO: 3729600 - DNA, 25 bp, Homo sapien
tcaaatacagttcttctaggttctc

SEQ ID NO: 3729601 - DNA, 25 bp, Homo sapien
caggttggggttgtcattcaaatac

SEQ ID NO: 3729602 - DNA, 25 bp, Homo sapien
caaatacagttcttctaggttctcc

SEQ ID NO: 3729603 - DNA, 25 bp, Homo sapien
cagaccatggcacgatatggaccct

SEQ ID NO: 3729604 - DNA, 25 bp, Homo sapien
gcaacaatctgaggtggaaggtgac

SEQ ID NO: 3729605 - DNA, 25 bp, Homo sapien
gagtggacagttctcaatactcatg

SEQ ID NO: 3729606 - DNA, 25 bp, Homo sapien
atgattgaaagcttgctgcagagtg

SEQ ID NO: 3729607 - DNA, 25 bp, Homo sapien
tccccaatggcttctatgcaatgtg

SEQ ID NO: 3729608 - DNA, 25 bp, Homo sapien
ggatgacatctagaacgcaccttgc

SEQ ID NO: 3729609 - DNA, 25 bp, Homo sapien
cattacgaacataggtttgacctca

SEQ ID NO: 3729610 - DNA, 25 bp, Homo sapien
tattttgcttcacaactcgtcagag

SEQ ID NO: 3729611 - DNA, 25 bp, Homo sapien
tataccgcacaaaccgcaaaagctg

SEQ ID NO: 3729612 - DNA, 25 bp, Homo sapien
catgttatgctgttgtataccgcac

SEQ ID NO: 3729613 - DNA, 25 bp, Homo sapien
gatgaagtcttgatcacaaacaggt

SEQ ID NO: 3729614 - DNA, 25 bp, Homo sapien
tctaaacagtagaggctactcctcc

SEQ ID NO: 3729615 - DNA, 25 bp, Homo sapien
tacaagccctgttaaacatcagtgg

SEQ ID NO: 3729616 - DNA, 25 bp, Homo sapien
ggtccagcttcagttacacacagca

SEQ ID NO: 3729617 - DNA, 25 bp, Homo sapien
agactctatggcagaacatttacaa

SEQ ID NO: 3729618 - DNA, 25 bp, Homo sapien
tcatgacactgcaaagactgacttc

SEQ ID NO: 3729619 - DNA, 25 bp, Homo sapien
tttggagttcatcagggattccatc

SEQ ID NO: 3729620 - DNA, 25 bp, Homo sapien
tagggaatccttgtttcaattacca

SEQ ID NO: 3729621 - DNA, 25 bp, Homo sapien
catcctacatgatctccctagggaa

SEQ ID NO: 3729622 - DNA, 25 bp, Homo sapien
gaggataagcagtcctatactgccc

SEQ ID NO: 3729623 - DNA, 25 bp, Homo sapien
tcaatgttctcacttgccccaagat

SEQ ID NO: 3729624 - DNA, 25 bp, Homo sapien
ggtaacactgatcatgccctgagaa

SEQ ID NO: 3729625 - DNA, 25 bp, Homo sapien
gacttgcctctaagttgatgatcac

SEQ ID NO: 3729626 - DNA, 25 bp, Homo sapien
tttattccacagtcacgggaggtgc

SEQ ID NO: 3729627 - DNA, 25 bp, Homo sapien
gatttgttcacattgagcttccagc

SEQ ID NO: 3729628 - DNA, 25 bp, Homo sapien
cttgttcccagtaagttgtgattct

SEQ ID NO: 3729629 - DNA, 25 bp, Homo sapien
tccacgtgtctttctccaatttggg

SEQ ID NO: 3729630 - DNA, 25 bp, Homo sapien
ttgttcccacggaggtttctgcttg

SEQ ID NO: 3729631 - DNA, 25 bp, Homo sapien
aatcataatattcatcaacagcaga

SEQ ID NO: 3729632 - DNA, 25 bp, Homo sapien
taatacccttcatacacacagagca

SEQ ID NO: 3729633 - DNA, 25 bp, Homo sapien
tatatatgtgacttacttgacaaca

SEQ ID NO: 3729634 - DNA, 25 bp, Homo sapien
caggtatataccatagagacataca

SEQ ID NO: 3729635 - DNA, 25 bp, Homo sapien
ttctagctccttgatgtataaaatg

SEQ ID NO: 3729636 - DNA, 25 bp, Homo sapien
gatatattccttaggcatttatcac

SEQ ID NO: 3729637 - DNA, 25 bp, Homo sapien
cttccttctgctaaccttggactta

SEQ ID NO: 3729638 - DNA, 25 bp, Homo sapien
tatttacttccttctgctaaccttg

SEQ ID NO: 3729639 - DNA, 25 bp, Homo sapien
caggtacatcaagtagacgtagatt

SEQ ID NO: 3729640 - DNA, 25 bp, Homo sapien
tcaggtacatcaagtagacgtagat

SEQ ID NO: 3729641 - DNA, 25 bp, Homo sapien
tttcaggtacatcaagtagacgtag

SEQ ID NO: 3729642 - DNA, 25 bp, Homo sapien
ggtacatcaagtagacgtagatttg

SEQ ID NO: 3729643 - DNA, 25 bp, Homo sapien
gcccgcaccagtgatacagttattg

SEQ ID NO: 3729644 - DNA, 25 bp, Homo sapien
tgatacagttattggtgctgctgct

SEQ ID NO: 3729645 - DNA, 25 bp, Homo sapien
gctgatgtctatagcccgcaccagt

SEQ ID NO: 3729646 - DNA, 25 bp, Homo sapien
ttcattcccagctgatgtctatagc

SEQ ID NO: 3729647 - DNA, 25 bp, Homo sapien
gaatcttgagcctgagcgaaagcaa

SEQ ID NO: 3729648 - DNA, 25 bp, Homo sapien
gagaacaaaaatcatcggtggcctg

SEQ ID NO: 3729649 - DNA, 25 bp, Homo sapien
gagcgccgcgagacttccaaagttg

SEQ ID NO: 3729650 - DNA, 25 bp, Homo sapien
gcaggtgaacgatcagctctccagg

SEQ ID NO: 3729651 - DNA, 25 bp, Homo sapien
ccggcgcctcggtcccgttccagct

SEQ ID NO: 3729652 - DNA, 25 bp, Homo sapien
cagctcgcgttgcccgcgtccggct

SEQ ID NO: 3729653 - DNA, 25 bp, Homo sapien
cgcgttgcccgcgtccggctgcagg

SEQ ID NO: 3729654 - DNA, 25 bp, Homo sapien
ctgcagggagtaaggggtggcccgg

SEQ ID NO: 3729655 - DNA, 25 bp, Homo sapien
cgtgaacacggcgatgatgacgagc

SEQ ID NO: 3729656 - DNA, 25 bp, Homo sapien
acgttgccgaacacggtgagcagca

SEQ ID NO: 3729657 - DNA, 25 bp, Homo sapien
gcgatgatgacgagcacgttgccga

SEQ ID NO: 3729658 - DNA, 25 bp, Homo sapien
tgatgacgagcacgttgccgaacac

SEQ ID NO: 3729659 - DNA, 25 bp, Homo sapien
gttttggggcgccttgagcgcgcgg

SEQ ID NO: 3729660 - DNA, 25 bp, Homo sapien
cctcgttggccagcgagaaagggat

SEQ ID NO: 3729661 - DNA, 25 bp, Homo sapien
aaagggatgacgagcgtggccacca

SEQ ID NO: 3729662 - DNA, 25 bp, Homo sapien
aggatgtcggccgaggccagagaca

SEQ ID NO: 3729663 - DNA, 25 bp, Homo sapien
gtagatctcgcaccaagccttgccg

SEQ ID NO: 3729664 - DNA, 25 bp, Homo sapien
gatctcgcaccaagccttgccgaag

SEQ ID NO: 3729665 - DNA, 25 bp, Homo sapien
agcgccaggtagatctcgcaccaag

SEQ ID NO: 3729666 - DNA, 25 bp, Homo sapien
ccaggtagatctcgcaccaagcctt

SEQ ID NO: 3729667 - DNA, 25 bp, Homo sapien
cgatggcctgtgtgatggaccagta

SEQ ID NO: 3729668 - DNA, 25 bp, Homo sapien
caggttgtactcgatggcctgtgtg

SEQ ID NO: 3729669 - DNA, 25 bp, Homo sapien
atgatgatggccttgatgcggcgcg

SEQ ID NO: 3729670 - DNA, 25 bp, Homo sapien
tgatggccttgatgcggcgcggcgt

SEQ ID NO: 3729671 - DNA, 25 bp, Homo sapien
tctggtcgttgatctcgcagcgcgg

SEQ ID NO: 3729672 - DNA, 25 bp, Homo sapien
gacgagatgacgtaccacttctggt

SEQ ID NO: 3729673 - DNA, 25 bp, Homo sapien
cgacgcttggcgatctggtagatgc

SEQ ID NO: 3729674 - DNA, 25 bp, Homo sapien
tggtagatgcgcacgtagaccagga

SEQ ID NO: 3729675 - DNA, 25 bp, Homo sapien
tggctcgctcgggccttgcctttgc

SEQ ID NO: 3729676 - DNA, 25 bp, Homo sapien
ctggctcgctcgggccttgcctttg

SEQ ID NO: 3729677 - DNA, 25 bp, Homo sapien
ggctcgctcgggccttgcctttgcc

SEQ ID NO: 3729678 - DNA, 25 bp, Homo sapien
cccgcgccgcggcaggctgtcgccc

SEQ ID NO: 3729679 - DNA, 25 bp, Homo sapien
gccgcggcaggctgtcgcccggctt

SEQ ID NO: 3729680 - DNA, 25 bp, Homo sapien
cggcccgcgccgcggcaggctgtcg

SEQ ID NO: 3729681 - DNA, 25 bp, Homo sapien
cgcgccgcggcaggctgtcgcccgg

SEQ ID NO: 3729682 - DNA, 25 bp, Homo sapien
accacgaacactccgatgaccacgg

SEQ ID NO: 3729683 - DNA, 25 bp, Homo sapien
gaacactccgatgaccacggccagc

SEQ ID NO: 3729684 - DNA, 25 bp, Homo sapien
agcacaccacgaacactccgatgac

SEQ ID NO: 3729685 - DNA, 25 bp, Homo sapien
ccagcacaccacgaacactccgatg

SEQ ID NO: 3729686 - DNA, 25 bp, Homo sapien
cttcttgaaggcgcggcggaaatcg

SEQ ID NO: 3729687 - DNA, 25 bp, Homo sapien
tgcgtggcacggagcacccgacggc

SEQ ID NO: 3729688 - DNA, 25 bp, Homo sapien
ccgtgagcgtgtaggtgaagaagaa

SEQ ID NO: 3729689 - DNA, 25 bp, Homo sapien
tcctgtccccccgacagaggatctt

SEQ ID NO: 3729690 - DNA, 25 bp, Homo sapien
tattcttcttcaagcagtggccctg

SEQ ID NO: 3729691 - DNA, 25 bp, Homo sapien
gatctcaaccagaaaagcacggagg

SEQ ID NO: 3729692 - DNA, 25 bp, Homo sapien
tgagccatgcccttgtagtccagtg

SEQ ID NO: 3729693 - DNA, 25 bp, Homo sapien
gaaatctcaaagcaggtccgtgtcg

SEQ ID NO: 3729694 - DNA, 25 bp, Homo sapien
taaaatcagatgttcccagagtctt

SEQ ID NO: 3729695 - DNA, 25 bp, Homo sapien
aaatcagatgttcccagagtcttaa

SEQ ID NO: 3729696 - DNA, 25 bp, Homo sapien
atcagatgttcccagagtcttaaag

SEQ ID NO: 3729697 - DNA, 25 bp, Homo sapien
aaaatcagatgttcccagagtctta

SEQ ID NO: 3729698 - DNA, 25 bp, Homo sapien
cacagaagaactggggaagatacca

SEQ ID NO: 3729699 - DNA, 25 bp, Homo sapien
ctctccagtagtgggcacagaagaa

SEQ ID NO: 3729700 - DNA, 25 bp, Homo sapien
tggggaagataccagtctctggccc

SEQ ID NO: 3729701 - DNA, 25 bp, Homo sapien
gaactggggaagataccagtctctg

SEQ ID NO: 3729702 - DNA, 25 bp, Homo sapien
gaaaggtaccctctgcaaccaggga

SEQ ID NO: 3729703 - DNA, 25 bp, Homo sapien
gagggactgtgcctatttttccatc

SEQ ID NO: 3729704 - DNA, 25 bp, Homo sapien
tagttcccaccacagtctggaaagg

SEQ ID NO: 3729705 - DNA, 25 bp, Homo sapien
ccttgtggcccagtacaagaaaaca

SEQ ID NO: 3729706 - DNA, 25 bp, Homo sapien
aaggacacgcatatctccaagtcat

SEQ ID NO: 3729707 - DNA, 25 bp, Homo sapien
gaaaggacacgcatatctccaagtc

SEQ ID NO: 3729708 - DNA, 25 bp, Homo sapien
ctgaaaggacacgcatatctccaag

SEQ ID NO: 3729709 - DNA, 25 bp, Homo sapien
atcccctttcactgctgaaaggaca

SEQ ID NO: 3729710 - DNA, 25 bp, Homo sapien
ccagatgatgccaggtcagactcca

SEQ ID NO: 3729711 - DNA, 25 bp, Homo sapien
ctaggatcccgcacgcagcggaaga

SEQ ID NO: 3729712 - DNA, 25 bp, Homo sapien
tgcggccccggttcctttcagaggc

SEQ ID NO: 3729713 - DNA, 25 bp, Homo sapien
ctcgggagctgtaaaacgaccgtct

SEQ ID NO: 3729714 - DNA, 25 bp, Homo sapien
cttgggcgcctggaacttgcgctgc

SEQ ID NO: 3729715 - DNA, 25 bp, Homo sapien
ttccagatcctgacttctagattct

SEQ ID NO: 3729716 - DNA, 25 bp, Homo sapien
ccagatcctgacttctagattcttc

SEQ ID NO: 3729717 - DNA, 25 bp, Homo sapien
cttttgctgctgaccgacgcacgcc

SEQ ID NO: 3729718 - DNA, 25 bp, Homo sapien
tttgctgctgaccgacgcacgcctt

SEQ ID NO: 3729719 - DNA, 25 bp, Homo sapien
ttcttgggcaggctgttgctggctt

SEQ ID NO: 3729720 - DNA, 25 bp, Homo sapien
ctttcttcttggtcggggccttcag

SEQ ID NO: 3729721 - DNA, 25 bp, Homo sapien
ttcttggtcggggccttcagcagtg

SEQ ID NO: 3729722 - DNA, 25 bp, Homo sapien
ttcagcagtgccagcttcttgggca

SEQ ID NO: 3729723 - DNA, 25 bp, Homo sapien
tcaggaaggtgtcttgttggaggag

SEQ ID NO: 3729724 - DNA, 25 bp, Homo sapien
tgttggaggaggtggcagcagccac

SEQ ID NO: 3729725 - DNA, 25 bp, Homo sapien
cttgttggaggaggtggcagcagcc

SEQ ID NO: 3729726 - DNA, 25 bp, Homo sapien
aggaaggtgtcttgttggaggaggt

SEQ ID NO: 3729727 - DNA, 25 bp, Homo sapien
gctgcccctctgtggaaccatccat

SEQ ID NO: 3729728 - DNA, 25 bp, Homo sapien
tcggccctgtgaggcagcgtcacca

SEQ ID NO: 3729729 - DNA, 25 bp, Homo sapien
cttcctcggccctgtgaggcagcgt

SEQ ID NO: 3729730 - DNA, 25 bp, Homo sapien
gtgaggcagcgtcaccagctcagtt

SEQ ID NO: 3729731 - DNA, 25 bp, Homo sapien
gccctgtgaggcagcgtcaccagct

SEQ ID NO: 3729732 - DNA, 25 bp, Homo sapien
cagcctctgtgggacagcgttctta

SEQ ID NO: 3729733 - DNA, 25 bp, Homo sapien
cctctgtgggacagcgttcttacac

SEQ ID NO: 3729734 - DNA, 25 bp, Homo sapien
ctctgtgggacagcgttcttacaca

SEQ ID NO: 3729735 - DNA, 25 bp, Homo sapien
gcctctgtgggacagcgttcttaca

SEQ ID NO: 3729736 - DNA, 25 bp, Homo sapien
cctcagtagtccattcaatgaaagt

SEQ ID NO: 3729737 - DNA, 25 bp, Homo sapien
tagtccattcaatgaaagttgattg

SEQ ID NO: 3729738 - DNA, 25 bp, Homo sapien
cattcaatgaaagttgattgtctca

SEQ ID NO: 3729739 - DNA, 25 bp, Homo sapien
cagtagtccattcaatgaaagttga

SEQ ID NO: 3729740 - DNA, 25 bp, Homo sapien
actcccggcagaggacagagaccgg

SEQ ID NO: 3729741 - DNA, 25 bp, Homo sapien
catttgtggagggtctttcagtgcc

SEQ ID NO: 3729742 - DNA, 25 bp, Homo sapien
gggagcacgggtcaatcctggtggg

SEQ ID NO: 3729743 - DNA, 25 bp, Homo sapien
aggagatgtactcccggcagaggac

SEQ ID NO: 3729744 - DNA, 25 bp, Homo sapien
gtgtaaacatgtgagatgcgactgc

SEQ ID NO: 3729745 - DNA, 25 bp, Homo sapien
caggcatgggtgtaaacatgtgaga

SEQ ID NO: 3729746 - DNA, 25 bp, Homo sapien
tgagatgcgactgcataacacaggt

SEQ ID NO: 3729747 - DNA, 25 bp, Homo sapien
gcataacacaggtcagagcccaggt

SEQ ID NO: 3729748 - DNA, 25 bp, Homo sapien
tcctactaaagcaggtcaaccaaga

SEQ ID NO: 3729749 - DNA, 25 bp, Homo sapien
caagaacaaagagtaacgatagggt

SEQ ID NO: 3729750 - DNA, 25 bp, Homo sapien
gagtggagcacatcctgcttcctac

SEQ ID NO: 3729751 - DNA, 25 bp, Homo sapien
acgatagggtcgtattccagggaag

SEQ ID NO: 3729752 - DNA, 25 bp, Homo sapien
gcagccctgatttggcctcgtggca

SEQ ID NO: 3729753 - DNA, 25 bp, Homo sapien
agcagccctgatttggcctcgtggc

SEQ ID NO: 3729754 - DNA, 25 bp, Homo sapien
cagccctgatttggcctcgtggcat

SEQ ID NO: 3729755 - DNA, 25 bp, Homo sapien
aagcagccctgatttggcctcgtgg

SEQ ID NO: 3729756 - DNA, 25 bp, Homo sapien
atttgcagcggaggccaactggcct

SEQ ID NO: 3729757 - DNA, 25 bp, Homo sapien
cggaggccaactggcctcttgaatt

SEQ ID NO: 3729758 - DNA, 25 bp, Homo sapien
cctctgacactctaaggaccatttg

SEQ ID NO: 3729759 - DNA, 25 bp, Homo sapien
taaggaccatttgcagcggaggcca

SEQ ID NO: 3729760 - DNA, 25 bp, Homo sapien
caaccattcaaactggctgaggatg

SEQ ID NO: 3729761 - DNA, 25 bp, Homo sapien
tctggaagatttagcacccactggg

SEQ ID NO: 3729762 - DNA, 25 bp, Homo sapien
gggcacttcaagatcagatgcacca

SEQ ID NO: 3729763 - DNA, 25 bp, Homo sapien
tcatctcagaggcaccaagacatgt

SEQ ID NO: 3729764 - DNA, 25 bp, Homo sapien
aagatcagatgcaccaagttcaatg

SEQ ID NO: 3729765 - DNA, 25 bp, Homo sapien
gaaacaaaccgaaattcattctcaa

SEQ ID NO: 3729766 - DNA, 25 bp, Homo sapien
ctcttggtccaagcggatgagggat

SEQ ID NO: 3729767 - DNA, 25 bp, Homo sapien
tctcaagtgagctgcagtaaggccc

SEQ ID NO: 3729768 - DNA, 25 bp, Homo sapien
cggatgagggattcattgtcttagc

SEQ ID NO: 3729769 - DNA, 25 bp, Homo sapien
tgtcctgagcttccatatccggcca

SEQ ID NO: 3729770 - DNA, 25 bp, Homo sapien
tatccggccaccaaaatgacctgct

SEQ ID NO: 3729771 - DNA, 25 bp, Homo sapien
cattcttctccagagcgtgggactt

SEQ ID NO: 3729772 - DNA, 25 bp, Homo sapien
gagtgtccgaaaccttgccaacaga

SEQ ID NO: 3729773 - DNA, 25 bp, Homo sapien
caagctggcaatgggggacacttcc

SEQ ID NO: 3729774 - DNA, 25 bp, Homo sapien
caagctggccaactttagttccttt

SEQ ID NO: 3729775 - DNA, 25 bp, Homo sapien
cacttcccaagctggccaactttag

SEQ ID NO: 3729776 - DNA, 25 bp, Homo sapien
gggacacttcccaagctggccaact

SEQ ID NO: 3729777 - DNA, 25 bp, Homo sapien
ctggaacatcatggccatgagctca

SEQ ID NO: 3729778 - DNA, 25 bp, Homo sapien
atcatggccatgagctcattaaacc

SEQ ID NO: 3729779 - DNA, 25 bp, Homo sapien
gaacatcatggccatgagctcatta

SEQ ID NO: 3729780 - DNA, 25 bp, Homo sapien
acatcatggccatgagctcattaaa

SEQ ID NO: 3729781 - DNA, 25 bp, Homo sapien
tttcctctatcttcgttaccttcca

SEQ ID NO: 3729782 - DNA, 25 bp, Homo sapien
tatcttcgttaccttccagaactct

SEQ ID NO: 3729783 - DNA, 25 bp, Homo sapien
tcgttaccttccagaactcttccag

SEQ ID NO: 3729784 - DNA, 25 bp, Homo sapien
agaactcttccaggccgcttgcctc

SEQ ID NO: 3729785 - DNA, 25 bp, Homo sapien
agccagtcccatgactcgctgccat

SEQ ID NO: 3729786 - DNA, 25 bp, Homo sapien
gaaccacagccagtcccatgactcg

SEQ ID NO: 3729787 - DNA, 25 bp, Homo sapien
accacagccagtcccatgactcgct

SEQ ID NO: 3729788 - DNA, 25 bp, Homo sapien
acagccagtcccatgactcgctgcc

SEQ ID NO: 3729789 - DNA, 25 bp, Homo sapien
ctggagcaccagagatagcagatgc

SEQ ID NO: 3729790 - DNA, 25 bp, Homo sapien
atcatcctccgcctgatgggtgctg

SEQ ID NO: 3729791 - DNA, 25 bp, Homo sapien
cctgtcaatggagggtaaacaattg

SEQ ID NO: 3729792 - DNA, 25 bp, Homo sapien
gcagactcatttgctacagcaggca

SEQ ID NO: 3729793 - DNA, 25 bp, Homo sapien
cagcaccttgatgcagacatcatcc

SEQ ID NO: 3729794 - DNA, 25 bp, Homo sapien
caaacacgacaagccagtgtcagga

SEQ ID NO: 3729795 - DNA, 25 bp, Homo sapien
tcaggaacgggtagaagcttcacat

SEQ ID NO: 3729796 - DNA, 25 bp, Homo sapien
ccacatctggatgagaaggccttgc

SEQ ID NO: 3729797 - DNA, 25 bp, Homo sapien
tgtccaagtcctgtccaaacacgac

SEQ ID NO: 3729798 - DNA, 25 bp, Homo sapien
ccttaatgtgatcaagaatgcagcc

SEQ ID NO: 3729799 - DNA, 25 bp, Homo sapien
ggtttcccaggactgatccaaccac

SEQ ID NO: 3729800 - DNA, 25 bp, Homo sapien
taagtcaaaggagccctcacttggt

SEQ ID NO: 3729801 - DNA, 25 bp, Homo sapien
caacaatttcaccactcctgagagt

SEQ ID NO: 3729802 - DNA, 25 bp, Homo sapien
ttgatgataaccttagtggagatca

SEQ ID NO: 3729803 - DNA, 25 bp, Homo sapien
taaccttagtggagatcatctgcct

SEQ ID NO: 3729804 - DNA, 25 bp, Homo sapien
caaccatgaatttgatgataacctt

SEQ ID NO: 3729805 - DNA, 25 bp, Homo sapien
tcacaaccatgaatttgatgataac

SEQ ID NO: 3729806 - DNA, 25 bp, Homo sapien
cttcaccactaacacctgctcgcac

SEQ ID NO: 3729807 - DNA, 25 bp, Homo sapien
caccactaacacctgctcgcacctc

SEQ ID NO: 3729808 - DNA, 25 bp, Homo sapien
ttcaccactaacacctgctcgcacc

SEQ ID NO: 3729809 - DNA, 25 bp, Homo sapien
ccttcaccactaacacctgctcgca

SEQ ID NO: 3729810 - DNA, 25 bp, Homo sapien
ggctcagaagatccatatttctgta

SEQ ID NO: 3729811 - DNA, 25 bp, Homo sapien
ttaactgggcaaagcagtttgctgc

SEQ ID NO: 3729812 - DNA, 25 bp, Homo sapien
gttctgcctttcttaaagaggctca

SEQ ID NO: 3729813 - DNA, 25 bp, Homo sapien
ccatatttctgtaagtggcacttac

SEQ ID NO: 3729814 - DNA, 25 bp, Homo sapien
ttcaaggggcatggccgtgatgacc

SEQ ID NO: 3729815 - DNA, 25 bp, Homo sapien
gacctgggacaggtcgtcaggagcc

SEQ ID NO: 3729816 - DNA, 25 bp, Homo sapien
caggtcgtcaggagcccaggaacag

SEQ ID NO: 3729817 - DNA, 25 bp, Homo sapien
tctaagtccataagtagagcagcaa

SEQ ID NO: 3729818 - DNA, 25 bp, Homo sapien
tgggagcagaagtaacaacttttct

SEQ ID NO: 3729819 - DNA, 25 bp, Homo sapien
ctttggttgtccaaatgtgacccag

SEQ ID NO: 3729820 - DNA, 25 bp, Homo sapien
aaactgagtgtagtccatcaggtgt

SEQ ID NO: 3729821 - DNA, 25 bp, Homo sapien
tggcttccactaatcaaaactgagt

SEQ ID NO: 3729822 - DNA, 25 bp, Homo sapien
acagtggtggggcttctatggcttc

SEQ ID NO: 3729823 - DNA, 25 bp, Homo sapien
aactgagtgtagtccatcaggtgtt

SEQ ID NO: 3729824 - DNA, 25 bp, Homo sapien
aggcttcaccaggaacttgctgcat

SEQ ID NO: 3729825 - DNA, 25 bp, Homo sapien
aaggcttcaccaggaacttgctgca

SEQ ID NO: 3729826 - DNA, 25 bp, Homo sapien
gagtcaaggcttcaccaggaacttg

SEQ ID NO: 3729827 - DNA, 25 bp, Homo sapien
ctttggagtcaaggcttcaccagga

SEQ ID NO: 3729828 - DNA, 25 bp, Homo sapien
tccacactgagtccggcaattgtct

SEQ ID NO: 3729829 - DNA, 25 bp, Homo sapien
ttgggtccccccagtatcttgctgt

SEQ ID NO: 3729830 - DNA, 25 bp, Homo sapien
tgagtccggcaattgtcttctgctg

SEQ ID NO: 3729831 - DNA, 25 bp, Homo sapien
tctctctttgggtccccccagtatc

SEQ ID NO: 3729832 - DNA, 25 bp, Homo sapien
ttcggggtgcctttattctgacaag

SEQ ID NO: 3729833 - DNA, 25 bp, Homo sapien
tgcagacttcttcggggtgccttta

SEQ ID NO: 3729834 - DNA, 25 bp, Homo sapien
tattgtcttaataagagcaatggca

SEQ ID NO: 3729835 - DNA, 25 bp, Homo sapien
tcaaagcctcgacagtccaagatct

SEQ ID NO: 3729836 - DNA, 25 bp, Homo sapien
gaaatgagctcatactgcacactca

SEQ ID NO: 3729837 - DNA, 25 bp, Homo sapien
agcctgcaaactttgagaaatgagc

SEQ ID NO: 3729838 - DNA, 25 bp, Homo sapien
tgctgtgttggcacagcctgcaaac

SEQ ID NO: 3729839 - DNA, 25 bp, Homo sapien
ggaagaaaaatcagccctctcagcc

SEQ ID NO: 3729840 - DNA, 25 bp, Homo sapien
tttccacttataagaactctagcag

SEQ ID NO: 3729841 - DNA, 25 bp, Homo sapien
taagaactctagcagcttctcggtc

SEQ ID NO: 3729842 - DNA, 25 bp, Homo sapien
agaactctagcagcttctcggtccc

SEQ ID NO: 3729843 - DNA, 25 bp, Homo sapien
ttataagaactctagcagcttctcg

SEQ ID NO: 3729844 - DNA, 25 bp, Homo sapien
tgagagaaatttcccgacaagtctt

SEQ ID NO: 3729845 - DNA, 25 bp, Homo sapien
ccatgagagaaatttcccgacaagt

SEQ ID NO: 3729846 - DNA, 25 bp, Homo sapien
tcaggcatctacagtcttgttctct

SEQ ID NO: 3729847 - DNA, 25 bp, Homo sapien
gaaatttcccgacaagtcttgatac

SEQ ID NO: 3729848 - DNA, 25 bp, Homo sapien
taatctagacaatattctttgggcc

SEQ ID NO: 3729849 - DNA, 25 bp, Homo sapien
tctgcattgcctttgcccctaaggg

SEQ ID NO: 3729850 - DNA, 25 bp, Homo sapien
taagggctacatcttttagtgcagg

SEQ ID NO: 3729851 - DNA, 25 bp, Homo sapien
tacagagttggtatcatgggagcaa

SEQ ID NO: 3729852 - DNA, 25 bp, Homo sapien
agatgcccatttaatgttccaagaa

SEQ ID NO: 3729853 - DNA, 25 bp, Homo sapien
tatctgagaatagtagactttcaac

SEQ ID NO: 3729854 - DNA, 25 bp, Homo sapien
caagcctaaaatactgagatgccca

SEQ ID NO: 3729855 - DNA, 25 bp, Homo sapien
atagtagactttcaacagtgacacc

SEQ ID NO: 3729856 - DNA, 25 bp, Homo sapien
gtctgtgtatttgggaacagatgct

SEQ ID NO: 3729857 - DNA, 25 bp, Homo sapien
atttgcaggcaccaagatgagtctg

SEQ ID NO: 3729858 - DNA, 25 bp, Homo sapien
tgttctaggatgctcggaataggcc

SEQ ID NO: 3729859 - DNA, 25 bp, Homo sapien
cacctgcggcatgtggtaaaaatgg

SEQ ID NO: 3729860 - DNA, 25 bp, Homo sapien
gtccagaagtcctgcacagagaccc

SEQ ID NO: 3729861 - DNA, 25 bp, Homo sapien
tccagaagtcctgcacagagacccc

SEQ ID NO: 3729862 - DNA, 25 bp, Homo sapien
agtccagaagtcctgcacagagacc

SEQ ID NO: 3729863 - DNA, 25 bp, Homo sapien
ggattgtgagcaagacagtccccac

SEQ ID NO: 3729864 - DNA, 25 bp, Homo sapien
atgctggccagcaggattgtgagca

SEQ ID NO: 3729865 - DNA, 25 bp, Homo sapien
tgctggccagcaggattgtgagcaa

SEQ ID NO: 3729866 - DNA, 25 bp, Homo sapien
gctggccagcaggattgtgagcaag

SEQ ID NO: 3729867 - DNA, 25 bp, Homo sapien
aatctcttcgctgcaacaagacctt

SEQ ID NO: 3729868 - DNA, 25 bp, Homo sapien
ccaccaaggaggaatccattctgtg

SEQ ID NO: 3729869 - DNA, 25 bp, Homo sapien
atatcaccaggtgctcccacgatga

SEQ ID NO: 3729870 - DNA, 25 bp, Homo sapien
ttagactgataatcgaagcagcttc

SEQ ID NO: 3729871 - DNA, 25 bp, Homo sapien
ctattaggaccactaccatcacccc

SEQ ID NO: 3729872 - DNA, 25 bp, Homo sapien
tcctgctgccactattaggaccact

SEQ ID NO: 3729873 - DNA, 25 bp, Homo sapien
ctgctcctgctgccactattaggac

SEQ ID NO: 3729874 - DNA, 25 bp, Homo sapien
tgccactattaggaccactaccatc

SEQ ID NO: 3729875 - DNA, 25 bp, Homo sapien
tcatccatttcctggaggctcctct

SEQ ID NO: 3729876 - DNA, 25 bp, Homo sapien
tttcatccatttcctggaggctcct

SEQ ID NO: 3729877 - DNA, 25 bp, Homo sapien
ttaggtccagtgttttttcatccat

SEQ ID NO: 3729878 - DNA, 25 bp, Homo sapien
tccatttcctggaggctcctctcac

SEQ ID NO: 3729879 - DNA, 25 bp, Homo sapien
cctattctcagggaacatgaatgag

SEQ ID NO: 3729880 - DNA, 25 bp, Homo sapien
tctataaaagtctcgtggacatgtg

SEQ ID NO: 3729881 - DNA, 25 bp, Homo sapien
ggccttgggcgaggctatacaattt

SEQ ID NO: 3729882 - DNA, 25 bp, Homo sapien
ggatagttagatgcactcacaccca

SEQ ID NO: 3729883 - DNA, 25 bp, Homo sapien
tagaaatgagcaattcaggagccct

SEQ ID NO: 3729884 - DNA, 25 bp, Homo sapien
taccactgagagtgtaaagcagcat

SEQ ID NO: 3729885 - DNA, 25 bp, Homo sapien
gatttgcgtcctccaggttaacaag

SEQ ID NO: 3729886 - DNA, 25 bp, Homo sapien
taaggagcttactgtatctggaagc

SEQ ID NO: 3729887 - DNA, 25 bp, Homo sapien
tcttcattaagtgaagcacatgtgg

SEQ ID NO: 3729888 - DNA, 25 bp, Homo sapien
tcacagagaaccaagggaaatccag

SEQ ID NO: 3729889 - DNA, 25 bp, Homo sapien
ttgcaattagcaagtgaaggaacat

SEQ ID NO: 3729890 - DNA, 25 bp, Homo sapien
gcaatatgttcactgcttctgcagc

SEQ ID NO: 3729891 - DNA, 25 bp, Homo sapien
tggctcttatgatttctacgtatgt

SEQ ID NO: 3729892 - DNA, 25 bp, Homo sapien
ttctgggtctcaggggaaatggttc

SEQ ID NO: 3729893 - DNA, 25 bp, Homo sapien
ttagttctgttatgtgacgagtgac

SEQ ID NO: 3729894 - DNA, 25 bp, Homo sapien
gccttttccgcctttattgagatga

SEQ ID NO: 3729895 - DNA, 25 bp, Homo sapien
tgaccatatgatctggtgagatggg

SEQ ID NO: 3729896 - DNA, 25 bp, Homo sapien
tctgctgtgaccatatgatctggtg

SEQ ID NO: 3729897 - DNA, 25 bp, Homo sapien
cttctgctgtgaccatatgatctgg

SEQ ID NO: 3729898 - DNA, 25 bp, Homo sapien
gctgtgaccatatgatctggtgaga

SEQ ID NO: 3729899 - DNA, 25 bp, Homo sapien
ctgagcattggagaatgtgcagagc

SEQ ID NO: 3729900 - DNA, 25 bp, Homo sapien
ttcaaatgatgcctgatcggcaggt

SEQ ID NO: 3729901 - DNA, 25 bp, Homo sapien
cctgatcggcaggtgctgagcattg

SEQ ID NO: 3729902 - DNA, 25 bp, Homo sapien
tgctgagcattggagaatgtgcaga

SEQ ID NO: 3729903 - DNA, 25 bp, Homo sapien
tcttcacctaagaagggagcctcca

SEQ ID NO: 3729904 - DNA, 25 bp, Homo sapien
tttcttcacctaagaagggagcctc

SEQ ID NO: 3729905 - DNA, 25 bp, Homo sapien
tgcatttcttcacctaagaagggag

SEQ ID NO: 3729906 - DNA, 25 bp, Homo sapien
ttcacctaagaagggagcctccagt

SEQ ID NO: 3729907 - DNA, 25 bp, Homo sapien
gttattctcccactctggaggtcct

SEQ ID NO: 3729908 - DNA, 25 bp, Homo sapien
tgacaggcgaggagttattctccca

SEQ ID NO: 3729909 - DNA, 25 bp, Homo sapien
gaggagttattctcccactctggag

SEQ ID NO: 3729910 - DNA, 25 bp, Homo sapien
cctttcttcattgtccaaataatgc

SEQ ID NO: 3729911 - DNA, 25 bp, Homo sapien
caagcagtatgtgtcttcttcaact

SEQ ID NO: 3729912 - DNA, 25 bp, Homo sapien
gagacaagcagtatgtgtcttcttc

SEQ ID NO: 3729913 - DNA, 25 bp, Homo sapien
tcagagacaagcagtatgtgtcttc

SEQ ID NO: 3729914 - DNA, 25 bp, Homo sapien
tcaactcagagacaagcagtatgtg

SEQ ID NO: 3729915 - DNA, 25 bp, Homo sapien
agctttttctagactccctgattcc

SEQ ID NO: 3729916 - DNA, 25 bp, Homo sapien
tccagaagttgggcctggacagtgg

SEQ ID NO: 3729917 - DNA, 25 bp, Homo sapien
tgattggttcctgaaggccataaag

SEQ ID NO: 3729918 - DNA, 25 bp, Homo sapien
gaggtctggccacttgatggatgaa

SEQ ID NO: 3729919 - DNA, 25 bp, Homo sapien
tagagtgacaccatagcaggagaag

SEQ ID NO: 3729920 - DNA, 25 bp, Homo sapien
atgcagggataagaataccgttgag

SEQ ID NO: 3729921 - DNA, 25 bp, Homo sapien
ttgagatatttaggcacatgcccca

SEQ ID NO: 3729922 - DNA, 25 bp, Homo sapien
taaacctccacaggactttccagag

SEQ ID NO: 3729923 - DNA, 25 bp, Homo sapien
gttggagactcatatgggttcttga

SEQ ID NO: 3729924 - DNA, 25 bp, Homo sapien
tcaggatgggacagtcttgggtgcc

SEQ ID NO: 3729925 - DNA, 25 bp, Homo sapien
ttctggcagttggagactcatatgg

SEQ ID NO: 3729926 - DNA, 25 bp, Homo sapien
gacagtcttgggtgcctgactgcag

SEQ ID NO: 3729927 - DNA, 25 bp, Homo sapien
tagaatgctaatctgccacacacga

SEQ ID NO: 3729928 - DNA, 25 bp, Homo sapien
gccacacacgatgaactcaagggaa

SEQ ID NO: 3729929 - DNA, 25 bp, Homo sapien
ggtgagaacatcacactccttgcct

SEQ ID NO: 3729930 - DNA, 25 bp, Homo sapien
gaagggacatcaggtctaccactgg

SEQ ID NO: 3729931 - DNA, 25 bp, Homo sapien
tctgtaggggttcctttaagccaca

SEQ ID NO: 3729932 - DNA, 25 bp, Homo sapien
ttcagttgttccaaatgagacccca

SEQ ID NO: 3729933 - DNA, 25 bp, Homo sapien
gaccccatggctagtaggacatttg

SEQ ID NO: 3729934 - DNA, 25 bp, Homo sapien
gccaatgacagagcattctttcagt

SEQ ID NO: 3729935 - DNA, 25 bp, Homo sapien
cgcaagcacgattgggaagggtgct

SEQ ID NO: 3729936 - DNA, 25 bp, Homo sapien
cacgcaagcacgattgggaagggtg

SEQ ID NO: 3729937 - DNA, 25 bp, Homo sapien
gcacgcaagcacgattgggaagggt

SEQ ID NO: 3729938 - DNA, 25 bp, Homo sapien
aggcacgcaagcacgattgggaagg

SEQ ID NO: 3729939 - DNA, 25 bp, Homo sapien
cgggagcactggtttcctattagga

SEQ ID NO: 3729940 - DNA, 25 bp, Homo sapien
ggtccacactttagtgaccccagag

SEQ ID NO: 3729941 - DNA, 25 bp, Homo sapien
caatgcgcttgtcttcgggagcact

SEQ ID NO: 3729942 - DNA, 25 bp, Homo sapien
tcccagcaaggttttgcagctgccc

SEQ ID NO: 3729943 - DNA, 25 bp, Homo sapien
ctgctcatggtacaggccttgctgc

SEQ ID NO: 3729944 - DNA, 25 bp, Homo sapien
tgctcatggtacaggccttgctgcc

SEQ ID NO: 3729945 - DNA, 25 bp, Homo sapien
gctcatggtacaggccttgctgccc

SEQ ID NO: 3729946 - DNA, 25 bp, Homo sapien
tcatggtacaggccttgctgccccc

SEQ ID NO: 3729947 - DNA, 25 bp, Homo sapien
tcaaagaccgagtgaaggaattggc

SEQ ID NO: 3729948 - DNA, 25 bp, Homo sapien
tcatggtgagacaggaccaacatca

SEQ ID NO: 3729949 - DNA, 25 bp, Homo sapien
gaggtccttgggtgcccagattcta

SEQ ID NO: 3729950 - DNA, 25 bp, Homo sapien
ccaacatcaaagaccgagtgaagga

SEQ ID NO: 3729951 - DNA, 25 bp, Homo sapien
ggagtgggaacctccaccaagagct

SEQ ID NO: 3729952 - DNA, 25 bp, Homo sapien
ttgtttgtattgcttctccctctgg

SEQ ID NO: 3729953 - DNA, 25 bp, Homo sapien
taggagagccatcttggtgtcagga

SEQ ID NO: 3729954 - DNA, 25 bp, Homo sapien
ctctggaagctgtgaaaactggctt

SEQ ID NO: 3729955 - DNA, 25 bp, Homo sapien
tttatatctacaacccatttggaaa

SEQ ID NO: 3729956 - DNA, 25 bp, Homo sapien
catttggtacgagataaggcttaag

SEQ ID NO: 3729957 - DNA, 25 bp, Homo sapien
tgcaatgtagttcaatgtatcaatc

SEQ ID NO: 3729958 - DNA, 25 bp, Homo sapien
tgcctacccccaagatctcaaagat

SEQ ID NO: 3729959 - DNA, 25 bp, Homo sapien
caaactactggccattatagcagac

SEQ ID NO: 3729960 - DNA, 25 bp, Homo sapien
tatagcagacactgtcacttctccc

SEQ ID NO: 3729961 - DNA, 25 bp, Homo sapien
gatgggctcttttgcaaactactgg

SEQ ID NO: 3729962 - DNA, 25 bp, Homo sapien
gcttgggatgggctcttttgcaaac

SEQ ID NO: 3729963 - DNA, 25 bp, Homo sapien
gagaatattgccaagaagagacctt

SEQ ID NO: 3729964 - DNA, 25 bp, Homo sapien
tccccaatgccatgtagagcttaca

SEQ ID NO: 3729965 - DNA, 25 bp, Homo sapien
aagagaccttcagaatgtctaacag

SEQ ID NO: 3729966 - DNA, 25 bp, Homo sapien
gaatgtctaacagacttaaccctgt

SEQ ID NO: 3729967 - DNA, 25 bp, Homo sapien
tgcccctgttgcagtgattacttct

SEQ ID NO: 3729968 - DNA, 25 bp, Homo sapien
gttgcagtgattacttctatgaggt

SEQ ID NO: 3729969 - DNA, 25 bp, Homo sapien
aaatgaaattggctctcttggtcct

SEQ ID NO: 3729970 - DNA, 25 bp, Homo sapien
tgcacacagaattcacaccagtctc

SEQ ID NO: 3729971 - DNA, 25 bp, Homo sapien
atgggtctctggcattgacatttcc

SEQ ID NO: 3729972 - DNA, 25 bp, Homo sapien
gggtctctggcattgacatttccaa

SEQ ID NO: 3729973 - DNA, 25 bp, Homo sapien
ttagctaacggatgggtctctggca

SEQ ID NO: 3729974 - DNA, 25 bp, Homo sapien
aacggatgggtctctggcattgaca

SEQ ID NO: 3729975 - DNA, 25 bp, Homo sapien
ggctcctaggatctgatgtcatcag

SEQ ID NO: 3729976 - DNA, 25 bp, Homo sapien
caagaccgctgggaaatgtcgagag

SEQ ID NO: 3729977 - DNA, 25 bp, Homo sapien
tcagtgtttcctgcggctctccatg

SEQ ID NO: 3729978 - DNA, 25 bp, Homo sapien
ctctccatgaagtgtgttttgatct

SEQ ID NO: 3729979 - DNA, 25 bp, Homo sapien
tgctaaatccagaatgttgtaggag

SEQ ID NO: 3729980 - DNA, 25 bp, Homo sapien
ctgctccttcctaaatgctaaatcc

SEQ ID NO: 3729981 - DNA, 25 bp, Homo sapien
taaatccagaatgttgtaggagaag

SEQ ID NO: 3729982 - DNA, 25 bp, Homo sapien
ttctgcaactttttctcgattttta

SEQ ID NO: 3729983 - DNA, 25 bp, Homo sapien
tatcctgttgtggattcacagagca

SEQ ID NO: 3729984 - DNA, 25 bp, Homo sapien
aatagggttcccaatattctcccag

SEQ ID NO: 3729985 - DNA, 25 bp, Homo sapien
gaagctatcatccttagtttccctg

SEQ ID NO: 3729986 - DNA, 25 bp, Homo sapien
gaataggtcgttctctaaaagtgtg

SEQ ID NO: 3729987 - DNA, 25 bp, Homo sapien
ttgctttggattctacactataaat

SEQ ID NO: 3729988 - DNA, 25 bp, Homo sapien
gctttggattctacactataaatta

SEQ ID NO: 3729989 - DNA, 25 bp, Homo sapien
tgctttggattctacactataaatt

SEQ ID NO: 3729990 - DNA, 25 bp, Homo sapien
tttgctttggattctacactataaa

SEQ ID NO: 3729991 - DNA, 25 bp, Homo sapien
tggggcatgtataagccaccaggct

SEQ ID NO: 3729992 - DNA, 25 bp, Homo sapien
gagcagcttccacacttggcagacc

SEQ ID NO: 3729993 - DNA, 25 bp, Homo sapien
tgaccatctctaatgggaggctgtt

SEQ ID NO: 3729994 - DNA, 25 bp, Homo sapien
gtcccctcctgcattgtctgcagat

SEQ ID NO: 3729995 - DNA, 25 bp, Homo sapien
gagggctcccattagagagcagctt

SEQ ID NO: 3729996 - DNA, 25 bp, Homo sapien
tgccatggaactgggatgtggagca

SEQ ID NO: 3729997 - DNA, 25 bp, Homo sapien
ccatggaactgggatgtggagcaag

SEQ ID NO: 3729998 - DNA, 25 bp, Homo sapien
ctgccatggaactgggatgtggagc

SEQ ID NO: 3729999 - DNA, 25 bp, Homo sapien
atggaactgggatgtggagcaagat

SEQ ID NO: 3730000 - DNA, 25 bp, Homo sapien
cagtgataaggacttgagaactaag

SEQ ID NO: 3730001 - DNA, 25 bp, Homo sapien
ggcatgcagtgataaggacttgaga

SEQ ID NO: 3730002 - DNA, 25 bp, Homo sapien
aggcagcctcaagttttgagcttgg

SEQ ID NO: 3730003 - DNA, 25 bp, Homo sapien
caagttttgagcttgggttactggg

SEQ ID NO: 3730004 - DNA, 25 bp, Homo sapien
tattccaccgcagtaaagccactga

SEQ ID NO: 3730005 - DNA, 25 bp, Homo sapien
ccactgagagataagtgtcagcctg

SEQ ID NO: 3730006 - DNA, 25 bp, Homo sapien
tgtcagcctgcttgtattgccttag

SEQ ID NO: 3730007 - DNA, 25 bp, Homo sapien
gattcctgggtgaattggctggtat

SEQ ID NO: 3730008 - DNA, 25 bp, Homo sapien
gaacttgtagggaccaataatgggc

SEQ ID NO: 3730009 - DNA, 25 bp, Homo sapien
ctactttgtacaggaatggtgctaa

SEQ ID NO: 3730010 - DNA, 25 bp, Homo sapien
aatgggcccagtggactccacacag

SEQ ID NO: 3730011 - DNA, 25 bp, Homo sapien
ggactacggccttcaagaacttgta

SEQ ID NO: 3730012 - DNA, 25 bp, Homo sapien
caatggccactggtgaagttggaaa

SEQ ID NO: 3730013 - DNA, 25 bp, Homo sapien
gcagtatatactaaccacagcatcc

SEQ ID NO: 3730014 - DNA, 25 bp, Homo sapien
gggaatgaaagtatgcagtatatac

SEQ ID NO: 3730015 - DNA, 25 bp, Homo sapien
agaatgaaggtggtatcttgctctc

SEQ ID NO: 3730016 - DNA, 25 bp, Homo sapien
cctaaagttctctttcgttgcatca

SEQ ID NO: 3730017 - DNA, 25 bp, Homo sapien
tgcatcaggcaactctgtatttcct

SEQ ID NO: 3730018 - DNA, 25 bp, Homo sapien
aagttctctttcgttgcatcaggca

SEQ ID NO: 3730019 - DNA, 25 bp, Homo sapien
tgtatttcctaacatgcccttcact

SEQ ID NO: 3730020 - DNA, 25 bp, Homo sapien
gtcttgatccactatgccttcttct

SEQ ID NO: 3730021 - DNA, 25 bp, Homo sapien
tctggggacttgaatacactgagct

SEQ ID NO: 3730022 - DNA, 25 bp, Homo sapien
cttgccaactcgtcttgatccacta

SEQ ID NO: 3730023 - DNA, 25 bp, Homo sapien
gggacttgaatacactgagcttcat

SEQ ID NO: 3730024 - DNA, 25 bp, Homo sapien
catacagatatgtcccttgctgagc

SEQ ID NO: 3730025 - DNA, 25 bp, Homo sapien
catgctgatttccaagtataatgct

SEQ ID NO: 3730026 - DNA, 25 bp, Homo sapien
tgctgaagcctctgtgtatcccata

SEQ ID NO: 3730027 - DNA, 25 bp, Homo sapien
tccaggcgcaataagagagcatgct

SEQ ID NO: 3730028 - DNA, 25 bp, Homo sapien
tgatctaaagcattctggaagccag

SEQ ID NO: 3730029 - DNA, 25 bp, Homo sapien
cttcggaggtctaagaggtaagatt

SEQ ID NO: 3730030 - DNA, 25 bp, Homo sapien
caggaatttctcttgcgggacgtga

SEQ ID NO: 3730031 - DNA, 25 bp, Homo sapien
caggctaccaatttagttgtggttc

SEQ ID NO: 3730032 - DNA, 25 bp, Homo sapien
ttcggctccgtcaggtcatttaagt

SEQ ID NO: 3730033 - DNA, 25 bp, Homo sapien
tatcctgcagaatgtttcccagttt

SEQ ID NO: 3730034 - DNA, 25 bp, Homo sapien
taagtacttctctacacgtttattc

SEQ ID NO: 3730035 - DNA, 25 bp, Homo sapien
ggctccgtcaggtcatttaagtact

SEQ ID NO: 3730036 - DNA, 25 bp, Homo sapien
tctagaaatgacctctgctatagtt

SEQ ID NO: 3730037 - DNA, 25 bp, Homo sapien
aaatcctctagaaatgacctctgct

SEQ ID NO: 3730038 - DNA, 25 bp, Homo sapien
ggggataatgtagctttgcctttac

SEQ ID NO: 3730039 - DNA, 25 bp, Homo sapien
ctctgctatagttccccaaaactgg

SEQ ID NO: 3730040 - DNA, 25 bp, Homo sapien
tacattcccagaggcggatcagggc

SEQ ID NO: 3730041 - DNA, 25 bp, Homo sapien
tctatgagtgattggatcatatggc

SEQ ID NO: 3730042 - DNA, 25 bp, Homo sapien
tcagggctatatgactgatggccac

SEQ ID NO: 3730043 - DNA, 25 bp, Homo sapien
gatcaaaatgcttcgtggtcttaca

SEQ ID NO: 3730044 - DNA, 25 bp, Homo sapien
gcactgccacatgcaggtaaatcag

SEQ ID NO: 3730045 - DNA, 25 bp, Homo sapien
cactgccacatgcaggtaaatcagg

SEQ ID NO: 3730046 - DNA, 25 bp, Homo sapien
ctgcactgccacatgcaggtaaatc

SEQ ID NO: 3730047 - DNA, 25 bp, Homo sapien
ctgccacatgcaggtaaatcaggtt

SEQ ID NO: 3730048 - DNA, 25 bp, Homo sapien
ttggtggacgctttaatccaggttg

SEQ ID NO: 3730049 - DNA, 25 bp, Homo sapien
tcacttggtggacgctttaatccag

SEQ ID NO: 3730050 - DNA, 25 bp, Homo sapien
gtggacgctttaatccaggttgcac

SEQ ID NO: 3730051 - DNA, 25 bp, Homo sapien
acttggtggacgctttaatccaggt

SEQ ID NO: 3730052 - DNA, 25 bp, Homo sapien
ctgagcatggaattggaggtcagga

SEQ ID NO: 3730053 - DNA, 25 bp, Homo sapien
gagcatggaattggaggtcaggaga

SEQ ID NO: 3730054 - DNA, 25 bp, Homo sapien
gacctgagcatggaattggaggtca

SEQ ID NO: 3730055 - DNA, 25 bp, Homo sapien
gcatggaattggaggtcaggagaga

SEQ ID NO: 3730056 - DNA, 25 bp, Homo sapien
cgggctttcggatcctccaggtatt

SEQ ID NO: 3730057 - DNA, 25 bp, Homo sapien
gctttcggatcctccaggtattacc

SEQ ID NO: 3730058 - DNA, 25 bp, Homo sapien
tttcggatcctccaggtattaccat

SEQ ID NO: 3730059 - DNA, 25 bp, Homo sapien
gggctttcggatcctccaggtatta

SEQ ID NO: 3730060 - DNA, 25 bp, Homo sapien
tctaaataaggaacggaatatggat

SEQ ID NO: 3730061 - DNA, 25 bp, Homo sapien
agctgagctgaacctttctgtgtga

SEQ ID NO: 3730062 - DNA, 25 bp, Homo sapien
tcactgtataaagtggtagctgagc

SEQ ID NO: 3730063 - DNA, 25 bp, Homo sapien
cctcaagagtttggctatatcagca

SEQ ID NO: 3730064 - DNA, 25 bp, Homo sapien
ggagttagctttccctgaagctgtg

SEQ ID NO: 3730065 - DNA, 25 bp, Homo sapien
agaaatgcagctggagttagctttc

SEQ ID NO: 3730066 - DNA, 25 bp, Homo sapien
tacacgttttgtactgccagcagaa

SEQ ID NO: 3730067 - DNA, 25 bp, Homo sapien
ctttacacgttttgtactgccagca

SEQ ID NO: 3730068 - DNA, 25 bp, Homo sapien
agaagggtgctttattgcattgtcc

SEQ ID NO: 3730069 - DNA, 25 bp, Homo sapien
cacaaccgggccacaatgtgctaag

SEQ ID NO: 3730070 - DNA, 25 bp, Homo sapien
ccgggccacaatgtgctaagaaggg

SEQ ID NO: 3730071 - DNA, 25 bp, Homo sapien
gtgctaagaagggtgctttattgca

SEQ ID NO: 3730072 - DNA, 25 bp, Homo sapien
gatagggtttaatcacaccgttcat

SEQ ID NO: 3730073 - DNA, 25 bp, Homo sapien
accaattcttcttaatcatgttagg

SEQ ID NO: 3730074 - DNA, 25 bp, Homo sapien
cttcttaatcatgttaggggggaga

SEQ ID NO: 3730075 - DNA, 25 bp, Homo sapien
gagatagggtttaatcacaccgttc

SEQ ID NO: 3730076 - DNA, 25 bp, Homo sapien
ctgttttcttgcattacaaccatga

SEQ ID NO: 3730077 - DNA, 25 bp, Homo sapien
tgcttttcgctttgcctgctttaag

SEQ ID NO: 3730078 - DNA, 25 bp, Homo sapien
gaatgtgtaaggcttcccagcattg

SEQ ID NO: 3730079 - DNA, 25 bp, Homo sapien
tttcactcccctgcttttcgctttg

SEQ ID NO: 3730080 - DNA, 25 bp, Homo sapien
gcattgggtaaagagctatctaggg

SEQ ID NO: 3730081 - DNA, 25 bp, Homo sapien
ttcctgtcttgttactgattccttc

SEQ ID NO: 3730082 - DNA, 25 bp, Homo sapien
gaatttacccgagatgcaggtcgtc

SEQ ID NO: 3730083 - DNA, 25 bp, Homo sapien
cactcttctaacagaatttacccga

SEQ ID NO: 3730084 - DNA, 25 bp, Homo sapien
cctcttgtgggatgagactcagttc

SEQ ID NO: 3730085 - DNA, 25 bp, Homo sapien
agctgtgcggaaccgagagctccct

SEQ ID NO: 3730086 - DNA, 25 bp, Homo sapien
tttgataagattagtttttatgcta

SEQ ID NO: 3730087 - DNA, 25 bp, Homo sapien
gttttgataagattagtttttatgc

SEQ ID NO: 3730088 - DNA, 25 bp, Homo sapien
tgataagattagtttttatgctaaa

SEQ ID NO: 3730089 - DNA, 25 bp, Homo sapien
gataagattagtttttatgctaaac

SEQ ID NO: 3730090 - DNA, 25 bp, Homo sapien
ttctgtagggcacgcctcccagaat

SEQ ID NO: 3730091 - DNA, 25 bp, Homo sapien
ttcttttctgtagggcacgcctccc

SEQ ID NO: 3730092 - DNA, 25 bp, Homo sapien
gggcacgcctcccagaatgtctgtc

SEQ ID NO: 3730093 - DNA, 25 bp, Homo sapien
gcctcccagaatgtctgtccagaat

SEQ ID NO: 3730094 - DNA, 25 bp, Homo sapien
ttgtctttgctacccgcaaataagg

SEQ ID NO: 3730095 - DNA, 25 bp, Homo sapien
tcagaacttagatcaaagagaatgg

SEQ ID NO: 3730096 - DNA, 25 bp, Homo sapien
caagaaggcttcagaacttagatca

SEQ ID NO: 3730097 - DNA, 25 bp, Homo sapien
gagaatggatttacctgcctttgtc

SEQ ID NO: 3730098 - DNA, 25 bp, Homo sapien
tcttcttatgaggatctatcccaaa

SEQ ID NO: 3730099 - DNA, 25 bp, Homo sapien
gaggatctatcccaaacattacaga

SEQ ID NO: 3730100 - DNA, 25 bp, Homo sapien
ggtacatgaagaatctcctgctgct

SEQ ID NO: 3730101 - DNA, 25 bp, Homo sapien
cagaattttgggttccaagagaaag

SEQ ID NO: 3730102 - DNA, 25 bp, Homo sapien
aggaccctgagttctttctgagatc

SEQ ID NO: 3730103 - DNA, 25 bp, Homo sapien
cagctgcaggaagaaattttcttct

SEQ ID NO: 3730104 - DNA, 25 bp, Homo sapien
gagatctttcagattcagctgcagg

SEQ ID NO: 3730105 - DNA, 25 bp, Homo sapien
tggaaagagctcacactcccgaggc

SEQ ID NO: 3730106 - DNA, 25 bp, Homo sapien
ctctccttcctgaaagtatagagcc

SEQ ID NO: 3730107 - DNA, 25 bp, Homo sapien
aagtatagagcctattctatatttg

SEQ ID NO: 3730108 - DNA, 25 bp, Homo sapien
tatagagcctattctatatttgttc

SEQ ID NO: 3730109 - DNA, 25 bp, Homo sapien
tgctctccttcctgaaagtatagag

SEQ ID NO: 3730110 - DNA, 25 bp, Homo sapien
tggtatcaccataatatagtcagga

SEQ ID NO: 3730111 - DNA, 25 bp, Homo sapien
aggctcttaaagtttactgctttca

SEQ ID NO: 3730112 - DNA, 25 bp, Homo sapien
gcctggtatcaccataatatagtca

SEQ ID NO: 3730113 - DNA, 25 bp, Homo sapien
ttaaagtttactgctttcatcttca

SEQ ID NO: 3730114 - DNA, 25 bp, Homo sapien
agaccgccttgtaagttcttgggag

SEQ ID NO: 3730115 - DNA, 25 bp, Homo sapien
gagactgctgtgtatttaaagtgca

SEQ ID NO: 3730116 - DNA, 25 bp, Homo sapien
gagccccaagcgcagtgatctccat

SEQ ID NO: 3730117 - DNA, 25 bp, Homo sapien
aagggaactgtaactgcagatggga

SEQ ID NO: 3730118 - DNA, 25 bp, Homo sapien
cttgtgtccagctttaatgagtttt

SEQ ID NO: 3730119 - DNA, 25 bp, Homo sapien
aatgagttttatggtgaccgagtcc

SEQ ID NO: 3730120 - DNA, 25 bp, Homo sapien
ttaatgagttttatggtgaccgagt

SEQ ID NO: 3730121 - DNA, 25 bp, Homo sapien
tgtgtccagctttaatgagttttat

SEQ ID NO: 3730122 - DNA, 25 bp, Homo sapien
ctctgctggagagcacacgagtgct

SEQ ID NO: 3730123 - DNA, 25 bp, Homo sapien
tgaccatcttcagtgcttgctgcag

SEQ ID NO: 3730124 - DNA, 25 bp, Homo sapien
gctctgtttacaggaactgggaact

SEQ ID NO: 3730125 - DNA, 25 bp, Homo sapien
tgataaaaacggtccacttgtcacc

SEQ ID NO: 3730126 - DNA, 25 bp, Homo sapien
cctcctttgaggaatatctctgtca

SEQ ID NO: 3730127 - DNA, 25 bp, Homo sapien
gctggcaggatttgtatcgaggaat

SEQ ID NO: 3730128 - DNA, 25 bp, Homo sapien
tgtagatgatctttgggtcacaggc

SEQ ID NO: 3730129 - DNA, 25 bp, Homo sapien
gaatggagatacacccttttctgct

SEQ ID NO: 3730130 - DNA, 25 bp, Homo sapien
cagatatgcttggacttgaatccca

SEQ ID NO: 3730131 - DNA, 25 bp, Homo sapien
cagaatgctaggaaacagtgggtca

SEQ ID NO: 3730132 - DNA, 25 bp, Homo sapien
cttgtatccgaatgtaaaccagcca

SEQ ID NO: 3730133 - DNA, 25 bp, Homo sapien
gagaaatccaccttgcatagtctgg

SEQ ID NO: 3730134 - DNA, 25 bp, Homo sapien
ccgttttcccagaaaccatggccat

SEQ ID NO: 3730135 - DNA, 25 bp, Homo sapien
ctgaaccgttttcccagaaaccatg

SEQ ID NO: 3730136 - DNA, 25 bp, Homo sapien
tcttctctattggaaaacctagggc

SEQ ID NO: 3730137 - DNA, 25 bp, Homo sapien
gcagacagattttggagctatccaa

SEQ ID NO: 3730138 - DNA, 25 bp, Homo sapien
catattagatatctggcctccccaa

SEQ ID NO: 3730139 - DNA, 25 bp, Homo sapien
gcctccccaataggaagcagacaga

SEQ ID NO: 3730140 - DNA, 25 bp, Homo sapien
tacaataggccactaatgaagattc

SEQ ID NO: 3730141 - DNA, 25 bp, Homo sapien
tcacttccttttgccgtagaattac

SEQ ID NO: 3730142 - DNA, 25 bp, Homo sapien
atgaagattcgataaaagctatttc

SEQ ID NO: 3730143 - DNA, 25 bp, Homo sapien
gccgtagaattacaataggccacta

SEQ ID NO: 3730144 - DNA, 25 bp, Homo sapien
catgagggaccaaactcaggccaaa

SEQ ID NO: 3730145 - DNA, 25 bp, Homo sapien
tatggatttatggtgccacagatga

SEQ ID NO: 3730146 - DNA, 25 bp, Homo sapien
gacttctcaaggctacatggcatgt

SEQ ID NO: 3730147 - DNA, 25 bp, Homo sapien
tcaggccaaaaaagctgatctcaat

SEQ ID NO: 3730148 - DNA, 25 bp, Homo sapien
tgactttcagatttaggacgaattc

SEQ ID NO: 3730149 - DNA, 25 bp, Homo sapien
tctctgcttctgctacgttgacctg

SEQ ID NO: 3730150 - DNA, 25 bp, Homo sapien
gctacgttgacctggaaacctctct

SEQ ID NO: 3730151 - DNA, 25 bp, Homo sapien
ttaggacgaattcttttccagtatc

SEQ ID NO: 3730152 - DNA, 25 bp, Homo sapien
gatcttaaccgtcctcacattgaat

SEQ ID NO: 3730153 - DNA, 25 bp, Homo sapien
taatcttcaaagactgatactctga

SEQ ID NO: 3730154 - DNA, 25 bp, Homo sapien
tataggttatctctatgttcatcct

SEQ ID NO: 3730155 - DNA, 25 bp, Homo sapien
aattctacaaacacgagattcaggg

SEQ ID NO: 3730156 - DNA, 25 bp, Homo sapien
ttcagttcttgagcaccaactttct

SEQ ID NO: 3730157 - DNA, 25 bp, Homo sapien
ttccaaactctctggagaatactcg

SEQ ID NO: 3730158 - DNA, 25 bp, Homo sapien
tctctggagaatactcgaagggcag

SEQ ID NO: 3730159 - DNA, 25 bp, Homo sapien
ttttcagttcttgagcaccaacttt

SEQ ID NO: 3730160 - DNA, 25 bp, Homo sapien
tagaaatggagacactgatatcagc

SEQ ID NO: 3730161 - DNA, 25 bp, Homo sapien
cagctccatcaatctcaaagaggtg

SEQ ID NO: 3730162 - DNA, 25 bp, Homo sapien
aatgccagatttcttgtctagaaat

SEQ ID NO: 3730163 - DNA, 25 bp, Homo sapien
caaagaggtggtggtttgaagatca

SEQ ID NO: 3730164 - DNA, 25 bp, Homo sapien
cactcatgctctgcttgcgcactgg

SEQ ID NO: 3730165 - DNA, 25 bp, Homo sapien
gtatccagaacactcatgctctgct

SEQ ID NO: 3730166 - DNA, 25 bp, Homo sapien
gaacactcatgctctgcttgcgcac

SEQ ID NO: 3730167 - DNA, 25 bp, Homo sapien
ctgcttgcgcactggggatgatgaa

SEQ ID NO: 3730168 - DNA, 25 bp, Homo sapien
tatttggtcctaaggctataattcc

SEQ ID NO: 3730169 - DNA, 25 bp, Homo sapien
gctataattccgctctcattgtgga

SEQ ID NO: 3730170 - DNA, 25 bp, Homo sapien
gaatctgaagaggtcaaactgaaca

SEQ ID NO: 3730171 - DNA, 25 bp, Homo sapien
ctgaagaggtcaaactgaacaaatg

SEQ ID NO: 3730172 - DNA, 25 bp, Homo sapien
tccccttgcaaggggacatgtggtt

SEQ ID NO: 3730173 - DNA, 25 bp, Homo sapien
atgtggttgactggcggcggctact

SEQ ID NO: 3730174 - DNA, 25 bp, Homo sapien
gactggcggcggctactgctgagtc

SEQ ID NO: 3730175 - DNA, 25 bp, Homo sapien
tggcggcggctactgctgagtccat

SEQ ID NO: 3730176 - DNA, 25 bp, Homo sapien
ggttgccgttgtgtgaaagctttcc

SEQ ID NO: 3730177 - DNA, 25 bp, Homo sapien
tctcctctccctactgaactcaaca

SEQ ID NO: 3730178 - DNA, 25 bp, Homo sapien
cctactgaactcaacacgggggaga

SEQ ID NO: 3730179 - DNA, 25 bp, Homo sapien
aaattatcttgggttgccgttgtgt

SEQ ID NO: 3730180 - DNA, 25 bp, Homo sapien
tagctccgagtctgctgggtctccc

SEQ ID NO: 3730181 - DNA, 25 bp, Homo sapien
actttggtgctttctgcaaaactca

SEQ ID NO: 3730182 - DNA, 25 bp, Homo sapien
aaactttggtgctttctgcaaaact

SEQ ID NO: 3730183 - DNA, 25 bp, Homo sapien
ctagctccgagtctgctgggtctcc

SEQ ID NO: 3730184 - DNA, 25 bp, Homo sapien
tttggctgttattgccactggttac

SEQ ID NO: 3730185 - DNA, 25 bp, Homo sapien
gactcccttgatgacaagagtgatt

SEQ ID NO: 3730186 - DNA, 25 bp, Homo sapien
tgtacgcagactcccttgatgacaa

SEQ ID NO: 3730187 - DNA, 25 bp, Homo sapien
ctgtgtacgcagactcccttgatga

SEQ ID NO: 3730188 - DNA, 25 bp, Homo sapien
agttggagcgggatttcagtaaagc

SEQ ID NO: 3730189 - DNA, 25 bp, Homo sapien
agcgggatttcagtaaagctgccct

SEQ ID NO: 3730190 - DNA, 25 bp, Homo sapien
tgatggccaatgctccggggactac

SEQ ID NO: 3730191 - DNA, 25 bp, Homo sapien
tgccctgatggccaatgctccgggg

SEQ ID NO: 3730192 - DNA, 25 bp, Homo sapien
ggtccctatacagaacctcttcact

SEQ ID NO: 3730193 - DNA, 25 bp, Homo sapien
cggtctaggtccctatacagaacct

SEQ ID NO: 3730194 - DNA, 25 bp, Homo sapien
tctaggtccctatacagaacctctt

SEQ ID NO: 3730195 - DNA, 25 bp, Homo sapien
atacagaacctcttcactgcatttg

SEQ ID NO: 3730196 - DNA, 25 bp, Homo sapien
gcatgtgctctacccccagacttac

SEQ ID NO: 3730197 - DNA, 25 bp, Homo sapien
ctgcatgtgctctacccccagactt

SEQ ID NO: 3730198 - DNA, 25 bp, Homo sapien
tgcatgtgctctacccccagactta

SEQ ID NO: 3730199 - DNA, 25 bp, Homo sapien
tactcatactgagtacaacagcagg

SEQ ID NO: 3730200 - DNA, 25 bp, Homo sapien
gccatcttgccccagtgtactcata

SEQ ID NO: 3730201 - DNA, 25 bp, Homo sapien
cttgccccagtgtactcatactgag

SEQ ID NO: 3730202 - DNA, 25 bp, Homo sapien
catactgagtacaacagcaggaggc

SEQ ID NO: 3730203 - DNA, 25 bp, Homo sapien
caatatggagatgacctgcttggtc

SEQ ID NO: 3730204 - DNA, 25 bp, Homo sapien
tctccaccaatatggagatgacctg

SEQ ID NO: 3730205 - DNA, 25 bp, Homo sapien
gccaagcagtctctggagctctcca

SEQ ID NO: 3730206 - DNA, 25 bp, Homo sapien
agccaagcagtctctggagctctcc

SEQ ID NO: 3730207 - DNA, 25 bp, Homo sapien
tcccatagctaagcaggctaggctg

SEQ ID NO: 3730208 - DNA, 25 bp, Homo sapien
aggatgagccccaccaacgaatcaa

SEQ ID NO: 3730209 - DNA, 25 bp, Homo sapien
aatctggggtggtcgcggctccact

SEQ ID NO: 3730210 - DNA, 25 bp, Homo sapien
gtcgcggctccactgagactatggg

SEQ ID NO: 3730211 - DNA, 25 bp, Homo sapien
tggctgccgtgctgacatggacaaa

SEQ ID NO: 3730212 - DNA, 25 bp, Homo sapien
aaagagccgcgcaggcaatttgcca

SEQ ID NO: 3730213 - DNA, 25 bp, Homo sapien
cctgagtcaggtgttgcctgcggca

SEQ ID NO: 3730214 - DNA, 25 bp, Homo sapien
tgttcctgagctcgtgcttgccaga

SEQ ID NO: 3730215 - DNA, 25 bp, Homo sapien
caatctgagttgacctttggctccc

SEQ ID NO: 3730216 - DNA, 25 bp, Homo sapien
atggcttggcctgatccacaagctt

SEQ ID NO: 3730217 - DNA, 25 bp, Homo sapien
gatccacaagcttcaatctgagttg

SEQ ID NO: 3730218 - DNA, 25 bp, Homo sapien
cagtgtgcgttgttcttctcccatc

SEQ ID NO: 3730219 - DNA, 25 bp, Homo sapien
gtggatttgttcatgacccccagtg

SEQ ID NO: 3730220 - DNA, 25 bp, Homo sapien
gttccctggaaaacatgctccccat

SEQ ID NO: 3730221 - DNA, 25 bp, Homo sapien
gacccccagtgcaaagttccctgga

SEQ ID NO: 3730222 - DNA, 25 bp, Homo sapien
gttcatgacccccagtgcaaagttc

SEQ ID NO: 3730223 - DNA, 25 bp, Homo sapien
tttgccaaagatcctgttgagtagc

SEQ ID NO: 3730224 - DNA, 25 bp, Homo sapien
tgtacagtcatcaacaccctaggac

SEQ ID NO: 3730225 - DNA, 25 bp, Homo sapien
caactagaatcattagaagttttcc

SEQ ID NO: 3730226 - DNA, 25 bp, Homo sapien
tgattctccaatgtcctgtacagtc

SEQ ID NO: 3730227 - DNA, 25 bp, Homo sapien
gaaatggtgacttactatgttgcca

SEQ ID NO: 3730228 - DNA, 25 bp, Homo sapien
gatccttttgtcttggccaccccaa

SEQ ID NO: 3730229 - DNA, 25 bp, Homo sapien
tgaagggatccttttgtcttggcca

SEQ ID NO: 3730230 - DNA, 25 bp, Homo sapien
tgcggtggcaccgtcataactcact

SEQ ID NO: 3730231 - DNA, 25 bp, Homo sapien
ttatgtgacctgataggactggggt

SEQ ID NO: 3730232 - DNA, 25 bp, Homo sapien
cctggtccacacttggacattctgc

SEQ ID NO: 3730233 - DNA, 25 bp, Homo sapien
atccactgctcatgttggctgctgc

SEQ ID NO: 3730234 - DNA, 25 bp, Homo sapien
ccactgctcatgttggctgctgcca

SEQ ID NO: 3730235 - DNA, 25 bp, Homo sapien
ctcttgagctcaagatgtagccaca

SEQ ID NO: 3730236 - DNA, 25 bp, Homo sapien
agtgctccagccaagcctgtctctt

SEQ ID NO: 3730237 - DNA, 25 bp, Homo sapien
gctctgggatctgcggtctggccct

SEQ ID NO: 3730238 - DNA, 25 bp, Homo sapien
tctggccctgcctgtggatgctcct

SEQ ID NO: 3730239 - DNA, 25 bp, Homo sapien
tgagagccaaacaagccaccaacga

SEQ ID NO: 3730240 - DNA, 25 bp, Homo sapien
tgtgcttcaggcaggaacgaaaagg

SEQ ID NO: 3730241 - DNA, 25 bp, Homo sapien
gtgcactgaggcaggcttccctgtg

SEQ ID NO: 3730242 - DNA, 25 bp, Homo sapien
cgaaccccagaatgggacagcgtgt

SEQ ID NO: 3730243 - DNA, 25 bp, Homo sapien
ctttgcctgctgagttcgtcttccc

SEQ ID NO: 3730244 - DNA, 25 bp, Homo sapien
cctgctgagttcgtcttcccttcaa

SEQ ID NO: 3730245 - DNA, 25 bp, Homo sapien
aaagtgctttggatggagggcggtc

SEQ ID NO: 3730246 - DNA, 25 bp, Homo sapien
ccttcaaagtgctttggatggaggg

SEQ ID NO: 3730247 - DNA, 25 bp, Homo sapien
aagggaatgagtaatgtgcttcctt

SEQ ID NO: 3730248 - DNA, 25 bp, Homo sapien
tcagggactcgttcttctactgctt

SEQ ID NO: 3730249 - DNA, 25 bp, Homo sapien
tccaagggaatgagtaatgtgcttc

SEQ ID NO: 3730250 - DNA, 25 bp, Homo sapien
ccaagggaatgagtaatgtgcttcc

SEQ ID NO: 3730251 - DNA, 25 bp, Homo sapien
cttcgatatcttgtctagaacccat

SEQ ID NO: 3730252 - DNA, 25 bp, Homo sapien
catcttcgatatcttgtctagaacc

SEQ ID NO: 3730253 - DNA, 25 bp, Homo sapien
tcctccatcttcgatatcttgtcta

SEQ ID NO: 3730254 - DNA, 25 bp, Homo sapien
ctccatcttcgatatcttgtctaga

SEQ ID NO: 3730255 - DNA, 25 bp, Homo sapien
caccttctctggctgttgtttccat

SEQ ID NO: 3730256 - DNA, 25 bp, Homo sapien
accttctctggctgttgtttccatt

SEQ ID NO: 3730257 - DNA, 25 bp, Homo sapien
ctttgcctatgttcaccttctctgg

SEQ ID NO: 3730258 - DNA, 25 bp, Homo sapien
tccagtttactgctgtcactgagta

SEQ ID NO: 3730259 - DNA, 25 bp, Homo sapien
cagaccccttgcactttgaggttgg

SEQ ID NO: 3730260 - DNA, 25 bp, Homo sapien
acagcgaatatctcagccaccaggg

SEQ ID NO: 3730261 - DNA, 25 bp, Homo sapien
ggagctgcatctcttgctttttagg

SEQ ID NO: 3730262 - DNA, 25 bp, Homo sapien
gcccaggctcccagttattgcagac

SEQ ID NO: 3730263 - DNA, 25 bp, Homo sapien
gatgtcaccacacgtgtcagaaaaa

SEQ ID NO: 3730264 - DNA, 25 bp, Homo sapien
gaacttcaatatgtcccaaagagga

SEQ ID NO: 3730265 - DNA, 25 bp, Homo sapien
tttggaccactcaggacaggtgggt

SEQ ID NO: 3730266 - DNA, 25 bp, Homo sapien
tgaactcttgggtttatgcagtgaa

SEQ ID NO: 3730267 - DNA, 25 bp, Homo sapien
agctgcccgaagttcttgtgtgggt

SEQ ID NO: 3730268 - DNA, 25 bp, Homo sapien
gctgcccgaagttcttgtgtgggtt

SEQ ID NO: 3730269 - DNA, 25 bp, Homo sapien
ggagctgcccgaagttcttgtgtgg

SEQ ID NO: 3730270 - DNA, 25 bp, Homo sapien
gagctgcccgaagttcttgtgtggg

SEQ ID NO: 3730271 - DNA, 25 bp, Homo sapien
tgtccagacactgttcagccacagc

SEQ ID NO: 3730272 - DNA, 25 bp, Homo sapien
gctcttctgtccagacactgttcag

SEQ ID NO: 3730273 - DNA, 25 bp, Homo sapien
cagacactgttcagccacagccttg

SEQ ID NO: 3730274 - DNA, 25 bp, Homo sapien
tgtcctgggccgaggacccagagct

SEQ ID NO: 3730275 - DNA, 25 bp, Homo sapien
gcatgagcccttggttgtgggagct

SEQ ID NO: 3730276 - DNA, 25 bp, Homo sapien
tctggccccatgttcgccagcatga

SEQ ID NO: 3730277 - DNA, 25 bp, Homo sapien
atttccttgggtatctcccaatcca

SEQ ID NO: 3730278 - DNA, 25 bp, Homo sapien
ctggaatcccttgccttgcatcccc

SEQ ID NO: 3730279 - DNA, 25 bp, Homo sapien
gcgcattccaactctgtccactaga

SEQ ID NO: 3730280 - DNA, 25 bp, Homo sapien
gccaatttgcttgcatcaggccccg

SEQ ID NO: 3730281 - DNA, 25 bp, Homo sapien
gatggcggtcagatttcatcaaggg

SEQ ID NO: 3730282 - DNA, 25 bp, Homo sapien
gggtgtggccacactgcgcattcca

SEQ ID NO: 3730283 - DNA, 25 bp, Homo sapien
tgctaatttgcttgcattaagcctc

SEQ ID NO: 3730284 - DNA, 25 bp, Homo sapien
agatgctaatttgcttgcattaagc

SEQ ID NO: 3730285 - DNA, 25 bp, Homo sapien
cagatgctaatttgcttgcattaag

SEQ ID NO: 3730286 - DNA, 25 bp, Homo sapien
ttcagatgctaatttgcttgcatta

SEQ ID NO: 3730287 - DNA, 25 bp, Homo sapien
gccttcttccagtacagagctctga

SEQ ID NO: 3730288 - DNA, 25 bp, Homo sapien
atgggtgggccaatctcatgtcagg

SEQ ID NO: 3730289 - DNA, 25 bp, Homo sapien
ggcacacactgctgttgagtgtgat

SEQ ID NO: 3730290 - DNA, 25 bp, Homo sapien
ggataatagaaagccacaacctgga

SEQ ID NO: 3730291 - DNA, 25 bp, Homo sapien
caaccacctgctgaaagttcccaac

SEQ ID NO: 3730292 - DNA, 25 bp, Homo sapien
ctcaaccacctgctgaaagttccca

SEQ ID NO: 3730293 - DNA, 25 bp, Homo sapien
cctcaaccacctgctgaaagttccc

SEQ ID NO: 3730294 - DNA, 25 bp, Homo sapien
tcaaccacctgctgaaagttcccaa

SEQ ID NO: 3730295 - DNA, 25 bp, Homo sapien
tgtatcgaaacaagctagcatttgc

SEQ ID NO: 3730296 - DNA, 25 bp, Homo sapien
gaaacaagctagcatttgctgctgg

SEQ ID NO: 3730297 - DNA, 25 bp, Homo sapien
caaagaaactgtatcgaaacaagct

SEQ ID NO: 3730298 - DNA, 25 bp, Homo sapien
ctaggcaatgagcacgtctgggtca

SEQ ID NO: 3730299 - DNA, 25 bp, Homo sapien
tatgctcatccagacaagctgacct

SEQ ID NO: 3730300 - DNA, 25 bp, Homo sapien
ccagggagtcttgggtgttccttat

SEQ ID NO: 3730301 - DNA, 25 bp, Homo sapien
ttattcaagattgggactcgcttcc

SEQ ID NO: 3730302 - DNA, 25 bp, Homo sapien
tactgactagggtagaagaacactt

SEQ ID NO: 3730303 - DNA, 25 bp, Homo sapien
gctatgctgttgtgatccctctcaa

SEQ ID NO: 3730304 - DNA, 25 bp, Homo sapien
catgagtaatgtgtgttttgggaga

SEQ ID NO: 3730305 - DNA, 25 bp, Homo sapien
gaaactcatagcaataatgctatgc

SEQ ID NO: 3730306 - DNA, 25 bp, Homo sapien
gagggatgctgattgatatttcaca

SEQ ID NO: 3730307 - DNA, 25 bp, Homo sapien
tactgactggtaatggttagaggca

SEQ ID NO: 3730308 - DNA, 25 bp, Homo sapien
gactggtacccactcgagttgtgcc

SEQ ID NO: 3730309 - DNA, 25 bp, Homo sapien
ggaaatcctccaaccaaatagcagt

SEQ ID NO: 3730310 - DNA, 25 bp, Homo sapien
tatatgcatgtggtggccctactga

SEQ ID NO: 3730311 - DNA, 25 bp, Homo sapien
tgttgtagatctccacagctccttc

SEQ ID NO: 3730312 - DNA, 25 bp, Homo sapien
tttctactctgccttgtgggagcag

SEQ ID NO: 3730313 - DNA, 25 bp, Homo sapien
catgctctaatcagcggaagactgg

SEQ ID NO: 3730314 - DNA, 25 bp, Homo sapien
caggatcaggcactatttctggtcc

SEQ ID NO: 3730315 - DNA, 25 bp, Homo sapien
gtccccttcagatgctggttctccc

SEQ ID NO: 3730316 - DNA, 25 bp, Homo sapien
agtccccttcagatgctggttctcc

SEQ ID NO: 3730317 - DNA, 25 bp, Homo sapien
cctccacggaatacaccttggtgtt

SEQ ID NO: 3730318 - DNA, 25 bp, Homo sapien
atctcctccacggaatacaccttgg

SEQ ID NO: 3730319 - DNA, 25 bp, Homo sapien
catgctttggatattgacagcagct

SEQ ID NO: 3730320 - DNA, 25 bp, Homo sapien
tcaagacaccatgctttggatattg

SEQ ID NO: 3730321 - DNA, 25 bp, Homo sapien
tatccagagtatgagggcctagaag

SEQ ID NO: 3730322 - DNA, 25 bp, Homo sapien
caagcccagtgcaaggggttatacc

SEQ ID NO: 3730323 - DNA, 25 bp, Homo sapien
cactgcaggggtcccgtgggatttc

SEQ ID NO: 3730324 - DNA, 25 bp, Homo sapien
cctcttggatgtgattcttctctgc

SEQ ID NO: 3730325 - DNA, 25 bp, Homo sapien
ctgtgtgcatttgctcctcatgaaa

SEQ ID NO: 3730326 - DNA, 25 bp, Homo sapien
aaggcaaaactgaggtgcttgggca

SEQ ID NO: 3730327 - DNA, 25 bp, Homo sapien
taggatgtcatgacatgagacacgg

SEQ ID NO: 3730328 - DNA, 25 bp, Homo sapien
tatttgcagctgacaagaggtgcaa

SEQ ID NO: 3730329 - DNA, 25 bp, Homo sapien
ttgttgtggttcctttggacaggcc

SEQ ID NO: 3730330 - DNA, 25 bp, Homo sapien
tctgacttggatccgcttcctgtct

SEQ ID NO: 3730331 - DNA, 25 bp, Homo sapien
cctgtctaccactgctggttttgtt

SEQ ID NO: 3730332 - DNA, 25 bp, Homo sapien
gaatatttgactgtacttgtccctc

SEQ ID NO: 3730333 - DNA, 25 bp, Homo sapien
aaacattccttgcaatgggtcaagc

SEQ ID NO: 3730334 - DNA, 25 bp, Homo sapien
ccatctctccatagtcgctctgttt

SEQ ID NO: 3730335 - DNA, 25 bp, Homo sapien
ttggcgagccttcagtgaagtcctc

SEQ ID NO: 3730336 - DNA, 25 bp, Homo sapien
tgagaacttggcgagccttcagtga

SEQ ID NO: 3730337 - DNA, 25 bp, Homo sapien
tgtgctctgcaagtcctacttcttc

SEQ ID NO: 3730338 - DNA, 25 bp, Homo sapien
tgttgtgctctgcaagtcctacttc

SEQ ID NO: 3730339 - DNA, 25 bp, Homo sapien
cacaacgatgaccttcttttcaggg

SEQ ID NO: 3730340 - DNA, 25 bp, Homo sapien
tccacaacgatgaccttcttttcag

SEQ ID NO: 3730341 - DNA, 25 bp, Homo sapien
cacatcgttcaagtctcaattcaaa

SEQ ID NO: 3730342 - DNA, 25 bp, Homo sapien
tctggaactctgctgttgcctgcct

SEQ ID NO: 3730343 - DNA, 25 bp, Homo sapien
cctactcctttgtggctctctagaa

SEQ ID NO: 3730344 - DNA, 25 bp, Homo sapien
tttctgggctcacctcctgtcgctt

SEQ ID NO: 3730345 - DNA, 25 bp, Homo sapien
gatctttaggcctctcaatttggga

SEQ ID NO: 3730346 - DNA, 25 bp, Homo sapien
tgttgggaatgaaaccagggtcgct

SEQ ID NO: 3730347 - DNA, 25 bp, Homo sapien
ccttgtaaccccagccacattgaat

SEQ ID NO: 3730348 - DNA, 25 bp, Homo sapien
cacaagctattctgtgaggaaccac

SEQ ID NO: 3730349 - DNA, 25 bp, Homo sapien
gaggggcctgattgtcaaatctgac

SEQ ID NO: 3730350 - DNA, 25 bp, Homo sapien
gcagatgatgctaaagtctggtttt

SEQ ID NO: 3730351 - DNA, 25 bp, Homo sapien
tccccaccagtacctggtcttgagg

SEQ ID NO: 3730352 - DNA, 25 bp, Homo sapien
gctcatagaggccagaggactctcc

SEQ ID NO: 3730353 - DNA, 25 bp, Homo sapien
acagtgtggcgattgctttgatggc

SEQ ID NO: 3730354 - DNA, 25 bp, Homo sapien
ctttgatggcagctaactgtgtggg

SEQ ID NO: 3730355 - DNA, 25 bp, Homo sapien
gggccctggcccgacagaagatctg

SEQ ID NO: 3730356 - DNA, 25 bp, Homo sapien
cagaagatctgcagacagtgtggcg

SEQ ID NO: 3730357 - DNA, 25 bp, Homo sapien
aaaatgcaattctttgctcgtacag

SEQ ID NO: 3730358 - DNA, 25 bp, Homo sapien
gcaattctttgctcgtacagcctcg

SEQ ID NO: 3730359 - DNA, 25 bp, Homo sapien
aatgcaattctttgctcgtacagcc

SEQ ID NO: 3730360 - DNA, 25 bp, Homo sapien
aattctttgctcgtacagcctcgag

SEQ ID NO: 3730361 - DNA, 25 bp, Homo sapien
acaagacaaaggccttcgtcaccat

SEQ ID NO: 3730362 - DNA, 25 bp, Homo sapien
aacaagacaaaggccttcgtcacca

SEQ ID NO: 3730363 - DNA, 25 bp, Homo sapien
tttatttggagcacacgattttgca

SEQ ID NO: 3730364 - DNA, 25 bp, Homo sapien
tatttggagcacacgattttgcaga

SEQ ID NO: 3730365 - DNA, 25 bp, Homo sapien
ggagcacacgattttgcagaggctt

SEQ ID NO: 3730366 - DNA, 25 bp, Homo sapien
ctgctttatttggagcacacgattt

SEQ ID NO: 3730367 - DNA, 25 bp, Homo sapien
ttttaggtgataaatctgggatcac

SEQ ID NO: 3730368 - DNA, 25 bp, Homo sapien
caaattggtagtaacctccttcgtg

SEQ ID NO: 3730369 - DNA, 25 bp, Homo sapien
tcagactgggttccacaataggact

SEQ ID NO: 3730370 - DNA, 25 bp, Homo sapien
gtggaccccattgtaacacagccct

SEQ ID NO: 3730371 - DNA, 25 bp, Homo sapien
tggaaacgatgtgactgtagaagtg

SEQ ID NO: 3730372 - DNA, 25 bp, Homo sapien
tcactgtggtgtcattggaaacgat

SEQ ID NO: 3730373 - DNA, 25 bp, Homo sapien
cagcctggttcaccaagtaggtgga

SEQ ID NO: 3730374 - DNA, 25 bp, Homo sapien
tagttgacaggctggttttttacaa

SEQ ID NO: 3730375 - DNA, 25 bp, Homo sapien
aaaggggagagaattttgcataagg

SEQ ID NO: 3730376 - DNA, 25 bp, Homo sapien
ctgaaaaggggagagaattttgcat

SEQ ID NO: 3730377 - DNA, 25 bp, Homo sapien
gaaaaggggagagaattttgcataa

SEQ ID NO: 3730378 - DNA, 25 bp, Homo sapien
aaggggagagaattttgcataagga

SEQ ID NO: 3730379 - DNA, 25 bp, Homo sapien
tcaaatgtgcccatgctcccgttct

SEQ ID NO: 3730380 - DNA, 25 bp, Homo sapien
gtagaagttgagagacagttggctc

SEQ ID NO: 3730381 - DNA, 25 bp, Homo sapien
cgttcttcacgtgaacagtggccac

SEQ ID NO: 3730382 - DNA, 25 bp, Homo sapien
gaagttgagagacagttggctctca

SEQ ID NO: 3730383 - DNA, 25 bp, Homo sapien
gatctgaaccgatttcggatgcctc

SEQ ID NO: 3730384 - DNA, 25 bp, Homo sapien
agatctgaaccgatttcggatgcct

SEQ ID NO: 3730385 - DNA, 25 bp, Homo sapien
cagatctgaaccgatttcggatgcc

SEQ ID NO: 3730386 - DNA, 25 bp, Homo sapien
aagggatacatgaagtcagccgagg

SEQ ID NO: 3730387 - DNA, 25 bp, Homo sapien
cagctgccactgcaagggatacatg

SEQ ID NO: 3730388 - DNA, 25 bp, Homo sapien
ccactgcaagggatacatgaagtca

SEQ ID NO: 3730389 - DNA, 25 bp, Homo sapien
tgcaagggatacatgaagtcagccg

SEQ ID NO: 3730390 - DNA, 25 bp, Homo sapien
tgcacgaggacggtttcatccgtgg

SEQ ID NO: 3730391 - DNA, 25 bp, Homo sapien
attgaattggaaggttgccctgtga

SEQ ID NO: 3730392 - DNA, 25 bp, Homo sapien
aattggaaggttgccctgtgatctc

SEQ ID NO: 3730393 - DNA, 25 bp, Homo sapien
atctctcccattctcatgcacgagg

SEQ ID NO: 3730394 - DNA, 25 bp, Homo sapien
tgtcgcagatgaacgtctcacagtg

SEQ ID NO: 3730395 - DNA, 25 bp, Homo sapien
gagtttctcactgtcgcagatgaac

SEQ ID NO: 3730396 - DNA, 25 bp, Homo sapien
gatgaacgtctcacagtgtaaccac

SEQ ID NO: 3730397 - DNA, 25 bp, Homo sapien
tcactgtcgcagatgaacgtctcac

SEQ ID NO: 3730398 - DNA, 25 bp, Homo sapien
gctcctccaatactggcacccttta

SEQ ID NO: 3730399 - DNA, 25 bp, Homo sapien
tccaatactggcaccctttaggtaa

SEQ ID NO: 3730400 - DNA, 25 bp, Homo sapien
tcctccaatactggcaccctttagg

SEQ ID NO: 3730401 - DNA, 25 bp, Homo sapien
ctccaatactggcaccctttaggta

SEQ ID NO: 3730402 - DNA, 25 bp, Homo sapien
agggagagctccacgaccaggactc

SEQ ID NO: 3730403 - DNA, 25 bp, Homo sapien
ggaggcgcttccgtttatcgcaggt

SEQ ID NO: 3730404 - DNA, 25 bp, Homo sapien
tccgcagggagagctccacgaccag

SEQ ID NO: 3730405 - DNA, 25 bp, Homo sapien
gtctcgcaggaggcgcttccgttta

SEQ ID NO: 3730406 - DNA, 25 bp, Homo sapien
tcagtaaaaatgctcaaaccggctg

SEQ ID NO: 3730407 - DNA, 25 bp, Homo sapien
cagcgtgaactcaaccgtttggaaa

SEQ ID NO: 3730408 - DNA, 25 bp, Homo sapien
tgcccacaggcacgactggtttggc

SEQ ID NO: 3730409 - DNA, 25 bp, Homo sapien
caggtgaaggttgtgcccacaggca

SEQ ID NO: 3730410 - DNA, 25 bp, Homo sapien
ctcaactccttcgtttggcttgagc

SEQ ID NO: 3730411 - DNA, 25 bp, Homo sapien
aactccttcgtttggcttgagctgt

SEQ ID NO: 3730412 - DNA, 25 bp, Homo sapien
caactccttcgtttggcttgagctg

SEQ ID NO: 3730413 - DNA, 25 bp, Homo sapien
actccttcgtttggcttgagctgtt

SEQ ID NO: 3730414 - DNA, 25 bp, Homo sapien
gagaagctatagagactggaaaatc

SEQ ID NO: 3730415 - DNA, 25 bp, Homo sapien
agctatagagactggaaaatcccct

SEQ ID NO: 3730416 - DNA, 25 bp, Homo sapien
ctgagaagctatagagactggaaaa

SEQ ID NO: 3730417 - DNA, 25 bp, Homo sapien
ctatagagactggaaaatcccctgc

SEQ ID NO: 3730418 - DNA, 25 bp, Homo sapien
cagttctgcttcatccgatttacct

SEQ ID NO: 3730419 - DNA, 25 bp, Homo sapien
gctttactaagacttggggaagtga

SEQ ID NO: 3730420 - DNA, 25 bp, Homo sapien
taaatgttggaatccaagggaagcc

SEQ ID NO: 3730421 - DNA, 25 bp, Homo sapien
atctggggatggctttactaagact

SEQ ID NO: 3730422 - DNA, 25 bp, Homo sapien
ggcacaaatccccaacatcatgatg

SEQ ID NO: 3730423 - DNA, 25 bp, Homo sapien
acaaatccccaacatcatgatgagg

SEQ ID NO: 3730424 - DNA, 25 bp, Homo sapien
tataacacggcacaaatccccaaca

SEQ ID NO: 3730425 - DNA, 25 bp, Homo sapien
ctataacacggcacaaatccccaac

SEQ ID NO: 3730426 - DNA, 25 bp, Homo sapien
tcattcgctgaggactattgtgggt

SEQ ID NO: 3730427 - DNA, 25 bp, Homo sapien
cattcgctgaggactattgtgggtg

SEQ ID NO: 3730428 - DNA, 25 bp, Homo sapien
ttcgctgaggactattgtgggtgga

SEQ ID NO: 3730429 - DNA, 25 bp, Homo sapien
gctgaggactattgtgggtggagga

SEQ ID NO: 3730430 - DNA, 25 bp, Homo sapien
tatgggcatattctggatcactggg

SEQ ID NO: 3730431 - DNA, 25 bp, Homo sapien
catttatctgtaggattgggtcacc

SEQ ID NO: 3730432 - DNA, 25 bp, Homo sapien
tgggtcaccaaactcacagcacttg

SEQ ID NO: 3730433 - DNA, 25 bp, Homo sapien
acagcacttgtgtcattggagtcac

SEQ ID NO: 3730434 - DNA, 25 bp, Homo sapien
tacacttcatgtatccggagatttc

SEQ ID NO: 3730435 - DNA, 25 bp, Homo sapien
gcttagagaccaagtctagaccaaa

SEQ ID NO: 3730436 - DNA, 25 bp, Homo sapien
tatttattccatagcgccaggtaga

SEQ ID NO: 3730437 - DNA, 25 bp, Homo sapien
tcctaaactcgttggaactccagct

SEQ ID NO: 3730438 - DNA, 25 bp, Homo sapien
tcccttctttggtatttgcaccgaa

SEQ ID NO: 3730439 - DNA, 25 bp, Homo sapien
ggcacgagagcattgttcccttctt

SEQ ID NO: 3730440 - DNA, 25 bp, Homo sapien
tttgcaccgaaccacctaacatctg

SEQ ID NO: 3730441 - DNA, 25 bp, Homo sapien
ccagatgggtgaattaaggcacgag

SEQ ID NO: 3730442 - DNA, 25 bp, Homo sapien
tatagactcttatagttcactctca

SEQ ID NO: 3730443 - DNA, 25 bp, Homo sapien
gatgctattgtgtatagactcttat

SEQ ID NO: 3730444 - DNA, 25 bp, Homo sapien
ctgtctgaagttgatgctattgtgt

SEQ ID NO: 3730445 - DNA, 25 bp, Homo sapien
gaagttgatgctattgtgtatagac

SEQ ID NO: 3730446 - DNA, 25 bp, Homo sapien
gtaggcttccagaccccctggaaca

SEQ ID NO: 3730447 - DNA, 25 bp, Homo sapien
taggcttccagaccccctggaacat

SEQ ID NO: 3730448 - DNA, 25 bp, Homo sapien
caatggcttctcaagggtcctgtca

SEQ ID NO: 3730449 - DNA, 25 bp, Homo sapien
agtagcaatggcttctcaagggtcc

SEQ ID NO: 3730450 - DNA, 25 bp, Homo sapien
ggcttctcaagggtcctgtcatccc

SEQ ID NO: 3730451 - DNA, 25 bp, Homo sapien
caagggtcctgtcatccctgtgata

SEQ ID NO: 3730452 - DNA, 25 bp, Homo sapien
caaattgggctagtaacaatggcaa

SEQ ID NO: 3730453 - DNA, 25 bp, Homo sapien
tcaaaggcatcacacaaattgggct

SEQ ID NO: 3730454 - DNA, 25 bp, Homo sapien
ttccattccagccaatcaaaggcat

SEQ ID NO: 3730455 - DNA, 25 bp, Homo sapien
gctagtaacaatggcaatgcttttc

SEQ ID NO: 3730456 - DNA, 25 bp, Homo sapien
ggccacgcacagacaacttctgttc

SEQ ID NO: 3730457 - DNA, 25 bp, Homo sapien
taatcataagggtaacttctaggcc

SEQ ID NO: 3730458 - DNA, 25 bp, Homo sapien
ccatccgatgaaatagcatggcctc

SEQ ID NO: 3730459 - DNA, 25 bp, Homo sapien
actttgaacctctgctggccacgca

SEQ ID NO: 3730460 - DNA, 25 bp, Homo sapien
ggctcatcgcattgcattccactta

SEQ ID NO: 3730461 - DNA, 25 bp, Homo sapien
cagtgtgatcacaggctcatcgcat

SEQ ID NO: 3730462 - DNA, 25 bp, Homo sapien
gatcacaggctcatcgcattgcatt

SEQ ID NO: 3730463 - DNA, 25 bp, Homo sapien
tcgcattgcattccacttaggtcaa

SEQ ID NO: 3730464 - DNA, 25 bp, Homo sapien
gaagagaaccttgctgtcatcaccc

SEQ ID NO: 3730465 - DNA, 25 bp, Homo sapien
ccatttgttaggaatccaccagagg

SEQ ID NO: 3730466 - DNA, 25 bp, Homo sapien
taggaatccaccagaggcctagtat

SEQ ID NO: 3730467 - DNA, 25 bp, Homo sapien
ttaggaacctgtaagcccgaactga

SEQ ID NO: 3730468 - DNA, 25 bp, Homo sapien
ttctagaatagtgagtacgcggtgt

SEQ ID NO: 3730469 - DNA, 25 bp, Homo sapien
tagaatagtgagtacgcggtgtgct

SEQ ID NO: 3730470 - DNA, 25 bp, Homo sapien
gaatagtgagtacgcggtgtgctct

SEQ ID NO: 3730471 - DNA, 25 bp, Homo sapien
ctagaatagtgagtacgcggtgtgc

SEQ ID NO: 3730472 - DNA, 25 bp, Homo sapien
cctgataggtcacagccatgtttac

SEQ ID NO: 3730473 - DNA, 25 bp, Homo sapien
caaacttttgcttagtagaagctgc

SEQ ID NO: 3730474 - DNA, 25 bp, Homo sapien
agctgcatcttcagaaccggcacca

SEQ ID NO: 3730475 - DNA, 25 bp, Homo sapien
cagtttgatcttaactctgctttcc

SEQ ID NO: 3730476 - DNA, 25 bp, Homo sapien
cttcagaaccggcaccatagctgtt

SEQ ID NO: 3730477 - DNA, 25 bp, Homo sapien
tatacaatcccgctacaatgctgac

SEQ ID NO: 3730478 - DNA, 25 bp, Homo sapien
tacttgtgagggtacctaaaatgcc

SEQ ID NO: 3730479 - DNA, 25 bp, Homo sapien
taataacctttaggcttgggcatcc

SEQ ID NO: 3730480 - DNA, 25 bp, Homo sapien
aatgagagagataagcccaggaccc

SEQ ID NO: 3730481 - DNA, 25 bp, Homo sapien
tagaagttacctgttcaaacacttg

SEQ ID NO: 3730482 - DNA, 25 bp, Homo sapien
ttcaaaggtagaagttacctgttca

SEQ ID NO: 3730483 - DNA, 25 bp, Homo sapien
agaagttacctgttcaaacacttgt

SEQ ID NO: 3730484 - DNA, 25 bp, Homo sapien
tcaaaggtagaagttacctgttcaa

SEQ ID NO: 3730485 - DNA, 25 bp, Homo sapien
ctgagagtggccaacacactcccct

SEQ ID NO: 3730486 - DNA, 25 bp, Homo sapien
acacactcccctggaacctttgaat

SEQ ID NO: 3730487 - DNA, 25 bp, Homo sapien
caacacactcccctggaacctttga

SEQ ID NO: 3730488 - DNA, 25 bp, Homo sapien
cacagctcctaggactgactgggac

SEQ ID NO: 3730489 - DNA, 25 bp, Homo sapien
cacacccgaagctactgtgtactgt

SEQ ID NO: 3730490 - DNA, 25 bp, Homo sapien
tcagcaccacattcaggcacttcta

SEQ ID NO: 3730491 - DNA, 25 bp, Homo sapien
tgactgggacacacccgaagctact

SEQ ID NO: 3730492 - DNA, 25 bp, Homo sapien
ggagccgcctttggacatggaagaa

SEQ ID NO: 3730493 - DNA, 25 bp, Homo sapien
ggggcctgtggcattccatcctctg

SEQ ID NO: 3730494 - DNA, 25 bp, Homo sapien
tctcagagaacacaagagctgagcc

SEQ ID NO: 3730495 - DNA, 25 bp, Homo sapien
ccgcctttggacatggaagaaagat

SEQ ID NO: 3730496 - DNA, 25 bp, Homo sapien
gttctttctacagagcagttcttaa

SEQ ID NO: 3730497 - DNA, 25 bp, Homo sapien
ttctacagagcagttcttaaaagct

SEQ ID NO: 3730498 - DNA, 25 bp, Homo sapien
ctttgctggagctagattagggttt

SEQ ID NO: 3730499 - DNA, 25 bp, Homo sapien
cacgaaggctcacaggaagttcagc

SEQ ID NO: 3730500 - DNA, 25 bp, Homo sapien
cagggctgtgagtcgttcaattggc

SEQ ID NO: 3730501 - DNA, 25 bp, Homo sapien
taagcaagtcaggaacgacagggct

SEQ ID NO: 3730502 - DNA, 25 bp, Homo sapien
aagctaccctggctccgtgtcaaag

SEQ ID NO: 3730503 - DNA, 25 bp, Homo sapien
gaaagtctggctagagggtacctca

SEQ ID NO: 3730504 - DNA, 25 bp, Homo sapien
agaaggccggcccagagtgtcccca

SEQ ID NO: 3730505 - DNA, 25 bp, Homo sapien
cgtgctcggggacttcacttcctgg

SEQ ID NO: 3730506 - DNA, 25 bp, Homo sapien
gctgtcccgagtcaggccatgtcag

SEQ ID NO: 3730507 - DNA, 25 bp, Homo sapien
tgtcaggctttctaacgtgctcggg

SEQ ID NO: 3730508 - DNA, 25 bp, Homo sapien
gacagggtggcttcagagcgtccat

SEQ ID NO: 3730509 - DNA, 25 bp, Homo sapien
tccttcttccctcgctcgtggttcc

SEQ ID NO: 3730510 - DNA, 25 bp, Homo sapien
tcgctcgtggttcctccagagacag

SEQ ID NO: 3730511 - DNA, 25 bp, Homo sapien
gggccgcatctctcagtgcttctag

SEQ ID NO: 3730512 - DNA, 25 bp, Homo sapien
gagaccaatcatctcattaggttgg

SEQ ID NO: 3730513 - DNA, 25 bp, Homo sapien
ttcttcacggagagaccaatcatct

SEQ ID NO: 3730514 - DNA, 25 bp, Homo sapien
atctactttcttcacggagagacca

SEQ ID NO: 3730515 - DNA, 25 bp, Homo sapien
tctcattaggttggatggagccaaa

SEQ ID NO: 3730516 - DNA, 25 bp, Homo sapien
gctgatgtctagtaagatctcaact

SEQ ID NO: 3730517 - DNA, 25 bp, Homo sapien
gtctagtaagatctcaactatgatt

SEQ ID NO: 3730518 - DNA, 25 bp, Homo sapien
caatcaagctgatgtctagtaagat

SEQ ID NO: 3730519 - DNA, 25 bp, Homo sapien
gtaagatctcaactatgattccaac

SEQ ID NO: 3730520 - DNA, 25 bp, Homo sapien
ggggccctgaaactgtgtctttcaa

SEQ ID NO: 3730521 - DNA, 25 bp, Homo sapien
ctaaccgataagaaaccagagcaaa

SEQ ID NO: 3730522 - DNA, 25 bp, Homo sapien
ctcttccaagccctcatgttgtgta

SEQ ID NO: 3730523 - DNA, 25 bp, Homo sapien
caagccctcatgttgtgtaaaatgc

SEQ ID NO: 3730524 - DNA, 25 bp, Homo sapien
taccagagacaaagacacgttgagg

SEQ ID NO: 3730525 - DNA, 25 bp, Homo sapien
tgatgaaacggtgagaaatgcaacg

SEQ ID NO: 3730526 - DNA, 25 bp, Homo sapien
gacatgccttttcctcgtgcatcag

SEQ ID NO: 3730527 - DNA, 25 bp, Homo sapien
gtactgagacaactggctagccatt

SEQ ID NO: 3730528 - DNA, 25 bp, Homo sapien
gatgactggagccacagtcactcat

SEQ ID NO: 3730529 - DNA, 25 bp, Homo sapien
gatggatgactggagccacagtcac

SEQ ID NO: 3730530 - DNA, 25 bp, Homo sapien
tggatgactggagccacagtcactc

SEQ ID NO: 3730531 - DNA, 25 bp, Homo sapien
ctgtggatggatgactggagccaca

SEQ ID NO: 3730532 - DNA, 25 bp, Homo sapien
catgtcaaaaggcttactccacttt

SEQ ID NO: 3730533 - DNA, 25 bp, Homo sapien
caggatgtcccatgtcaaaaggctt

SEQ ID NO: 3730534 - DNA, 25 bp, Homo sapien
cactttttgacgtggtgatggtgac

SEQ ID NO: 3730535 - DNA, 25 bp, Homo sapien
actccactttttgacgtggtgatgg

SEQ ID NO: 3730536 - DNA, 25 bp, Homo sapien
gtgaacagcagcaggaaattcagac

SEQ ID NO: 3730537 - DNA, 25 bp, Homo sapien
ttgtgaacagcagcaggaaattcag

SEQ ID NO: 3730538 - DNA, 25 bp, Homo sapien
ctttgtgaacagcagcaggaaattc

SEQ ID NO: 3730539 - DNA, 25 bp, Homo sapien
tttgtgaacagcagcaggaaattca

SEQ ID NO: 3730540 - DNA, 25 bp, Homo sapien
caagaagaggtaagacgggttgagg

SEQ ID NO: 3730541 - DNA, 25 bp, Homo sapien
aattcccacagactgattgttcagg

SEQ ID NO: 3730542 - DNA, 25 bp, Homo sapien
aatgtcaggatgcagatcaacgccg

SEQ ID NO: 3730543 - DNA, 25 bp, Homo sapien
aggtctggtgatcagccacaagaag

SEQ ID NO: 3730544 - DNA, 25 bp, Homo sapien
cagcgagtcctctttggaaaacctc

SEQ ID NO: 3730545 - DNA, 25 bp, Homo sapien
acctcatacatagtcttggcatctg

SEQ ID NO: 3730546 - DNA, 25 bp, Homo sapien
gacacagcgagtcctctttggaaaa

SEQ ID NO: 3730547 - DNA, 25 bp, Homo sapien
cagacacagcgagtcctctttggaa

SEQ ID NO: 3730548 - DNA, 25 bp, Homo sapien
ttgtcttcttcaggcaaggacagac

SEQ ID NO: 3730549 - DNA, 25 bp, Homo sapien
ggcaaggacagaccaccaggcttac

SEQ ID NO: 3730550 - DNA, 25 bp, Homo sapien
ttcaggcaaggacagaccaccaggc

SEQ ID NO: 3730551 - DNA, 25 bp, Homo sapien
cttcttcaggcaaggacagaccacc

SEQ ID NO: 3730552 - DNA, 25 bp, Homo sapien
ggccccatcggactcttcagataga

SEQ ID NO: 3730553 - DNA, 25 bp, Homo sapien
gacggataaaagttacacggccaga

SEQ ID NO: 3730554 - DNA, 25 bp, Homo sapien
cacagaaagagctataagccagcag

SEQ ID NO: 3730555 - DNA, 25 bp, Homo sapien
ttaacatgcagaagtcaagggacgg

SEQ ID NO: 3730556 - DNA, 25 bp, Homo sapien
tcttctaagatatcaaggcttgtaa

SEQ ID NO: 3730557 - DNA, 25 bp, Homo sapien
gaagtagtggtattaggctgaagaa

SEQ ID NO: 3730558 - DNA, 25 bp, Homo sapien
taagtttgggaacatccatttacaa

SEQ ID NO: 3730559 - DNA, 25 bp, Homo sapien
tactttcatgacttgtttgttcatg

SEQ ID NO: 3730560 - DNA, 25 bp, Homo sapien
ccatctgtagggctggtttggtttt

SEQ ID NO: 3730561 - DNA, 25 bp, Homo sapien
ctggtttggttttctatatcccaag

SEQ ID NO: 3730562 - DNA, 25 bp, Homo sapien
ggttttctatatcccaagcagggcc

SEQ ID NO: 3730563 - DNA, 25 bp, Homo sapien
tctatatcccaagcagggcccattg

SEQ ID NO: 3730564 - DNA, 25 bp, Homo sapien
ccaggtactctgctctatcagacac

SEQ ID NO: 3730565 - DNA, 25 bp, Homo sapien
aagatgccgacaaactggtctggtg

SEQ ID NO: 3730566 - DNA, 25 bp, Homo sapien
actggtctggtgatgatttataacc

SEQ ID NO: 3730567 - DNA, 25 bp, Homo sapien
acccaggtactctgctctatcagac

SEQ ID NO: 3730568 - DNA, 25 bp, Homo sapien
gtacagagagaagttcaagtaagga

SEQ ID NO: 3730569 - DNA, 25 bp, Homo sapien
ctgtacagagagaagttcaagtaag

SEQ ID NO: 3730570 - DNA, 25 bp, Homo sapien
tgtacagagagaagttcaagtaagg

SEQ ID NO: 3730571 - DNA, 25 bp, Homo sapien
taacaagccaattcggagatgatcc

SEQ ID NO: 3730572 - DNA, 25 bp, Homo sapien
tatgtacgatggcttctggtcccaa

SEQ ID NO: 3730573 - DNA, 25 bp, Homo sapien
aaggtgtcatacagaggtacagcta

SEQ ID NO: 3730574 - DNA, 25 bp, Homo sapien
taccatagagtacgtgtaacaagcc

SEQ ID NO: 3730575 - DNA, 25 bp, Homo sapien
tgtccaaaggagattacacctgcaa

SEQ ID NO: 3730576 - DNA, 25 bp, Homo sapien
tctctctgctaagtacctgattgcc

SEQ ID NO: 3730577 - DNA, 25 bp, Homo sapien
caaaatagaaccagaggtcattccc

SEQ ID NO: 3730578 - DNA, 25 bp, Homo sapien
agttttcaaagctaacaggtgtcca

SEQ ID NO: 3730579 - DNA, 25 bp, Homo sapien
ttggggtgtgtcacagatcaccatg

SEQ ID NO: 3730580 - DNA, 25 bp, Homo sapien
ttttggggtgtgtcacagatcacca

SEQ ID NO: 3730581 - DNA, 25 bp, Homo sapien
tttggggtgtgtcacagatcaccat

SEQ ID NO: 3730582 - DNA, 25 bp, Homo sapien
ctcagcatcatatagggataagatc

SEQ ID NO: 3730583 - DNA, 25 bp, Homo sapien
tacattccctatcagcaccaatgcc

SEQ ID NO: 3730584 - DNA, 25 bp, Homo sapien
gggataagatctcaattccactctt

SEQ ID NO: 3730585 - DNA, 25 bp, Homo sapien
aaggatgatcaccttcaggctcggg

SEQ ID NO: 3730586 - DNA, 25 bp, Homo sapien
tggacaagcattggagctgcaagct

SEQ ID NO: 3730587 - DNA, 25 bp, Homo sapien
gtgttggacaagcattggagctgca

SEQ ID NO: 3730588 - DNA, 25 bp, Homo sapien
ccaaggtgttggacaagcattggag

SEQ ID NO: 3730589 - DNA, 25 bp, Homo sapien
gacaagcattggagctgcaagctaa

SEQ ID NO: 3730590 - DNA, 25 bp, Homo sapien
ttctgaagtgctctttgcctaggtt

SEQ ID NO: 3730591 - DNA, 25 bp, Homo sapien
ttttctgaagtgctctttgcctagg

SEQ ID NO: 3730592 - DNA, 25 bp, Homo sapien
cacaggttttctgaagtgctctttg

SEQ ID NO: 3730593 - DNA, 25 bp, Homo sapien
caggttttctgaagtgctctttgcc

SEQ ID NO: 3730594 - DNA, 25 bp, Homo sapien
gtcccactggtgaagcagatgacgc

SEQ ID NO: 3730595 - DNA, 25 bp, Homo sapien
ggtgaagcagatgacgctcaggtct

SEQ ID NO: 3730596 - DNA, 25 bp, Homo sapien
acgctcaggtcttctgggctaggag

SEQ ID NO: 3730597 - DNA, 25 bp, Homo sapien
agatgacgctcaggtcttctgggct

SEQ ID NO: 3730598 - DNA, 25 bp, Homo sapien
agatactttatgtagctaataggta

SEQ ID NO: 3730599 - DNA, 25 bp, Homo sapien
atactttatgtagctaataggtagc

SEQ ID NO: 3730600 - DNA, 25 bp, Homo sapien
gatactttatgtagctaataggtag

SEQ ID NO: 3730601 - DNA, 25 bp, Homo sapien
ttttgatgggttatcatggctcctt

SEQ ID NO: 3730602 - DNA, 25 bp, Homo sapien
tttgatgggttatcatggctccttt

SEQ ID NO: 3730603 - DNA, 25 bp, Homo sapien
ttgatgggttatcatggctcctttg

SEQ ID NO: 3730604 - DNA, 25 bp, Homo sapien
tgatgggttatcatggctcctttgg

SEQ ID NO: 3730605 - DNA, 25 bp, Homo sapien
tgtacaatcctctcaaacatatgag

SEQ ID NO: 3730606 - DNA, 25 bp, Homo sapien
ctgtacaatcctctcaaacatatga

SEQ ID NO: 3730607 - DNA, 25 bp, Homo sapien
tacaatcctctcaaacatatgagcc

SEQ ID NO: 3730608 - DNA, 25 bp, Homo sapien
gtacaatcctctcaaacatatgagc

SEQ ID NO: 3730609 - DNA, 25 bp, Homo sapien
tcctgttaaggagtcgaggcaccgc

SEQ ID NO: 3730610 - DNA, 25 bp, Homo sapien
gcaaccgaatatccccttggaagaa

SEQ ID NO: 3730611 - DNA, 25 bp, Homo sapien
ttcatgtcgtcagccagcaaccgaa

SEQ ID NO: 3730612 - DNA, 25 bp, Homo sapien
ggaagaatccaactctggctccaca

SEQ ID NO: 3730613 - DNA, 25 bp, Homo sapien
taactgaacttggagaattcccacc

SEQ ID NO: 3730614 - DNA, 25 bp, Homo sapien
caccctactggaagtcagattcaag

SEQ ID NO: 3730615 - DNA, 25 bp, Homo sapien
agctcgcatgatttccctggtctcc

SEQ ID NO: 3730616 - DNA, 25 bp, Homo sapien
tataaacaaggtgtctttagccaca

SEQ ID NO: 3730617 - DNA, 25 bp, Homo sapien
tgagcttgtcccagaaactatcatg

SEQ ID NO: 3730618 - DNA, 25 bp, Homo sapien
gtcccagaaactatcatgcctgatg

SEQ ID NO: 3730619 - DNA, 25 bp, Homo sapien
aaagatgagcttgtcccagaaacta

SEQ ID NO: 3730620 - DNA, 25 bp, Homo sapien
aaactatcatgcctgatgataccct

SEQ ID NO: 3730621 - DNA, 25 bp, Homo sapien
aatgtcatgactgaagtggacatgg

SEQ ID NO: 3730622 - DNA, 25 bp, Homo sapien
tgctgcccggaagaatgtcatgact

SEQ ID NO: 3730623 - DNA, 25 bp, Homo sapien
tgacaattacacgaacccttccgcc

SEQ ID NO: 3730624 - DNA, 25 bp, Homo sapien
tggacatgggggcagctccagtgac

SEQ ID NO: 3730625 - DNA, 25 bp, Homo sapien
ctgatgtccagtccccaggtaatgt

SEQ ID NO: 3730626 - DNA, 25 bp, Homo sapien
gtccagtccccaggtaatgtaaatg

SEQ ID NO: 3730627 - DNA, 25 bp, Homo sapien
taaatgtacagccacctgtgcattc

SEQ ID NO: 3730628 - DNA, 25 bp, Homo sapien
gcattctgtttgaccataagcttca

SEQ ID NO: 3730629 - DNA, 25 bp, Homo sapien
gcaagccaggggcaccccaacgtga

SEQ ID NO: 3730630 - DNA, 25 bp, Homo sapien
tgtaaagtagttcatgtcagccaca

SEQ ID NO: 3730631 - DNA, 25 bp, Homo sapien
tcttccagcttcacgtaattgcaag

SEQ ID NO: 3730632 - DNA, 25 bp, Homo sapien
ctgtaaagtagttcatgtcagccac

SEQ ID NO: 3730633 - DNA, 25 bp, Homo sapien
tcagggtccttcaggtatcctttga

SEQ ID NO: 3730634 - DNA, 25 bp, Homo sapien
cgaccaatgtctcctgtgtgaagcc

SEQ ID NO: 3730635 - DNA, 25 bp, Homo sapien
aacacgtttgtacccttgatgcaga

SEQ ID NO: 3730636 - DNA, 25 bp, Homo sapien
cgggagccagcgaccaatgtctcct

SEQ ID NO: 3730637 - DNA, 25 bp, Homo sapien
cgtgtacaaaaatttgtaacactgg

SEQ ID NO: 3730638 - DNA, 25 bp, Homo sapien
ttctttttacggtcgatgatcttca

SEQ ID NO: 3730639 - DNA, 25 bp, Homo sapien
gtgcaatgtattctccttgggccag

SEQ ID NO: 3730640 - DNA, 25 bp, Homo sapien
ttttctatcttctctggtgcaatgt

SEQ ID NO: 3730641 - DNA, 25 bp, Homo sapien
tggttttggcacagttcctcaaagg

SEQ ID NO: 3730642 - DNA, 25 bp, Homo sapien
aaaggagcccttcaccccaagcttg

SEQ ID NO: 3730643 - DNA, 25 bp, Homo sapien
cccaagcttggctgcaaatgaggga

SEQ ID NO: 3730644 - DNA, 25 bp, Homo sapien
gggaagtacatctgtgtcaggaacc

SEQ ID NO: 3730645 - DNA, 25 bp, Homo sapien
gcaagtcttctaaaatggcttccct

SEQ ID NO: 3730646 - DNA, 25 bp, Homo sapien
tttctgcaagtcttctaaaatggct

SEQ ID NO: 3730647 - DNA, 25 bp, Homo sapien
tctgcaagtcttctaaaatggcttc

SEQ ID NO: 3730648 - DNA, 25 bp, Homo sapien
gtcttctaaaatggcttcccttaca

SEQ ID NO: 3730649 - DNA, 25 bp, Homo sapien
tagtgatttggacttctctgcagag

SEQ ID NO: 3730650 - DNA, 25 bp, Homo sapien
agaaagtgaggttgatgcagtgaaa

SEQ ID NO: 3730651 - DNA, 25 bp, Homo sapien
ctgcagagccccctgagtgctctgt

SEQ ID NO: 3730652 - DNA, 25 bp, Homo sapien
cattagtgatttggacttctctgca

SEQ ID NO: 3730653 - DNA, 25 bp, Homo sapien
tggatgtgctcatacaggctgtcaa

SEQ ID NO: 3730654 - DNA, 25 bp, Homo sapien
ggctgtcaatttgggtccgaaagta

SEQ ID NO: 3730655 - DNA, 25 bp, Homo sapien
tttcaatgttggtgtcaagagccca

SEQ ID NO: 3730656 - DNA, 25 bp, Homo sapien
tcaatggaaaatggctctggatgaa

SEQ ID NO: 3730657 - DNA, 25 bp, Homo sapien
ccattttctcacaagcagtgcacag

SEQ ID NO: 3730658 - DNA, 25 bp, Homo sapien
agtgcacagtgggccggcaggtact

SEQ ID NO: 3730659 - DNA, 25 bp, Homo sapien
cattttctcacaagcagtgcacagt

SEQ ID NO: 3730660 - DNA, 25 bp, Homo sapien
gcagtgcacagtgggccggcaggta

SEQ ID NO: 3730661 - DNA, 25 bp, Homo sapien
aaagctatggctttagagtttaaca

SEQ ID NO: 3730662 - DNA, 25 bp, Homo sapien
taagtttacacattatatgtctcaa

SEQ ID NO: 3730663 - DNA, 25 bp, Homo sapien
ctatggctttagagtttaacaggtt

SEQ ID NO: 3730664 - DNA, 25 bp, Homo sapien
actaagtttacacattatatgtctc

SEQ ID NO: 3730665 - DNA, 25 bp, Homo sapien
taatttacgcagaagagcatcggag

SEQ ID NO: 3730666 - DNA, 25 bp, Homo sapien
gcatgttgataaaagtagccctgaa

SEQ ID NO: 3730667 - DNA, 25 bp, Homo sapien
gggatcttgaagacaggcatgttga

SEQ ID NO: 3730668 - DNA, 25 bp, Homo sapien
cagcagcaaactgtagggaacagat

SEQ ID NO: 3730669 - DNA, 25 bp, Homo sapien
gaaacaacatgtgttatctgtgggt

SEQ ID NO: 3730670 - DNA, 25 bp, Homo sapien
taaggtagagcaggaactctaatcc

SEQ ID NO: 3730671 - DNA, 25 bp, Homo sapien
actctaatccaagggtgggggagat

SEQ ID NO: 3730672 - DNA, 25 bp, Homo sapien
gggagatcagttggttccttcacag

SEQ ID NO: 3730673 - DNA, 25 bp, Homo sapien
tttcttatgcactgcacactctgga

SEQ ID NO: 3730674 - DNA, 25 bp, Homo sapien
gaagccattctgcatatgcctttga

SEQ ID NO: 3730675 - DNA, 25 bp, Homo sapien
catttcatccaagtaagttaacggc

SEQ ID NO: 3730676 - DNA, 25 bp, Homo sapien
tggacctcacctgcagatacagttc

SEQ ID NO: 3730677 - DNA, 25 bp, Homo sapien
taaaccttgctctgaaaatagtact

SEQ ID NO: 3730678 - DNA, 25 bp, Homo sapien
taatcattgttacggagaggtaccg

SEQ ID NO: 3730679 - DNA, 25 bp, Homo sapien
tcagacggatgacatggtaattgtg

SEQ ID NO: 3730680 - DNA, 25 bp, Homo sapien
taccgtggtgcagtagttaagaaca

SEQ ID NO: 3730681 - DNA, 25 bp, Homo sapien
taggaacaaccatagctgttgggat

SEQ ID NO: 3730682 - DNA, 25 bp, Homo sapien
tgaagatcgacatgagtgcagcccg

SEQ ID NO: 3730683 - DNA, 25 bp, Homo sapien
gagagatcctcttccaattgttcca

SEQ ID NO: 3730684 - DNA, 25 bp, Homo sapien
gttgctgcgatagctctcctttggg

SEQ ID NO: 3730685 - DNA, 25 bp, Homo sapien
tctctattgtaggtcacttgggtca

SEQ ID NO: 3730686 - DNA, 25 bp, Homo sapien
agttacatgtgtctatttgagccca

SEQ ID NO: 3730687 - DNA, 25 bp, Homo sapien
tatcaacagtacacggcaagacttt

SEQ ID NO: 3730688 - DNA, 25 bp, Homo sapien
ccactggaggtctataagggatttg

SEQ ID NO: 3730689 - DNA, 25 bp, Homo sapien
catgtttgtcggtccgggctttgtc

SEQ ID NO: 3730690 - DNA, 25 bp, Homo sapien
tacaactggaggaagtgtgaatttc

SEQ ID NO: 3730691 - DNA, 25 bp, Homo sapien
ttcaatgccatgtttgtcggtccgg

SEQ ID NO: 3730692 - DNA, 25 bp, Homo sapien
tgataaattggactgtcatgattct

SEQ ID NO: 3730693 - DNA, 25 bp, Homo sapien
gcacaagtcaacagcgtctgctgcg

SEQ ID NO: 3730694 - DNA, 25 bp, Homo sapien
tgctccatgactcgggcgggaaact

SEQ ID NO: 3730695 - DNA, 25 bp, Homo sapien
gctgcgtggtagtctgtattatcca

SEQ ID NO: 3730696 - DNA, 25 bp, Homo sapien
tctgctccatgactcgggcgggaaa

SEQ ID NO: 3730697 - DNA, 25 bp, Homo sapien
tgacagtaacagagactgcgcaggg

SEQ ID NO: 3730698 - DNA, 25 bp, Homo sapien
ggcttgtagcaggtcccgcactcca

SEQ ID NO: 3730699 - DNA, 25 bp, Homo sapien
tctcgctgccagggtttgctctctg

SEQ ID NO: 3730700 - DNA, 25 bp, Homo sapien
aggtgctcggcttgtagcaggtccc

SEQ ID NO: 3730701 - DNA, 25 bp, Homo sapien
tgttctgggaatcggctccggatcc

SEQ ID NO: 3730702 - DNA, 25 bp, Homo sapien
tctccggaaattgggttgcgtgcgt

SEQ ID NO: 3730703 - DNA, 25 bp, Homo sapien
tgttcgtcgcaatctcggttctccg

SEQ ID NO: 3730704 - DNA, 25 bp, Homo sapien
ggaaaagcgccccaattagtgcctc

SEQ ID NO: 3730705 - DNA, 25 bp, Homo sapien
cggaaggtgcccccgagagcagaac

SEQ ID NO: 3730706 - DNA, 25 bp, Homo sapien
aaggtgcccccgagagcagaacgga

SEQ ID NO: 3730707 - DNA, 25 bp, Homo sapien
ccccggaaggtgcccccgagagcag

SEQ ID NO: 3730708 - DNA, 25 bp, Homo sapien
ctaggtcagggaaagggcctcgagg

SEQ ID NO: 3730709 - DNA, 25 bp, Homo sapien
ccggaacgagtagcccaggccaaag

SEQ ID NO: 3730710 - DNA, 25 bp, Homo sapien
gctccggaacgagtagcccaggcca

SEQ ID NO: 3730711 - DNA, 25 bp, Homo sapien
cggaacgagtagcccaggccaaagc

SEQ ID NO: 3730712 - DNA, 25 bp, Homo sapien
tccggaacgagtagcccaggccaaa

SEQ ID NO: 3730713 - DNA, 25 bp, Homo sapien
cgcaatcttgctggtgatctctgca

SEQ ID NO: 3730714 - DNA, 25 bp, Homo sapien
tctctgcagtgagcaccgcgaagtc

SEQ ID NO: 3730715 - DNA, 25 bp, Homo sapien
tgggaccctcgcaatcttgctggtg

SEQ ID NO: 3730716 - DNA, 25 bp, Homo sapien
cgtaaccttcgaagtcggacgacat

SEQ ID NO: 3730717 - DNA, 25 bp, Homo sapien
agtctagcatagaaaataagatgtg

SEQ ID NO: 3730718 - DNA, 25 bp, Homo sapien
tcctgagcccctaataagtaaacgc

SEQ ID NO: 3730719 - DNA, 25 bp, Homo sapien
catagttgacagtctagcatagaaa

SEQ ID NO: 3730720 - DNA, 25 bp, Homo sapien
acagctcccaccttcacatagttga

SEQ ID NO: 3730721 - DNA, 25 bp, Homo sapien
agatgagtggggtataagttcagag

SEQ ID NO: 3730722 - DNA, 25 bp, Homo sapien
atgagtggggtataagttcagagat

SEQ ID NO: 3730723 - DNA, 25 bp, Homo sapien
tgagtggggtataagttcagagatc

SEQ ID NO: 3730724 - DNA, 25 bp, Homo sapien
gagtggggtataagttcagagatcc

SEQ ID NO: 3730725 - DNA, 25 bp, Homo sapien
tgttcccttacttggactcataaac

SEQ ID NO: 3730726 - DNA, 25 bp, Homo sapien
ggctctgggactcaattcaaaggaa

SEQ ID NO: 3730727 - DNA, 25 bp, Homo sapien
gggtcacttttagctcaacactgca

SEQ ID NO: 3730728 - DNA, 25 bp, Homo sapien
taaattatagttcacctcctctggg

SEQ ID NO: 3730729 - DNA, 25 bp, Homo sapien
aaatcaagacgatctccggcagtgg

SEQ ID NO: 3730730 - DNA, 25 bp, Homo sapien
cttagaaatgtagggtcaaaccact

SEQ ID NO: 3730731 - DNA, 25 bp, Homo sapien
ccctcattaaagtgtcaaggctcac

SEQ ID NO: 3730732 - DNA, 25 bp, Homo sapien
tagtgctgacgtacaaacaagtctt

SEQ ID NO: 3730733 - DNA, 25 bp, Homo sapien
cttaatcagcacagaacaccctcat

SEQ ID NO: 3730734 - DNA, 25 bp, Homo sapien
aacaaacaataataccaagaaattg

SEQ ID NO: 3730735 - DNA, 25 bp, Homo sapien
tgaaacaaacaataataccaagaaa

SEQ ID NO: 3730736 - DNA, 25 bp, Homo sapien
ctgaaacaaacaataataccaagaa

SEQ ID NO: 3730737 - DNA, 25 bp, Homo sapien
cagttctttcgcttcttcaagctgt

SEQ ID NO: 3730738 - DNA, 25 bp, Homo sapien
agttctttcgcttcttcaagctgtt

SEQ ID NO: 3730739 - DNA, 25 bp, Homo sapien
atctgtttcgagttttcccatttct

SEQ ID NO: 3730740 - DNA, 25 bp, Homo sapien
ttggggtggtatctctcggacttcc

SEQ ID NO: 3730741 - DNA, 25 bp, Homo sapien
catccctcgactttggggtggtatc

SEQ ID NO: 3730742 - DNA, 25 bp, Homo sapien
tgttgctgtacatccctcgactttg

SEQ ID NO: 3730743 - DNA, 25 bp, Homo sapien
taaatatgacaaagggtcgaatttg

SEQ ID NO: 3730744 - DNA, 25 bp, Homo sapien
aatatgacaaagggtcgaatttgac

SEQ ID NO: 3730745 - DNA, 25 bp, Homo sapien
aaatatgacaaagggtcgaatttga

SEQ ID NO: 3730746 - DNA, 25 bp, Homo sapien
gaagtcttgattcccatactgagaa

SEQ ID NO: 3730747 - DNA, 25 bp, Homo sapien
catggaaacgtgaagagggaagaca

SEQ ID NO: 3730748 - DNA, 25 bp, Homo sapien
tagcctttcacaaagcagttggaga

SEQ ID NO: 3730749 - DNA, 25 bp, Homo sapien
caatgatgtcattcgtgtgggcctt

SEQ ID NO: 3730750 - DNA, 25 bp, Homo sapien
taaactcagatactcaagttgtcca

SEQ ID NO: 3730751 - DNA, 25 bp, Homo sapien
tcataaactcagatactcaagttgt

SEQ ID NO: 3730752 - DNA, 25 bp, Homo sapien
ataaactcagatactcaagttgtcc

SEQ ID NO: 3730753 - DNA, 25 bp, Homo sapien
cataaactcagatactcaagttgtc

SEQ ID NO: 3730754 - DNA, 25 bp, Homo sapien
gaaactgcactgttaatggtagtct

SEQ ID NO: 3730755 - DNA, 25 bp, Homo sapien
gattcaaagaaggtccagatagctg

SEQ ID NO: 3730756 - DNA, 25 bp, Homo sapien
cagatagctgaggtttaaaatgcac

SEQ ID NO: 3730757 - DNA, 25 bp, Homo sapien
gcccaaagatcagacaatagtttgt

SEQ ID NO: 3730758 - DNA, 25 bp, Homo sapien
gacagaataccttgagttagtggca

SEQ ID NO: 3730759 - DNA, 25 bp, Homo sapien
ttgagcaccaacaaactggcacccg

SEQ ID NO: 3730760 - DNA, 25 bp, Homo sapien
gccagtgacagttgtttagccccag

SEQ ID NO: 3730761 - DNA, 25 bp, Homo sapien
tgaaatacattaccaagggcacaag

SEQ ID NO: 3730762 - DNA, 25 bp, Homo sapien
cccagccagaaacttcattcttaaa

SEQ ID NO: 3730763 - DNA, 25 bp, Homo sapien
acccagccagaaacttcattcttaa

SEQ ID NO: 3730764 - DNA, 25 bp, Homo sapien
cttcattcttaaagcatcttaattc

SEQ ID NO: 3730765 - DNA, 25 bp, Homo sapien
agaaacttcattcttaaagcatctt

SEQ ID NO: 3730766 - DNA, 25 bp, Homo sapien
gccaggtcccggctgccagcaaaaa

SEQ ID NO: 3730767 - DNA, 25 bp, Homo sapien
taagtgcctttctcaatgctatatg

SEQ ID NO: 3730768 - DNA, 25 bp, Homo sapien
gctatatgcatagcagctagaggca

SEQ ID NO: 3730769 - DNA, 25 bp, Homo sapien
cccggctgccagcaaaaattttgtc

SEQ ID NO: 3730770 - DNA, 25 bp, Homo sapien
gcaattgcaatgatataccgcgcag

SEQ ID NO: 3730771 - DNA, 25 bp, Homo sapien
gtactactgactgcggcaattgcaa

SEQ ID NO: 3730772 - DNA, 25 bp, Homo sapien
ctgagtgtaaaagacccttagggct

SEQ ID NO: 3730773 - DNA, 25 bp, Homo sapien
ttagggctaatatcaaaggctcccc

SEQ ID NO: 3730774 - DNA, 25 bp, Homo sapien
ttttgacattatttgcttgcatctg

SEQ ID NO: 3730775 - DNA, 25 bp, Homo sapien
tgaggatttacgttcccattcaccc

SEQ ID NO: 3730776 - DNA, 25 bp, Homo sapien
ctgaggatttacgttcccattcacc

SEQ ID NO: 3730777 - DNA, 25 bp, Homo sapien
taaaatcagctagttcccacacctg

SEQ ID NO: 3730778 - DNA, 25 bp, Homo sapien
gtattctgttgcatatgaattaagt

SEQ ID NO: 3730779 - DNA, 25 bp, Homo sapien
aatgatctggtattacaataaaatc

SEQ ID NO: 3730780 - DNA, 25 bp, Homo sapien
gcatatgaattaagtaatgatctgg

SEQ ID NO: 3730781 - DNA, 25 bp, Homo sapien
cttggtatatgaacaggtcctttgc

SEQ ID NO: 3730782 - DNA, 25 bp, Homo sapien
aatgcgagaatttcggattcaaggc

SEQ ID NO: 3730783 - DNA, 25 bp, Homo sapien
ctaagaagttagatgcacaagtttc

SEQ ID NO: 3730784 - DNA, 25 bp, Homo sapien
gacacaagtgagttatgaatgcgag

SEQ ID NO: 3730785 - DNA, 25 bp, Homo sapien
cactgtaggcgatccgtgacctttt

SEQ ID NO: 3730786 - DNA, 25 bp, Homo sapien
tacttcgtcactgtaggcgatccgt

SEQ ID NO: 3730787 - DNA, 25 bp, Homo sapien
gttctctgaggaattcccatcatcc

SEQ ID NO: 3730788 - DNA, 25 bp, Homo sapien
caggagctcattccgtacttcgtca

SEQ ID NO: 3730789 - DNA, 25 bp, Homo sapien
cagttcctctgtatgggtatccaag

SEQ ID NO: 3730790 - DNA, 25 bp, Homo sapien
gagttgctgctaataccgttaagga

SEQ ID NO: 3730791 - DNA, 25 bp, Homo sapien
cacacaataggagattgggctgccc

SEQ ID NO: 3730792 - DNA, 25 bp, Homo sapien
cagtatcgcttccacatgagttgct

SEQ ID NO: 3730793 - DNA, 25 bp, Homo sapien
ttttatactacttgccaaagtggca

SEQ ID NO: 3730794 - DNA, 25 bp, Homo sapien
tcatttaggcagagtagagactttt

SEQ ID NO: 3730795 - DNA, 25 bp, Homo sapien
caaagtggcattagtaaccatgttc

SEQ ID NO: 3730796 - DNA, 25 bp, Homo sapien
cttgtttctgaaggtccctatcatg

SEQ ID NO: 3730797 - DNA, 25 bp, Homo sapien
tggtaaatacaattatgcaattttt

SEQ ID NO: 3730798 - DNA, 25 bp, Homo sapien
tcaatatattaggtttcactatcct

SEQ ID NO: 3730799 - DNA, 25 bp, Homo sapien
ttttggtttactcagtgactgattt

SEQ ID NO: 3730800 - DNA, 25 bp, Homo sapien
tactcagtgactgatttatgttcat

SEQ ID NO: 3730801 - DNA, 25 bp, Homo sapien
cagattatagtataatagatagcaa

SEQ ID NO: 3730802 - DNA, 25 bp, Homo sapien
taaagaactgacatgggaactacgc

SEQ ID NO: 3730803 - DNA, 25 bp, Homo sapien
gtattacagtcaggtttcagatgcc

SEQ ID NO: 3730804 - DNA, 25 bp, Homo sapien
tcaagtgaccatacctagttaagga

SEQ ID NO: 3730805 - DNA, 25 bp, Homo sapien
gaaagagcttccgttttgactccat

SEQ ID NO: 3730806 - DNA, 25 bp, Homo sapien
tctgggaattgatcggccagcgatc

SEQ ID NO: 3730807 - DNA, 25 bp, Homo sapien
tgactatgatacttaaagggccaaa

SEQ ID NO: 3730808 - DNA, 25 bp, Homo sapien
tcttcagcaatagagaccatttggg

SEQ ID NO: 3730809 - DNA, 25 bp, Homo sapien
aatacctggcctatcatatatcgga

SEQ ID NO: 3730810 - DNA, 25 bp, Homo sapien
ctgtgttatcgagcagatgtgccct

SEQ ID NO: 3730811 - DNA, 25 bp, Homo sapien
ctagtctccgagatgacctttccag

SEQ ID NO: 3730812 - DNA, 25 bp, Homo sapien
gcctctctgtgttatcgagcagatg

SEQ ID NO: 3730813 - DNA, 25 bp, Homo sapien
cctctagtctccgagatgacctttc

SEQ ID NO: 3730814 - DNA, 25 bp, Homo sapien
taagcgcaaataagctcccaattgt

SEQ ID NO: 3730815 - DNA, 25 bp, Homo sapien
ccctgaaatgtcatgtgttgtgaag

SEQ ID NO: 3730816 - DNA, 25 bp, Homo sapien
ggtaaactgacaacatgtaactgca

SEQ ID NO: 3730817 - DNA, 25 bp, Homo sapien
tgtaaaccacatctcgggctgctgt

SEQ ID NO: 3730818 - DNA, 25 bp, Homo sapien
tgattttagaagtcatactaagatt

SEQ ID NO: 3730819 - DNA, 25 bp, Homo sapien
tcattttaagtagactgattttaga

SEQ ID NO: 3730820 - DNA, 25 bp, Homo sapien
cattttaagtagactgattttagaa

SEQ ID NO: 3730821 - DNA, 25 bp, Homo sapien
gaagtcatactaagattatgttttc

SEQ ID NO: 3730822 - DNA, 25 bp, Homo sapien
tccctttcaggtggcttgaatttct

SEQ ID NO: 3730823 - DNA, 25 bp, Homo sapien
taagccatgtatttgccccaaagcc

SEQ ID NO: 3730824 - DNA, 25 bp, Homo sapien
tattttcccataggcattttgccaa

SEQ ID NO: 3730825 - DNA, 25 bp, Homo sapien
gtctttccccgacataatgaaatag

SEQ ID NO: 3730826 - DNA, 25 bp, Homo sapien
aatttgtgtagccttcttaggacag

SEQ ID NO: 3730827 - DNA, 25 bp, Homo sapien
ggtcctaatcatcaacagatctgca

SEQ ID NO: 3730828 - DNA, 25 bp, Homo sapien
gggatcagtgttactcagcttgaac

SEQ ID NO: 3730829 - DNA, 25 bp, Homo sapien
taacactagtgagaaaaactcgtgc

SEQ ID NO: 3730830 - DNA, 25 bp, Homo sapien
cctgcatggtgacaaccgtagggat

SEQ ID NO: 3730831 - DNA, 25 bp, Homo sapien
cttttactagccaaagctgcacagg

SEQ ID NO: 3730832 - DNA, 25 bp, Homo sapien
tatgggcacctttgattgacaggac

SEQ ID NO: 3730833 - DNA, 25 bp, Homo sapien
gagctggtatatgcccagcaccaag

SEQ ID NO: 3730834 - DNA, 25 bp, Homo sapien
agctgggcgtgatggtgcgcgcctg

SEQ ID NO: 3730835 - DNA, 25 bp, Homo sapien
tcccagctactcgggaggctgaggc

SEQ ID NO: 3730836 - DNA, 25 bp, Homo sapien
ggaggcagaagttgcagtgagccga

SEQ ID NO: 3730837 - DNA, 25 bp, Homo sapien
aggagaatcacttgaacccgggagg

SEQ ID NO: 3730838 - DNA, 25 bp, Homo sapien
agcactgcttggtgtttgtggagaa

SEQ ID NO: 3730839 - DNA, 25 bp, Homo sapien
gatgttcttatgaaaaaagcactgc

SEQ ID NO: 3730840 - DNA, 25 bp, Homo sapien
catggtgacatcgtttctgttttcc

SEQ ID NO: 3730841 - DNA, 25 bp, Homo sapien
tgaagagctgtgattgggaacatgg

SEQ ID NO: 3730842 - DNA, 25 bp, Homo sapien
gttggccttcaacaattgtcaatga

SEQ ID NO: 3730843 - DNA, 25 bp, Homo sapien
tttcctcaagcgtgttaatgtctct

SEQ ID NO: 3730844 - DNA, 25 bp, Homo sapien
tgtctctttgtttaggctcgcaagt

SEQ ID NO: 3730845 - DNA, 25 bp, Homo sapien
caagtcgaatggtcaatgtaaacac

SEQ ID NO: 3730846 - DNA, 25 bp, Homo sapien
tattaggccaactaaacagaggccc

SEQ ID NO: 3730847 - DNA, 25 bp, Homo sapien
cattttacggcagcataggtgatca

SEQ ID NO: 3730848 - DNA, 25 bp, Homo sapien
tcaggctctgttgcaaagcgaaatg

SEQ ID NO: 3730849 - DNA, 25 bp, Homo sapien
gccaggagccatcatacagggaaat

SEQ ID NO: 3730850 - DNA, 25 bp, Homo sapien
tacacagagtattttcgcaaagaaa

SEQ ID NO: 3730851 - DNA, 25 bp, Homo sapien
tagtcccagagcagtttctagaatc

SEQ ID NO: 3730852 - DNA, 25 bp, Homo sapien
tgcaagatcaaagaaggacgtttaa

SEQ ID NO: 3730853 - DNA, 25 bp, Homo sapien
gaatctgccgatctgcaagatgcaa

SEQ ID NO: 3730854 - DNA, 25 bp, Homo sapien
aatccaagcagagtcccattcgcca

SEQ ID NO: 3730855 - DNA, 25 bp, Homo sapien
aaatagtcaatatcactgcttaaat

SEQ ID NO: 3730856 - DNA, 25 bp, Homo sapien
aatactttcataacgtttgctaagg

SEQ ID NO: 3730857 - DNA, 25 bp, Homo sapien
cattcgccaacaatactaaaatact

SEQ ID NO: 3730858 - DNA, 25 bp, Homo sapien
gcttgtcagtcctcactaatgtaca

SEQ ID NO: 3730859 - DNA, 25 bp, Homo sapien
tctgccaacatcattacagatggca

SEQ ID NO: 3730860 - DNA, 25 bp, Homo sapien
tcacagcaccatatcaccaccttcc

SEQ ID NO: 3730861 - DNA, 25 bp, Homo sapien
caggataccctcttcgcttgtcagt

SEQ ID NO: 3730862 - DNA, 25 bp, Homo sapien
tgagtcaccttgacattccccacca

SEQ ID NO: 3730863 - DNA, 25 bp, Homo sapien
gagtaacttggcttcctatttggaa

SEQ ID NO: 3730864 - DNA, 25 bp, Homo sapien
cagctgggcctttgcgatggttcag

SEQ ID NO: 3730865 - DNA, 25 bp, Homo sapien
tcttctttctaagttcttgaccttg

SEQ ID NO: 3730866 - DNA, 25 bp, Homo sapien
tattgcagcaacagatgttgatccc

SEQ ID NO: 3730867 - DNA, 25 bp, Homo sapien
gaaacatacaaaaccctactcagat

SEQ ID NO: 3730868 - DNA, 25 bp, Homo sapien
tacatagtgtcagggcccaactgaa

SEQ ID NO: 3730869 - DNA, 25 bp, Homo sapien
taaatgcaatgcctaggaaagtcaa

SEQ ID NO: 3730870 - DNA, 25 bp, Homo sapien
atctctgggctaatgaaataaataa

SEQ ID NO: 3730871 - DNA, 25 bp, Homo sapien
cgtttccaatctctgggctaatgaa

SEQ ID NO: 3730872 - DNA, 25 bp, Homo sapien
tataccttctgttctcgtttccaat

SEQ ID NO: 3730873 - DNA, 25 bp, Homo sapien
ccttctgttctcgtttccaatctct

SEQ ID NO: 3730874 - DNA, 25 bp, Homo sapien
caagtctaattgtaggtttatccac

SEQ ID NO: 3730875 - DNA, 25 bp, Homo sapien
tcatggaacgtaacacaagtctaat

SEQ ID NO: 3730876 - DNA, 25 bp, Homo sapien
cacaggattcactcggttaacacct

SEQ ID NO: 3730877 - DNA, 25 bp, Homo sapien
actttccttcatggaacgtaacaca

SEQ ID NO: 3730878 - DNA, 25 bp, Homo sapien
aggcggaggaagtactcctctccca

SEQ ID NO: 3730879 - DNA, 25 bp, Homo sapien
gccgggctcttgttgaggttcccca

SEQ ID NO: 3730880 - DNA, 25 bp, Homo sapien
ctcctctcccatgcggagcaggacc

SEQ ID NO: 3730881 - DNA, 25 bp, Homo sapien
aactgctcggccctggccatttcca

SEQ ID NO: 3730882 - DNA, 25 bp, Homo sapien
agcttgctgtgctaactgctcggcc

SEQ ID NO: 3730883 - DNA, 25 bp, Homo sapien
ggaggctcctcggaccgcctttctc

SEQ ID NO: 3730884 - DNA, 25 bp, Homo sapien
ttcccaataatctccatgagtttcc

SEQ ID NO: 3730885 - DNA, 25 bp, Homo sapien
gctgtgagcttgctgtgctaactgc

SEQ ID NO: 3730886 - DNA, 25 bp, Homo sapien
tgctaactgctcggccctggccatt

SEQ ID NO: 3730887 - DNA, 25 bp, Homo sapien
gctcttgttgaggttccccaggcgg

SEQ ID NO: 3730888 - DNA, 25 bp, Homo sapien
gggctcttgttgaggttccccaggc

SEQ ID NO: 3730889 - DNA, 25 bp, Homo sapien
tgtctctggagttaggcgaatccat

SEQ ID NO: 3730890 - DNA, 25 bp, Homo sapien
gagttacagactcctggtgtggaga

SEQ ID NO: 3730891 - DNA, 25 bp, Homo sapien
cagtgtgcacagagctgtctctgga

SEQ ID NO: 3730892 - DNA, 25 bp, Homo sapien
gagagggagcggtgatcctccagtg

SEQ ID NO: 3730893 - DNA, 25 bp, Homo sapien
caactcacctgtacctaacaagtgt

SEQ ID NO: 3730894 - DNA, 25 bp, Homo sapien
taacaagtgtctgccacgtaatagg

SEQ ID NO: 3730895 - DNA, 25 bp, Homo sapien
ccattattaggctgtaaagcccatg

SEQ ID NO: 3730896 - DNA, 25 bp, Homo sapien
gacaatatccatcaggacctgagat

SEQ ID NO: 3730897 - DNA, 25 bp, Homo sapien
cagtgctggtggttaaatttggtcc

SEQ ID NO: 3730898 - DNA, 25 bp, Homo sapien
gaagagtttcgaatttagctatccc

SEQ ID NO: 3730899 - DNA, 25 bp, Homo sapien
aatttggtccctgaacatcttgggc

SEQ ID NO: 3730900 - DNA, 25 bp, Homo sapien
ggaatccagagagcctaatttaggg

SEQ ID NO: 3730901 - DNA, 25 bp, Homo sapien
tgtcctgaaaatacaaggcccttag

SEQ ID NO: 3730902 - DNA, 25 bp, Homo sapien
tccaataacaaagcaaaatagtcag

SEQ ID NO: 3730903 - DNA, 25 bp, Homo sapien
gaatatttttacacctgtcctgaaa

SEQ ID NO: 3730904 - DNA, 25 bp, Homo sapien
ttaccatgcatatgcaacaaagtcc

SEQ ID NO: 3730905 - DNA, 25 bp, Homo sapien
caagttaaacatatgtattcagcgc

SEQ ID NO: 3730906 - DNA, 25 bp, Homo sapien
aatcccatccaggtcactagctctt

SEQ ID NO: 3730907 - DNA, 25 bp, Homo sapien
taaacacacaaacataggcgtagcc

SEQ ID NO: 3730908 - DNA, 25 bp, Homo sapien
gatgcttctgataatcgtgcttcca

SEQ ID NO: 3730909 - DNA, 25 bp, Homo sapien
caagtctgtcagaagaaagagtctc

SEQ ID NO: 3730910 - DNA, 25 bp, Homo sapien
gagtactaatacctacaacacaggg

SEQ ID NO: 3730911 - DNA, 25 bp, Homo sapien
tgtgactccataggatgctctgctg

SEQ ID NO: 3730912 - DNA, 25 bp, Homo sapien
caattgggaacgaagtgggcatttc

SEQ ID NO: 3730913 - DNA, 25 bp, Homo sapien
tagttgagagtagcatagcagtgtc

SEQ ID NO: 3730914 - DNA, 25 bp, Homo sapien
taatattctttactctatactacgc

SEQ ID NO: 3730915 - DNA, 25 bp, Homo sapien
tatactacgctcttatcagcttgag

SEQ ID NO: 3730916 - DNA, 25 bp, Homo sapien
tttctattacgtgaattgtacctca

SEQ ID NO: 3730917 - DNA, 25 bp, Homo sapien
gctgcaatgtaaatggacctcaaaa

SEQ ID NO: 3730918 - DNA, 25 bp, Homo sapien
aaaggtcacatgttgtaggattcca

SEQ ID NO: 3730919 - DNA, 25 bp, Homo sapien
tcagaggtttgcgtcaggctttcag

SEQ ID NO: 3730920 - DNA, 25 bp, Homo sapien
gaagtactgacctaggctgcaatgt

SEQ ID NO: 3730921 - DNA, 25 bp, Homo sapien
gcttcctgcggaactcacatgccat

SEQ ID NO: 3730922 - DNA, 25 bp, Homo sapien
aactgaagaccttttgttccagagc

SEQ ID NO: 3730923 - DNA, 25 bp, Homo sapien
ttgaactgaagaccttttgttccag

SEQ ID NO: 3730924 - DNA, 25 bp, Homo sapien
tccagagcttcctgcggaactcaca

SEQ ID NO: 3730925 - DNA, 25 bp, Homo sapien
tatgagtcacgacaaacaagacaca

SEQ ID NO: 3730926 - DNA, 25 bp, Homo sapien
gagtgcaaatctttagtacatggag

SEQ ID NO: 3730927 - DNA, 25 bp, Homo sapien
tacatggagcattatgagtcacgac

SEQ ID NO: 3730928 - DNA, 25 bp, Homo sapien
ctctggtcccagattgagcaatcct

SEQ ID NO: 3730929 - DNA, 25 bp, Homo sapien
gattcatagattacagtgtcttaga

SEQ ID NO: 3730930 - DNA, 25 bp, Homo sapien
taagtgattcatagattacagtgtc

SEQ ID NO: 3730931 - DNA, 25 bp, Homo sapien
tcaataagtgattcatagattacag

SEQ ID NO: 3730932 - DNA, 25 bp, Homo sapien
catcaataagtgattcatagattac

SEQ ID NO: 3730933 - DNA, 25 bp, Homo sapien
tgatggacactaacttggagaaaag

SEQ ID NO: 3730934 - DNA, 25 bp, Homo sapien
aaaagatcaacataaccatggctgg

SEQ ID NO: 3730935 - DNA, 25 bp, Homo sapien
accccaactgatggacactaacttg

SEQ ID NO: 3730936 - DNA, 25 bp, Homo sapien
tcaacataaccatggctggccaagt

SEQ ID NO: 3730937 - DNA, 25 bp, Homo sapien
tatgtgaatcccgtctatccctgcc

SEQ ID NO: 3730938 - DNA, 25 bp, Homo sapien
gctggcaacgatccccatggtggag

SEQ ID NO: 3730939 - DNA, 25 bp, Homo sapien
agactacgcaatacattccaggatg

SEQ ID NO: 3730940 - DNA, 25 bp, Homo sapien
tagggtgtgcaccttcacaaatgac

SEQ ID NO: 3730941 - DNA, 25 bp, Homo sapien
tatttctggccggtacactatagtc

SEQ ID NO: 3730942 - DNA, 25 bp, Homo sapien
caagtcgcattaccatgaacactgt

SEQ ID NO: 3730943 - DNA, 25 bp, Homo sapien
caatcaacatgcatgtgacactaca

SEQ ID NO: 3730944 - DNA, 25 bp, Homo sapien
caatccacaagcactgtaatgacag

SEQ ID NO: 3730945 - DNA, 25 bp, Homo sapien
ttcaatgtctgaagatcaattatcc

SEQ ID NO: 3730946 - DNA, 25 bp, Homo sapien
tgtctgaagatcaattatcccttcg

SEQ ID NO: 3730947 - DNA, 25 bp, Homo sapien
ttccagccccggtgttttgcctgct

SEQ ID NO: 3730948 - DNA, 25 bp, Homo sapien
ctgtgttgttccagccccggtgttt

SEQ ID NO: 3730949 - DNA, 25 bp, Homo sapien
gtaaggtaactctctcagtgacaca

SEQ ID NO: 3730950 - DNA, 25 bp, Homo sapien
tctgcatgggagacattactttttg

SEQ ID NO: 3730951 - DNA, 25 bp, Homo sapien
gaactgggaagttcaccaacaagga

SEQ ID NO: 3730952 - DNA, 25 bp, Homo sapien
taactaaactgcaaagtataagctc

SEQ ID NO: 3730953 - DNA, 25 bp, Homo sapien
tctggagtgagtcatgacttttttt

SEQ ID NO: 3730954 - DNA, 25 bp, Homo sapien
atttcttgatacaggcttccacttt

SEQ ID NO: 3730955 - DNA, 25 bp, Homo sapien
taagaaatcctggatgtaacaagat

SEQ ID NO: 3730956 - DNA, 25 bp, Homo sapien
attgattgcctttgtgtttctgaac

SEQ ID NO: 3730957 - DNA, 25 bp, Homo sapien
ttctgtctgttgctcatgagcagag

SEQ ID NO: 3730958 - DNA, 25 bp, Homo sapien
ccatgtgagctggtccactcttcct

SEQ ID NO: 3730959 - DNA, 25 bp, Homo sapien
tgcctgatccccatgtgagctggtc

SEQ ID NO: 3730960 - DNA, 25 bp, Homo sapien
gatccccatgtgagctggtccactc

SEQ ID NO: 3730961 - DNA, 25 bp, Homo sapien
cctgatccccatgtgagctggtcca

SEQ ID NO: 3730962 - DNA, 25 bp, Homo sapien
ctttccacattgtgcaaagtaagga

SEQ ID NO: 3730963 - DNA, 25 bp, Homo sapien
cattgtgcaaagtaaggaaagtggc

SEQ ID NO: 3730964 - DNA, 25 bp, Homo sapien
caaagtaaggaaagtggctattctg

SEQ ID NO: 3730965 - DNA, 25 bp, Homo sapien
gtgcaaagtaaggaaagtggctatt

SEQ ID NO: 3730966 - DNA, 25 bp, Homo sapien
cgcggcgagtggggaaaggtcctca

SEQ ID NO: 3730967 - DNA, 25 bp, Homo sapien
ctggtcatttgctatagcctctgtg

SEQ ID NO: 3730968 - DNA, 25 bp, Homo sapien
ctgtgagtccctccaaatcccccag

SEQ ID NO: 3730969 - DNA, 25 bp, Homo sapien
cccagtttcctagccgcggcgagtg

SEQ ID NO: 3730970 - DNA, 25 bp, Homo sapien
cacaacggattgatatggggccaaa

SEQ ID NO: 3730971 - DNA, 25 bp, Homo sapien
gggccaaatgtggtttgtaaaagca

SEQ ID NO: 3730972 - DNA, 25 bp, Homo sapien
ctacacaacggattgatatggggcc

SEQ ID NO: 3730973 - DNA, 25 bp, Homo sapien
gatatggggccaaatgtggtttgta

SEQ ID NO: 3730974 - DNA, 25 bp, Homo sapien
ttctgcggcccatttgtgttcaaag

SEQ ID NO: 3730975 - DNA, 25 bp, Homo sapien
caagcgcaagtgcaggagttgggct

SEQ ID NO: 3730976 - DNA, 25 bp, Homo sapien
gttcaaagacaagcgcaagtgcagg

SEQ ID NO: 3730977 - DNA, 25 bp, Homo sapien
tttctgcggcccatttgtgttcaaa

SEQ ID NO: 3730978 - DNA, 25 bp, Homo sapien
ctgctcaatggtaccctgtttccgg

SEQ ID NO: 3730979 - DNA, 25 bp, Homo sapien
caatttctgctcaatggtaccctgt

SEQ ID NO: 3730980 - DNA, 25 bp, Homo sapien
ttctgctcaatggtaccctgtttcc

SEQ ID NO: 3730981 - DNA, 25 bp, Homo sapien
tcaatttctgctcaatggtaccctg

SEQ ID NO: 3730982 - DNA, 25 bp, Homo sapien
cagcaactgtgcttgggttggctga

SEQ ID NO: 3730983 - DNA, 25 bp, Homo sapien
tgtgcttgggttggctgataaccca

SEQ ID NO: 3730984 - DNA, 25 bp, Homo sapien
ttgggttggctgataacccatagaa

SEQ ID NO: 3730985 - DNA, 25 bp, Homo sapien
aactgtgcttgggttggctgataac

SEQ ID NO: 3730986 - DNA, 25 bp, Homo sapien
tcaacagtgatgcaatgtttacagc

SEQ ID NO: 3730987 - DNA, 25 bp, Homo sapien
gaagtctttcgtagcttatgcagta

SEQ ID NO: 3730988 - DNA, 25 bp, Homo sapien
tctagctatgcaatgttcaatgtca

SEQ ID NO: 3730989 - DNA, 25 bp, Homo sapien
tcctaattcggctagttatgcaact

SEQ ID NO: 3730990 - DNA, 25 bp, Homo sapien
gggtaatggcagcatatttatgagg

SEQ ID NO: 3730991 - DNA, 25 bp, Homo sapien
atgaggtctcttgccgggtccttcc

SEQ ID NO: 3730992 - DNA, 25 bp, Homo sapien
ttccctcctgtgaatgctgtataat

SEQ ID NO: 3730993 - DNA, 25 bp, Homo sapien
tctttgaatacgaattagcagtggg

SEQ ID NO: 3730994 - DNA, 25 bp, Homo sapien
atttctgaggactgaagtgtaccgc

SEQ ID NO: 3730995 - DNA, 25 bp, Homo sapien
agtgtaccgctctagtctgttttca

SEQ ID NO: 3730996 - DNA, 25 bp, Homo sapien
gactgaagtgtaccgctctagtctg

SEQ ID NO: 3730997 - DNA, 25 bp, Homo sapien
atgtgaaggacactcatttctgagg

SEQ ID NO: 3730998 - DNA, 25 bp, Homo sapien
gataagacccacttgctatcctgga

SEQ ID NO: 3730999 - DNA, 25 bp, Homo sapien
gggaccttttctcaattgacaacag

SEQ ID NO: 3731000 - DNA, 25 bp, Homo sapien
ctatcctggacctatggcaccggga

SEQ ID NO: 3731001 - DNA, 25 bp, Homo sapien
caggcagtcaactcgggttggcaca

SEQ ID NO: 3731002 - DNA, 25 bp, Homo sapien
caatcaatcacagtgccctgaacac

SEQ ID NO: 3731003 - DNA, 25 bp, Homo sapien
atcaatcacagtgccctgaacacac

SEQ ID NO: 3731004 - DNA, 25 bp, Homo sapien
tcaatcaatcacagtgccctgaaca

SEQ ID NO: 3731005 - DNA, 25 bp, Homo sapien
aatcaatcacagtgccctgaacaca

SEQ ID NO: 3731006 - DNA, 25 bp, Homo sapien
tgagcatgataaacgaattcctgga

SEQ ID NO: 3731007 - DNA, 25 bp, Homo sapien
gatacttcctaaaggactggcctga

SEQ ID NO: 3731008 - DNA, 25 bp, Homo sapien
tagagaaacacacgtgcaaaagggt

SEQ ID NO: 3731009 - DNA, 25 bp, Homo sapien
tggaagatatacacaatagccattg

SEQ ID NO: 3731010 - DNA, 25 bp, Homo sapien
gtggctcctagtggaagcatcacag

SEQ ID NO: 3731011 - DNA, 25 bp, Homo sapien
aattgggtaagatatgtggctccta

SEQ ID NO: 3731012 - DNA, 25 bp, Homo sapien
ggaagatgatatcaataatggagaa

SEQ ID NO: 3731013 - DNA, 25 bp, Homo sapien
tctcctgttcagattgatggtatta

SEQ ID NO: 3731014 - DNA, 25 bp, Homo sapien
ctctggcttataaacatataagcat

SEQ ID NO: 3731015 - DNA, 25 bp, Homo sapien
gcttataaacatataagcattcaaa

SEQ ID NO: 3731016 - DNA, 25 bp, Homo sapien
ctggcttataaacatataagcattc

SEQ ID NO: 3731017 - DNA, 25 bp, Homo sapien
ggcttataaacatataagcattcaa

SEQ ID NO: 3731018 - DNA, 25 bp, Homo sapien
tctctttactcatacctataacaac

SEQ ID NO: 3731019 - DNA, 25 bp, Homo sapien
gtctctttactcatacctataacaa

SEQ ID NO: 3731020 - DNA, 25 bp, Homo sapien
tgtctctttactcatacctataaca

SEQ ID NO: 3731021 - DNA, 25 bp, Homo sapien
cttttctctgtcatgactaaggttt

SEQ ID NO: 3731022 - DNA, 25 bp, Homo sapien
cacgtgctcgctgtatcttttctct

SEQ ID NO: 3731023 - DNA, 25 bp, Homo sapien
tctgtcatgactaaggttttccaac

SEQ ID NO: 3731024 - DNA, 25 bp, Homo sapien
tccaacatctcctgaccaatttgct

SEQ ID NO: 3731025 - DNA, 25 bp, Homo sapien
gctttttcccaaattagcatctgtt

SEQ ID NO: 3731026 - DNA, 25 bp, Homo sapien
acatccctgtcagaatcctggagct

SEQ ID NO: 3731027 - DNA, 25 bp, Homo sapien
ttcgcaacatccctgtcagaatcct

SEQ ID NO: 3731028 - DNA, 25 bp, Homo sapien
gcaacatccctgtcagaatcctgga

SEQ ID NO: 3731029 - DNA, 25 bp, Homo sapien
taatatgccccattgcaattgaatg

SEQ ID NO: 3731030 - DNA, 25 bp, Homo sapien
gctcaaaagcatgtaatatgcccca

SEQ ID NO: 3731031 - DNA, 25 bp, Homo sapien
ctaagagcagaagctcaaaagcatg

SEQ ID NO: 3731032 - DNA, 25 bp, Homo sapien
tatgccccattgcaattgaatgaaa

SEQ ID NO: 3731033 - DNA, 25 bp, Homo sapien
ttgtctataggcactgaagcattcc

SEQ ID NO: 3731034 - DNA, 25 bp, Homo sapien
gtcacattatactagccttggctgg

SEQ ID NO: 3731035 - DNA, 25 bp, Homo sapien
taggcttgctactggtcaggctgct

SEQ ID NO: 3731036 - DNA, 25 bp, Homo sapien
tcagccttgaagaccaaaccactag

SEQ ID NO: 3731037 - DNA, 25 bp, Homo sapien
tttcatttcaggatccccggccctg

SEQ ID NO: 3731038 - DNA, 25 bp, Homo sapien
tttaatgaccagcaaggactaactg

SEQ ID NO: 3731039 - DNA, 25 bp, Homo sapien
ttccaaacaggtgggcattatagcc

SEQ ID NO: 3731040 - DNA, 25 bp, Homo sapien
ccggccctggcatacagacattaaa

SEQ ID NO: 3731041 - DNA, 25 bp, Homo sapien
tcaatggtggaatctggtagggttt

SEQ ID NO: 3731042 - DNA, 25 bp, Homo sapien
gtagggtttgttcattgctttcagg

SEQ ID NO: 3731043 - DNA, 25 bp, Homo sapien
cttcagcccaccctcaatggtggaa

SEQ ID NO: 3731044 - DNA, 25 bp, Homo sapien
ctggtagggtttgttcattgctttc

SEQ ID NO: 3731045 - DNA, 25 bp, Homo sapien
agattccacgccattactttcactg

SEQ ID NO: 3731046 - DNA, 25 bp, Homo sapien
caatggctgtactgagatgctggca

SEQ ID NO: 3731047 - DNA, 25 bp, Homo sapien
gaatccttgacgaaggccagaaccc

SEQ ID NO: 3731048 - DNA, 25 bp, Homo sapien
aaaaaatcgctatattcaatggctg

SEQ ID NO: 3731049 - DNA, 25 bp, Homo sapien
cacaggagttaccaccatggttccc

SEQ ID NO: 3731050 - DNA, 25 bp, Homo sapien
ttaatttctgctggttgcacaatac

SEQ ID NO: 3731051 - DNA, 25 bp, Homo sapien
gggagctgtaaagcatccttttggg

SEQ ID NO: 3731052 - DNA, 25 bp, Homo sapien
gcacaatactgtgggggagctgtaa

SEQ ID NO: 3731053 - DNA, 25 bp, Homo sapien
tgtttataaggaaggcctagggctc

SEQ ID NO: 3731054 - DNA, 25 bp, Homo sapien
attcaagaatggcatgcatccaggg

SEQ ID NO: 3731055 - DNA, 25 bp, Homo sapien
tgcttcaagttaacagctcaaggct

SEQ ID NO: 3731056 - DNA, 25 bp, Homo sapien
tgacggaaaatgtaaagtgcaccct

SEQ ID NO: 3731057 - DNA, 25 bp, Homo sapien
tatgcagtaaggaaaccagagttcc

SEQ ID NO: 3731058 - DNA, 25 bp, Homo sapien
ggttcacctgccacatagtcttcta

SEQ ID NO: 3731059 - DNA, 25 bp, Homo sapien
taatgctgcccctatcaaagtgtcc

SEQ ID NO: 3731060 - DNA, 25 bp, Homo sapien
tacaatggtgcctctccatggatcc

SEQ ID NO: 3731061 - DNA, 25 bp, Homo sapien
gttctgcagtaccctgccaggtcct

SEQ ID NO: 3731062 - DNA, 25 bp, Homo sapien
ccagagaacttgatcaacgaggcag

SEQ ID NO: 3731063 - DNA, 25 bp, Homo sapien
ggcagttgtgcaccaagaatgaacc

SEQ ID NO: 3731064 - DNA, 25 bp, Homo sapien
tgtcagctttagtcatgctgatgaa

SEQ ID NO: 3731065 - DNA, 25 bp, Homo sapien
gaatttatacctttcagtcaactgg

SEQ ID NO: 3731066 - DNA, 25 bp, Homo sapien
tgcagcaaagttcaaggtaggtact

SEQ ID NO: 3731067 - DNA, 25 bp, Homo sapien
gctagtagaattaaccctcaaatta

SEQ ID NO: 3731068 - DNA, 25 bp, Homo sapien
tatgcccttttccttatacccaatg

SEQ ID NO: 3731069 - DNA, 25 bp, Homo sapien
gggtacactccatatgtagggaggc

SEQ ID NO: 3731070 - DNA, 25 bp, Homo sapien
tattacccaagtctcaaggtctgag

SEQ ID NO: 3731071 - DNA, 25 bp, Homo sapien
aaggtctgagaagccgcatagccca

SEQ ID NO: 3731072 - DNA, 25 bp, Homo sapien
gagacaatatgcagtgttcggaaga

SEQ ID NO: 3731073 - DNA, 25 bp, Homo sapien
gggtgtggtagctacggaggaccac

SEQ ID NO: 3731074 - DNA, 25 bp, Homo sapien
tgtggtcatctccgcgaggattttc

SEQ ID NO: 3731075 - DNA, 25 bp, Homo sapien
tcatctccgcgaggattttcttctc

SEQ ID NO: 3731076 - DNA, 25 bp, Homo sapien
ggtagctacggaggaccacagctgt

SEQ ID NO: 3731077 - DNA, 25 bp, Homo sapien
tcatacagtgatatttgtaactcac

SEQ ID NO: 3731078 - DNA, 25 bp, Homo sapien
cattagttactaataaaagttggct

SEQ ID NO: 3731079 - DNA, 25 bp, Homo sapien
aactcactagatgtaggatttctaa

SEQ ID NO: 3731080 - DNA, 25 bp, Homo sapien
tctccagagtaatttcagcattagt

SEQ ID NO: 3731081 - DNA, 25 bp, Homo sapien
ggaggcccaattagttaatactaga

SEQ ID NO: 3731082 - DNA, 25 bp, Homo sapien
tggtctagccaaaaaggaggcccaa

SEQ ID NO: 3731083 - DNA, 25 bp, Homo sapien
tactgtaaccaaggcagatttatcc

SEQ ID NO: 3731084 - DNA, 25 bp, Homo sapien
tagttaatactagagagtacccagg

SEQ ID NO: 3731085 - DNA, 25 bp, Homo sapien
ccacagggaacgagatgggtgcact

SEQ ID NO: 3731086 - DNA, 25 bp, Homo sapien
cagaggaccagattaacacggaact

SEQ ID NO: 3731087 - DNA, 25 bp, Homo sapien
catctctgggagtactgtgcattga

SEQ ID NO: 3731088 - DNA, 25 bp, Homo sapien
caaaacgtggaaagtgggtatgagc

SEQ ID NO: 3731089 - DNA, 25 bp, Homo sapien
ggctatgatgactgggctgccctcc

SEQ ID NO: 3731090 - DNA, 25 bp, Homo sapien
cactccctttatccctatggctatg

SEQ ID NO: 3731091 - DNA, 25 bp, Homo sapien
ttctcaggaggtggcaacttcacat

SEQ ID NO: 3731092 - DNA, 25 bp, Homo sapien
gctgaagagtaattaaacgtgtcca

SEQ ID NO: 3731093 - DNA, 25 bp, Homo sapien
tttttgatcgaatagcgttttccag

SEQ ID NO: 3731094 - DNA, 25 bp, Homo sapien
gaatagcgttttccagacacccaga

SEQ ID NO: 3731095 - DNA, 25 bp, Homo sapien
tgttatctgctaatataatggtgga

SEQ ID NO: 3731096 - DNA, 25 bp, Homo sapien
cgttttccagacacccagataccat

SEQ ID NO: 3731097 - DNA, 25 bp, Homo sapien
cagaagctgactgcgcccttgaagt

SEQ ID NO: 3731098 - DNA, 25 bp, Homo sapien
gcagcgtgtcttcccagtctcaata

SEQ ID NO: 3731099 - DNA, 25 bp, Homo sapien
tgaagtaggtcatccccaggaacag

SEQ ID NO: 3731100 - DNA, 25 bp, Homo sapien
caggaacaactatctggcagggaaa

SEQ ID NO: 3731101 - DNA, 25 bp, Homo sapien
cactccagttgaatatctctaatcc

SEQ ID NO: 3731102 - DNA, 25 bp, Homo sapien
ggctaacacacacttattcttcaaa

SEQ ID NO: 3731103 - DNA, 25 bp, Homo sapien
aacatattgttttaaggcctccatg

SEQ ID NO: 3731104 - DNA, 25 bp, Homo sapien
gatggtcaatctgtagctcctgggc

SEQ ID NO: 3731105 - DNA, 25 bp, Homo sapien
tatctgaatatagatcccttgttgt

SEQ ID NO: 3731106 - DNA, 25 bp, Homo sapien
tgtccttgcgatagtcaaatcttat

SEQ ID NO: 3731107 - DNA, 25 bp, Homo sapien
tcttatctgaatatagatcccttgt

SEQ ID NO: 3731108 - DNA, 25 bp, Homo sapien
tgcgatagtcaaatcttatctgaat

SEQ ID NO: 3731109 - DNA, 25 bp, Homo sapien
tcaagtgctcgatggaaaaacaggt

SEQ ID NO: 3731110 - DNA, 25 bp, Homo sapien
tatgtcacggtaagcaaccctccga

SEQ ID NO: 3731111 - DNA, 25 bp, Homo sapien
gaagattcaggaggtcagcctgccg

SEQ ID NO: 3731112 - DNA, 25 bp, Homo sapien
caataatggtgacgaggaggacgat

SEQ ID NO: 3731113 - DNA, 25 bp, Homo sapien
ttcataatccccaagagaggtcagg

SEQ ID NO: 3731114 - DNA, 25 bp, Homo sapien
gaaagagcaatttgtgctgagttca

SEQ ID NO: 3731115 - DNA, 25 bp, Homo sapien
tactaggtgcatgggaattcacggg

SEQ ID NO: 3731116 - DNA, 25 bp, Homo sapien
tctcttagtgcagggttactaggtg

SEQ ID NO: 3731117 - DNA, 25 bp, Homo sapien
gagttcatgtccaaacttgccccag

SEQ ID NO: 3731118 - DNA, 25 bp, Homo sapien
tatagagtttttgagttcatgtcca

SEQ ID NO: 3731119 - DNA, 25 bp, Homo sapien
acacagattacatgagggaatgcac

SEQ ID NO: 3731120 - DNA, 25 bp, Homo sapien
gaaaacacaacccttatctatagag

SEQ ID NO: 3731121 - DNA, 25 bp, Homo sapien
atcacagggagcactggccattata

SEQ ID NO: 3731122 - DNA, 25 bp, Homo sapien
gaaggaggtggaatcacagggagca

SEQ ID NO: 3731123 - DNA, 25 bp, Homo sapien
ggtggaatcacagggagcactggcc

SEQ ID NO: 3731124 - DNA, 25 bp, Homo sapien
acagggagcactggccattataaga

SEQ ID NO: 3731125 - DNA, 25 bp, Homo sapien
cactctggtgtcttagaagcccaga

SEQ ID NO: 3731126 - DNA, 25 bp, Homo sapien
tatctgatttagaaggagaggatga

SEQ ID NO: 3731127 - DNA, 25 bp, Homo sapien
aggatgaaggcattgagagaagcag

SEQ ID NO: 3731128 - DNA, 25 bp, Homo sapien
ttagagaagtgttccccactctggt

SEQ ID NO: 3731129 - DNA, 25 bp, Homo sapien
tactgacggcttggacagcaacagg

SEQ ID NO: 3731130 - DNA, 25 bp, Homo sapien
gactaaatttgtctactgacggctt

SEQ ID NO: 3731131 - DNA, 25 bp, Homo sapien
ctggggccaggactgcctgtttcca

SEQ ID NO: 3731132 - DNA, 25 bp, Homo sapien
aaagcatggttgttctgggttaaga

SEQ ID NO: 3731133 - DNA, 25 bp, Homo sapien
aacaagccagtgcacatcaggatct

SEQ ID NO: 3731134 - DNA, 25 bp, Homo sapien
ccaacaagccagtgcacatcaggat

SEQ ID NO: 3731135 - DNA, 25 bp, Homo sapien
ctccaacaagccagtgcacatcagg

SEQ ID NO: 3731136 - DNA, 25 bp, Homo sapien
aagccagtgcacatcaggatctagt

SEQ ID NO: 3731137 - DNA, 25 bp, Homo sapien
atgaagaacattgcaaagaaacgac

SEQ ID NO: 3731138 - DNA, 25 bp, Homo sapien
gcaaagaaacgaccgggcttgtctg

SEQ ID NO: 3731139 - DNA, 25 bp, Homo sapien
ggcttgtctgggattctcttcattc

SEQ ID NO: 3731140 - DNA, 25 bp, Homo sapien
gaacattgcaaagaaacgaccgggc

SEQ ID NO: 3731141 - DNA, 25 bp, Homo sapien
ccacacacagtgtgaaaggcccagt

SEQ ID NO: 3731142 - DNA, 25 bp, Homo sapien
cattcatattggtcatcagtagccc

SEQ ID NO: 3731143 - DNA, 25 bp, Homo sapien
taatggatctccaaaagccacagtc

SEQ ID NO: 3731144 - DNA, 25 bp, Homo sapien
agcagcaaagtacatccagagagaa

SEQ ID NO: 3731145 - DNA, 25 bp, Homo sapien
tcttggggaccatccacctttactg

SEQ ID NO: 3731146 - DNA, 25 bp, Homo sapien
tggggaccatccacctttactgtgt

SEQ ID NO: 3731147 - DNA, 25 bp, Homo sapien
tcttcttggggaccatccaccttta

SEQ ID NO: 3731148 - DNA, 25 bp, Homo sapien
tctcttcttggggaccatccacctt

SEQ ID NO: 3731149 - DNA, 25 bp, Homo sapien
ctgcatgttgcaatgccaaattaaa

SEQ ID NO: 3731150 - DNA, 25 bp, Homo sapien
tgcaatgccaaattaaattcgttgt

SEQ ID NO: 3731151 - DNA, 25 bp, Homo sapien
caatgccaaattaaattcgttgtcc

SEQ ID NO: 3731152 - DNA, 25 bp, Homo sapien
tgttgcaatgccaaattaaattcgt

SEQ ID NO: 3731153 - DNA, 25 bp, Homo sapien
gggccagagacaggttacattgttt

SEQ ID NO: 3731154 - DNA, 25 bp, Homo sapien
gccagagacaggttacattgttttt

SEQ ID NO: 3731155 - DNA, 25 bp, Homo sapien
ggccagagacaggttacattgtttt

SEQ ID NO: 3731156 - DNA, 25 bp, Homo sapien
tcacagagctggactaagaccttac

SEQ ID NO: 3731157 - DNA, 25 bp, Homo sapien
tactcattttccgtccagggcagct

SEQ ID NO: 3731158 - DNA, 25 bp, Homo sapien
ggctccttgctcacgatgtacctaa

SEQ ID NO: 3731159 - DNA, 25 bp, Homo sapien
ccgtctaaggcatcccagggaacag

SEQ ID NO: 3731160 - DNA, 25 bp, Homo sapien
cacaccagagggtttatcagacaga

SEQ ID NO: 3731161 - DNA, 25 bp, Homo sapien
aaggtcaggcttatcggttcacgct

SEQ ID NO: 3731162 - DNA, 25 bp, Homo sapien
gaactgtgactcttagggacaccag

SEQ ID NO: 3731163 - DNA, 25 bp, Homo sapien
tgttctgtgagagcgagttccgccc

SEQ ID NO: 3731164 - DNA, 25 bp, Homo sapien
gactgtaaacattcttggcccaggg

SEQ ID NO: 3731165 - DNA, 25 bp, Homo sapien
tgtaaattgaaatagccccagaggg

SEQ ID NO: 3731166 - DNA, 25 bp, Homo sapien
tcagccgtgatagcagccaatgttg

SEQ ID NO: 3731167 - DNA, 25 bp, Homo sapien
tgcgctgggtaagtgactggatctc

SEQ ID NO: 3731168 - DNA, 25 bp, Homo sapien
catcggccacctaacaacgttttgg

SEQ ID NO: 3731169 - DNA, 25 bp, Homo sapien
tataggatataccttacagcctagg

SEQ ID NO: 3731170 - DNA, 25 bp, Homo sapien
acaaaacaattacggtcatcggcca

SEQ ID NO: 3731171 - DNA, 25 bp, Homo sapien
tggtcaacaacggaaactatagtta

SEQ ID NO: 3731172 - DNA, 25 bp, Homo sapien
caaacaggcaatacgaaggactgct

SEQ ID NO: 3731173 - DNA, 25 bp, Homo sapien
tagctctgcctgaagtgtaaaaacc

SEQ ID NO: 3731174 - DNA, 25 bp, Homo sapien
gactagggtggtgcaacttttgaca

SEQ ID NO: 3731175 - DNA, 25 bp, Homo sapien
caaaaaatgcctgggtatatggcct

SEQ ID NO: 3731176 - DNA, 25 bp, Homo sapien
cagaaatggcggtggtctactccct

SEQ ID NO: 3731177 - DNA, 25 bp, Homo sapien
tatccacatttacagtccggacaga

SEQ ID NO: 3731178 - DNA, 25 bp, Homo sapien
caagcactgacgttattctacagga

SEQ ID NO: 3731179 - DNA, 25 bp, Homo sapien
tctacgtgccctggcaggtcattgg

SEQ ID NO: 3731180 - DNA, 25 bp, Homo sapien
cgataatgtaatcagaatagcacaa

SEQ ID NO: 3731181 - DNA, 25 bp, Homo sapien
tatcagctctgcttcagactagtcg

SEQ ID NO: 3731182 - DNA, 25 bp, Homo sapien
ctggtgaagctgactccccggtaaa

SEQ ID NO: 3731183 - DNA, 25 bp, Homo sapien
ccggtaaagagatatcagctctgct

SEQ ID NO: 3731184 - DNA, 25 bp, Homo sapien
ccgcctgagttccaatgattctcgt

SEQ ID NO: 3731185 - DNA, 25 bp, Homo sapien
accgcctgagttccaatgattctcg

SEQ ID NO: 3731186 - DNA, 25 bp, Homo sapien
cgcctgagttccaatgattctcgtg

SEQ ID NO: 3731187 - DNA, 25 bp, Homo sapien
ggacttgggccaatcagatcatctc

SEQ ID NO: 3731188 - DNA, 25 bp, Homo sapien
agaaccctttcatcaaagaagccct

SEQ ID NO: 3731189 - DNA, 25 bp, Homo sapien
caagaaccctttcatcaaagaagcc

SEQ ID NO: 3731190 - DNA, 25 bp, Homo sapien
caatcagatcatctcgctgtctgtt

SEQ ID NO: 3731191 - DNA, 25 bp, Homo sapien
catttccaccgaaaatcaagaattt

SEQ ID NO: 3731192 - DNA, 25 bp, Homo sapien
tcaagtaccgcaggcactgattggg

SEQ ID NO: 3731193 - DNA, 25 bp, Homo sapien
ctgattggggttaagtagctggtaa

SEQ ID NO: 3731194 - DNA, 25 bp, Homo sapien
tggctgcaatgaccgacacatcaag

SEQ ID NO: 3731195 - DNA, 25 bp, Homo sapien
tgttgcaacaggaaggtaaaagagg

SEQ ID NO: 3731196 - DNA, 25 bp, Homo sapien
ttctaaggtctgtggtgttgcaaca

SEQ ID NO: 3731197 - DNA, 25 bp, Homo sapien
tttccaatactaggcagaacaatgg

SEQ ID NO: 3731198 - DNA, 25 bp, Homo sapien
tttctccaggctatgttctaaggtc

SEQ ID NO: 3731199 - DNA, 25 bp, Homo sapien
tgcaggacaagcaaaccctttctcc

SEQ ID NO: 3731200 - DNA, 25 bp, Homo sapien
ttgtaggttttgtgaattatgtatc

SEQ ID NO: 3731201 - DNA, 25 bp, Homo sapien
tatgtatcaataaagcagttactga

SEQ ID NO: 3731202 - DNA, 25 bp, Homo sapien
tactttaaatgggtgcattgtaggt

SEQ ID NO: 3731203 - DNA, 25 bp, Homo sapien
gggtggcccctggatggtcaatggc

SEQ ID NO: 3731204 - DNA, 25 bp, Homo sapien
aggtcatggatttcccaccacttct

SEQ ID NO: 3731205 - DNA, 25 bp, Homo sapien
ggtcatggatttcccaccacttctt

SEQ ID NO: 3731206 - DNA, 25 bp, Homo sapien
ccctggatggtcaatggcagaggca

SEQ ID NO: 3731207 - DNA, 25 bp, Homo sapien
ttcacactcatctcctttgtagtgg

SEQ ID NO: 3731208 - DNA, 25 bp, Homo sapien
cacactcatctcctttgtagtggga

SEQ ID NO: 3731209 - DNA, 25 bp, Homo sapien
catctcctttgtagtgggaagacca

SEQ ID NO: 3731210 - DNA, 25 bp, Homo sapien
actcatctcctttgtagtgggaaga

SEQ ID NO: 3731211 - DNA, 25 bp, Homo sapien
tgctaaggcccagagcctgtttctg

SEQ ID NO: 3731212 - DNA, 25 bp, Homo sapien
tcttgtttccgggacacagaccaga

SEQ ID NO: 3731213 - DNA, 25 bp, Homo sapien
acagcagctgtgagataatctctct

SEQ ID NO: 3731214 - DNA, 25 bp, Homo sapien
gaacagaccgcctagtgctaaggcc

SEQ ID NO: 3731215 - DNA, 25 bp, Homo sapien
tccttttcaagctgcgataaagcaa

SEQ ID NO: 3731216 - DNA, 25 bp, Homo sapien
tttcaagctgcgataaagcaaacgt

SEQ ID NO: 3731217 - DNA, 25 bp, Homo sapien
ttttcaagctgcgataaagcaaacg

SEQ ID NO: 3731218 - DNA, 25 bp, Homo sapien
ttcaagctgcgataaagcaaacgtg

SEQ ID NO: 3731219 - DNA, 25 bp, Homo sapien
gtccagcaagcgctctgatgaggtc

SEQ ID NO: 3731220 - DNA, 25 bp, Homo sapien
tgatgaggtctgtgggaaatgatct

SEQ ID NO: 3731221 - DNA, 25 bp, Homo sapien
acagagtccagcaagcgctctgatg

SEQ ID NO: 3731222 - DNA, 25 bp, Homo sapien
cagcaagcgctctgatgaggtctgt

SEQ ID NO: 3731223 - DNA, 25 bp, Homo sapien
tccaagtcggcgtgaggttttagtg

SEQ ID NO: 3731224 - DNA, 25 bp, Homo sapien
tggcctgatccaagcgtcattgcaa

SEQ ID NO: 3731225 - DNA, 25 bp, Homo sapien
gcatgcgcttccacgccgaaaaaga

SEQ ID NO: 3731226 - DNA, 25 bp, Homo sapien
cagcatgcaactggcgacagccagt

SEQ ID NO: 3731227 - DNA, 25 bp, Homo sapien
aagggatctgcctacatcttgagtt

SEQ ID NO: 3731228 - DNA, 25 bp, Homo sapien
tgtgggaaaacattactggctgtgc

SEQ ID NO: 3731229 - DNA, 25 bp, Homo sapien
tgaacaaccctgagatctctccagg

SEQ ID NO: 3731230 - DNA, 25 bp, Homo sapien
gcttcagagtgtaacatgaacaacc

SEQ ID NO: 3731231 - DNA, 25 bp, Homo sapien
tttaggtaaaccactacaagcatga

SEQ ID NO: 3731232 - DNA, 25 bp, Homo sapien
ttaatagagaaattgggtacccata

SEQ ID NO: 3731233 - DNA, 25 bp, Homo sapien
tgaacatagaccataaccttacact

SEQ ID NO: 3731234 - DNA, 25 bp, Homo sapien
caaaggatccaaggcaatttaatag

SEQ ID NO: 3731235 - DNA, 25 bp, Homo sapien
gagaaaaacctcatgcctgcaactg

SEQ ID NO: 3731236 - DNA, 25 bp, Homo sapien
ccagttcagagttcaagcagtgcca

SEQ ID NO: 3731237 - DNA, 25 bp, Homo sapien
caacttgaatcaaggccagagccca

SEQ ID NO: 3731238 - DNA, 25 bp, Homo sapien
tatcggagcacacaatcaggagcat

SEQ ID NO: 3731239 - DNA, 25 bp, Homo sapien
ctttggttcacagccgcactgacct

SEQ ID NO: 3731240 - DNA, 25 bp, Homo sapien
tgctttggttcacagccgcactgac

SEQ ID NO: 3731241 - DNA, 25 bp, Homo sapien
ggttcacagccgcactgacctaaca

SEQ ID NO: 3731242 - DNA, 25 bp, Homo sapien
agcattgctttggttcacagccgca

SEQ ID NO: 3731243 - DNA, 25 bp, Homo sapien
catccacgaaatggtaataaaggaa

SEQ ID NO: 3731244 - DNA, 25 bp, Homo sapien
ttccccatccacgaaatggtaataa

SEQ ID NO: 3731245 - DNA, 25 bp, Homo sapien
ccccatccacgaaatggtaataaag

SEQ ID NO: 3731246 - DNA, 25 bp, Homo sapien
cccatccacgaaatggtaataaagg

SEQ ID NO: 3731247 - DNA, 25 bp, Homo sapien
cagagcccactgataagtccgatgg

SEQ ID NO: 3731248 - DNA, 25 bp, Homo sapien
tgcagactcccagataggatcaagg

SEQ ID NO: 3731249 - DNA, 25 bp, Homo sapien
ggaaggcagccaacaagtacctgtc

SEQ ID NO: 3731250 - DNA, 25 bp, Homo sapien
catcacattggctggctccgggata

SEQ ID NO: 3731251 - DNA, 25 bp, Homo sapien
ggttaaattatgtggtggtcttcga

SEQ ID NO: 3731252 - DNA, 25 bp, Homo sapien
ggtcttcgacaaggcatgagctgca

SEQ ID NO: 3731253 - DNA, 25 bp, Homo sapien
ttatgtggtggtcttcgacaaggca

SEQ ID NO: 3731254 - DNA, 25 bp, Homo sapien
ggtggtcttcgacaaggcatgagct

SEQ ID NO: 3731255 - DNA, 25 bp, Homo sapien
gtgacctgtgatcgcacgactgcat

SEQ ID NO: 3731256 - DNA, 25 bp, Homo sapien
gaatctgagttgtataattttgaat

SEQ ID NO: 3731257 - DNA, 25 bp, Homo sapien
attagcccgtggctaaaacaggagg

SEQ ID NO: 3731258 - DNA, 25 bp, Homo sapien
caactattattagcccgtggctaaa

SEQ ID NO: 3731259 - DNA, 25 bp, Homo sapien
gggctcacagtcttccgaagctttt

SEQ ID NO: 3731260 - DNA, 25 bp, Homo sapien
acagaagctttgcatgcagctgtgg

SEQ ID NO: 3731261 - DNA, 25 bp, Homo sapien
tactgtggatctacactaagatctc

SEQ ID NO: 3731262 - DNA, 25 bp, Homo sapien
aggtcagtcccagccgagttcacag

SEQ ID NO: 3731263 - DNA, 25 bp, Homo sapien
cagggtcacgtggttattgctctcc

SEQ ID NO: 3731264 - DNA, 25 bp, Homo sapien
cagtaacaattagcaaccgtgagag

SEQ ID NO: 3731265 - DNA, 25 bp, Homo sapien
cagacactttacaggttcagagcag

SEQ ID NO: 3731266 - DNA, 25 bp, Homo sapien
cattaaggatgccagcggagtccca

SEQ ID NO: 3731267 - DNA, 25 bp, Homo sapien
cgtcttccgcaaaactgccttagtg

SEQ ID NO: 3731268 - DNA, 25 bp, Homo sapien
ctcctcgcaggagatgaatggtcca

SEQ ID NO: 3731269 - DNA, 25 bp, Homo sapien
gatcacatttgctgacacgtcttcc

SEQ ID NO: 3731270 - DNA, 25 bp, Homo sapien
gaaactgtcttatcagaccaaccca

SEQ ID NO: 3731271 - DNA, 25 bp, Homo sapien
aatggctttcgaggctcagaaaatc

SEQ ID NO: 3731272 - DNA, 25 bp, Homo sapien
caaagctaaggcgaatcaaatggct

SEQ ID NO: 3731273 - DNA, 25 bp, Homo sapien
tcaagggccccttgcgagcttctct

SEQ ID NO: 3731274 - DNA, 25 bp, Homo sapien
catgtagcctctttaagtgatcaag

SEQ ID NO: 3731275 - DNA, 25 bp, Homo sapien
cttctgacagaaaaagtgatcgcca

SEQ ID NO: 3731276 - DNA, 25 bp, Homo sapien
gagcaggatgcggttctggatgatt

SEQ ID NO: 3731277 - DNA, 25 bp, Homo sapien
atgatccctaggatgacgagcagga

SEQ ID NO: 3731278 - DNA, 25 bp, Homo sapien
aaaagtgatcgccatcaggatggtg

SEQ ID NO: 3731279 - DNA, 25 bp, Homo sapien
ttaattactcagaacaagctgttgt

SEQ ID NO: 3731280 - DNA, 25 bp, Homo sapien
tactcagaacaagctgttgttgctg

SEQ ID NO: 3731281 - DNA, 25 bp, Homo sapien
tgtttatcaagggagagcagataca

SEQ ID NO: 3731282 - DNA, 25 bp, Homo sapien
ttgttgctgtttatcaagggagagc

SEQ ID NO: 3731283 - DNA, 25 bp, Homo sapien
gatttatccgaacacatgcaggcct

SEQ ID NO: 3731284 - DNA, 25 bp, Homo sapien
gacggatcccttaagctgacaggaa

SEQ ID NO: 3731285 - DNA, 25 bp, Homo sapien
ttttcagcaacaagaggcgggtgac

SEQ ID NO: 3731286 - DNA, 25 bp, Homo sapien
ggaaacgacctcagcttgggcaact

SEQ ID NO: 3731287 - DNA, 25 bp, Homo sapien
ttgagggaaccttctgaccagcttc

SEQ ID NO: 3731288 - DNA, 25 bp, Homo sapien
gatccgatcaaccttgcttgctagg

SEQ ID NO: 3731289 - DNA, 25 bp, Homo sapien
tgtctgcttcaacatgaacgccagg

SEQ ID NO: 3731290 - DNA, 25 bp, Homo sapien
gtgaaatattcaggaggcggccagt

SEQ ID NO: 3731291 - DNA, 25 bp, Homo sapien
ggccagagccgcacaattttgttca

SEQ ID NO: 3731292 - DNA, 25 bp, Homo sapien
taaacaggcgccaagttgctggcaa

SEQ ID NO: 3731293 - DNA, 25 bp, Homo sapien
taaacagaatagcaaatggcctccc

SEQ ID NO: 3731294 - DNA, 25 bp, Homo sapien
ttaatgagcccctctgggactgacg

SEQ ID NO: 3731295 - DNA, 25 bp, Homo sapien
aggcaggtacctcccacgccgtggc

SEQ ID NO: 3731296 - DNA, 25 bp, Homo sapien
atgctgagagatgctacactgagca

SEQ ID NO: 3731297 - DNA, 25 bp, Homo sapien
tctgtccttggatgggtgatgctga

SEQ ID NO: 3731298 - DNA, 25 bp, Homo sapien
gcaaggaacgtgcaccatctcttcc

SEQ ID NO: 3731299 - DNA, 25 bp, Homo sapien
agcaaagttgcggtaacgaagtggc

SEQ ID NO: 3731300 - DNA, 25 bp, Homo sapien
ttgcggtaacgaagtggcactgagc

SEQ ID NO: 3731301 - DNA, 25 bp, Homo sapien
aagttgcggtaacgaagtggcactg

SEQ ID NO: 3731302 - DNA, 25 bp, Homo sapien
aaacagcaaagttgcggtaacgaag

SEQ ID NO: 3731303 - DNA, 25 bp, Homo sapien
tcagcccaggatgcctctatggcct

SEQ ID NO: 3731304 - DNA, 25 bp, Homo sapien
ggatgcctctatggcctgggtcctt

SEQ ID NO: 3731305 - DNA, 25 bp, Homo sapien
ccacaggtgtcagcccaggatgcct

SEQ ID NO: 3731306 - DNA, 25 bp, Homo sapien
cctctatggcctgggtccttggcag

SEQ ID NO: 3731307 - DNA, 25 bp, Homo sapien
cggctgatgcacgtctgttgaattt

SEQ ID NO: 3731308 - DNA, 25 bp, Homo sapien
caggatgccgaagtgcttgtcagcg

SEQ ID NO: 3731309 - DNA, 25 bp, Homo sapien
ggagagtaacgcgaaaatgtggtac

SEQ ID NO: 3731310 - DNA, 25 bp, Homo sapien
aacagtccccatccctcaaggaggt

SEQ ID NO: 3731311 - DNA, 25 bp, Homo sapien
gattgcctgccaagtcaaaccttta

SEQ ID NO: 3731312 - DNA, 25 bp, Homo sapien
cagcattgtccacttggagaagatt

SEQ ID NO: 3731313 - DNA, 25 bp, Homo sapien
gtggtgcacctcttagccactcggc

SEQ ID NO: 3731314 - DNA, 25 bp, Homo sapien
gcaaggaggaatgaacatacagcat

SEQ ID NO: 3731315 - DNA, 25 bp, Homo sapien
tgtatttcacggttctctcaggagg

SEQ ID NO: 3731316 - DNA, 25 bp, Homo sapien
acgtgacgggatgctactttagacc

SEQ ID NO: 3731317 - DNA, 25 bp, Homo sapien
gaggataccttgacctggccggaag

SEQ ID NO: 3731318 - DNA, 25 bp, Homo sapien
tcacaaaggagttcagagaggccgt

SEQ ID NO: 3731319 - DNA, 25 bp, Homo sapien
tgctgagtgtacagcggccgaaacc

SEQ ID NO: 3731320 - DNA, 25 bp, Homo sapien
gatattctcgattcccacactgtgg

SEQ ID NO: 3731321 - DNA, 25 bp, Homo sapien
ccttaaattccaagccgaagccgat

SEQ ID NO: 3731322 - DNA, 25 bp, Homo sapien
cagcctaagtctcccttgtaaaagt

SEQ ID NO: 3731323 - DNA, 25 bp, Homo sapien
tattttagtccaacaatgcaggccc

SEQ ID NO: 3731324 - DNA, 25 bp, Homo sapien
cctgaaggtagggagaagctttcct

SEQ ID NO: 3731325 - DNA, 25 bp, Homo sapien
gtgtagagtacccaccggaagctgc

SEQ ID NO: 3731326 - DNA, 25 bp, Homo sapien
gctgaaggcccctgaagagactcat

SEQ ID NO: 3731327 - DNA, 25 bp, Homo sapien
tgtgatccacctacacggagtgcag

SEQ ID NO: 3731328 - DNA, 25 bp, Homo sapien
tgatgtgagctagtaaacacctggc

SEQ ID NO: 3731329 - DNA, 25 bp, Homo sapien
gagtagtgccagttagtcccagagc

SEQ ID NO: 3731330 - DNA, 25 bp, Homo sapien
cagccaagctgaaatgtgtcccatg

SEQ ID NO: 3731331 - DNA, 25 bp, Homo sapien
aaataatgcctctcaaagccctatg

SEQ ID NO: 3731332 - DNA, 25 bp, Homo sapien
gtctgcaaaccatggatctaaccca

SEQ ID NO: 3731333 - DNA, 25 bp, Homo sapien
actcctaaatatgcccatgaggaaa

SEQ ID NO: 3731334 - DNA, 25 bp, Homo sapien
tctcaaagccctatgccttggcatt

SEQ ID NO: 3731335 - DNA, 25 bp, Homo sapien
tgagggtacacaaaagcatagggtt

SEQ ID NO: 3731336 - DNA, 25 bp, Homo sapien
tgggtggttcttccgctctatctgg

SEQ ID NO: 3731337 - DNA, 25 bp, Homo sapien
gaatgttccctgaggatctctagat

SEQ ID NO: 3731338 - DNA, 25 bp, Homo sapien
gtttcttcagtaactaggcacagtg

SEQ ID NO: 3731339 - DNA, 25 bp, Homo sapien
ctctgatccgatggagggaaatctg

SEQ ID NO: 3731340 - DNA, 25 bp, Homo sapien
acaggctctgatccgatggagggaa

SEQ ID NO: 3731341 - DNA, 25 bp, Homo sapien
gctctgatccgatggagggaaatct

SEQ ID NO: 3731342 - DNA, 25 bp, Homo sapien
aggctctgatccgatggagggaaat

SEQ ID NO: 3731343 - DNA, 25 bp, Homo sapien
agtaaagagtgttcctgccaagtgc

SEQ ID NO: 3731344 - DNA, 25 bp, Homo sapien
cagtctcaggtgctgcaaggtggac

SEQ ID NO: 3731345 - DNA, 25 bp, Homo sapien
cagagttcggaaggaaacatgcgcc

SEQ ID NO: 3731346 - DNA, 25 bp, Homo sapien
ggtggactaatctgacacactaggg

SEQ ID NO: 3731347 - DNA, 25 bp, Homo sapien
gatgctggcactgcttagaaagggt

SEQ ID NO: 3731348 - DNA, 25 bp, Homo sapien
gcactgcttagaaagggttcatgcc

SEQ ID NO: 3731349 - DNA, 25 bp, Homo sapien
gctggcactgcttagaaagggttca

SEQ ID NO: 3731350 - DNA, 25 bp, Homo sapien
tggcactgcttagaaagggttcatg

SEQ ID NO: 3731351 - DNA, 25 bp, Homo sapien
tctgtccagacttgcggcttcctct

SEQ ID NO: 3731352 - DNA, 25 bp, Homo sapien
ttctctgtccagacttgcggcttcc

SEQ ID NO: 3731353 - DNA, 25 bp, Homo sapien
ccagacttgcggcttcctctttagt

SEQ ID NO: 3731354 - DNA, 25 bp, Homo sapien
gacttgcggcttcctctttagtggg

SEQ ID NO: 3731355 - DNA, 25 bp, Homo sapien
ccttggacaaggagaacatggcact

SEQ ID NO: 3731356 - DNA, 25 bp, Homo sapien
tagatgatcttgtcccactgaggca

SEQ ID NO: 3731357 - DNA, 25 bp, Homo sapien
taaaacagggctactgaacttgggc

SEQ ID NO: 3731358 - DNA, 25 bp, Homo sapien
aaattctctggtcattgggcctgca

SEQ ID NO: 3731359 - DNA, 25 bp, Homo sapien
aagccaattaggaaccctctctgga

SEQ ID NO: 3731360 - DNA, 25 bp, Homo sapien
caattaggaaccctctctggactgg

SEQ ID NO: 3731361 - DNA, 25 bp, Homo sapien
cctctctggactggcgggaagaagc

SEQ ID NO: 3731362 - DNA, 25 bp, Homo sapien
gactggcgggaagaagccaggttcc

SEQ ID NO: 3731363 - DNA, 25 bp, Homo sapien
aaaggctcataaataatgaggtgga

SEQ ID NO: 3731364 - DNA, 25 bp, Homo sapien
gaaaggctcataaataatgaggtgg

SEQ ID NO: 3731365 - DNA, 25 bp, Homo sapien
ccagaaaggctcataaataatgagg

SEQ ID NO: 3731366 - DNA, 25 bp, Homo sapien
ttccagaaaggctcataaataatga

SEQ ID NO: 3731367 - DNA, 25 bp, Homo sapien
ttcagatgtgagtacccaatagcgg

SEQ ID NO: 3731368 - DNA, 25 bp, Homo sapien
ttggtttcagatgtgagtacccaat

SEQ ID NO: 3731369 - DNA, 25 bp, Homo sapien
cagatgtgagtacccaatagcggcc

SEQ ID NO: 3731370 - DNA, 25 bp, Homo sapien
aattggtttcagatgtgagtaccca

SEQ ID NO: 3731371 - DNA, 25 bp, Homo sapien
tgtctgtggctgtgcgggcattctc

SEQ ID NO: 3731372 - DNA, 25 bp, Homo sapien
tcaccgtactatcagtccccatgtg

SEQ ID NO: 3731373 - DNA, 25 bp, Homo sapien
ccccagtcacctgcctatttgctgc

SEQ ID NO: 3731374 - DNA, 25 bp, Homo sapien
cctatttgctgcgtggatcttcacc

SEQ ID NO: 3731375 - DNA, 25 bp, Homo sapien
ggaagacagtgtgaggaagcacggg

SEQ ID NO: 3731376 - DNA, 25 bp, Homo sapien
aagacagtgtgaggaagcacgggct

SEQ ID NO: 3731377 - DNA, 25 bp, Homo sapien
gacagtgtgaggaagcacgggcttg

SEQ ID NO: 3731378 - DNA, 25 bp, Homo sapien
aaaacagcatggggaagacagtgtg

SEQ ID NO: 3731379 - DNA, 25 bp, Homo sapien
acttgctaagggctatcattacagc

SEQ ID NO: 3731380 - DNA, 25 bp, Homo sapien
tatagaaaaggctcagttatcttgt

SEQ ID NO: 3731381 - DNA, 25 bp, Homo sapien
ccaataatcactgcgcttacaaaac

SEQ ID NO: 3731382 - DNA, 25 bp, Homo sapien
tcagttatcttgttcagagatcccc

SEQ ID NO: 3731383 - DNA, 25 bp, Homo sapien
tattccatgacataaatggacctta

SEQ ID NO: 3731384 - DNA, 25 bp, Homo sapien
atttagtacttagtattattccatg

SEQ ID NO: 3731385 - DNA, 25 bp, Homo sapien
ccatgacataaatggaccttaaatt

SEQ ID NO: 3731386 - DNA, 25 bp, Homo sapien
agtattattccatgacataaatgga

SEQ ID NO: 3731387 - DNA, 25 bp, Homo sapien
aatctccaagtgactcaaagtgtgg

SEQ ID NO: 3731388 - DNA, 25 bp, Homo sapien
gaatagatggtggagcacctttggc

SEQ ID NO: 3731389 - DNA, 25 bp, Homo sapien
gctgaacactgctattgacaatctc

SEQ ID NO: 3731390 - DNA, 25 bp, Homo sapien
gaaatccagtcttggcttgcaggcc

SEQ ID NO: 3731391 - DNA, 25 bp, Homo sapien
agcgatagctcccttcctcattagt

SEQ ID NO: 3731392 - DNA, 25 bp, Homo sapien
tagctcccttcctcattagtctaag

SEQ ID NO: 3731393 - DNA, 25 bp, Homo sapien
tgttgagcgatagctcccttcctca

SEQ ID NO: 3731394 - DNA, 25 bp, Homo sapien
ccttcctcattagtctaaggtccat

SEQ ID NO: 3731395 - DNA, 25 bp, Homo sapien
ccctttataagatcctgagttcctt

SEQ ID NO: 3731396 - DNA, 25 bp, Homo sapien
tccctttataagatcctgagttcct

SEQ ID NO: 3731397 - DNA, 25 bp, Homo sapien
cctttataagatcctgagttccttt

SEQ ID NO: 3731398 - DNA, 25 bp, Homo sapien
ctccctttataagatcctgagttcc

SEQ ID NO: 3731399 - DNA, 25 bp, Homo sapien
ctgggaagagaagcagagagaggtg

SEQ ID NO: 3731400 - DNA, 25 bp, Homo sapien
tgggaagagaagcagagagaggtga

SEQ ID NO: 3731401 - DNA, 25 bp, Homo sapien
gggaagagaagcagagagaggtgag

SEQ ID NO: 3731402 - DNA, 25 bp, Homo sapien
ggaagagaagcagagagaggtgagg

SEQ ID NO: 3731403 - DNA, 25 bp, Homo sapien
ctcactctgcaggtagaatcccaag

SEQ ID NO: 3731404 - DNA, 25 bp, Homo sapien
tcacctcccaattcctgagtgtggt

SEQ ID NO: 3731405 - DNA, 25 bp, Homo sapien
tatgggacaggtgtctgagaactgt

SEQ ID NO: 3731406 - DNA, 25 bp, Homo sapien
tcatggcctttactagggccagggc

SEQ ID NO: 3731407 - DNA, 25 bp, Homo sapien
cacaccgttggctgtcaaataggcg

SEQ ID NO: 3731408 - DNA, 25 bp, Homo sapien
cggatcttgttaattatcttccaca

SEQ ID NO: 3731409 - DNA, 25 bp, Homo sapien
caaataggcgattgatctgactcgg

SEQ ID NO: 3731410 - DNA, 25 bp, Homo sapien
ccccagcgctggatcggaaggattg

SEQ ID NO: 3731411 - DNA, 25 bp, Homo sapien
caaggagaaggtgtgttttatgctc

SEQ ID NO: 3731412 - DNA, 25 bp, Homo sapien
tggcagttaacagaaccctttgatt

SEQ ID NO: 3731413 - DNA, 25 bp, Homo sapien
tgtgtagatcttggcagttaacaga

SEQ ID NO: 3731414 - DNA, 25 bp, Homo sapien
gcactttacaaggagaaggtgtgtt

SEQ ID NO: 3731415 - DNA, 25 bp, Homo sapien
agcagttgggtgtttcaaatggcag

SEQ ID NO: 3731416 - DNA, 25 bp, Homo sapien
aaatggcagagctgatctttcctgc

SEQ ID NO: 3731417 - DNA, 25 bp, Homo sapien
aatggcagagctgatctttcctgct

SEQ ID NO: 3731418 - DNA, 25 bp, Homo sapien
tgcggtgaccaacaggcaaagcgtg

SEQ ID NO: 3731419 - DNA, 25 bp, Homo sapien
gcgtggtctcattcctggccagcac

SEQ ID NO: 3731420 - DNA, 25 bp, Homo sapien
gagttccctggagatgcggtgacca

SEQ ID NO: 3731421 - DNA, 25 bp, Homo sapien
ccagcactctggctcatatgatgta

SEQ ID NO: 3731422 - DNA, 25 bp, Homo sapien
tgcgatcaaaagggttaactccctg

SEQ ID NO: 3731423 - DNA, 25 bp, Homo sapien
cctcttagagctggatcaaatgact

SEQ ID NO: 3731424 - DNA, 25 bp, Homo sapien
cacctcttagagctggatcaaatga

SEQ ID NO: 3731425 - DNA, 25 bp, Homo sapien
ctccctggaaggtgccttctagttc

SEQ ID NO: 3731426 - DNA, 25 bp, Homo sapien
tctcctcgtttgttatcatctgttc

SEQ ID NO: 3731427 - DNA, 25 bp, Homo sapien
cctgtgtctcctcgtttgttatcat

SEQ ID NO: 3731428 - DNA, 25 bp, Homo sapien
tgtctcctcgtttgttatcatctgt

SEQ ID NO: 3731429 - DNA, 25 bp, Homo sapien
gtgtctcctcgtttgttatcatctg

SEQ ID NO: 3731430 - DNA, 25 bp, Homo sapien
tgcctggcctacagtgcattattag

SEQ ID NO: 3731431 - DNA, 25 bp, Homo sapien
cctgcttaactgaagctttgtacct

SEQ ID NO: 3731432 - DNA, 25 bp, Homo sapien
tatatagaacaccagatcttatccc

SEQ ID NO: 3731433 - DNA, 25 bp, Homo sapien
tattagtagctatagtcacgatcca

SEQ ID NO: 3731434 - DNA, 25 bp, Homo sapien
cagcattgatggctgttgtcccacc

SEQ ID NO: 3731435 - DNA, 25 bp, Homo sapien
agcattgatggctgttgtcccacca

SEQ ID NO: 3731436 - DNA, 25 bp, Homo sapien
caccagcattgatggctgttgtccc

SEQ ID NO: 3731437 - DNA, 25 bp, Homo sapien
accagcattgatggctgttgtccca

SEQ ID NO: 3731438 - DNA, 25 bp, Homo sapien
tagggagccccagcctccaatactg

SEQ ID NO: 3731439 - DNA, 25 bp, Homo sapien
ctccctagggagccccagcctccaa

SEQ ID NO: 3731440 - DNA, 25 bp, Homo sapien
cctagggagccccagcctccaatac

SEQ ID NO: 3731441 - DNA, 25 bp, Homo sapien
gggagccccagcctccaatactgac

SEQ ID NO: 3731442 - DNA, 25 bp, Homo sapien
ttcaaagtcccttgccttagaagca

SEQ ID NO: 3731443 - DNA, 25 bp, Homo sapien
cagatccatgtgaggctcctgccaa

SEQ ID NO: 3731444 - DNA, 25 bp, Homo sapien
caacatccatagcatcttttcaaag

SEQ ID NO: 3731445 - DNA, 25 bp, Homo sapien
gaagcaaggtctaccgcagatttgc

SEQ ID NO: 3731446 - DNA, 25 bp, Homo sapien
tatgcagcacaaggtttagcaacag

SEQ ID NO: 3731447 - DNA, 25 bp, Homo sapien
tagcctgagggcatgctgtaaatac

SEQ ID NO: 3731448 - DNA, 25 bp, Homo sapien
gactgtcatctttagcaaacaccgg

SEQ ID NO: 3731449 - DNA, 25 bp, Homo sapien
caaacaccggttctgggtagcctga

SEQ ID NO: 3731450 - DNA, 25 bp, Homo sapien
ggaaattgctaaccaaaccgatgct

SEQ ID NO: 3731451 - DNA, 25 bp, Homo sapien
ggtctgaaatgaaatccccgaaaga

SEQ ID NO: 3731452 - DNA, 25 bp, Homo sapien
aaccgatgctagaagaccttcggga

SEQ ID NO: 3731453 - DNA, 25 bp, Homo sapien
caacccctgggatcagttgggctac

SEQ ID NO: 3731454 - DNA, 25 bp, Homo sapien
gggagatcttctgcacgcgtgagtt

SEQ ID NO: 3731455 - DNA, 25 bp, Homo sapien
atacaggaggtgctcgtgccgctcg

SEQ ID NO: 3731456 - DNA, 25 bp, Homo sapien
cgttcccaaggatccgatcaatgtg

SEQ ID NO: 3731457 - DNA, 25 bp, Homo sapien
tgcaagaaaaagacgagtccaaggt

SEQ ID NO: 3731458 - DNA, 25 bp, Homo sapien
gactagagacgatttgacatcagct

SEQ ID NO: 3731459 - DNA, 25 bp, Homo sapien
tgttcgccctcgtctttgaaggaaa

SEQ ID NO: 3731460 - DNA, 25 bp, Homo sapien
gaaatcagttcgtcgttggcgccta

SEQ ID NO: 3731461 - DNA, 25 bp, Homo sapien
tctctgccgaggagttttcggagct

SEQ ID NO: 3731462 - DNA, 25 bp, Homo sapien
tttgtctcggaaactttcggagcga

SEQ ID NO: 3731463 - DNA, 25 bp, Homo sapien
gagcgaggcggaggccgtctttccg

SEQ ID NO: 3731464 - DNA, 25 bp, Homo sapien
tctcggaaactttcggagcgaggcg

SEQ ID NO: 3731465 - DNA, 25 bp, Homo sapien
gatttgtctcggaaactttcggagc

SEQ ID NO: 3731466 - DNA, 25 bp, Homo sapien
gcggccgcgcggagcgggagagagt

SEQ ID NO: 3731467 - DNA, 25 bp, Homo sapien
cggccgcgcggagcgggagagagtg

SEQ ID NO: 3731468 - DNA, 25 bp, Homo sapien
ggcggccgcgcggagcgggagagag

SEQ ID NO: 3731469 - DNA, 25 bp, Homo sapien
ttaaagagccctccatcttgcctct

SEQ ID NO: 3731470 - DNA, 25 bp, Homo sapien
aaagagccctccatcttgcctcttg

SEQ ID NO: 3731471 - DNA, 25 bp, Homo sapien
agagccctccatcttgcctcttggc

SEQ ID NO: 3731472 - DNA, 25 bp, Homo sapien
cttaaagagccctccatcttgcctc

SEQ ID NO: 3731473 - DNA, 25 bp, Homo sapien
taggggctcgtcaggtcggggatca

SEQ ID NO: 3731474 - DNA, 25 bp, Homo sapien
cgagagcgatccgttggggaggtag

SEQ ID NO: 3731475 - DNA, 25 bp, Homo sapien
ggcgagagcgatccgttggggaggt

SEQ ID NO: 3731476 - DNA, 25 bp, Homo sapien
gggatcatgatgaaggggtagccgg

SEQ ID NO: 3731477 - DNA, 25 bp, Homo sapien
tgctgccctgcgcggcccgggagag

SEQ ID NO: 3731478 - DNA, 25 bp, Homo sapien
ctgctgccctgcgcggcccgggaga

SEQ ID NO: 3731479 - DNA, 25 bp, Homo sapien
gcccgggagagcccgcagccagtgc

SEQ ID NO: 3731480 - DNA, 25 bp, Homo sapien
catacatcccaaggcgccaaaattc

SEQ ID NO: 3731481 - DNA, 25 bp, Homo sapien
ccacgacgggcctacacggaagctg

SEQ ID NO: 3731482 - DNA, 25 bp, Homo sapien
tacacggaagctggcgagcgccgac

SEQ ID NO: 3731483 - DNA, 25 bp, Homo sapien
gccatacatcccaaggcgccaaaat

SEQ ID NO: 3731484 - DNA, 25 bp, Homo sapien
tactgccaatgtctgcggaccttga

SEQ ID NO: 3731485 - DNA, 25 bp, Homo sapien
tgaatattataaggccaacgtggcg

SEQ ID NO: 3731486 - DNA, 25 bp, Homo sapien
gaggaaacgtacaagtcagctgcca

SEQ ID NO: 3731487 - DNA, 25 bp, Homo sapien
gagagaaatctgagctactgccaat

SEQ ID NO: 3731488 - DNA, 25 bp, Homo sapien
caaccattgcgctggagagatttcc

SEQ ID NO: 3731489 - DNA, 25 bp, Homo sapien
ggcacatctgagtttaaaaaccagg

SEQ ID NO: 3731490 - DNA, 25 bp, Homo sapien
tatgaggtgagactgcgaagtccag

SEQ ID NO: 3731491 - DNA, 25 bp, Homo sapien
tccaggacaagatgactaaggcaca

SEQ ID NO: 3731492 - DNA, 25 bp, Homo sapien
catgaaaaggaaagacggatgccca

SEQ ID NO: 3731493 - DNA, 25 bp, Homo sapien
caggtatcccgaaataggaagagca

SEQ ID NO: 3731494 - DNA, 25 bp, Homo sapien
tagagaccacccatcaatgaagcag

SEQ ID NO: 3731495 - DNA, 25 bp, Homo sapien
tatgagaagccacaagactgcaaca

SEQ ID NO: 3731496 - DNA, 25 bp, Homo sapien
tttgtacgcagagtaatgtgtgctg

SEQ ID NO: 3731497 - DNA, 25 bp, Homo sapien
tgtgtgctgccggactgaaaatgga

SEQ ID NO: 3731498 - DNA, 25 bp, Homo sapien
gaactgcaatctggtgttcaatcgt

SEQ ID NO: 3731499 - DNA, 25 bp, Homo sapien
gttcaatcgttttgtacgcagagta

SEQ ID NO: 3731500 - DNA, 25 bp, Homo sapien
aagcttcagaatctcttgcgtttcc

SEQ ID NO: 3731501 - DNA, 25 bp, Homo sapien
cttcagaatctcttgcgtttcctac

SEQ ID NO: 3731502 - DNA, 25 bp, Homo sapien
tcaagcttcagaatctcttgcgttt

SEQ ID NO: 3731503 - DNA, 25 bp, Homo sapien
gcttcagaatctcttgcgtttccta

SEQ ID NO: 3731504 - DNA, 25 bp, Homo sapien
ggcacttcagcaacgggtgtaaaga

SEQ ID NO: 3731505 - DNA, 25 bp, Homo sapien
tcctgagaaagagcttcacatggcc

SEQ ID NO: 3731506 - DNA, 25 bp, Homo sapien
tttggagaaagacgaactgctcggc

SEQ ID NO: 3731507 - DNA, 25 bp, Homo sapien
ggctagtctcccagtgacatggccc

SEQ ID NO: 3731508 - DNA, 25 bp, Homo sapien
aaaaatgacggccagcgggaggcta

SEQ ID NO: 3731509 - DNA, 25 bp, Homo sapien
aaaaactcactggaacataagggca

SEQ ID NO: 3731510 - DNA, 25 bp, Homo sapien
tggtttcagaagactctaaggcagc

SEQ ID NO: 3731511 - DNA, 25 bp, Homo sapien
caatgtagtacttagccagccctca

SEQ ID NO: 3731512 - DNA, 25 bp, Homo sapien
gaatctccaaggagtagaacccagg

SEQ ID NO: 3731513 - DNA, 25 bp, Homo sapien
tcaggacccgttccaagcttacaga

SEQ ID NO: 3731514 - DNA, 25 bp, Homo sapien
taagggaacccctagaccactgtga

SEQ ID NO: 3731515 - DNA, 25 bp, Homo sapien
tgaatcctaattggccttgggcaaa

SEQ ID NO: 3731516 - DNA, 25 bp, Homo sapien
ccactgtttggatgatgccatagtc

SEQ ID NO: 3731517 - DNA, 25 bp, Homo sapien
agttaccactgtttggatgatgcca

SEQ ID NO: 3731518 - DNA, 25 bp, Homo sapien
gcattctgaaaatcagaagatggtc

SEQ ID NO: 3731519 - DNA, 25 bp, Homo sapien
gatggtcatagaaatagacaccagt

SEQ ID NO: 3731520 - DNA, 25 bp, Homo sapien
tgactaatgttcaccaacactcata

SEQ ID NO: 3731521 - DNA, 25 bp, Homo sapien
ctgcggcatcggcacatccctttcc

SEQ ID NO: 3731522 - DNA, 25 bp, Homo sapien
ttgactaatgttcaccaacactcat

SEQ ID NO: 3731523 - DNA, 25 bp, Homo sapien
cggcatcggcacatccctttccccc

SEQ ID NO: 3731524 - DNA, 25 bp, Homo sapien
tttatttacacagcgctgctccccg

SEQ ID NO: 3731525 - DNA, 25 bp, Homo sapien
tagcagagcccatacgggtttcagg

SEQ ID NO: 3731526 - DNA, 25 bp, Homo sapien
agtacatcgtttggtcattgctgcc

SEQ ID NO: 3731527 - DNA, 25 bp, Homo sapien
gcaagagctttttctaggcctcctg

SEQ ID NO: 3731528 - DNA, 25 bp, Homo sapien
tagacaagaccttctagactccatt

SEQ ID NO: 3731529 - DNA, 25 bp, Homo sapien
gatatgaggtccttatacatcctaa

SEQ ID NO: 3731530 - DNA, 25 bp, Homo sapien
caatatctagctctgaaaactgcct

SEQ ID NO: 3731531 - DNA, 25 bp, Homo sapien
caaagctgggtcaccacttagtagc

SEQ ID NO: 3731532 - DNA, 25 bp, Homo sapien
ctcatctcacaatgcactgcctggg

SEQ ID NO: 3731533 - DNA, 25 bp, Homo sapien
caaagacaaggttctccccagagaa

SEQ ID NO: 3731534 - DNA, 25 bp, Homo sapien
cagacctaggagtgttcagagctcc

SEQ ID NO: 3731535 - DNA, 25 bp, Homo sapien
cagagaaccagctatctgcagccag

SEQ ID NO: 3731536 - DNA, 25 bp, Homo sapien
atggcttctaattaattggtcttac

SEQ ID NO: 3731537 - DNA, 25 bp, Homo sapien
caaagcgttttatccatcatcccag

SEQ ID NO: 3731538 - DNA, 25 bp, Homo sapien
tctgacttcagtgccaaagcgtttt

SEQ ID NO: 3731539 - DNA, 25 bp, Homo sapien
tcccagaacgcctccttatcacaac

SEQ ID NO: 3731540 - DNA, 25 bp, Homo sapien
cattcacatacaccgttatggtagt

SEQ ID NO: 3731541 - DNA, 25 bp, Homo sapien
ccaggacattcacatacaccgttat

SEQ ID NO: 3731542 - DNA, 25 bp, Homo sapien
catacaccgttatggtagtaaaagg

SEQ ID NO: 3731543 - DNA, 25 bp, Homo sapien
caccgttatggtagtaaaaggagat

SEQ ID NO: 3731544 - DNA, 25 bp, Homo sapien
tactaaaaatcagcccagcctggtg

SEQ ID NO: 3731545 - DNA, 25 bp, Homo sapien
tagaaactggacgactctggagctc

SEQ ID NO: 3731546 - DNA, 25 bp, Homo sapien
gaaaaggttacccacagcaagcaag

SEQ ID NO: 3731547 - DNA, 25 bp, Homo sapien
ccaatgtcacgtgcaaggcctcagt

SEQ ID NO: 3731548 - DNA, 25 bp, Homo sapien
taaaagacctataagcagcttggct

SEQ ID NO: 3731549 - DNA, 25 bp, Homo sapien
gatcagtctccaattgaaaagcctg

SEQ ID NO: 3731550 - DNA, 25 bp, Homo sapien
gagggcttccatcaaacggtctgtc

SEQ ID NO: 3731551 - DNA, 25 bp, Homo sapien
cccattgagatgagtacggaaacgt

SEQ ID NO: 3731552 - DNA, 25 bp, Homo sapien
cctagcaagatctctgttagcttcc

SEQ ID NO: 3731553 - DNA, 25 bp, Homo sapien
gggtacaacctcacatggatacagg

SEQ ID NO: 3731554 - DNA, 25 bp, Homo sapien
tccccactttcaaaccactcaggag

SEQ ID NO: 3731555 - DNA, 25 bp, Homo sapien
aggagcctgggggtacaacctcaca

SEQ ID NO: 3731556 - DNA, 25 bp, Homo sapien
aaacccttgcgcaaacagggtggca

SEQ ID NO: 3731557 - DNA, 25 bp, Homo sapien
ggtgagataaccacaaccgcatcct

SEQ ID NO: 3731558 - DNA, 25 bp, Homo sapien
aagcctcaccccgaagtacaaggag

SEQ ID NO: 3731559 - DNA, 25 bp, Homo sapien
caatttgggataacgatgaggacaa

SEQ ID NO: 3731560 - DNA, 25 bp, Homo sapien
ctggcacgaggcagggagctgccag

SEQ ID NO: 3731561 - DNA, 25 bp, Homo sapien
ctgccagggcctcatgcgcctccat

SEQ ID NO: 3731562 - DNA, 25 bp, Homo sapien
gagctgccagggcctcatgcgcctc

SEQ ID NO: 3731563 - DNA, 25 bp, Homo sapien
tggcacgaggcagggagctgccagg

SEQ ID NO: 3731564 - DNA, 25 bp, Homo sapien
gggccacagcactttccagtatttt

SEQ ID NO: 3731565 - DNA, 25 bp, Homo sapien
cctcgggccacagcactttccagta

SEQ ID NO: 3731566 - DNA, 25 bp, Homo sapien
ggccacagcactttccagtatttta

SEQ ID NO: 3731567 - DNA, 25 bp, Homo sapien
tcgggccacagcactttccagtatt

SEQ ID NO: 3731568 - DNA, 25 bp, Homo sapien
agaatccagacacacggggtgagga

SEQ ID NO: 3731569 - DNA, 25 bp, Homo sapien
aagaatccagacacacggggtgagg

SEQ ID NO: 3731570 - DNA, 25 bp, Homo sapien
tccatcaggtaaagcccatctggtc

SEQ ID NO: 3731571 - DNA, 25 bp, Homo sapien
ctctgcaggatgctcatttccaggc

SEQ ID NO: 3731572 - DNA, 25 bp, Homo sapien
gcaaagcacactccatcaggtaaag

SEQ ID NO: 3731573 - DNA, 25 bp, Homo sapien
gtgtgaacaggagccgagctctgca

SEQ ID NO: 3731574 - DNA, 25 bp, Homo sapien
ggttcagtccaaagaccagtgtgga

SEQ ID NO: 3731575 - DNA, 25 bp, Homo sapien
gtccaaagaccagtgtggatttcct

SEQ ID NO: 3731576 - DNA, 25 bp, Homo sapien
tctggttcagtccaaagaccagtgt

SEQ ID NO: 3731577 - DNA, 25 bp, Homo sapien
ccagcctctggttcagtccaaagac

SEQ ID NO: 3731578 - DNA, 25 bp, Homo sapien
ccagccgcctaaagtttcccaaatg

SEQ ID NO: 3731579 - DNA, 25 bp, Homo sapien
cagccgcctaaagtttcccaaatgc

SEQ ID NO: 3731580 - DNA, 25 bp, Homo sapien
caaacatgtggagatgcttcgtaac

SEQ ID NO: 3731581 - DNA, 25 bp, Homo sapien
ttcgtaacgctacacccaggaagcc

SEQ ID NO: 3731582 - DNA, 25 bp, Homo sapien
tagctgtgacaaacatgtggagatg

SEQ ID NO: 3731583 - DNA, 25 bp, Homo sapien
gaagcccaaaggtcagcagtgcctc

SEQ ID NO: 3731584 - DNA, 25 bp, Homo sapien
gctccctgcctggacatcaagcagt

SEQ ID NO: 3731585 - DNA, 25 bp, Homo sapien
gcttgtctactctggaggctccctg

SEQ ID NO: 3731586 - DNA, 25 bp, Homo sapien
ggcatccttgagggcttgtctactc

SEQ ID NO: 3731587 - DNA, 25 bp, Homo sapien
caagcagtggccatttcatctggag

SEQ ID NO: 3731588 - DNA, 25 bp, Homo sapien
caaaatggcagaatgcatcttaaga

SEQ ID NO: 3731589 - DNA, 25 bp, Homo sapien
tgcataattctacctgtcatggatg

SEQ ID NO: 3731590 - DNA, 25 bp, Homo sapien
tactcaaatgaaaaacccatgattg

SEQ ID NO: 3731591 - DNA, 25 bp, Homo sapien
tcaaataaggctgagctatcttctc

SEQ ID NO: 3731592 - DNA, 25 bp, Homo sapien
ggacagaatcatggaaactccttct

SEQ ID NO: 3731593 - DNA, 25 bp, Homo sapien
taagtctccttaaaacagtcctcag

SEQ ID NO: 3731594 - DNA, 25 bp, Homo sapien
tagaggagactacacgatacaggtt

SEQ ID NO: 3731595 - DNA, 25 bp, Homo sapien
gatacaggttaaagcgacacctcct

SEQ ID NO: 3731596 - DNA, 25 bp, Homo sapien
gacagaacaatcagacacagccact

SEQ ID NO: 3731597 - DNA, 25 bp, Homo sapien
gacaaactttgagatagacacccta

SEQ ID NO: 3731598 - DNA, 25 bp, Homo sapien
caaaagaatgacaggcctccaggtt

SEQ ID NO: 3731599 - DNA, 25 bp, Homo sapien
cagcctagtctggtgtccggaaacc

SEQ ID NO: 3731600 - DNA, 25 bp, Homo sapien
gaatattttcttgcccactggtata

SEQ ID NO: 3731601 - DNA, 25 bp, Homo sapien
cctggggccaggctcggtgactcac

SEQ ID NO: 3731602 - DNA, 25 bp, Homo sapien
tactggttttcatctctatgccttc

SEQ ID NO: 3731603 - DNA, 25 bp, Homo sapien
cccaacagaagtcccatgagagcaa

SEQ ID NO: 3731604 - DNA, 25 bp, Homo sapien
cctgtgtccaccaggttcccatctc

SEQ ID NO: 3731605 - DNA, 25 bp, Homo sapien
aatctcaatccattcaccagcactg

SEQ ID NO: 3731606 - DNA, 25 bp, Homo sapien
agagcagtgccacattccagggcca

SEQ ID NO: 3731607 - DNA, 25 bp, Homo sapien
aggttcccatctcccgctctcctct

SEQ ID NO: 3731608 - DNA, 25 bp, Homo sapien
ctcagataacagaatcagattaatg

SEQ ID NO: 3731609 - DNA, 25 bp, Homo sapien
tgtcccatccggtgtcaagtttcct

SEQ ID NO: 3731610 - DNA, 25 bp, Homo sapien
gaatcagattaatgtcccatccggt

SEQ ID NO: 3731611 - DNA, 25 bp, Homo sapien
gaggcaaggaatcacccgggtgtgg

SEQ ID NO: 3731612 - DNA, 25 bp, Homo sapien
gacatctgagctaagattccatcaa

SEQ ID NO: 3731613 - DNA, 25 bp, Homo sapien
ttccagaaggccaagcctagggcga

SEQ ID NO: 3731614 - DNA, 25 bp, Homo sapien
ttcttgtagcaaagcgggtagggag

SEQ ID NO: 3731615 - DNA, 25 bp, Homo sapien
ggaagcaagagaacagtgagttcca

SEQ ID NO: 3731616 - DNA, 25 bp, Homo sapien
gttgtagactggaaagacacctgct

SEQ ID NO: 3731617 - DNA, 25 bp, Homo sapien
gctacagatcgaggcaagaaccaat

SEQ ID NO: 3731618 - DNA, 25 bp, Homo sapien
tcagcttggttgcagtccaggcacc

SEQ ID NO: 3731619 - DNA, 25 bp, Homo sapien
gctgctgcccagaacggaaaaggta

SEQ ID NO: 3731620 - DNA, 25 bp, Homo sapien
tgatgagccccgcagtgatgagtgt

SEQ ID NO: 3731621 - DNA, 25 bp, Homo sapien
tgtgcagccgtcagcagtgtgccaa

SEQ ID NO: 3731622 - DNA, 25 bp, Homo sapien
tactcaaccgagatcaggaaaccca

SEQ ID NO: 3731623 - DNA, 25 bp, Homo sapien
aaatctgcctatggcgtggaggccc

SEQ ID NO: 3731624 - DNA, 25 bp, Homo sapien
gttacagtgagttatgatctggaca

SEQ ID NO: 3731625 - DNA, 25 bp, Homo sapien
tgagttatgatctggacaacagagc

SEQ ID NO: 3731626 - DNA, 25 bp, Homo sapien
agtgagttatgatctggacaacaga

SEQ ID NO: 3731627 - DNA, 25 bp, Homo sapien
acagtgagttatgatctggacaaca

SEQ ID NO: 3731628 - DNA, 25 bp, Homo sapien
tgcaccacagacctttcacagcttg

SEQ ID NO: 3731629 - DNA, 25 bp, Homo sapien
catttgcaaattgggttgccattca

SEQ ID NO: 3731630 - DNA, 25 bp, Homo sapien
atacatttgcaaattgggttgccat

SEQ ID NO: 3731631 - DNA, 25 bp, Homo sapien
cacagcttgagaagctactagcttt

SEQ ID NO: 3731632 - DNA, 25 bp, Homo sapien
gatgcaggggtcaacctcatcttgc

SEQ ID NO: 3731633 - DNA, 25 bp, Homo sapien
agacagtacacacataagatgcagg

SEQ ID NO: 3731634 - DNA, 25 bp, Homo sapien
gatggcgatcaggcacagtgctcac

SEQ ID NO: 3731635 - DNA, 25 bp, Homo sapien
caccaataaaaggatggcgatcagg

SEQ ID NO: 3731636 - DNA, 25 bp, Homo sapien
gggtgagccagttccttattacaaa

SEQ ID NO: 3731637 - DNA, 25 bp, Homo sapien
gaatggatttgtgcgtctctgaaag

SEQ ID NO: 3731638 - DNA, 25 bp, Homo sapien
gacacttgatgatgcagattatgga

SEQ ID NO: 3731639 - DNA, 25 bp, Homo sapien
tccaagtctagatgtaaaagggcct

SEQ ID NO: 3731640 - DNA, 25 bp, Homo sapien
gaaataatgtcactcagggctgggt

SEQ ID NO: 3731641 - DNA, 25 bp, Homo sapien
tagttgtccatccacgaatcaaggg

SEQ ID NO: 3731642 - DNA, 25 bp, Homo sapien
catgtagcttagtggagtgaacccc

SEQ ID NO: 3731643 - DNA, 25 bp, Homo sapien
gatggttctaatacatgggcccctg

SEQ ID NO: 3731644 - DNA, 25 bp, Homo sapien
taaacaggagcgtgagtcattcggc

SEQ ID NO: 3731645 - DNA, 25 bp, Homo sapien
caaaggtgacttggttagccctcca

SEQ ID NO: 3731646 - DNA, 25 bp, Homo sapien
taaggtctccgtctggcaagcagag

SEQ ID NO: 3731647 - DNA, 25 bp, Homo sapien
gcagagttaccaaagtgcctcagag

SEQ ID NO: 3731648 - DNA, 25 bp, Homo sapien
caagaagggcgatttcacaaccaag

SEQ ID NO: 3731649 - DNA, 25 bp, Homo sapien
gagactgtaaggagcatgcccaagg

SEQ ID NO: 3731650 - DNA, 25 bp, Homo sapien
tcaggtcccagtcaactcatgcagg

SEQ ID NO: 3731651 - DNA, 25 bp, Homo sapien
tgttgagatctcaggcaagcggcac

SEQ ID NO: 3731652 - DNA, 25 bp, Homo sapien
tgtaaggagtggctccttttcatgt

SEQ ID NO: 3731653 - DNA, 25 bp, Homo sapien
ttttgtaaggagtggctccttttca

SEQ ID NO: 3731654 - DNA, 25 bp, Homo sapien
tttgtaaggagtggctccttttcat

SEQ ID NO: 3731655 - DNA, 25 bp, Homo sapien
caactttttgtaaggagtggctcct

SEQ ID NO: 3731656 - DNA, 25 bp, Homo sapien
cagtttctagttgtcttatgtggct

SEQ ID NO: 3731657 - DNA, 25 bp, Homo sapien
tctagttgtcttatgtggctattca

SEQ ID NO: 3731658 - DNA, 25 bp, Homo sapien
ttctagttgtcttatgtggctattc

SEQ ID NO: 3731659 - DNA, 25 bp, Homo sapien
tttacagtttctagttgtcttatgt

SEQ ID NO: 3731660 - DNA, 25 bp, Homo sapien
tcactggcgccagggatctaatcag

SEQ ID NO: 3731661 - DNA, 25 bp, Homo sapien
gaaaaagatcttctaccaggccatg

SEQ ID NO: 3731662 - DNA, 25 bp, Homo sapien
taatcaagacataggcgtggcccaa

SEQ ID NO: 3731663 - DNA, 25 bp, Homo sapien
tcagacccaggccagttaaagggaa

SEQ ID NO: 3731664 - DNA, 25 bp, Homo sapien
ccatgctgtgggatccggattttca

SEQ ID NO: 3731665 - DNA, 25 bp, Homo sapien
cgtacagtagttcctggatcacagg

SEQ ID NO: 3731666 - DNA, 25 bp, Homo sapien
caggaagcctgtgttaaatgtcaag

SEQ ID NO: 3731667 - DNA, 25 bp, Homo sapien
tgacgaccagtcacaagaggttccc

SEQ ID NO: 3731668 - DNA, 25 bp, Homo sapien
aatgcggttatatgccatgggtcac

SEQ ID NO: 3731669 - DNA, 25 bp, Homo sapien
aatcaggacagagtgcaccatctcg

SEQ ID NO: 3731670 - DNA, 25 bp, Homo sapien
taatccccggccactgatcaggaaa

SEQ ID NO: 3731671 - DNA, 25 bp, Homo sapien
gatctaaagggttcgaatctggctg

SEQ ID NO: 3731672 - DNA, 25 bp, Homo sapien
tgcccggccaacagcggaactttgg

SEQ ID NO: 3731673 - DNA, 25 bp, Homo sapien
taagcatattaagggacaggaggga

SEQ ID NO: 3731674 - DNA, 25 bp, Homo sapien
caagtgcatgtatagtatgatccca

SEQ ID NO: 3731675 - DNA, 25 bp, Homo sapien
gaaaatgtttagttagccgaatgct

SEQ ID NO: 3731676 - DNA, 25 bp, Homo sapien
gagaaacaggtacgtcaacagagac

SEQ ID NO: 3731677 - DNA, 25 bp, Homo sapien
caacagagacgctgactgataggca

SEQ ID NO: 3731678 - DNA, 25 bp, Homo sapien
taatttatactctcccttgacgcag

SEQ ID NO: 3731679 - DNA, 25 bp, Homo sapien
aatggcctttcagagacgtgacaga

SEQ ID NO: 3731680 - DNA, 25 bp, Homo sapien
cccggcctcctcatgggttcttcta

SEQ ID NO: 3731681 - DNA, 25 bp, Homo sapien
cggcctcctcatgggttcttctaca

SEQ ID NO: 3731682 - DNA, 25 bp, Homo sapien
cctcctcatgggttcttctacaact

SEQ ID NO: 3731683 - DNA, 25 bp, Homo sapien
tgcccggcctcctcatgggttcttc

SEQ ID NO: 3731684 - DNA, 25 bp, Homo sapien
tgtggaaagaatgccaccacccgct

SEQ ID NO: 3731685 - DNA, 25 bp, Homo sapien
aattggctgcgatggcaagtctcca

SEQ ID NO: 3731686 - DNA, 25 bp, Homo sapien
cagagcatgctaggtgtacaggcaa

SEQ ID NO: 3731687 - DNA, 25 bp, Homo sapien
gaaacctgttgccagacaatgggag

SEQ ID NO: 3731688 - DNA, 25 bp, Homo sapien
ttccaggcccagtttaacattacat

SEQ ID NO: 3731689 - DNA, 25 bp, Homo sapien
atgagagtttcactcccatgatggg

SEQ ID NO: 3731690 - DNA, 25 bp, Homo sapien
ctaaacatagtccattcccaaccaa

SEQ ID NO: 3731691 - DNA, 25 bp, Homo sapien
acattccaggcccagtttaacatta

SEQ ID NO: 3731692 - DNA, 25 bp, Homo sapien
cacttcacctcaggcggagcagagg

SEQ ID NO: 3731693 - DNA, 25 bp, Homo sapien
ggatcactgtgcaaacatggttcct

SEQ ID NO: 3731694 - DNA, 25 bp, Homo sapien
cctgtgttaggagagcaccggacac

SEQ ID NO: 3731695 - DNA, 25 bp, Homo sapien
gagcgattgccccaagtttaacggc

SEQ ID NO: 3731696 - DNA, 25 bp, Homo sapien
cacactgatgcctggaggtccctag

SEQ ID NO: 3731697 - DNA, 25 bp, Homo sapien
gcctggaggtccctagagtcctact

SEQ ID NO: 3731698 - DNA, 25 bp, Homo sapien
cagtcagtgcagtggtcggccacac

SEQ ID NO: 3731699 - DNA, 25 bp, Homo sapien
ggcatctctatgcccacaatggctt

SEQ ID NO: 3731700 - DNA, 25 bp, Homo sapien
caattctaaagctggaaatacgctc

SEQ ID NO: 3731701 - DNA, 25 bp, Homo sapien
tccccaagataacaccgtaagtggc

SEQ ID NO: 3731702 - DNA, 25 bp, Homo sapien
tcatgatggaaaatgccagtgcggc

SEQ ID NO: 3731703 - DNA, 25 bp, Homo sapien
tatacacactgtcggcagggattgt

SEQ ID NO: 3731704 - DNA, 25 bp, Homo sapien
tggttcacacatgacattttcttca

SEQ ID NO: 3731705 - DNA, 25 bp, Homo sapien
gaatgacagcgcctgataacgtcga

SEQ ID NO: 3731706 - DNA, 25 bp, Homo sapien
tagcagcccgaaaataggaaggaac

SEQ ID NO: 3731707 - DNA, 25 bp, Homo sapien
aaataggaaggaacgaatgacagcg

SEQ ID NO: 3731708 - DNA, 25 bp, Homo sapien
tgtcaacgaagtcaatcttattaac

SEQ ID NO: 3731709 - DNA, 25 bp, Homo sapien
ctgtcaacgaagtcaatcttattaa

SEQ ID NO: 3731710 - DNA, 25 bp, Homo sapien
aattcgcagcggtcccattatgcgg

SEQ ID NO: 3731711 - DNA, 25 bp, Homo sapien
cctagcgtgaggtgtcaattttgac

SEQ ID NO: 3731712 - DNA, 25 bp, Homo sapien
cctatcgaccactggcctagcgtga

SEQ ID NO: 3731713 - DNA, 25 bp, Homo sapien
caaagagagcacacgaattcgcagc

SEQ ID NO: 3731714 - DNA, 25 bp, Homo sapien
tactgaaggacccaacactaaatcg

SEQ ID NO: 3731715 - DNA, 25 bp, Homo sapien
tcccattgacctgatcttagaaagt

SEQ ID NO: 3731716 - DNA, 25 bp, Homo sapien
cactaaatcgcaacatctgaaaaac

SEQ ID NO: 3731717 - DNA, 25 bp, Homo sapien
aatccccaaaatgtcaagctactga

SEQ ID NO: 3731718 - DNA, 25 bp, Homo sapien
gcatgttgtcatgaaaagtcagcca

SEQ ID NO: 3731719 - DNA, 25 bp, Homo sapien
cgagaggattgatcaacaggacggc

SEQ ID NO: 3731720 - DNA, 25 bp, Homo sapien
aacaggacggcaatttctaatggca

SEQ ID NO: 3731721 - DNA, 25 bp, Homo sapien
gccttgcggcaaatctgtcatgtcg

SEQ ID NO: 3731722 - DNA, 25 bp, Homo sapien
ccgcgccgccgccgcgcacccgcgg

SEQ ID NO: 3731723 - DNA, 25 bp, Homo sapien
cgcgccgccgccgcgcacccgcggc

SEQ ID NO: 3731724 - DNA, 25 bp, Homo sapien
gtccttcccgctgccggctcgcggg

SEQ ID NO: 3731725 - DNA, 25 bp, Homo sapien
ggcatgctgcctgcgcccagatgct

SEQ ID NO: 3731726 - DNA, 25 bp, Homo sapien
agggttgcggcgctgtccttcccgc

SEQ ID NO: 3731727 - DNA, 25 bp, Homo sapien
gctcgcgggcatgctgcctgcgccc

SEQ ID NO: 3731728 - DNA, 25 bp, Homo sapien
agggacagagctgccgctaagagta

SEQ ID NO: 3731729 - DNA, 25 bp, Homo sapien
cagagctgccgctaagagtagcaaa

SEQ ID NO: 3731730 - DNA, 25 bp, Homo sapien
gccgctaagagtagcaaagaaatta

SEQ ID NO: 3731731 - DNA, 25 bp, Homo sapien
tagcaaagaaattacggtcagccat

SEQ ID NO: 3731732 - DNA, 25 bp, Homo sapien
ttccattcccactaaaattgtgtcc

SEQ ID NO: 3731733 - DNA, 25 bp, Homo sapien
ccggaggccactgcgcctcccttac

SEQ ID NO: 3731734 - DNA, 25 bp, Homo sapien
aaattgaggtgccaaccgcccaact

SEQ ID NO: 3731735 - DNA, 25 bp, Homo sapien
attgaggtgccaaccgcccaactgc

SEQ ID NO: 3731736 - DNA, 25 bp, Homo sapien
agagagaccccggaggccactgcgc

SEQ ID NO: 3731737 - DNA, 25 bp, Homo sapien
tgtataccctgtgcctaactttcga

SEQ ID NO: 3731738 - DNA, 25 bp, Homo sapien
tctgagaaaagctcaagaaacagct

SEQ ID NO: 3731739 - DNA, 25 bp, Homo sapien
tgaaaatcatgcctactccatggag

SEQ ID NO: 3731740 - DNA, 25 bp, Homo sapien
taactttcgaatctcagcctgcatt

SEQ ID NO: 3731741 - DNA, 25 bp, Homo sapien
ttaagagcataatggttattacatc

SEQ ID NO: 3731742 - DNA, 25 bp, Homo sapien
attttaagagcataatggttattac

SEQ ID NO: 3731743 - DNA, 25 bp, Homo sapien
gatttagagtaaattttaagagcat

SEQ ID NO: 3731744 - DNA, 25 bp, Homo sapien
taaattttaagagcataatggttat

SEQ ID NO: 3731745 - DNA, 25 bp, Homo sapien
cttctatcgatagctacagcactgc

SEQ ID NO: 3731746 - DNA, 25 bp, Homo sapien
tcgcagctagccaggacccatgcat

SEQ ID NO: 3731747 - DNA, 25 bp, Homo sapien
taatggtggattgtttccctggaca

SEQ ID NO: 3731748 - DNA, 25 bp, Homo sapien
ctttctgtctaaggccttgctccca

SEQ ID NO: 3731749 - DNA, 25 bp, Homo sapien
cacaaagcccttccacccaaagtat

SEQ ID NO: 3731750 - DNA, 25 bp, Homo sapien
gggttttgagcattgaatagttaaa

SEQ ID NO: 3731751 - DNA, 25 bp, Homo sapien
aggtcctttaacagccctcaaggca

SEQ ID NO: 3731752 - DNA, 25 bp, Homo sapien
cccaaagtattcatcgtattcatcg

SEQ ID NO: 3731753 - DNA, 25 bp, Homo sapien
tcctctgtctggttccttaggctcc

SEQ ID NO: 3731754 - DNA, 25 bp, Homo sapien
ttcctctgtctggttccttaggctc

SEQ ID NO: 3731755 - DNA, 25 bp, Homo sapien
cctctgtctggttccttaggctcca

SEQ ID NO: 3731756 - DNA, 25 bp, Homo sapien
ctctgtctggttccttaggctccat

SEQ ID NO: 3731757 - DNA, 25 bp, Homo sapien
tctacactctcccagtctgcagaaa

SEQ ID NO: 3731758 - DNA, 25 bp, Homo sapien
ggatggggttaattgctgtgttcat

SEQ ID NO: 3731759 - DNA, 25 bp, Homo sapien
tgcagaaactggcattactgggatg

SEQ ID NO: 3731760 - DNA, 25 bp, Homo sapien
cattactgggatggggttaattgct

SEQ ID NO: 3731761 - DNA, 25 bp, Homo sapien
gatacaaaatcattacagccagtga

SEQ ID NO: 3731762 - DNA, 25 bp, Homo sapien
catggtagtgatggtcaaggagagc

SEQ ID NO: 3731763 - DNA, 25 bp, Homo sapien
gccagtgacagcgaaccaatgttca

SEQ ID NO: 3731764 - DNA, 25 bp, Homo sapien
aagagcctgcgttgctgtactgaac

SEQ ID NO: 3731765 - DNA, 25 bp, Homo sapien
tgaaggcgattccaacaaaaggtgg

SEQ ID NO: 3731766 - DNA, 25 bp, Homo sapien
tgtgttccgccatgaggaccacacg

SEQ ID NO: 3731767 - DNA, 25 bp, Homo sapien
tattttgcacacctgagcctagcca

SEQ ID NO: 3731768 - DNA, 25 bp, Homo sapien
aatgggacctgtactaggactagcc

SEQ ID NO: 3731769 - DNA, 25 bp, Homo sapien
tgatcaagtgccacgggagcaggac

SEQ ID NO: 3731770 - DNA, 25 bp, Homo sapien
accaccatcagccaggagaaggatc

SEQ ID NO: 3731771 - DNA, 25 bp, Homo sapien
ggtggaaggactgatcaagtgccac

SEQ ID NO: 3731772 - DNA, 25 bp, Homo sapien
gagaagggaagatgattactaaggg

SEQ ID NO: 3731773 - DNA, 25 bp, Homo sapien
gaagtcaacgtttccaacagcctgg

SEQ ID NO: 3731774 - DNA, 25 bp, Homo sapien
gacagacacggacaaagtggagact

SEQ ID NO: 3731775 - DNA, 25 bp, Homo sapien
tggagctttggaaaccagcaacact

SEQ ID NO: 3731776 - DNA, 25 bp, Homo sapien
ctcaaggacaggcactaaggattcc

SEQ ID NO: 3731777 - DNA, 25 bp, Homo sapien
taaactgcctgacaagcacctgcat

SEQ ID NO: 3731778 - DNA, 25 bp, Homo sapien
tattttatgcagattacagcagccc

SEQ ID NO: 3731779 - DNA, 25 bp, Homo sapien
tcattagaaagtcatccgggaacgc

SEQ ID NO: 3731780 - DNA, 25 bp, Homo sapien
tttaccagaaagctctaaactgcct

SEQ ID NO: 3731781 - DNA, 25 bp, Homo sapien
taccccattatggagcccaagagtc

SEQ ID NO: 3731782 - DNA, 25 bp, Homo sapien
ttatggagcccaagagtctgcactt

SEQ ID NO: 3731783 - DNA, 25 bp, Homo sapien
ggtgagtcagaagtggagacttcaa

SEQ ID NO: 3731784 - DNA, 25 bp, Homo sapien
tcaatctcccatgcctactgcgttt

SEQ ID NO: 3731785 - DNA, 25 bp, Homo sapien
tctaagatgcactcaactctgccca

SEQ ID NO: 3731786 - DNA, 25 bp, Homo sapien
cttcagagcaccgggcccgtgggtt

SEQ ID NO: 3731787 - DNA, 25 bp, Homo sapien
gatagttgtaagacagctctctggg

SEQ ID NO: 3731788 - DNA, 25 bp, Homo sapien
catgtgaaaataatagatagttgta

SEQ ID NO: 3731789 - DNA, 25 bp, Homo sapien
tctacgtcggctggtaagtgtggag

SEQ ID NO: 3731790 - DNA, 25 bp, Homo sapien
tgtggaggtgggtttcccggcgtga

SEQ ID NO: 3731791 - DNA, 25 bp, Homo sapien
tcccggcgtgaagtgttcattgctg

SEQ ID NO: 3731792 - DNA, 25 bp, Homo sapien
cattgctgtacgtgataagaggcgt

SEQ ID NO: 3731793 - DNA, 25 bp, Homo sapien
cttggctccgtagcccacagcctac

SEQ ID NO: 3731794 - DNA, 25 bp, Homo sapien
gaggagagctacaagtaaccccacc

SEQ ID NO: 3731795 - DNA, 25 bp, Homo sapien
gagagctacaagtaaccccaccttc

SEQ ID NO: 3731796 - DNA, 25 bp, Homo sapien
gatttagatcttgttggaggagagc

SEQ ID NO: 3731797 - DNA, 25 bp, Homo sapien
tttagatcttgttggaggagagcta

SEQ ID NO: 3731798 - DNA, 25 bp, Homo sapien
gcaagtacgtgccaccgcacatctg

SEQ ID NO: 3731799 - DNA, 25 bp, Homo sapien
tcacaaggcacacatgagcggattc

SEQ ID NO: 3731800 - DNA, 25 bp, Homo sapien
gcgtcgcaggggctaagagcttcac

SEQ ID NO: 3731801 - DNA, 25 bp, Homo sapien
catgagcggattctgcaagtacgtg

SEQ ID NO: 3731802 - DNA, 25 bp, Homo sapien
tttgtcctacggtgccaggcgatag

SEQ ID NO: 3731803 - DNA, 25 bp, Homo sapien
ggagggtgcggaggccgtgggattc

SEQ ID NO: 3731804 - DNA, 25 bp, Homo sapien
tgccaggcgatagtgggtaatacgg

SEQ ID NO: 3731805 - DNA, 25 bp, Homo sapien
catcctagcggatgggggatttgtc

SEQ ID NO: 3731806 - DNA, 25 bp, Homo sapien
taggtaaaacattcaacgtgcaaag

SEQ ID NO: 3731807 - DNA, 25 bp, Homo sapien
tgattcagtcccatggagcttctca

SEQ ID NO: 3731808 - DNA, 25 bp, Homo sapien
aacattcaacgtgcaaagactctca

SEQ ID NO: 3731809 - DNA, 25 bp, Homo sapien
cagtcccatggagcttctcaacaga

SEQ ID NO: 3731810 - DNA, 25 bp, Homo sapien
acatgctgcagtgacggttccaaat

SEQ ID NO: 3731811 - DNA, 25 bp, Homo sapien
atgctgcagtgacggttccaaatgc

SEQ ID NO: 3731812 - DNA, 25 bp, Homo sapien
catgctgcagtgacggttccaaatg

SEQ ID NO: 3731813 - DNA, 25 bp, Homo sapien
catggaagcattgacggtcagagct

SEQ ID NO: 3731814 - DNA, 25 bp, Homo sapien
gattgggtacactggttgaccttgc

SEQ ID NO: 3731815 - DNA, 25 bp, Homo sapien
ctggacatggaagcattgacggtca

SEQ ID NO: 3731816 - DNA, 25 bp, Homo sapien
ctgaatcctcctgtcgtgattgggt

SEQ ID NO: 3731817 - DNA, 25 bp, Homo sapien
ttggtggccatctagagaacttctt

SEQ ID NO: 3731818 - DNA, 25 bp, Homo sapien
tctagagaacttcttgagaagtcac

SEQ ID NO: 3731819 - DNA, 25 bp, Homo sapien
gtggccatctagagaacttcttgag

SEQ ID NO: 3731820 - DNA, 25 bp, Homo sapien
ccatctagagaacttcttgagaagt

SEQ ID NO: 3731821 - DNA, 25 bp, Homo sapien
gcggatgctttcttgttgacttgca

SEQ ID NO: 3731822 - DNA, 25 bp, Homo sapien
aggaggcggatgctttcttgttgac

SEQ ID NO: 3731823 - DNA, 25 bp, Homo sapien
caccagtaatcttttttcgaactct

SEQ ID NO: 3731824 - DNA, 25 bp, Homo sapien
actaccttcaccgctacctttcttg

SEQ ID NO: 3731825 - DNA, 25 bp, Homo sapien
accaatttagcaggctgagggcccg

SEQ ID NO: 3731826 - DNA, 25 bp, Homo sapien
tctcgtcaggagaagagccttgcac

SEQ ID NO: 3731827 - DNA, 25 bp, Homo sapien
gatctcgctccctttgaagccggca

SEQ ID NO: 3731828 - DNA, 25 bp, Homo sapien
tcagagccggctctcgtcaggagaa

SEQ ID NO: 3731829 - DNA, 25 bp, Homo sapien
gactatggccggatgcggaatgccc

SEQ ID NO: 3731830 - DNA, 25 bp, Homo sapien
tgagccgacatcactctgggacgat

SEQ ID NO: 3731831 - DNA, 25 bp, Homo sapien
aatgcccgtcgtgtgtagcgtatga

SEQ ID NO: 3731832 - DNA, 25 bp, Homo sapien
tttgactgttggtgtgactatggcc

SEQ ID NO: 3731833 - DNA, 25 bp, Homo sapien
ttcttcctttttggagtcctgatgc

SEQ ID NO: 3731834 - DNA, 25 bp, Homo sapien
cttcttcctttttggagtcctgatg

SEQ ID NO: 3731835 - DNA, 25 bp, Homo sapien
ttcctttttggagtcctgatgcttt

SEQ ID NO: 3731836 - DNA, 25 bp, Homo sapien
tcttcctttttggagtcctgatgct

SEQ ID NO: 3731837 - DNA, 25 bp, Homo sapien
cctccgcccaaggatctggttgatg

SEQ ID NO: 3731838 - DNA, 25 bp, Homo sapien
caacatgaatgcattaagaggtttc

SEQ ID NO: 3731839 - DNA, 25 bp, Homo sapien
gatggccgcgctttctttcaacgtg

SEQ ID NO: 3731840 - DNA, 25 bp, Homo sapien
tgcactcagctacgacctttgctct

SEQ ID NO: 3731841 - DNA, 25 bp, Homo sapien
ggccagctcgtagtatttcgcttgc

SEQ ID NO: 3731842 - DNA, 25 bp, Homo sapien
ccagccggggtacagttgcatatga

SEQ ID NO: 3731843 - DNA, 25 bp, Homo sapien
gcatatgaagctgtcgctccttccg

SEQ ID NO: 3731844 - DNA, 25 bp, Homo sapien
atagttatcccgcgcggaccagccg

SEQ ID NO: 3731845 - DNA, 25 bp, Homo sapien
tgttctctttgtccgtatagacgca

SEQ ID NO: 3731846 - DNA, 25 bp, Homo sapien
gacgcacaacacagctctacagact

SEQ ID NO: 3731847 - DNA, 25 bp, Homo sapien
tcaagtggcaggtcctgttctcttt

SEQ ID NO: 3731848 - DNA, 25 bp, Homo sapien
tccaatcctaacgaaaatgatccac

SEQ ID NO: 3731849 - DNA, 25 bp, Homo sapien
aagtctccggaagacagcgtgctca

SEQ ID NO: 3731850 - DNA, 25 bp, Homo sapien
cagagtcggttcatgcatcctgcca

SEQ ID NO: 3731851 - DNA, 25 bp, Homo sapien
gactaggcagatcctgtagccaaca

SEQ ID NO: 3731852 - DNA, 25 bp, Homo sapien
tacaacccaagagaggactaggcag

SEQ ID NO: 3731853 - DNA, 25 bp, Homo sapien
cccctaagagtggatggtgaaatcc

SEQ ID NO: 3731854 - DNA, 25 bp, Homo sapien
gcttcaccgcggatgatgccagtgg

SEQ ID NO: 3731855 - DNA, 25 bp, Homo sapien
tccatggctccaagacatcgacagg

SEQ ID NO: 3731856 - DNA, 25 bp, Homo sapien
gcctgtgccggccttaagacaagtt

SEQ ID NO: 3731857 - DNA, 25 bp, Homo sapien
ttcaaatccataaaagcttcagtgc

SEQ ID NO: 3731858 - DNA, 25 bp, Homo sapien
tcagtgctgcggttcttagtcccag

SEQ ID NO: 3731859 - DNA, 25 bp, Homo sapien
cataaaagcttcagtgctgcggttc

SEQ ID NO: 3731860 - DNA, 25 bp, Homo sapien
ctgcggttcttagtcccagtgttcc

SEQ ID NO: 3731861 - DNA, 25 bp, Homo sapien
ctttgaggagcacatgaaggtggtc

SEQ ID NO: 3731862 - DNA, 25 bp, Homo sapien
ttgaggagcacatgaaggtggtcat

SEQ ID NO: 3731863 - DNA, 25 bp, Homo sapien
tttgaggagcacatgaaggtggtca

SEQ ID NO: 3731864 - DNA, 25 bp, Homo sapien
gacccacagcatttgatccataaaa

SEQ ID NO: 3731865 - DNA, 25 bp, Homo sapien
tgggatgatggcgttgcaagcagtc

SEQ ID NO: 3731866 - DNA, 25 bp, Homo sapien
tatgtccattgtcaaacctgaccca

SEQ ID NO: 3731867 - DNA, 25 bp, Homo sapien
gacggcacgaggaagattcagagag

SEQ ID NO: 3731868 - DNA, 25 bp, Homo sapien
tccaaccccgcttcaagccaaatgc

SEQ ID NO: 3731869 - DNA, 25 bp, Homo sapien
ggattggcgggtggtgaagggaagc

SEQ ID NO: 3731870 - DNA, 25 bp, Homo sapien
acacacgcttcttgggagcagagaa

SEQ ID NO: 3731871 - DNA, 25 bp, Homo sapien
gcccttgcattgtaccccagctgga

SEQ ID NO: 3731872 - DNA, 25 bp, Homo sapien
gaattactgcaagaaacagatgtga

SEQ ID NO: 3731873 - DNA, 25 bp, Homo sapien
gaaacacagggaattactgcaagaa

SEQ ID NO: 3731874 - DNA, 25 bp, Homo sapien
agagatgaaacacagggaattactg

SEQ ID NO: 3731875 - DNA, 25 bp, Homo sapien
cacagggaattactgcaagaaacag

SEQ ID NO: 3731876 - DNA, 25 bp, Homo sapien
attggtctctcccggctgcttgtcc

SEQ ID NO: 3731877 - DNA, 25 bp, Homo sapien
ccggctgcttgtcccttttcctctt

SEQ ID NO: 3731878 - DNA, 25 bp, Homo sapien
cccggctgcttgtcccttttcctct

SEQ ID NO: 3731879 - DNA, 25 bp, Homo sapien
tctctcccggctgcttgtccctttt

SEQ ID NO: 3731880 - DNA, 25 bp, Homo sapien
tgctctccagttataggctctgcag

SEQ ID NO: 3731881 - DNA, 25 bp, Homo sapien
tgcatcagaacattcaggaacagcc

SEQ ID NO: 3731882 - DNA, 25 bp, Homo sapien
taagcagactgtataaatcccggca

SEQ ID NO: 3731883 - DNA, 25 bp, Homo sapien
gggacctctgagattgcctatgcag

SEQ ID NO: 3731884 - DNA, 25 bp, Homo sapien
ggatttaggaaacattcgctgtgtt

SEQ ID NO: 3731885 - DNA, 25 bp, Homo sapien
tctactgaaacatacgaaaccgtgt

SEQ ID NO: 3731886 - DNA, 25 bp, Homo sapien
gcttgcgtgagaaaacttagtggga

SEQ ID NO: 3731887 - DNA, 25 bp, Homo sapien
tcatactgcggatgcatgcttgcgt

SEQ ID NO: 3731888 - DNA, 25 bp, Homo sapien
gcagcatttaagcaggcacagtcag

SEQ ID NO: 3731889 - DNA, 25 bp, Homo sapien
cagttattctgttgatcaaggccaa

SEQ ID NO: 3731890 - DNA, 25 bp, Homo sapien
tattctgttgatcaaggccaaagcg

SEQ ID NO: 3731891 - DNA, 25 bp, Homo sapien
atcaaggccaaagcgcgctcggcat

SEQ ID NO: 3731892 - DNA, 25 bp, Homo sapien
tctgttgatcaaggccaaagcgcgc

SEQ ID NO: 3731893 - DNA, 25 bp, Homo sapien
gagaggatcgaatagaccagctgca

SEQ ID NO: 3731894 - DNA, 25 bp, Homo sapien
ggagaacaagcacatccctcataga

SEQ ID NO: 3731895 - DNA, 25 bp, Homo sapien
catttgcttctacctaggccaggat

SEQ ID NO: 3731896 - DNA, 25 bp, Homo sapien
taaggtttgctgtcgctgacccgag

SEQ ID NO: 3731897 - DNA, 25 bp, Homo sapien
tgcaccataaagtctgtcggtcaag

SEQ ID NO: 3731898 - DNA, 25 bp, Homo sapien
tctgtcggtcaagcccgaacagtgc

SEQ ID NO: 3731899 - DNA, 25 bp, Homo sapien
gaacagtgcccgacacttctttgga

SEQ ID NO: 3731900 - DNA, 25 bp, Homo sapien
tgcacggtttgcaccataaagtctg

SEQ ID NO: 3731901 - DNA, 25 bp, Homo sapien
tgattttcccaaaggcctcgcagtg

SEQ ID NO: 3731902 - DNA, 25 bp, Homo sapien
tttgattttcccaaaggcctcgcag

SEQ ID NO: 3731903 - DNA, 25 bp, Homo sapien
ttgattttcccaaaggcctcgcagt

SEQ ID NO: 3731904 - DNA, 25 bp, Homo sapien
tgagacaggagctagtcggtatccc

SEQ ID NO: 3731905 - DNA, 25 bp, Homo sapien
gaacatgggtgcttaatttggacac

SEQ ID NO: 3731906 - DNA, 25 bp, Homo sapien
ggaagtacctacactttccctgaga

SEQ ID NO: 3731907 - DNA, 25 bp, Homo sapien
tgttaattctgcaggcctagggacg

SEQ ID NO: 3731908 - DNA, 25 bp, Homo sapien
gctgggaaagtctgaacactgctga

SEQ ID NO: 3731909 - DNA, 25 bp, Homo sapien
ggaactctggcacctaggaccaggg

SEQ ID NO: 3731910 - DNA, 25 bp, Homo sapien
tggccatagccacgttaaaaggaaa

SEQ ID NO: 3731911 - DNA, 25 bp, Homo sapien
catctcgattcagaggagtggcctc

SEQ ID NO: 3731912 - DNA, 25 bp, Homo sapien
gaaagactaattttgccctgcacca

SEQ ID NO: 3731913 - DNA, 25 bp, Homo sapien
gacaatgtcactggccttggaaagg

SEQ ID NO: 3731914 - DNA, 25 bp, Homo sapien
caggaagtgtgctcatctaaggacc

SEQ ID NO: 3731915 - DNA, 25 bp, Homo sapien
gaaacacgtgtgtaagcactggcca

SEQ ID NO: 3731916 - DNA, 25 bp, Homo sapien
caggttgtggattaaattaagattc

SEQ ID NO: 3731917 - DNA, 25 bp, Homo sapien
tggttgtatggcctgcaggttgtgg

SEQ ID NO: 3731918 - DNA, 25 bp, Homo sapien
agaaaatgattcaaaggaacgagaa

SEQ ID NO: 3731919 - DNA, 25 bp, Homo sapien
tgcaggttgtggattaaattaagat

SEQ ID NO: 3731920 - DNA, 25 bp, Homo sapien
gcgcccagagagctttcgggcttgt

SEQ ID NO: 3731921 - DNA, 25 bp, Homo sapien
gcgctagcaagaggcttaaaggttt

SEQ ID NO: 3731922 - DNA, 25 bp, Homo sapien
gcccacatagctgaaggcagcgcta

SEQ ID NO: 3731923 - DNA, 25 bp, Homo sapien
ctggcgcccagagagctttcgggct

SEQ ID NO: 3731924 - DNA, 25 bp, Homo sapien
cccagggtgggtcgcttacttcaca

SEQ ID NO: 3731925 - DNA, 25 bp, Homo sapien
tccgaggacaattacagtggcgccc

SEQ ID NO: 3731926 - DNA, 25 bp, Homo sapien
tgaggtcacctaagggatgtcccac

SEQ ID NO: 3731927 - DNA, 25 bp, Homo sapien
ccagccgcctcgtatcaatatgaaa

SEQ ID NO: 3731928 - DNA, 25 bp, Homo sapien
ttccatctgaagagggtgggctgag

SEQ ID NO: 3731929 - DNA, 25 bp, Homo sapien
cttcaccttgtatgtagcgaacgca

SEQ ID NO: 3731930 - DNA, 25 bp, Homo sapien
cttgtatgtagcgaacgcacttttt

SEQ ID NO: 3731931 - DNA, 25 bp, Homo sapien
caccttgtatgtagcgaacgcactt

SEQ ID NO: 3731932 - DNA, 25 bp, Homo sapien
tcgacggctgtgcaattgatgagga

SEQ ID NO: 3731933 - DNA, 25 bp, Homo sapien
tcagtctgtgacttggcgtctcggg

SEQ ID NO: 3731934 - DNA, 25 bp, Homo sapien
gaatgtaaggaagaagtcgacggct

SEQ ID NO: 3731935 - DNA, 25 bp, Homo sapien
taaagacttggtgacgagcgacagc

SEQ ID NO: 3731936 - DNA, 25 bp, Homo sapien
tgtacacggtcagtccgggtcctaa

SEQ ID NO: 3731937 - DNA, 25 bp, Homo sapien
gaaacgaagatggttcccactgctg

SEQ ID NO: 3731938 - DNA, 25 bp, Homo sapien
gacatacaggtacgacaagcaatct

SEQ ID NO: 3731939 - DNA, 25 bp, Homo sapien
tattaagtgttgagtagcgtcccct

SEQ ID NO: 3731940 - DNA, 25 bp, Homo sapien
catcacaactgttaggaaacattca

SEQ ID NO: 3731941 - DNA, 25 bp, Homo sapien
tactgtacagcatgaacatttattc

SEQ ID NO: 3731942 - DNA, 25 bp, Homo sapien
aaacggaacagtaacatcacaactg

SEQ ID NO: 3731943 - DNA, 25 bp, Homo sapien
gaacttggaataagagcataaaacg

SEQ ID NO: 3731944 - DNA, 25 bp, Homo sapien
ttattaatccagaacggcatgctac

SEQ ID NO: 3731945 - DNA, 25 bp, Homo sapien
gcttttattaatccagaacggcatg

SEQ ID NO: 3731946 - DNA, 25 bp, Homo sapien
gttgcttttattaatccagaacggc

SEQ ID NO: 3731947 - DNA, 25 bp, Homo sapien
attaatccagaacggcatgctacag

SEQ ID NO: 3731948 - DNA, 25 bp, Homo sapien
ccaaatatggggccctggtaattat

SEQ ID NO: 3731949 - DNA, 25 bp, Homo sapien
aatatggggccctggtaattatgga

SEQ ID NO: 3731950 - DNA, 25 bp, Homo sapien
caaatatggggccctggtaattatg

SEQ ID NO: 3731951 - DNA, 25 bp, Homo sapien
aaatatggggccctggtaattatgg

SEQ ID NO: 3731952 - DNA, 25 bp, Homo sapien
tctgtctggctccagaaattgatcc

SEQ ID NO: 3731953 - DNA, 25 bp, Homo sapien
aattgatccagtgccccccacttgt

SEQ ID NO: 3731954 - DNA, 25 bp, Homo sapien
cagaaattgatccagtgccccccac

SEQ ID NO: 3731955 - DNA, 25 bp, Homo sapien
gaaattgatccagtgccccccactt

SEQ ID NO: 3731956 - DNA, 25 bp, Homo sapien
gaggaacctgggacccactccaggc

SEQ ID NO: 3731957 - DNA, 25 bp, Homo sapien
gaggaggaacctgggacccactcca

SEQ ID NO: 3731958 - DNA, 25 bp, Homo sapien
gagaggaggaacctgggacccactc

SEQ ID NO: 3731959 - DNA, 25 bp, Homo sapien
ctggagaggaggaacctgggaccca

SEQ ID NO: 3731960 - DNA, 25 bp, Homo sapien
aggctgcaacaagcgcggcctttat

SEQ ID NO: 3731961 - DNA, 25 bp, Homo sapien
tgtcagggagcccacattgagcagg

SEQ ID NO: 3731962 - DNA, 25 bp, Homo sapien
tctataaccctttcaaactcgctgt

SEQ ID NO: 3731963 - DNA, 25 bp, Homo sapien
tcggccctgtcagggaaggctgcaa

SEQ ID NO: 3731964 - DNA, 25 bp, Homo sapien
gaaaaaatctggcaccagccataat

SEQ ID NO: 3731965 - DNA, 25 bp, Homo sapien
tggcaccagccataatgaggcaggc

SEQ ID NO: 3731966 - DNA, 25 bp, Homo sapien
aaatctggcaccagccataatgagg

SEQ ID NO: 3731967 - DNA, 25 bp, Homo sapien
gccataatgaggcaggcatgagctc

SEQ ID NO: 3731968 - DNA, 25 bp, Homo sapien
tgtctgacagcgaagggcccaggaa

SEQ ID NO: 3731969 - DNA, 25 bp, Homo sapien
tatccactcttaaaacagggtgtct

SEQ ID NO: 3731970 - DNA, 25 bp, Homo sapien
ggaaaccagctcctattcgctgaac

SEQ ID NO: 3731971 - DNA, 25 bp, Homo sapien
gctcctattcgctgaacactgtggc

SEQ ID NO: 3731972 - DNA, 25 bp, Homo sapien
gcgagcagggcctcaaaggtagcac

SEQ ID NO: 3731973 - DNA, 25 bp, Homo sapien
gcagggcctcaaaggtagcacctga

SEQ ID NO: 3731974 - DNA, 25 bp, Homo sapien
gagcagggcctcaaaggtagcacct

SEQ ID NO: 3731975 - DNA, 25 bp, Homo sapien
ggcgagcagggcctcaaaggtagca

SEQ ID NO: 3731976 - DNA, 25 bp, Homo sapien
gaaatgacggaaaacatatgcggca

SEQ ID NO: 3731977 - DNA, 25 bp, Homo sapien
gagcacttaccagaatctcagtggg

SEQ ID NO: 3731978 - DNA, 25 bp, Homo sapien
tatgcggcatgctgtttgtgtccaa

SEQ ID NO: 3731979 - DNA, 25 bp, Homo sapien
ggttcacgatggaaacaagatgctc

SEQ ID NO: 3731980 - DNA, 25 bp, Homo sapien
tctttaggccagcaaggatcttatc

SEQ ID NO: 3731981 - DNA, 25 bp, Homo sapien
taggccagcaaggatcttatcctcg

SEQ ID NO: 3731982 - DNA, 25 bp, Homo sapien
gatcttatcctcgttgtaaaggcac

SEQ ID NO: 3731983 - DNA, 25 bp, Homo sapien
ctactggaatgttctctttaggcca

SEQ ID NO: 3731984 - DNA, 25 bp, Homo sapien
ttctttctgaagaagtccagactca

SEQ ID NO: 3731985 - DNA, 25 bp, Homo sapien
gtcgtgaataggctgaaaagtgagt

SEQ ID NO: 3731986 - DNA, 25 bp, Homo sapien
gaaaagtgagtatctttgagtcttc

SEQ ID NO: 3731987 - DNA, 25 bp, Homo sapien
ggacaagccgccacatttttggagg

SEQ ID NO: 3731988 - DNA, 25 bp, Homo sapien
ctgctctcctgacgggacgtcagga

SEQ ID NO: 3731989 - DNA, 25 bp, Homo sapien
gacgtcaggagaatagagttggccc

SEQ ID NO: 3731990 - DNA, 25 bp, Homo sapien
tagagttggcccctggaacttctct

SEQ ID NO: 3731991 - DNA, 25 bp, Homo sapien
tcttgtctgcaagagggttacccac

SEQ ID NO: 3731992 - DNA, 25 bp, Homo sapien
ttcagcccgcgtggctttcttccag

SEQ ID NO: 3731993 - DNA, 25 bp, Homo sapien
ttccacaatgatccagggccaggag

SEQ ID NO: 3731994 - DNA, 25 bp, Homo sapien
taatgctccaatgggcggcagaagc

SEQ ID NO: 3731995 - DNA, 25 bp, Homo sapien
cttcagaaagcagatgccgctcatt

SEQ ID NO: 3731996 - DNA, 25 bp, Homo sapien
tgggactggcctggcccgatgccag

SEQ ID NO: 3731997 - DNA, 25 bp, Homo sapien
ctgggactggcctggcccgatgcca

SEQ ID NO: 3731998 - DNA, 25 bp, Homo sapien
ctggaacattaacgcggctctgtgg

SEQ ID NO: 3731999 - DNA, 25 bp, Homo sapien
acattaacgcggctctgtggggctg

SEQ ID NO: 3732000 - DNA, 25 bp, Homo sapien
gaacattaacgcggctctgtggggc

SEQ ID NO: 3732001 - DNA, 25 bp, Homo sapien
tggaacattaacgcggctctgtggg

SEQ ID NO: 3732002 - DNA, 25 bp, Homo sapien
tatttaagcctgtcatgtcatatct

SEQ ID NO: 3732003 - DNA, 25 bp, Homo sapien
tcttcaggttcgctgcctggattat

SEQ ID NO: 3732004 - DNA, 25 bp, Homo sapien
ttgctgccagaatgcccaaagtcct

SEQ ID NO: 3732005 - DNA, 25 bp, Homo sapien
gcctggattatttaagcctgtcatg

SEQ ID NO: 3732006 - DNA, 25 bp, Homo sapien
ctgggcatacgggacagccaaaagg

SEQ ID NO: 3732007 - DNA, 25 bp, Homo sapien
tagcctgagaccaccctgaatatcc

SEQ ID NO: 3732008 - DNA, 25 bp, Homo sapien
gggtcataatacagtagcctgagac

SEQ ID NO: 3732009 - DNA, 25 bp, Homo sapien
gccatcactgggcatacgggacagc

SEQ ID NO: 3732010 - DNA, 25 bp, Homo sapien
gaagtaggtcactaagatgacgtcg

SEQ ID NO: 3732011 - DNA, 25 bp, Homo sapien
atctgtggcacccaaggaaaccgcc

SEQ ID NO: 3732012 - DNA, 25 bp, Homo sapien
tcaggaagtaggtcactaagatgac

SEQ ID NO: 3732013 - DNA, 25 bp, Homo sapien
caaggaaaccgcctcaggaagtagg

SEQ ID NO: 3732014 - DNA, 25 bp, Homo sapien
tgaagactcaaagatccccaagtgc

SEQ ID NO: 3732015 - DNA, 25 bp, Homo sapien
taactgatgtgtataggaaggactc

SEQ ID NO: 3732016 - DNA, 25 bp, Homo sapien
tcaccacgccagagaaatgcagtta

SEQ ID NO: 3732017 - DNA, 25 bp, Homo sapien
ggacctcaatccacgactctgaaga

SEQ ID NO: 3732018 - DNA, 25 bp, Homo sapien
ggtgctccagatgcgctgaatgaac

SEQ ID NO: 3732019 - DNA, 25 bp, Homo sapien
acacacaaagatgcaaactgatgac

SEQ ID NO: 3732020 - DNA, 25 bp, Homo sapien
tgaatgaacacacaaagatgcaaac

SEQ ID NO: 3732021 - DNA, 25 bp, Homo sapien
tccagatgcgctgaatgaacacaca

SEQ ID NO: 3732022 - DNA, 25 bp, Homo sapien
ctgtccaacacatactgagccctgc

SEQ ID NO: 3732023 - DNA, 25 bp, Homo sapien
tccttgggtctttctcactgcagtc

SEQ ID NO: 3732024 - DNA, 25 bp, Homo sapien
ttgcacagagcatgaggcagtgcgt

SEQ ID NO: 3732025 - DNA, 25 bp, Homo sapien
actgcagtccaaggctctgatgatt

SEQ ID NO: 3732026 - DNA, 25 bp, Homo sapien
ggcagtgcgtgtggctccctgctca

SEQ ID NO: 3732027 - DNA, 25 bp, Homo sapien
cagagctgaacatccaagtgtgctt

SEQ ID NO: 3732028 - DNA, 25 bp, Homo sapien
tctcagtgcctgtccacagagctga

SEQ ID NO: 3732029 - DNA, 25 bp, Homo sapien
tcttctcagtgcctgtccacagagc

SEQ ID NO: 3732030 - DNA, 25 bp, Homo sapien
ctgtccacagagctgaacatccaag

SEQ ID NO: 3732031 - DNA, 25 bp, Homo sapien
tgggtcacctgagtgtcacagcatc

SEQ ID NO: 3732032 - DNA, 25 bp, Homo sapien
ggtcacctgagtgtcacagcatcct

SEQ ID NO: 3732033 - DNA, 25 bp, Homo sapien
ctatgggtcacctgagtgtcacagc

SEQ ID NO: 3732034 - DNA, 25 bp, Homo sapien
gcagacagcccccattttttgacca

SEQ ID NO: 3732035 - DNA, 25 bp, Homo sapien
tatacactagtttgttaaaaactgc

SEQ ID NO: 3732036 - DNA, 25 bp, Homo sapien
tctttcacagactctgtcatgctgg

SEQ ID NO: 3732037 - DNA, 25 bp, Homo sapien
ggagtgagttctatacactagtttg

SEQ ID NO: 3732038 - DNA, 25 bp, Homo sapien
ttcccattttgaggagtgagttcta

SEQ ID NO: 3732039 - DNA, 25 bp, Homo sapien
aagtaacaattccactccatcaggg

SEQ ID NO: 3732040 - DNA, 25 bp, Homo sapien
catcagggggcagggagtaactcac

SEQ ID NO: 3732041 - DNA, 25 bp, Homo sapien
ttgggggaagggatactgacccaca

SEQ ID NO: 3732042 - DNA, 25 bp, Homo sapien
gatactgacccacaaacggaaagta

SEQ ID NO: 3732043 - DNA, 25 bp, Homo sapien
taagttacaaatatcccacttatga

SEQ ID NO: 3732044 - DNA, 25 bp, Homo sapien
ttacataggtactgctaagttacaa

SEQ ID NO: 3732045 - DNA, 25 bp, Homo sapien
gggatgagctaagcccaattgttgc

SEQ ID NO: 3732046 - DNA, 25 bp, Homo sapien
tgatcatcccaaatgagggatgagc

SEQ ID NO: 3732047 - DNA, 25 bp, Homo sapien
agcgaataatccacgtaacttctcc

SEQ ID NO: 3732048 - DNA, 25 bp, Homo sapien
atagcgaataatccacgtaacttct

SEQ ID NO: 3732049 - DNA, 25 bp, Homo sapien
catagcgaataatccacgtaacttc

SEQ ID NO: 3732050 - DNA, 25 bp, Homo sapien
tagcgaataatccacgtaacttctc

SEQ ID NO: 3732051 - DNA, 25 bp, Homo sapien
catcagtgagttgtgaaaagcctcg

SEQ ID NO: 3732052 - DNA, 25 bp, Homo sapien
gggattgttggtctcggctgcatca

SEQ ID NO: 3732053 - DNA, 25 bp, Homo sapien
aaaagcctcgagtgttgagtgtgga

SEQ ID NO: 3732054 - DNA, 25 bp, Homo sapien
gcacagaaagtaggcctggcaagga

SEQ ID NO: 3732055 - DNA, 25 bp, Homo sapien
gctcccaagggcttcttgcagggga

SEQ ID NO: 3732056 - DNA, 25 bp, Homo sapien
cgcgggtggttatgtgggtatattc

SEQ ID NO: 3732057 - DNA, 25 bp, Homo sapien
caagattcatacaactgtacagtta

SEQ ID NO: 3732058 - DNA, 25 bp, Homo sapien
aaggtatcttgactcgcgggtggtt

SEQ ID NO: 3732059 - DNA, 25 bp, Homo sapien
tcatatgtcaagattcatacaactg

SEQ ID NO: 3732060 - DNA, 25 bp, Homo sapien
tcagggttgcatccaagttccaggg

SEQ ID NO: 3732061 - DNA, 25 bp, Homo sapien
tcaagccttctgtgactcaacaggc

SEQ ID NO: 3732062 - DNA, 25 bp, Homo sapien
gctcctcaggcaaaaacgacagaag

SEQ ID NO: 3732063 - DNA, 25 bp, Homo sapien
taggtccctggtcaacagtatctgc

SEQ ID NO: 3732064 - DNA, 25 bp, Homo sapien
taagcttgaacagtgccagggtagc

SEQ ID NO: 3732065 - DNA, 25 bp, Homo sapien
gcaatgctgctataagcttgaacag

SEQ ID NO: 3732066 - DNA, 25 bp, Homo sapien
acagtgccagggtagcagatacgac

SEQ ID NO: 3732067 - DNA, 25 bp, Homo sapien
gccagggtagcagatacgacaccca

SEQ ID NO: 3732068 - DNA, 25 bp, Homo sapien
gctgataaactcagacagggtcaag

SEQ ID NO: 3732069 - DNA, 25 bp, Homo sapien
gatattttgctatgcctctcagtga

SEQ ID NO: 3732070 - DNA, 25 bp, Homo sapien
ggatgacgacttgggaatctccagt

SEQ ID NO: 3732071 - DNA, 25 bp, Homo sapien
gaaggcagttgactggatggcctct

SEQ ID NO: 3732072 - DNA, 25 bp, Homo sapien
gatgccagtgagaagtacgatccac

SEQ ID NO: 3732073 - DNA, 25 bp, Homo sapien
tagtacagctctccgtgctgtcggc

SEQ ID NO: 3732074 - DNA, 25 bp, Homo sapien
gagaatagtatgacttggtgccctg

SEQ ID NO: 3732075 - DNA, 25 bp, Homo sapien
gaagccccgtggctaacagctgagc

SEQ ID NO: 3732076 - DNA, 25 bp, Homo sapien
gcagaaccaggatcactccaatcca

SEQ ID NO: 3732077 - DNA, 25 bp, Homo sapien
catggcagaaccaggatcactccaa

SEQ ID NO: 3732078 - DNA, 25 bp, Homo sapien
tggcagaaccaggatcactccaatc

SEQ ID NO: 3732079 - DNA, 25 bp, Homo sapien
agaaccaggatcactccaatccaag

SEQ ID NO: 3732080 - DNA, 25 bp, Homo sapien
tactcccaggatcagtatggatttc

SEQ ID NO: 3732081 - DNA, 25 bp, Homo sapien
gcctttgccctcgatgactcagagg

SEQ ID NO: 3732082 - DNA, 25 bp, Homo sapien
tcgatgactcagagggtggcatccc

SEQ ID NO: 3732083 - DNA, 25 bp, Homo sapien
tctcttcctagagttactcccagga

SEQ ID NO: 3732084 - DNA, 25 bp, Homo sapien
tctagaatatcacaggacgactccg

SEQ ID NO: 3732085 - DNA, 25 bp, Homo sapien
gaacactggtgtgaccggaaacgtg

SEQ ID NO: 3732086 - DNA, 25 bp, Homo sapien
cccagtgaaagaacggtagtgacct

SEQ ID NO: 3732087 - DNA, 25 bp, Homo sapien
cggaaacgtgggcttgaattagcaa

SEQ ID NO: 3732088 - DNA, 25 bp, Homo sapien
caaccaatggatgatgaccaagctc

SEQ ID NO: 3732089 - DNA, 25 bp, Homo sapien
tgttttactggctagagatacatcc

SEQ ID NO: 3732090 - DNA, 25 bp, Homo sapien
tctttcggtgtttgttctagggctg

SEQ ID NO: 3732091 - DNA, 25 bp, Homo sapien
gagatacatcctttaaccttacaag

SEQ ID NO: 3732092 - DNA, 25 bp, Homo sapien
aattggattattttgtccttcctgg

SEQ ID NO: 3732093 - DNA, 25 bp, Homo sapien
cacaaattggattattttgtccttc

SEQ ID NO: 3732094 - DNA, 25 bp, Homo sapien
caacacaaattggattattttgtcc

SEQ ID NO: 3732095 - DNA, 25 bp, Homo sapien
tttcaacacaaattggattattttg

SEQ ID NO: 3732096 - DNA, 25 bp, Homo sapien
ccagttctaagtggaggcctcaaga

SEQ ID NO: 3732097 - DNA, 25 bp, Homo sapien
caaggtcagcctttgtcagccaagt

SEQ ID NO: 3732098 - DNA, 25 bp, Homo sapien
cattttgccactccctgaatctggg

SEQ ID NO: 3732099 - DNA, 25 bp, Homo sapien
caagtgagccccagatacatgagtg

SEQ ID NO: 3732100 - DNA, 25 bp, Homo sapien
tccaacgtgggaacgcggcaaggca

SEQ ID NO: 3732101 - DNA, 25 bp, Homo sapien
cagagtcctgctaggcctccaacgt

SEQ ID NO: 3732102 - DNA, 25 bp, Homo sapien
ggcctccaacgtgggaacgcggcaa

SEQ ID NO: 3732103 - DNA, 25 bp, Homo sapien
ctgctaggcctccaacgtgggaacg

SEQ ID NO: 3732104 - DNA, 25 bp, Homo sapien
ctgcccgtggccctatgaaatcaac

SEQ ID NO: 3732105 - DNA, 25 bp, Homo sapien
gtggccctatgaaatcaacactact

SEQ ID NO: 3732106 - DNA, 25 bp, Homo sapien
aaatcaacactactgctggctccca

SEQ ID NO: 3732107 - DNA, 25 bp, Homo sapien
actactgctggctcccatgggatgc

SEQ ID NO: 3732108 - DNA, 25 bp, Homo sapien
aaatccatttaaattgacaagctga

SEQ ID NO: 3732109 - DNA, 25 bp, Homo sapien
tgcagttagagtccttgttgctgaa

SEQ ID NO: 3732110 - DNA, 25 bp, Homo sapien
attttcagccagacctttcagagag

SEQ ID NO: 3732111 - DNA, 25 bp, Homo sapien
gtgtgtttttctccatagttcaatg

SEQ ID NO: 3732112 - DNA, 25 bp, Homo sapien
gagggtgtgtttttctccatagttc

SEQ ID NO: 3732113 - DNA, 25 bp, Homo sapien
aaggaggtactagtgccagctgtgt

SEQ ID NO: 3732114 - DNA, 25 bp, Homo sapien
cccagagggctagaatttgccaagt

SEQ ID NO: 3732115 - DNA, 25 bp, Homo sapien
gtggatggttccaacatgatgtaat

SEQ ID NO: 3732116 - DNA, 25 bp, Homo sapien
tgggaaggaggtactagtgccagct

SEQ ID NO: 3732117 - DNA, 25 bp, Homo sapien
gaccattttgctgatcatgtatgac

SEQ ID NO: 3732118 - DNA, 25 bp, Homo sapien
tgtttagcctggttgcaattgatcc

SEQ ID NO: 3732119 - DNA, 25 bp, Homo sapien
gcgatgtctatcttgatggatgaca

SEQ ID NO: 3732120 - DNA, 25 bp, Homo sapien
gagaaaatagttggcaaattgcgat

SEQ ID NO: 3732121 - DNA, 25 bp, Homo sapien
aagtcagtggaaaagaagcaagaat

SEQ ID NO: 3732122 - DNA, 25 bp, Homo sapien
taccctggatcttcaataactggct

SEQ ID NO: 3732123 - DNA, 25 bp, Homo sapien
cgtggccttcagtatctaatgctgg

SEQ ID NO: 3732124 - DNA, 25 bp, Homo sapien
taccaagttctgtccagactgatgc

SEQ ID NO: 3732125 - DNA, 25 bp, Homo sapien
taaatcagcaggtcgcaacctgtgc

SEQ ID NO: 3732126 - DNA, 25 bp, Homo sapien
catactttggtaaatcagcaggtcg

SEQ ID NO: 3732127 - DNA, 25 bp, Homo sapien
aggtcgcaacctgtgccctttagcc

SEQ ID NO: 3732128 - DNA, 25 bp, Homo sapien
tttgtgtgagttgatcatactttgg

SEQ ID NO: 3732129 - DNA, 25 bp, Homo sapien
cagagagctctcataggcagacaga

SEQ ID NO: 3732130 - DNA, 25 bp, Homo sapien
cgtatgaaggcatgtcacagggcca

SEQ ID NO: 3732131 - DNA, 25 bp, Homo sapien
gaaggcccaaaatgtagctgctacc

SEQ ID NO: 3732132 - DNA, 25 bp, Homo sapien
tgcagaaagcttcgttggcagccca

SEQ ID NO: 3732133 - DNA, 25 bp, Homo sapien
ctgctacttgttctttgtctttcat

SEQ ID NO: 3732134 - DNA, 25 bp, Homo sapien
tctattcaggccattccaaccaccc

SEQ ID NO: 3732135 - DNA, 25 bp, Homo sapien
ctctattcaggccattccaaccacc

SEQ ID NO: 3732136 - DNA, 25 bp, Homo sapien
tattcaggccattccaaccacccag

SEQ ID NO: 3732137 - DNA, 25 bp, Homo sapien
ttcaggccattccaaccacccagaa

SEQ ID NO: 3732138 - DNA, 25 bp, Homo sapien
catagatggtactccgaaccaactc

SEQ ID NO: 3732139 - DNA, 25 bp, Homo sapien
gatggtactccgaaccaactccata

SEQ ID NO: 3732140 - DNA, 25 bp, Homo sapien
tcctttccaatacatagatggtact

SEQ ID NO: 3732141 - DNA, 25 bp, Homo sapien
caatacatagatggtactccgaacc

SEQ ID NO: 3732142 - DNA, 25 bp, Homo sapien
tgagcagctgtccttatgaccctct

SEQ ID NO: 3732143 - DNA, 25 bp, Homo sapien
cttaaagagatgtgcttagccaatc

SEQ ID NO: 3732144 - DNA, 25 bp, Homo sapien
cccctctgagcatgacttaaagaga

SEQ ID NO: 3732145 - DNA, 25 bp, Homo sapien
tcctcttggttaagatggaccggtg

SEQ ID NO: 3732146 - DNA, 25 bp, Homo sapien
gcaacacattttcactaggtcttgg

SEQ ID NO: 3732147 - DNA, 25 bp, Homo sapien
tcaaactagaatcatcctggatgca

SEQ ID NO: 3732148 - DNA, 25 bp, Homo sapien
actagaatcatcctggatgcaatgg

SEQ ID NO: 3732149 - DNA, 25 bp, Homo sapien
ccaacttctgccaaatttgtcgcag

SEQ ID NO: 3732150 - DNA, 25 bp, Homo sapien
caaatttgtcgcagaaccccagaga

SEQ ID NO: 3732151 - DNA, 25 bp, Homo sapien
gaaactcgcactccttcttcagact

SEQ ID NO: 3732152 - DNA, 25 bp, Homo sapien
tgtctttgcaactggtactctcctg

SEQ ID NO: 3732153 - DNA, 25 bp, Homo sapien
tggtcagctgtcactaaactgtagt

SEQ ID NO: 3732154 - DNA, 25 bp, Homo sapien
tcctgggaagccttctctagaccct

SEQ ID NO: 3732155 - DNA, 25 bp, Homo sapien
gggaagcattccaactttcactgct

SEQ ID NO: 3732156 - DNA, 25 bp, Homo sapien
actgctgcaggttgtgtatttatca

SEQ ID NO: 3732157 - DNA, 25 bp, Homo sapien
tggagggaagcattccaactttcac

SEQ ID NO: 3732158 - DNA, 25 bp, Homo sapien
cactgctgcaggttgtgtatttatc

SEQ ID NO: 3732159 - DNA, 25 bp, Homo sapien
cacaggctaacacaagccagcttgg

SEQ ID NO: 3732160 - DNA, 25 bp, Homo sapien
acaggctaacacaagccagcttggg

SEQ ID NO: 3732161 - DNA, 25 bp, Homo sapien
agtcatgggcgaggacatggccaca

SEQ ID NO: 3732162 - DNA, 25 bp, Homo sapien
ctacggttcatagtcatgggcgagg

SEQ ID NO: 3732163 - DNA, 25 bp, Homo sapien
ctaaccagatgtcgggtgatctgcc

SEQ ID NO: 3732164 - DNA, 25 bp, Homo sapien
caatatctgcatgaattatgaagct

SEQ ID NO: 3732165 - DNA, 25 bp, Homo sapien
ttttcttcacaatatctgcatgaat

SEQ ID NO: 3732166 - DNA, 25 bp, Homo sapien
aattatgaagctgacttctaaccag

SEQ ID NO: 3732167 - DNA, 25 bp, Homo sapien
aggctggtcttgaactcccggccac

SEQ ID NO: 3732168 - DNA, 25 bp, Homo sapien
gctggtcttgaactcccggccacct

SEQ ID NO: 3732169 - DNA, 25 bp, Homo sapien
ggttcaagcatccaagcaattctca

SEQ ID NO: 3732170 - DNA, 25 bp, Homo sapien
ccaggctggtcttgaactcccggcc

SEQ ID NO: 3732171 - DNA, 25 bp, Homo sapien
aatgagaaagagaccgggagtggac

SEQ ID NO: 3732172 - DNA, 25 bp, Homo sapien
atgcagctggagacgggaatgagaa

SEQ ID NO: 3732173 - DNA, 25 bp, Homo sapien
taaagactgccatggacacaaagct

SEQ ID NO: 3732174 - DNA, 25 bp, Homo sapien
caaagctacatcactaatgaccatg

SEQ ID NO: 3732175 - DNA, 25 bp, Homo sapien
ggcatgaggctgttgggtgcccttc

SEQ ID NO: 3732176 - DNA, 25 bp, Homo sapien
ctggcatacaattaatttgcaggca

SEQ ID NO: 3732177 - DNA, 25 bp, Homo sapien
ggatgcttctgcaaagccgctggca

SEQ ID NO: 3732178 - DNA, 25 bp, Homo sapien
taatttgcaggcatgaggctgttgg

SEQ ID NO: 3732179 - DNA, 25 bp, Homo sapien
agacaccacattcagtaatatcagc

SEQ ID NO: 3732180 - DNA, 25 bp, Homo sapien
ccagaacagactcccagttcctgca

SEQ ID NO: 3732181 - DNA, 25 bp, Homo sapien
tccagaacagactcccagttcctgc

SEQ ID NO: 3732182 - DNA, 25 bp, Homo sapien
cagacaccacattcagtaatatcag

SEQ ID NO: 3732183 - DNA, 25 bp, Homo sapien
ggagagaagacaaagaatattccat

SEQ ID NO: 3732184 - DNA, 25 bp, Homo sapien
tggagagaagacaaagaatattcca

SEQ ID NO: 3732185 - DNA, 25 bp, Homo sapien
ctggagagaagacaaagaatattcc

SEQ ID NO: 3732186 - DNA, 25 bp, Homo sapien
tggtgtctgatgtggctgccaggag

SEQ ID NO: 3732187 - DNA, 25 bp, Homo sapien
tgccaggagttcctttgctgtggcc

SEQ ID NO: 3732188 - DNA, 25 bp, Homo sapien
ctgtggccagccctttaggattctc

SEQ ID NO: 3732189 - DNA, 25 bp, Homo sapien
gccagccctttaggattctctgcag

SEQ ID NO: 3732190 - DNA, 25 bp, Homo sapien
tctacgtgagcaagcttggtgacct

SEQ ID NO: 3732191 - DNA, 25 bp, Homo sapien
gagcaaagcgcagtttccatctgaa

SEQ ID NO: 3732192 - DNA, 25 bp, Homo sapien
tgtgtgcatagctcttccaggctgg

SEQ ID NO: 3732193 - DNA, 25 bp, Homo sapien
taaagtctgccatggatcccaggct

SEQ ID NO: 3732194 - DNA, 25 bp, Homo sapien
tcctggttggtgcaggtccagacat

SEQ ID NO: 3732195 - DNA, 25 bp, Homo sapien
ggttggtgcaggtccagacattagt

SEQ ID NO: 3732196 - DNA, 25 bp, Homo sapien
cctcctggttggtgcaggtccagac

SEQ ID NO: 3732197 - DNA, 25 bp, Homo sapien
tggttggtgcaggtccagacattag

SEQ ID NO: 3732198 - DNA, 25 bp, Homo sapien
ctgaaaaagacactgctgccaaggc

SEQ ID NO: 3732199 - DNA, 25 bp, Homo sapien
actggctccccactaagccagagat

SEQ ID NO: 3732200 - DNA, 25 bp, Homo sapien
cgcttggaatcggatttggatctca

SEQ ID NO: 3732201 - DNA, 25 bp, Homo sapien
tggggtaacatgagcccctggcttc

SEQ ID NO: 3732202 - DNA, 25 bp, Homo sapien
ccccttggaagttggagtcctatat

SEQ ID NO: 3732203 - DNA, 25 bp, Homo sapien
agtcctgaatcgactaagctgctcc

SEQ ID NO: 3732204 - DNA, 25 bp, Homo sapien
ggagtcctatatgggaacttttgag

SEQ ID NO: 3732205 - DNA, 25 bp, Homo sapien
gaacttttgagaatgaagtcctgaa

SEQ ID NO: 3732206 - DNA, 25 bp, Homo sapien
tgtccccattccttttcggtagaga

SEQ ID NO: 3732207 - DNA, 25 bp, Homo sapien
ccagggtctctttgggtgtccccat

SEQ ID NO: 3732208 - DNA, 25 bp, Homo sapien
ggtagagaaacctcacaatttccat

SEQ ID NO: 3732209 - DNA, 25 bp, Homo sapien
agggagcccagggtctctttgggtg

SEQ ID NO: 3732210 - DNA, 25 bp, Homo sapien
cctcatccccatagactgcattctt

SEQ ID NO: 3732211 - DNA, 25 bp, Homo sapien
tcatccccatagactgcattcttga

SEQ ID NO: 3732212 - DNA, 25 bp, Homo sapien
acccttcacgctacctcctctacaa

SEQ ID NO: 3732213 - DNA, 25 bp, Homo sapien
tgaaagttctatttgtgatgttctc

SEQ ID NO: 3732214 - DNA, 25 bp, Homo sapien
cacacagaggtctatgtggacctat

SEQ ID NO: 3732215 - DNA, 25 bp, Homo sapien
gaacatgtacaattggtgccaggca

SEQ ID NO: 3732216 - DNA, 25 bp, Homo sapien
ccggagatggaaactattgcttgaa

SEQ ID NO: 3732217 - DNA, 25 bp, Homo sapien
caacctcaacaagtggaaagttcac

SEQ ID NO: 3732218 - DNA, 25 bp, Homo sapien
ggagtctgcaggtaacctctctcct

SEQ ID NO: 3732219 - DNA, 25 bp, Homo sapien
cctggaacatctggaacatctctgc

SEQ ID NO: 3732220 - DNA, 25 bp, Homo sapien
gatttctcagggcacaaccagccct

SEQ ID NO: 3732221 - DNA, 25 bp, Homo sapien
ccttcaaaacaagcggaagctgaca

SEQ ID NO: 3732222 - DNA, 25 bp, Homo sapien
tcactagtgttcttcttgaattctc

SEQ ID NO: 3732223 - DNA, 25 bp, Homo sapien
gtgttcttcttgaattctcttcctg

SEQ ID NO: 3732224 - DNA, 25 bp, Homo sapien
actagtgttcttcttgaattctctt

SEQ ID NO: 3732225 - DNA, 25 bp, Homo sapien
tagtgttcttcttgaattctcttcc

SEQ ID NO: 3732226 - DNA, 25 bp, Homo sapien
agtttactcgtacttcctgtcctag

SEQ ID NO: 3732227 - DNA, 25 bp, Homo sapien
tcttttctaacaggagcacttaagg

SEQ ID NO: 3732228 - DNA, 25 bp, Homo sapien
gcacttaaggttacaaatctccctc

SEQ ID NO: 3732229 - DNA, 25 bp, Homo sapien
gaaataattgggttcagtctgacaa

SEQ ID NO: 3732230 - DNA, 25 bp, Homo sapien
gctgtagacccttgtctatctccaa

SEQ ID NO: 3732231 - DNA, 25 bp, Homo sapien
ggctgtagacccttgtctatctcca

SEQ ID NO: 3732232 - DNA, 25 bp, Homo sapien
tgtagacccttgtctatctccaaag

SEQ ID NO: 3732233 - DNA, 25 bp, Homo sapien
ctgtagacccttgtctatctccaaa

SEQ ID NO: 3732234 - DNA, 25 bp, Homo sapien
gttctgtgccactcttgcccaaggg

SEQ ID NO: 3732235 - DNA, 25 bp, Homo sapien
tacagctccaccttgctttacttga

SEQ ID NO: 3732236 - DNA, 25 bp, Homo sapien
gaaacagttctgtgccactcttgcc

SEQ ID NO: 3732237 - DNA, 25 bp, Homo sapien
gggccagctagcaatcctgagctca

SEQ ID NO: 3732238 - DNA, 25 bp, Homo sapien
tcccagatctggtgccctttgacat

SEQ ID NO: 3732239 - DNA, 25 bp, Homo sapien
tctggtgccctttgacatattcagt

SEQ ID NO: 3732240 - DNA, 25 bp, Homo sapien
tcccctttggttcccagatctggtg

SEQ ID NO: 3732241 - DNA, 25 bp, Homo sapien
tctcccctttggttcccagatctgg

SEQ ID NO: 3732242 - DNA, 25 bp, Homo sapien
gtgtccctacttgatccaagcccag

SEQ ID NO: 3732243 - DNA, 25 bp, Homo sapien
acaatggaaacccagttgctctttc

SEQ ID NO: 3732244 - DNA, 25 bp, Homo sapien
tcagaccactcatcaaataaaggac

SEQ ID NO: 3732245 - DNA, 25 bp, Homo sapien
caggtcttgcaacacatcattccag

SEQ ID NO: 3732246 - DNA, 25 bp, Homo sapien
aatgaggagcacaaccaagcgtgtc

SEQ ID NO: 3732247 - DNA, 25 bp, Homo sapien
aattttttatggcttgtatgtgctt

SEQ ID NO: 3732248 - DNA, 25 bp, Homo sapien
cccacattgcttcagaggacctgaa

SEQ ID NO: 3732249 - DNA, 25 bp, Homo sapien
ctggcatgcaaatgaggagcacaac

SEQ ID NO: 3732250 - DNA, 25 bp, Homo sapien
tgttccctagagctcagacactggg

SEQ ID NO: 3732251 - DNA, 25 bp, Homo sapien
agatctaggagcttgcaaagcactg

SEQ ID NO: 3732252 - DNA, 25 bp, Homo sapien
tctgtgcagacacaaacgtccctct

SEQ ID NO: 3732253 - DNA, 25 bp, Homo sapien
agaagcacgctccaacctttcactt

SEQ ID NO: 3732254 - DNA, 25 bp, Homo sapien
tgcacagtctaccttcaccgttgca

SEQ ID NO: 3732255 - DNA, 25 bp, Homo sapien
agtctaccttcaccgttgcagcatt

SEQ ID NO: 3732256 - DNA, 25 bp, Homo sapien
ccctgcacagtctaccttcaccgtt

SEQ ID NO: 3732257 - DNA, 25 bp, Homo sapien
acagtctaccttcaccgttgcagca

SEQ ID NO: 3732258 - DNA, 25 bp, Homo sapien
gaacagatgtaaaggccaaggtgct

SEQ ID NO: 3732259 - DNA, 25 bp, Homo sapien
caggcaagggatatagcagcacaac

SEQ ID NO: 3732260 - DNA, 25 bp, Homo sapien
cattgaccaaacatggactgtccat

SEQ ID NO: 3732261 - DNA, 25 bp, Homo sapien
ccagcaccagaagatacacactgca

SEQ ID NO: 3732262 - DNA, 25 bp, Homo sapien
caattgcaatgttgaagaacacagt

SEQ ID NO: 3732263 - DNA, 25 bp, Homo sapien
atcaattgcaatgttgaagaacaca

SEQ ID NO: 3732264 - DNA, 25 bp, Homo sapien
ttgcaatgttgaagaacacagtggg

SEQ ID NO: 3732265 - DNA, 25 bp, Homo sapien
attgcaatgttgaagaacacagtgg

SEQ ID NO: 3732266 - DNA, 25 bp, Homo sapien
aaatagcttgaaggagatgcagccc

SEQ ID NO: 3732267 - DNA, 25 bp, Homo sapien
tccatctttagaactttgtctgcaa

SEQ ID NO: 3732268 - DNA, 25 bp, Homo sapien
taaaagcagggacatttatcaccaa

SEQ ID NO: 3732269 - DNA, 25 bp, Homo sapien
tgttcagagcacaaaaattttcttc

SEQ ID NO: 3732270 - DNA, 25 bp, Homo sapien
accctgacacacaccccggaataat

SEQ ID NO: 3732271 - DNA, 25 bp, Homo sapien
ccctgacacacaccccggaataatt

SEQ ID NO: 3732272 - DNA, 25 bp, Homo sapien
caccctgacacacaccccggaataa

SEQ ID NO: 3732273 - DNA, 25 bp, Homo sapien
tcatcaaattccttgctgtagaggg

SEQ ID NO: 3732274 - DNA, 25 bp, Homo sapien
catcaaattccttgctgtagaggga

SEQ ID NO: 3732275 - DNA, 25 bp, Homo sapien
tcaaattccttgctgtagagggact

SEQ ID NO: 3732276 - DNA, 25 bp, Homo sapien
tcatccatcctctgtcttggcagta

SEQ ID NO: 3732277 - DNA, 25 bp, Homo sapien
atccatcctctgtcttggcagtaca

SEQ ID NO: 3732278 - DNA, 25 bp, Homo sapien
caaagaccacatgctgtcatccatc

SEQ ID NO: 3732279 - DNA, 25 bp, Homo sapien
tttgccgtggacaagacgccaggag

SEQ ID NO: 3732280 - DNA, 25 bp, Homo sapien
ggacccagagcgttccagggcttcc

SEQ ID NO: 3732281 - DNA, 25 bp, Homo sapien
ctggacccagagcgttccagggctt

SEQ ID NO: 3732282 - DNA, 25 bp, Homo sapien
tggacccagagcgttccagggcttc

SEQ ID NO: 3732283 - DNA, 25 bp, Homo sapien
cctggacccagagcgttccagggct

SEQ ID NO: 3732284 - DNA, 25 bp, Homo sapien
taacagcccacgtgcaacagtggtc

SEQ ID NO: 3732285 - DNA, 25 bp, Homo sapien
tgggtaacagcccacgtgcaacagt

SEQ ID NO: 3732286 - DNA, 25 bp, Homo sapien
ccacgtgcaacagtggtctgcagct

SEQ ID NO: 3732287 - DNA, 25 bp, Homo sapien
ctgtgggtaacagcccacgtgcaac

SEQ ID NO: 3732288 - DNA, 25 bp, Homo sapien
ttcctgggagttcccatctggtcct

SEQ ID NO: 3732289 - DNA, 25 bp, Homo sapien
ctttgatgtctttgatgttgctcat

SEQ ID NO: 3732290 - DNA, 25 bp, Homo sapien
atctttgatgtctttgatgttgctc

SEQ ID NO: 3732291 - DNA, 25 bp, Homo sapien
tctcttgccttagctcatactcaaa

SEQ ID NO: 3732292 - DNA, 25 bp, Homo sapien
catccaccggtgtacgtgcctttgg

SEQ ID NO: 3732293 - DNA, 25 bp, Homo sapien
tgcaggtactaacatgccttcgtgc

SEQ ID NO: 3732294 - DNA, 25 bp, Homo sapien
cctttggcattgacttggaaacact

SEQ ID NO: 3732295 - DNA, 25 bp, Homo sapien
tccttcttggagtgcagagccatca

SEQ ID NO: 3732296 - DNA, 25 bp, Homo sapien
aacttggaaccagcatctaatgcaa

SEQ ID NO: 3732297 - DNA, 25 bp, Homo sapien
atttggggcacttcttaggcatgag

SEQ ID NO: 3732298 - DNA, 25 bp, Homo sapien
gcccaacttttatgtgcatctaaca

SEQ ID NO: 3732299 - DNA, 25 bp, Homo sapien
ggaaccagcatctaatgcaaagtaa

SEQ ID NO: 3732300 - DNA, 25 bp, Homo sapien
cttgaccaaggcatccttctcttca

SEQ ID NO: 3732301 - DNA, 25 bp, Homo sapien
acttctactgagcttttcagcttct

SEQ ID NO: 3732302 - DNA, 25 bp, Homo sapien
gctttccacttctactgagcttttc

SEQ ID NO: 3732303 - DNA, 25 bp, Homo sapien
ctgctttccacttctactgagcttt

SEQ ID NO: 3732304 - DNA, 25 bp, Homo sapien
cacttctactgagcttttcagcttc

SEQ ID NO: 3732305 - DNA, 25 bp, Homo sapien
aatacttcttccctgcgtgtaccca

SEQ ID NO: 3732306 - DNA, 25 bp, Homo sapien
cctgcatgcagtgttcacctgggcc

SEQ ID NO: 3732307 - DNA, 25 bp, Homo sapien
gctgcctgcatgcagtgttcacctg

SEQ ID NO: 3732308 - DNA, 25 bp, Homo sapien
gcatgcagtgttcacctgggcctca

SEQ ID NO: 3732309 - DNA, 25 bp, Homo sapien
ctaattcctccatagctttgacctc

SEQ ID NO: 3732310 - DNA, 25 bp, Homo sapien
tttgacctcctggtcctggaccact

SEQ ID NO: 3732311 - DNA, 25 bp, Homo sapien
aattcctccatagctttgacctcct

SEQ ID NO: 3732312 - DNA, 25 bp, Homo sapien
gtcctggaccactcacttccccttg

SEQ ID NO: 3732313 - DNA, 25 bp, Homo sapien
ttcctattaagatgtttggggatga

SEQ ID NO: 3732314 - DNA, 25 bp, Homo sapien
attaagatgtttggggatgagaaga

SEQ ID NO: 3732315 - DNA, 25 bp, Homo sapien
ctttcctattaagatgtttggggat

SEQ ID NO: 3732316 - DNA, 25 bp, Homo sapien
aagatgtttggggatgagaagaata

SEQ ID NO: 3732317 - DNA, 25 bp, Homo sapien
catggagtcatcacccatgtggcct

SEQ ID NO: 3732318 - DNA, 25 bp, Homo sapien
cagcacttggtctttgcataaccca

SEQ ID NO: 3732319 - DNA, 25 bp, Homo sapien
tgctcgtgtgggtgtgacagtcctc

SEQ ID NO: 3732320 - DNA, 25 bp, Homo sapien
tttctgtcctttggcggcagggaaa

SEQ ID NO: 3732321 - DNA, 25 bp, Homo sapien
agggcccttcctgggcactgggttg

SEQ ID NO: 3732322 - DNA, 25 bp, Homo sapien
ctctgggagctccgcttctctgaca

SEQ ID NO: 3732323 - DNA, 25 bp, Homo sapien
cccttcctgggcactgggttgtgcc

SEQ ID NO: 3732324 - DNA, 25 bp, Homo sapien
tgggagctccgcttctctgacagcc

SEQ ID NO: 3732325 - DNA, 25 bp, Homo sapien
ttcctgcagtctcgctgagtcctgc

SEQ ID NO: 3732326 - DNA, 25 bp, Homo sapien
catgtagccccatattgtcaccttc

SEQ ID NO: 3732327 - DNA, 25 bp, Homo sapien
catttccctgcgttcttgcttggct

SEQ ID NO: 3732328 - DNA, 25 bp, Homo sapien
tgagtcctgcagacatcgctgccat

SEQ ID NO: 3732329 - DNA, 25 bp, Homo sapien
atcccttcagcagagtgtccttcct

SEQ ID NO: 3732330 - DNA, 25 bp, Homo sapien
tgtccaaatcccttcagcagagtgt

SEQ ID NO: 3732331 - DNA, 25 bp, Homo sapien
agcagtgtcagtaaacagtacatga

SEQ ID NO: 3732332 - DNA, 25 bp, Homo sapien
cagagccgagggcagtgcagatggg

SEQ ID NO: 3732333 - DNA, 25 bp, Homo sapien
tccactggcaaaccctgtgtgtggt

SEQ ID NO: 3732334 - DNA, 25 bp, Homo sapien
tcttacgcatttcgctctttccttc

SEQ ID NO: 3732335 - DNA, 25 bp, Homo sapien
ctctgatgccttcgttttatttggg

SEQ ID NO: 3732336 - DNA, 25 bp, Homo sapien
ccagggataccagcttcttacgcat

SEQ ID NO: 3732337 - DNA, 25 bp, Homo sapien
tttctaggtctagacctccatttgg

SEQ ID NO: 3732338 - DNA, 25 bp, Homo sapien
gacttctggtccaaccagaaggcca

SEQ ID NO: 3732339 - DNA, 25 bp, Homo sapien
accctgctgttgagctatgactgca

SEQ ID NO: 3732340 - DNA, 25 bp, Homo sapien
ataaaagaatctggcaaagctggct

SEQ ID NO: 3732341 - DNA, 25 bp, Homo sapien
gatgaacccgcgatactgattctct

SEQ ID NO: 3732342 - DNA, 25 bp, Homo sapien
aagcaggtgttgagtgtccagcaca

SEQ ID NO: 3732343 - DNA, 25 bp, Homo sapien
tatgaggctgagcatgagtctggat

SEQ ID NO: 3732344 - DNA, 25 bp, Homo sapien
cggccagacgaagcgtgcctgtcta

SEQ ID NO: 3732345 - DNA, 25 bp, Homo sapien
tcaacaggaagtgacctggtgagtt

SEQ ID NO: 3732346 - DNA, 25 bp, Homo sapien
gtgtcaacaggaagtgacctggtga

SEQ ID NO: 3732347 - DNA, 25 bp, Homo sapien
cttctgactttgtggagagattccc

SEQ ID NO: 3732348 - DNA, 25 bp, Homo sapien
ttcccagaaaacaagccagaagctt

SEQ ID NO: 3732349 - DNA, 25 bp, Homo sapien
gggaaaaatgtcagtctccaaggat

SEQ ID NO: 3732350 - DNA, 25 bp, Homo sapien
aaatgtcagtctccaaggattcagg

SEQ ID NO: 3732351 - DNA, 25 bp, Homo sapien
ctttgcagtttaaggacttgtgttt

SEQ ID NO: 3732352 - DNA, 25 bp, Homo sapien
tcttttgttgtctatgcctttaggg

SEQ ID NO: 3732353 - DNA, 25 bp, Homo sapien
tgtctttcccaccagagccattaac

SEQ ID NO: 3732354 - DNA, 25 bp, Homo sapien
ccagagccattaacagcagaacatg

SEQ ID NO: 3732355 - DNA, 25 bp, Homo sapien
agagccattaacagcagaacatgga

SEQ ID NO: 3732356 - DNA, 25 bp, Homo sapien
tcccaccagagccattaacagcaga

SEQ ID NO: 3732357 - DNA, 25 bp, Homo sapien
acaatttgtaattacaaccaccaca

SEQ ID NO: 3732358 - DNA, 25 bp, Homo sapien
gacaacaatttgtaattacaaccac

SEQ ID NO: 3732359 - DNA, 25 bp, Homo sapien
atttgtaattacaaccaccacacac

SEQ ID NO: 3732360 - DNA, 25 bp, Homo sapien
ttgacaacaatttgtaattacaacc

SEQ ID NO: 3732361 - DNA, 25 bp, Homo sapien
gtgtcaacgtttctccttgcccgca

SEQ ID NO: 3732362 - DNA, 25 bp, Homo sapien
gcgtgggcctccgatgatttctcct

SEQ ID NO: 3732363 - DNA, 25 bp, Homo sapien
gatctaattctttccgactggtatg

SEQ ID NO: 3732364 - DNA, 25 bp, Homo sapien
cctgtggtatttctgctgtgtctcg

SEQ ID NO: 3732365 - DNA, 25 bp, Homo sapien
cccaaacttggtccgataagtcaat

SEQ ID NO: 3732366 - DNA, 25 bp, Homo sapien
gatgctgagcctggtcacttgccca

SEQ ID NO: 3732367 - DNA, 25 bp, Homo sapien
ccgataagtcaatatccacagcatt

SEQ ID NO: 3732368 - DNA, 25 bp, Homo sapien
caggtgtggatgcttgaattaatcg

SEQ ID NO: 3732369 - DNA, 25 bp, Homo sapien
agactggcattctggaggctttgaa

SEQ ID NO: 3732370 - DNA, 25 bp, Homo sapien
tcctaggcccgaaagagactggcat

SEQ ID NO: 3732371 - DNA, 25 bp, Homo sapien
tcagtctctcctaggcccgaaagag

SEQ ID NO: 3732372 - DNA, 25 bp, Homo sapien
gactggcattctggaggctttgaaa

SEQ ID NO: 3732373 - DNA, 25 bp, Homo sapien
catgctgcctacagccagcaggtgg

SEQ ID NO: 3732374 - DNA, 25 bp, Homo sapien
agcaggtggcagacgtgcccttcct

SEQ ID NO: 3732375 - DNA, 25 bp, Homo sapien
gagcctgaagccgatgtgcagcttg

SEQ ID NO: 3732376 - DNA, 25 bp, Homo sapien
tgggccagcattgcgcatcctggct

SEQ ID NO: 3732377 - DNA, 25 bp, Homo sapien
aggctttccaataaagacatcaggg

SEQ ID NO: 3732378 - DNA, 25 bp, Homo sapien
tgggtccaggctttccaataaagac

SEQ ID NO: 3732379 - DNA, 25 bp, Homo sapien
tttccaataaagacatcagggagaa

SEQ ID NO: 3732380 - DNA, 25 bp, Homo sapien
ctgggtccaggctttccaataaaga

SEQ ID NO: 3732381 - DNA, 25 bp, Homo sapien
gaggccgccctcgcacaaaaagagg

SEQ ID NO: 3732382 - DNA, 25 bp, Homo sapien
cgccctcgcacaaaaagaggtggag

SEQ ID NO: 3732383 - DNA, 25 bp, Homo sapien
gccgccctcgcacaaaaagaggtgg

SEQ ID NO: 3732384 - DNA, 25 bp, Homo sapien
ggccgccctcgcacaaaaagaggtg

SEQ ID NO: 3732385 - DNA, 25 bp, Homo sapien
gcctgaggaagcaaaccatttgggc

SEQ ID NO: 3732386 - DNA, 25 bp, Homo sapien
aagcaaaccatttgggcagagaaga

SEQ ID NO: 3732387 - DNA, 25 bp, Homo sapien
gtggtagacgcgtcgagcctgagga

SEQ ID NO: 3732388 - DNA, 25 bp, Homo sapien
gaggaagcaaaccatttgggcagag

SEQ ID NO: 3732389 - DNA, 25 bp, Homo sapien
cagaggaactgaactatgtgtcgtt

SEQ ID NO: 3732390 - DNA, 25 bp, Homo sapien
tgggtggtggtgtgttcatcagcta

SEQ ID NO: 3732391 - DNA, 25 bp, Homo sapien
tgaaatacgcgccttcagaggaact

SEQ ID NO: 3732392 - DNA, 25 bp, Homo sapien
gtcgttgaatatccttcgtgttggg

SEQ ID NO: 3732393 - DNA, 25 bp, Homo sapien
tcagcggtgcctgagcaatttgggc

SEQ ID NO: 3732394 - DNA, 25 bp, Homo sapien
gggatccccttcagcggtgcctgag

SEQ ID NO: 3732395 - DNA, 25 bp, Homo sapien
gcggtgcctgagcaatttgggctta

SEQ ID NO: 3732396 - DNA, 25 bp, Homo sapien
cccttcagcggtgcctgagcaattt

SEQ ID NO: 3732397 - DNA, 25 bp, Homo sapien
tccagcaagatcaaccaaagaagca

SEQ ID NO: 3732398 - DNA, 25 bp, Homo sapien
ctgttgtctagagccagcagggagc

SEQ ID NO: 3732399 - DNA, 25 bp, Homo sapien
ggtctctttcgccatgctgttgtct

SEQ ID NO: 3732400 - DNA, 25 bp, Homo sapien
tcaccgtgcgctgtctccagcaaga

SEQ ID NO: 3732401 - DNA, 25 bp, Homo sapien
agaggcatttccacaggcctgctgg

SEQ ID NO: 3732402 - DNA, 25 bp, Homo sapien
cagagccaagccagctttgaagagg

SEQ ID NO: 3732403 - DNA, 25 bp, Homo sapien
agccaagccagctttgaagaggcat

SEQ ID NO: 3732404 - DNA, 25 bp, Homo sapien
aagaggcatttccacaggcctgctg

SEQ ID NO: 3732405 - DNA, 25 bp, Homo sapien
tgatggatgggctcagcctgcattg

SEQ ID NO: 3732406 - DNA, 25 bp, Homo sapien
ctggcggggcaagcccagcagacac

SEQ ID NO: 3732407 - DNA, 25 bp, Homo sapien
ggggcaagcccagcagacactctcg

SEQ ID NO: 3732408 - DNA, 25 bp, Homo sapien
gcggggcaagcccagcagacactct

SEQ ID NO: 3732409 - DNA, 25 bp, Homo sapien
tggcggggcaagcccagcagacact

SEQ ID NO: 3732410 - DNA, 25 bp, Homo sapien
actgtggcacagacggctcctctga

SEQ ID NO: 3732411 - DNA, 25 bp, Homo sapien
gagcttgccagatgtgtggaacaga

SEQ ID NO: 3732412 - DNA, 25 bp, Homo sapien
cagaatcaaaatccccggaatgtcg

SEQ ID NO: 3732413 - DNA, 25 bp, Homo sapien
aatgctcagagttcctgcgatggga

SEQ ID NO: 3732414 - DNA, 25 bp, Homo sapien
tgcctttttacgatcctggaatctc

SEQ ID NO: 3732415 - DNA, 25 bp, Homo sapien
gtcccttgaccaggattaactcagt

SEQ ID NO: 3732416 - DNA, 25 bp, Homo sapien
ggaagtagcatgcattgggaaacct

SEQ ID NO: 3732417 - DNA, 25 bp, Homo sapien
gggaaaccttcttaagcacatgctc

SEQ ID NO: 3732418 - DNA, 25 bp, Homo sapien
ttcctccaacttgatagttagtttc

SEQ ID NO: 3732419 - DNA, 25 bp, Homo sapien
ctccaacttgatagttagtttctta

SEQ ID NO: 3732420 - DNA, 25 bp, Homo sapien
tgtttcctccaacttgatagttagt

SEQ ID NO: 3732421 - DNA, 25 bp, Homo sapien
ctctcttgggtatttggtctatctt

SEQ ID NO: 3732422 - DNA, 25 bp, Homo sapien
ccggcaaggtagtgttgacatttag

SEQ ID NO: 3732423 - DNA, 25 bp, Homo sapien
caaggtagtgttgacatttagcagg

SEQ ID NO: 3732424 - DNA, 25 bp, Homo sapien
tagtgttgacatttagcagggtcat

SEQ ID NO: 3732425 - DNA, 25 bp, Homo sapien
ggtagtgttgacatttagcagggtc

SEQ ID NO: 3732426 - DNA, 25 bp, Homo sapien
gtagctgtaatcatactggtcaggg

SEQ ID NO: 3732427 - DNA, 25 bp, Homo sapien
ttctcagcgtgggtaagtgtgctac

SEQ ID NO: 3732428 - DNA, 25 bp, Homo sapien
tagtaccagtcaggattctcagcgt

SEQ ID NO: 3732429 - DNA, 25 bp, Homo sapien
ctgattataatcctcgtagctgtaa

SEQ ID NO: 3732430 - DNA, 25 bp, Homo sapien
aggtgctcccatggacgaggcagtc

SEQ ID NO: 3732431 - DNA, 25 bp, Homo sapien
ctgcatgtgaaggtgctcccatgga

SEQ ID NO: 3732432 - DNA, 25 bp, Homo sapien
ccaccgtgttcacaggggttgggct

SEQ ID NO: 3732433 - DNA, 25 bp, Homo sapien
tctgacacttattcccagagaaagg

SEQ ID NO: 3732434 - DNA, 25 bp, Homo sapien
tgtaggagatccataacataagaca

SEQ ID NO: 3732435 - DNA, 25 bp, Homo sapien
ctgtaggagatccataacataagac

SEQ ID NO: 3732436 - DNA, 25 bp, Homo sapien
tccataacataagacattatttggg

SEQ ID NO: 3732437 - DNA, 25 bp, Homo sapien
ggagatccataacataagacattat

SEQ ID NO: 3732438 - DNA, 25 bp, Homo sapien
taagggtgtttacagacacagcggt

SEQ ID NO: 3732439 - DNA, 25 bp, Homo sapien
ggaggactctgggtaatgagacatt

SEQ ID NO: 3732440 - DNA, 25 bp, Homo sapien
acacagcggtagtagggaggactct

SEQ ID NO: 3732441 - DNA, 25 bp, Homo sapien
attggccccggccacatgggttgtc

SEQ ID NO: 3732442 - DNA, 25 bp, Homo sapien
tccccttgaactggtcgggacaggc

SEQ ID NO: 3732443 - DNA, 25 bp, Homo sapien
tggatctccgcttatgccgggagca

SEQ ID NO: 3732444 - DNA, 25 bp, Homo sapien
ccttgaactggtcgggacaggcaca

SEQ ID NO: 3732445 - DNA, 25 bp, Homo sapien
aggcacaggtgaacttggatctccg

SEQ ID NO: 3732446 - DNA, 25 bp, Homo sapien
ccctgatggtggcagagacccatac

SEQ ID NO: 3732447 - DNA, 25 bp, Homo sapien
ggccctgatggtggcagagacccat

SEQ ID NO: 3732448 - DNA, 25 bp, Homo sapien
gtggccctgatggtggcagagaccc

SEQ ID NO: 3732449 - DNA, 25 bp, Homo sapien
tcacttgtggccctgatggtggcag

SEQ ID NO: 3732450 - DNA, 25 bp, Homo sapien
caggtagcaatgtgagaaccaacag

SEQ ID NO: 3732451 - DNA, 25 bp, Homo sapien
gcaggtagcaatgtgagaaccaaca

SEQ ID NO: 3732452 - DNA, 25 bp, Homo sapien
agagagcaggtagcaatgtgagaac

SEQ ID NO: 3732453 - DNA, 25 bp, Homo sapien
gagcaggtagcaatgtgagaaccaa

SEQ ID NO: 3732454 - DNA, 25 bp, Homo sapien
gagttccagtaaaggcacgcatgct

SEQ ID NO: 3732455 - DNA, 25 bp, Homo sapien
cacgcatgctggttgactgtcctat

SEQ ID NO: 3732456 - DNA, 25 bp, Homo sapien
tttccctcggtaagagtagccatcg

SEQ ID NO: 3732457 - DNA, 25 bp, Homo sapien
gtagccatcgccaacatagcagtca

SEQ ID NO: 3732458 - DNA, 25 bp, Homo sapien
catttcaccttgtcattggtaactt

SEQ ID NO: 3732459 - DNA, 25 bp, Homo sapien
caccttgtcattggtaactttaata

SEQ ID NO: 3732460 - DNA, 25 bp, Homo sapien
cagggcttttcgtccgcatctgggt

SEQ ID NO: 3732461 - DNA, 25 bp, Homo sapien
taataaagcaccagggcttttcgtc

SEQ ID NO: 3732462 - DNA, 25 bp, Homo sapien
tgggctgagcaggctgagacatcac

SEQ ID NO: 3732463 - DNA, 25 bp, Homo sapien
cctgggctgagcaggctgagacatc

SEQ ID NO: 3732464 - DNA, 25 bp, Homo sapien
ctgggctgagcaggctgagacatca

SEQ ID NO: 3732465 - DNA, 25 bp, Homo sapien
cctggtgggtgcagacagttgggca

SEQ ID NO: 3732466 - DNA, 25 bp, Homo sapien
tgacctaaacccacaaaggtatcca

SEQ ID NO: 3732467 - DNA, 25 bp, Homo sapien
acaaaggtatccagacctgcttggc

SEQ ID NO: 3732468 - DNA, 25 bp, Homo sapien
gatgggaattggtaaagcaggtgtg

SEQ ID NO: 3732469 - DNA, 25 bp, Homo sapien
tgatggctcagtggggctttcctct

SEQ ID NO: 3732470 - DNA, 25 bp, Homo sapien
atggctcagtggggctttcctctgg

SEQ ID NO: 3732471 - DNA, 25 bp, Homo sapien
cttggttgatggctcagtggggctt

SEQ ID NO: 3732472 - DNA, 25 bp, Homo sapien
gttgatggctcagtggggctttcct

SEQ ID NO: 3732473 - DNA, 25 bp, Homo sapien
tgcttgcccgccgtgctcttaaagc

SEQ ID NO: 3732474 - DNA, 25 bp, Homo sapien
aaagcctccatagattctcttgatc

SEQ ID NO: 3732475 - DNA, 25 bp, Homo sapien
cttaaagcctccatagattctcttg

SEQ ID NO: 3732476 - DNA, 25 bp, Homo sapien
ggagggacgcctgccatgggtgctt

SEQ ID NO: 3732477 - DNA, 25 bp, Homo sapien
cagcaggggtggatcagcgccccac

SEQ ID NO: 3732478 - DNA, 25 bp, Homo sapien
ccagcaggggtggatcagcgcccca

SEQ ID NO: 3732479 - DNA, 25 bp, Homo sapien
cccagcaggggtggatcagcgcccc

SEQ ID NO: 3732480 - DNA, 25 bp, Homo sapien
cctgactcagaagggtcattggtga

SEQ ID NO: 3732481 - DNA, 25 bp, Homo sapien
caggaggcatggatgaagacacctg

SEQ ID NO: 3732482 - DNA, 25 bp, Homo sapien
gacacctgactcagaagggtcattg

SEQ ID NO: 3732483 - DNA, 25 bp, Homo sapien
cattggtgatggtatcagacaaagg

SEQ ID NO: 3732484 - DNA, 25 bp, Homo sapien
tcagctccccagaagttacttgctt

SEQ ID NO: 3732485 - DNA, 25 bp, Homo sapien
catttactataaggtgaactggaag

SEQ ID NO: 3732486 - DNA, 25 bp, Homo sapien
aacccagactttgttggaccagcct

SEQ ID NO: 3732487 - DNA, 25 bp, Homo sapien
caaaacccagactttgttggaccag

SEQ ID NO: 3732488 - DNA, 25 bp, Homo sapien
tagcaccacctttagatgtctggtt

SEQ ID NO: 3732489 - DNA, 25 bp, Homo sapien
atctctttcattgtagtggctgtac

SEQ ID NO: 3732490 - DNA, 25 bp, Homo sapien
ttgtagtggctgtacttgaatatct

SEQ ID NO: 3732491 - DNA, 25 bp, Homo sapien
tggtcccctagcaccacctttagat

SEQ ID NO: 3732492 - DNA, 25 bp, Homo sapien
cctcaggaaagccatgaaagaggaa

SEQ ID NO: 3732493 - DNA, 25 bp, Homo sapien
ctcaggaaagccatgaaagaggaac

SEQ ID NO: 3732494 - DNA, 25 bp, Homo sapien
cagagggaaaggacccatcaggcaa

SEQ ID NO: 3732495 - DNA, 25 bp, Homo sapien
tcaggcaagcacacagtcttcacgt

SEQ ID NO: 3732496 - DNA, 25 bp, Homo sapien
tgtaacaccccagccagagatgtgg

SEQ ID NO: 3732497 - DNA, 25 bp, Homo sapien
catccactggctttaacttgagcaa

SEQ ID NO: 3732498 - DNA, 25 bp, Homo sapien
gaagatttcctgcacagatcatact

SEQ ID NO: 3732499 - DNA, 25 bp, Homo sapien
caatcatgtggtcatagagttggcg

SEQ ID NO: 3732500 - DNA, 25 bp, Homo sapien
catagagttggcgggagttgcacaa

SEQ ID NO: 3732501 - DNA, 25 bp, Homo sapien
caaagtgttggcaatcagcttgact

SEQ ID NO: 3732502 - DNA, 25 bp, Homo sapien
gtaggtgccgtccttctcacaggtc

SEQ ID NO: 3732503 - DNA, 25 bp, Homo sapien
gatggtggctttgatccaattcagg

SEQ ID NO: 3732504 - DNA, 25 bp, Homo sapien
acttgggtgtagacccctggcctct

SEQ ID NO: 3732505 - DNA, 25 bp, Homo sapien
tatcccatagacgtagtaggtgccg

SEQ ID NO: 3732506 - DNA, 25 bp, Homo sapien
ctctggaggtgtccattgttggcca

SEQ ID NO: 3732507 - DNA, 25 bp, Homo sapien
tattgtgcaaatgctggtctgggaa

SEQ ID NO: 3732508 - DNA, 25 bp, Homo sapien
tctctgcttagagtagggatagtct

SEQ ID NO: 3732509 - DNA, 25 bp, Homo sapien
gaagaagcctggtgatattgtgcaa

SEQ ID NO: 3732510 - DNA, 25 bp, Homo sapien
tgtggtcctctctgatacctagacg

SEQ ID NO: 3732511 - DNA, 25 bp, Homo sapien
tacctagacgtggatggctgattct

SEQ ID NO: 3732512 - DNA, 25 bp, Homo sapien
tctgttgagtgcctcgagtgtctgg

SEQ ID NO: 3732513 - DNA, 25 bp, Homo sapien
ctttgatttcggcaagctggaatgg

SEQ ID NO: 3732514 - DNA, 25 bp, Homo sapien
cgttacattcgcagaaagggtcagg

SEQ ID NO: 3732515 - DNA, 25 bp, Homo sapien
caggcagatgacacgcaggttaaac

SEQ ID NO: 3732516 - DNA, 25 bp, Homo sapien
aacaaggcgcctaatttcatgggtc

SEQ ID NO: 3732517 - DNA, 25 bp, Homo sapien
tcttagcgtgtcctgtgggaaccgg

SEQ ID NO: 3732518 - DNA, 25 bp, Homo sapien
gcagtgtcgacgatgacccaaggat

SEQ ID NO: 3732519 - DNA, 25 bp, Homo sapien
gggactggcccttcactgtagatgg

SEQ ID NO: 3732520 - DNA, 25 bp, Homo sapien
acaaagaggctttcctgcgggaccg

SEQ ID NO: 3732521 - DNA, 25 bp, Homo sapien
tgtccacagtgctagacggaggcgc

SEQ ID NO: 3732522 - DNA, 25 bp, Homo sapien
gaaagtctacagaaactcctgggag

SEQ ID NO: 3732523 - DNA, 25 bp, Homo sapien
taccaagtgggtgtcgcaaatgagc

SEQ ID NO: 3732524 - DNA, 25 bp, Homo sapien
gagatcgccagtgatgtaagacccc

SEQ ID NO: 3732525 - DNA, 25 bp, Homo sapien
ggaagcttgaattctggcacctaga

SEQ ID NO: 3732526 - DNA, 25 bp, Homo sapien
catggtgtgccccttagagagagtg

SEQ ID NO: 3732527 - DNA, 25 bp, Homo sapien
ggccatgctttctagttgaccctga

SEQ ID NO: 3732528 - DNA, 25 bp, Homo sapien
aaatagtacacagggagaagtcgcc

SEQ ID NO: 3732529 - DNA, 25 bp, Homo sapien
ggtgtcaataaccagcccagatctg

SEQ ID NO: 3732530 - DNA, 25 bp, Homo sapien
taccgttcaccccagaggtggctgc

SEQ ID NO: 3732531 - DNA, 25 bp, Homo sapien
taacaggtagagagacggcagaatc

SEQ ID NO: 3732532 - DNA, 25 bp, Homo sapien
tgtaaagccctgtgggatcccatgc

SEQ ID NO: 3732533 - DNA, 25 bp, Homo sapien
tgtcagatcagaataacacaggctg

SEQ ID NO: 3732534 - DNA, 25 bp, Homo sapien
aaaattctgacttgggtatggctcc

SEQ ID NO: 3732535 - DNA, 25 bp, Homo sapien
tcccctggccctagtgggtgtagac

SEQ ID NO: 3732536 - DNA, 25 bp, Homo sapien
gatctcagtgatgtgctgggtaacc

SEQ ID NO: 3732537 - DNA, 25 bp, Homo sapien
ggaaagatgctgcaatggtagccca

SEQ ID NO: 3732538 - DNA, 25 bp, Homo sapien
cttcacgtgggcacaactgacagtg

SEQ ID NO: 3732539 - DNA, 25 bp, Homo sapien
cacgtgggcacaactgacagtgtct

SEQ ID NO: 3732540 - DNA, 25 bp, Homo sapien
gttttcctgttgatactgaggtgcg

SEQ ID NO: 3732541 - DNA, 25 bp, Homo sapien
tgatactgaggtgcgagatgccatg

SEQ ID NO: 3732542 - DNA, 25 bp, Homo sapien
cctttgcctacttgagcaggctcag

SEQ ID NO: 3732543 - DNA, 25 bp, Homo sapien
ctgtctctatgagggctctggccat

SEQ ID NO: 3732544 - DNA, 25 bp, Homo sapien
tagggcctttgcctacttgagcagg

SEQ ID NO: 3732545 - DNA, 25 bp, Homo sapien
cttccgtagggcctttgcctacttg

SEQ ID NO: 3732546 - DNA, 25 bp, Homo sapien
tccttgcgtgaatggagtacatgct

SEQ ID NO: 3732547 - DNA, 25 bp, Homo sapien
taggaaccaccaaatccttgcgtga

SEQ ID NO: 3732548 - DNA, 25 bp, Homo sapien
tggtcggataccaggcaagaacgcc

SEQ ID NO: 3732549 - DNA, 25 bp, Homo sapien
aatggagtacatgcttagtggtcgg

SEQ ID NO: 3732550 - DNA, 25 bp, Homo sapien
aaggctgatccgcttcgggcccgct

SEQ ID NO: 3732551 - DNA, 25 bp, Homo sapien
ggcgtaggacgctccctcagctttg

SEQ ID NO: 3732552 - DNA, 25 bp, Homo sapien
cagctttgaaggaagtacccaccca

SEQ ID NO: 3732553 - DNA, 25 bp, Homo sapien
ggtctcctagacgttgctttgcggg

SEQ ID NO: 3732554 - DNA, 25 bp, Homo sapien
gacctgggccttcacatcaactcgg

SEQ ID NO: 3732555 - DNA, 25 bp, Homo sapien
cagtgtacacctcgacctgggcctt

SEQ ID NO: 3732556 - DNA, 25 bp, Homo sapien
tcggagacccctttcccatagccag

SEQ ID NO: 3732557 - DNA, 25 bp, Homo sapien
ggctctcccctagcgaaacctggat

SEQ ID NO: 3732558 - DNA, 25 bp, Homo sapien
ctacaaagttgagcccgcgcgcggg

SEQ ID NO: 3732559 - DNA, 25 bp, Homo sapien
acaaagttgagcccgcgcgcgggag

SEQ ID NO: 3732560 - DNA, 25 bp, Homo sapien
tacaaagttgagcccgcgcgcggga

SEQ ID NO: 3732561 - DNA, 25 bp, Homo sapien
ctccgcaggggtggaagagcccaaa

SEQ ID NO: 3732562 - DNA, 25 bp, Homo sapien
cctggagggcgctctctgcaaagct

SEQ ID NO: 3732563 - DNA, 25 bp, Homo sapien
ccgcacgcatagtccctggagggcg

SEQ ID NO: 3732564 - DNA, 25 bp, Homo sapien
tggaagagcccaaagcgacccgtgt

SEQ ID NO: 3732565 - DNA, 25 bp, Homo sapien
tctggggcccctttagcgaaagcga

SEQ ID NO: 3732566 - DNA, 25 bp, Homo sapien
tccgtcgctccgcagcaagggtctg

SEQ ID NO: 3732567 - DNA, 25 bp, Homo sapien
agtctctctccgtcgctccgcagca

SEQ ID NO: 3732568 - DNA, 25 bp, Homo sapien
ggctgggactggcacagtctctctc

SEQ ID NO: 3732569 - DNA, 25 bp, Homo sapien
gacgctcagctccagtgtactcaga

SEQ ID NO: 3732570 - DNA, 25 bp, Homo sapien
gaaacgcgtaccataatcaactctg

SEQ ID NO: 3732571 - DNA, 25 bp, Homo sapien
ttgacagagccactgccgcgaaacg

SEQ ID NO: 3732572 - DNA, 25 bp, Homo sapien
agccctgcagcaaggacgctcagct

SEQ ID NO: 3732573 - DNA, 25 bp, Homo sapien
ctggaggccaaccaacacagtccat

SEQ ID NO: 3732574 - DNA, 25 bp, Homo sapien
gttcttttccaagtgccacttcctg

SEQ ID NO: 3732575 - DNA, 25 bp, Homo sapien
ggtaacataagaagcacaaatccca

SEQ ID NO: 3732576 - DNA, 25 bp, Homo sapien
atcccactgctaccaccgcagctgg

SEQ ID NO: 3732577 - DNA, 25 bp, Homo sapien
ctgctaccaccgcagctggtgttct

SEQ ID NO: 3732578 - DNA, 25 bp, Homo sapien
cttcatttcccgcatagccttcgta

SEQ ID NO: 3732579 - DNA, 25 bp, Homo sapien
ggcttgtttatttgcgctctgctgt

SEQ ID NO: 3732580 - DNA, 25 bp, Homo sapien
cgcatagccttcgtatgtggcttgt

SEQ ID NO: 3732581 - DNA, 25 bp, Homo sapien
gctgtttggctcctataagacaata

SEQ ID NO: 3732582 - DNA, 25 bp, Homo sapien
cgaggaccggtctggcttagcatcc

SEQ ID NO: 3732583 - DNA, 25 bp, Homo sapien
tgaagagggacggtacaaacgagga

SEQ ID NO: 3732584 - DNA, 25 bp, Homo sapien
tacaaacgaggaccggtctggctta

SEQ ID NO: 3732585 - DNA, 25 bp, Homo sapien
ggcttagcatccactgaatcttcat

SEQ ID NO: 3732586 - DNA, 25 bp, Homo sapien
tcccagtggttgcttttgtccattc

SEQ ID NO: 3732587 - DNA, 25 bp, Homo sapien
caggagactcccagtggttgctttt

SEQ ID NO: 3732588 - DNA, 25 bp, Homo sapien
gagcaggagactcccagtggttgct

SEQ ID NO: 3732589 - DNA, 25 bp, Homo sapien
ctgagcaggagactcccagtggttg

SEQ ID NO: 3732590 - DNA, 25 bp, Homo sapien
tgagaacagcccctgatacttagga

SEQ ID NO: 3732591 - DNA, 25 bp, Homo sapien
ctaatgagaacagcccctgatactt

SEQ ID NO: 3732592 - DNA, 25 bp, Homo sapien
aatgagaacagcccctgatacttag

SEQ ID NO: 3732593 - DNA, 25 bp, Homo sapien
gagaacagcccctgatacttaggaa

SEQ ID NO: 3732594 - DNA, 25 bp, Homo sapien
gattctgtgttgtcaaacttggtcc

SEQ ID NO: 3732595 - DNA, 25 bp, Homo sapien
ttctgtgttgtcaaacttggtccca

SEQ ID NO: 3732596 - DNA, 25 bp, Homo sapien
tctgtgttgtcaaacttggtcccac

SEQ ID NO: 3732597 - DNA, 25 bp, Homo sapien
ttggattctgtgttgtcaaacttgg

SEQ ID NO: 3732598 - DNA, 25 bp, Homo sapien
gatgaacagcctggtgccaccaaag

SEQ ID NO: 3732599 - DNA, 25 bp, Homo sapien
ggaaaaaagcactctgtgggtggat

SEQ ID NO: 3732600 - DNA, 25 bp, Homo sapien
gaaaatttgctgacccacttgggtg

SEQ ID NO: 3732601 - DNA, 25 bp, Homo sapien
gaagcagagaagaagccgtgtacac

SEQ ID NO: 3732602 - DNA, 25 bp, Homo sapien
gccctgctgggacagcgtccctatg

SEQ ID NO: 3732603 - DNA, 25 bp, Homo sapien
cttgctgctcctgaaacgtacactt

SEQ ID NO: 3732604 - DNA, 25 bp, Homo sapien
tatgccatccgtccgccgctggaaa

SEQ ID NO: 3732605 - DNA, 25 bp, Homo sapien
gaaacgtacacttggccctcttcac

SEQ ID NO: 3732606 - DNA, 25 bp, Homo sapien
gccctgaaggcctgtgactgaatca

SEQ ID NO: 3732607 - DNA, 25 bp, Homo sapien
cctgaaggcctgtgactgaatcagc

SEQ ID NO: 3732608 - DNA, 25 bp, Homo sapien
actgaatcagcagtgaactgcacgc

SEQ ID NO: 3732609 - DNA, 25 bp, Homo sapien
gcagtgaactgcacgctggagtttt

SEQ ID NO: 3732610 - DNA, 25 bp, Homo sapien
gtgcaaagtccaagataaaccagag

SEQ ID NO: 3732611 - DNA, 25 bp, Homo sapien
tgttgagcttcttcgccagtatggg

SEQ ID NO: 3732612 - DNA, 25 bp, Homo sapien
gaaacctggctactaaatcactatg

SEQ ID NO: 3732613 - DNA, 25 bp, Homo sapien
tagagccagacaagcaagatcacaa

SEQ ID NO: 3732614 - DNA, 25 bp, Homo sapien
gacagctgagctgaacattaaactg

SEQ ID NO: 3732615 - DNA, 25 bp, Homo sapien
cagtgagggtatgtttagggccacg

SEQ ID NO: 3732616 - DNA, 25 bp, Homo sapien
ctgcagcagtgagggtatgtttagg

SEQ ID NO: 3732617 - DNA, 25 bp, Homo sapien
tgaacattaaactgaaattccttta

SEQ ID NO: 3732618 - DNA, 25 bp, Homo sapien
ctcaggaagcacggcctctggaagg

SEQ ID NO: 3732619 - DNA, 25 bp, Homo sapien
tcaggaagcacggcctctggaaggt

SEQ ID NO: 3732620 - DNA, 25 bp, Homo sapien
gaagcacggcctctggaaggtgccc

SEQ ID NO: 3732621 - DNA, 25 bp, Homo sapien
aggaagcacggcctctggaaggtgc

SEQ ID NO: 3732622 - DNA, 25 bp, Homo sapien
ttggccaggagatggaacctgacat

SEQ ID NO: 3732623 - DNA, 25 bp, Homo sapien
cttggccaggagatggaacctgaca

SEQ ID NO: 3732624 - DNA, 25 bp, Homo sapien
tggccaggagatggaacctgacata

SEQ ID NO: 3732625 - DNA, 25 bp, Homo sapien
ggccaggagatggaacctgacatac

SEQ ID NO: 3732626 - DNA, 25 bp, Homo sapien
acaccagctcgctctacggtatcaa

SEQ ID NO: 3732627 - DNA, 25 bp, Homo sapien
ccagctcgctctacggtatcaaaca

SEQ ID NO: 3732628 - DNA, 25 bp, Homo sapien
tctacggtatcaaacacctctccag

SEQ ID NO: 3732629 - DNA, 25 bp, Homo sapien
tcgctctacggtatcaaacacctct

SEQ ID NO: 3732630 - DNA, 25 bp, Homo sapien
tggagaagttgatggaagatgttgg

SEQ ID NO: 3732631 - DNA, 25 bp, Homo sapien
ttcctgcgtggtgccgattcacact

SEQ ID NO: 3732632 - DNA, 25 bp, Homo sapien
atggaagatgttggccccacattcc

SEQ ID NO: 3732633 - DNA, 25 bp, Homo sapien
tggaagtggagaagttgatggaaga

SEQ ID NO: 3732634 - DNA, 25 bp, Homo sapien
tttcattgctgtctctgatcttgtt

SEQ ID NO: 3732635 - DNA, 25 bp, Homo sapien
ctttcattgctgtctctgatcttgt

SEQ ID NO: 3732636 - DNA, 25 bp, Homo sapien
gctcagagcctgtaaacaagttaat

SEQ ID NO: 3732637 - DNA, 25 bp, Homo sapien
gctcgtatctgcataaagagacact

SEQ ID NO: 3732638 - DNA, 25 bp, Homo sapien
ggcagcagtgtgctaccttttggaa

SEQ ID NO: 3732639 - DNA, 25 bp, Homo sapien
tgggctgtgtggatttgactcccta

SEQ ID NO: 3732640 - DNA, 25 bp, Homo sapien
tgtcattagctcatcctcagtgatg

SEQ ID NO: 3732641 - DNA, 25 bp, Homo sapien
cttctgtggtatggatctctatgat

SEQ ID NO: 3732642 - DNA, 25 bp, Homo sapien
agctgtcattagctcatcctcagtg

SEQ ID NO: 3732643 - DNA, 25 bp, Homo sapien
ggtatggatctctatgatgatatcc

SEQ ID NO: 3732644 - DNA, 25 bp, Homo sapien
cacctatgggccaggagttttataa

SEQ ID NO: 3732645 - DNA, 25 bp, Homo sapien
tttacgtagctatttcctattaata

SEQ ID NO: 3732646 - DNA, 25 bp, Homo sapien
tccagaagaagtatatttacgtagc

SEQ ID NO: 3732647 - DNA, 25 bp, Homo sapien
cctattaatacctgccacctatggg

SEQ ID NO: 3732648 - DNA, 25 bp, Homo sapien
tgactttatcctccactttcggaag

SEQ ID NO: 3732649 - DNA, 25 bp, Homo sapien
tctaagccgcagatgctgtattgct

SEQ ID NO: 3732650 - DNA, 25 bp, Homo sapien
cacgggtactgcacttgagttgtca

SEQ ID NO: 3732651 - DNA, 25 bp, Homo sapien
caaaagagcgctggacttgcggcta

SEQ ID NO: 3732652 - DNA, 25 bp, Homo sapien
tgaaatataaagttccagagtcagg

SEQ ID NO: 3732653 - DNA, 25 bp, Homo sapien
ctggtgaaatataaagttccagagt

SEQ ID NO: 3732654 - DNA, 25 bp, Homo sapien
ggtgaaatataaagttccagagtca

SEQ ID NO: 3732655 - DNA, 25 bp, Homo sapien
gaaatataaagttccagagtcaggg

SEQ ID NO: 3732656 - DNA, 25 bp, Homo sapien
tattatgatgcatttgcccagcttt

SEQ ID NO: 3732657 - DNA, 25 bp, Homo sapien
atatgtaggcactcggtcccgggtg

SEQ ID NO: 3732658 - DNA, 25 bp, Homo sapien
attcatgttgtactgatatgtaggc

SEQ ID NO: 3732659 - DNA, 25 bp, Homo sapien
tgtttattatgatgcatttgcccag

SEQ ID NO: 3732660 - DNA, 25 bp, Homo sapien
aatcacgtcaaaacccaggcttcgg

SEQ ID NO: 3732661 - DNA, 25 bp, Homo sapien
taagcagatcttgcatcttggcaca

SEQ ID NO: 3732662 - DNA, 25 bp, Homo sapien
ttcggaagcacttgaagagcgcctc

SEQ ID NO: 3732663 - DNA, 25 bp, Homo sapien
gcatctttgtctgttccgtttcgaa

SEQ ID NO: 3732664 - DNA, 25 bp, Homo sapien
caggcggcatttgtatggtcctctt

SEQ ID NO: 3732665 - DNA, 25 bp, Homo sapien
catggcttaagaggatgcaggcgaa

SEQ ID NO: 3732666 - DNA, 25 bp, Homo sapien
cgaagcaggcggcatttgtatggtc

SEQ ID NO: 3732667 - DNA, 25 bp, Homo sapien
tcttctccatggcttaagaggatgc

SEQ ID NO: 3732668 - DNA, 25 bp, Homo sapien
tatcccccctaaagtgggctgtcaa

SEQ ID NO: 3732669 - DNA, 25 bp, Homo sapien
catctatcccccctaaagtgggctg

SEQ ID NO: 3732670 - DNA, 25 bp, Homo sapien
ttttgcatctatcccccctaaagtg

SEQ ID NO: 3732671 - DNA, 25 bp, Homo sapien
cctaaagtgggctgtcaaatccttt

SEQ ID NO: 3732672 - DNA, 25 bp, Homo sapien
tgcagtcttccgagatcacgccgct

SEQ ID NO: 3732673 - DNA, 25 bp, Homo sapien
gcactccagcctgggtgacagagca

SEQ ID NO: 3732674 - DNA, 25 bp, Homo sapien
gaggttgcagtcttccgagatcacg

SEQ ID NO: 3732675 - DNA, 25 bp, Homo sapien
cctgggtgacagagcaagattccat

SEQ ID NO: 3732676 - DNA, 25 bp, Homo sapien
taaaagtattgcaatgtcttaaaga

SEQ ID NO: 3732677 - DNA, 25 bp, Homo sapien
aaagtattgcaatgtcttaaagaaa

SEQ ID NO: 3732678 - DNA, 25 bp, Homo sapien
gaaaccttcataatttgtggctggg

SEQ ID NO: 3732679 - DNA, 25 bp, Homo sapien
agcaaataaaagtattgcaatgtct

SEQ ID NO: 3732680 - DNA, 25 bp, Homo sapien
cttccactgggatcttgtatcgagg

SEQ ID NO: 3732681 - DNA, 25 bp, Homo sapien
gaataggcgaagaggaagtcagctt

SEQ ID NO: 3732682 - DNA, 25 bp, Homo sapien
gagtcggcctggatgccatcatcaa

SEQ ID NO: 3732683 - DNA, 25 bp, Homo sapien
tctgtgtcattgatgggccccgagt

SEQ ID NO: 3732684 - DNA, 25 bp, Homo sapien
gagacgaccaaatcagctaattctg

SEQ ID NO: 3732685 - DNA, 25 bp, Homo sapien
gaaaggagacgaccaaatcagctaa

SEQ ID NO: 3732686 - DNA, 25 bp, Homo sapien
aagaaaggagacgaccaaatcagct

SEQ ID NO: 3732687 - DNA, 25 bp, Homo sapien
ggaaagaaaggagacgaccaaatca

SEQ ID NO: 3732688 - DNA, 25 bp, Homo sapien
agcagagggcttgcacaaaccagga

SEQ ID NO: 3732689 - DNA, 25 bp, Homo sapien
cctggtgaggatctgcatgatttcc

SEQ ID NO: 3732690 - DNA, 25 bp, Homo sapien
cctgggctcctccacgagtaatagc

SEQ ID NO: 3732691 - DNA, 25 bp, Homo sapien
caggtcttttccgtgctcctccagg

SEQ ID NO: 3732692 - DNA, 25 bp, Homo sapien
gaagtgtgggtcatcagactgagac

SEQ ID NO: 3732693 - DNA, 25 bp, Homo sapien
tgtgggtcatcagactgagactcaa

SEQ ID NO: 3732694 - DNA, 25 bp, Homo sapien
gagactcaaagtgcctggcaactct

SEQ ID NO: 3732695 - DNA, 25 bp, Homo sapien
ctcaaagtgcctggcaactctgtca

SEQ ID NO: 3732696 - DNA, 25 bp, Homo sapien
gttccttggtgagcatggagaccac

SEQ ID NO: 3732697 - DNA, 25 bp, Homo sapien
tccttggtgagcatggagaccacac

SEQ ID NO: 3732698 - DNA, 25 bp, Homo sapien
gagttccttggtgagcatggagacc

SEQ ID NO: 3732699 - DNA, 25 bp, Homo sapien
agagttccttggtgagcatggagac

SEQ ID NO: 3732700 - DNA, 25 bp, Homo sapien
gaaaatctgccctaagccaatgaaa

SEQ ID NO: 3732701 - DNA, 25 bp, Homo sapien
cagctagaatgtacccctgatatgg

SEQ ID NO: 3732702 - DNA, 25 bp, Homo sapien
cttatgttcacattatgggccaggc

SEQ ID NO: 3732703 - DNA, 25 bp, Homo sapien
attatcctcatagccctgggtgtgg

SEQ ID NO: 3732704 - DNA, 25 bp, Homo sapien
gaaatccagctttgagctcataaag

SEQ ID NO: 3732705 - DNA, 25 bp, Homo sapien
tcctttagggtaacttgtcctcaga

SEQ ID NO: 3732706 - DNA, 25 bp, Homo sapien
ggaatgtatattcaccaggaccgag

SEQ ID NO: 3732707 - DNA, 25 bp, Homo sapien
gccctgtctgatactcctgtgagga

SEQ ID NO: 3732708 - DNA, 25 bp, Homo sapien
aaagctggcaaaaatggtgtgcttc

SEQ ID NO: 3732709 - DNA, 25 bp, Homo sapien
tgtgcttcgaggaagtcaaaggcaa

SEQ ID NO: 3732710 - DNA, 25 bp, Homo sapien
gaagtcaaaggcaatcaatccttgg

SEQ ID NO: 3732711 - DNA, 25 bp, Homo sapien
aatcaatccttggtcaccagagtag

SEQ ID NO: 3732712 - DNA, 25 bp, Homo sapien
ctggccagaggttttctggaaaagg

SEQ ID NO: 3732713 - DNA, 25 bp, Homo sapien
ttccacagttgaaagcctgactgat

SEQ ID NO: 3732714 - DNA, 25 bp, Homo sapien
cattagaaggaatccaatgtgcttt

SEQ ID NO: 3732715 - DNA, 25 bp, Homo sapien
tttcacaattgtacatcagatcctg

SEQ ID NO: 3732716 - DNA, 25 bp, Homo sapien
gaaagcctgactgatctggccctgc

SEQ ID NO: 3732717 - DNA, 25 bp, Homo sapien
gaaagtgccttgtcccgaggattcc

SEQ ID NO: 3732718 - DNA, 25 bp, Homo sapien
gaagccaagaggtcgctggtccagt

SEQ ID NO: 3732719 - DNA, 25 bp, Homo sapien
cctgggtgaggattaagcacaaact

SEQ ID NO: 3732720 - DNA, 25 bp, Homo sapien
caaactctgcttgaaatctgaacca

SEQ ID NO: 3732721 - DNA, 25 bp, Homo sapien
gaaagatgccaagctattgaggccg

SEQ ID NO: 3732722 - DNA, 25 bp, Homo sapien
tatgttgaagaaccggtgcccttag

SEQ ID NO: 3732723 - DNA, 25 bp, Homo sapien
tacaatgcccatttacagacgagga

SEQ ID NO: 3732724 - DNA, 25 bp, Homo sapien
catgtttataggacttggccacgcc

SEQ ID NO: 3732725 - DNA, 25 bp, Homo sapien
ggagccaacgtagccgagaaagcat

SEQ ID NO: 3732726 - DNA, 25 bp, Homo sapien
agagagctggcggatggcaacacaa

SEQ ID NO: 3732727 - DNA, 25 bp, Homo sapien
cttactgctttgataagagagctgg

SEQ ID NO: 3732728 - DNA, 25 bp, Homo sapien
agagataagaacagggcaaagggca

SEQ ID NO: 3732729 - DNA, 25 bp, Homo sapien
ctggactcttctgaggtttgggttc

SEQ ID NO: 3732730 - DNA, 25 bp, Homo sapien
ggactcttctgaggtttgggttcca

SEQ ID NO: 3732731 - DNA, 25 bp, Homo sapien
gactcttctgaggtttgggttccat

SEQ ID NO: 3732732 - DNA, 25 bp, Homo sapien
tggactcttctgaggtttgggttcc

SEQ ID NO: 3732733 - DNA, 25 bp, Homo sapien
aaaaagatttctgcttctgcgatta

SEQ ID NO: 3732734 - DNA, 25 bp, Homo sapien
gcttctgcgattatacccctcgggt

SEQ ID NO: 3732735 - DNA, 25 bp, Homo sapien
ctggttagcttgaaggaaaccgtgg

SEQ ID NO: 3732736 - DNA, 25 bp, Homo sapien
accaagttctgtatcctggttagct

SEQ ID NO: 3732737 - DNA, 25 bp, Homo sapien
ttggacctccctattcaatgagact

SEQ ID NO: 3732738 - DNA, 25 bp, Homo sapien
taatgaatatttctagaagcccact

SEQ ID NO: 3732739 - DNA, 25 bp, Homo sapien
aatggcctctaagtgaaggcgagtg

SEQ ID NO: 3732740 - DNA, 25 bp, Homo sapien
catcatatctattagagtgaccagc

SEQ ID NO: 3732741 - DNA, 25 bp, Homo sapien
cactggatgggagtaagagcagatt

SEQ ID NO: 3732742 - DNA, 25 bp, Homo sapien
gaaagtcaatcaatcaaaacaggcc

SEQ ID NO: 3732743 - DNA, 25 bp, Homo sapien
taaaatttgcgatgtttggcagtca

SEQ ID NO: 3732744 - DNA, 25 bp, Homo sapien
tactagttctacactgagcactgct

SEQ ID NO: 3732745 - DNA, 25 bp, Homo sapien
cgttggctctctacgtgtgagcaaa

SEQ ID NO: 3732746 - DNA, 25 bp, Homo sapien
tttctagagtatgtcgttggctctc

SEQ ID NO: 3732747 - DNA, 25 bp, Homo sapien
ctagagtatgtcgttggctctctac

SEQ ID NO: 3732748 - DNA, 25 bp, Homo sapien
tttctgtttctagagtatgtcgttg

SEQ ID NO: 3732749 - DNA, 25 bp, Homo sapien
cacagccgagaccttcattcaaaca

SEQ ID NO: 3732750 - DNA, 25 bp, Homo sapien
gtttatctctggaaagaccttcaga

SEQ ID NO: 3732751 - DNA, 25 bp, Homo sapien
tgtatgattcttattcctccacagc

SEQ ID NO: 3732752 - DNA, 25 bp, Homo sapien
taaaagtgaacagaactcagtttgt

SEQ ID NO: 3732753 - DNA, 25 bp, Homo sapien
aacagctgagaaggtggtgatttaa

SEQ ID NO: 3732754 - DNA, 25 bp, Homo sapien
taataaagtaatcttgtttgcagac

SEQ ID NO: 3732755 - DNA, 25 bp, Homo sapien
gaacagctgagaaggtggtgattta

SEQ ID NO: 3732756 - DNA, 25 bp, Homo sapien
aaagtaatcttgtttgcagacttca

SEQ ID NO: 3732757 - DNA, 25 bp, Homo sapien
tgatcaatttcaatggaacctcggt

SEQ ID NO: 3732758 - DNA, 25 bp, Homo sapien
caatttcaatggaacctcggtgatg

SEQ ID NO: 3732759 - DNA, 25 bp, Homo sapien
tgacaggatgaaaaaccgctttttc

SEQ ID NO: 3732760 - DNA, 25 bp, Homo sapien
tttcaatggaacctcggtgatgatg

SEQ ID NO: 3732761 - DNA, 25 bp, Homo sapien
gactttatagtatttgttgttataa

SEQ ID NO: 3732762 - DNA, 25 bp, Homo sapien
aaagttttcctgcttggatacacac

SEQ ID NO: 3732763 - DNA, 25 bp, Homo sapien
tataaaagttttcctgcttggatac

SEQ ID NO: 3732764 - DNA, 25 bp, Homo sapien
tgtttgactttatagtatttgttgt

SEQ ID NO: 3732765 - DNA, 25 bp, Homo sapien
gacatgacctcatcagggtggcatt

SEQ ID NO: 3732766 - DNA, 25 bp, Homo sapien
tagtggttctgatggacatgacctc

SEQ ID NO: 3732767 - DNA, 25 bp, Homo sapien
gctacttatgccaacttctacactg

SEQ ID NO: 3732768 - DNA, 25 bp, Homo sapien
tgaggaagtattccctgttagtggt

SEQ ID NO: 3732769 - DNA, 25 bp, Homo sapien
atgacatgaaggagacccagtcttt

SEQ ID NO: 3732770 - DNA, 25 bp, Homo sapien
ttgcttttatatcctggcgaaatga

SEQ ID NO: 3732771 - DNA, 25 bp, Homo sapien
tgacatgaaggagacccagtcttta

SEQ ID NO: 3732772 - DNA, 25 bp, Homo sapien
tgtgttgcttttatatcctggcgaa

SEQ ID NO: 3732773 - DNA, 25 bp, Homo sapien
agggctggagtagaagagggttctt

SEQ ID NO: 3732774 - DNA, 25 bp, Homo sapien
ttttattacccaatgagagttcctc

SEQ ID NO: 3732775 - DNA, 25 bp, Homo sapien
tggtgagctggagccaacagcctct

SEQ ID NO: 3732776 - DNA, 25 bp, Homo sapien
ggagaccatttcttggtgagctgga

SEQ ID NO: 3732777 - DNA, 25 bp, Homo sapien
cttgtcttggagaccatttcttggt

SEQ ID NO: 3732778 - DNA, 25 bp, Homo sapien
cttggagaccatttcttggtgagct

SEQ ID NO: 3732779 - DNA, 25 bp, Homo sapien
ctttcctgttcctgctccatatttt

SEQ ID NO: 3732780 - DNA, 25 bp, Homo sapien
tttcctgttcctgctccatattttt

SEQ ID NO: 3732781 - DNA, 25 bp, Homo sapien
ttcctgttcctgctccatatttttc

SEQ ID NO: 3732782 - DNA, 25 bp, Homo sapien
cttgtaggtgagtttgcctaaatcc

SEQ ID NO: 3732783 - DNA, 25 bp, Homo sapien
tctaaaagaacacttcgaggagtaa

SEQ ID NO: 3732784 - DNA, 25 bp, Homo sapien
gtggcttctgataaatcttgtaggt

SEQ ID NO: 3732785 - DNA, 25 bp, Homo sapien
ccttcacatcttgagtggcttctga

SEQ ID NO: 3732786 - DNA, 25 bp, Homo sapien
cgccatgttcgtgctctcttcttca

SEQ ID NO: 3732787 - DNA, 25 bp, Homo sapien
catcgccatgttcgtgctctcttct

SEQ ID NO: 3732788 - DNA, 25 bp, Homo sapien
attggccccctgcaaatggtgctgt

SEQ ID NO: 3732789 - DNA, 25 bp, Homo sapien
tcttcttcacctcgagtgccatctt

SEQ ID NO: 3732790 - DNA, 25 bp, Homo sapien
tccattggctcataatgacactcaa

SEQ ID NO: 3732791 - DNA, 25 bp, Homo sapien
tggctcataatgacactcaattctt

SEQ ID NO: 3732792 - DNA, 25 bp, Homo sapien
caccagaatcactggaagcaatgat

SEQ ID NO: 3732793 - DNA, 25 bp, Homo sapien
taggattccattggctcataatgac

SEQ ID NO: 3732794 - DNA, 25 bp, Homo sapien
gactcatgggatgtctctttgaaaa

SEQ ID NO: 3732795 - DNA, 25 bp, Homo sapien
gggaaagacaccaatcaattcctga

SEQ ID NO: 3732796 - DNA, 25 bp, Homo sapien
ttgcaggtggaggtccccatcctgg

SEQ ID NO: 3732797 - DNA, 25 bp, Homo sapien
tgctatccacagactcatgggatgt

SEQ ID NO: 3732798 - DNA, 25 bp, Homo sapien
caattgcacaacagttagtgaggcc

SEQ ID NO: 3732799 - DNA, 25 bp, Homo sapien
acaattgcacaacagttagtgaggc

SEQ ID NO: 3732800 - DNA, 25 bp, Homo sapien
ctgtgagagcaagatagttgatgac

SEQ ID NO: 3732801 - DNA, 25 bp, Homo sapien
tgagagcaagatagttgatgacatc

SEQ ID NO: 3732802 - DNA, 25 bp, Homo sapien
agagcaagatagttgatgacatcag

SEQ ID NO: 3732803 - DNA, 25 bp, Homo sapien
cacttggctttcatcggggatatta

SEQ ID NO: 3732804 - DNA, 25 bp, Homo sapien
tctcctgattctaggtcacgtggca

SEQ ID NO: 3732805 - DNA, 25 bp, Homo sapien
gcagggcacgcagggtctcctgatt

SEQ ID NO: 3732806 - DNA, 25 bp, Homo sapien
tacaataggagcctaacccttcctc

SEQ ID NO: 3732807 - DNA, 25 bp, Homo sapien
gtagactatctccttctgtttagaa

SEQ ID NO: 3732808 - DNA, 25 bp, Homo sapien
actgccagaagatgatctccgtggc

SEQ ID NO: 3732809 - DNA, 25 bp, Homo sapien
ggggtttcaggtcattcactgccag

SEQ ID NO: 3732810 - DNA, 25 bp, Homo sapien
tatgcatcccaaacgtggggggcct

SEQ ID NO: 3732811 - DNA, 25 bp, Homo sapien
ccagaagatgatctccgtggcaaaa

SEQ ID NO: 3732812 - DNA, 25 bp, Homo sapien
ctccttctggatggaccgggtaaga

SEQ ID NO: 3732813 - DNA, 25 bp, Homo sapien
ctggatggaccgggtaagaaacagg

SEQ ID NO: 3732814 - DNA, 25 bp, Homo sapien
ttctggatggaccgggtaagaaaca

SEQ ID NO: 3732815 - DNA, 25 bp, Homo sapien
tccttctggatggaccgggtaagaa

SEQ ID NO: 3732816 - DNA, 25 bp, Homo sapien
cttctggtactgatttgccctgttc

SEQ ID NO: 3732817 - DNA, 25 bp, Homo sapien
ggaagaatgaggaaccttatttgta

SEQ ID NO: 3732818 - DNA, 25 bp, Homo sapien
ttctcagactccatctaagaccctg

SEQ ID NO: 3732819 - DNA, 25 bp, Homo sapien
tatttgcacttgatggtggaagaat

SEQ ID NO: 3732820 - DNA, 25 bp, Homo sapien
gctacttgatatgaaagaatcctga

SEQ ID NO: 3732821 - DNA, 25 bp, Homo sapien
tttggaatccctgcaccagtctgat

SEQ ID NO: 3732822 - DNA, 25 bp, Homo sapien
tttgctacatcatgccgatctgagg

SEQ ID NO: 3732823 - DNA, 25 bp, Homo sapien
gccagtcacctttgtaagcacgtta

SEQ ID NO: 3732824 - DNA, 25 bp, Homo sapien
ctctgaatttgggatcctgccgatg

SEQ ID NO: 3732825 - DNA, 25 bp, Homo sapien
gatcctgccgatggtaagctttaat

SEQ ID NO: 3732826 - DNA, 25 bp, Homo sapien
tgggatcctgccgatggtaagcttt

SEQ ID NO: 3732827 - DNA, 25 bp, Homo sapien
gaatttgggatcctgccgatggtaa

SEQ ID NO: 3732828 - DNA, 25 bp, Homo sapien
gctctttttaatggccggactcctc

SEQ ID NO: 3732829 - DNA, 25 bp, Homo sapien
gcactttggcattttgagggacaca

SEQ ID NO: 3732830 - DNA, 25 bp, Homo sapien
tatccagctgagaaggtgcagcact

SEQ ID NO: 3732831 - DNA, 25 bp, Homo sapien
gctctgttcagtctaggcttatcca

SEQ ID NO: 3732832 - DNA, 25 bp, Homo sapien
tgcaactgtatgtcccttaacaaag

SEQ ID NO: 3732833 - DNA, 25 bp, Homo sapien
tgtattacatgaaggactgacccaa

SEQ ID NO: 3732834 - DNA, 25 bp, Homo sapien
tgatcagctatcacatctcccttgg

SEQ ID NO: 3732835 - DNA, 25 bp, Homo sapien
gacaatagctgagataataaggcct

SEQ ID NO: 3732836 - DNA, 25 bp, Homo sapien
gaggtgtctgggaaggaggtgtttg

SEQ ID NO: 3732837 - DNA, 25 bp, Homo sapien
agaggtgtttgggaaggaggtgttg

SEQ ID NO: 3732838 - DNA, 25 bp, Homo sapien
aggaggtgttgggaaggaggtgtct

SEQ ID NO: 3732839 - DNA, 25 bp, Homo sapien
aggaggtgttgggaaggaggtgttg

SEQ ID NO: 3732840 - DNA, 25 bp, Homo sapien
ggcggtgttgggaaggaggtgtctg

SEQ ID NO: 3732841 - DNA, 25 bp, Homo sapien
aggaggtgttgggaaggcggtgttg

SEQ ID NO: 3732842 - DNA, 25 bp, Homo sapien
gaaggaggtgttgggaaggatgttg

SEQ ID NO: 3732843 - DNA, 25 bp, Homo sapien
agaggtgtttgggaaggaggtgttg

SEQ ID NO: 3732844 - DNA, 25 bp, Homo sapien
aggaggtgttgggaaggaggtgttg

SEQ ID NO: 3732845 - DNA, 25 bp, Homo sapien
caagctgatcttggctgcatgtgat

SEQ ID NO: 3732846 - DNA, 25 bp, Homo sapien
tgtgatgtaaaactgctgcgacttc

SEQ ID NO: 3732847 - DNA, 25 bp, Homo sapien
tctgtctcagcactctggcctgtgg

SEQ ID NO: 3732848 - DNA, 25 bp, Homo sapien
aaaatatgcctttcatcgctccggg

SEQ ID NO: 3732849 - DNA, 25 bp, Homo sapien
gaccacagctcgacatgggatttgt

SEQ ID NO: 3732850 - DNA, 25 bp, Homo sapien
tgctaactccttcgtgagaactcca

SEQ ID NO: 3732851 - DNA, 25 bp, Homo sapien
gatccaaaagggcatgcgttctcac

SEQ ID NO: 3732852 - DNA, 25 bp, Homo sapien
agcaggcatcttacacggcaggagc

SEQ ID NO: 3732853 - DNA, 25 bp, Homo sapien
tagccgtgcagcagaagagggctct

SEQ ID NO: 3732854 - DNA, 25 bp, Homo sapien
tgagacaaatggcttgatgactggg

SEQ ID NO: 3732855 - DNA, 25 bp, Homo sapien
agaaagagccttgttggacccctgg

SEQ ID NO: 3732856 - DNA, 25 bp, Homo sapien
aaatggcttgatgactgggctttgg

SEQ ID NO: 3732857 - DNA, 25 bp, Homo sapien
aggacagctgagccaatcactttgt

SEQ ID NO: 3732858 - DNA, 25 bp, Homo sapien
aatcactttgtagtccccagcccca

SEQ ID NO: 3732859 - DNA, 25 bp, Homo sapien
gatttgagccgaggatgtgatggcc

SEQ ID NO: 3732860 - DNA, 25 bp, Homo sapien
cagatttgagccgaggatgtgatgg

SEQ ID NO: 3732861 - DNA, 25 bp, Homo sapien
caaggcaactgagaactctaaatca

SEQ ID NO: 3732862 - DNA, 25 bp, Homo sapien
aagcaaatggcaatacctccaccgc

SEQ ID NO: 3732863 - DNA, 25 bp, Homo sapien
caccaaggcaactgagaactctaaa

SEQ ID NO: 3732864 - DNA, 25 bp, Homo sapien
gaacatacttgagagccaagaggca

SEQ ID NO: 3732865 - DNA, 25 bp, Homo sapien
aaggcacagcatttatactgagaag

SEQ ID NO: 3732866 - DNA, 25 bp, Homo sapien
atgcactcgaggcagaaactcccac

SEQ ID NO: 3732867 - DNA, 25 bp, Homo sapien
taacggtagcagcttcacctgatgg

SEQ ID NO: 3732868 - DNA, 25 bp, Homo sapien
ttaagtgattccctcgtaccatgca

SEQ ID NO: 3732869 - DNA, 25 bp, Homo sapien
tgatggtccctgagtctttaagtga

SEQ ID NO: 3732870 - DNA, 25 bp, Homo sapien
aatcgctgctacctaatgacacaaa

SEQ ID NO: 3732871 - DNA, 25 bp, Homo sapien
gctgctacctaatgacacaaatgtg

SEQ ID NO: 3732872 - DNA, 25 bp, Homo sapien
taatcgctgctacctaatgacacaa

SEQ ID NO: 3732873 - DNA, 25 bp, Homo sapien
tcgctgctacctaatgacacaaatg

SEQ ID NO: 3732874 - DNA, 25 bp, Homo sapien
tctgtaaggctcctagctgctaatg

SEQ ID NO: 3732875 - DNA, 25 bp, Homo sapien
cactaggctgtaagctcgcagaaag

SEQ ID NO: 3732876 - DNA, 25 bp, Homo sapien
aagtctgtatgtttccacgtctagg

SEQ ID NO: 3732877 - DNA, 25 bp, Homo sapien
cattagaaggtgaggtttactgacc

SEQ ID NO: 3732878 - DNA, 25 bp, Homo sapien
cacattgggaattagcggactttcg

SEQ ID NO: 3732879 - DNA, 25 bp, Homo sapien
tctcgctgggagagacgaaacgttc

SEQ ID NO: 3732880 - DNA, 25 bp, Homo sapien
gaataaggccttagggacagcgtcc

SEQ ID NO: 3732881 - DNA, 25 bp, Homo sapien
caaaagtccaaatcggcgcagttcc

SEQ ID NO: 3732882 - DNA, 25 bp, Homo sapien
gaaactcgggtactgacaagtcctg

SEQ ID NO: 3732883 - DNA, 25 bp, Homo sapien
cagggcgtactctagcgaggtctgc

SEQ ID NO: 3732884 - DNA, 25 bp, Homo sapien
ttctcctgctgggtaacggcgtcga

SEQ ID NO: 3732885 - DNA, 25 bp, Homo sapien
tctgcagatactggtagaccaggct

SEQ ID NO: 3732886 - DNA, 25 bp, Homo sapien
gcatggagatcaggcaataggtgaa

SEQ ID NO: 3732887 - DNA, 25 bp, Homo sapien
caaggacgactatttttccacatag

SEQ ID NO: 3732888 - DNA, 25 bp, Homo sapien
ccttgtagacagaaataggttcttc

SEQ ID NO: 3732889 - DNA, 25 bp, Homo sapien
gaatacagtttatgcagcagtaggt

SEQ ID NO: 3732890 - DNA, 25 bp, Homo sapien
tagaatccctgaagccttgccaaat

SEQ ID NO: 3732891 - DNA, 25 bp, Homo sapien
cactcttccagtgactatgccagga

SEQ ID NO: 3732892 - DNA, 25 bp, Homo sapien
tatgagctaatgagtcagccactct

SEQ ID NO: 3732893 - DNA, 25 bp, Homo sapien
ccaggacagtctgttagaaactaat

SEQ ID NO: 3732894 - DNA, 25 bp, Homo sapien
acccagaagtagcacagatagattc

SEQ ID NO: 3732895 - DNA, 25 bp, Homo sapien
gaaatcaattagaggcataagactg

SEQ ID NO: 3732896 - DNA, 25 bp, Homo sapien
gtccagagactcaattataaaacta

SEQ ID NO: 3732897 - DNA, 25 bp, Homo sapien
gagattcaagatcaggtagccacca

SEQ ID NO: 3732898 - DNA, 25 bp, Homo sapien
gggcacatgtgcacagtattctctg

SEQ ID NO: 3732899 - DNA, 25 bp, Homo sapien
taggttgcaggagcacacaaaagca

SEQ ID NO: 3732900 - DNA, 25 bp, Homo sapien
tactagttagccatgtagctccaca

SEQ ID NO: 3732901 - DNA, 25 bp, Homo sapien
tatagtagattcaccagaaagggca

SEQ ID NO: 3732902 - DNA, 25 bp, Homo sapien
gaacccagagttcacatatcgtcac

SEQ ID NO: 3732903 - DNA, 25 bp, Homo sapien
tttacagaaggagcgagagctgatg

SEQ ID NO: 3732904 - DNA, 25 bp, Homo sapien
tacaggactataacagaacccagag

SEQ ID NO: 3732905 - DNA, 25 bp, Homo sapien
tgaattaagagggttgatgcctact

SEQ ID NO: 3732906 - DNA, 25 bp, Homo sapien
tattgactaccaaagtagtagagat

SEQ ID NO: 3732907 - DNA, 25 bp, Homo sapien
ctatgcctgcttttgggaggtattt

SEQ ID NO: 3732908 - DNA, 25 bp, Homo sapien
gaaattcagagttgactatgcctgc

SEQ ID NO: 3732909 - DNA, 25 bp, Homo sapien
ttccacctataataagcccctttga

SEQ ID NO: 3732910 - DNA, 25 bp, Homo sapien
taaatatttaagtttgaatatcatc

SEQ ID NO: 3732911 - DNA, 25 bp, Homo sapien
gaaacttctagttcttgccaaaggc

SEQ ID NO: 3732912 - DNA, 25 bp, Homo sapien
caagtatgactagagttggccagca

SEQ ID NO: 3732913 - DNA, 25 bp, Homo sapien
ggtctactgttactttgccaggaaa

SEQ ID NO: 3732914 - DNA, 25 bp, Homo sapien
ggaaacttagccgagtgaacaccaa

SEQ ID NO: 3732915 - DNA, 25 bp, Homo sapien
ttactgtaaaacacgttatctatcg

SEQ ID NO: 3732916 - DNA, 25 bp, Homo sapien
cacgttatctatcgtaatcagaagc

SEQ ID NO: 3732917 - DNA, 25 bp, Homo sapien
gtaaaacacgttatctatcgtaatc

SEQ ID NO: 3732918 - DNA, 25 bp, Homo sapien
tatctatcgtaatcagaagcaagtt

SEQ ID NO: 3732919 - DNA, 25 bp, Homo sapien
cctgtggagaattaaaagttgattc

SEQ ID NO: 3732920 - DNA, 25 bp, Homo sapien
caccctgtggagaattaaaagttga

SEQ ID NO: 3732921 - DNA, 25 bp, Homo sapien
gctacaccctgtggagaattaaaag

SEQ ID NO: 3732922 - DNA, 25 bp, Homo sapien
tatggctacaccctgtggagaatta

SEQ ID NO: 3732923 - DNA, 25 bp, Homo sapien
tcagtgtctgccacatatatgatat

SEQ ID NO: 3732924 - DNA, 25 bp, Homo sapien
ttcagtgtctgccacatatatgata

SEQ ID NO: 3732925 - DNA, 25 bp, Homo sapien
cagtgtctgccacatatatgatatt

SEQ ID NO: 3732926 - DNA, 25 bp, Homo sapien
agtgtctgccacatatatgatatta

SEQ ID NO: 3732927 - DNA, 25 bp, Homo sapien
ccttgaattccaataccagctacag

SEQ ID NO: 3732928 - DNA, 25 bp, Homo sapien
catcccaaggggaactaatgggttg

SEQ ID NO: 3732929 - DNA, 25 bp, Homo sapien
taccttgaattccaataccagctac

SEQ ID NO: 3732930 - DNA, 25 bp, Homo sapien
tgaattccaataccagctacagtgc

SEQ ID NO: 3732931 - DNA, 25 bp, Homo sapien
cctttcagtataagaaattcagaac

SEQ ID NO: 3732932 - DNA, 25 bp, Homo sapien
tccaaatgaccacctcaagaatatt

SEQ ID NO: 3732933 - DNA, 25 bp, Homo sapien
ggagggtgcatctaatatataattc

SEQ ID NO: 3732934 - DNA, 25 bp, Homo sapien
caattaacaaactctgaggcatagg

SEQ ID NO: 3732935 - DNA, 25 bp, Homo sapien
tcattcattatcaatgtctacacaa

SEQ ID NO: 3732936 - DNA, 25 bp, Homo sapien
attcattatcaatgtctacacaatt

SEQ ID NO: 3732937 - DNA, 25 bp, Homo sapien
cattcattatcaatgtctacacaat

SEQ ID NO: 3732938 - DNA, 25 bp, Homo sapien
ttagctctggtaacaagtactcaag

SEQ ID NO: 3732939 - DNA, 25 bp, Homo sapien
tgcctctgacccatgcagacttagc

SEQ ID NO: 3732940 - DNA, 25 bp, Homo sapien
taacaagtactcaagtgcatttctg

SEQ ID NO: 3732941 - DNA, 25 bp, Homo sapien
tgcagacttagctctggtaacaagt

SEQ ID NO: 3732942 - DNA, 25 bp, Homo sapien
gctatccataaaatgtcacctcttt

SEQ ID NO: 3732943 - DNA, 25 bp, Homo sapien
ggctatccataaaatgtcacctctt

SEQ ID NO: 3732944 - DNA, 25 bp, Homo sapien
cataaaatgtcacctctttggacct

SEQ ID NO: 3732945 - DNA, 25 bp, Homo sapien
atccataaaatgtcacctctttgga

SEQ ID NO: 3732946 - DNA, 25 bp, Homo sapien
cccatatctgatgagtccctgccat

SEQ ID NO: 3732947 - DNA, 25 bp, Homo sapien
agtttgccagagtccagcaggagtg

SEQ ID NO: 3732948 - DNA, 25 bp, Homo sapien
caggagtgcccatatctgatgagtc

SEQ ID NO: 3732949 - DNA, 25 bp, Homo sapien
cagagtccagcaggagtgcccatat

SEQ ID NO: 3732950 - DNA, 25 bp, Homo sapien
caaaacctgccttgtgaggataggc

SEQ ID NO: 3732951 - DNA, 25 bp, Homo sapien
ccacttccagcaaacctaaggcagg

SEQ ID NO: 3732952 - DNA, 25 bp, Homo sapien
tcctacgaggtgcttcactgctcca

SEQ ID NO: 3732953 - DNA, 25 bp, Homo sapien
gaaacggttctcactgtactgctct

SEQ ID NO: 3732954 - DNA, 25 bp, Homo sapien
gattgtaggagtctgcaacataaag

SEQ ID NO: 3732955 - DNA, 25 bp, Homo sapien
aagctttgcattgattcctactcca

SEQ ID NO: 3732956 - DNA, 25 bp, Homo sapien
cattgattcctactccatcaacatc

SEQ ID NO: 3732957 - DNA, 25 bp, Homo sapien
catgttactccaagggggtgttgaa

SEQ ID NO: 3732958 - DNA, 25 bp, Homo sapien
tccagttcctgctaatgttgtacag

SEQ ID NO: 3732959 - DNA, 25 bp, Homo sapien
gatgattattggtgtctgctacata

SEQ ID NO: 3732960 - DNA, 25 bp, Homo sapien
ctggtaacattatttgtgtctccag

SEQ ID NO: 3732961 - DNA, 25 bp, Homo sapien
tacacaagcctcctggttcattaaa

SEQ ID NO: 3732962 - DNA, 25 bp, Homo sapien
cagttagctttgatcctgatgggag

SEQ ID NO: 3732963 - DNA, 25 bp, Homo sapien
cagcaactggatactccttcagtta

SEQ ID NO: 3732964 - DNA, 25 bp, Homo sapien
taatctgagtttgaactgaagagtc

SEQ ID NO: 3732965 - DNA, 25 bp, Homo sapien
ttttctactaggaacgggccatcta

SEQ ID NO: 3732966 - DNA, 25 bp, Homo sapien
tacaatggcttcaagtgataagcaa

SEQ ID NO: 3732967 - DNA, 25 bp, Homo sapien
aattgttggttgactggaaatgttc

SEQ ID NO: 3732968 - DNA, 25 bp, Homo sapien
tgttctctatatctccagctgctat

SEQ ID NO: 3732969 - DNA, 25 bp, Homo sapien
caatcatcaggaatttgtagtgaaa

SEQ ID NO: 3732970 - DNA, 25 bp, Homo sapien
tacagtaataaagaaacacactgac

SEQ ID NO: 3732971 - DNA, 25 bp, Homo sapien
ctacagtaataaagaaacacactga

SEQ ID NO: 3732972 - DNA, 25 bp, Homo sapien
aattgccttcatcatacaagcactg

SEQ ID NO: 3732973 - DNA, 25 bp, Homo sapien
gagctatgcaaccttgctgtgtatc

SEQ ID NO: 3732974 - DNA, 25 bp, Homo sapien
tgtgtatccgttatttgtaaaggct

SEQ ID NO: 3732975 - DNA, 25 bp, Homo sapien
tgactgaacaaaattgccttcatca

SEQ ID NO: 3732976 - DNA, 25 bp, Homo sapien
tctgaactgagcaatgggcatcttg

SEQ ID NO: 3732977 - DNA, 25 bp, Homo sapien
taactaaggccagtagggcaaggtg

SEQ ID NO: 3732978 - DNA, 25 bp, Homo sapien
gactcagctagtatcagccaaagca

SEQ ID NO: 3732979 - DNA, 25 bp, Homo sapien
ggcatcttggtatccagaggcagaa

SEQ ID NO: 3732980 - DNA, 25 bp, Homo sapien
acagaaaatgattgggccaaaatat

SEQ ID NO: 3732981 - DNA, 25 bp, Homo sapien
aacagaaaatgattgggccaaaata

SEQ ID NO: 3732982 - DNA, 25 bp, Homo sapien
cacattactggcatttcaagtgagg

SEQ ID NO: 3732983 - DNA, 25 bp, Homo sapien
cgaaatcacgtacttaagagaaccg

SEQ ID NO: 3732984 - DNA, 25 bp, Homo sapien
cagactggcagtgggtaagaataag

SEQ ID NO: 3732985 - DNA, 25 bp, Homo sapien
gaaccggtagatcaaaggactccaa

SEQ ID NO: 3732986 - DNA, 25 bp, Homo sapien
tactttaagaggcaatacagcagag

SEQ ID NO: 3732987 - DNA, 25 bp, Homo sapien
tacagcagagagttgaacagactcc

SEQ ID NO: 3732988 - DNA, 25 bp, Homo sapien
agttaggaatgaggagacccgtgcc

SEQ ID NO: 3732989 - DNA, 25 bp, Homo sapien
tcaggcatcgagcactattccggtt

SEQ ID NO: 3732990 - DNA, 25 bp, Homo sapien
ccagagctcacttggactaatattt

SEQ ID NO: 3732991 - DNA, 25 bp, Homo sapien
gacaaacaattatagactgttccaa

SEQ ID NO: 3732992 - DNA, 25 bp, Homo sapien
cagcactgttgagaactaacactgg

SEQ ID NO: 3732993 - DNA, 25 bp, Homo sapien
gtttgagatagtcctgtgcaaaagg

SEQ ID NO: 3732994 - DNA, 25 bp, Homo sapien
tgctggaataggttgaccatggtga

SEQ ID NO: 3732995 - DNA, 25 bp, Homo sapien
catggtgaaaactttactgtaacag

SEQ ID NO: 3732996 - DNA, 25 bp, Homo sapien
caaaaagtacctaatgctggaatag

SEQ ID NO: 3732997 - DNA, 25 bp, Homo sapien
tacctaatgctaggctgggtacggt

SEQ ID NO: 3732998 - DNA, 25 bp, Homo sapien
ggaattcataccatgccctgacagt

SEQ ID NO: 3732999 - DNA, 25 bp, Homo sapien
ggtacacttgaaagcgacatgccag

SEQ ID NO: 3733000 - DNA, 25 bp, Homo sapien
gaacctccagagctcatatgtaaag

SEQ ID NO: 3733001 - DNA, 25 bp, Homo sapien
taatagtatttagtgcgctgggcgc

SEQ ID NO: 3733002 - DNA, 25 bp, Homo sapien
caaatgttcccagtatcgtttattg

SEQ ID NO: 3733003 - DNA, 25 bp, Homo sapien
gctcaagtaaatcacagcttacagg

SEQ ID NO: 3733004 - DNA, 25 bp, Homo sapien
ttgatcttgaggtatctgcttgcag

SEQ ID NO: 3733005 - DNA, 25 bp, Homo sapien
tacctcatgatatacttagaaagca

SEQ ID NO: 3733006 - DNA, 25 bp, Homo sapien
ggaaagtaactagccagcaccgaca

SEQ ID NO: 3733007 - DNA, 25 bp, Homo sapien
tacatgctgatgaaggttgcctcac

SEQ ID NO: 3733008 - DNA, 25 bp, Homo sapien
ggaaaactgttaagactgaggtcac

SEQ ID NO: 3733009 - DNA, 25 bp, Homo sapien
tgctccttagcagctggcaagataa

SEQ ID NO: 3733010 - DNA, 25 bp, Homo sapien
cagcaaaaacacccaagggtatcct

SEQ ID NO: 3733011 - DNA, 25 bp, Homo sapien
ccacctacaacactgaaccacagca

SEQ ID NO: 3733012 - DNA, 25 bp, Homo sapien
aacagcaaggtgcaagggaaccaca

SEQ ID NO: 3733013 - DNA, 25 bp, Homo sapien
cttccacctacaacactgaaccaca

SEQ ID NO: 3733014 - DNA, 25 bp, Homo sapien
tttacttccaacaggacatccttgt

SEQ ID NO: 3733015 - DNA, 25 bp, Homo sapien
atggtcttccgggaactttccatat

SEQ ID NO: 3733016 - DNA, 25 bp, Homo sapien
tgatcagagtgatggatggtcttcc

SEQ ID NO: 3733017 - DNA, 25 bp, Homo sapien
atttacttccaacaggacatccttg

SEQ ID NO: 3733018 - DNA, 25 bp, Homo sapien
ctaggaggacaccagagggcaaggg

SEQ ID NO: 3733019 - DNA, 25 bp, Homo sapien
accagagggcaagggcacctcctgc

SEQ ID NO: 3733020 - DNA, 25 bp, Homo sapien
gacaccagagggcaagggcacctcc

SEQ ID NO: 3733021 - DNA, 25 bp, Homo sapien
agagggcaagggcacctcctgctgt

SEQ ID NO: 3733022 - DNA, 25 bp, Homo sapien
aaaagtctctatgcgttgtagcacc

SEQ ID NO: 3733023 - DNA, 25 bp, Homo sapien
ctgaaaagtctctatgcgttgtagc

SEQ ID NO: 3733024 - DNA, 25 bp, Homo sapien
gtctctatgcgttgtagcacccttc

SEQ ID NO: 3733025 - DNA, 25 bp, Homo sapien
aagtctctatgcgttgtagcaccct

SEQ ID NO: 3733026 - DNA, 25 bp, Homo sapien
gatttctgggaaaatccctgattca

SEQ ID NO: 3733027 - DNA, 25 bp, Homo sapien
gagatttctgggaaaatccctgatt

SEQ ID NO: 3733028 - DNA, 25 bp, Homo sapien
tgagatttctgggaaaatccctgat

SEQ ID NO: 3733029 - DNA, 25 bp, Homo sapien
cctgagatttctgggaaaatccctg

SEQ ID NO: 3733030 - DNA, 25 bp, Homo sapien
ctcacgttgcattattaccgattcc

SEQ ID NO: 3733031 - DNA, 25 bp, Homo sapien
cattattaccgattcctctgctgta

SEQ ID NO: 3733032 - DNA, 25 bp, Homo sapien
aaattacattgctgtgtccatagtg

SEQ ID NO: 3733033 - DNA, 25 bp, Homo sapien
aaaattacattgctgtgtccatagt

SEQ ID NO: 3733034 - DNA, 25 bp, Homo sapien
ccttctcgtggctgtagagcgaatt

SEQ ID NO: 3733035 - DNA, 25 bp, Homo sapien
tgtaagagaatatcgtcgaagcagc

SEQ ID NO: 3733036 - DNA, 25 bp, Homo sapien
agccttccttctcgtggctgtagag

SEQ ID NO: 3733037 - DNA, 25 bp, Homo sapien
gccgtgacaatggatagccttcctt

SEQ ID NO: 3733038 - DNA, 25 bp, Homo sapien
ggacaactcctacatgggaccctct

SEQ ID NO: 3733039 - DNA, 25 bp, Homo sapien
cagttccgagtccaagccgtcataa

SEQ ID NO: 3733040 - DNA, 25 bp, Homo sapien
cctcttgtaggaaagctggtctcca

SEQ ID NO: 3733041 - DNA, 25 bp, Homo sapien
tctgagaccctgatttggaggaatt

SEQ ID NO: 3733042 - DNA, 25 bp, Homo sapien
tttcaaaatctctaggttctgctgg

SEQ ID NO: 3733043 - DNA, 25 bp, Homo sapien
tacagatttcaaaatctctaggttc

SEQ ID NO: 3733044 - DNA, 25 bp, Homo sapien
attttgtcatagcaaatattgactg

SEQ ID NO: 3733045 - DNA, 25 bp, Homo sapien
gatttcaaaatctctaggttctgct

SEQ ID NO: 3733046 - DNA, 25 bp, Homo sapien
ccaaaaagtatttgtcatgcgggtt

SEQ ID NO: 3733047 - DNA, 25 bp, Homo sapien
aaaaagtatttgtcatgcgggttct

SEQ ID NO: 3733048 - DNA, 25 bp, Homo sapien
aaagtatttgtcatgcgggttcttt

SEQ ID NO: 3733049 - DNA, 25 bp, Homo sapien
tcaaggaaccaaaaagtatttgtca

SEQ ID NO: 3733050 - DNA, 25 bp, Homo sapien
ttgttttggtatctgctgtggctaa

SEQ ID NO: 3733051 - DNA, 25 bp, Homo sapien
caggccctcaaaattcagtcttgtt

SEQ ID NO: 3733052 - DNA, 25 bp, Homo sapien
cagcaacaggccctcaaaattcagt

SEQ ID NO: 3733053 - DNA, 25 bp, Homo sapien
atatttccatgacacccatgtgagc

SEQ ID NO: 3733054 - DNA, 25 bp, Homo sapien
ttaacagtctgccagaaacgggagc

SEQ ID NO: 3733055 - DNA, 25 bp, Homo sapien
ttgggatgccccattgcaataggaa

SEQ ID NO: 3733056 - DNA, 25 bp, Homo sapien
gatttctgaaaaggccctgcaagag

SEQ ID NO: 3733057 - DNA, 25 bp, Homo sapien
tgcaagagcatcagccttaacagtc

SEQ ID NO: 3733058 - DNA, 25 bp, Homo sapien
cagaaggaggattgcattggctcag

SEQ ID NO: 3733059 - DNA, 25 bp, Homo sapien
ggattgcattggctcagtgctttcc

SEQ ID NO: 3733060 - DNA, 25 bp, Homo sapien
cctttcaggtctgagtctctccgtg

SEQ ID NO: 3733061 - DNA, 25 bp, Homo sapien
ggattccaggggcacccacggagct

SEQ ID NO: 3733062 - DNA, 25 bp, Homo sapien
gacagaccgtccacttctaaggaaa

SEQ ID NO: 3733063 - DNA, 25 bp, Homo sapien
tagcctaatctagtcatcagctttg

SEQ ID NO: 3733064 - DNA, 25 bp, Homo sapien
cctgggaaccctatttgctcagtta

SEQ ID NO: 3733065 - DNA, 25 bp, Homo sapien
atcatccctgatttgccttgaaagc

SEQ ID NO: 3733066 - DNA, 25 bp, Homo sapien
tgccaggatcgtctctgagcacagt

SEQ ID NO: 3733067 - DNA, 25 bp, Homo sapien
tagtactctggcgttttcactgcca

SEQ ID NO: 3733068 - DNA, 25 bp, Homo sapien
gtctctgagcacagttcagcttcct

SEQ ID NO: 3733069 - DNA, 25 bp, Homo sapien
tactctggcgttttcactgccagga

SEQ ID NO: 3733070 - DNA, 25 bp, Homo sapien
acctggaccttcctgtaatacagtg

SEQ ID NO: 3733071 - DNA, 25 bp, Homo sapien
gtaatacagtgttgacaccagaatc

SEQ ID NO: 3733072 - DNA, 25 bp, Homo sapien
cactgtaatacataggccccaccat

SEQ ID NO: 3733073 - DNA, 25 bp, Homo sapien
tctattaggaatatcctccttttca

SEQ ID NO: 3733074 - DNA, 25 bp, Homo sapien
gacagaaccttctcctttaagcact

SEQ ID NO: 3733075 - DNA, 25 bp, Homo sapien
cttgagagctgtgatcacccaacca

SEQ ID NO: 3733076 - DNA, 25 bp, Homo sapien
cccagacagaaccttctcctttaag

SEQ ID NO: 3733077 - DNA, 25 bp, Homo sapien
tgagagctgtgatcacccaaccacc

SEQ ID NO: 3733078 - DNA, 25 bp, Homo sapien
ggagccacgcatgccacaattatgg

SEQ ID NO: 3733079 - DNA, 25 bp, Homo sapien
tgctctcatcattgtggttgggcag

SEQ ID NO: 3733080 - DNA, 25 bp, Homo sapien
gaagccgcggcattgcattccaatt

SEQ ID NO: 3733081 - DNA, 25 bp, Homo sapien
caatttctgttttgtgaccacatct

SEQ ID NO: 3733082 - DNA, 25 bp, Homo sapien
cccacccaaatgtcgaatgcagctt

SEQ ID NO: 3733083 - DNA, 25 bp, Homo sapien
tgggtttcctcactcgacagcttgc

SEQ ID NO: 3733084 - DNA, 25 bp, Homo sapien
agcttgcatccactcccagatttct

SEQ ID NO: 3733085 - DNA, 25 bp, Homo sapien
aagacaccccgctacaagactgtgg

SEQ ID NO: 3733086 - DNA, 25 bp, Homo sapien
aaaggctatgaaaccacatgggtca

SEQ ID NO: 3733087 - DNA, 25 bp, Homo sapien
agagccagagggacaactccaagat

SEQ ID NO: 3733088 - DNA, 25 bp, Homo sapien
ggctatgaaaccacatgggtcagaa

SEQ ID NO: 3733089 - DNA, 25 bp, Homo sapien
agagggacaactccaagattccaga

SEQ ID NO: 3733090 - DNA, 25 bp, Homo sapien
tcttcctcgcccctggtgagccttg

SEQ ID NO: 3733091 - DNA, 25 bp, Homo sapien
acatttgtgccgcattcttcctcgc

SEQ ID NO: 3733092 - DNA, 25 bp, Homo sapien
tgttctcagtaacatttgtgccgca

SEQ ID NO: 3733093 - DNA, 25 bp, Homo sapien
ccttgcaacacggagactggtgact

SEQ ID NO: 3733094 - DNA, 25 bp, Homo sapien
tatagctgtaccaaagtgtggccac

SEQ ID NO: 3733095 - DNA, 25 bp, Homo sapien
tagaagacacgaatgtcagccaccg

SEQ ID NO: 3733096 - DNA, 25 bp, Homo sapien
tatatgtgatggtgacttggaggaa

SEQ ID NO: 3733097 - DNA, 25 bp, Homo sapien
tcagccaccggcctttctgtatatg

SEQ ID NO: 3733098 - DNA, 25 bp, Homo sapien
gaagcatctcgggtgggtcatgtgg

SEQ ID NO: 3733099 - DNA, 25 bp, Homo sapien
tcatcagcacagctggcgtgaagca

SEQ ID NO: 3733100 - DNA, 25 bp, Homo sapien
taccagtccctgtagcctctttctt

SEQ ID NO: 3733101 - DNA, 25 bp, Homo sapien
agtccctgtagcctctttcttcatg

SEQ ID NO: 3733102 - DNA, 25 bp, Homo sapien
tcaagttgcatattacattcgcatg

SEQ ID NO: 3733103 - DNA, 25 bp, Homo sapien
gctgcgactataagcaatgtctgtg

SEQ ID NO: 3733104 - DNA, 25 bp, Homo sapien
ctctttataagaaaagctgcgacta

SEQ ID NO: 3733105 - DNA, 25 bp, Homo sapien
cattcgcatgcatgttgtagctctt

SEQ ID NO: 3733106 - DNA, 25 bp, Homo sapien
ccttctgagcatgacagccgcgtta

SEQ ID NO: 3733107 - DNA, 25 bp, Homo sapien
tccgcattgggcacgccattgtcac

SEQ ID NO: 3733108 - DNA, 25 bp, Homo sapien
tggaagtggaaattgttctccgcat

SEQ ID NO: 3733109 - DNA, 25 bp, Homo sapien
tgtcacatccacatccaaagatgcc

SEQ ID NO: 3733110 - DNA, 25 bp, Homo sapien
tcccacagtgtttagctttgaaaat

SEQ ID NO: 3733111 - DNA, 25 bp, Homo sapien
gcaatatgttcagcccatctgctac

SEQ ID NO: 3733112 - DNA, 25 bp, Homo sapien
taaagccttccacgttggtggattc

SEQ ID NO: 3733113 - DNA, 25 bp, Homo sapien
tgccggcagttgtgcggtccaatcc

SEQ ID NO: 3733114 - DNA, 25 bp, Homo sapien
atttattgtactggtctggtgtttt

SEQ ID NO: 3733115 - DNA, 25 bp, Homo sapien
tttattgtactggtctggtgttttc

SEQ ID NO: 3733116 - DNA, 25 bp, Homo sapien
tttactgcatgcttcatcattgacg

SEQ ID NO: 3733117 - DNA, 25 bp, Homo sapien
tactgcatgcttcatcattgacgat

SEQ ID NO: 3733118 - DNA, 25 bp, Homo sapien
tatttactgcatgcttcatcattga

SEQ ID NO: 3733119 - DNA, 25 bp, Homo sapien
ttatttactgcatgcttcatcattg

SEQ ID NO: 3733120 - DNA, 25 bp, Homo sapien
gatattttgatatcgtgtagtcaca

SEQ ID NO: 3733121 - DNA, 25 bp, Homo sapien
aaaataagccaatccagttggttga

SEQ ID NO: 3733122 - DNA, 25 bp, Homo sapien
tgtagaccacttttcagcaggatat

SEQ ID NO: 3733123 - DNA, 25 bp, Homo sapien
gagtgtgtagaccacttttcagcag

SEQ ID NO: 3733124 - DNA, 25 bp, Homo sapien
tctcctactgccaaccactccgcag

SEQ ID NO: 3733125 - DNA, 25 bp, Homo sapien
ctgccaaccactccgcagcacgcat

SEQ ID NO: 3733126 - DNA, 25 bp, Homo sapien
tcctactgccaaccactccgcagca

SEQ ID NO: 3733127 - DNA, 25 bp, Homo sapien
ctactgccaaccactccgcagcacg

SEQ ID NO: 3733128 - DNA, 25 bp, Homo sapien
tgaatgtctaaaagcgccgcatgga

SEQ ID NO: 3733129 - DNA, 25 bp, Homo sapien
taaaagcgccgcatggatactagct

SEQ ID NO: 3733130 - DNA, 25 bp, Homo sapien
tgatacattttagcgtgaatgtcta

SEQ ID NO: 3733131 - DNA, 25 bp, Homo sapien
tttagcgtgaatgtctaaaagcgcc

SEQ ID NO: 3733132 - DNA, 25 bp, Homo sapien
taacctggcaaaaaggattatactg

SEQ ID NO: 3733133 - DNA, 25 bp, Homo sapien
gaaattagtgagttgttaacctggc

SEQ ID NO: 3733134 - DNA, 25 bp, Homo sapien
tgaatatgcaatatggcaggactgc

SEQ ID NO: 3733135 - DNA, 25 bp, Homo sapien
tatggcaggactgcaagccccttct

SEQ ID NO: 3733136 - DNA, 25 bp, Homo sapien
gtgtggcagggctgggccgtggttg

SEQ ID NO: 3733137 - DNA, 25 bp, Homo sapien
gtggcagggctgggccgtggttggg

SEQ ID NO: 3733138 - DNA, 25 bp, Homo sapien
ggcagggctgggccgtggttgggga

SEQ ID NO: 3733139 - DNA, 25 bp, Homo sapien
gcagggctgggccgtggttggggaa

SEQ ID NO: 3733140 - DNA, 25 bp, Homo sapien
ggcgtcttggcgatggccacgatca

SEQ ID NO: 3733141 - DNA, 25 bp, Homo sapien
agcggtgcggccgacgacaggttac

SEQ ID NO: 3733142 - DNA, 25 bp, Homo sapien
agcacattgcccgccacgatgagca

SEQ ID NO: 3733143 - DNA, 25 bp, Homo sapien
gatgagcagcacgatgagcgccatc

SEQ ID NO: 3733144 - DNA, 25 bp, Homo sapien
cgtcacgcacagcacgtccactgag

SEQ ID NO: 3733145 - DNA, 25 bp, Homo sapien
ccacagctcgcagaagaaggagccg

SEQ ID NO: 3733146 - DNA, 25 bp, Homo sapien
gcagaagaaggagccgtactcccag

SEQ ID NO: 3733147 - DNA, 25 bp, Homo sapien
aagaaggagccgtactcccagcggc

SEQ ID NO: 3733148 - DNA, 25 bp, Homo sapien
gacaccagggccgagatggcccaca

SEQ ID NO: 3733149 - DNA, 25 bp, Homo sapien
tctggtagcggaagggcgaggtgat

SEQ ID NO: 3733150 - DNA, 25 bp, Homo sapien
cgcccgccaccagtgcatgaggatg

SEQ ID NO: 3733151 - DNA, 25 bp, Homo sapien
cccgcgcgcgcgtcagcaggctctg

SEQ ID NO: 3733152 - DNA, 25 bp, Homo sapien
taggcccggttggtgacgaagtcgc

SEQ ID NO: 3733153 - DNA, 25 bp, Homo sapien
ggaacacccgcaggtacacgaaggc

SEQ ID NO: 3733154 - DNA, 25 bp, Homo sapien
cagcacttggggtcgttgtagcagc

SEQ ID NO: 3733155 - DNA, 25 bp, Homo sapien
cacgtagaaggagactacggacgag

SEQ ID NO: 3733156 - DNA, 25 bp, Homo sapien
ggccgccgaggaaacggcgctcgca

SEQ ID NO: 3733157 - DNA, 25 bp, Homo sapien
aggaaacggcgctcgcagctgtcga

SEQ ID NO: 3733158 - DNA, 25 bp, Homo sapien
gctcgcagctgtcgatcttcttcac

SEQ ID NO: 3733159 - DNA, 25 bp, Homo sapien
acccgcacgcccgttggccagcggg

SEQ ID NO: 3733160 - DNA, 25 bp, Homo sapien
gcagggccacgaggcgcgagggccg

SEQ ID NO: 3733161 - DNA, 25 bp, Homo sapien
tgctcgcgcagggccacgaggcgcg

SEQ ID NO: 3733162 - DNA, 25 bp, Homo sapien
cgcgcagggccacgaggcgcgaggg

SEQ ID NO: 3733163 - DNA, 25 bp, Homo sapien
ctcgcgcagggccacgaggcgcgag

SEQ ID NO: 3733164 - DNA, 25 bp, Homo sapien
accagctcgcggtggaaggccttca

SEQ ID NO: 3733165 - DNA, 25 bp, Homo sapien
cagagcgtgaagacgcccatgatga

SEQ ID NO: 3733166 - DNA, 25 bp, Homo sapien
ttgaaggccgagttggcgtagccca

SEQ ID NO: 3733167 - DNA, 25 bp, Homo sapien
ggcgtggccccgacgacatcgtcgt

SEQ ID NO: 3733168 - DNA, 25 bp, Homo sapien
gattcagacgaggattgtgggcttc

SEQ ID NO: 3733169 - DNA, 25 bp, Homo sapien
caacaaggaacatcagcaagccact

SEQ ID NO: 3733170 - DNA, 25 bp, Homo sapien
tcctttttgtgcaacggtccgtggc

SEQ ID NO: 3733171 - DNA, 25 bp, Homo sapien
gagttcacctgctatcggtcttaag

SEQ ID NO: 3733172 - DNA, 25 bp, Homo sapien
gacagcgggtttgccctacacaagg

SEQ ID NO: 3733173 - DNA, 25 bp, Homo sapien
tgcacagtgtgaggtagaaatccct

SEQ ID NO: 3733174 - DNA, 25 bp, Homo sapien
cacgtgggcacttggacataaaaaa

SEQ ID NO: 3733175 - DNA, 25 bp, Homo sapien
ggatgggagccacgatgatcgattt

SEQ ID NO: 3733176 - DNA, 25 bp, Homo sapien
tgaatccggctgtgaaaatgtaggg

SEQ ID NO: 3733177 - DNA, 25 bp, Homo sapien
ggaaacctattaaaagagctctatg

SEQ ID NO: 3733178 - DNA, 25 bp, Homo sapien
tagtctagaacaccttgaatccggc

SEQ ID NO: 3733179 - DNA, 25 bp, Homo sapien
aatgtagggtaaatctgtagctctc

SEQ ID NO: 3733180 - DNA, 25 bp, Homo sapien
tggtttcctctaactcactaaagtg

SEQ ID NO: 3733181 - DNA, 25 bp, Homo sapien
tgaagggcctgcgtatatgttttgg

SEQ ID NO: 3733182 - DNA, 25 bp, Homo sapien
gaagcatttacctggtacttcagtg

SEQ ID NO: 3733183 - DNA, 25 bp, Homo sapien
tgcatcttacatactcatggtcggg

SEQ ID NO: 3733184 - DNA, 25 bp, Homo sapien
tgccatcgctactgggactgacagc

SEQ ID NO: 3733185 - DNA, 25 bp, Homo sapien
taaggctgcctttttgcacactcaa

SEQ ID NO: 3733186 - DNA, 25 bp, Homo sapien
tctcaccagattaagcaggactggc

SEQ ID NO: 3733187 - DNA, 25 bp, Homo sapien
tacacatttctacatcggagagaga

SEQ ID NO: 3733188 - DNA, 25 bp, Homo sapien
aggtttcttgagtgtttgaagcagg

SEQ ID NO: 3733189 - DNA, 25 bp, Homo sapien
caaataggtttcttgagtgtttgaa

SEQ ID NO: 3733190 - DNA, 25 bp, Homo sapien
ttgaagcagggggcctgcaaatgtc

SEQ ID NO: 3733191 - DNA, 25 bp, Homo sapien
aataggtttcttgagtgtttgaagc

SEQ ID NO: 3733192 - DNA, 25 bp, Homo sapien
cctcccagaagataagggatgacca

SEQ ID NO: 3733193 - DNA, 25 bp, Homo sapien
cccaggatcccacatgaaaggatgg

SEQ ID NO: 3733194 - DNA, 25 bp, Homo sapien
tcatgtccagggagctgtaacccag

SEQ ID NO: 3733195 - DNA, 25 bp, Homo sapien
cgcattctccctctgaataggtcgg

SEQ ID NO: 3733196 - DNA, 25 bp, Homo sapien
agaacccatgcaggtcccaatcccc

SEQ ID NO: 3733197 - DNA, 25 bp, Homo sapien
tagaacccatgcaggtcccaatccc

SEQ ID NO: 3733198 - DNA, 25 bp, Homo sapien
ttagttctttttccacccatccatc

SEQ ID NO: 3733199 - DNA, 25 bp, Homo sapien
aagttgatggccttctcttgccgtc

SEQ ID NO: 3733200 - DNA, 25 bp, Homo sapien
ccttctcttgccgtcttctttagtt

SEQ ID NO: 3733201 - DNA, 25 bp, Homo sapien
tgtctcccattttgaagttgatggc

SEQ ID NO: 3733202 - DNA, 25 bp, Homo sapien
tgaacttccccaaactgctcctcca

SEQ ID NO: 3733203 - DNA, 25 bp, Homo sapien
tgtgaacttccccaaactgctcctc

SEQ ID NO: 3733204 - DNA, 25 bp, Homo sapien
gaacttccccaaactgctcctccac

SEQ ID NO: 3733205 - DNA, 25 bp, Homo sapien
gtgaacttccccaaactgctcctcc

SEQ ID NO: 3733206 - DNA, 25 bp, Homo sapien
taaattgggcatatgaggacaacag

SEQ ID NO: 3733207 - DNA, 25 bp, Homo sapien
catatgaggacaacaggctgaaact

SEQ ID NO: 3733208 - DNA, 25 bp, Homo sapien
aattgggcatatgaggacaacaggc

SEQ ID NO: 3733209 - DNA, 25 bp, Homo sapien
tgggcatatgaggacaacaggctga

SEQ ID NO: 3733210 - DNA, 25 bp, Homo sapien
aacacattctttcgatgatgtaggg

SEQ ID NO: 3733211 - DNA, 25 bp, Homo sapien
cctgttctgagactgagtgaccttc

SEQ ID NO: 3733212 - DNA, 25 bp, Homo sapien
gctatttctggcagcagttccggtt

SEQ ID NO: 3733213 - DNA, 25 bp, Homo sapien
gcttgataccaaggccctggtgcca

SEQ ID NO: 3733214 - DNA, 25 bp, Homo sapien
ggatatacttttgcctaccttgagc

SEQ ID NO: 3733215 - DNA, 25 bp, Homo sapien
ggattgcccctcgtacttcttcgta

SEQ ID NO: 3733216 - DNA, 25 bp, Homo sapien
taataaaggtttcacgatgaggatg

SEQ ID NO: 3733217 - DNA, 25 bp, Homo sapien
tcttcgtattgtaggagtccaggtg

SEQ ID NO: 3733218 - DNA, 25 bp, Homo sapien
gcttcagtgagctagaaacgcaaat

SEQ ID NO: 3733219 - DNA, 25 bp, Homo sapien
tttgcggctggctacagactgagag

SEQ ID NO: 3733220 - DNA, 25 bp, Homo sapien
tctggaatcccttccgagagtggcc

SEQ ID NO: 3733221 - DNA, 25 bp, Homo sapien
ggaatctttgattgccgtgaactgg

SEQ ID NO: 3733222 - DNA, 25 bp, Homo sapien
acagaagcatcgtgcagggctgcac

SEQ ID NO: 3733223 - DNA, 25 bp, Homo sapien
agccaaaaatatcaaacagcctcag

SEQ ID NO: 3733224 - DNA, 25 bp, Homo sapien
aaatgggaattatgaagccaaaaat

SEQ ID NO: 3733225 - DNA, 25 bp, Homo sapien
caaaaatatcaaacagcctcagatc

SEQ ID NO: 3733226 - DNA, 25 bp, Homo sapien
gccaaaaatatcaaacagcctcaga

SEQ ID NO: 3733227 - DNA, 25 bp, Homo sapien
gaacgccagactattctgtatcttg

SEQ ID NO: 3733228 - DNA, 25 bp, Homo sapien
cggaacgccagactattctgtatct

SEQ ID NO: 3733229 - DNA, 25 bp, Homo sapien
aacgccagactattctgtatcttgg

SEQ ID NO: 3733230 - DNA, 25 bp, Homo sapien
ctcggaacgccagactattctgtat

SEQ ID NO: 3733231 - DNA, 25 bp, Homo sapien
catccgatgcgtgcacgttaccgtg

SEQ ID NO: 3733232 - DNA, 25 bp, Homo sapien
ccgggaaccacatccgatgcgtgca

SEQ ID NO: 3733233 - DNA, 25 bp, Homo sapien
cgttaccgtgcctgtctggagacca

SEQ ID NO: 3733234 - DNA, 25 bp, Homo sapien
cggacttcaattcgccttacttcaa

SEQ ID NO: 3733235 - DNA, 25 bp, Homo sapien
tgagaactccggtcccctctcatgt

SEQ ID NO: 3733236 - DNA, 25 bp, Homo sapien
gagcccacgcttcactggcttttag

SEQ ID NO: 3733237 - DNA, 25 bp, Homo sapien
agggatcgcctgtctccgtcggcgc

SEQ ID NO: 3733238 - DNA, 25 bp, Homo sapien
cagctctgggatgcggagccaggct

SEQ ID NO: 3733239 - DNA, 25 bp, Homo sapien
gatgaagtcaacacaatcatttcct

SEQ ID NO: 3733240 - DNA, 25 bp, Homo sapien
cccctctgcaagtggtggccatgtg

SEQ ID NO: 3733241 - DNA, 25 bp, Homo sapien
cgggagctgggcgctttctctctct

SEQ ID NO: 3733242 - DNA, 25 bp, Homo sapien
taaaggatctatttcttggcttggc

SEQ ID NO: 3733243 - DNA, 25 bp, Homo sapien
cagtctgagagaacacagtatggcg

SEQ ID NO: 3733244 - DNA, 25 bp, Homo sapien
agaacacagtatggcgatgacaggg

SEQ ID NO: 3733245 - DNA, 25 bp, Homo sapien
cagggatcccgggtggtacgcgagg

SEQ ID NO: 3733246 - DNA, 25 bp, Homo sapien
gagacaggacaaggaccttacagtc

SEQ ID NO: 3733247 - DNA, 25 bp, Homo sapien
catggttcttcaagggctgaggaca

SEQ ID NO: 3733248 - DNA, 25 bp, Homo sapien
aatagtaaaggcacagtgatgcgct

SEQ ID NO: 3733249 - DNA, 25 bp, Homo sapien
taggcaaggaccaaccgtgcaaatg

SEQ ID NO: 3733250 - DNA, 25 bp, Homo sapien
cattgcaagatcctgagcactaggc

SEQ ID NO: 3733251 - DNA, 25 bp, Homo sapien
ctagagggtcatacacaggataacc

SEQ ID NO: 3733252 - DNA, 25 bp, Homo sapien
cacactctagaggttagctgttgct

SEQ ID NO: 3733253 - DNA, 25 bp, Homo sapien
cacaggtacttttgcctagagggtc

SEQ ID NO: 3733254 - DNA, 25 bp, Homo sapien
tctgcaagtttccatgtggcccaca

SEQ ID NO: 3733255 - DNA, 25 bp, Homo sapien
ttctgtgacagacccgaatttacta

SEQ ID NO: 3733256 - DNA, 25 bp, Homo sapien
ctacacgtgctctgaagcgatcacc

SEQ ID NO: 3733257 - DNA, 25 bp, Homo sapien
tgacagtcatcattgtgcagagcct

SEQ ID NO: 3733258 - DNA, 25 bp, Homo sapien
ttttgacagtcatcattgtgcagag

SEQ ID NO: 3733259 - DNA, 25 bp, Homo sapien
ggtgtaatacagttcccatttcagc

SEQ ID NO: 3733260 - DNA, 25 bp, Homo sapien
caattgaggtgatgcgagtgctcca

SEQ ID NO: 3733261 - DNA, 25 bp, Homo sapien
aagatcatactggacccacaggtgt

SEQ ID NO: 3733262 - DNA, 25 bp, Homo sapien
gaacacttctcaccatccggagctg

SEQ ID NO: 3733263 - DNA, 25 bp, Homo sapien
aattattctcggaggcccagtcatc

SEQ ID NO: 3733264 - DNA, 25 bp, Homo sapien
caatgggaaactgcgagggaccttt

SEQ ID NO: 3733265 - DNA, 25 bp, Homo sapien
tgtggtggctgccaacttgtgttgc

SEQ ID NO: 3733266 - DNA, 25 bp, Homo sapien
tcataaattattctcggaggcccag

SEQ ID NO: 3733267 - DNA, 25 bp, Homo sapien
tgaacagaaagtggaaaaacgaagc

SEQ ID NO: 3733268 - DNA, 25 bp, Homo sapien
ctgctgtgcacaccaaggtctcaat

SEQ ID NO: 3733269 - DNA, 25 bp, Homo sapien
gatcttcagaagcaaccgcaatgcc

SEQ ID NO: 3733270 - DNA, 25 bp, Homo sapien
atcttcagaagcaaccgcaatgcca

SEQ ID NO: 3733271 - DNA, 25 bp, Homo sapien
cagaaatctcactcgtacatgaggc

SEQ ID NO: 3733272 - DNA, 25 bp, Homo sapien
tccttgcaaaggtacgctgaaagca

SEQ ID NO: 3733273 - DNA, 25 bp, Homo sapien
tacttgtgcaagtggcccagaaatc

SEQ ID NO: 3733274 - DNA, 25 bp, Homo sapien
cctggtggttctgcacgtttcctaa

SEQ ID NO: 3733275 - DNA, 25 bp, Homo sapien
ggactgaaaatggtaggtttgggca

SEQ ID NO: 3733276 - DNA, 25 bp, Homo sapien
tcataaccatttaaagcgatttagc

SEQ ID NO: 3733277 - DNA, 25 bp, Homo sapien
attttccccataccacttcagactt

SEQ ID NO: 3733278 - DNA, 25 bp, Homo sapien
aagaatgaatttgaactttgatggg

SEQ ID NO: 3733279 - DNA, 25 bp, Homo sapien
gaggttccatcttcgtgcaagtaca

SEQ ID NO: 3733280 - DNA, 25 bp, Homo sapien
gggtctccagtcatacagtgtaaaa

SEQ ID NO: 3733281 - DNA, 25 bp, Homo sapien
taagaatcccttggtccgatgtaac

SEQ ID NO: 3733282 - DNA, 25 bp, Homo sapien
gctgtttgctccctagatcactgtg

SEQ ID NO: 3733283 - DNA, 25 bp, Homo sapien
gcgtcggctgtgtttctcaccgcgg

SEQ ID NO: 3733284 - DNA, 25 bp, Homo sapien
tttgttgatgtgtcagctccgcagg

SEQ ID NO: 3733285 - DNA, 25 bp, Homo sapien
ctttgttgatgtgtcagctccgcag

SEQ ID NO: 3733286 - DNA, 25 bp, Homo sapien
gaggcgtcggctgtgtttctcaccg

SEQ ID NO: 3733287 - DNA, 25 bp, Homo sapien
gggccggcttcagtgtcgccgccat

SEQ ID NO: 3733288 - DNA, 25 bp, Homo sapien
tcagctgtaaccgggccggcttcag

SEQ ID NO: 3733289 - DNA, 25 bp, Homo sapien
aaccgggccggcttcagtgtcgccg

SEQ ID NO: 3733290 - DNA, 25 bp, Homo sapien
tgtaaccgggccggcttcagtgtcg

SEQ ID NO: 3733291 - DNA, 25 bp, Homo sapien
cgaccaaagggcaggagacccggct

SEQ ID NO: 3733292 - DNA, 25 bp, Homo sapien
tctcgggccgcaaggtggggcctcc

SEQ ID NO: 3733293 - DNA, 25 bp, Homo sapien
ggctctccaggtcgcggaggcgtgg

SEQ ID NO: 3733294 - DNA, 25 bp, Homo sapien
aacaggctgcgtgggtccggaggag

SEQ ID NO: 3733295 - DNA, 25 bp, Homo sapien
cagaaagaaacaggctgcgtgggtc

SEQ ID NO: 3733296 - DNA, 25 bp, Homo sapien
tgcagaaagaaacaggctgcgtggg

SEQ ID NO: 3733297 - DNA, 25 bp, Homo sapien
agaaacaggctgcgtgggtccggag

SEQ ID NO: 3733298 - DNA, 25 bp, Homo sapien
tgtccctgactcatgcaggccaaag

SEQ ID NO: 3733299 - DNA, 25 bp, Homo sapien
atgtccctgactcatgcaggccaaa

SEQ ID NO: 3733300 - DNA, 25 bp, Homo sapien
aggagtaatagccaacaagagcgtc

SEQ ID NO: 3733301 - DNA, 25 bp, Homo sapien
ccacgtaaggtgcaaggtttccgca

SEQ ID NO: 3733302 - DNA, 25 bp, Homo sapien
tttccgcatgagagccgggaagcca

SEQ ID NO: 3733303 - DNA, 25 bp, Homo sapien
cacgaacgcgctgttatggaacccc

SEQ ID NO: 3733304 - DNA, 25 bp, Homo sapien
cagagacgaaggcaccgacagttta

SEQ ID NO: 3733305 - DNA, 25 bp, Homo sapien
gactgcggagagaactcaggttccc

SEQ ID NO: 3733306 - DNA, 25 bp, Homo sapien
gaaaaagccacgtttgttcactgtg

SEQ ID NO: 3733307 - DNA, 25 bp, Homo sapien
aaagtagcgaacgtctgcttctggc

SEQ ID NO: 3733308 - DNA, 25 bp, Homo sapien
cactcttcgggcaatgttttgaagc

SEQ ID NO: 3733309 - DNA, 25 bp, Homo sapien
tggaaagtaaacacacacgtgctca

SEQ ID NO: 3733310 - DNA, 25 bp, Homo sapien
ttggaaagtaaacacacacgtgctc

SEQ ID NO: 3733311 - DNA, 25 bp, Homo sapien
cttggaaagtaaacacacacgtgct

SEQ ID NO: 3733312 - DNA, 25 bp, Homo sapien
gaaagtaaacacacacgtgctcata

SEQ ID NO: 3733313 - DNA, 25 bp, Homo sapien
caaatttgggcgcaaagatgcagac

SEQ ID NO: 3733314 - DNA, 25 bp, Homo sapien
gatgtctctggcaacgcctttggca

SEQ ID NO: 3733315 - DNA, 25 bp, Homo sapien
tccgcgtccacgtgcaactcaatgt

SEQ ID NO: 3733316 - DNA, 25 bp, Homo sapien
tctagttacaggctcaaaaagttcc

SEQ ID NO: 3733317 - DNA, 25 bp, Homo sapien
atggcgactgccgatgctgggagcc

SEQ ID NO: 3733318 - DNA, 25 bp, Homo sapien
tccaatccccagtgcgccctcctgg

SEQ ID NO: 3733319 - DNA, 25 bp, Homo sapien
ccctgcacttccctcgcctccaatc

SEQ ID NO: 3733320 - DNA, 25 bp, Homo sapien
gctgggagccctgccgcctgggatg

SEQ ID NO: 3733321 - DNA, 25 bp, Homo sapien
aaagaggcaagaggaccgcggatcc

SEQ ID NO: 3733322 - DNA, 25 bp, Homo sapien
ggaaagaggcaagaggaccgcggat

SEQ ID NO: 3733323 - DNA, 25 bp, Homo sapien
agaggcaagaggaccgcggatccga

SEQ ID NO: 3733324 - DNA, 25 bp, Homo sapien
aggcaagaggaccgcggatccgaac

SEQ ID NO: 3733325 - DNA, 25 bp, Homo sapien
tagggcccggaaaagctactggcac

SEQ ID NO: 3733326 - DNA, 25 bp, Homo sapien
tatttatagcaaggaccctagggcc

SEQ ID NO: 3733327 - DNA, 25 bp, Homo sapien
tccttaaacaaactagcgccagctg

SEQ ID NO: 3733328 - DNA, 25 bp, Homo sapien
gcaccgtgctgcctcactaaggaag

SEQ ID NO: 3733329 - DNA, 25 bp, Homo sapien
cattaaatggcgatttaacactcat

SEQ ID NO: 3733330 - DNA, 25 bp, Homo sapien
cacattaaatggcgatttaacactc

SEQ ID NO: 3733331 - DNA, 25 bp, Homo sapien
acattaaatggcgatttaacactca

SEQ ID NO: 3733332 - DNA, 25 bp, Homo sapien
caaggaggtgcttccaaattatttc

SEQ ID NO: 3733333 - DNA, 25 bp, Homo sapien
aaggaggtgcttccaaattatttct

SEQ ID NO: 3733334 - DNA, 25 bp, Homo sapien
tacaaggaggtgcttccaaattatt

SEQ ID NO: 3733335 - DNA, 25 bp, Homo sapien
cttacaaggaggtgcttccaaatta

SEQ ID NO: 3733336 - DNA, 25 bp, Homo sapien
tacttctccgttgatgccattcggg

SEQ ID NO: 3733337 - DNA, 25 bp, Homo sapien
gccattcgggtttgaagaaactgaa

SEQ ID NO: 3733338 - DNA, 25 bp, Homo sapien
cagcctgaaattagggtggttagga

SEQ ID NO: 3733339 - DNA, 25 bp, Homo sapien
taaagactcatgtggtggaagcttg

SEQ ID NO: 3733340 - DNA, 25 bp, Homo sapien
aatattcacttctttgggtggtgaa

SEQ ID NO: 3733341 - DNA, 25 bp, Homo sapien
ctttcagcacttggtggtgacactg

SEQ ID NO: 3733342 - DNA, 25 bp, Homo sapien
ggtggtgaattactttcagcacttg

SEQ ID NO: 3733343 - DNA, 25 bp, Homo sapien
aattactttcagcacttggtggtga

SEQ ID NO: 3733344 - DNA, 25 bp, Homo sapien
gattttgcaggacgtacattatttc

SEQ ID NO: 3733345 - DNA, 25 bp, Homo sapien
tttttgattttgcaggacgtacatt

SEQ ID NO: 3733346 - DNA, 25 bp, Homo sapien
caggacgtacattatttccaggctt

SEQ ID NO: 3733347 - DNA, 25 bp, Homo sapien
tttgcaggacgtacattatttccag

SEQ ID NO: 3733348 - DNA, 25 bp, Homo sapien
tggattacttatggacaaggaattc

SEQ ID NO: 3733349 - DNA, 25 bp, Homo sapien
gaagagccctggattacttatggac

SEQ ID NO: 3733350 - DNA, 25 bp, Homo sapien
ccctggattacttatggacaaggaa

SEQ ID NO: 3733351 - DNA, 25 bp, Homo sapien
gagccctggattacttatggacaag

SEQ ID NO: 3733352 - DNA, 25 bp, Homo sapien
ggcaagttgtggaccgaagaggagg

SEQ ID NO: 3733353 - DNA, 25 bp, Homo sapien
ccacagcgatggcaagttgtggacc

SEQ ID NO: 3733354 - DNA, 25 bp, Homo sapien
tggcaagttgtggaccgaagaggag

SEQ ID NO: 3733355 - DNA, 25 bp, Homo sapien
cagcgatggcaagttgtggaccgaa

SEQ ID NO: 3733356 - DNA, 25 bp, Homo sapien
cacacgatgctgtgtgcagaccagt

SEQ ID NO: 3733357 - DNA, 25 bp, Homo sapien
tttggctgaacaggcctgcacacga

SEQ ID NO: 3733358 - DNA, 25 bp, Homo sapien
caatagtaggtctgcttgcactgag

SEQ ID NO: 3733359 - DNA, 25 bp, Homo sapien
ctttgacatgctgtggagcaatagt

SEQ ID NO: 3733360 - DNA, 25 bp, Homo sapien
atcacagtggtaatgtaaaactccc

SEQ ID NO: 3733361 - DNA, 25 bp, Homo sapien
cagtggtaatgtaaaactccccagt

SEQ ID NO: 3733362 - DNA, 25 bp, Homo sapien
tggtaatgtaaaactccccagtgct

SEQ ID NO: 3733363 - DNA, 25 bp, Homo sapien
ttccagaatcacagtggtaatgtaa

SEQ ID NO: 3733364 - DNA, 25 bp, Homo sapien
cttattgtttacctccacatccttt

SEQ ID NO: 3733365 - DNA, 25 bp, Homo sapien
attgtttacctccacatcctttgtt

SEQ ID NO: 3733366 - DNA, 25 bp, Homo sapien
cacatcctttgtttcaatagatgat

SEQ ID NO: 3733367 - DNA, 25 bp, Homo sapien
gatgatttattttcaagtttgtgga

SEQ ID NO: 3733368 - DNA, 25 bp, Homo sapien
cttgagttgtagacttctcaaatca

SEQ ID NO: 3733369 - DNA, 25 bp, Homo sapien
gttttcttgagttgtagacttctca

SEQ ID NO: 3733370 - DNA, 25 bp, Homo sapien
ttttcttgagttgtagacttctcaa

SEQ ID NO: 3733371 - DNA, 25 bp, Homo sapien
ttcttgagttgtagacttctcaaat

SEQ ID NO: 3733372 - DNA, 25 bp, Homo sapien
tataactgcacgtagaagtcccctg

SEQ ID NO: 3733373 - DNA, 25 bp, Homo sapien
actgcacgtagaagtcccctgggtg

SEQ ID NO: 3733374 - DNA, 25 bp, Homo sapien
acttctgaagaatataactgcacgt

SEQ ID NO: 3733375 - DNA, 25 bp, Homo sapien
tgaagaatataactgcacgtagaag

SEQ ID NO: 3733376 - DNA, 25 bp, Homo sapien
cttaacaggaatatagtctttttca

SEQ ID NO: 3733377 - DNA, 25 bp, Homo sapien
aagtcaatgttcctgttgaggtggt

SEQ ID NO: 3733378 - DNA, 25 bp, Homo sapien
cctgttgaggtggtaaattctgttt

SEQ ID NO: 3733379 - DNA, 25 bp, Homo sapien
tttgtatgattgctctgttccaggt

SEQ ID NO: 3733380 - DNA, 25 bp, Homo sapien
tcttttgctgcacatcaacgttttg

SEQ ID NO: 3733381 - DNA, 25 bp, Homo sapien
ttctgctgggataacattggctaca

SEQ ID NO: 3733382 - DNA, 25 bp, Homo sapien
tctgctgggataacattggctacaa

SEQ ID NO: 3733383 - DNA, 25 bp, Homo sapien
ctgctgggataacattggctacaaa

SEQ ID NO: 3733384 - DNA, 25 bp, Homo sapien
caatctttatggagcagtactgctc

SEQ ID NO: 3733385 - DNA, 25 bp, Homo sapien
caagatgtcgacaatctttatggag

SEQ ID NO: 3733386 - DNA, 25 bp, Homo sapien
tcgacaatctttatggagcagtact

SEQ ID NO: 3733387 - DNA, 25 bp, Homo sapien
ctcttccaagatgtcgacaatcttt

SEQ ID NO: 3733388 - DNA, 25 bp, Homo sapien
tttctataagcacatggtctaaaag

SEQ ID NO: 3733389 - DNA, 25 bp, Homo sapien
ttctataagcacatggtctaaaagt

SEQ ID NO: 3733390 - DNA, 25 bp, Homo sapien
cttgtccactgggtttcaagccata

SEQ ID NO: 3733391 - DNA, 25 bp, Homo sapien
gtccactgggtttcaagccatatcc

SEQ ID NO: 3733392 - DNA, 25 bp, Homo sapien
tctacgacaatgttgttttcagttg

SEQ ID NO: 3733393 - DNA, 25 bp, Homo sapien
cacttttgtctacgacaatgttgtt

SEQ ID NO: 3733394 - DNA, 25 bp, Homo sapien
aggtcacttttgtctacgacaatgt

SEQ ID NO: 3733395 - DNA, 25 bp, Homo sapien
ttgtctacgacaatgttgttttcag

SEQ ID NO: 3733396 - DNA, 25 bp, Homo sapien
caaaactcatcacctacattcaaag

SEQ ID NO: 3733397 - DNA, 25 bp, Homo sapien
gtgggcaaccacaccacaaaactca

SEQ ID NO: 3733398 - DNA, 25 bp, Homo sapien
gacaaaagaagtcttctggtgtttg

SEQ ID NO: 3733399 - DNA, 25 bp, Homo sapien
tctggtgtttgaatgtgggcaacca

SEQ ID NO: 3733400 - DNA, 25 bp, Homo sapien
cgtggaggcaactgatcacagtact

SEQ ID NO: 3733401 - DNA, 25 bp, Homo sapien
ggataaaaatcagagcgtggaggca

SEQ ID NO: 3733402 - DNA, 25 bp, Homo sapien
ctgagaactgagcacaacatatatc

SEQ ID NO: 3733403 - DNA, 25 bp, Homo sapien
gatcacagtacttgctaagggatgc

SEQ ID NO: 3733404 - DNA, 25 bp, Homo sapien
tacatatccgaccagtacagattct

SEQ ID NO: 3733405 - DNA, 25 bp, Homo sapien
tccataatctacatatccgaccagt

SEQ ID NO: 3733406 - DNA, 25 bp, Homo sapien
tcagaagcgtaagccaaaacagagg

SEQ ID NO: 3733407 - DNA, 25 bp, Homo sapien
gaggcacggtaccactgatcatcct

SEQ ID NO: 3733408 - DNA, 25 bp, Homo sapien
catttagaaatttagctcctaattt

SEQ ID NO: 3733409 - DNA, 25 bp, Homo sapien
gcatttagaaatttagctcctaatt

SEQ ID NO: 3733410 - DNA, 25 bp, Homo sapien
caaagaattttgaatgaatgttaca

SEQ ID NO: 3733411 - DNA, 25 bp, Homo sapien
cactggtttctttcacgtcactggg

SEQ ID NO: 3733412 - DNA, 25 bp, Homo sapien
gcaaagcctgcatctaggagaactt

SEQ ID NO: 3733413 - DNA, 25 bp, Homo sapien
taacactgacatgaggcgtctcgga

SEQ ID NO: 3733414 - DNA, 25 bp, Homo sapien
gatttatcaataagctccaccaggg

SEQ ID NO: 3733415 - DNA, 25 bp, Homo sapien
caatggatttacttttccttccaca

SEQ ID NO: 3733416 - DNA, 25 bp, Homo sapien
tccaatggatttacttttccttcca

SEQ ID NO: 3733417 - DNA, 25 bp, Homo sapien
cacatggcaataaaattctccagga

SEQ ID NO: 3733418 - DNA, 25 bp, Homo sapien
tcacacagaccacaacatctactgt

SEQ ID NO: 3733419 - DNA, 25 bp, Homo sapien
ccaggactatatatcacacagacca

SEQ ID NO: 3733420 - DNA, 25 bp, Homo sapien
caacaccaagttcaacccatgtcca

SEQ ID NO: 3733421 - DNA, 25 bp, Homo sapien
ctggcagtgttctgctaatgacttg

SEQ ID NO: 3733422 - DNA, 25 bp, Homo sapien
aaccattaggtaacttctgctggca

SEQ ID NO: 3733423 - DNA, 25 bp, Homo sapien
atgacttgttcaaatcattgagttt

SEQ ID NO: 3733424 - DNA, 25 bp, Homo sapien
ttgtcctatctctgccttgaaacca

SEQ ID NO: 3733425 - DNA, 25 bp, Homo sapien
tctgcagtaacttcttcgatgtttc

SEQ ID NO: 3733426 - DNA, 25 bp, Homo sapien
gatatcattcggagttcatctgcag

SEQ ID NO: 3733427 - DNA, 25 bp, Homo sapien
tgactaaagcacgataccaactacc

SEQ ID NO: 3733428 - DNA, 25 bp, Homo sapien
tgctaactggcaccgtattccctga

SEQ ID NO: 3733429 - DNA, 25 bp, Homo sapien
ttcaactcctatcccattttcagtg

SEQ ID NO: 3733430 - DNA, 25 bp, Homo sapien
gcaattttatcccagcaacacacat

SEQ ID NO: 3733431 - DNA, 25 bp, Homo sapien
aattattctgggataacaagtggag

SEQ ID NO: 3733432 - DNA, 25 bp, Homo sapien
caagtggagagatcggtgagttcaa

SEQ ID NO: 3733433 - DNA, 25 bp, Homo sapien
aaaccagatgttcatcaatcagaac

SEQ ID NO: 3733434 - DNA, 25 bp, Homo sapien
tggtaagtctttatgtggtgaagca

SEQ ID NO: 3733435 - DNA, 25 bp, Homo sapien
gtccctgtacatgaacttgaagctc

SEQ ID NO: 3733436 - DNA, 25 bp, Homo sapien
tgtttattaacaagtctgtcatttg

SEQ ID NO: 3733437 - DNA, 25 bp, Homo sapien
gtatagttttatccactggcaattc

SEQ ID NO: 3733438 - DNA, 25 bp, Homo sapien
ctggcatcccttttggtagagcata

SEQ ID NO: 3733439 - DNA, 25 bp, Homo sapien
aattctatcgtcttccattgctcag

SEQ ID NO: 3733440 - DNA, 25 bp, Homo sapien
gggcttatgatttctaatacatttg

SEQ ID NO: 3733441 - DNA, 25 bp, Homo sapien
gacttttcggagcattgcagtattc

SEQ ID NO: 3733442 - DNA, 25 bp, Homo sapien
tgtatttggcacagcatgcgtctcc

SEQ ID NO: 3733443 - DNA, 25 bp, Homo sapien
aattcttggtctatagggtggtcga

SEQ ID NO: 3733444 - DNA, 25 bp, Homo sapien
gcagtattctaataattcagctgtc

SEQ ID NO: 3733445 - DNA, 25 bp, Homo sapien
catagtctgcatagagcacttccac

SEQ ID NO: 3733446 - DNA, 25 bp, Homo sapien
tgatgtccccagaacaactgcacga

SEQ ID NO: 3733447 - DNA, 25 bp, Homo sapien
gaacatctaataatttggaaaggaa

SEQ ID NO: 3733448 - DNA, 25 bp, Homo sapien
gattggttgcactctgcaaagaggc

SEQ ID NO: 3733449 - DNA, 25 bp, Homo sapien
ttgagaagagcttccattcaattcc

SEQ ID NO: 3733450 - DNA, 25 bp, Homo sapien
gaaagcattacattctgattcaaca

SEQ ID NO: 3733451 - DNA, 25 bp, Homo sapien
ctttcacagaaagcattacattctg

SEQ ID NO: 3733452 - DNA, 25 bp, Homo sapien
tattaattgagaagagcttccattc

SEQ ID NO: 3733453 - DNA, 25 bp, Homo sapien
tgccagaccaaatgtcactagctta

SEQ ID NO: 3733454 - DNA, 25 bp, Homo sapien
tcagctacatcgacagtcccattct

SEQ ID NO: 3733455 - DNA, 25 bp, Homo sapien
cactctgcctttgaggtgtgatgtt

SEQ ID NO: 3733456 - DNA, 25 bp, Homo sapien
aagcactctgcctttgaggtgtgat

SEQ ID NO: 3733457 - DNA, 25 bp, Homo sapien
agcagcaattcatcctatacatctt

SEQ ID NO: 3733458 - DNA, 25 bp, Homo sapien
gtgcagcagcaattcatcctataca

SEQ ID NO: 3733459 - DNA, 25 bp, Homo sapien
gcagcagcaattcatcctatacatc

SEQ ID NO: 3733460 - DNA, 25 bp, Homo sapien
gtttctgtaactctgtgcagcagca

SEQ ID NO: 3733461 - DNA, 25 bp, Homo sapien
attggttgaattgtttaagaggaag

SEQ ID NO: 3733462 - DNA, 25 bp, Homo sapien
aggaagagaagaatatgttcatgtt

SEQ ID NO: 3733463 - DNA, 25 bp, Homo sapien
gaagagaagaatatgttcatgtttt

SEQ ID NO: 3733464 - DNA, 25 bp, Homo sapien
gaattgtttaagaggaagagaagaa

SEQ ID NO: 3733465 - DNA, 25 bp, Homo sapien
gaggctaagctttatgtcacaacaa

SEQ ID NO: 3733466 - DNA, 25 bp, Homo sapien
gcattcacagaaccaaacaacagta

SEQ ID NO: 3733467 - DNA, 25 bp, Homo sapien
gaagatgtcctattggtgatcacag

SEQ ID NO: 3733468 - DNA, 25 bp, Homo sapien
tcattaaatcacgaaagtacagcct

SEQ ID NO: 3733469 - DNA, 25 bp, Homo sapien
cttggccctttagatccactttccg

SEQ ID NO: 3733470 - DNA, 25 bp, Homo sapien
aaaaagtgctaaacatatttacagc

SEQ ID NO: 3733471 - DNA, 25 bp, Homo sapien
caatgtgcataagtgagctctgagt

SEQ ID NO: 3733472 - DNA, 25 bp, Homo sapien
ttagatacccctcgcaaaaagtgct

SEQ ID NO: 3733473 - DNA, 25 bp, Homo sapien
tagaatcaccacagccaaaagcagg

SEQ ID NO: 3733474 - DNA, 25 bp, Homo sapien
gaagttctaattggctcttaatcaa

SEQ ID NO: 3733475 - DNA, 25 bp, Homo sapien
cctgatcagaagttctaattggctc

SEQ ID NO: 3733476 - DNA, 25 bp, Homo sapien
ccagtatgttctttagacactagaa

SEQ ID NO: 3733477 - DNA, 25 bp, Homo sapien
cataagggtttacctccaagagatg

SEQ ID NO: 3733478 - DNA, 25 bp, Homo sapien
ataagggtttacctccaagagatgc

SEQ ID NO: 3733479 - DNA, 25 bp, Homo sapien
taagggtttacctccaagagatgct

SEQ ID NO: 3733480 - DNA, 25 bp, Homo sapien
tcataagggtttacctccaagagat

SEQ ID NO: 3733481 - DNA, 25 bp, Homo sapien
tctcctaaagctagcctttgctgtt

SEQ ID NO: 3733482 - DNA, 25 bp, Homo sapien
caggcaaaaacggagggatagaagg

SEQ ID NO: 3733483 - DNA, 25 bp, Homo sapien
gatagaaggtcattacagagaaagt

SEQ ID NO: 3733484 - DNA, 25 bp, Homo sapien
tacagagaaagtggacaaagaaaag

SEQ ID NO: 3733485 - DNA, 25 bp, Homo sapien
tattccttgccagtattctcattga

SEQ ID NO: 3733486 - DNA, 25 bp, Homo sapien
agttacatatatagcagaaagtccc

SEQ ID NO: 3733487 - DNA, 25 bp, Homo sapien
gaaagtccctatgtattccttgcca

SEQ ID NO: 3733488 - DNA, 25 bp, Homo sapien
tgccagtattctcattgatttggta

SEQ ID NO: 3733489 - DNA, 25 bp, Homo sapien
cagttagagtggtccagaggtcaga

SEQ ID NO: 3733490 - DNA, 25 bp, Homo sapien
cagatttctaaggttgtggacacag

SEQ ID NO: 3733491 - DNA, 25 bp, Homo sapien
gaagaggcagacgacagagaatgca

SEQ ID NO: 3733492 - DNA, 25 bp, Homo sapien
gaaagtcagccagcccataattctg

SEQ ID NO: 3733493 - DNA, 25 bp, Homo sapien
aagtacttcacttctacgcgggtca

SEQ ID NO: 3733494 - DNA, 25 bp, Homo sapien
ttttaaagcggcatcggcccaggtc

SEQ ID NO: 3733495 - DNA, 25 bp, Homo sapien
gaactaccgccagggaggtgcatag

SEQ ID NO: 3733496 - DNA, 25 bp, Homo sapien
gctgccacgtgggacacctgtttgt

SEQ ID NO: 3733497 - DNA, 25 bp, Homo sapien
ctcaggtgcgcgcagacaatgcgaa

SEQ ID NO: 3733498 - DNA, 25 bp, Homo sapien
ccccagtaccgggagcgtgaatcgg

SEQ ID NO: 3733499 - DNA, 25 bp, Homo sapien
accgcgagtggccacgagggaggcg

SEQ ID NO: 3733500 - DNA, 25 bp, Homo sapien
agctcgcccgggacggaccgcgagt

SEQ ID NO: 3733501 - DNA, 25 bp, Homo sapien
gtccagggtgccacagagagtggtc

SEQ ID NO: 3733502 - DNA, 25 bp, Homo sapien
ggcaggtagtccagggtgccacaga

SEQ ID NO: 3733503 - DNA, 25 bp, Homo sapien
cgggggcaggtagtccagggtgcca

SEQ ID NO: 3733504 - DNA, 25 bp, Homo sapien
cagggtgccacagagagtggtcctc

SEQ ID NO: 3733505 - DNA, 25 bp, Homo sapien
cttctcaccatgcatctgacctcca

SEQ ID NO: 3733506 - DNA, 25 bp, Homo sapien
tcaccatgcatctgacctccaatca

SEQ ID NO: 3733507 - DNA, 25 bp, Homo sapien
caccatgcatctgacctccaatcat

SEQ ID NO: 3733508 - DNA, 25 bp, Homo sapien
tctcaccatgcatctgacctccaat

SEQ ID NO: 3733509 - DNA, 25 bp, Homo sapien
aaaattcatagcaaagaacaccaag

SEQ ID NO: 3733510 - DNA, 25 bp, Homo sapien
taaaaattcatagcaaagaacacca

SEQ ID NO: 3733511 - DNA, 25 bp, Homo sapien
ttcatagcaaagaacaccaaggctc

SEQ ID NO: 3733512 - DNA, 25 bp, Homo sapien
aattcatagcaaagaacaccaaggc

SEQ ID NO: 3733513 - DNA, 25 bp, Homo sapien
ttgcctcaaaaggaggcttcccaac

SEQ ID NO: 3733514 - DNA, 25 bp, Homo sapien
tttgcctcaaaaggaggcttcccaa

SEQ ID NO: 3733515 - DNA, 25 bp, Homo sapien
gtttgcctcaaaaggaggcttccca

SEQ ID NO: 3733516 - DNA, 25 bp, Homo sapien
acagctccttaaccgatcgagtcag

SEQ ID NO: 3733517 - DNA, 25 bp, Homo sapien
gaaaacacagacggcttccagcaac

SEQ ID NO: 3733518 - DNA, 25 bp, Homo sapien
aacacagacggcttccagcaacagg

SEQ ID NO: 3733519 - DNA, 25 bp, Homo sapien
acacagacggcttccagcaacagga

SEQ ID NO: 3733520 - DNA, 25 bp, Homo sapien
aaacacagacggcttccagcaacag

SEQ ID NO: 3733521 - DNA, 25 bp, Homo sapien
cttctcatatttcaaagagactaga

SEQ ID NO: 3733522 - DNA, 25 bp, Homo sapien
ttctcatatttcaaagagactagaa

SEQ ID NO: 3733523 - DNA, 25 bp, Homo sapien
gcaaactctccagctgaaggcaggc

SEQ ID NO: 3733524 - DNA, 25 bp, Homo sapien
agcaaactctccagctgaaggcagg

SEQ ID NO: 3733525 - DNA, 25 bp, Homo sapien
cagcaaactctccagctgaaggcag

SEQ ID NO: 3733526 - DNA, 25 bp, Homo sapien
aaactctccagctgaaggcaggcca

SEQ ID NO: 3733527 - DNA, 25 bp, Homo sapien
tattctcctgacaaagggcccagta

SEQ ID NO: 3733528 - DNA, 25 bp, Homo sapien
ccagccctctgcgtaaacacatagg

SEQ ID NO: 3733529 - DNA, 25 bp, Homo sapien
cataggcactaaggtttcctgagct

SEQ ID NO: 3733530 - DNA, 25 bp, Homo sapien
tcctgagctgagtccatgaattatt

SEQ ID NO: 3733531 - DNA, 25 bp, Homo sapien
aaatgtcaatgtgcagtgacagcac

SEQ ID NO: 3733532 - DNA, 25 bp, Homo sapien
gctttgtaaatgtcaatgtgcagtg

SEQ ID NO: 3733533 - DNA, 25 bp, Homo sapien
atgctttgtaaatgtcaatgtgcag

SEQ ID NO: 3733534 - DNA, 25 bp, Homo sapien
tggtaggtgtctagcagcagaagag

SEQ ID NO: 3733535 - DNA, 25 bp, Homo sapien
gaaatcttcccgatggtttctttgc

SEQ ID NO: 3733536 - DNA, 25 bp, Homo sapien
aaatcttcccgatggtttctttgct

SEQ ID NO: 3733537 - DNA, 25 bp, Homo sapien
gctggcagctgaaatcttcccgatg

SEQ ID NO: 3733538 - DNA, 25 bp, Homo sapien
gcagctgaaatcttcccgatggttt

SEQ ID NO: 3733539 - DNA, 25 bp, Homo sapien
atgtccactgcagccgagcaccaca

SEQ ID NO: 3733540 - DNA, 25 bp, Homo sapien
gatgtccagaccgtcacagactgtg

SEQ ID NO: 3733541 - DNA, 25 bp, Homo sapien
caaagtgcttggacctttcaaagct

SEQ ID NO: 3733542 - DNA, 25 bp, Homo sapien
ttcccgacgctgttagacccatcta

SEQ ID NO: 3733543 - DNA, 25 bp, Homo sapien
gctgcatctgctccggatcagctgg

SEQ ID NO: 3733544 - DNA, 25 bp, Homo sapien
catctgctccggatcagctgggtgg

SEQ ID NO: 3733545 - DNA, 25 bp, Homo sapien
cgggctgcatctgctccggatcagc

SEQ ID NO: 3733546 - DNA, 25 bp, Homo sapien
gcatctgctccggatcagctgggtg

SEQ ID NO: 3733547 - DNA, 25 bp, Homo sapien
ggccaagtgagtcatatttaagcaa

SEQ ID NO: 3733548 - DNA, 25 bp, Homo sapien
ctcgacaggcgtgggacgtgggaga

SEQ ID NO: 3733549 - DNA, 25 bp, Homo sapien
gggagatgatggaaacgccctgcca

SEQ ID NO: 3733550 - DNA, 25 bp, Homo sapien
ccaagagtgcaaatgggccaagtga

SEQ ID NO: 3733551 - DNA, 25 bp, Homo sapien
ccccgagactggagtcaaaaacatt

SEQ ID NO: 3733552 - DNA, 25 bp, Homo sapien
cccgagactggagtcaaaaacattc

SEQ ID NO: 3733553 - DNA, 25 bp, Homo sapien
gaaaatgaatccaaggggaattcca

SEQ ID NO: 3733554 - DNA, 25 bp, Homo sapien
tggaactgaactggaatgctcccac

SEQ ID NO: 3733555 - DNA, 25 bp, Homo sapien
aaaaccatcctcttgattcttgcct

SEQ ID NO: 3733556 - DNA, 25 bp, Homo sapien
tcacttcctgttgggttgaaaatga

SEQ ID NO: 3733557 - DNA, 25 bp, Homo sapien
tatcatgcaataaggaggggcagcc

SEQ ID NO: 3733558 - DNA, 25 bp, Homo sapien
ttatcatgcaataaggaggggcagc

SEQ ID NO: 3733559 - DNA, 25 bp, Homo sapien
tcatgcaataaggaggggcagcctt

SEQ ID NO: 3733560 - DNA, 25 bp, Homo sapien
gctggactcctgaaagcagcccaca

SEQ ID NO: 3733561 - DNA, 25 bp, Homo sapien
gaccatggacttcagaggacttcag

SEQ ID NO: 3733562 - DNA, 25 bp, Homo sapien
aggagacagccataaatggctgtga

SEQ ID NO: 3733563 - DNA, 25 bp, Homo sapien
gagacagccataaatggctgtgacc

SEQ ID NO: 3733564 - DNA, 25 bp, Homo sapien
tgaccatggacttcagaggacttca

SEQ ID NO: 3733565 - DNA, 25 bp, Homo sapien
gaagtataaccacgatcccatccct

SEQ ID NO: 3733566 - DNA, 25 bp, Homo sapien
agaactcccagtctagttgaagaaa

SEQ ID NO: 3733567 - DNA, 25 bp, Homo sapien
ggatccactagagggaagatagtga

SEQ ID NO: 3733568 - DNA, 25 bp, Homo sapien
ttttcaacctgtgagtatttactgt

SEQ ID NO: 3733569 - DNA, 25 bp, Homo sapien
tctcaaattaggaggctcctgtaag

SEQ ID NO: 3733570 - DNA, 25 bp, Homo sapien
agctcagttataggaactgttgacc

SEQ ID NO: 3733571 - DNA, 25 bp, Homo sapien
gctaaatctcaaattaggaggctcc

SEQ ID NO: 3733572 - DNA, 25 bp, Homo sapien
taggaactgttgaccaatcctggaa

SEQ ID NO: 3733573 - DNA, 25 bp, Homo sapien
gtatttcagagcaagttccgtctcc

SEQ ID NO: 3733574 - DNA, 25 bp, Homo sapien
tcagagcaagttccgtctccgtgcg

SEQ ID NO: 3733575 - DNA, 25 bp, Homo sapien
tttcagagcaagttccgtctccgtg

SEQ ID NO: 3733576 - DNA, 25 bp, Homo sapien
agagcaagttccgtctccgtgcgcc

SEQ ID NO: 3733577 - DNA, 25 bp, Homo sapien
ctggggcacagaagcatttctgcct

SEQ ID NO: 3733578 - DNA, 25 bp, Homo sapien
agcatttctgcctccaggcaaccct

SEQ ID NO: 3733579 - DNA, 25 bp, Homo sapien
gaagcatttctgcctccaggcaacc

SEQ ID NO: 3733580 - DNA, 25 bp, Homo sapien
ggggcacagaagcatttctgcctcc

SEQ ID NO: 3733581 - DNA, 25 bp, Homo sapien
tgggaaacctgacccccacagcaaa

SEQ ID NO: 3733582 - DNA, 25 bp, Homo sapien
ttcccatcagtgacgatgatgagga

SEQ ID NO: 3733583 - DNA, 25 bp, Homo sapien
gcttggatggcagtgccacatcccc

SEQ ID NO: 3733584 - DNA, 25 bp, Homo sapien
tcagctgcttggatggcagtgccac

SEQ ID NO: 3733585 - DNA, 25 bp, Homo sapien
gcagagggccatgaggcaaagtccc

SEQ ID NO: 3733586 - DNA, 25 bp, Homo sapien
tgtctggcacaatgtgggaaacggc

SEQ ID NO: 3733587 - DNA, 25 bp, Homo sapien
tggcaatggctatgctcaaggcact

SEQ ID NO: 3733588 - DNA, 25 bp, Homo sapien
tgggttctaccctcatggacaaatc

SEQ ID NO: 3733589 - DNA, 25 bp, Homo sapien
ctgctgaagaagaaagcactggaag

SEQ ID NO: 3733590 - DNA, 25 bp, Homo sapien
ctgaagaagaaagcactggaaggag

SEQ ID NO: 3733591 - DNA, 25 bp, Homo sapien
gaagaagaaagcactggaaggagac

SEQ ID NO: 3733592 - DNA, 25 bp, Homo sapien
agaagaaagcactggaaggagacag

SEQ ID NO: 3733593 - DNA, 25 bp, Homo sapien
caacagcacgtgctgccctctaggc

SEQ ID NO: 3733594 - DNA, 25 bp, Homo sapien
ctgaagaggccgttggtggcatcct

SEQ ID NO: 3733595 - DNA, 25 bp, Homo sapien
aacagcacgtgctgccctctaggct

SEQ ID NO: 3733596 - DNA, 25 bp, Homo sapien
gagggtgctgaagaggccgttggtg

SEQ ID NO: 3733597 - DNA, 25 bp, Homo sapien
cccacacccacggaggagacagggt

SEQ ID NO: 3733598 - DNA, 25 bp, Homo sapien
cacccacggaggagacagggttcca

SEQ ID NO: 3733599 - DNA, 25 bp, Homo sapien
cacacccacggaggagacagggttc

SEQ ID NO: 3733600 - DNA, 25 bp, Homo sapien
cacccacacccacggaggagacagg

SEQ ID NO: 3733601 - DNA, 25 bp, Homo sapien
agggtccgccgcgatcctctccagc

SEQ ID NO: 3733602 - DNA, 25 bp, Homo sapien
gtgtgcagccagcaccgcaagggtc

SEQ ID NO: 3733603 - DNA, 25 bp, Homo sapien
ttgccagcgaactcccggaccatct

SEQ ID NO: 3733604 - DNA, 25 bp, Homo sapien
cctctccagcatggggcattgccag

SEQ ID NO: 3733605 - DNA, 25 bp, Homo sapien
tgcctgtgaccctgccaccagtgct

SEQ ID NO: 3733606 - DNA, 25 bp, Homo sapien
ccagtgctcaccctgggtacctggg

SEQ ID NO: 3733607 - DNA, 25 bp, Homo sapien
gaccctgccaccagtgctcaccctg

SEQ ID NO: 3733608 - DNA, 25 bp, Homo sapien
cagccttccagaatgcctgtgaccc

SEQ ID NO: 3733609 - DNA, 25 bp, Homo sapien
acaggggcaggccaatcaggtgctc

SEQ ID NO: 3733610 - DNA, 25 bp, Homo sapien
ggggcaggccaatcaggtgctcctc

SEQ ID NO: 3733611 - DNA, 25 bp, Homo sapien
gcaggccaatcaggtgctcctctag

SEQ ID NO: 3733612 - DNA, 25 bp, Homo sapien
ggcaggccaatcaggtgctcctcta

SEQ ID NO: 3733613 - DNA, 25 bp, Homo sapien
cagaaagccccactctgggttggca

SEQ ID NO: 3733614 - DNA, 25 bp, Homo sapien
tggcctcacctgaggagactcttgg

SEQ ID NO: 3733615 - DNA, 25 bp, Homo sapien
ctgggatggcctcacctgaggagac

SEQ ID NO: 3733616 - DNA, 25 bp, Homo sapien
tgggccttggcagaaacattcccta

SEQ ID NO: 3733617 - DNA, 25 bp, Homo sapien
ctgcgtctccggggccatgtgccct

SEQ ID NO: 3733618 - DNA, 25 bp, Homo sapien
tgcgtctccggggccatgtgccctg

SEQ ID NO: 3733619 - DNA, 25 bp, Homo sapien
gtctccggggccatgtgccctgctg

SEQ ID NO: 3733620 - DNA, 25 bp, Homo sapien
cctcgcctctcctgcgtctccgggg

SEQ ID NO: 3733621 - DNA, 25 bp, Homo sapien
cagggtgggttaggaacactctctt

SEQ ID NO: 3733622 - DNA, 25 bp, Homo sapien
gcagggtgggttaggaacactctct

SEQ ID NO: 3733623 - DNA, 25 bp, Homo sapien
ctatcagagagatgcccattaaccg

SEQ ID NO: 3733624 - DNA, 25 bp, Homo sapien
gcactggtagccgtccagtccttct

SEQ ID NO: 3733625 - DNA, 25 bp, Homo sapien
gcagaggcactggtagccgtccagt

SEQ ID NO: 3733626 - DNA, 25 bp, Homo sapien
ctggtagccgtccagtccttctgga

SEQ ID NO: 3733627 - DNA, 25 bp, Homo sapien
gaggcactggtagccgtccagtcct

SEQ ID NO: 3733628 - DNA, 25 bp, Homo sapien
cccaggagggagatggtgcagagaa

SEQ ID NO: 3733629 - DNA, 25 bp, Homo sapien
ccaggagggagatggtgcagagaaa

SEQ ID NO: 3733630 - DNA, 25 bp, Homo sapien
tcccaggagggagatggtgcagaga

SEQ ID NO: 3733631 - DNA, 25 bp, Homo sapien
ctcccaggagggagatggtgcagag

SEQ ID NO: 3733632 - DNA, 25 bp, Homo sapien
catgcgagctgtcccacccgagatg

SEQ ID NO: 3733633 - DNA, 25 bp, Homo sapien
gtcaagccatggtcatgcggcatgc

SEQ ID NO: 3733634 - DNA, 25 bp, Homo sapien
gtcatgcggcatgcgagctgtccca

SEQ ID NO: 3733635 - DNA, 25 bp, Homo sapien
gcggggatcacagcaacacccactg

SEQ ID NO: 3733636 - DNA, 25 bp, Homo sapien
tgagcaaaaccaccactctacgtgg

SEQ ID NO: 3733637 - DNA, 25 bp, Homo sapien
gggccaccacggaagggaatgccat

SEQ ID NO: 3733638 - DNA, 25 bp, Homo sapien
aagaggaggtcgaccctgcattcca

SEQ ID NO: 3733639 - DNA, 25 bp, Homo sapien
gatcctgaggatccgagtagaccat

SEQ ID NO: 3733640 - DNA, 25 bp, Homo sapien
tgtgccagtcagagcccctcgacgg

SEQ ID NO: 3733641 - DNA, 25 bp, Homo sapien
cagtggatgtgccagtcagagcccc

SEQ ID NO: 3733642 - DNA, 25 bp, Homo sapien
ggcttcagcagtggatgtgccagtc

SEQ ID NO: 3733643 - DNA, 25 bp, Homo sapien
cagagcccctcgacgggacccaggg

SEQ ID NO: 3733644 - DNA, 25 bp, Homo sapien
gagcaaaattctcgggccctactga

SEQ ID NO: 3733645 - DNA, 25 bp, Homo sapien
aatgagcacgtcctggtggtaccgc

SEQ ID NO: 3733646 - DNA, 25 bp, Homo sapien
taagctgccacgtggatcagggaat

SEQ ID NO: 3733647 - DNA, 25 bp, Homo sapien
tgtccaacatgaagacgaggtccag

SEQ ID NO: 3733648 - DNA, 25 bp, Homo sapien
tgagggtgtggattcccccactcac

SEQ ID NO: 3733649 - DNA, 25 bp, Homo sapien
gagggcctgccatgggggcagccct

SEQ ID NO: 3733650 - DNA, 25 bp, Homo sapien
ctgagggcctgccatgggggcagcc

SEQ ID NO: 3733651 - DNA, 25 bp, Homo sapien
gggcagccctgagggtgtggattcc

SEQ ID NO: 3733652 - DNA, 25 bp, Homo sapien
cctactgtaggattttatgtgagca

SEQ ID NO: 3733653 - DNA, 25 bp, Homo sapien
tcaaataggatggttatgcctactg

SEQ ID NO: 3733654 - DNA, 25 bp, Homo sapien
gatctttagacccttaggaagcttg

SEQ ID NO: 3733655 - DNA, 25 bp, Homo sapien
gagctgccatcctcgtcatgatgta

SEQ ID NO: 3733656 - DNA, 25 bp, Homo sapien
tctgcaggacgcagctgccctcatt

SEQ ID NO: 3733657 - DNA, 25 bp, Homo sapien
ttcatgcacgggctgggtttgcaga

SEQ ID NO: 3733658 - DNA, 25 bp, Homo sapien
gctgccctcattcatgcacgggctg

SEQ ID NO: 3733659 - DNA, 25 bp, Homo sapien
ttgcagcggtagctcccattctgca

SEQ ID NO: 3733660 - DNA, 25 bp, Homo sapien
atccctggctcacacatacagagca

SEQ ID NO: 3733661 - DNA, 25 bp, Homo sapien
cctggctcacacatacagagcaaga

SEQ ID NO: 3733662 - DNA, 25 bp, Homo sapien
cacatacagagcaagagctccactc

SEQ ID NO: 3733663 - DNA, 25 bp, Homo sapien
catacagagcaagagctccactcac

SEQ ID NO: 3733664 - DNA, 25 bp, Homo sapien
tctctgtagttgctgggaggggtac

SEQ ID NO: 3733665 - DNA, 25 bp, Homo sapien
tgctgccctcctgcacgggagccat

SEQ ID NO: 3733666 - DNA, 25 bp, Homo sapien
tagttgctgggaggggtacggctgc

SEQ ID NO: 3733667 - DNA, 25 bp, Homo sapien
ccatgtgcctcaggggcgtctcaag

SEQ ID NO: 3733668 - DNA, 25 bp, Homo sapien
ctggccacggcgggaagcagacatt

SEQ ID NO: 3733669 - DNA, 25 bp, Homo sapien
tcctccctcagtgagaatagtggtc

SEQ ID NO: 3733670 - DNA, 25 bp, Homo sapien
caacaacatcgtttgtgggtgacat

SEQ ID NO: 3733671 - DNA, 25 bp, Homo sapien
tcgtttgtgggtgacatcagctgct

SEQ ID NO: 3733672 - DNA, 25 bp, Homo sapien
ttgtgggtgacatcagctgctttct

SEQ ID NO: 3733673 - DNA, 25 bp, Homo sapien
ttgtgtgcaaaggaacgtcaggccg

SEQ ID NO: 3733674 - DNA, 25 bp, Homo sapien
tccaaaggatgctctagtaaaggcc

SEQ ID NO: 3733675 - DNA, 25 bp, Homo sapien
ggcagtcgccagaagtcacaaacgt

SEQ ID NO: 3733676 - DNA, 25 bp, Homo sapien
tggacactgctcacgactcagaacg

SEQ ID NO: 3733677 - DNA, 25 bp, Homo sapien
gcttcaagcgcttttctagcaccag

SEQ ID NO: 3733678 - DNA, 25 bp, Homo sapien
taaagtgtctggagtcacatcagag

SEQ ID NO: 3733679 - DNA, 25 bp, Homo sapien
tatgactcaatgtctggtacaccag

SEQ ID NO: 3733680 - DNA, 25 bp, Homo sapien
gaaagaattccataaacacgccaca

SEQ ID NO: 3733681 - DNA, 25 bp, Homo sapien
gtaatttctatgacatcactgatca

SEQ ID NO: 3733682 - DNA, 25 bp, Homo sapien
catctgctagggagcatgtgatcct

SEQ ID NO: 3733683 - DNA, 25 bp, Homo sapien
gcatgtgatcctgccccggacgttg

SEQ ID NO: 3733684 - DNA, 25 bp, Homo sapien
atcactgatcagcatctgctaggga

SEQ ID NO: 3733685 - DNA, 25 bp, Homo sapien
gaactagggtattcaacaagatgac

SEQ ID NO: 3733686 - DNA, 25 bp, Homo sapien
tcagcagggtttatagaatgatgca

SEQ ID NO: 3733687 - DNA, 25 bp, Homo sapien
gcagaactgaaatggaggccttaat

SEQ ID NO: 3733688 - DNA, 25 bp, Homo sapien
caaaatcgggttcattaaagagaca

SEQ ID NO: 3733689 - DNA, 25 bp, Homo sapien
gcctccttgaatcaaagagcataga

SEQ ID NO: 3733690 - DNA, 25 bp, Homo sapien
gatgggatcctagcaggaaactcag

SEQ ID NO: 3733691 - DNA, 25 bp, Homo sapien
gaaaaatcagtactcctcccagaag

SEQ ID NO: 3733692 - DNA, 25 bp, Homo sapien
tttacacactgaactacaagatggg

SEQ ID NO: 3733693 - DNA, 25 bp, Homo sapien
gactgagagcgggtctgcctctccc

SEQ ID NO: 3733694 - DNA, 25 bp, Homo sapien
cacgataggccttctgcaagttgag

SEQ ID NO: 3733695 - DNA, 25 bp, Homo sapien
cccacccagactgagagcgggtctg

SEQ ID NO: 3733696 - DNA, 25 bp, Homo sapien
ctcagcaagtcaagtccttccatgt

SEQ ID NO: 3733697 - DNA, 25 bp, Homo sapien
gtcctgcctggacaatgcaactgag

SEQ ID NO: 3733698 - DNA, 25 bp, Homo sapien
cctggacaatgcaactgaggccctc

SEQ ID NO: 3733699 - DNA, 25 bp, Homo sapien
tccccgacgttgtcctgcctggaca

SEQ ID NO: 3733700 - DNA, 25 bp, Homo sapien
gacaatgcaactgaggccctcccgg

SEQ ID NO: 3733701 - DNA, 25 bp, Homo sapien
ttctcagagcccaacacttacatcg

SEQ ID NO: 3733702 - DNA, 25 bp, Homo sapien
agagcccaacacttacatcgatggc

SEQ ID NO: 3733703 - DNA, 25 bp, Homo sapien
tcagagcccaacacttacatcgatg

SEQ ID NO: 3733704 - DNA, 25 bp, Homo sapien
tctcagagcccaacacttacatcga

SEQ ID NO: 3733705 - DNA, 25 bp, Homo sapien
ttggcggccatagcgatttgctgac

SEQ ID NO: 3733706 - DNA, 25 bp, Homo sapien
tgccttacaagctggcctgacctca

SEQ ID NO: 3733707 - DNA, 25 bp, Homo sapien
cagtgtgacatgcaggttgtgactg

SEQ ID NO: 3733708 - DNA, 25 bp, Homo sapien
agttgcttggattcttgacctgctc

SEQ ID NO: 3733709 - DNA, 25 bp, Homo sapien
tccatctcgacacaaacaagtggtc

SEQ ID NO: 3733710 - DNA, 25 bp, Homo sapien
gtctctcaactgtgagttcatattg

SEQ ID NO: 3733711 - DNA, 25 bp, Homo sapien
aagtggtcagaaaggccagcgcttc

SEQ ID NO: 3733712 - DNA, 25 bp, Homo sapien
gagttcatattggtcgtagccggga

SEQ ID NO: 3733713 - DNA, 25 bp, Homo sapien
gatttcagaccaaaggcgagggtgc

SEQ ID NO: 3733714 - DNA, 25 bp, Homo sapien
tcagaccaaaggcgagggtgcggtg

SEQ ID NO: 3733715 - DNA, 25 bp, Homo sapien
gaccaaaggcgagggtgcggtgctg

SEQ ID NO: 3733716 - DNA, 25 bp, Homo sapien
atttcagaccaaaggcgagggtgcg

SEQ ID NO: 3733717 - DNA, 25 bp, Homo sapien
caaattgagaactggccacagagca

SEQ ID NO: 3733718 - DNA, 25 bp, Homo sapien
caggaaagcatggtccaaattgaga

SEQ ID NO: 3733719 - DNA, 25 bp, Homo sapien
acagagcattcagcctttagtgtga

SEQ ID NO: 3733720 - DNA, 25 bp, Homo sapien
gtgacagagggtagtctgggctgct

SEQ ID NO: 3733721 - DNA, 25 bp, Homo sapien
tagagaatcctgaccttgggccaga

SEQ ID NO: 3733722 - DNA, 25 bp, Homo sapien
ccagatctcgggtgcccagagcttt

SEQ ID NO: 3733723 - DNA, 25 bp, Homo sapien
tgtcctgttcgactctagagaatcc

SEQ ID NO: 3733724 - DNA, 25 bp, Homo sapien
tgatgatgacccatggggagctcct

SEQ ID NO: 3733725 - DNA, 25 bp, Homo sapien
gcaggtctgtccagcaatagaaggg

SEQ ID NO: 3733726 - DNA, 25 bp, Homo sapien
tccaacccctacagactcagtagag

SEQ ID NO: 3733727 - DNA, 25 bp, Homo sapien
gcaacctcgtgggtgtggacagtga

SEQ ID NO: 3733728 - DNA, 25 bp, Homo sapien
acaggctcgggatgcttatcggcca

SEQ ID NO: 3733729 - DNA, 25 bp, Homo sapien
agaggccatggccgctggaacccca

SEQ ID NO: 3733730 - DNA, 25 bp, Homo sapien
ggagaggccatggccgctggaaccc

SEQ ID NO: 3733731 - DNA, 25 bp, Homo sapien
gaggccatggccgctggaaccccat

SEQ ID NO: 3733732 - DNA, 25 bp, Homo sapien
gagaggccatggccgctggaacccc

SEQ ID NO: 3733733 - DNA, 25 bp, Homo sapien
cagggagacttctagcaaagccagc

SEQ ID NO: 3733734 - DNA, 25 bp, Homo sapien
cagctgtaagttaattgggccacgg

SEQ ID NO: 3733735 - DNA, 25 bp, Homo sapien
taggtcccacctggtcttgtgcaag

SEQ ID NO: 3733736 - DNA, 25 bp, Homo sapien
tggcacgatcccaaggaggcctttc

SEQ ID NO: 3733737 - DNA, 25 bp, Homo sapien
aaattgtgttttacaagcacagcat

SEQ ID NO: 3733738 - DNA, 25 bp, Homo sapien
tgtgtgagtgttctagaaattgtgt

SEQ ID NO: 3733739 - DNA, 25 bp, Homo sapien
tgttttacaagcacagcatggactg

SEQ ID NO: 3733740 - DNA, 25 bp, Homo sapien
gtgtgagtgttctagaaattgtgtt

SEQ ID NO: 3733741 - DNA, 25 bp, Homo sapien
tgggctttgctagtggaagtgccat

SEQ ID NO: 3733742 - DNA, 25 bp, Homo sapien
gctagtggaagtgccatcttctgcc

SEQ ID NO: 3733743 - DNA, 25 bp, Homo sapien
aaatccagcgtctgattctgaccaa

SEQ ID NO: 3733744 - DNA, 25 bp, Homo sapien
gattctgaccaaggtatcttgggct

SEQ ID NO: 3733745 - DNA, 25 bp, Homo sapien
gctgttctgagccacggctggaact

SEQ ID NO: 3733746 - DNA, 25 bp, Homo sapien
ttaaccagaggttttctggtatggc

SEQ ID NO: 3733747 - DNA, 25 bp, Homo sapien
gagccacggctggaacttttctatc

SEQ ID NO: 3733748 - DNA, 25 bp, Homo sapien
ttggctgatggctttaaccagaggt

SEQ ID NO: 3733749 - DNA, 25 bp, Homo sapien
tcccatgagcatatgtaataaccca

SEQ ID NO: 3733750 - DNA, 25 bp, Homo sapien
tagctagggcttaatgagcattccc

SEQ ID NO: 3733751 - DNA, 25 bp, Homo sapien
gcccggcctaagtgaagtattttca

SEQ ID NO: 3733752 - DNA, 25 bp, Homo sapien
tcttccatgctggttgaaagtagag

SEQ ID NO: 3733753 - DNA, 25 bp, Homo sapien
ctggttcaccacggtgtctgatggc

SEQ ID NO: 3733754 - DNA, 25 bp, Homo sapien
ggttcaccacggtgtctgatggctt

SEQ ID NO: 3733755 - DNA, 25 bp, Homo sapien
gttcaccacggtgtctgatggcttt

SEQ ID NO: 3733756 - DNA, 25 bp, Homo sapien
gcctggttcaccacggtgtctgatg

SEQ ID NO: 3733757 - DNA, 25 bp, Homo sapien
ttccccacacatctggctggcccac

SEQ ID NO: 3733758 - DNA, 25 bp, Homo sapien
tcagcagacagcacccaagagctgc

SEQ ID NO: 3733759 - DNA, 25 bp, Homo sapien
cagcagacagcacccaagagctgct

SEQ ID NO: 3733760 - DNA, 25 bp, Homo sapien
aagagctgctcttccccacacatct

SEQ ID NO: 3733761 - DNA, 25 bp, Homo sapien
gcgcaactggttttgacagtccaca

SEQ ID NO: 3733762 - DNA, 25 bp, Homo sapien
gactatgcgcaactggttttgacag

SEQ ID NO: 3733763 - DNA, 25 bp, Homo sapien
ccagacgactatgcgcaactggttt

SEQ ID NO: 3733764 - DNA, 25 bp, Homo sapien
gacgactatgcgcaactggttttga

SEQ ID NO: 3733765 - DNA, 25 bp, Homo sapien
cctggaataagtgaaggtctttctt

SEQ ID NO: 3733766 - DNA, 25 bp, Homo sapien
tgaaatccgtcagcactccctggaa

SEQ ID NO: 3733767 - DNA, 25 bp, Homo sapien
gatggcattctttccacagcggtcg

SEQ ID NO: 3733768 - DNA, 25 bp, Homo sapien
ttccactcttgtatctcccatcagg

SEQ ID NO: 3733769 - DNA, 25 bp, Homo sapien
tgcatagagaatcgcagaagaatac

SEQ ID NO: 3733770 - DNA, 25 bp, Homo sapien
catagagaatcgcagaagaatacca

SEQ ID NO: 3733771 - DNA, 25 bp, Homo sapien
tttgcatagagaatcgcagaagaat

SEQ ID NO: 3733772 - DNA, 25 bp, Homo sapien
tagagaatcgcagaagaataccaga

SEQ ID NO: 3733773 - DNA, 25 bp, Homo sapien
tgtgcgtcagcttttcgtgagtgtt

SEQ ID NO: 3733774 - DNA, 25 bp, Homo sapien
gtcagcttttcgtgagtgttattca

SEQ ID NO: 3733775 - DNA, 25 bp, Homo sapien
caccagggaattccccggcccactg

SEQ ID NO: 3733776 - DNA, 25 bp, Homo sapien
ggcccactgtgcgtcagcttttcgt

SEQ ID NO: 3733777 - DNA, 25 bp, Homo sapien
cctgggcacagtcctctctggtggg

SEQ ID NO: 3733778 - DNA, 25 bp, Homo sapien
tgggcacagtcctctctggtgggct

SEQ ID NO: 3733779 - DNA, 25 bp, Homo sapien
tggtgggctccatgcagctgtccct

SEQ ID NO: 3733780 - DNA, 25 bp, Homo sapien
ggctccatgcagctgtccctcccca

SEQ ID NO: 3733781 - DNA, 25 bp, Homo sapien
ctgcaagatgacgacgcccagtgct

SEQ ID NO: 3733782 - DNA, 25 bp, Homo sapien
aagatgacgacgcccagtgctgaga

SEQ ID NO: 3733783 - DNA, 25 bp, Homo sapien
gcaagatgacgacgcccagtgctga

SEQ ID NO: 3733784 - DNA, 25 bp, Homo sapien
gatgacgacgcccagtgctgagagg

SEQ ID NO: 3733785 - DNA, 25 bp, Homo sapien
ttctaagtccagcatacatttcaag

SEQ ID NO: 3733786 - DNA, 25 bp, Homo sapien
ctgcttatgtgttcagaacctgctc

SEQ ID NO: 3733787 - DNA, 25 bp, Homo sapien
tccagcatacatttcaagagttgcc

SEQ ID NO: 3733788 - DNA, 25 bp, Homo sapien
catttcaagagttgcctctccttga

SEQ ID NO: 3733789 - DNA, 25 bp, Homo sapien
cacagctgtgactgagttttaacaa

SEQ ID NO: 3733790 - DNA, 25 bp, Homo sapien
tcacagctgtgactgagttttaaca

SEQ ID NO: 3733791 - DNA, 25 bp, Homo sapien
ttcaggctcgggttttggtcttctc

SEQ ID NO: 3733792 - DNA, 25 bp, Homo sapien
tcccttctttgactgcctcgaaagg

SEQ ID NO: 3733793 - DNA, 25 bp, Homo sapien
tctttacaactctagttgaagtgtg

SEQ ID NO: 3733794 - DNA, 25 bp, Homo sapien
tcgaaaggtggagctccatttcata

SEQ ID NO: 3733795 - DNA, 25 bp, Homo sapien
tctccatgggtcccgtaggtggccc

SEQ ID NO: 3733796 - DNA, 25 bp, Homo sapien
ctccatgggtcccgtaggtggccca

SEQ ID NO: 3733797 - DNA, 25 bp, Homo sapien
ctgatgaggagagatgagacagaag

SEQ ID NO: 3733798 - DNA, 25 bp, Homo sapien
gcagctccagcttggccctgccagc

SEQ ID NO: 3733799 - DNA, 25 bp, Homo sapien
cttggccctgccagccagcggccag

SEQ ID NO: 3733800 - DNA, 25 bp, Homo sapien
gagacagaaggagcagctccagctt

SEQ ID NO: 3733801 - DNA, 25 bp, Homo sapien
ctttgagaactgagtatcaacaacc

SEQ ID NO: 3733802 - DNA, 25 bp, Homo sapien
ctgagtatcaacaaccaggctgagc

SEQ ID NO: 3733803 - DNA, 25 bp, Homo sapien
caaagcgtttggcatgatttcagcc

SEQ ID NO: 3733804 - DNA, 25 bp, Homo sapien
ccttccctgatttgcctcttcccag

SEQ ID NO: 3733805 - DNA, 25 bp, Homo sapien
ttcttctagaatcatccagcgaggg

SEQ ID NO: 3733806 - DNA, 25 bp, Homo sapien
cttcttctagaatcatccagcgagg

SEQ ID NO: 3733807 - DNA, 25 bp, Homo sapien
tcttcttctagaatcatccagcgag

SEQ ID NO: 3733808 - DNA, 25 bp, Homo sapien
catggtagaaggactgtggtgagtc

SEQ ID NO: 3733809 - DNA, 25 bp, Homo sapien
cataaatatggtcatcacccagtgc

SEQ ID NO: 3733810 - DNA, 25 bp, Homo sapien
tggaatgaaagcctctcggacataa

SEQ ID NO: 3733811 - DNA, 25 bp, Homo sapien
tggtgagtcttgtgaggacagcccc

SEQ ID NO: 3733812 - DNA, 25 bp, Homo sapien
ctcctaaaatgtgctgcagagtgtc

SEQ ID NO: 3733813 - DNA, 25 bp, Homo sapien
tgatcattcccaagaggttctgttg

SEQ ID NO: 3733814 - DNA, 25 bp, Homo sapien
tggcccctgctgcttatacttcata

SEQ ID NO: 3733815 - DNA, 25 bp, Homo sapien
tgcttcgagtccctggcctatgtgg

SEQ ID NO: 3733816 - DNA, 25 bp, Homo sapien
gcagccatgtttggatctgatgtta

SEQ ID NO: 3733817 - DNA, 25 bp, Homo sapien
taaccaggatgtcaagtcctccagc

SEQ ID NO: 3733818 - DNA, 25 bp, Homo sapien
aaccaggatgtcaagtcctccagct

SEQ ID NO: 3733819 - DNA, 25 bp, Homo sapien
accaggatgtcaagtcctccagctg

SEQ ID NO: 3733820 - DNA, 25 bp, Homo sapien
gtgtctgtgcgtatagatttcttct

SEQ ID NO: 3733821 - DNA, 25 bp, Homo sapien
tcaagtgtaagacttgtcctacaag

SEQ ID NO: 3733822 - DNA, 25 bp, Homo sapien
gagagtgcaaaggaccttgttctat

SEQ ID NO: 3733823 - DNA, 25 bp, Homo sapien
caagtgtaagacttgtcctacaaga

SEQ ID NO: 3733824 - DNA, 25 bp, Homo sapien
tgttctattggagtggagagacttc

SEQ ID NO: 3733825 - DNA, 25 bp, Homo sapien
ttctaccacttccattcaggtctcc

SEQ ID NO: 3733826 - DNA, 25 bp, Homo sapien
tccaaagaagggattcccactgaga

SEQ ID NO: 3733827 - DNA, 25 bp, Homo sapien
gatcttgagtccaaagaagggattc

SEQ ID NO: 3733828 - DNA, 25 bp, Homo sapien
gagtccaaagaagggattcccactg

SEQ ID NO: 3733829 - DNA, 25 bp, Homo sapien
ctgtatggctgtgacacagttgtgc

SEQ ID NO: 3733830 - DNA, 25 bp, Homo sapien
acagttgtgctgtgacggttccaga

SEQ ID NO: 3733831 - DNA, 25 bp, Homo sapien
ttaccggaattgtggctgaggatcg

SEQ ID NO: 3733832 - DNA, 25 bp, Homo sapien
tgcatggtggtcaagcacggtttct

SEQ ID NO: 3733833 - DNA, 25 bp, Homo sapien
acttgtttgccctgctcatgctctg

SEQ ID NO: 3733834 - DNA, 25 bp, Homo sapien
ctctgcagttcctggagacacctgg

SEQ ID NO: 3733835 - DNA, 25 bp, Homo sapien
agagcaggacttgtttgccctgctc

SEQ ID NO: 3733836 - DNA, 25 bp, Homo sapien
gcagttcctggagacacctggcaca

SEQ ID NO: 3733837 - DNA, 25 bp, Homo sapien
agcgttactcagtctgctctgagga

SEQ ID NO: 3733838 - DNA, 25 bp, Homo sapien
gctctgaggactgtctgcattggaa

SEQ ID NO: 3733839 - DNA, 25 bp, Homo sapien
tggattgcagggcagcgttactcag

SEQ ID NO: 3733840 - DNA, 25 bp, Homo sapien
gatcgtttctgatcctgtggtccag

SEQ ID NO: 3733841 - DNA, 25 bp, Homo sapien
atgtggaggtgaagccaccgtgagt

SEQ ID NO: 3733842 - DNA, 25 bp, Homo sapien
gatgtggaggtgaagccaccgtgag

SEQ ID NO: 3733843 - DNA, 25 bp, Homo sapien
gtttgtaggcctgtaacacctggct

SEQ ID NO: 3733844 - DNA, 25 bp, Homo sapien
ggtctgccaaccaacaaatctataa

SEQ ID NO: 3733845 - DNA, 25 bp, Homo sapien
gagcggccgtaggcatgcagcaggt

SEQ ID NO: 3733846 - DNA, 25 bp, Homo sapien
acccaaccacccgaggtctgccagc

SEQ ID NO: 3733847 - DNA, 25 bp, Homo sapien
agtggatgactcagtgtgagcggcc

SEQ ID NO: 3733848 - DNA, 25 bp, Homo sapien
ttctgtttcactcccatctcccacg

SEQ ID NO: 3733849 - DNA, 25 bp, Homo sapien
ctcttttgcctgtagggtgatggcc

SEQ ID NO: 3733850 - DNA, 25 bp, Homo sapien
tagcactgagcaggactcttttgcc

SEQ ID NO: 3733851 - DNA, 25 bp, Homo sapien
cacgggagtcctgtttcctatgaca

SEQ ID NO: 3733852 - DNA, 25 bp, Homo sapien
tccaattccaatacttagcactgag

SEQ ID NO: 3733853 - DNA, 25 bp, Homo sapien
aaggctcggaatgcccccgggacat

SEQ ID NO: 3733854 - DNA, 25 bp, Homo sapien
tcagctcggcaaggctcggaatgcc

SEQ ID NO: 3733855 - DNA, 25 bp, Homo sapien
agctcggcaaggctcggaatgcccc

SEQ ID NO: 3733856 - DNA, 25 bp, Homo sapien
ttccttcagctcggcaaggctcgga

SEQ ID NO: 3733857 - DNA, 25 bp, Homo sapien
cagggataggctgtagcgagtcggg

SEQ ID NO: 3733858 - DNA, 25 bp, Homo sapien
agggataggctgtagcgagtcgggt

SEQ ID NO: 3733859 - DNA, 25 bp, Homo sapien
ctctgaacaaacacttcccttctac

SEQ ID NO: 3733860 - DNA, 25 bp, Homo sapien
tcagggataggctgtagcgagtcgg

SEQ ID NO: 3733861 - DNA, 25 bp, Homo sapien
gagtgtgggccactttttagtaaga

SEQ ID NO: 3733862 - DNA, 25 bp, Homo sapien
gccactatgagtgtgggccactttt

SEQ ID NO: 3733863 - DNA, 25 bp, Homo sapien
tgaagcttctgagccactatgagtg

SEQ ID NO: 3733864 - DNA, 25 bp, Homo sapien
ggatttgaggaggtttgaagcttct

SEQ ID NO: 3733865 - DNA, 25 bp, Homo sapien
gctgtgtcataggtgtttgatttgg

SEQ ID NO: 3733866 - DNA, 25 bp, Homo sapien
gtttagtagagccattacactgtgc

SEQ ID NO: 3733867 - DNA, 25 bp, Homo sapien
ccaataacccagaccatattgacca

SEQ ID NO: 3733868 - DNA, 25 bp, Homo sapien
aataacagcaggatattccaggact

SEQ ID NO: 3733869 - DNA, 25 bp, Homo sapien
aaaagctgtgtcgtgttccctgtga

SEQ ID NO: 3733870 - DNA, 25 bp, Homo sapien
taactcggagacgtctagctggcaa

SEQ ID NO: 3733871 - DNA, 25 bp, Homo sapien
caaaagtgtttctcctaagagtgca

SEQ ID NO: 3733872 - DNA, 25 bp, Homo sapien
caatcatgtgtgtggttcctgcgag

SEQ ID NO: 3733873 - DNA, 25 bp, Homo sapien
tggaactccatcagggaacagggca

SEQ ID NO: 3733874 - DNA, 25 bp, Homo sapien
tctggagctccacctttgcaaagaa

SEQ ID NO: 3733875 - DNA, 25 bp, Homo sapien
caagtgcccttaggatgccgcatgg

SEQ ID NO: 3733876 - DNA, 25 bp, Homo sapien
tgactgtccggataagagctggcaa

SEQ ID NO: 3733877 - DNA, 25 bp, Homo sapien
cacacactcattaacatgtgaatgt

SEQ ID NO: 3733878 - DNA, 25 bp, Homo sapien
ttgaggttttaaaccatacgcttgc

SEQ ID NO: 3733879 - DNA, 25 bp, Homo sapien
ttccacacactcattaacatgtgaa

SEQ ID NO: 3733880 - DNA, 25 bp, Homo sapien
tgaggttttaaaccatacgcttgct

SEQ ID NO: 3733881 - DNA, 25 bp, Homo sapien
caactgtgaacagcatagtgagaca

SEQ ID NO: 3733882 - DNA, 25 bp, Homo sapien
aatcactgcctgacctgaattggcc

SEQ ID NO: 3733883 - DNA, 25 bp, Homo sapien
tctagcaggaaagcgcttgtgcacg

SEQ ID NO: 3733884 - DNA, 25 bp, Homo sapien
cagtggtgcccacattcaaggtatt

SEQ ID NO: 3733885 - DNA, 25 bp, Homo sapien
cattagagtagatgttatttcccca

SEQ ID NO: 3733886 - DNA, 25 bp, Homo sapien
cccagaatcctggtttgtatgctaa

SEQ ID NO: 3733887 - DNA, 25 bp, Homo sapien
cacttcaaatgtgtaggcaggtact

SEQ ID NO: 3733888 - DNA, 25 bp, Homo sapien
taaccagcactattaaaggcaaaca

SEQ ID NO: 3733889 - DNA, 25 bp, Homo sapien
gatgaataaggttcctacgtaaagc

SEQ ID NO: 3733890 - DNA, 25 bp, Homo sapien
gaggaatcagcatgtcacgagtgaa

SEQ ID NO: 3733891 - DNA, 25 bp, Homo sapien
ggtactccgtgagtgcacattgcat

SEQ ID NO: 3733892 - DNA, 25 bp, Homo sapien
tgcacacttcgagaatgcaaagatg

SEQ ID NO: 3733893 - DNA, 25 bp, Homo sapien
ttaatgtgattttatgcacgcgctc

SEQ ID NO: 3733894 - DNA, 25 bp, Homo sapien
tgtgattttatgcacgcgctccttc

SEQ ID NO: 3733895 - DNA, 25 bp, Homo sapien
gtgattttatgcacgcgctccttct

SEQ ID NO: 3733896 - DNA, 25 bp, Homo sapien
aatgtgattttatgcacgcgctcct

SEQ ID NO: 3733897 - DNA, 25 bp, Homo sapien
aagcagggtagccttgacatggccg

SEQ ID NO: 3733898 - DNA, 25 bp, Homo sapien
ttggggaaagatcccactgccgcac

SEQ ID NO: 3733899 - DNA, 25 bp, Homo sapien
gaagagattccatcggaatgtcacc

SEQ ID NO: 3733900 - DNA, 25 bp, Homo sapien
cgggagggaatggcagcttccacat

SEQ ID NO: 3733901 - DNA, 25 bp, Homo sapien
aagggctcttgtacccccagctcac

SEQ ID NO: 3733902 - DNA, 25 bp, Homo sapien
gaaagggctcttgtacccccagctc

SEQ ID NO: 3733903 - DNA, 25 bp, Homo sapien
tggaaagggctcttgtacccccagc

SEQ ID NO: 3733904 - DNA, 25 bp, Homo sapien
aaagggctcttgtacccccagctca

SEQ ID NO: 3733905 - DNA, 25 bp, Homo sapien
caaataggaccgttttatgcatgtt

SEQ ID NO: 3733906 - DNA, 25 bp, Homo sapien
taatgaccacatagtggtaaaatcc

SEQ ID NO: 3733907 - DNA, 25 bp, Homo sapien
tacaatttccttcacttggcagtaa

SEQ ID NO: 3733908 - DNA, 25 bp, Homo sapien
cacatagatacctgtgggagggcat

SEQ ID NO: 3733909 - DNA, 25 bp, Homo sapien
caggacaactccagatgacagctcc

SEQ ID NO: 3733910 - DNA, 25 bp, Homo sapien
agcacaggacaactccagatgacag

SEQ ID NO: 3733911 - DNA, 25 bp, Homo sapien
gactggtccgtcaaagctttccttg

SEQ ID NO: 3733912 - DNA, 25 bp, Homo sapien
ctgcagccttgccagactggtccgt

SEQ ID NO: 3733913 - DNA, 25 bp, Homo sapien
ctgccttgacaccggtgtttgtgag

SEQ ID NO: 3733914 - DNA, 25 bp, Homo sapien
ccttgacaccggtgtttgtgaggtt

SEQ ID NO: 3733915 - DNA, 25 bp, Homo sapien
gccttgacaccggtgtttgtgaggt

SEQ ID NO: 3733916 - DNA, 25 bp, Homo sapien
ggttgattggccccaggatgttcca

SEQ ID NO: 3733917 - DNA, 25 bp, Homo sapien
tttaatataaccaagtgctgttcat

SEQ ID NO: 3733918 - DNA, 25 bp, Homo sapien
cctacccgacagaggtgatcttcaa

SEQ ID NO: 3733919 - DNA, 25 bp, Homo sapien
tccacgggaattttcatgaccttct

SEQ ID NO: 3733920 - DNA, 25 bp, Homo sapien
cttttaccactatagacataaaagg

SEQ ID NO: 3733921 - DNA, 25 bp, Homo sapien
tgattgattccagggtgccccacct

SEQ ID NO: 3733922 - DNA, 25 bp, Homo sapien
cctgtgctctctgggaacgtgcagt

SEQ ID NO: 3733923 - DNA, 25 bp, Homo sapien
gacagcaggacaggatttagactcg

SEQ ID NO: 3733924 - DNA, 25 bp, Homo sapien
tcagatggagccgagggaagtcctc

SEQ ID NO: 3733925 - DNA, 25 bp, Homo sapien
gaagtcctctagaccctggaatgcc

SEQ ID NO: 3733926 - DNA, 25 bp, Homo sapien
tgtgccggctgcggaagagatatca

SEQ ID NO: 3733927 - DNA, 25 bp, Homo sapien
gctgctggcgctggataagcagtgg

SEQ ID NO: 3733928 - DNA, 25 bp, Homo sapien
gtgccggctgcggaagagatatcaa

SEQ ID NO: 3733929 - DNA, 25 bp, Homo sapien
gctggcgctggataagcagtggcac

SEQ ID NO: 3733930 - DNA, 25 bp, Homo sapien
gccgatgtcgtccagtccgaaagaa

SEQ ID NO: 3733931 - DNA, 25 bp, Homo sapien
acagccgatgtcgtccagtccgaaa

SEQ ID NO: 3733932 - DNA, 25 bp, Homo sapien
tgcacagccgatgtcgtccagtccg

SEQ ID NO: 3733933 - DNA, 25 bp, Homo sapien
gatgtcgtccagtccgaaagaaacc

SEQ ID NO: 3733934 - DNA, 25 bp, Homo sapien
agatgggaaacgtcctggtacccag

SEQ ID NO: 3733935 - DNA, 25 bp, Homo sapien
tggggagatgggaaacgtcctggta

SEQ ID NO: 3733936 - DNA, 25 bp, Homo sapien
ctggtacccaggtgtgccctgtgat

SEQ ID NO: 3733937 - DNA, 25 bp, Homo sapien
gaaacgtcctggtacccaggtgtgc

SEQ ID NO: 3733938 - DNA, 25 bp, Homo sapien
ggaggagcaagatcaggaccaggac

SEQ ID NO: 3733939 - DNA, 25 bp, Homo sapien
atcaggaccaggactatctgccatg

SEQ ID NO: 3733940 - DNA, 25 bp, Homo sapien
agggagggaggagcaagatcaggac

SEQ ID NO: 3733941 - DNA, 25 bp, Homo sapien
gactatctgccatgcatcgtcccat

SEQ ID NO: 3733942 - DNA, 25 bp, Homo sapien
cctctttgccatcgcattcacagcc

SEQ ID NO: 3733943 - DNA, 25 bp, Homo sapien
gccctctttgccatcgcattcacag

SEQ ID NO: 3733944 - DNA, 25 bp, Homo sapien
tatcttggcatttgattcattttga

SEQ ID NO: 3733945 - DNA, 25 bp, Homo sapien
agaagcatatcttggcatttgattc

SEQ ID NO: 3733946 - DNA, 25 bp, Homo sapien
tagactccctgttgtgcttgccact

SEQ ID NO: 3733947 - DNA, 25 bp, Homo sapien
gcttgccacttagagctcacactgg

SEQ ID NO: 3733948 - DNA, 25 bp, Homo sapien
ggctcgggtcctggcaatgtccatc

SEQ ID NO: 3733949 - DNA, 25 bp, Homo sapien
tcaggaatcaactcgaggaggctcg

SEQ ID NO: 3733950 - DNA, 25 bp, Homo sapien
cttctgtatctctttcgaatgtaca

SEQ ID NO: 3733951 - DNA, 25 bp, Homo sapien
tatctctttcgaatgtacagccaac

SEQ ID NO: 3733952 - DNA, 25 bp, Homo sapien
tgtatctctttcgaatgtacagcca

SEQ ID NO: 3733953 - DNA, 25 bp, Homo sapien
tctgtatctctttcgaatgtacagc

SEQ ID NO: 3733954 - DNA, 25 bp, Homo sapien
ctctcttgctgagcggcaagcattc

SEQ ID NO: 3733955 - DNA, 25 bp, Homo sapien
tcttgctgagcggcaagcattcctt

SEQ ID NO: 3733956 - DNA, 25 bp, Homo sapien
ctcttgctgagcggcaagcattcct

SEQ ID NO: 3733957 - DNA, 25 bp, Homo sapien
tctcttgctgagcggcaagcattcc

SEQ ID NO: 3733958 - DNA, 25 bp, Homo sapien
tttgtttgctgtttagaagtctttc

SEQ ID NO: 3733959 - DNA, 25 bp, Homo sapien
ttagaagtctttcctcatccaagtt

SEQ ID NO: 3733960 - DNA, 25 bp, Homo sapien
caagttttgtttgtttgctgtttag

SEQ ID NO: 3733961 - DNA, 25 bp, Homo sapien
tttgtttgtttgctgtttagaagtc

SEQ ID NO: 3733962 - DNA, 25 bp, Homo sapien
caaatcagccatggacctgtgacgg

SEQ ID NO: 3733963 - DNA, 25 bp, Homo sapien
cctgtgacggccatgggtacaagac

SEQ ID NO: 3733964 - DNA, 25 bp, Homo sapien
caaagctgctaacagaaagggaata

SEQ ID NO: 3733965 - DNA, 25 bp, Homo sapien
tatggatggactcctgttaacttgg

SEQ ID NO: 3733966 - DNA, 25 bp, Homo sapien
cccagggcctcatccggtttgttga

SEQ ID NO: 3733967 - DNA, 25 bp, Homo sapien
cccaaacagcagtcttactttaact

SEQ ID NO: 3733968 - DNA, 25 bp, Homo sapien
cctcatccggtttgttgatgggata

SEQ ID NO: 3733969 - DNA, 25 bp, Homo sapien
tgggatatggttccccccaaacagc

SEQ ID NO: 3733970 - DNA, 25 bp, Homo sapien
tttgagaggcaaagtagtgaccggc

SEQ ID NO: 3733971 - DNA, 25 bp, Homo sapien
ggagacacactgtgttgtggcctcc

SEQ ID NO: 3733972 - DNA, 25 bp, Homo sapien
gcaaagtagtgaccggcatctgctg

SEQ ID NO: 3733973 - DNA, 25 bp, Homo sapien
tagtgaccggcatctgctgctggca

SEQ ID NO: 3733974 - DNA, 25 bp, Homo sapien
acccgctctcctgactgatggcttt

SEQ ID NO: 3733975 - DNA, 25 bp, Homo sapien
gaagcgtcttgggtatagtaggcca

SEQ ID NO: 3733976 - DNA, 25 bp, Homo sapien
ttgggtatagtaggccataggccac

SEQ ID NO: 3733977 - DNA, 25 bp, Homo sapien
ttcttcaagatgctgtggagctttt

SEQ ID NO: 3733978 - DNA, 25 bp, Homo sapien
ggccataggccacaaatggctttgt

SEQ ID NO: 3733979 - DNA, 25 bp, Homo sapien
atgttcctgtgctacgaagccccag

SEQ ID NO: 3733980 - DNA, 25 bp, Homo sapien
tgtaaagctcaaaacaacccttgga

SEQ ID NO: 3733981 - DNA, 25 bp, Homo sapien
gaagccccagagtgttcaggagcag

SEQ ID NO: 3733982 - DNA, 25 bp, Homo sapien
gaaagatctcacgatgctgcagctt

SEQ ID NO: 3733983 - DNA, 25 bp, Homo sapien
gggtggctcacctcacacacgcgtg

SEQ ID NO: 3733984 - DNA, 25 bp, Homo sapien
gtgtgtgaacacatcaaaaggatca

SEQ ID NO: 3733985 - DNA, 25 bp, Homo sapien
acatcaaaaggatcatcatatacag

SEQ ID NO: 3733986 - DNA, 25 bp, Homo sapien
gtggctcacctcacacacgcgtgtg

SEQ ID NO: 3733987 - DNA, 25 bp, Homo sapien
tggaggagggtaagtgaaaagctct

SEQ ID NO: 3733988 - DNA, 25 bp, Homo sapien
ttatatgtagttcggttgtctttaa

SEQ ID NO: 3733989 - DNA, 25 bp, Homo sapien
gtggaacttagttcacaggtgtctg

SEQ ID NO: 3733990 - DNA, 25 bp, Homo sapien
ggagtggaacttagttcacaggtgt

SEQ ID NO: 3733991 - DNA, 25 bp, Homo sapien
caactttcatgtgtttcctctccat

SEQ ID NO: 3733992 - DNA, 25 bp, Homo sapien
ctaagaacgttcatgtttttgctta

SEQ ID NO: 3733993 - DNA, 25 bp, Homo sapien
taagaacgttcatgtttttgcttag

SEQ ID NO: 3733994 - DNA, 25 bp, Homo sapien
cactttgtctggaggtagctcggca

SEQ ID NO: 3733995 - DNA, 25 bp, Homo sapien
gaaacagcggctgtttttcttagac

SEQ ID NO: 3733996 - DNA, 25 bp, Homo sapien
ttagaccaagagattcataatggcc

SEQ ID NO: 3733997 - DNA, 25 bp, Homo sapien
ggccttcagagggtgtagctatgtt

SEQ ID NO: 3733998 - DNA, 25 bp, Homo sapien
ccagaatgctaaagcagggagcctg

SEQ ID NO: 3733999 - DNA, 25 bp, Homo sapien
cagggagcctgacttcagccagaac

SEQ ID NO: 3734000 - DNA, 25 bp, Homo sapien
caccagaatgctaaagcagggagcc

SEQ ID NO: 3734001 - DNA, 25 bp, Homo sapien
ggagcctgacttcagccagaacacc

SEQ ID NO: 3734002 - DNA, 25 bp, Homo sapien
cattgccaaagacaactttgcctgt

SEQ ID NO: 3734003 - DNA, 25 bp, Homo sapien
caggccttgtgcaagggaatgtcca

SEQ ID NO: 3734004 - DNA, 25 bp, Homo sapien
ggaatgtccattgccaaagacaact

SEQ ID NO: 3734005 - DNA, 25 bp, Homo sapien
tgtgcaagggaatgtccattgccaa

SEQ ID NO: 3734006 - DNA, 25 bp, Homo sapien
ctcccatctgaatggttcttgcaga

SEQ ID NO: 3734007 - DNA, 25 bp, Homo sapien
agctcccatctgaatggttcttgca

SEQ ID NO: 3734008 - DNA, 25 bp, Homo sapien
gctcccatctgaatggttcttgcag

SEQ ID NO: 3734009 - DNA, 25 bp, Homo sapien
tagctcccatctgaatggttcttgc

SEQ ID NO: 3734010 - DNA, 25 bp, Homo sapien
aagccacacagtttcctatgtcctg

SEQ ID NO: 3734011 - DNA, 25 bp, Homo sapien
gaggaaaccattgctgtttagactg

SEQ ID NO: 3734012 - DNA, 25 bp, Homo sapien
gtttagactgagactcttcatcatt

SEQ ID NO: 3734013 - DNA, 25 bp, Homo sapien
tcttcatcattagcccaggcatctg

SEQ ID NO: 3734014 - DNA, 25 bp, Homo sapien
ctgaggaaaccattgctgtttagac

SEQ ID NO: 3734015 - DNA, 25 bp, Homo sapien
gggtaagaacttggcaggacatgag

SEQ ID NO: 3734016 - DNA, 25 bp, Homo sapien
gtaagaacttggcaggacatgagca

SEQ ID NO: 3734017 - DNA, 25 bp, Homo sapien
gcaggacatgagcaggcccatttac

SEQ ID NO: 3734018 - DNA, 25 bp, Homo sapien
ttggcaggacatgagcaggcccatt

SEQ ID NO: 3734019 - DNA, 25 bp, Homo sapien
gaaccctaataatatctaacctcat

SEQ ID NO: 3734020 - DNA, 25 bp, Homo sapien
gagagttcttccatttactgagggc

SEQ ID NO: 3734021 - DNA, 25 bp, Homo sapien
tttactgagggcacactgtccagaa

SEQ ID NO: 3734022 - DNA, 25 bp, Homo sapien
ctgtccagaaccctaataatatcta

SEQ ID NO: 3734023 - DNA, 25 bp, Homo sapien
tgcttgtgaggttcccctgttcaag

SEQ ID NO: 3734024 - DNA, 25 bp, Homo sapien
caggacatttcccagcaagggccag

SEQ ID NO: 3734025 - DNA, 25 bp, Homo sapien
tcccctgttcaagcctttggtggga

SEQ ID NO: 3734026 - DNA, 25 bp, Homo sapien
cagtcccatttgcttgacttacttg

SEQ ID NO: 3734027 - DNA, 25 bp, Homo sapien
tttccgagagcctggccgactcgga

SEQ ID NO: 3734028 - DNA, 25 bp, Homo sapien
gtcggtccccgcgtgtggactgcgg

SEQ ID NO: 3734029 - DNA, 25 bp, Homo sapien
gcgaccgtggtcttcgctctcctgt

SEQ ID NO: 3734030 - DNA, 25 bp, Homo sapien
tggactgcgggctgagccccctcag

SEQ ID NO: 3734031 - DNA, 25 bp, Homo sapien
tcaagcgctagttgataaacctcca

SEQ ID NO: 3734032 - DNA, 25 bp, Homo sapien
ccagggcactaagaggtttttgttg

SEQ ID NO: 3734033 - DNA, 25 bp, Homo sapien
tgataaacctccagggcactaagag

SEQ ID NO: 3734034 - DNA, 25 bp, Homo sapien
tgttgcttattagcatcaagcgcta

SEQ ID NO: 3734035 - DNA, 25 bp, Homo sapien
tcatctgtgtagtctattacaagca

SEQ ID NO: 3734036 - DNA, 25 bp, Homo sapien
catctgtgtagtctattacaagcat

SEQ ID NO: 3734037 - DNA, 25 bp, Homo sapien
gactatttgtgggtcctctgcaaca

SEQ ID NO: 3734038 - DNA, 25 bp, Homo sapien
tatgccacgttatgtccactgtagc

SEQ ID NO: 3734039 - DNA, 25 bp, Homo sapien
caaaaatgggtttgttgtccaccat

SEQ ID NO: 3734040 - DNA, 25 bp, Homo sapien
taggattgcaggcttcacagttctg

SEQ ID NO: 3734041 - DNA, 25 bp, Homo sapien
gcaggccagcgctcttgctgcaaca

SEQ ID NO: 3734042 - DNA, 25 bp, Homo sapien
tttccaggtagaatgtagcagatca

SEQ ID NO: 3734043 - DNA, 25 bp, Homo sapien
agcagatcatggcaggccagcgctc

SEQ ID NO: 3734044 - DNA, 25 bp, Homo sapien
gaaaaaatatgacaggctgacttct

SEQ ID NO: 3734045 - DNA, 25 bp, Homo sapien
gagagagtacagttcgaccgacatt

SEQ ID NO: 3734046 - DNA, 25 bp, Homo sapien
taaattggagggtaacaacagtgcc

SEQ ID NO: 3734047 - DNA, 25 bp, Homo sapien
taatggctaactgcctggtccctgg

SEQ ID NO: 3734048 - DNA, 25 bp, Homo sapien
taacacgggttagtccacaagatgg

SEQ ID NO: 3734049 - DNA, 25 bp, Homo sapien
gattcccatatcctttggagtctgg

SEQ ID NO: 3734050 - DNA, 25 bp, Homo sapien
tccatgatctggcaactgctctagt

SEQ ID NO: 3734051 - DNA, 25 bp, Homo sapien
caagaacattctttgacgtaaccgc

SEQ ID NO: 3734052 - DNA, 25 bp, Homo sapien
ggtcttgggaaattgcaatcttgct

SEQ ID NO: 3734053 - DNA, 25 bp, Homo sapien
ctgtaaggaccgatttggaagactc

SEQ ID NO: 3734054 - DNA, 25 bp, Homo sapien
ctgactttgtagggacacgcagccg

SEQ ID NO: 3734055 - DNA, 25 bp, Homo sapien
cagccgtccatatatgcgtatagca

SEQ ID NO: 3734056 - DNA, 25 bp, Homo sapien
gcgtatagcattcagaggttcttcc

SEQ ID NO: 3734057 - DNA, 25 bp, Homo sapien
caccggttgggacacggtggcagcc

SEQ ID NO: 3734058 - DNA, 25 bp, Homo sapien
cgaggagggcgttcggcgaggactc

SEQ ID NO: 3734059 - DNA, 25 bp, Homo sapien
gtggcagcccggctcgggttccttc

SEQ ID NO: 3734060 - DNA, 25 bp, Homo sapien
cgcttcaggtgtgcgcgggcggctc

SEQ ID NO: 3734061 - DNA, 25 bp, Homo sapien
tccagagtgaaggccggtgcggggc

SEQ ID NO: 3734062 - DNA, 25 bp, Homo sapien
ctccagagtgaaggccggtgcgggg

SEQ ID NO: 3734063 - DNA, 25 bp, Homo sapien
tcccgggacgacctggagagctcct

SEQ ID NO: 3734064 - DNA, 25 bp, Homo sapien
acgacctggagagctcctcgatccg

SEQ ID NO: 3734065 - DNA, 25 bp, Homo sapien
tctcccgggacgacctggagagctc

SEQ ID NO: 3734066 - DNA, 25 bp, Homo sapien
gggacgacctggagagctcctcgat

SEQ ID NO: 3734067 - DNA, 25 bp, Homo sapien
tgcaggatggaggtgaacttggaga

SEQ ID NO: 3734068 - DNA, 25 bp, Homo sapien
cctccacggcgtgctgcaggatgga

SEQ ID NO: 3734069 - DNA, 25 bp, Homo sapien
cgcctccacggcgtgctgcaggatg

SEQ ID NO: 3734070 - DNA, 25 bp, Homo sapien
ggatggaggtgaacttggagaacat

SEQ ID NO: 3734071 - DNA, 25 bp, Homo sapien
ccatccccggcctgccgtgcgcccg

SEQ ID NO: 3734072 - DNA, 25 bp, Homo sapien
cgaggccgccggggagcgtaggccg

SEQ ID NO: 3734073 - DNA, 25 bp, Homo sapien
gccggggagcgtaggccgccgccat

SEQ ID NO: 3734074 - DNA, 25 bp, Homo sapien
ccgccatccccggcctgccgtgcgc

SEQ ID NO: 3734075 - DNA, 25 bp, Homo sapien
ttgctcccttctcctatagagttca

SEQ ID NO: 3734076 - DNA, 25 bp, Homo sapien
cagagagccttctataacaactcca

SEQ ID NO: 3734077 - DNA, 25 bp, Homo sapien
cttctcctatagagttcactggcta

SEQ ID NO: 3734078 - DNA, 25 bp, Homo sapien
taacaactccaatcctaaatgcttg

SEQ ID NO: 3734079 - DNA, 25 bp, Homo sapien
gtctctatgtagtaatgggtaattg

SEQ ID NO: 3734080 - DNA, 25 bp, Homo sapien
gaagtctctatgtagtaatgggtaa

SEQ ID NO: 3734081 - DNA, 25 bp, Homo sapien
ctgaagtctctatgtagtaatgggt

SEQ ID NO: 3734082 - DNA, 25 bp, Homo sapien
ctctatgtagtaatgggtaattgcc

SEQ ID NO: 3734083 - DNA, 25 bp, Homo sapien
tcagctttccccaaggtatataatg

SEQ ID NO: 3734084 - DNA, 25 bp, Homo sapien
gaagcaaatattccatacatggccc

SEQ ID NO: 3734085 - DNA, 25 bp, Homo sapien
gatggaatatttgtatcggtcactg

SEQ ID NO: 3734086 - DNA, 25 bp, Homo sapien
catctgttccagatgcgatggaata

SEQ ID NO: 3734087 - DNA, 25 bp, Homo sapien
cctgctgtttcattcccggaggaca

SEQ ID NO: 3734088 - DNA, 25 bp, Homo sapien
tcttcccagaagtttcgtatagaaa

SEQ ID NO: 3734089 - DNA, 25 bp, Homo sapien
gaagtagtggctgccggattcttcc

SEQ ID NO: 3734090 - DNA, 25 bp, Homo sapien
ggcctgtgcacgttaatgtgtggaa

SEQ ID NO: 3734091 - DNA, 25 bp, Homo sapien
cattttctgttggtgttgctaggac

SEQ ID NO: 3734092 - DNA, 25 bp, Homo sapien
gcttcgcacacacaatgcaaagaaa

SEQ ID NO: 3734093 - DNA, 25 bp, Homo sapien
gctaggacttcaccacagagtctaa

SEQ ID NO: 3734094 - DNA, 25 bp, Homo sapien
ggtcctgtttcagcttcgcacacac

SEQ ID NO: 3734095 - DNA, 25 bp, Homo sapien
ctgaaattacatttggtactccttt

SEQ ID NO: 3734096 - DNA, 25 bp, Homo sapien
tctgaaattacatttggtactcctt

SEQ ID NO: 3734097 - DNA, 25 bp, Homo sapien
tgaaattacatttggtactcctttg

SEQ ID NO: 3734098 - DNA, 25 bp, Homo sapien
gaggtgacactgaggttatccaagc

SEQ ID NO: 3734099 - DNA, 25 bp, Homo sapien
tcctctggttgacgggactgtcctg

SEQ ID NO: 3734100 - DNA, 25 bp, Homo sapien
tgatttggacaaacaaccgaggcct

SEQ ID NO: 3734101 - DNA, 25 bp, Homo sapien
tccaagcttgtggacaggtgatcca

SEQ ID NO: 3734102 - DNA, 25 bp, Homo sapien
tcagtagttcacacaagcaagtgct

SEQ ID NO: 3734103 - DNA, 25 bp, Homo sapien
gccgcaggctctggcaaacttacta

SEQ ID NO: 3734104 - DNA, 25 bp, Homo sapien
ccttgtacagggaggcaagtctgtc

SEQ ID NO: 3734105 - DNA, 25 bp, Homo sapien
cactgactgaggtagggccttgtac

SEQ ID NO: 3734106 - DNA, 25 bp, Homo sapien
aatgaaattaaggctcgttttcctg

SEQ ID NO: 3734107 - DNA, 25 bp, Homo sapien
taatgagctgatcacaataatcaaa

SEQ ID NO: 3734108 - DNA, 25 bp, Homo sapien
ttgggcttccttaatgagctgatca

SEQ ID NO: 3734109 - DNA, 25 bp, Homo sapien
gcttccttaatgagctgatcacaat

SEQ ID NO: 3734110 - DNA, 25 bp, Homo sapien
cattaattgaggttccataacacca

SEQ ID NO: 3734111 - DNA, 25 bp, Homo sapien
gtttgcattaattgaggttccataa

SEQ ID NO: 3734112 - DNA, 25 bp, Homo sapien
ccataacaccaatgaaaaatctttc

SEQ ID NO: 3734113 - DNA, 25 bp, Homo sapien
tgaggttccataacaccaatgaaaa

SEQ ID NO: 3734114 - DNA, 25 bp, Homo sapien
tgagcacaatgaacaggtagtcagt

SEQ ID NO: 3734115 - DNA, 25 bp, Homo sapien
acatgacacagtgatgcggtttttt

SEQ ID NO: 3734116 - DNA, 25 bp, Homo sapien
caggtagtcagtgggcaaaaataac

SEQ ID NO: 3734117 - DNA, 25 bp, Homo sapien
gtcagtgggcaaaaataacatgaca

SEQ ID NO: 3734118 - DNA, 25 bp, Homo sapien
cagtggatgtgagaatacccatctc

SEQ ID NO: 3734119 - DNA, 25 bp, Homo sapien
tgttctccaaggataaaaaacacca

SEQ ID NO: 3734120 - DNA, 25 bp, Homo sapien
tcagaggtcacttgccgaacgatgc

SEQ ID NO: 3734121 - DNA, 25 bp, Homo sapien
cctatgccttaaaggatgtctgctg

SEQ ID NO: 3734122 - DNA, 25 bp, Homo sapien
tgctcctgctatcaatccattttct

SEQ ID NO: 3734123 - DNA, 25 bp, Homo sapien
ttctgggcacaaaggtttatattct

SEQ ID NO: 3734124 - DNA, 25 bp, Homo sapien
gaatgtgctcattgggtttttgtaa

SEQ ID NO: 3734125 - DNA, 25 bp, Homo sapien
agatgttcaaacattcgtaatgtca

SEQ ID NO: 3734126 - DNA, 25 bp, Homo sapien
tctggtgaaatgtcagtaaataatg

SEQ ID NO: 3734127 - DNA, 25 bp, Homo sapien
gtgaaatgtcagtaaataatggatc

SEQ ID NO: 3734128 - DNA, 25 bp, Homo sapien
tttctggtgaaatgtcagtaaataa

SEQ ID NO: 3734129 - DNA, 25 bp, Homo sapien
gaaatgtcagtaaataatggatctt

SEQ ID NO: 3734130 - DNA, 25 bp, Homo sapien
ccagaaccaggtatatcagtgacaa

SEQ ID NO: 3734131 - DNA, 25 bp, Homo sapien
gccagaaccaggtatatcagtgaca

SEQ ID NO: 3734132 - DNA, 25 bp, Homo sapien
ctgccagaaccaggtatatcagtga

SEQ ID NO: 3734133 - DNA, 25 bp, Homo sapien
tgccagaaccaggtatatcagtgac

SEQ ID NO: 3734134 - DNA, 25 bp, Homo sapien
cgtcatccggtaccagacagagaaa

SEQ ID NO: 3734135 - DNA, 25 bp, Homo sapien
taagtgtcatatcctgtgccctcaa

SEQ ID NO: 3734136 - DNA, 25 bp, Homo sapien
ctgcctatgagcgtctcggaggtaa

SEQ ID NO: 3734137 - DNA, 25 bp, Homo sapien
tggtaggaggattttgcgtcatccg

SEQ ID NO: 3734138 - DNA, 25 bp, Homo sapien
gagaagagtacaagtatctgctaag

SEQ ID NO: 3734139 - DNA, 25 bp, Homo sapien
aagtatctgctaagcatatgaaaag

SEQ ID NO: 3734140 - DNA, 25 bp, Homo sapien
agtacaagtatctgctaagcatatg

SEQ ID NO: 3734141 - DNA, 25 bp, Homo sapien
tcttcagagaagagtacaagtatct

SEQ ID NO: 3734142 - DNA, 25 bp, Homo sapien
aaagctgcagtaaccgagacagggt

SEQ ID NO: 3734143 - DNA, 25 bp, Homo sapien
caatgatttcttaggtacggcacaa

SEQ ID NO: 3734144 - DNA, 25 bp, Homo sapien
aaaaatgaatctggaccccacctca

SEQ ID NO: 3734145 - DNA, 25 bp, Homo sapien
ttttcactaagtgctgcagagacaa

SEQ ID NO: 3734146 - DNA, 25 bp, Homo sapien
ccattctgtcgaacagcactttcaa

SEQ ID NO: 3734147 - DNA, 25 bp, Homo sapien
cccatcttaagcagatagcacagta

SEQ ID NO: 3734148 - DNA, 25 bp, Homo sapien
tcttcccattctgtcgaacagcact

SEQ ID NO: 3734149 - DNA, 25 bp, Homo sapien
agcagatagcacagtagtctcggaa

SEQ ID NO: 3734150 - DNA, 25 bp, Homo sapien
gcggaatgtttcactctcagccact

SEQ ID NO: 3734151 - DNA, 25 bp, Homo sapien
tctcaagtcctatgctgtaaggccc

SEQ ID NO: 3734152 - DNA, 25 bp, Homo sapien
tcagtggagaatgctcgggcacacg

SEQ ID NO: 3734153 - DNA, 25 bp, Homo sapien
gctacagacgctacgatgaacatgt

SEQ ID NO: 3734154 - DNA, 25 bp, Homo sapien
caagatgggaagatattacaccttt

SEQ ID NO: 3734155 - DNA, 25 bp, Homo sapien
tttagaagtgatattcctcacctca

SEQ ID NO: 3734156 - DNA, 25 bp, Homo sapien
caaattacatatattgcaggcctaa

SEQ ID NO: 3734157 - DNA, 25 bp, Homo sapien
gaggacccattgagcataagaccaa

SEQ ID NO: 3734158 - DNA, 25 bp, Homo sapien
cactgaggttacttgtaagtttaca

SEQ ID NO: 3734159 - DNA, 25 bp, Homo sapien
gatctacagccaggagcgaggttca

SEQ ID NO: 3734160 - DNA, 25 bp, Homo sapien
gagaaagtctagataacactgaggt

SEQ ID NO: 3734161 - DNA, 25 bp, Homo sapien
caaaaggtactcgtggatgtgtgga

SEQ ID NO: 3734162 - DNA, 25 bp, Homo sapien
tcacagaggcaaggcacttcagttc

SEQ ID NO: 3734163 - DNA, 25 bp, Homo sapien
ctgcatcacagaggcaaggcacttc

SEQ ID NO: 3734164 - DNA, 25 bp, Homo sapien
gcatcacagaggcaaggcacttcag

SEQ ID NO: 3734165 - DNA, 25 bp, Homo sapien
catcacagaggcaaggcacttcagt

SEQ ID NO: 3734166 - DNA, 25 bp, Homo sapien
ttcgaagcataaggtctccaacaac

SEQ ID NO: 3734167 - DNA, 25 bp, Homo sapien
taaagtcttgaatacgctggattcg

SEQ ID NO: 3734168 - DNA, 25 bp, Homo sapien
cagaagcttgggagtaaagtcttga

SEQ ID NO: 3734169 - DNA, 25 bp, Homo sapien
caagtaaccgctttctgactaacag

SEQ ID NO: 3734170 - DNA, 25 bp, Homo sapien
tattttacaaatgcgattgccgcca

SEQ ID NO: 3734171 - DNA, 25 bp, Homo sapien
gccagctccttacagaactcttcta

SEQ ID NO: 3734172 - DNA, 25 bp, Homo sapien
cacaccctctagcagtgtgatgtgg

SEQ ID NO: 3734173 - DNA, 25 bp, Homo sapien
tggtgtggaggaagcatgatatttt

SEQ ID NO: 3734174 - DNA, 25 bp, Homo sapien
caagccggaacctttgatagcctgt

SEQ ID NO: 3734175 - DNA, 25 bp, Homo sapien
gtagtgacagttcccttcaagccgg

SEQ ID NO: 3734176 - DNA, 25 bp, Homo sapien
gttatcagtcagttccccacctaga

SEQ ID NO: 3734177 - DNA, 25 bp, Homo sapien
caagtacaagcatgctgtgcccagc

SEQ ID NO: 3734178 - DNA, 25 bp, Homo sapien
agcttctactggctctaggtctgaa

SEQ ID NO: 3734179 - DNA, 25 bp, Homo sapien
agagcttctactggctctaggtctg

SEQ ID NO: 3734180 - DNA, 25 bp, Homo sapien
tgtgagagcttctactggctctagg

SEQ ID NO: 3734181 - DNA, 25 bp, Homo sapien
tgagagcttctactggctctaggtc

SEQ ID NO: 3734182 - DNA, 25 bp, Homo sapien
tggaacttgctatggcaatcaattg

SEQ ID NO: 3734183 - DNA, 25 bp, Homo sapien
caaatgtgaagcaaggctgaaattc

SEQ ID NO: 3734184 - DNA, 25 bp, Homo sapien
cggtgctttccactcagcatagtgc

SEQ ID NO: 3734185 - DNA, 25 bp, Homo sapien
ttgcaagtactgagtaacagaaata

SEQ ID NO: 3734186 - DNA, 25 bp, Homo sapien
gacgctggtaacactgtcagtaacc

SEQ ID NO: 3734187 - DNA, 25 bp, Homo sapien
tctatcaagtaaagaatgcggctca

SEQ ID NO: 3734188 - DNA, 25 bp, Homo sapien
tccacggagggaccaagaattccag

SEQ ID NO: 3734189 - DNA, 25 bp, Homo sapien
ttaatgtaaacaaggcaggaggcaa

SEQ ID NO: 3734190 - DNA, 25 bp, Homo sapien
ccactgattgtagggtgccatatcc

SEQ ID NO: 3734191 - DNA, 25 bp, Homo sapien
gaatactatagagacccactgattg

SEQ ID NO: 3734192 - DNA, 25 bp, Homo sapien
ccttttgggcagtgattattaagaa

SEQ ID NO: 3734193 - DNA, 25 bp, Homo sapien
tgagacgtgcataaacattccttcc

SEQ ID NO: 3734194 - DNA, 25 bp, Homo sapien
ctcctccctcacagatccaaggcat

SEQ ID NO: 3734195 - DNA, 25 bp, Homo sapien
tctcctccctcacagatccaaggca

SEQ ID NO: 3734196 - DNA, 25 bp, Homo sapien
cacagcgctccttggggaccttctg

SEQ ID NO: 3734197 - DNA, 25 bp, Homo sapien
agagatgacgtggacctgcatgcct

SEQ ID NO: 3734198 - DNA, 25 bp, Homo sapien
tgacgtggacctgcatgcctggtcc

SEQ ID NO: 3734199 - DNA, 25 bp, Homo sapien
gtcacaggaacaagccaaatcctgc

SEQ ID NO: 3734200 - DNA, 25 bp, Homo sapien
agtagacaggaccagggggccgtgc

SEQ ID NO: 3734201 - DNA, 25 bp, Homo sapien
gagtagacaggaccagggggccgtg

SEQ ID NO: 3734202 - DNA, 25 bp, Homo sapien
cactcgggaactgttgagaggcctg

SEQ ID NO: 3734203 - DNA, 25 bp, Homo sapien
tccagcctgtgaaagctcccttgag

SEQ ID NO: 3734204 - DNA, 25 bp, Homo sapien
tgtttggagacatcgccctccagtg

SEQ ID NO: 3734205 - DNA, 25 bp, Homo sapien
tcggcaacacgcttggaggcataaa

SEQ ID NO: 3734206 - DNA, 25 bp, Homo sapien
atgaatttggaaactcgtgcttgac

SEQ ID NO: 3734207 - DNA, 25 bp, Homo sapien
ttttgcgggatttctgaaggagctg

SEQ ID NO: 3734208 - DNA, 25 bp, Homo sapien
ccatattttgcgggatttctgaagg

SEQ ID NO: 3734209 - DNA, 25 bp, Homo sapien
aaggagctgcatgggttccagttgc

SEQ ID NO: 3734210 - DNA, 25 bp, Homo sapien
tattttgcgggatttctgaaggagc

SEQ ID NO: 3734211 - DNA, 25 bp, Homo sapien
cacatagctcgtaacatagtgtgtc

SEQ ID NO: 3734212 - DNA, 25 bp, Homo sapien
tgatccccacatagctcgtaacata

SEQ ID NO: 3734213 - DNA, 25 bp, Homo sapien
ttagctcctttgagtattgtccctg

SEQ ID NO: 3734214 - DNA, 25 bp, Homo sapien
tttgagtattgtccctgatccccac

SEQ ID NO: 3734215 - DNA, 25 bp, Homo sapien
actgatagagcaaggcatctgcagg

SEQ ID NO: 3734216 - DNA, 25 bp, Homo sapien
catgtgctaccaagaggcaagggcc

SEQ ID NO: 3734217 - DNA, 25 bp, Homo sapien
tgtaaagtcaggatactggtcccct

SEQ ID NO: 3734218 - DNA, 25 bp, Homo sapien
taacacctaggtctgaatgctacca

SEQ ID NO: 3734219 - DNA, 25 bp, Homo sapien
tcatttaaggattccggagcctcaa

SEQ ID NO: 3734220 - DNA, 25 bp, Homo sapien
tgtgccagccaaacttgcaagagta

SEQ ID NO: 3734221 - DNA, 25 bp, Homo sapien
tgccagccaaacttgcaagagtatg

SEQ ID NO: 3734222 - DNA, 25 bp, Homo sapien
gtgccagccaaacttgcaagagtat

SEQ ID NO: 3734223 - DNA, 25 bp, Homo sapien
caagagtatgaatgtccctggccat

SEQ ID NO: 3734224 - DNA, 25 bp, Homo sapien
ttaccaccatgaaggcaacgtctgc

SEQ ID NO: 3734225 - DNA, 25 bp, Homo sapien
cccttgttttggatgagcctggtca

SEQ ID NO: 3734226 - DNA, 25 bp, Homo sapien
tgattcaggtctgccaatcagcctg

SEQ ID NO: 3734227 - DNA, 25 bp, Homo sapien
ttctgggcatgggataggtgattca

SEQ ID NO: 3734228 - DNA, 25 bp, Homo sapien
gcagttgatccaaggcccaagattt

SEQ ID NO: 3734229 - DNA, 25 bp, Homo sapien
ctacatataacataaccttgcttgg

SEQ ID NO: 3734230 - DNA, 25 bp, Homo sapien
tacatataacataaccttgcttggc

SEQ ID NO: 3734231 - DNA, 25 bp, Homo sapien
gcgtttttggccaccacggcgcaca

SEQ ID NO: 3734232 - DNA, 25 bp, Homo sapien
ggcgtttttggccaccacggcgcac

SEQ ID NO: 3734233 - DNA, 25 bp, Homo sapien
ttttggccaccacggcgcacacgaa

SEQ ID NO: 3734234 - DNA, 25 bp, Homo sapien
gtttttggccaccacggcgcacacg

SEQ ID NO: 3734235 - DNA, 25 bp, Homo sapien
cttgctgtaagttgcacccttggaa

SEQ ID NO: 3734236 - DNA, 25 bp, Homo sapien
tcttctccacgctgcacggcgagaa

SEQ ID NO: 3734237 - DNA, 25 bp, Homo sapien
caggacactaaggaatcagtctcca

SEQ ID NO: 3734238 - DNA, 25 bp, Homo sapien
aggacactaaggaatcagtctccat

SEQ ID NO: 3734239 - DNA, 25 bp, Homo sapien
catcagttgcaataactaactcctt

SEQ ID NO: 3734240 - DNA, 25 bp, Homo sapien
gcattttatcatcagttgcaataac

SEQ ID NO: 3734241 - DNA, 25 bp, Homo sapien
taactaactccttaaatgcatgact

SEQ ID NO: 3734242 - DNA, 25 bp, Homo sapien
aatgcatgacttcccttagaagtca

SEQ ID NO: 3734243 - DNA, 25 bp, Homo sapien
tcaaccctatcaactccagttaagg

SEQ ID NO: 3734244 - DNA, 25 bp, Homo sapien
gggccagcccgcaactgcagatttt

SEQ ID NO: 3734245 - DNA, 25 bp, Homo sapien
caactccagttaaggtgtcactgta

SEQ ID NO: 3734246 - DNA, 25 bp, Homo sapien
tagtcatagataaaagagcagtctt

SEQ ID NO: 3734247 - DNA, 25 bp, Homo sapien
caaacctgtgtgtagacttgagaaa

SEQ ID NO: 3734248 - DNA, 25 bp, Homo sapien
cacaagaactcgctatgaactgaag

SEQ ID NO: 3734249 - DNA, 25 bp, Homo sapien
gcaattgaaaattctcctaacaggg

SEQ ID NO: 3734250 - DNA, 25 bp, Homo sapien
gaaagctgagtatgctcaaacctgt

SEQ ID NO: 3734251 - DNA, 25 bp, Homo sapien
cagaacggagaggtcgcacggactt

SEQ ID NO: 3734252 - DNA, 25 bp, Homo sapien
ttcccatatagaccaagagcttgct

SEQ ID NO: 3734253 - DNA, 25 bp, Homo sapien
cctgaggcttgtgaagatccatggc

SEQ ID NO: 3734254 - DNA, 25 bp, Homo sapien
gaacttatgtaccacgttaactgag

SEQ ID NO: 3734255 - DNA, 25 bp, Homo sapien
tgcaacaagagtgcgcctgacagga

SEQ ID NO: 3734256 - DNA, 25 bp, Homo sapien
acaagagtgcgcctgacaggaccct

SEQ ID NO: 3734257 - DNA, 25 bp, Homo sapien
gatgcaacaagagtgcgcctgacag

SEQ ID NO: 3734258 - DNA, 25 bp, Homo sapien
gagtgcgcctgacaggaccctcttc

SEQ ID NO: 3734259 - DNA, 25 bp, Homo sapien
ttttcaaagacggcgaagacaccac

SEQ ID NO: 3734260 - DNA, 25 bp, Homo sapien
ctgttttcaaagacggcgaagacac

SEQ ID NO: 3734261 - DNA, 25 bp, Homo sapien
ttcaaagacggcgaagacaccaccg

SEQ ID NO: 3734262 - DNA, 25 bp, Homo sapien
tgttttcaaagacggcgaagacacc

SEQ ID NO: 3734263 - DNA, 25 bp, Homo sapien
gaccgttcctgcagtttcaaggaca

SEQ ID NO: 3734264 - DNA, 25 bp, Homo sapien
gcagccattgctgcgaccgttcctg

SEQ ID NO: 3734265 - DNA, 25 bp, Homo sapien
tgctgacggggtcgcagccattgct

SEQ ID NO: 3734266 - DNA, 25 bp, Homo sapien
gctgcgaccgttcctgcagtttcaa

SEQ ID NO: 3734267 - DNA, 25 bp, Homo sapien
gcgaacacgccgctcaaggacagca

SEQ ID NO: 3734268 - DNA, 25 bp, Homo sapien
gcagctcggctgaagtgggcccttt

SEQ ID NO: 3734269 - DNA, 25 bp, Homo sapien
tccttcaaccgattcagcagctcgg

SEQ ID NO: 3734270 - DNA, 25 bp, Homo sapien
ctttgggcttgtgcacggcgaacac

SEQ ID NO: 3734271 - DNA, 25 bp, Homo sapien
tcgggctgcgctgtctagagtccct

SEQ ID NO: 3734272 - DNA, 25 bp, Homo sapien
gaactcctcgggctgcgctgtctag

SEQ ID NO: 3734273 - DNA, 25 bp, Homo sapien
actcctcgggctgcgctgtctagag

SEQ ID NO: 3734274 - DNA, 25 bp, Homo sapien
tgcgctgtctagagtccctccatgc

SEQ ID NO: 3734275 - DNA, 25 bp, Homo sapien
tcctgactttgtcactcactaattc

SEQ ID NO: 3734276 - DNA, 25 bp, Homo sapien
gccatccacaatagggcagatgatt

SEQ ID NO: 3734277 - DNA, 25 bp, Homo sapien
caggagcaccaggtatctgccatcc

SEQ ID NO: 3734278 - DNA, 25 bp, Homo sapien
taggctactgaagtgctaagctggt

SEQ ID NO: 3734279 - DNA, 25 bp, Homo sapien
tcaacatttttgttccgcttccaat

SEQ ID NO: 3734280 - DNA, 25 bp, Homo sapien
tggtcaacatttttgttccgcttcc

SEQ ID NO: 3734281 - DNA, 25 bp, Homo sapien
tttgttccgcttccaattccaacaa

SEQ ID NO: 3734282 - DNA, 25 bp, Homo sapien
ttttgttccgcttccaattccaaca

SEQ ID NO: 3734283 - DNA, 25 bp, Homo sapien
tcaacttaggccaaaggaacacatc

SEQ ID NO: 3734284 - DNA, 25 bp, Homo sapien
gtctctcccttaaagaactggcatg

SEQ ID NO: 3734285 - DNA, 25 bp, Homo sapien
gcaatattttgcctacatcaccagc

SEQ ID NO: 3734286 - DNA, 25 bp, Homo sapien
gaacacatcagcctaacctctcaga

SEQ ID NO: 3734287 - DNA, 25 bp, Homo sapien
ccgtagaatctagtgtatcagtagc

SEQ ID NO: 3734288 - DNA, 25 bp, Homo sapien
taccctccccgtagaatctagtgta

SEQ ID NO: 3734289 - DNA, 25 bp, Homo sapien
tctagtgtatcagtagctttcccca

SEQ ID NO: 3734290 - DNA, 25 bp, Homo sapien
cccagttctccaatggcagtatatc

SEQ ID NO: 3734291 - DNA, 25 bp, Homo sapien
aatttccaatcttcttagcccaaag

SEQ ID NO: 3734292 - DNA, 25 bp, Homo sapien
tcctatcaagtaagcaacaatgcga

SEQ ID NO: 3734293 - DNA, 25 bp, Homo sapien
gcaacaatgcgataaacaatttcca

SEQ ID NO: 3734294 - DNA, 25 bp, Homo sapien
ggcctacattagatgagcttcatac

SEQ ID NO: 3734295 - DNA, 25 bp, Homo sapien
tcaatatcttcttgtgttattttat

SEQ ID NO: 3734296 - DNA, 25 bp, Homo sapien
tgtagaatgccttcaatatcttctt

SEQ ID NO: 3734297 - DNA, 25 bp, Homo sapien
gtagaatgccttcaatatcttcttg

SEQ ID NO: 3734298 - DNA, 25 bp, Homo sapien
gcttgaaatggtaatgtgcacgaaa

SEQ ID NO: 3734299 - DNA, 25 bp, Homo sapien
ttaaaaagcgtctcctcagagatat

SEQ ID NO: 3734300 - DNA, 25 bp, Homo sapien
tatgatctgaatgccaaacctccaa

SEQ ID NO: 3734301 - DNA, 25 bp, Homo sapien
gtaattaggtcgtagggcgcagccc

SEQ ID NO: 3734302 - DNA, 25 bp, Homo sapien
gcaggttttgcttctacgacttcac

SEQ ID NO: 3734303 - DNA, 25 bp, Homo sapien
ctaatgtgaaaaatggtggctggaa

SEQ ID NO: 3734304 - DNA, 25 bp, Homo sapien
gaagggagatactgtatacagtcac

SEQ ID NO: 3734305 - DNA, 25 bp, Homo sapien
tcttcatcaaagtcgaaagtctttg

SEQ ID NO: 3734306 - DNA, 25 bp, Homo sapien
tcatccagtagcatatgtgtttgtg

SEQ ID NO: 3734307 - DNA, 25 bp, Homo sapien
aggcataccactttaatacttcagc

SEQ ID NO: 3734308 - DNA, 25 bp, Homo sapien
tttaaattaactggcaaggcatacc

SEQ ID NO: 3734309 - DNA, 25 bp, Homo sapien
ggcagctttgccatcatgagcggta

SEQ ID NO: 3734310 - DNA, 25 bp, Homo sapien
gttaacagtgacatagtaaattgct

SEQ ID NO: 3734311 - DNA, 25 bp, Homo sapien
agtgacatagtaaattgctaacctc

SEQ ID NO: 3734312 - DNA, 25 bp, Homo sapien
acagtgacatagtaaattgctaacc

SEQ ID NO: 3734313 - DNA, 25 bp, Homo sapien
taacagtgacatagtaaattgctaa

SEQ ID NO: 3734314 - DNA, 25 bp, Homo sapien
caagcttctgatataaaaacctcct

SEQ ID NO: 3734315 - DNA, 25 bp, Homo sapien
aagcttctgatataaaaacctcctc

SEQ ID NO: 3734316 - DNA, 25 bp, Homo sapien
agcttctgatataaaaacctcctcc

SEQ ID NO: 3734317 - DNA, 25 bp, Homo sapien
tgcttttaaagctgaaggcagcaag

SEQ ID NO: 3734318 - DNA, 25 bp, Homo sapien
gcaagccagaaacctacaatgcttt

SEQ ID NO: 3734319 - DNA, 25 bp, Homo sapien
tctctaaatgataattcataattca

SEQ ID NO: 3734320 - DNA, 25 bp, Homo sapien
tcttccaattgaaaaggagtattat

SEQ ID NO: 3734321 - DNA, 25 bp, Homo sapien
gttcttctagcgtaaatggtccctg

SEQ ID NO: 3734322 - DNA, 25 bp, Homo sapien
gattttttaagtgccaactctgctg

SEQ ID NO: 3734323 - DNA, 25 bp, Homo sapien
tgagcaatgctcaagagactgtgca

SEQ ID NO: 3734324 - DNA, 25 bp, Homo sapien
tgtttggttcgggtcagctctagca

SEQ ID NO: 3734325 - DNA, 25 bp, Homo sapien
ctcatttagagttatatattcacag

SEQ ID NO: 3734326 - DNA, 25 bp, Homo sapien
ggctcatttagagttatatattcac

SEQ ID NO: 3734327 - DNA, 25 bp, Homo sapien
ttggctcatttagagttatatattc

SEQ ID NO: 3734328 - DNA, 25 bp, Homo sapien
tctttggctcatttagagttatata

SEQ ID NO: 3734329 - DNA, 25 bp, Homo sapien
gagccaactgcaaggccatttataa

SEQ ID NO: 3734330 - DNA, 25 bp, Homo sapien
gaagaaagagatcaataatggccac

SEQ ID NO: 3734331 - DNA, 25 bp, Homo sapien
ttgtgaaactaaagaaacatggagc

SEQ ID NO: 3734332 - DNA, 25 bp, Homo sapien
tgcacacaggattcaaatgtcaact

SEQ ID NO: 3734333 - DNA, 25 bp, Homo sapien
aagcttattcatttccaagatctaa

SEQ ID NO: 3734334 - DNA, 25 bp, Homo sapien
tttccaagatctaaacaaacacagg

SEQ ID NO: 3734335 - DNA, 25 bp, Homo sapien
caagatctaaacaaacacaggtatt

SEQ ID NO: 3734336 - DNA, 25 bp, Homo sapien
tcatttccaagatctaaacaaacac

SEQ ID NO: 3734337 - DNA, 25 bp, Homo sapien
tgtcacagggaacaccctacagaga

SEQ ID NO: 3734338 - DNA, 25 bp, Homo sapien
gggcagccatctcaacatctgtaag

SEQ ID NO: 3734339 - DNA, 25 bp, Homo sapien
gctgtcttctgctctaatggtagga

SEQ ID NO: 3734340 - DNA, 25 bp, Homo sapien
tacaacctgttagtggtagcagtaa

SEQ ID NO: 3734341 - DNA, 25 bp, Homo sapien
tataaatcaggcatgtggcatttgc

SEQ ID NO: 3734342 - DNA, 25 bp, Homo sapien
tactgactgtttactaggttcgaag

SEQ ID NO: 3734343 - DNA, 25 bp, Homo sapien
ggttcgaagaatcagactaaacact

SEQ ID NO: 3734344 - DNA, 25 bp, Homo sapien
cactatctgaatgacctaactcagg

SEQ ID NO: 3734345 - DNA, 25 bp, Homo sapien
gtaaatgaatggggtttactggcca

SEQ ID NO: 3734346 - DNA, 25 bp, Homo sapien
aaaagaatgcctgcttatgagagag

SEQ ID NO: 3734347 - DNA, 25 bp, Homo sapien
aatgcctgcttatgagagagactcc

SEQ ID NO: 3734348 - DNA, 25 bp, Homo sapien
acgcggctgccgcttcactttcagt

SEQ ID NO: 3734349 - DNA, 25 bp, Homo sapien
cacaacgcggctgccgcttcacttt

SEQ ID NO: 3734350 - DNA, 25 bp, Homo sapien
aggtttatttcatgatggcgagtgc

SEQ ID NO: 3734351 - DNA, 25 bp, Homo sapien
gagtgctcgtcatcttttcacgttt

SEQ ID NO: 3734352 - DNA, 25 bp, Homo sapien
tttgtaatatcacagctccagaggt

SEQ ID NO: 3734353 - DNA, 25 bp, Homo sapien
agaggtttatttcatgatggcgagt

SEQ ID NO: 3734354 - DNA, 25 bp, Homo sapien
caatttagcaatgatcgaaacttgt

SEQ ID NO: 3734355 - DNA, 25 bp, Homo sapien
tgggatctgtacaatttagcaatga

SEQ ID NO: 3734356 - DNA, 25 bp, Homo sapien
ggacagatgtccagtctagttatat

SEQ ID NO: 3734357 - DNA, 25 bp, Homo sapien
cagatgtccagtctagttatattaa

SEQ ID NO: 3734358 - DNA, 25 bp, Homo sapien
acacattggattgctccttgtctct

SEQ ID NO: 3734359 - DNA, 25 bp, Homo sapien
ttttttattacacattggattgctc

SEQ ID NO: 3734360 - DNA, 25 bp, Homo sapien
caacaacaattcaggctgccttttt

SEQ ID NO: 3734361 - DNA, 25 bp, Homo sapien
gattgctccttgtctcttcgcttca

SEQ ID NO: 3734362 - DNA, 25 bp, Homo sapien
gctatataccaaggtaaatgagacc

SEQ ID NO: 3734363 - DNA, 25 bp, Homo sapien
tgctatataccaaggtaaatgagac

SEQ ID NO: 3734364 - DNA, 25 bp, Homo sapien
tttgctatataccaaggtaaatgag

SEQ ID NO: 3734365 - DNA, 25 bp, Homo sapien
ctatataccaaggtaaatgagacct

SEQ ID NO: 3734366 - DNA, 25 bp, Homo sapien
taacactcctgcatatgcagtagtg

SEQ ID NO: 3734367 - DNA, 25 bp, Homo sapien
ttgttacaagcagaacatctggtgg

SEQ ID NO: 3734368 - DNA, 25 bp, Homo sapien
ggtagtaacactcctgcatatgcag

SEQ ID NO: 3734369 - DNA, 25 bp, Homo sapien
tagtgtcaggaagtgagtattgtta

SEQ ID NO: 3734370 - DNA, 25 bp, Homo sapien
gatgaagtttcattaggcacagctc

SEQ ID NO: 3734371 - DNA, 25 bp, Homo sapien
cctggtctgggtaaggcagctctga

SEQ ID NO: 3734372 - DNA, 25 bp, Homo sapien
taaatggacgtggaaaagcagccct

SEQ ID NO: 3734373 - DNA, 25 bp, Homo sapien
tctatcagctggcagttcagaggct

SEQ ID NO: 3734374 - DNA, 25 bp, Homo sapien
ctttcctagccctttgcaggttggt

SEQ ID NO: 3734375 - DNA, 25 bp, Homo sapien
gaaagctgccaggatgtattcagtg

SEQ ID NO: 3734376 - DNA, 25 bp, Homo sapien
caggttggtgtgattgctctgcaga

SEQ ID NO: 3734377 - DNA, 25 bp, Homo sapien
caggatgtattcagtggcccctgag

SEQ ID NO: 3734378 - DNA, 25 bp, Homo sapien
ttgcaggaaaggttgacttctcagc

SEQ ID NO: 3734379 - DNA, 25 bp, Homo sapien
gttgacttctcagcacatttgcgtc

SEQ ID NO: 3734380 - DNA, 25 bp, Homo sapien
tctcagcacatttgcgtcctccaaa

SEQ ID NO: 3734381 - DNA, 25 bp, Homo sapien
cttgcaggaaaggttgacttctcag

SEQ ID NO: 3734382 - DNA, 25 bp, Homo sapien
tattaatgcttcttcagggaatcaa

SEQ ID NO: 3734383 - DNA, 25 bp, Homo sapien
agtcaggtcccatattaatgcttct

SEQ ID NO: 3734384 - DNA, 25 bp, Homo sapien
ttttataagtcaggtcccatattaa

SEQ ID NO: 3734385 - DNA, 25 bp, Homo sapien
atattaatgcttcttcagggaatca

SEQ ID NO: 3734386 - DNA, 25 bp, Homo sapien
aaaatgctcgtgtgtacccagttca

SEQ ID NO: 3734387 - DNA, 25 bp, Homo sapien
ctcgtgtgtacccagttcatcatct

SEQ ID NO: 3734388 - DNA, 25 bp, Homo sapien
tcatcatctggcaggaggctaagca

SEQ ID NO: 3734389 - DNA, 25 bp, Homo sapien
ctggaaaaatgctcgtgtgtaccca

SEQ ID NO: 3734390 - DNA, 25 bp, Homo sapien
gaatccagggatgcagaaaccacag

SEQ ID NO: 3734391 - DNA, 25 bp, Homo sapien
tcagtatagacgcttttttcttcaa

SEQ ID NO: 3734392 - DNA, 25 bp, Homo sapien
cagtatagacgcttttttcttcaaa

SEQ ID NO: 3734393 - DNA, 25 bp, Homo sapien
aaccacagatacaaagggccaactc

SEQ ID NO: 3734394 - DNA, 25 bp, Homo sapien
ctattcattctacaggcttcagcta

SEQ ID NO: 3734395 - DNA, 25 bp, Homo sapien
aggcttcagctaggttcttggtgag

SEQ ID NO: 3734396 - DNA, 25 bp, Homo sapien
ggcttcagctaggttcttggtgaga

SEQ ID NO: 3734397 - DNA, 25 bp, Homo sapien
gctagtggtgttccccactgcctgg

SEQ ID NO: 3734398 - DNA, 25 bp, Homo sapien
ccactgcctggtctcatagttcctc

SEQ ID NO: 3734399 - DNA, 25 bp, Homo sapien
tgcaatagcgactgctcttgggtgg

SEQ ID NO: 3734400 - DNA, 25 bp, Homo sapien
catcgtctatatatttcacccactc

SEQ ID NO: 3734401 - DNA, 25 bp, Homo sapien
ctggagggttctagactctggccat

SEQ ID NO: 3734402 - DNA, 25 bp, Homo sapien
tcagttttgcaatagcgactgctct

SEQ ID NO: 3734403 - DNA, 25 bp, Homo sapien
gactgcttttgtcaaaacctcctta

SEQ ID NO: 3734404 - DNA, 25 bp, Homo sapien
ctaagcccgctccatgactgctttt

SEQ ID NO: 3734405 - DNA, 25 bp, Homo sapien
caaaacctccttaggagacccagct

SEQ ID NO: 3734406 - DNA, 25 bp, Homo sapien
taagcccgctccatgactgcttttg

SEQ ID NO: 3734407 - DNA, 25 bp, Homo sapien
gcagaaatgacgtaagtcaatatca

SEQ ID NO: 3734408 - DNA, 25 bp, Homo sapien
gaaatgcagaaatgacgtaagtcaa

SEQ ID NO: 3734409 - DNA, 25 bp, Homo sapien
gacgtaagtcaatatcatgtgagaa

SEQ ID NO: 3734410 - DNA, 25 bp, Homo sapien
taccactacatgctgggctccgtgc

SEQ ID NO: 3734411 - DNA, 25 bp, Homo sapien
ctggcctgaactacttccagtttcc

SEQ ID NO: 3734412 - DNA, 25 bp, Homo sapien
ggcctgaactacttccagtttcctc

SEQ ID NO: 3734413 - DNA, 25 bp, Homo sapien
tggcctgaactacttccagtttcct

SEQ ID NO: 3734414 - DNA, 25 bp, Homo sapien
tgacattccgtgttcctttaccgaa

SEQ ID NO: 3734415 - DNA, 25 bp, Homo sapien
tgtgtctcaaggttgtctctaatgc

SEQ ID NO: 3734416 - DNA, 25 bp, Homo sapien
tgttcctttaccgaatgttcattga

SEQ ID NO: 3734417 - DNA, 25 bp, Homo sapien
taatgcgcttgacattccgtgttcc

SEQ ID NO: 3734418 - DNA, 25 bp, Homo sapien
tctccaccctttcctctattgtcac

SEQ ID NO: 3734419 - DNA, 25 bp, Homo sapien
ctatggcttctggacctgaactcca

SEQ ID NO: 3734420 - DNA, 25 bp, Homo sapien
tatggcttctggacctgaactccat

SEQ ID NO: 3734421 - DNA, 25 bp, Homo sapien
tcctctattgtcaccctcagaaact

SEQ ID NO: 3734422 - DNA, 25 bp, Homo sapien
cttgagcacaatgtcacactcgctt

SEQ ID NO: 3734423 - DNA, 25 bp, Homo sapien
gatgcccataggaggtcttccataa

SEQ ID NO: 3734424 - DNA, 25 bp, Homo sapien
acatctttataatgcatatggcaag

SEQ ID NO: 3734425 - DNA, 25 bp, Homo sapien
tgcatatggcaagatgcccatagga

SEQ ID NO: 3734426 - DNA, 25 bp, Homo sapien
gaggtcttccataattggtgataaa

SEQ ID NO: 3734427 - DNA, 25 bp, Homo sapien
gctgaagcgtgaatcttcctcgcca

SEQ ID NO: 3734428 - DNA, 25 bp, Homo sapien
cagcaaccaattaccctggacgtga

SEQ ID NO: 3734429 - DNA, 25 bp, Homo sapien
cagtcatggagaggacgcagaaaat

SEQ ID NO: 3734430 - DNA, 25 bp, Homo sapien
ccaggatcttgtggaccgagctgaa

SEQ ID NO: 3734431 - DNA, 25 bp, Homo sapien
tagagtctctttctactacgtgtga

SEQ ID NO: 3734432 - DNA, 25 bp, Homo sapien
caaagctagagaggtaataagggcc

SEQ ID NO: 3734433 - DNA, 25 bp, Homo sapien
tcaatttcctgtaatgtggccccaa

SEQ ID NO: 3734434 - DNA, 25 bp, Homo sapien
gaagactaatagcaatcctgcctct

SEQ ID NO: 3734435 - DNA, 25 bp, Homo sapien
gctttgcttcagggaaggcagtcat

SEQ ID NO: 3734436 - DNA, 25 bp, Homo sapien
ttgaaccagaagctttgcttcaggg

SEQ ID NO: 3734437 - DNA, 25 bp, Homo sapien
ttccttgaaccagaagctttgcttc

SEQ ID NO: 3734438 - DNA, 25 bp, Homo sapien
aaccagaagctttgcttcagggaag

SEQ ID NO: 3734439 - DNA, 25 bp, Homo sapien
ctgtaggacatctgtatacctatca

SEQ ID NO: 3734440 - DNA, 25 bp, Homo sapien
ttgtaagttttgcatagttgtggat

SEQ ID NO: 3734441 - DNA, 25 bp, Homo sapien
gttttgcatagttgtggattttcct

SEQ ID NO: 3734442 - DNA, 25 bp, Homo sapien
ccctgtaggacatctgtatacctat

SEQ ID NO: 3734443 - DNA, 25 bp, Homo sapien
caggctttatgttgttgggagtccc

SEQ ID NO: 3734444 - DNA, 25 bp, Homo sapien
tccctatttatcaggagcctgggcc

SEQ ID NO: 3734445 - DNA, 25 bp, Homo sapien
gaaagcctgagtaacattcaggaag

SEQ ID NO: 3734446 - DNA, 25 bp, Homo sapien
tcagatctccacagttactagaaag

SEQ ID NO: 3734447 - DNA, 25 bp, Homo sapien
gaaggtatatatcaggctttgcact

SEQ ID NO: 3734448 - DNA, 25 bp, Homo sapien
tagaaataatggctctatcctcagc

SEQ ID NO: 3734449 - DNA, 25 bp, Homo sapien
cattcaaaatgtgcaactagctctt

SEQ ID NO: 3734450 - DNA, 25 bp, Homo sapien
caaatccaggtttctaagtctaggt

SEQ ID NO: 3734451 - DNA, 25 bp, Homo sapien
aacactgtgatcaacagttccatcc

SEQ ID NO: 3734452 - DNA, 25 bp, Homo sapien
tccagaacccatgcaaagagtgggt

SEQ ID NO: 3734453 - DNA, 25 bp, Homo sapien
gaaaacactgtgatcaacagttcca

SEQ ID NO: 3734454 - DNA, 25 bp, Homo sapien
aaaacactgtgatcaacagttccat

SEQ ID NO: 3734455 - DNA, 25 bp, Homo sapien
ctgtgggagagacacagagtgtcca

SEQ ID NO: 3734456 - DNA, 25 bp, Homo sapien
acacagagtgtccagctctgccagt

SEQ ID NO: 3734457 - DNA, 25 bp, Homo sapien
actgggtgaggaagtttgtcttctc

SEQ ID NO: 3734458 - DNA, 25 bp, Homo sapien
gagagacacagagtgtccagctctg

SEQ ID NO: 3734459 - DNA, 25 bp, Homo sapien
gagtagcctgttctcggttgacttt

SEQ ID NO: 3734460 - DNA, 25 bp, Homo sapien
ggagtagcctgttctcggttgactt

SEQ ID NO: 3734461 - DNA, 25 bp, Homo sapien
ccaaaagacctcatggtcatgatga

SEQ ID NO: 3734462 - DNA, 25 bp, Homo sapien
ccagaaggatccgaaccagggtagc

SEQ ID NO: 3734463 - DNA, 25 bp, Homo sapien
ccagggtagccccaaaagacctcat

SEQ ID NO: 3734464 - DNA, 25 bp, Homo sapien
cagaaggatccgaaccagggtagcc

SEQ ID NO: 3734465 - DNA, 25 bp, Homo sapien
ttctccggtactccaatggagatgt

SEQ ID NO: 3734466 - DNA, 25 bp, Homo sapien
ctgctttctccggtactccaatgga

SEQ ID NO: 3734467 - DNA, 25 bp, Homo sapien
gctttctccggtactccaatggaga

SEQ ID NO: 3734468 - DNA, 25 bp, Homo sapien
tttctccggtactccaatggagatg

SEQ ID NO: 3734469 - DNA, 25 bp, Homo sapien
tactccagatggtggtctgaggatt

SEQ ID NO: 3734470 - DNA, 25 bp, Homo sapien
ggtggtctgaggattcaggactgat

SEQ ID NO: 3734471 - DNA, 25 bp, Homo sapien
ggtctgaggattcaggactgatgtt

SEQ ID NO: 3734472 - DNA, 25 bp, Homo sapien
tccagatggtggtctgaggattcag

SEQ ID NO: 3734473 - DNA, 25 bp, Homo sapien
cacatctacatcttcctcaacttga

SEQ ID NO: 3734474 - DNA, 25 bp, Homo sapien
acatctacatcttcctcaacttgat

SEQ ID NO: 3734475 - DNA, 25 bp, Homo sapien
ataaatcacatctacatcttcctca

SEQ ID NO: 3734476 - DNA, 25 bp, Homo sapien
atccatcataaatcacatctacatc

SEQ ID NO: 3734477 - DNA, 25 bp, Homo sapien
cacacacaacctggatacacagtac

SEQ ID NO: 3734478 - DNA, 25 bp, Homo sapien
cacacaacctggatacacagtacta

SEQ ID NO: 3734479 - DNA, 25 bp, Homo sapien
tcacacacaacctggatacacagta

SEQ ID NO: 3734480 - DNA, 25 bp, Homo sapien
acacaacctggatacacagtactaa

SEQ ID NO: 3734481 - DNA, 25 bp, Homo sapien
gctgactcccgggacagatatcttg

SEQ ID NO: 3734482 - DNA, 25 bp, Homo sapien
cgggacagatatcttgctgcctttg

SEQ ID NO: 3734483 - DNA, 25 bp, Homo sapien
tttgaggttaattcaccaaactctg

SEQ ID NO: 3734484 - DNA, 25 bp, Homo sapien
caccaaactctgaactgtctgaatt

SEQ ID NO: 3734485 - DNA, 25 bp, Homo sapien
tgacaccaaacccacgctcaacttg

SEQ ID NO: 3734486 - DNA, 25 bp, Homo sapien
cactgtgacaccaaacccacgctca

SEQ ID NO: 3734487 - DNA, 25 bp, Homo sapien
tgtgacaccaaacccacgctcaact

SEQ ID NO: 3734488 - DNA, 25 bp, Homo sapien
gacaccaaacccacgctcaacttgc

SEQ ID NO: 3734489 - DNA, 25 bp, Homo sapien
ctcgaaaccgcacgtctctcctttt

SEQ ID NO: 3734490 - DNA, 25 bp, Homo sapien
tcctccatctgggacgatattctgc

SEQ ID NO: 3734491 - DNA, 25 bp, Homo sapien
ctgggacgatattctgccttgaaaa

SEQ ID NO: 3734492 - DNA, 25 bp, Homo sapien
ttacagacgctgcctcgaaaccgca

SEQ ID NO: 3734493 - DNA, 25 bp, Homo sapien
ttagcgggccgaccccacagccgcg

SEQ ID NO: 3734494 - DNA, 25 bp, Homo sapien
agtctcccgaccttgtccttagcgg

SEQ ID NO: 3734495 - DNA, 25 bp, Homo sapien
ctccccggtcaggagggacagatcc

SEQ ID NO: 3734496 - DNA, 25 bp, Homo sapien
tcctgaggggacctgaccgggagga

SEQ ID NO: 3734497 - DNA, 25 bp, Homo sapien
ttgaagggaattccggccgcagaaa

SEQ ID NO: 3734498 - DNA, 25 bp, Homo sapien
gatgctgttgaagggaattccggcc

SEQ ID NO: 3734499 - DNA, 25 bp, Homo sapien
tgcccggcgagactgcgctcgcggg

SEQ ID NO: 3734500 - DNA, 25 bp, Homo sapien
cgggcgccgacagggatgctgttga

SEQ ID NO: 3734501 - DNA, 25 bp, Homo sapien
ctgcggggtaccagtgcgggcccgg

SEQ ID NO: 3734502 - DNA, 25 bp, Homo sapien
tgcggggtaccagtgcgggcccggc

SEQ ID NO: 3734503 - DNA, 25 bp, Homo sapien
gccgccgccgcccgccggccgagcc

SEQ ID NO: 3734504 - DNA, 25 bp, Homo sapien
ctgttcccgtccagcagccaggagg

SEQ ID NO: 3734505 - DNA, 25 bp, Homo sapien
agccaggaggaggcgcccccgccgc

SEQ ID NO: 3734506 - DNA, 25 bp, Homo sapien
ccgccgccgccgcccgccggccgag

SEQ ID NO: 3734507 - DNA, 25 bp, Homo sapien
aggtagaggaagccatagcacagca

SEQ ID NO: 3734508 - DNA, 25 bp, Homo sapien
ggtagaggaagccatagcacagcag

SEQ ID NO: 3734509 - DNA, 25 bp, Homo sapien
ggtcctctcgcacggcttggactgg

SEQ ID NO: 3734510 - DNA, 25 bp, Homo sapien
tctcgcacggcttggactgggacac

SEQ ID NO: 3734511 - DNA, 25 bp, Homo sapien
aagcaggagccggtcctctcgcacg

SEQ ID NO: 3734512 - DNA, 25 bp, Homo sapien
agccggtcctctcgcacggcttgga

SEQ ID NO: 3734513 - DNA, 25 bp, Homo sapien
ccaaagcgatgttcccgcacaaaag

SEQ ID NO: 3734514 - DNA, 25 bp, Homo sapien
caagccaaagcgatgttcccgcaca

SEQ ID NO: 3734515 - DNA, 25 bp, Homo sapien
ttcaaacaagccaaagcgatgttcc

SEQ ID NO: 3734516 - DNA, 25 bp, Homo sapien
aaacaagccaaagcgatgttcccgc

SEQ ID NO: 3734517 - DNA, 25 bp, Homo sapien
ggaatggcttgttattctgagtgct

SEQ ID NO: 3734518 - DNA, 25 bp, Homo sapien
cttctatcctcaagaaacatttgaa

SEQ ID NO: 3734519 - DNA, 25 bp, Homo sapien
tatcaatcttctatcctcaagaaac

SEQ ID NO: 3734520 - DNA, 25 bp, Homo sapien
taagagaactgaagtaccacttttg

SEQ ID NO: 3734521 - DNA, 25 bp, Homo sapien
aatgtagatcctatacctgtctcac

SEQ ID NO: 3734522 - DNA, 25 bp, Homo sapien
cattgcactttggaagtaaacaact

SEQ ID NO: 3734523 - DNA, 25 bp, Homo sapien
tacctgtctcaccattgcactttgg

SEQ ID NO: 3734524 - DNA, 25 bp, Homo sapien
atttgccccaggatgaattgtgcct

SEQ ID NO: 3734525 - DNA, 25 bp, Homo sapien
attccaattgtgtagtgctctccag

SEQ ID NO: 3734526 - DNA, 25 bp, Homo sapien
gaggatgtcaccaatcaaggtaaaa

SEQ ID NO: 3734527 - DNA, 25 bp, Homo sapien
ggaggatgtcaccaatcaaggtaaa

SEQ ID NO: 3734528 - DNA, 25 bp, Homo sapien
aggatgtcaccaatcaaggtaaaag

SEQ ID NO: 3734529 - DNA, 25 bp, Homo sapien
gggaggatgtcaccaatcaaggtaa

SEQ ID NO: 3734530 - DNA, 25 bp, Homo sapien
ctccttgccaataccagtccactgg

SEQ ID NO: 3734531 - DNA, 25 bp, Homo sapien
tccttgccaataccagtccactgga

SEQ ID NO: 3734532 - DNA, 25 bp, Homo sapien
gccaataccagtccactggaagcat

SEQ ID NO: 3734533 - DNA, 25 bp, Homo sapien
ttgccaataccagtccactggaagc

SEQ ID NO: 3734534 - DNA, 25 bp, Homo sapien
taaatatccagaaggttctgttaac

SEQ ID NO: 3734535 - DNA, 25 bp, Homo sapien
tagccttcaatgagccaagtacatt

SEQ ID NO: 3734536 - DNA, 25 bp, Homo sapien
tcaatgagccaagtacatttagttt

SEQ ID NO: 3734537 - DNA, 25 bp, Homo sapien
tatttatagttaattgggccatctg

SEQ ID NO: 3734538 - DNA, 25 bp, Homo sapien
aaggtgcatatattgaatctccatc

SEQ ID NO: 3734539 - DNA, 25 bp, Homo sapien
ctattaaaggtgcatatattgaatc

SEQ ID NO: 3734540 - DNA, 25 bp, Homo sapien
ttaaaggtgcatatattgaatctcc

SEQ ID NO: 3734541 - DNA, 25 bp, Homo sapien
ggtgcatatattgaatctccatcat

SEQ ID NO: 3734542 - DNA, 25 bp, Homo sapien
ccttatttcagggactatcaaacca

SEQ ID NO: 3734543 - DNA, 25 bp, Homo sapien
gatgtagtaacaacttcaggcacag

SEQ ID NO: 3734544 - DNA, 25 bp, Homo sapien
tgtaacagtgcatagccagatgtag

SEQ ID NO: 3734545 - DNA, 25 bp, Homo sapien
tgaaaccagttagattatacgcagc

SEQ ID NO: 3734546 - DNA, 25 bp, Homo sapien
ataaattgctgattcaaggatattt

SEQ ID NO: 3734547 - DNA, 25 bp, Homo sapien
ctggtgaaaaattctctggttacca

SEQ ID NO: 3734548 - DNA, 25 bp, Homo sapien
taaattgctgattcaaggatattta

SEQ ID NO: 3734549 - DNA, 25 bp, Homo sapien
tggtgaaaaattctctggttaccaa

SEQ ID NO: 3734550 - DNA, 25 bp, Homo sapien
acttcccatgaccagagcaattgtt

SEQ ID NO: 3734551 - DNA, 25 bp, Homo sapien
acagagacactagttgtacacttcc

SEQ ID NO: 3734552 - DNA, 25 bp, Homo sapien
gaccagagcaattgttaggacaaga

SEQ ID NO: 3734553 - DNA, 25 bp, Homo sapien
cttggaacagagacactagttgtac

SEQ ID NO: 3734554 - DNA, 25 bp, Homo sapien
caagcttcacccttccagtatttat

SEQ ID NO: 3734555 - DNA, 25 bp, Homo sapien
cagtaaggaatatcacaagcttcac

SEQ ID NO: 3734556 - DNA, 25 bp, Homo sapien
tctggactgccgcaattggctttac

SEQ ID NO: 3734557 - DNA, 25 bp, Homo sapien
tctccagtcaggtcacagtaaccgt

SEQ ID NO: 3734558 - DNA, 25 bp, Homo sapien
agcccgacctacagaaggactgaag

SEQ ID NO: 3734559 - DNA, 25 bp, Homo sapien
tatgtgaagcccgacctacagaagg

SEQ ID NO: 3734560 - DNA, 25 bp, Homo sapien
taagactcagtagagggaacattca

SEQ ID NO: 3734561 - DNA, 25 bp, Homo sapien
aaaactgctttatgtgaagcccgac

SEQ ID NO: 3734562 - DNA, 25 bp, Homo sapien
aattgaactacattcagaatgatga

SEQ ID NO: 3734563 - DNA, 25 bp, Homo sapien
caattgaactacattcagaatgatg

SEQ ID NO: 3734564 - DNA, 25 bp, Homo sapien
ctacaattgaactacattcagaatg

SEQ ID NO: 3734565 - DNA, 25 bp, Homo sapien
tgaactacattcagaatgatgaaaa

SEQ ID NO: 3734566 - DNA, 25 bp, Homo sapien
tacattccatatactgctttctaaa

SEQ ID NO: 3734567 - DNA, 25 bp, Homo sapien
cttgatggagttcctacattccata

SEQ ID NO: 3734568 - DNA, 25 bp, Homo sapien
cctacattccatatactgctttcta

SEQ ID NO: 3734569 - DNA, 25 bp, Homo sapien
tcctacattccatatactgctttct

SEQ ID NO: 3734570 - DNA, 25 bp, Homo sapien
agcaagagagtgtccatatctctgg

SEQ ID NO: 3734571 - DNA, 25 bp, Homo sapien
gagagtgtccatatctctggagagg

SEQ ID NO: 3734572 - DNA, 25 bp, Homo sapien
caagagagtgtccatatctctggag

SEQ ID NO: 3734573 - DNA, 25 bp, Homo sapien
aaagcaagagagtgtccatatctct

SEQ ID NO: 3734574 - DNA, 25 bp, Homo sapien
tgaaaaccaaacaagtgtcctgtca

SEQ ID NO: 3734575 - DNA, 25 bp, Homo sapien
aaatgcatggataaacaggtggtag

SEQ ID NO: 3734576 - DNA, 25 bp, Homo sapien
tttagacagcctagccaaaggccac

SEQ ID NO: 3734577 - DNA, 25 bp, Homo sapien
tgttctttatactgctcccatgctt

SEQ ID NO: 3734578 - DNA, 25 bp, Homo sapien
aaaacccataattcatctgtgacat

SEQ ID NO: 3734579 - DNA, 25 bp, Homo sapien
taaaaacccataattcatctgtgac

SEQ ID NO: 3734580 - DNA, 25 bp, Homo sapien
atgttaaaaacccataattcatctg

SEQ ID NO: 3734581 - DNA, 25 bp, Homo sapien
gttaaaaacccataattcatctgtg

SEQ ID NO: 3734582 - DNA, 25 bp, Homo sapien
gcatactgctgaccatgtccaagaa

SEQ ID NO: 3734583 - DNA, 25 bp, Homo sapien
tatggtattcctgtatgctgcttgt

SEQ ID NO: 3734584 - DNA, 25 bp, Homo sapien
gaatgtccctccacagcatactgct

SEQ ID NO: 3734585 - DNA, 25 bp, Homo sapien
tccataatatgtgctgaatgtccct

SEQ ID NO: 3734586 - DNA, 25 bp, Homo sapien
tcatatgaagattttattagagaaa

SEQ ID NO: 3734587 - DNA, 25 bp, Homo sapien
ttcatatgaagattttattagagaa

SEQ ID NO: 3734588 - DNA, 25 bp, Homo sapien
aaacattcccaatcaataaagaaat

SEQ ID NO: 3734589 - DNA, 25 bp, Homo sapien
tagagaaaaacattcccaatcaata

SEQ ID NO: 3734590 - DNA, 25 bp, Homo sapien
gtattctgttgtcttatctctataa

SEQ ID NO: 3734591 - DNA, 25 bp, Homo sapien
aatcaagccacactggatgacacag

SEQ ID NO: 3734592 - DNA, 25 bp, Homo sapien
tttcatattaatcaagccacactgg

SEQ ID NO: 3734593 - DNA, 25 bp, Homo sapien
tgtgtatgcttcacactagctattt

SEQ ID NO: 3734594 - DNA, 25 bp, Homo sapien
gaaaatgcaacattaaagatgacca

SEQ ID NO: 3734595 - DNA, 25 bp, Homo sapien
cataaataagggttctgcttattaa

SEQ ID NO: 3734596 - DNA, 25 bp, Homo sapien
taaaaaactggaacagctactcttg

SEQ ID NO: 3734597 - DNA, 25 bp, Homo sapien
gcaacattaaagatgaccatgtgac

SEQ ID NO: 3734598 - DNA, 25 bp, Homo sapien
gaagaactgagtagtgacaacagag

SEQ ID NO: 3734599 - DNA, 25 bp, Homo sapien
tgacacttgaggtacaatttggcaa

SEQ ID NO: 3734600 - DNA, 25 bp, Homo sapien
taaatttctcaggtaagggcacaca

SEQ ID NO: 3734601 - DNA, 25 bp, Homo sapien
tccatggttgccttgatctgtaggt

SEQ ID NO: 3734602 - DNA, 25 bp, Homo sapien
tatgtgttgcttttactgtcactat

SEQ ID NO: 3734603 - DNA, 25 bp, Homo sapien
tctttacttgttggtttagctattc

SEQ ID NO: 3734604 - DNA, 25 bp, Homo sapien
tataaatatacttctgataactgct

SEQ ID NO: 3734605 - DNA, 25 bp, Homo sapien
tctagctttttgaattgggaatgtg

SEQ ID NO: 3734606 - DNA, 25 bp, Homo sapien
tatggtccaagttagtaaaaccatc

SEQ ID NO: 3734607 - DNA, 25 bp, Homo sapien
cagaagagctttatggtccaagtta

SEQ ID NO: 3734608 - DNA, 25 bp, Homo sapien
ttcccctctgagatttgtagattcc

SEQ ID NO: 3734609 - DNA, 25 bp, Homo sapien
cacataattcccctctgagatttgt

SEQ ID NO: 3734610 - DNA, 25 bp, Homo sapien
tggccatatccaccttgtacaatag

SEQ ID NO: 3734611 - DNA, 25 bp, Homo sapien
tatttcatcatacacactagtatgg

SEQ ID NO: 3734612 - DNA, 25 bp, Homo sapien
tggcaatgctttataccctccatga

SEQ ID NO: 3734613 - DNA, 25 bp, Homo sapien
aatccatatttgttccctggcaatg

SEQ ID NO: 3734614 - DNA, 25 bp, Homo sapien
tgaatgaaggtatctggcaaaccca

SEQ ID NO: 3734615 - DNA, 25 bp, Homo sapien
ctcaaggaagtgtcattatgggtat

SEQ ID NO: 3734616 - DNA, 25 bp, Homo sapien
tccaaaaataagcatagctccattg

SEQ ID NO: 3734617 - DNA, 25 bp, Homo sapien
aaacattttgcaccgttactcaagg

SEQ ID NO: 3734618 - DNA, 25 bp, Homo sapien
aggatcatgccacctgacttcaaac

SEQ ID NO: 3734619 - DNA, 25 bp, Homo sapien
ggaggatcatgccacctgacttcaa

SEQ ID NO: 3734620 - DNA, 25 bp, Homo sapien
agctggaggatcatgccacctgact

SEQ ID NO: 3734621 - DNA, 25 bp, Homo sapien
aacaaagctggaggatcatgccacc

SEQ ID NO: 3734622 - DNA, 25 bp, Homo sapien
aaatctgttgacatctctatgaaga

SEQ ID NO: 3734623 - DNA, 25 bp, Homo sapien
ctactgcagagtgtccaaatctgtt

SEQ ID NO: 3734624 - DNA, 25 bp, Homo sapien
tgttgacatctctatgaagatttgg

SEQ ID NO: 3734625 - DNA, 25 bp, Homo sapien
ccgttaatgactactgcagagtgtc

SEQ ID NO: 3734626 - DNA, 25 bp, Homo sapien
gcaatgtaatgaccattgagtccaa

SEQ ID NO: 3734627 - DNA, 25 bp, Homo sapien
gattgtttactgtcactggattcca

SEQ ID NO: 3734628 - DNA, 25 bp, Homo sapien
actgtttggacagccacttgatatc

SEQ ID NO: 3734629 - DNA, 25 bp, Homo sapien
gccactaaatgagctagcagattgt

SEQ ID NO: 3734630 - DNA, 25 bp, Homo sapien
tggaggcttgtatacaaggatatca

SEQ ID NO: 3734631 - DNA, 25 bp, Homo sapien
tattagtattcccagattcccaaga

SEQ ID NO: 3734632 - DNA, 25 bp, Homo sapien
taggagggcactttgctctaagaat

SEQ ID NO: 3734633 - DNA, 25 bp, Homo sapien
cattaaggagtacactagaaaatcc

SEQ ID NO: 3734634 - DNA, 25 bp, Homo sapien
catttgtattggcagtacagctggc

SEQ ID NO: 3734635 - DNA, 25 bp, Homo sapien
accattggcacccatttgtattggc

SEQ ID NO: 3734636 - DNA, 25 bp, Homo sapien
actatttgccgaaatgcatttcttg

SEQ ID NO: 3734637 - DNA, 25 bp, Homo sapien
tgcagttactatttgccgaaatgca

SEQ ID NO: 3734638 - DNA, 25 bp, Homo sapien
acagctggtaagtttgttacaaatc

SEQ ID NO: 3734639 - DNA, 25 bp, Homo sapien
gatcccactggcaattcaagtttag

SEQ ID NO: 3734640 - DNA, 25 bp, Homo sapien
tagtgaacagcttttacagctggta

SEQ ID NO: 3734641 - DNA, 25 bp, Homo sapien
tgctcatttctcacatgacatttgg

SEQ ID NO: 3734642 - DNA, 25 bp, Homo sapien
ttatagcaataaagttttgcattgt

SEQ ID NO: 3734643 - DNA, 25 bp, Homo sapien
tgaagcaagatttccactaagatta

SEQ ID NO: 3734644 - DNA, 25 bp, Homo sapien
tcttttgaggttgttaatgaagcaa

SEQ ID NO: 3734645 - DNA, 25 bp, Homo sapien
gatttccactaagattatagcaata

SEQ ID NO: 3734646 - DNA, 25 bp, Homo sapien
gaatcattgggttcgccaggaagcc

SEQ ID NO: 3734647 - DNA, 25 bp, Homo sapien
ggattagcttttaagcctgccactg

SEQ ID NO: 3734648 - DNA, 25 bp, Homo sapien
gccatttgccatagatgtacaagga

SEQ ID NO: 3734649 - DNA, 25 bp, Homo sapien
tgcgcaagcctacccaaggtgatac

SEQ ID NO: 3734650 - DNA, 25 bp, Homo sapien
agtttgccactctagacattgtcca

SEQ ID NO: 3734651 - DNA, 25 bp, Homo sapien
gagagcatggctttttgcacggcct

SEQ ID NO: 3734652 - DNA, 25 bp, Homo sapien
catcgtttcgtactgctgcaccaca

SEQ ID NO: 3734653 - DNA, 25 bp, Homo sapien
gcacggcctcgcattttgatttgga

SEQ ID NO: 3734654 - DNA, 25 bp, Homo sapien
agggagctcaactcataatacatcc

SEQ ID NO: 3734655 - DNA, 25 bp, Homo sapien
atccctaaaaaaggatatcaacagg

SEQ ID NO: 3734656 - DNA, 25 bp, Homo sapien
atgtccatcccaggcatacctctcc

SEQ ID NO: 3734657 - DNA, 25 bp, Homo sapien
tcataatacatccaaccatgtccat

SEQ ID NO: 3734658 - DNA, 25 bp, Homo sapien
caataagcttcattggtccccgtga

SEQ ID NO: 3734659 - DNA, 25 bp, Homo sapien
ggtgtcaagaaccatctcactgtgg

SEQ ID NO: 3734660 - DNA, 25 bp, Homo sapien
tcactgtggtgcattccaataagct

SEQ ID NO: 3734661 - DNA, 25 bp, Homo sapien
tggacactggataaaggaccactca

SEQ ID NO: 3734662 - DNA, 25 bp, Homo sapien
gtgctatgtccattacactggcaag

SEQ ID NO: 3734663 - DNA, 25 bp, Homo sapien
gagatttttacactgttcgcacaca

SEQ ID NO: 3734664 - DNA, 25 bp, Homo sapien
gttggatctccataataacctggca

SEQ ID NO: 3734665 - DNA, 25 bp, Homo sapien
tattattgatgcaagtgctatgtcc

SEQ ID NO: 3734666 - DNA, 25 bp, Homo sapien
cggcatgcactttgaattttaataa

SEQ ID NO: 3734667 - DNA, 25 bp, Homo sapien
tatcggcatgcactttgaattttaa

SEQ ID NO: 3734668 - DNA, 25 bp, Homo sapien
ttaatatcggcatgcactttgaatt

SEQ ID NO: 3734669 - DNA, 25 bp, Homo sapien
aaatgagcttttcccaataaagtga

SEQ ID NO: 3734670 - DNA, 25 bp, Homo sapien
gaaaactcgtttgctaggaagacta

SEQ ID NO: 3734671 - DNA, 25 bp, Homo sapien
tcaaaaaggagttaggcttatgtcc

SEQ ID NO: 3734672 - DNA, 25 bp, Homo sapien
ccttaaaatggataagagctggcca

SEQ ID NO: 3734673 - DNA, 25 bp, Homo sapien
gtaataatcatggaggcacaaacct

SEQ ID NO: 3734674 - DNA, 25 bp, Homo sapien
taaaatgactccagaattaataggt

SEQ ID NO: 3734675 - DNA, 25 bp, Homo sapien
taggttagtgagtcaaaatgtaaga

SEQ ID NO: 3734676 - DNA, 25 bp, Homo sapien
tacataacttctcttaccagtcttc

SEQ ID NO: 3734677 - DNA, 25 bp, Homo sapien
aaatgtaagatagttaagctctgaa

SEQ ID NO: 3734678 - DNA, 25 bp, Homo sapien
aattccagaagttggacgcttacag

SEQ ID NO: 3734679 - DNA, 25 bp, Homo sapien
catgtggctcctgatacgttggtaa

SEQ ID NO: 3734680 - DNA, 25 bp, Homo sapien
caaagcagtgctccagtacgtgaac

SEQ ID NO: 3734681 - DNA, 25 bp, Homo sapien
gaggtgatccacaaacaatgatgct

SEQ ID NO: 3734682 - DNA, 25 bp, Homo sapien
gcatacttgtaaaccgctgagcaga

SEQ ID NO: 3734683 - DNA, 25 bp, Homo sapien
aattggcattggtcaccttttattc

SEQ ID NO: 3734684 - DNA, 25 bp, Homo sapien
tgtgtgcagatgacagatatttgca

SEQ ID NO: 3734685 - DNA, 25 bp, Homo sapien
ttattcctttagttgtgcagaaaca

SEQ ID NO: 3734686 - DNA, 25 bp, Homo sapien
cagatatttgcatggccactgcatg

SEQ ID NO: 3734687 - DNA, 25 bp, Homo sapien
tacaaatttcttggaaggatgaaac

SEQ ID NO: 3734688 - DNA, 25 bp, Homo sapien
ggaaggtgtccaatacaagaactac

SEQ ID NO: 3734689 - DNA, 25 bp, Homo sapien
taagttttcaatagtcaagcacaga

SEQ ID NO: 3734690 - DNA, 25 bp, Homo sapien
tgtaggaagtaactttggcatccca

SEQ ID NO: 3734691 - DNA, 25 bp, Homo sapien
tctaagtggattaccaacatagcga

SEQ ID NO: 3734692 - DNA, 25 bp, Homo sapien
gtggattaccaacatagcgattttc

SEQ ID NO: 3734693 - DNA, 25 bp, Homo sapien
tgttcctctaagtggattaccaaca

SEQ ID NO: 3734694 - DNA, 25 bp, Homo sapien
caacatagcgattttcagagtcaca

SEQ ID NO: 3734695 - DNA, 25 bp, Homo sapien
aagctgaaggtaaattgataatcaa

SEQ ID NO: 3734696 - DNA, 25 bp, Homo sapien
ctgttctgggtttgctataaagttt

SEQ ID NO: 3734697 - DNA, 25 bp, Homo sapien
tcatcttcctgtaataagctgaagg

SEQ ID NO: 3734698 - DNA, 25 bp, Homo sapien
tggcagtatggtggcgatcatcttc

SEQ ID NO: 3734699 - DNA, 25 bp, Homo sapien
ttgatatatccagatttttgttcga

SEQ ID NO: 3734700 - DNA, 25 bp, Homo sapien
tgttgaaccgacagaccacgtaatg

SEQ ID NO: 3734701 - DNA, 25 bp, Homo sapien
ccacgtaatgttgagattaaagttg

SEQ ID NO: 3734702 - DNA, 25 bp, Homo sapien
taaagttgtttgatgcattaattga

SEQ ID NO: 3734703 - DNA, 25 bp, Homo sapien
tgttaggattgcttctaaagttaaa

SEQ ID NO: 3734704 - DNA, 25 bp, Homo sapien
gaatgtaatgttaggattgcttcta

SEQ ID NO: 3734705 - DNA, 25 bp, Homo sapien
aaaactatctctgtattcctttata

SEQ ID NO: 3734706 - DNA, 25 bp, Homo sapien
aggaaaagttgctgacgtacacata

SEQ ID NO: 3734707 - DNA, 25 bp, Homo sapien
ggaaaaaatgtgacccatggagaac

SEQ ID NO: 3734708 - DNA, 25 bp, Homo sapien
gacagaactattgcccgcccaaaag

SEQ ID NO: 3734709 - DNA, 25 bp, Homo sapien
aagagtgagacagaactattgcccg

SEQ ID NO: 3734710 - DNA, 25 bp, Homo sapien
gtgagacagaactattgcccgccca

SEQ ID NO: 3734711 - DNA, 25 bp, Homo sapien
ttgtattgtgttgtgagaatgcaat

SEQ ID NO: 3734712 - DNA, 25 bp, Homo sapien
ctgaagaaggtgacaaaaaactgca

SEQ ID NO: 3734713 - DNA, 25 bp, Homo sapien
caaaaaactgcacaaggtccatgat

SEQ ID NO: 3734714 - DNA, 25 bp, Homo sapien
caaggtccatgattgtattgtgttg

SEQ ID NO: 3734715 - DNA, 25 bp, Homo sapien
tggcccaattatgtttaccatcaga

SEQ ID NO: 3734716 - DNA, 25 bp, Homo sapien
tactggcccaattatgtttaccatc

SEQ ID NO: 3734717 - DNA, 25 bp, Homo sapien
tatgtctgtaagtgatctccctagt

SEQ ID NO: 3734718 - DNA, 25 bp, Homo sapien
taagatggcataaaacattaagaac

SEQ ID NO: 3734719 - DNA, 25 bp, Homo sapien
tacagcaattcaggtgcttggaaga

SEQ ID NO: 3734720 - DNA, 25 bp, Homo sapien
acaccttcaaaagagagtggagtag

SEQ ID NO: 3734721 - DNA, 25 bp, Homo sapien
acatccatgttggtgggtggaacac

SEQ ID NO: 3734722 - DNA, 25 bp, Homo sapien
gagtggagtagaatgattatcatta

SEQ ID NO: 3734723 - DNA, 25 bp, Homo sapien
cagcattcgtggttcacgaaaatct

SEQ ID NO: 3734724 - DNA, 25 bp, Homo sapien
ctgacggtcctatctgctagaagga

SEQ ID NO: 3734725 - DNA, 25 bp, Homo sapien
ctgcagctgacggtcctatctgcta

SEQ ID NO: 3734726 - DNA, 25 bp, Homo sapien
gcagactgacacgtcacacagccag

SEQ ID NO: 3734727 - DNA, 25 bp, Homo sapien
acactacaaattcgctggtcactgg

SEQ ID NO: 3734728 - DNA, 25 bp, Homo sapien
tacaaattcgctggtcactggacat

SEQ ID NO: 3734729 - DNA, 25 bp, Homo sapien
gctggtcactggacattacaagaaa

SEQ ID NO: 3734730 - DNA, 25 bp, Homo sapien
ctgggacactacaaattcgctggtc

SEQ ID NO: 3734731 - DNA, 25 bp, Homo sapien
tctctccgtcgagaagcccaacaag

SEQ ID NO: 3734732 - DNA, 25 bp, Homo sapien
caccagcaataaggataggaaacaa

SEQ ID NO: 3734733 - DNA, 25 bp, Homo sapien
agcagccaccagcaataaggatagg

SEQ ID NO: 3734734 - DNA, 25 bp, Homo sapien
agtttgtttgatcttccataccaca

SEQ ID NO: 3734735 - DNA, 25 bp, Homo sapien
ttattctgtgccgaatcttctttct

SEQ ID NO: 3734736 - DNA, 25 bp, Homo sapien
tattctgtgccgaatcttctttctg

SEQ ID NO: 3734737 - DNA, 25 bp, Homo sapien
tgcaataggcatgcggaagacctgt

SEQ ID NO: 3734738 - DNA, 25 bp, Homo sapien
caataaagtaaatccaggtgctccc

SEQ ID NO: 3734739 - DNA, 25 bp, Homo sapien
tgctcccctaagaactttgcacgtg

SEQ ID NO: 3734740 - DNA, 25 bp, Homo sapien
gatacacctttgttgaactgagcaa

SEQ ID NO: 3734741 - DNA, 25 bp, Homo sapien
ccagaaaattcatgacgctcttcag

SEQ ID NO: 3734742 - DNA, 25 bp, Homo sapien
tgtgtgtacacaagccaatgcgatt

SEQ ID NO: 3734743 - DNA, 25 bp, Homo sapien
gtaaacttctttggctacatcggag

SEQ ID NO: 3734744 - DNA, 25 bp, Homo sapien
catcggagtaatataaagcagtcac

SEQ ID NO: 3734745 - DNA, 25 bp, Homo sapien
tagaattcgcctcctgcccaaataa

SEQ ID NO: 3734746 - DNA, 25 bp, Homo sapien
caggctttatggttaaactcagtgg

SEQ ID NO: 3734747 - DNA, 25 bp, Homo sapien
tctcaggataatgcccaaagcagct

SEQ ID NO: 3734748 - DNA, 25 bp, Homo sapien
caaagcagctgacattagaattcgc

SEQ ID NO: 3734749 - DNA, 25 bp, Homo sapien
aatgagaaatgaagttctgtacttc

SEQ ID NO: 3734750 - DNA, 25 bp, Homo sapien
taatgagaaatgaagttctgtactt

SEQ ID NO: 3734751 - DNA, 25 bp, Homo sapien
tttatcttctacttgatcacatatc

SEQ ID NO: 3734752 - DNA, 25 bp, Homo sapien
tacttgatcacatatctcattttgt

SEQ ID NO: 3734753 - DNA, 25 bp, Homo sapien
ggccatctgctgtcgttctcgaagc

SEQ ID NO: 3734754 - DNA, 25 bp, Homo sapien
ctggccatctgctgtcgttctcgaa

SEQ ID NO: 3734755 - DNA, 25 bp, Homo sapien
ggccctcgcagaaactctgtttgtt

SEQ ID NO: 3734756 - DNA, 25 bp, Homo sapien
tggccatctgctgtcgttctcgaag

SEQ ID NO: 3734757 - DNA, 25 bp, Homo sapien
ataaatatgcaaagcacagtggtcc

SEQ ID NO: 3734758 - DNA, 25 bp, Homo sapien
acagtggtcctctttcagcaccgct

SEQ ID NO: 3734759 - DNA, 25 bp, Homo sapien
cataagcagatgtagattagagaag

SEQ ID NO: 3734760 - DNA, 25 bp, Homo sapien
cagatgtagattagagaagcaatat

SEQ ID NO: 3734761 - DNA, 25 bp, Homo sapien
tataggcgctttgtttcttcgatca

SEQ ID NO: 3734762 - DNA, 25 bp, Homo sapien
ggtgcacagagtactccaaagacta

SEQ ID NO: 3734763 - DNA, 25 bp, Homo sapien
tggcataacatatgtagctgaatct

SEQ ID NO: 3734764 - DNA, 25 bp, Homo sapien
catctccactcgtaccttttctaag

SEQ ID NO: 3734765 - DNA, 25 bp, Homo sapien
tttaatgtctataaaatgctatcaa

SEQ ID NO: 3734766 - DNA, 25 bp, Homo sapien
tccattatgcaaaacctacagttca

SEQ ID NO: 3734767 - DNA, 25 bp, Homo sapien
gattatagtcaatgtgtaactcaaa

SEQ ID NO: 3734768 - DNA, 25 bp, Homo sapien
gggccaatattgttaagtggcaact

SEQ ID NO: 3734769 - DNA, 25 bp, Homo sapien
aaggccagtagatacaaccactgta

SEQ ID NO: 3734770 - DNA, 25 bp, Homo sapien
caaccactgtaggaatggttacatg

SEQ ID NO: 3734771 - DNA, 25 bp, Homo sapien
gtagatacaaccactgtaggaatgg

SEQ ID NO: 3734772 - DNA, 25 bp, Homo sapien
aggcttcactagcaaggccagtaga

SEQ ID NO: 3734773 - DNA, 25 bp, Homo sapien
atgtttactggttcaagaacatctg

SEQ ID NO: 3734774 - DNA, 25 bp, Homo sapien
gtttactggttcaagaacatctggg

SEQ ID NO: 3734775 - DNA, 25 bp, Homo sapien
ttactggttcaagaacatctgggct

SEQ ID NO: 3734776 - DNA, 25 bp, Homo sapien
gaatgtttactggttcaagaacatc

SEQ ID NO: 3734777 - DNA, 25 bp, Homo sapien
tagccgtgggcactaataattgctt

SEQ ID NO: 3734778 - DNA, 25 bp, Homo sapien
tgcctgccattctaacactgccaaa

SEQ ID NO: 3734779 - DNA, 25 bp, Homo sapien
ggctaattagaccttcaagtaggca

SEQ ID NO: 3734780 - DNA, 25 bp, Homo sapien
ctaattacctgcttgaggatgccaa

SEQ ID NO: 3734781 - DNA, 25 bp, Homo sapien
ctgcagggacttcaacaccaaaacc

SEQ ID NO: 3734782 - DNA, 25 bp, Homo sapien
aattgggcataaaacctgcagggac

SEQ ID NO: 3734783 - DNA, 25 bp, Homo sapien
ttaattgggcataaaacctgcaggg

SEQ ID NO: 3734784 - DNA, 25 bp, Homo sapien
accaaaacctgctaaccacaggaag

SEQ ID NO: 3734785 - DNA, 25 bp, Homo sapien
tcttgcttgctgaacaatgggagag

SEQ ID NO: 3734786 - DNA, 25 bp, Homo sapien
cctcccgccaagctatgggagcgaa

SEQ ID NO: 3734787 - DNA, 25 bp, Homo sapien
agatgtaaccctccctcttgcttgc

SEQ ID NO: 3734788 - DNA, 25 bp, Homo sapien
tatgggagcgaagaagggaagccac

SEQ ID NO: 3734789 - DNA, 25 bp, Homo sapien
tgccctcggctccatttggactgct

SEQ ID NO: 3734790 - DNA, 25 bp, Homo sapien
tggggtactgccttcagagacagcc

SEQ ID NO: 3734791 - DNA, 25 bp, Homo sapien
gcagttctctgtggtccacttgtct

SEQ ID NO: 3734792 - DNA, 25 bp, Homo sapien
agagacagccccacggaaacattct

SEQ ID NO: 3734793 - DNA, 25 bp, Homo sapien
gcatcatccctcgtgaacacaagca

SEQ ID NO: 3734794 - DNA, 25 bp, Homo sapien
tctattagaaacttgcggtgtccct

SEQ ID NO: 3734795 - DNA, 25 bp, Homo sapien
caagcaaacctctctctattagaaa

SEQ ID NO: 3734796 - DNA, 25 bp, Homo sapien
taaactattagtcaaatctgttata

SEQ ID NO: 3734797 - DNA, 25 bp, Homo sapien
ctgtgctgagatgctcggatggaaa

SEQ ID NO: 3734798 - DNA, 25 bp, Homo sapien
gatggaaacggacacgtgcagcaca

SEQ ID NO: 3734799 - DNA, 25 bp, Homo sapien
tgctcggatggaaacggacacgtgc

SEQ ID NO: 3734800 - DNA, 25 bp, Homo sapien
cggacacgtgcagcacacagtgggt

SEQ ID NO: 3734801 - DNA, 25 bp, Homo sapien
gctgttatcaaggaatctgacctga

SEQ ID NO: 3734802 - DNA, 25 bp, Homo sapien
ttgttccctgctgttatcaaggaat

SEQ ID NO: 3734803 - DNA, 25 bp, Homo sapien
tccctgctgttatcaaggaatctga

SEQ ID NO: 3734804 - DNA, 25 bp, Homo sapien
aaggaatctgacctgactgtaagca

SEQ ID NO: 3734805 - DNA, 25 bp, Homo sapien
tcaatggcaattggcttgggtgccc

SEQ ID NO: 3734806 - DNA, 25 bp, Homo sapien
tcccagcacatggttcaatggcaat

SEQ ID NO: 3734807 - DNA, 25 bp, Homo sapien
gggcacctgatgatcctcgtggtag

SEQ ID NO: 3734808 - DNA, 25 bp, Homo sapien
tcctcgtggtagacaaagaaacaca

SEQ ID NO: 3734809 - DNA, 25 bp, Homo sapien
cctacaggaaaaggagaatcagaac

SEQ ID NO: 3734810 - DNA, 25 bp, Homo sapien
cctactgagatggttgcgtgaagct

SEQ ID NO: 3734811 - DNA, 25 bp, Homo sapien
tgtgcccacctaagacagagggttt

SEQ ID NO: 3734812 - DNA, 25 bp, Homo sapien
tgtggacaacaccatcgcaatgagc

SEQ ID NO: 3734813 - DNA, 25 bp, Homo sapien
taatcgacagtcaaacactacagag

SEQ ID NO: 3734814 - DNA, 25 bp, Homo sapien
cctgtgatgggtcaaggcacaaaac

SEQ ID NO: 3734815 - DNA, 25 bp, Homo sapien
cactacagagatgcgagaattgagg

SEQ ID NO: 3734816 - DNA, 25 bp, Homo sapien
aaggaggtgctctatagccatcgcc

SEQ ID NO: 3734817 - DNA, 25 bp, Homo sapien
aagaagctggctaaggatcagacct

SEQ ID NO: 3734818 - DNA, 25 bp, Homo sapien
aagctggctaaggatcagacctggg

SEQ ID NO: 3734819 - DNA, 25 bp, Homo sapien
aggtaaaagaagctggctaaggatc

SEQ ID NO: 3734820 - DNA, 25 bp, Homo sapien
aaaagaagctggctaaggatcagac

SEQ ID NO: 3734821 - DNA, 25 bp, Homo sapien
tttacatctgaacgggaggaaatcc

SEQ ID NO: 3734822 - DNA, 25 bp, Homo sapien
caggatcggcagttagctgcagaga

SEQ ID NO: 3734823 - DNA, 25 bp, Homo sapien
ctgaagacccacaggatcggcagtt

SEQ ID NO: 3734824 - DNA, 25 bp, Homo sapien
tcactttacatctgaacgggaggaa

SEQ ID NO: 3734825 - DNA, 25 bp, Homo sapien
tggcccttcttagccctggaatcaa

SEQ ID NO: 3734826 - DNA, 25 bp, Homo sapien
caatctttcagtgtggactcatgga

SEQ ID NO: 3734827 - DNA, 25 bp, Homo sapien
tatttctatgtgcatccacctacag

SEQ ID NO: 3734828 - DNA, 25 bp, Homo sapien
cctctcagcaggcagcattaagaaa

SEQ ID NO: 3734829 - DNA, 25 bp, Homo sapien
tgctcttctccatgcaacatgtcag

SEQ ID NO: 3734830 - DNA, 25 bp, Homo sapien
tgtctgctagggttctttattacaa

SEQ ID NO: 3734831 - DNA, 25 bp, Homo sapien
tactagctatattgaccttgatcat

SEQ ID NO: 3734832 - DNA, 25 bp, Homo sapien
gatcatttggataagtcatgtctgc

SEQ ID NO: 3734833 - DNA, 25 bp, Homo sapien
taacagctgagtttgtatactccag

SEQ ID NO: 3734834 - DNA, 25 bp, Homo sapien
ttcctaccagatcaaattcaagctc

SEQ ID NO: 3734835 - DNA, 25 bp, Homo sapien
aagtaaatgtcctcaaaactgtgca

SEQ ID NO: 3734836 - DNA, 25 bp, Homo sapien
cacttggaaatctcaggttctgctg

SEQ ID NO: 3734837 - DNA, 25 bp, Homo sapien
gggggtgctgtaatatttaaatgag

SEQ ID NO: 3734838 - DNA, 25 bp, Homo sapien
gttcactgcaacatggaggtcctgg

SEQ ID NO: 3734839 - DNA, 25 bp, Homo sapien
tcagtaagtatgtgtatcccctggg

SEQ ID NO: 3734840 - DNA, 25 bp, Homo sapien
tacacagactaaaatttcagtaagt

SEQ ID NO: 3734841 - DNA, 25 bp, Homo sapien
ggttcacactatatccacaccaaac

SEQ ID NO: 3734842 - DNA, 25 bp, Homo sapien
ctggcatgaaacaaaggtccttatt

SEQ ID NO: 3734843 - DNA, 25 bp, Homo sapien
tttgccctactgaccctggcatgaa

SEQ ID NO: 3734844 - DNA, 25 bp, Homo sapien
tactgaccctggcatgaaacaaagg

SEQ ID NO: 3734845 - DNA, 25 bp, Homo sapien
tcactaagactgttctgcaggtcag

SEQ ID NO: 3734846 - DNA, 25 bp, Homo sapien
caatctcagcgtgcaaatgtgaaaa

SEQ ID NO: 3734847 - DNA, 25 bp, Homo sapien
tagagggcatttgctcgctatcatg

SEQ ID NO: 3734848 - DNA, 25 bp, Homo sapien
cattttgcgccctataaggtgctgg

SEQ ID NO: 3734849 - DNA, 25 bp, Homo sapien
aaagtggaactcttccggagtgcca

SEQ ID NO: 3734850 - DNA, 25 bp, Homo sapien
taagggatcaggtgcataaaaagtg

SEQ ID NO: 3734851 - DNA, 25 bp, Homo sapien
ccaagccctgtccagaggtgagagt

SEQ ID NO: 3734852 - DNA, 25 bp, Homo sapien
cacctagtggtgctaagggatcagg

SEQ ID NO: 3734853 - DNA, 25 bp, Homo sapien
ttcagcatggggaagtaccaagtag

SEQ ID NO: 3734854 - DNA, 25 bp, Homo sapien
agtgatgactatgatgtagccttca

SEQ ID NO: 3734855 - DNA, 25 bp, Homo sapien
gaagtaccaagtaggtgtccagata

SEQ ID NO: 3734856 - DNA, 25 bp, Homo sapien
tgatgactatgatgtagccttcagc

SEQ ID NO: 3734857 - DNA, 25 bp, Homo sapien
gggctcaaggactcccttgctagaa

SEQ ID NO: 3734858 - DNA, 25 bp, Homo sapien
ggcttcccctccatgtgtgcttgtg

SEQ ID NO: 3734859 - DNA, 25 bp, Homo sapien
agtaggtggctgctaatgtcacttc

SEQ ID NO: 3734860 - DNA, 25 bp, Homo sapien
ggttctatgaattcatgactgcagc

SEQ ID NO: 3734861 - DNA, 25 bp, Homo sapien
caggccatgggcaaagacctggaca

SEQ ID NO: 3734862 - DNA, 25 bp, Homo sapien
caagtgccgaagacactggaatgac

SEQ ID NO: 3734863 - DNA, 25 bp, Homo sapien
caccctcgccaatatgcaactaagg

SEQ ID NO: 3734864 - DNA, 25 bp, Homo sapien
tcattattaggcaaaactccaaagg

SEQ ID NO: 3734865 - DNA, 25 bp, Homo sapien
taatttaacattcggtgtggccacc

SEQ ID NO: 3734866 - DNA, 25 bp, Homo sapien
aggaaacaggctcctttgagaccat

SEQ ID NO: 3734867 - DNA, 25 bp, Homo sapien
aaggaaacaggctcctttgagacca

SEQ ID NO: 3734868 - DNA, 25 bp, Homo sapien
caggacaagccctaaaggaaacagg

SEQ ID NO: 3734869 - DNA, 25 bp, Homo sapien
ctagggcaggacaagccctaaagga

SEQ ID NO: 3734870 - DNA, 25 bp, Homo sapien
caaactggtccttgctaacagagag

SEQ ID NO: 3734871 - DNA, 25 bp, Homo sapien
actggtccttgctaacagagagcag

SEQ ID NO: 3734872 - DNA, 25 bp, Homo sapien
tggtccttgctaacagagagcaggc

SEQ ID NO: 3734873 - DNA, 25 bp, Homo sapien
gtccttgctaacagagagcaggccc

SEQ ID NO: 3734874 - DNA, 25 bp, Homo sapien
gattccggactccagaagtcttatc

SEQ ID NO: 3734875 - DNA, 25 bp, Homo sapien
gaaatatctattagggcactggcaa

SEQ ID NO: 3734876 - DNA, 25 bp, Homo sapien
aggtgttttcgattccggactccag

SEQ ID NO: 3734877 - DNA, 25 bp, Homo sapien
gacacaagttccttgacgtgttgaa

SEQ ID NO: 3734878 - DNA, 25 bp, Homo sapien
gagatctgcctccataaaatccaag

SEQ ID NO: 3734879 - DNA, 25 bp, Homo sapien
gaaactgtactcaggctctggatga

SEQ ID NO: 3734880 - DNA, 25 bp, Homo sapien
gaacagctttaacagaagcccgaag

SEQ ID NO: 3734881 - DNA, 25 bp, Homo sapien
tacagaatatacaggagcggtttcc

SEQ ID NO: 3734882 - DNA, 25 bp, Homo sapien
aatcttgccttacctttacaacgag

SEQ ID NO: 3734883 - DNA, 25 bp, Homo sapien
tacatcctactacatcaaaatcttg

SEQ ID NO: 3734884 - DNA, 25 bp, Homo sapien
tttaaatacattacctacatcctac

SEQ ID NO: 3734885 - DNA, 25 bp, Homo sapien
catacacaggtgattcaagtttgct

SEQ ID NO: 3734886 - DNA, 25 bp, Homo sapien
aagactcctgttgatgcttgccagc

SEQ ID NO: 3734887 - DNA, 25 bp, Homo sapien
tctagttaggcggaaagctgtcaca

SEQ ID NO: 3734888 - DNA, 25 bp, Homo sapien
tgtgctgactgtgggcaaccatgga

SEQ ID NO: 3734889 - DNA, 25 bp, Homo sapien
tgcgctcgtgttgggaagaagactc

SEQ ID NO: 3734890 - DNA, 25 bp, Homo sapien
gaaaatatcacagggaagtagaaac

SEQ ID NO: 3734891 - DNA, 25 bp, Homo sapien
tatcacagggaagtagaaacaacca

SEQ ID NO: 3734892 - DNA, 25 bp, Homo sapien
aaatatcacagggaagtagaaacaa

SEQ ID NO: 3734893 - DNA, 25 bp, Homo sapien
gagaaaatatcacagggaagtagaa

SEQ ID NO: 3734894 - DNA, 25 bp, Homo sapien
tgaccttataccatgaactgtagcc

SEQ ID NO: 3734895 - DNA, 25 bp, Homo sapien
cccagtgggatttgaggtgaataaa

SEQ ID NO: 3734896 - DNA, 25 bp, Homo sapien
cagagttagcaatatgtggcccaga

SEQ ID NO: 3734897 - DNA, 25 bp, Homo sapien
tagttcaaatagaatccccaggtta

SEQ ID NO: 3734898 - DNA, 25 bp, Homo sapien
tctagcctcgcaatgcctcgaaagg

SEQ ID NO: 3734899 - DNA, 25 bp, Homo sapien
cattaccgccctttacagatggaag

SEQ ID NO: 3734900 - DNA, 25 bp, Homo sapien
tgtccccacggttgttaataccagc

SEQ ID NO: 3734901 - DNA, 25 bp, Homo sapien
tttacctacgaccaaaagatggatg

SEQ ID NO: 3734902 - DNA, 25 bp, Homo sapien
aaggcagcactttgacccaatgcag

SEQ ID NO: 3734903 - DNA, 25 bp, Homo sapien
ctaatggtaagaagcactgaggagc

SEQ ID NO: 3734904 - DNA, 25 bp, Homo sapien
catatatactgataggagctctggt

SEQ ID NO: 3734905 - DNA, 25 bp, Homo sapien
tcactctagtatacggcaaatgggt

SEQ ID NO: 3734906 - DNA, 25 bp, Homo sapien
tgttggctttctaaaacgggcttga

SEQ ID NO: 3734907 - DNA, 25 bp, Homo sapien
acgggcttgaacttttacacaatct

SEQ ID NO: 3734908 - DNA, 25 bp, Homo sapien
taaagtcctgattaacagcatatta

SEQ ID NO: 3734909 - DNA, 25 bp, Homo sapien
ttacacaatcttttgaacactggca

SEQ ID NO: 3734910 - DNA, 25 bp, Homo sapien
cactttcagaagattctaacgtact

SEQ ID NO: 3734911 - DNA, 25 bp, Homo sapien
cccagcaatcagttttagtacactt

SEQ ID NO: 3734912 - DNA, 25 bp, Homo sapien
taacgtactctaaagtttgagagcc

SEQ ID NO: 3734913 - DNA, 25 bp, Homo sapien
tgagagccgctggttaaaaaacaga

SEQ ID NO: 3734914 - DNA, 25 bp, Homo sapien
ttccaaatcggacggatgcccctca

SEQ ID NO: 3734915 - DNA, 25 bp, Homo sapien
cttccaaatcggacggatgcccctc

SEQ ID NO: 3734916 - DNA, 25 bp, Homo sapien
tccaaatcggacggatgcccctcag

SEQ ID NO: 3734917 - DNA, 25 bp, Homo sapien
ccaaatcggacggatgcccctcagc

SEQ ID NO: 3734918 - DNA, 25 bp, Homo sapien
agaattatggccttccccgggctgg

SEQ ID NO: 3734919 - DNA, 25 bp, Homo sapien
cagcacaaatgtgccaacgccagga

SEQ ID NO: 3734920 - DNA, 25 bp, Homo sapien
gatgaacactgtccaaagagcttct

SEQ ID NO: 3734921 - DNA, 25 bp, Homo sapien
ggccttcccatctgcagaattatgg

SEQ ID NO: 3734922 - DNA, 25 bp, Homo sapien
tgagcaccatttagaagaacatgag

SEQ ID NO: 3734923 - DNA, 25 bp, Homo sapien
aaaagatgactgtgcagcatggtgg

SEQ ID NO: 3734924 - DNA, 25 bp, Homo sapien
gtggctgcattgcaatgagcaccat

SEQ ID NO: 3734925 - DNA, 25 bp, Homo sapien
tgtactcagcagacctggagatgga

SEQ ID NO: 3734926 - DNA, 25 bp, Homo sapien
tccaggaccgactactgtggtccct

SEQ ID NO: 3734927 - DNA, 25 bp, Homo sapien
ggaccgactactgtggtccctgcac

SEQ ID NO: 3734928 - DNA, 25 bp, Homo sapien
ggtggtccaggaccgactactgtgg

SEQ ID NO: 3734929 - DNA, 25 bp, Homo sapien
cagggtctgctgcccgtgtgccctt

SEQ ID NO: 3734930 - DNA, 25 bp, Homo sapien
ctcctgtggcgttgggtgtgggtgt

SEQ ID NO: 3734931 - DNA, 25 bp, Homo sapien
tggcgttgggtgtgggtgtagctca

SEQ ID NO: 3734932 - DNA, 25 bp, Homo sapien
tctgcagtgaagtcgctggttccac

SEQ ID NO: 3734933 - DNA, 25 bp, Homo sapien
tgaagtcgctggttccacccaagtc

SEQ ID NO: 3734934 - DNA, 25 bp, Homo sapien
ttctgccttgatggatagctgcccc

SEQ ID NO: 3734935 - DNA, 25 bp, Homo sapien
catctgctttgtgtcggcggcagca

SEQ ID NO: 3734936 - DNA, 25 bp, Homo sapien
caacaaattggcatatgatctgcag

SEQ ID NO: 3734937 - DNA, 25 bp, Homo sapien
gaatgatccgggttctgccttgatg

SEQ ID NO: 3734938 - DNA, 25 bp, Homo sapien
actttgctgagttctggcaccctcc

SEQ ID NO: 3734939 - DNA, 25 bp, Homo sapien
gcaattaacactaatgccatactgg

SEQ ID NO: 3734940 - DNA, 25 bp, Homo sapien
aagtgggctccatctgtgaactttg

SEQ ID NO: 3734941 - DNA, 25 bp, Homo sapien
aggtgccattttccttaagtgggct

SEQ ID NO: 3734942 - DNA, 25 bp, Homo sapien
ctttgaagatgtcctactctgcggg

SEQ ID NO: 3734943 - DNA, 25 bp, Homo sapien
ttggtcctctgcctaactgtctttg

SEQ ID NO: 3734944 - DNA, 25 bp, Homo sapien
cctactctgcgggtgaaatctcttc

SEQ ID NO: 3734945 - DNA, 25 bp, Homo sapien
ggtcctctgcctaactgtctttgaa

SEQ ID NO: 3734946 - DNA, 25 bp, Homo sapien
cgcagtgcctgctgtacccgttggg

SEQ ID NO: 3734947 - DNA, 25 bp, Homo sapien
cagccattctctggtgcagtgtaag

SEQ ID NO: 3734948 - DNA, 25 bp, Homo sapien
tgtaagacatgctcacccaagagag

SEQ ID NO: 3734949 - DNA, 25 bp, Homo sapien
ttcatacactaagccactgccacag

SEQ ID NO: 3734950 - DNA, 25 bp, Homo sapien
ccaaccttcacgggtaccagcctca

SEQ ID NO: 3734951 - DNA, 25 bp, Homo sapien
accttcacgggtaccagcctcaact

SEQ ID NO: 3734952 - DNA, 25 bp, Homo sapien
cttcacgggtaccagcctcaacttc

SEQ ID NO: 3734953 - DNA, 25 bp, Homo sapien
ttagccaaccttcacgggtaccagc

SEQ ID NO: 3734954 - DNA, 25 bp, Homo sapien
ctgtaagtaaaggtcccattgggca

SEQ ID NO: 3734955 - DNA, 25 bp, Homo sapien
cattgggtatacttcaggaggcgtc

SEQ ID NO: 3734956 - DNA, 25 bp, Homo sapien
gttctcagtgcactgtcttcaggcg

SEQ ID NO: 3734957 - DNA, 25 bp, Homo sapien
gcgttgcatagaggggatgcccaca

SEQ ID NO: 3734958 - DNA, 25 bp, Homo sapien
ctagctggagagccataagtctcct

SEQ ID NO: 3734959 - DNA, 25 bp, Homo sapien
tagctggagagccataagtctcctt

SEQ ID NO: 3734960 - DNA, 25 bp, Homo sapien
ctggagagccataagtctccttcac

SEQ ID NO: 3734961 - DNA, 25 bp, Homo sapien
gctggagagccataagtctccttca

SEQ ID NO: 3734962 - DNA, 25 bp, Homo sapien
ttaattgaaaattttctgagatggc

SEQ ID NO: 3734963 - DNA, 25 bp, Homo sapien
aaattttctgagatggccaggtacg

SEQ ID NO: 3734964 - DNA, 25 bp, Homo sapien
aaaattttctgagatggccaggtac

SEQ ID NO: 3734965 - DNA, 25 bp, Homo sapien
ttgaaaattttctgagatggccagg

SEQ ID NO: 3734966 - DNA, 25 bp, Homo sapien
ttttctgtttgggtctctgcttggt

SEQ ID NO: 3734967 - DNA, 25 bp, Homo sapien
catcggtggttcctcttctaagcat

SEQ ID NO: 3734968 - DNA, 25 bp, Homo sapien
ccttttctgtttgggtctctgcttg

SEQ ID NO: 3734969 - DNA, 25 bp, Homo sapien
ctctcctttcatcggtggttcctct

SEQ ID NO: 3734970 - DNA, 25 bp, Homo sapien
ccagaactagcaccaagccaacaaa

SEQ ID NO: 3734971 - DNA, 25 bp, Homo sapien
cagaactagcaccaagccaacaaag

SEQ ID NO: 3734972 - DNA, 25 bp, Homo sapien
gaactagcaccaagccaacaaagcc

SEQ ID NO: 3734973 - DNA, 25 bp, Homo sapien
ccccagaactagcaccaagccaaca

SEQ ID NO: 3734974 - DNA, 25 bp, Homo sapien
tgcttcaggtgctcagatgatgtca

SEQ ID NO: 3734975 - DNA, 25 bp, Homo sapien
gatgatgtcaccaaacttgggagca

SEQ ID NO: 3734976 - DNA, 25 bp, Homo sapien
tcagatgatgtcaccaaacttggga

SEQ ID NO: 3734977 - DNA, 25 bp, Homo sapien
cactgaaggatgcttcaggtgctca

SEQ ID NO: 3734978 - DNA, 25 bp, Homo sapien
aagtgcgtgacccagctctgactgc

SEQ ID NO: 3734979 - DNA, 25 bp, Homo sapien
caacttaggaagtgcgtgacccagc

SEQ ID NO: 3734980 - DNA, 25 bp, Homo sapien
ctacaacttaggaagtgcgtgaccc

SEQ ID NO: 3734981 - DNA, 25 bp, Homo sapien
ttaggaagtgcgtgacccagctctg

SEQ ID NO: 3734982 - DNA, 25 bp, Homo sapien
tcaggacagcctttgcagaaatccc

SEQ ID NO: 3734983 - DNA, 25 bp, Homo sapien
aggacagcctttgcagaaatcccca

SEQ ID NO: 3734984 - DNA, 25 bp, Homo sapien
ctctgggcttctcaggacagccttt

SEQ ID NO: 3734985 - DNA, 25 bp, Homo sapien
ggctctgggcttctcaggacagcct

SEQ ID NO: 3734986 - DNA, 25 bp, Homo sapien
tagctgaaggcatttctcggatgtg

SEQ ID NO: 3734987 - DNA, 25 bp, Homo sapien
tggaaatcgcagaaccaaatcagtt

SEQ ID NO: 3734988 - DNA, 25 bp, Homo sapien
tcagtttgccctgccatatttggct

SEQ ID NO: 3734989 - DNA, 25 bp, Homo sapien
gaagagctgattgtcctccgagggt

SEQ ID NO: 3734990 - DNA, 25 bp, Homo sapien
ggaccttctcagttcgctggcacat

SEQ ID NO: 3734991 - DNA, 25 bp, Homo sapien
agtgcaggtgaaggtaccctggacc

SEQ ID NO: 3734992 - DNA, 25 bp, Homo sapien
ggcgagaccgggtgactgtggcagt

SEQ ID NO: 3734993 - DNA, 25 bp, Homo sapien
gggcgagaccgggtgactgtggcag

SEQ ID NO: 3734994 - DNA, 25 bp, Homo sapien
agaattagaaaatccagtggatgtc

SEQ ID NO: 3734995 - DNA, 25 bp, Homo sapien
gaagaattagaaaatccagtggatg

SEQ ID NO: 3734996 - DNA, 25 bp, Homo sapien
ctagagtgaagtaggaagaagaatt

SEQ ID NO: 3734997 - DNA, 25 bp, Homo sapien
aagaagaattagaaaatccagtgga

SEQ ID NO: 3734998 - DNA, 25 bp, Homo sapien
tgcaagcataacacagatcctaaga

SEQ ID NO: 3734999 - DNA, 25 bp, Homo sapien
ctgcaagcataacacagatcctaag

SEQ ID NO: 3735000 - DNA, 25 bp, Homo sapien
gagatgccagagctgctttagctga

SEQ ID NO: 3735001 - DNA, 25 bp, Homo sapien
aaggagcaaaacttcgaatgtgcac

SEQ ID NO: 3735002 - DNA, 25 bp, Homo sapien
aacttcgaatgtgcacattgacccc

SEQ ID NO: 3735003 - DNA, 25 bp, Homo sapien
gaatgtgcacattgacccctgacac

SEQ ID NO: 3735004 - DNA, 25 bp, Homo sapien
tgacagcagcttagggaaacaccca

SEQ ID NO: 3735005 - DNA, 25 bp, Homo sapien
tgctgacaagaaaggtagaccactc

SEQ ID NO: 3735006 - DNA, 25 bp, Homo sapien
catttggagctgaacttgagaacac

SEQ ID NO: 3735007 - DNA, 25 bp, Homo sapien
gaaattcgccagttagtccgctgag

SEQ ID NO: 3735008 - DNA, 25 bp, Homo sapien
tactgatcagaacagggaccttcta

SEQ ID NO: 3735009 - DNA, 25 bp, Homo sapien
taatatccgaacgacagaggaagga

SEQ ID NO: 3735010 - DNA, 25 bp, Homo sapien
ggaccttctaacgaaacagccagag

SEQ ID NO: 3735011 - DNA, 25 bp, Homo sapien
ccagagttccttgaatcaggcagaa

SEQ ID NO: 3735012 - DNA, 25 bp, Homo sapien
atctgctatactaggagagtgggag

SEQ ID NO: 3735013 - DNA, 25 bp, Homo sapien
catacactctgaggatgggccgctt

SEQ ID NO: 3735014 - DNA, 25 bp, Homo sapien
cattttggagtccatgtaaagtgcc

SEQ ID NO: 3735015 - DNA, 25 bp, Homo sapien
tagaagttgtgtcttcgagttcctc

SEQ ID NO: 3735016 - DNA, 25 bp, Homo sapien
gactgcaacgtcttggccactgttt

SEQ ID NO: 3735017 - DNA, 25 bp, Homo sapien
tccatgctgggatgcacagttcttt

SEQ ID NO: 3735018 - DNA, 25 bp, Homo sapien
gattgtgtttactcctgactgcaac

SEQ ID NO: 3735019 - DNA, 25 bp, Homo sapien
cactgtttggagcagtttggtctga

SEQ ID NO: 3735020 - DNA, 25 bp, Homo sapien
cacttgtcatgacacaatccagtac

SEQ ID NO: 3735021 - DNA, 25 bp, Homo sapien
ggaactggtggctgcttgtaaatgt

SEQ ID NO: 3735022 - DNA, 25 bp, Homo sapien
tggctgcttgtaaatgttctgcagc

SEQ ID NO: 3735023 - DNA, 25 bp, Homo sapien
ttgacacacttgtcatgacacaatc

SEQ ID NO: 3735024 - DNA, 25 bp, Homo sapien
attgctcgaagtgcaagcgtgcata

SEQ ID NO: 3735025 - DNA, 25 bp, Homo sapien
cattgctcgaagtgcaagcgtgcat

SEQ ID NO: 3735026 - DNA, 25 bp, Homo sapien
ttgctcgaagtgcaagcgtgcatac

SEQ ID NO: 3735027 - DNA, 25 bp, Homo sapien
tcattgctcgaagtgcaagcgtgca

SEQ ID NO: 3735028 - DNA, 25 bp, Homo sapien
caaatacagctcatcaaaagcagac

SEQ ID NO: 3735029 - DNA, 25 bp, Homo sapien
cacaaatacagctcatcaaaagcag

SEQ ID NO: 3735030 - DNA, 25 bp, Homo sapien
ctcgtgctgtagcagaaagttctgc

SEQ ID NO: 3735031 - DNA, 25 bp, Homo sapien
gcagactctgagaagcctcgtgctg

SEQ ID NO: 3735032 - DNA, 25 bp, Homo sapien
gactgcacagacttggagctgatcg

SEQ ID NO: 3735033 - DNA, 25 bp, Homo sapien
gaacttggcgactgcacagacttgg

SEQ ID NO: 3735034 - DNA, 25 bp, Homo sapien
ggaacaagaacttggcgactgcaca

SEQ ID NO: 3735035 - DNA, 25 bp, Homo sapien
acagacttggagctgatcgaaatgc

SEQ ID NO: 3735036 - DNA, 25 bp, Homo sapien
ttatacagaggccaatgggataccc

SEQ ID NO: 3735037 - DNA, 25 bp, Homo sapien
tatacagaggccaatgggatacccg

SEQ ID NO: 3735038 - DNA, 25 bp, Homo sapien
cctttatacagaggccaatgggata

SEQ ID NO: 3735039 - DNA, 25 bp, Homo sapien
tttcctttatacagaggccaatggg

SEQ ID NO: 3735040 - DNA, 25 bp, Homo sapien
cagcagttcttccagttatgccaat

SEQ ID NO: 3735041 - DNA, 25 bp, Homo sapien
gctgcttccagctttagccaatggg

SEQ ID NO: 3735042 - DNA, 25 bp, Homo sapien
agttatgccaatcggagtggtcccc

SEQ ID NO: 3735043 - DNA, 25 bp, Homo sapien
gtgctgcttccagctttagccaatg

SEQ ID NO: 3735044 - DNA, 25 bp, Homo sapien
tgctgtagggctttcccgagcaccc

SEQ ID NO: 3735045 - DNA, 25 bp, Homo sapien
caggtttaggtggaactcctccaga

SEQ ID NO: 3735046 - DNA, 25 bp, Homo sapien
cgagcacccagaccgctctgtagga

SEQ ID NO: 3735047 - DNA, 25 bp, Homo sapien
cgtgccaggtttaggtggaactcct

SEQ ID NO: 3735048 - DNA, 25 bp, Homo sapien
tggcaccacggcaggctttccaaat

SEQ ID NO: 3735049 - DNA, 25 bp, Homo sapien
gcatctctgcgttctgcacaggaaa

SEQ ID NO: 3735050 - DNA, 25 bp, Homo sapien
gctataaatgatgtgtgcatctctg

SEQ ID NO: 3735051 - DNA, 25 bp, Homo sapien
actgggctgagagctataaatgatg

SEQ ID NO: 3735052 - DNA, 25 bp, Homo sapien
cagaaatggagtcctggggcagcaa

SEQ ID NO: 3735053 - DNA, 25 bp, Homo sapien
gtctccaattccataatcagagtga

SEQ ID NO: 3735054 - DNA, 25 bp, Homo sapien
caggctccgggcgagtgcactttta

SEQ ID NO: 3735055 - DNA, 25 bp, Homo sapien
tgagcatgctgctcgcaagcctgac

SEQ ID NO: 3735056 - DNA, 25 bp, Homo sapien
gctaataaacgggtattgacaagtg

SEQ ID NO: 3735057 - DNA, 25 bp, Homo sapien
gcaaaggtccagtttgtgctgcaga

SEQ ID NO: 3735058 - DNA, 25 bp, Homo sapien
gagacttgtatgctaataaacgggt

SEQ ID NO: 3735059 - DNA, 25 bp, Homo sapien
gacaagtgtgatagatgcagctagg

SEQ ID NO: 3735060 - DNA, 25 bp, Homo sapien
ttcaaagtacccgtcatgtctctaa

SEQ ID NO: 3735061 - DNA, 25 bp, Homo sapien
accctcttgtcccatctgcatcctc

SEQ ID NO: 3735062 - DNA, 25 bp, Homo sapien
tgctgtgctcttgcaatacattcaa

SEQ ID NO: 3735063 - DNA, 25 bp, Homo sapien
atcctctggcgcctgctgtgctctt

SEQ ID NO: 3735064 - DNA, 25 bp, Homo sapien
tcaacctgcagagatacccaaggca

SEQ ID NO: 3735065 - DNA, 25 bp, Homo sapien
agcaacagtgatcggggaagcccca

SEQ ID NO: 3735066 - DNA, 25 bp, Homo sapien
gggattccatctgcatcgccggaac

SEQ ID NO: 3735067 - DNA, 25 bp, Homo sapien
tgcttttgctgaaccctcaacctgc

SEQ ID NO: 3735068 - DNA, 25 bp, Homo sapien
gagttttcttgtaccatgaccatca

SEQ ID NO: 3735069 - DNA, 25 bp, Homo sapien
ccttgcaagttggaatggattttct

SEQ ID NO: 3735070 - DNA, 25 bp, Homo sapien
gagagtacctgtcaagccctgtcaa

SEQ ID NO: 3735071 - DNA, 25 bp, Homo sapien
tttgcgcattgggataaataggtgg

SEQ ID NO: 3735072 - DNA, 25 bp, Homo sapien
aagagaagacaccagctgtgatgag

SEQ ID NO: 3735073 - DNA, 25 bp, Homo sapien
agagaagacaccagctgtgatgagg

SEQ ID NO: 3735074 - DNA, 25 bp, Homo sapien
tctccctaggatttcataaggtctc

SEQ ID NO: 3735075 - DNA, 25 bp, Homo sapien
gatttcataaggtctcagggtcagt

SEQ ID NO: 3735076 - DNA, 25 bp, Homo sapien
tagcctgccttctggtggcatcttt

SEQ ID NO: 3735077 - DNA, 25 bp, Homo sapien
ttctggtggcatctttttgctctag

SEQ ID NO: 3735078 - DNA, 25 bp, Homo sapien
ctgtagcctgccttctggtggcatc

SEQ ID NO: 3735079 - DNA, 25 bp, Homo sapien
cctgccttctggtggcatctttttg

SEQ ID NO: 3735080 - DNA, 25 bp, Homo sapien
gattgtgtagtagaagtgacattcg

SEQ ID NO: 3735081 - DNA, 25 bp, Homo sapien
tgtgtagtagaagtgacattcggac

SEQ ID NO: 3735082 - DNA, 25 bp, Homo sapien
gtagattgtgtagtagaagtgacat

SEQ ID NO: 3735083 - DNA, 25 bp, Homo sapien
ttgtgtagtagaagtgacattcgga

SEQ ID NO: 3735084 - DNA, 25 bp, Homo sapien
ggctgtggtgacggtaaaagccact

SEQ ID NO: 3735085 - DNA, 25 bp, Homo sapien
aaggcaaataggtagcacagcaggt

SEQ ID NO: 3735086 - DNA, 25 bp, Homo sapien
tatgtaaataggctcgtgggaggaa

SEQ ID NO: 3735087 - DNA, 25 bp, Homo sapien
cagatgagtgatggttgcagggctg

SEQ ID NO: 3735088 - DNA, 25 bp, Homo sapien
gtgcccaacaccacgagaatactgc

SEQ ID NO: 3735089 - DNA, 25 bp, Homo sapien
cctgtggagaggtggcttggtgccc

SEQ ID NO: 3735090 - DNA, 25 bp, Homo sapien
cacgagaatactgctgaatttactc

SEQ ID NO: 3735091 - DNA, 25 bp, Homo sapien
caggtggaagagcacctcctgtgga

SEQ ID NO: 3735092 - DNA, 25 bp, Homo sapien
gcaattaaagctcccaaaatatgga

SEQ ID NO: 3735093 - DNA, 25 bp, Homo sapien
cagcactggcagcaattaaagctcc

SEQ ID NO: 3735094 - DNA, 25 bp, Homo sapien
catcctgtatggcacaatcatttct

SEQ ID NO: 3735095 - DNA, 25 bp, Homo sapien
ctccatcctgtatggcacaatcatt

SEQ ID NO: 3735096 - DNA, 25 bp, Homo sapien
aggcagaaaatgttacaacttgtat

SEQ ID NO: 3735097 - DNA, 25 bp, Homo sapien
ttaggcagaaaatgttacaacttgt

SEQ ID NO: 3735098 - DNA, 25 bp, Homo sapien
gcagaaaatgttacaacttgtattc

SEQ ID NO: 3735099 - DNA, 25 bp, Homo sapien
agaaaatgttacaacttgtattcca

SEQ ID NO: 3735100 - DNA, 25 bp, Homo sapien
tacctgctccaagtaagactgattc

SEQ ID NO: 3735101 - DNA, 25 bp, Homo sapien
gactgattcacatgggccactcagg

SEQ ID NO: 3735102 - DNA, 25 bp, Homo sapien
gctttcagtggcgaaagaggcccat

SEQ ID NO: 3735103 - DNA, 25 bp, Homo sapien
gaatggaaatatcgtctccttcagt

SEQ ID NO: 3735104 - DNA, 25 bp, Homo sapien
tgttgtctgatcatttgaagacagc

SEQ ID NO: 3735105 - DNA, 25 bp, Homo sapien
tttgaagacagctctgttgctagac

SEQ ID NO: 3735106 - DNA, 25 bp, Homo sapien
tctgatcatttgaagacagctctgt

SEQ ID NO: 3735107 - DNA, 25 bp, Homo sapien
atttgaagacagctctgttgctaga

SEQ ID NO: 3735108 - DNA, 25 bp, Homo sapien
tgggagagcaatgcgggttgcagct

SEQ ID NO: 3735109 - DNA, 25 bp, Homo sapien
attccttgtatctgggagagcaatg

SEQ ID NO: 3735110 - DNA, 25 bp, Homo sapien
tatctgggagagcaatgcgggttgc

SEQ ID NO: 3735111 - DNA, 25 bp, Homo sapien
ttattccttgtatctgggagagcaa

SEQ ID NO: 3735112 - DNA, 25 bp, Homo sapien
aatgcaaagcgtttgctgcggagga

SEQ ID NO: 3735113 - DNA, 25 bp, Homo sapien
cccatgcgtttggtgagaaccaggg

SEQ ID NO: 3735114 - DNA, 25 bp, Homo sapien
aaatgcaaagcgtttgctgcggagg

SEQ ID NO: 3735115 - DNA, 25 bp, Homo sapien
gcggaggatgggatgcccatgcgtt

SEQ ID NO: 3735116 - DNA, 25 bp, Homo sapien
gatgacttagaggatggtaaagcac

SEQ ID NO: 3735117 - DNA, 25 bp, Homo sapien
tcccggttggcatcccaactctgtt

SEQ ID NO: 3735118 - DNA, 25 bp, Homo sapien
tcctcctccaggttgaaagccatct

SEQ ID NO: 3735119 - DNA, 25 bp, Homo sapien
tctcacctcccggttggcatcccaa

SEQ ID NO: 3735120 - DNA, 25 bp, Homo sapien
caggttgaaagccatctggtctctc

SEQ ID NO: 3735121 - DNA, 25 bp, Homo sapien
gggtcctttcggatctctggtctct

SEQ ID NO: 3735122 - DNA, 25 bp, Homo sapien
taatgctctcgtgggtcctttcgga

SEQ ID NO: 3735123 - DNA, 25 bp, Homo sapien
ctggactctgagactagttaatgct

SEQ ID NO: 3735124 - DNA, 25 bp, Homo sapien
ctgtggcgagatacatcccctggac

SEQ ID NO: 3735125 - DNA, 25 bp, Homo sapien
catgaccaccattaacatggctttg

SEQ ID NO: 3735126 - DNA, 25 bp, Homo sapien
caaggatgcgagtaccgcttggaga

SEQ ID NO: 3735127 - DNA, 25 bp, Homo sapien
cagaccaacctctttggaatggact

SEQ ID NO: 3735128 - DNA, 25 bp, Homo sapien
gaatggactgtgaggcctgatcatg

SEQ ID NO: 3735129 - DNA, 25 bp, Homo sapien
tgtgtatgtgcacacgcgtccctgt

SEQ ID NO: 3735130 - DNA, 25 bp, Homo sapien
agtacagtgtccaagtgcatgtgta

SEQ ID NO: 3735131 - DNA, 25 bp, Homo sapien
ttttcaacacggatttttcgctgtg

SEQ ID NO: 3735132 - DNA, 25 bp, Homo sapien
aacacggatttttcgctgtgagctc

SEQ ID NO: 3735133 - DNA, 25 bp, Homo sapien
agctgaagaccaggccgtgcgagaa

SEQ ID NO: 3735134 - DNA, 25 bp, Homo sapien
cgtgcgagaagggactgtgttctct

SEQ ID NO: 3735135 - DNA, 25 bp, Homo sapien
accaggccgtgcgagaagggactgt

SEQ ID NO: 3735136 - DNA, 25 bp, Homo sapien
aagctgaagaccaggccgtgcgaga

SEQ ID NO: 3735137 - DNA, 25 bp, Homo sapien
tgcgcaagatctggtggcatcccat

SEQ ID NO: 3735138 - DNA, 25 bp, Homo sapien
tcccatgtctaacatctccgtggtg

SEQ ID NO: 3735139 - DNA, 25 bp, Homo sapien
tatgaagcatgtccagcaaggactt

SEQ ID NO: 3735140 - DNA, 25 bp, Homo sapien
cacaggcctcttcgggagtgggaat

SEQ ID NO: 3735141 - DNA, 25 bp, Homo sapien
tggtccctcttgacaagtgaccctg

SEQ ID NO: 3735142 - DNA, 25 bp, Homo sapien
gtcccataaagacagtggtccctct

SEQ ID NO: 3735143 - DNA, 25 bp, Homo sapien
gggatcttgatgttctcaggggcac

SEQ ID NO: 3735144 - DNA, 25 bp, Homo sapien
ggcactggatgagtttgtcagattc

SEQ ID NO: 3735145 - DNA, 25 bp, Homo sapien
tccaaaggctttgtaaagatgatag

SEQ ID NO: 3735146 - DNA, 25 bp, Homo sapien
tcataagtaatcctggctcctgctc

SEQ ID NO: 3735147 - DNA, 25 bp, Homo sapien
catttaaccgggtctcatcttctga

SEQ ID NO: 3735148 - DNA, 25 bp, Homo sapien
aaacaccgtggaaggacttgacgtg

SEQ ID NO: 3735149 - DNA, 25 bp, Homo sapien
agagatgttccaaagtgcaaactga

SEQ ID NO: 3735150 - DNA, 25 bp, Homo sapien
actcagtgaggataaggcccccaca

SEQ ID NO: 3735151 - DNA, 25 bp, Homo sapien
agtgcaaactgagccagcgggtctg

SEQ ID NO: 3735152 - DNA, 25 bp, Homo sapien
ttccaaagtgcaaactgagccagcg

SEQ ID NO: 3735153 - DNA, 25 bp, Homo sapien
tccaatcaacacagccttaggactg

SEQ ID NO: 3735154 - DNA, 25 bp, Homo sapien
ggttctgaggtgtgcccagtctcca

SEQ ID NO: 3735155 - DNA, 25 bp, Homo sapien
gccttaggactgtcattcagcctct

SEQ ID NO: 3735156 - DNA, 25 bp, Homo sapien
gcctctcccatactgggacggcaga

SEQ ID NO: 3735157 - DNA, 25 bp, Homo sapien
tctgttgtcagctatgagagccttc

SEQ ID NO: 3735158 - DNA, 25 bp, Homo sapien
gagagccttcttaaatggaagccta

SEQ ID NO: 3735159 - DNA, 25 bp, Homo sapien
tggaagcctattagtgtgagaattc

SEQ ID NO: 3735160 - DNA, 25 bp, Homo sapien
aaaatctaacccatttggtagtctg

SEQ ID NO: 3735161 - DNA, 25 bp, Homo sapien
cttctagaactcttagtgaagttgt

SEQ ID NO: 3735162 - DNA, 25 bp, Homo sapien
atccactgcacggtattcacctctt

SEQ ID NO: 3735163 - DNA, 25 bp, Homo sapien
ctagaactcttagtgaagttgttca

SEQ ID NO: 3735164 - DNA, 25 bp, Homo sapien
gggcatccactgcacggtattcacc

SEQ ID NO: 3735165 - DNA, 25 bp, Homo sapien
gggtgaccccagtcagatcagagtg

SEQ ID NO: 3735166 - DNA, 25 bp, Homo sapien
gtgaccccagtcagatcagagtggg

SEQ ID NO: 3735167 - DNA, 25 bp, Homo sapien
tgggtgaccccagtcagatcagagt

SEQ ID NO: 3735168 - DNA, 25 bp, Homo sapien
cgtgggtgaccccagtcagatcaga

SEQ ID NO: 3735169 - DNA, 25 bp, Homo sapien
ggagcagatgggatccaaccaggta

SEQ ID NO: 3735170 - DNA, 25 bp, Homo sapien
tccaccacaggacagagtgcttcga

SEQ ID NO: 3735171 - DNA, 25 bp, Homo sapien
gagtgcttcgatgcacaccagacct

SEQ ID NO: 3735172 - DNA, 25 bp, Homo sapien
cagaccttcagaggaccgactgaga

SEQ ID NO: 3735173 - DNA, 25 bp, Homo sapien
ttcctctgcatgaacatacaccgtg

SEQ ID NO: 3735174 - DNA, 25 bp, Homo sapien
acttcctctgcatgaacatacaccg

SEQ ID NO: 3735175 - DNA, 25 bp, Homo sapien
ctgcatgaacatacaccgtgcgcac

SEQ ID NO: 3735176 - DNA, 25 bp, Homo sapien
ctctgcatgaacatacaccgtgcgc

SEQ ID NO: 3735177 - DNA, 25 bp, Homo sapien
accttgtctttctgtaggcacaaaa

SEQ ID NO: 3735178 - DNA, 25 bp, Homo sapien
tctctgtatacagcatctgctcgct

SEQ ID NO: 3735179 - DNA, 25 bp, Homo sapien
ctctctgggctaatgaccctggaaa

SEQ ID NO: 3735180 - DNA, 25 bp, Homo sapien
taatgaccctggaaactctagaatt

SEQ ID NO: 3735181 - DNA, 25 bp, Homo sapien
agagtctggccttcgtggtcctgtg

SEQ ID NO: 3735182 - DNA, 25 bp, Homo sapien
ttgtgtctgtaagagtctggccttc

SEQ ID NO: 3735183 - DNA, 25 bp, Homo sapien
ctgtaagagtctggccttcgtggtc

SEQ ID NO: 3735184 - DNA, 25 bp, Homo sapien
tgtctgtaagagtctggccttcgtg

SEQ ID NO: 3735185 - DNA, 25 bp, Homo sapien
tgttgacacctgtgtcactgagctg

SEQ ID NO: 3735186 - DNA, 25 bp, Homo sapien
tcactgagctgctttttgggtcatt

SEQ ID NO: 3735187 - DNA, 25 bp, Homo sapien
aagcagatggcagtttgttgacacc

SEQ ID NO: 3735188 - DNA, 25 bp, Homo sapien
catgaagcagatggcagtttgttga

SEQ ID NO: 3735189 - DNA, 25 bp, Homo sapien
caaagagagtcaggttcattgcgtt

SEQ ID NO: 3735190 - DNA, 25 bp, Homo sapien
catctaagaagggacctgggtatct

SEQ ID NO: 3735191 - DNA, 25 bp, Homo sapien
tgggatgagctggatttctagcgct

SEQ ID NO: 3735192 - DNA, 25 bp, Homo sapien
agtcaggttcattgcgtttatctcc

SEQ ID NO: 3735193 - DNA, 25 bp, Homo sapien
catgcttctggagtgcactgaggaa

SEQ ID NO: 3735194 - DNA, 25 bp, Homo sapien
cagccagacatttgggaaggccctt

SEQ ID NO: 3735195 - DNA, 25 bp, Homo sapien
aaaaggtcagttacactgtgccagg

SEQ ID NO: 3735196 - DNA, 25 bp, Homo sapien
tgggaaacatcaaggcggcaaagag

SEQ ID NO: 3735197 - DNA, 25 bp, Homo sapien
gcctgggcagcccataacatttgag

SEQ ID NO: 3735198 - DNA, 25 bp, Homo sapien
tgatgcctggagatttcataagcca

SEQ ID NO: 3735199 - DNA, 25 bp, Homo sapien
gacctctccattggcagctggccag

SEQ ID NO: 3735200 - DNA, 25 bp, Homo sapien
gctggccaggagataactggcctgg

SEQ ID NO: 3735201 - DNA, 25 bp, Homo sapien
tgtcactggtacagtgaagcctggt

SEQ ID NO: 3735202 - DNA, 25 bp, Homo sapien
cttcccaaggactgtcactggtaca

SEQ ID NO: 3735203 - DNA, 25 bp, Homo sapien
gaaaaggcaaggttgtctgggactg

SEQ ID NO: 3735204 - DNA, 25 bp, Homo sapien
tgttaaccacatgaaccctcagaag

SEQ ID NO: 3735205 - DNA, 25 bp, Homo sapien
tgcttcggggagttacatttcacca

SEQ ID NO: 3735206 - DNA, 25 bp, Homo sapien
ccacctctgtgtgaagtaacgtggc

SEQ ID NO: 3735207 - DNA, 25 bp, Homo sapien
tgtgaagtaacgtggcttttctctc

SEQ ID NO: 3735208 - DNA, 25 bp, Homo sapien
gggagttacatttcaccattggtga

SEQ ID NO: 3735209 - DNA, 25 bp, Homo sapien
gcattgataccaaactgccttgcac

SEQ ID NO: 3735210 - DNA, 25 bp, Homo sapien
taggctgtcatcatagaaggcttgt

SEQ ID NO: 3735211 - DNA, 25 bp, Homo sapien
gctgactaaatgataggcaaagcaa

SEQ ID NO: 3735212 - DNA, 25 bp, Homo sapien
gctttttaaccttagcaatggcagc

SEQ ID NO: 3735213 - DNA, 25 bp, Homo sapien
taaggcttggccagattgatccctg

SEQ ID NO: 3735214 - DNA, 25 bp, Homo sapien
ctctacctggagttcttttacctct

SEQ ID NO: 3735215 - DNA, 25 bp, Homo sapien
gcccctatgcctttggatggattga

SEQ ID NO: 3735216 - DNA, 25 bp, Homo sapien
ttcaaaatgctcatccacggctgcc

SEQ ID NO: 3735217 - DNA, 25 bp, Homo sapien
ttgaacccctgatgtctgagagccc

SEQ ID NO: 3735218 - DNA, 25 bp, Homo sapien
gagagccccactcgcattgtttttg

SEQ ID NO: 3735219 - DNA, 25 bp, Homo sapien
aagtctctatgagtttgtcctcggg

SEQ ID NO: 3735220 - DNA, 25 bp, Homo sapien
gcctgtggagatatgtggagcctat

SEQ ID NO: 3735221 - DNA, 25 bp, Homo sapien
aattgattgaatgcttaaaccctct

SEQ ID NO: 3735222 - DNA, 25 bp, Homo sapien
attgattgaatgcttaaaccctctg

SEQ ID NO: 3735223 - DNA, 25 bp, Homo sapien
ttgattgaatgcttaaaccctctgt

SEQ ID NO: 3735224 - DNA, 25 bp, Homo sapien
ctaattgattgaatgcttaaaccct

SEQ ID NO: 3735225 - DNA, 25 bp, Homo sapien
gagatgttgtatcacattctacggg

SEQ ID NO: 3735226 - DNA, 25 bp, Homo sapien
cagattcattgtgtgcccactccca

SEQ ID NO: 3735227 - DNA, 25 bp, Homo sapien
gggtggagctttccttgtcacagat

SEQ ID NO: 3735228 - DNA, 25 bp, Homo sapien
tgaccttggggtggagctttccttg

SEQ ID NO: 3735229 - DNA, 25 bp, Homo sapien
gtgccagtggagattcctttgccaa

SEQ ID NO: 3735230 - DNA, 25 bp, Homo sapien
ccaagcaaacatgccactgttgtag

SEQ ID NO: 3735231 - DNA, 25 bp, Homo sapien
gctgctgctccttataccagtgcca

SEQ ID NO: 3735232 - DNA, 25 bp, Homo sapien
cactgttgtagaggtgtggcaaggc

SEQ ID NO: 3735233 - DNA, 25 bp, Homo sapien
tctttggggaacatgggtatggtct

SEQ ID NO: 3735234 - DNA, 25 bp, Homo sapien
cagtggcttaaagtgccatcagcct

SEQ ID NO: 3735235 - DNA, 25 bp, Homo sapien
tatggacatgtcatttaggccctca

SEQ ID NO: 3735236 - DNA, 25 bp, Homo sapien
gggtttcccgttctctatggacatg

SEQ ID NO: 3735237 - DNA, 25 bp, Homo sapien
caagtggagtgaaaactgccaccat

SEQ ID NO: 3735238 - DNA, 25 bp, Homo sapien
gtgcccaagtggagtgaaaactgcc

SEQ ID NO: 3735239 - DNA, 25 bp, Homo sapien
gtggagtgaaaactgccaccataga

SEQ ID NO: 3735240 - DNA, 25 bp, Homo sapien
cccaagtggagtgaaaactgccacc

SEQ ID NO: 3735241 - DNA, 25 bp, Homo sapien
tgtgcccttgggagtatgaacgact

SEQ ID NO: 3735242 - DNA, 25 bp, Homo sapien
tgcccttgggagtatgaacgactcc

SEQ ID NO: 3735243 - DNA, 25 bp, Homo sapien
cctcagtgtgcccttgggagtatga

SEQ ID NO: 3735244 - DNA, 25 bp, Homo sapien
cagtgtgcccttgggagtatgaacg

SEQ ID NO: 3735245 - DNA, 25 bp, Homo sapien
tcaacctgattgtggctagagcggc

SEQ ID NO: 3735246 - DNA, 25 bp, Homo sapien
tacaagtgtctctggtgccctttgg

SEQ ID NO: 3735247 - DNA, 25 bp, Homo sapien
tatgagcagagcgttgtctgaagga

SEQ ID NO: 3735248 - DNA, 25 bp, Homo sapien
cccttgggaagtgagtatgagcaga

SEQ ID NO: 3735249 - DNA, 25 bp, Homo sapien
ctacacggttgcctgagctgtctgg

SEQ ID NO: 3735250 - DNA, 25 bp, Homo sapien
agcaggagggtcatgaatattggcc

SEQ ID NO: 3735251 - DNA, 25 bp, Homo sapien
gagcaaccttattgtgcctggagga

SEQ ID NO: 3735252 - DNA, 25 bp, Homo sapien
tgaatattggccgtgtggctacacg

SEQ ID NO: 3735253 - DNA, 25 bp, Homo sapien
tgcttggcttcaatgtagaggagcc

SEQ ID NO: 3735254 - DNA, 25 bp, Homo sapien
ggcttcaatgtagaggagcccagcc

SEQ ID NO: 3735255 - DNA, 25 bp, Homo sapien
cttggcttcaatgtagaggagccca

SEQ ID NO: 3735256 - DNA, 25 bp, Homo sapien
gcttcaatgtagaggagcccagccc

SEQ ID NO: 3735257 - DNA, 25 bp, Homo sapien
tgtggtaatcacatttactgcttgc

SEQ ID NO: 3735258 - DNA, 25 bp, Homo sapien
ttttgcaaaggcactcagtggggta

SEQ ID NO: 3735259 - DNA, 25 bp, Homo sapien
gtgtacagccgccaaggtttttgca

SEQ ID NO: 3735260 - DNA, 25 bp, Homo sapien
ctgactgttcttcacaaggagggaa

SEQ ID NO: 3735261 - DNA, 25 bp, Homo sapien
agagcttgctgctgtcctataggcc

SEQ ID NO: 3735262 - DNA, 25 bp, Homo sapien
gtcctataggccctgtttgccttgc

SEQ ID NO: 3735263 - DNA, 25 bp, Homo sapien
gctgctgtcctataggccctgtttg

SEQ ID NO: 3735264 - DNA, 25 bp, Homo sapien
gccagaggtttagagcttgctgctg

SEQ ID NO: 3735265 - DNA, 25 bp, Homo sapien
ttggtattggttgagccccagatga

SEQ ID NO: 3735266 - DNA, 25 bp, Homo sapien
gttggtattggttgagccccagatg

SEQ ID NO: 3735267 - DNA, 25 bp, Homo sapien
tgctgatgctattgttggtattggt

SEQ ID NO: 3735268 - DNA, 25 bp, Homo sapien
tgttggtattggttgagccccagat

SEQ ID NO: 3735269 - DNA, 25 bp, Homo sapien
aggaataagattctgggaacatcac

SEQ ID NO: 3735270 - DNA, 25 bp, Homo sapien
taggaataagattctgggaacatca

SEQ ID NO: 3735271 - DNA, 25 bp, Homo sapien
ttcttcatagaacatcatgcagctc

SEQ ID NO: 3735272 - DNA, 25 bp, Homo sapien
tgtgctccaaatacctgttcttcat

SEQ ID NO: 3735273 - DNA, 25 bp, Homo sapien
tcatgtgctccaaatacctgttctt

SEQ ID NO: 3735274 - DNA, 25 bp, Homo sapien
gctccaaatacctgttcttcataga

SEQ ID NO: 3735275 - DNA, 25 bp, Homo sapien
gaaataattgccatggttgctactt

SEQ ID NO: 3735276 - DNA, 25 bp, Homo sapien
tattgaaataattgccatggttgct

SEQ ID NO: 3735277 - DNA, 25 bp, Homo sapien
tgccatggttgctacttatttccat

SEQ ID NO: 3735278 - DNA, 25 bp, Homo sapien
ctggaacttattgaaataattgcca

SEQ ID NO: 3735279 - DNA, 25 bp, Homo sapien
tgcttctactttgagtgttcctcct

SEQ ID NO: 3735280 - DNA, 25 bp, Homo sapien
tcttctctcctaagaacactgggat

SEQ ID NO: 3735281 - DNA, 25 bp, Homo sapien
tccttctgcttctactttgagtgtt

SEQ ID NO: 3735282 - DNA, 25 bp, Homo sapien
tgggatgctccacccatccagagat

SEQ ID NO: 3735283 - DNA, 25 bp, Homo sapien
gacagctgactgagggaagtaggca

SEQ ID NO: 3735284 - DNA, 25 bp, Homo sapien
aaagtatttacatcgcccagtttgg

SEQ ID NO: 3735285 - DNA, 25 bp, Homo sapien
taagccagttgagcagaacagatga

SEQ ID NO: 3735286 - DNA, 25 bp, Homo sapien
atgagtcacagcactgcggggagct

SEQ ID NO: 3735287 - DNA, 25 bp, Homo sapien
atcagctgggtttgcgtgcacttaa

SEQ ID NO: 3735288 - DNA, 25 bp, Homo sapien
gggtttgcgtgcacttaaagttgta

SEQ ID NO: 3735289 - DNA, 25 bp, Homo sapien
gctgggtttgcgtgcacttaaagtt

SEQ ID NO: 3735290 - DNA, 25 bp, Homo sapien
gcgtgcacttaaagttgtatataat

SEQ ID NO: 3735291 - DNA, 25 bp, Homo sapien
ccagggcctgccacattgaaagaca

SEQ ID NO: 3735292 - DNA, 25 bp, Homo sapien
gttgtcaaacgctgcaccttcccgg

SEQ ID NO: 3735293 - DNA, 25 bp, Homo sapien
acacggctctcctgttgtcaaacgc

SEQ ID NO: 3735294 - DNA, 25 bp, Homo sapien
tggcaggcggcgttccccagggcct

SEQ ID NO: 3735295 - DNA, 25 bp, Homo sapien
gagcacggcgttgagaggtcttctc

SEQ ID NO: 3735296 - DNA, 25 bp, Homo sapien
tcaccataatgggagtaggaggctg

SEQ ID NO: 3735297 - DNA, 25 bp, Homo sapien
gccgtggagtagttgggtcaccata

SEQ ID NO: 3735298 - DNA, 25 bp, Homo sapien
gcaagaactcaagccgtggagtagt

SEQ ID NO: 3735299 - DNA, 25 bp, Homo sapien
gctctgtgagagtttccttgaccag

SEQ ID NO: 3735300 - DNA, 25 bp, Homo sapien
tcttctgggctgctggttttatgca

SEQ ID NO: 3735301 - DNA, 25 bp, Homo sapien
agggagctctgtgagagtttccttg

SEQ ID NO: 3735302 - DNA, 25 bp, Homo sapien
gttttcaagatatgtgtcttctggg

SEQ ID NO: 3735303 - DNA, 25 bp, Homo sapien
catgtacacttccacgaacaatatt

SEQ ID NO: 3735304 - DNA, 25 bp, Homo sapien
ttccacgaacaatattccactcttg

SEQ ID NO: 3735305 - DNA, 25 bp, Homo sapien
aacaatattccactcttgatgggca

SEQ ID NO: 3735306 - DNA, 25 bp, Homo sapien
tgtacacttccacgaacaatattcc

SEQ ID NO: 3735307 - DNA, 25 bp, Homo sapien
acattctgcaagaagttcggggcca

SEQ ID NO: 3735308 - DNA, 25 bp, Homo sapien
ttctgcaagaagttcggggccacag

SEQ ID NO: 3735309 - DNA, 25 bp, Homo sapien
ttcggggccacagatctggtcggat

SEQ ID NO: 3735310 - DNA, 25 bp, Homo sapien
ggccacagatctggtcggattcagc

SEQ ID NO: 3735311 - DNA, 25 bp, Homo sapien
gacatgagcaaaacagccgtctgga

SEQ ID NO: 3735312 - DNA, 25 bp, Homo sapien
ggtggtgggactcatgaactgtacc

SEQ ID NO: 3735313 - DNA, 25 bp, Homo sapien
tgttgcacttcagatgtacgctttg

SEQ ID NO: 3735314 - DNA, 25 bp, Homo sapien
gaagcttcaaatccatggcacctgc

SEQ ID NO: 3735315 - DNA, 25 bp, Homo sapien
tgttcctaccacgtgaagggtagct

SEQ ID NO: 3735316 - DNA, 25 bp, Homo sapien
gctgctcgtattgtgggcgagcctt

SEQ ID NO: 3735317 - DNA, 25 bp, Homo sapien
gaaatggctctcatgcggattcggc

SEQ ID NO: 3735318 - DNA, 25 bp, Homo sapien
tcgaggtagatagaaacagcctctc

SEQ ID NO: 3735319 - DNA, 25 bp, Homo sapien
gagactgctcagtatctttgcacat

SEQ ID NO: 3735320 - DNA, 25 bp, Homo sapien
gatgcatgaccattgatagcctggt

SEQ ID NO: 3735321 - DNA, 25 bp, Homo sapien
caggtagtccgtgtgctggtccttc

SEQ ID NO: 3735322 - DNA, 25 bp, Homo sapien
tgagggtgcgcgtttctgacttcgt

SEQ ID NO: 3735323 - DNA, 25 bp, Homo sapien
cgtggacgtccactttagtcttgaa

SEQ ID NO: 3735324 - DNA, 25 bp, Homo sapien
ggatgcctctgacttaagtcccagc

SEQ ID NO: 3735325 - DNA, 25 bp, Homo sapien
agatttagctatactggttcccagg

SEQ ID NO: 3735326 - DNA, 25 bp, Homo sapien
gccagcaaggatcaagatgtccgtg

SEQ ID NO: 3735327 - DNA, 25 bp, Homo sapien
tcatgtggcggttttctgaggatct

SEQ ID NO: 3735328 - DNA, 25 bp, Homo sapien
gaggatctggccctgagatattctt

SEQ ID NO: 3735329 - DNA, 25 bp, Homo sapien
catgtggcggttttctgaggatctg

SEQ ID NO: 3735330 - DNA, 25 bp, Homo sapien
atctggccctgagatattcttcctg

SEQ ID NO: 3735331 - DNA, 25 bp, Homo sapien
gcattgcctggaaacgacttccttt

SEQ ID NO: 3735332 - DNA, 25 bp, Homo sapien
tggtggcagctgtttttttgaatac

SEQ ID NO: 3735333 - DNA, 25 bp, Homo sapien
gggtttgagatctgtctagaatcct

SEQ ID NO: 3735334 - DNA, 25 bp, Homo sapien
cagtcttctttgtctgggtttgaga

SEQ ID NO: 3735335 - DNA, 25 bp, Homo sapien
cgcaggaaccgggtttcagccccag

SEQ ID NO: 3735336 - DNA, 25 bp, Homo sapien
gctggcgtctcccaactttagggcc

SEQ ID NO: 3735337 - DNA, 25 bp, Homo sapien
tgtttgggaacccattgccgcttcc

SEQ ID NO: 3735338 - DNA, 25 bp, Homo sapien
taaataaacaaactggctcctcgcc

SEQ ID NO: 3735339 - DNA, 25 bp, Homo sapien
gagctctcgaagattaccgcatcta

SEQ ID NO: 3735340 - DNA, 25 bp, Homo sapien
aactcggcccttcgagctctcgaag

SEQ ID NO: 3735341 - DNA, 25 bp, Homo sapien
tttcctagcgcagataaagtgagcc

SEQ ID NO: 3735342 - DNA, 25 bp, Homo sapien
cgagggctctgctcggaaatcgtcc

SEQ ID NO: 3735343 - DNA, 25 bp, Homo sapien
ctccttgtcggagctccaggagaga

SEQ ID NO: 3735344 - DNA, 25 bp, Homo sapien
tggacgaacggatgggcgcatccca

SEQ ID NO: 3735345 - DNA, 25 bp, Homo sapien
gagagaggtagagactgcgtgtgca

SEQ ID NO: 3735346 - DNA, 25 bp, Homo sapien
tgggggctccgcttttgtctccttg

SEQ ID NO: 3735347 - DNA, 25 bp, Homo sapien
ccttttaacatacctgagccttgcc

SEQ ID NO: 3735348 - DNA, 25 bp, Homo sapien
cagcaaggcatctccgagtcatgca

SEQ ID NO: 3735349 - DNA, 25 bp, Homo sapien
ggcaagtctgctgaaataacacttt

SEQ ID NO: 3735350 - DNA, 25 bp, Homo sapien
ctctgtggcaagtctgctgaaataa

SEQ ID NO: 3735351 - DNA, 25 bp, Homo sapien
agatcatgtctctgttgaagcggac

SEQ ID NO: 3735352 - DNA, 25 bp, Homo sapien
taagcacagtcagcaatcaataatt

SEQ ID NO: 3735353 - DNA, 25 bp, Homo sapien
tcaaatagtccccatattttcaatt

SEQ ID NO: 3735354 - DNA, 25 bp, Homo sapien
tgaagcggactattatagctgcctg

SEQ ID NO: 3735355 - DNA, 25 bp, Homo sapien
tcagcaaaatggtacgtgccaacaa

SEQ ID NO: 3735356 - DNA, 25 bp, Homo sapien
cattttagggataacgtcctcaagg

SEQ ID NO: 3735357 - DNA, 25 bp, Homo sapien
tcctcaaggtgctctgtctttcagc

SEQ ID NO: 3735358 - DNA, 25 bp, Homo sapien
aaaccttccctaaggctggagccag

SEQ ID NO: 3735359 - DNA, 25 bp, Homo sapien
cttggcttttgagggcgtctgggca

SEQ ID NO: 3735360 - DNA, 25 bp, Homo sapien
ggcagtttcaaggtctgcctttttc

SEQ ID NO: 3735361 - DNA, 25 bp, Homo sapien
tggcaaataaaaaggctgccaagac

SEQ ID NO: 3735362 - DNA, 25 bp, Homo sapien
tttccctggcggaacccctgactca

SEQ ID NO: 3735363 - DNA, 25 bp, Homo sapien
ttggtggcaaataaaaaggctgcca

SEQ ID NO: 3735364 - DNA, 25 bp, Homo sapien
ctggctcctgcgatccttttctcgc

SEQ ID NO: 3735365 - DNA, 25 bp, Homo sapien
tattttataaccaactctgaggatc

SEQ ID NO: 3735366 - DNA, 25 bp, Homo sapien
gctcctgcgatccttttctcgccct

SEQ ID NO: 3735367 - DNA, 25 bp, Homo sapien
aaatattttataaccaactctgagg

SEQ ID NO: 3735368 - DNA, 25 bp, Homo sapien
tccgcctgatgctcggtgaagatga

SEQ ID NO: 3735369 - DNA, 25 bp, Homo sapien
aaacggcgactctcctccgcctgat

SEQ ID NO: 3735370 - DNA, 25 bp, Homo sapien
cggcgactctcctccgcctgatgct

SEQ ID NO: 3735371 - DNA, 25 bp, Homo sapien
cttctcgcatcaaacggcgactctc

SEQ ID NO: 3735372 - DNA, 25 bp, Homo sapien
ccccattttggtggcgtttgataag

SEQ ID NO: 3735373 - DNA, 25 bp, Homo sapien
atgcaagctcccctaacggctctga

SEQ ID NO: 3735374 - DNA, 25 bp, Homo sapien
ttgataagccacctttcagttgtct

SEQ ID NO: 3735375 - DNA, 25 bp, Homo sapien
gctctgaccactgccttcgggattt

SEQ ID NO: 3735376 - DNA, 25 bp, Homo sapien
cgacatctggttatttccgacctta

SEQ ID NO: 3735377 - DNA, 25 bp, Homo sapien
cttaattttttcacgacatctggtt

SEQ ID NO: 3735378 - DNA, 25 bp, Homo sapien
tcattcagctcctccgttgctttct

SEQ ID NO: 3735379 - DNA, 25 bp, Homo sapien
cagctcctccgttgctttcttaatt

SEQ ID NO: 3735380 - DNA, 25 bp, Homo sapien
catattcctatggtttgtaatttca

SEQ ID NO: 3735381 - DNA, 25 bp, Homo sapien
gcatattcctatggtttgtaatttc

SEQ ID NO: 3735382 - DNA, 25 bp, Homo sapien
agcatattcctatggtttgtaattt

SEQ ID NO: 3735383 - DNA, 25 bp, Homo sapien
tattcctatggtttgtaatttcact

SEQ ID NO: 3735384 - DNA, 25 bp, Homo sapien
tttcaacatgtttgcttggttttct

SEQ ID NO: 3735385 - DNA, 25 bp, Homo sapien
tggttttctaagtcagatatttcaa

SEQ ID NO: 3735386 - DNA, 25 bp, Homo sapien
tcataatcattattaaagtctgtaa

SEQ ID NO: 3735387 - DNA, 25 bp, Homo sapien
tctttcatcaaaagctctcttttct

SEQ ID NO: 3735388 - DNA, 25 bp, Homo sapien
cattaatgcaagacaaatgaggtga

SEQ ID NO: 3735389 - DNA, 25 bp, Homo sapien
tattttcattaatgcaagacaaatg

SEQ ID NO: 3735390 - DNA, 25 bp, Homo sapien
taatgcaagacaaatgaggtgatat

SEQ ID NO: 3735391 - DNA, 25 bp, Homo sapien
caaatgaggtgatatttattcatac

SEQ ID NO: 3735392 - DNA, 25 bp, Homo sapien
tcaaggagtaagaataggctccaat

SEQ ID NO: 3735393 - DNA, 25 bp, Homo sapien
caaggagtaagaataggctccaatc

SEQ ID NO: 3735394 - DNA, 25 bp, Homo sapien
tttttgaagttcatttaactggcta

SEQ ID NO: 3735395 - DNA, 25 bp, Homo sapien
aactggctactatcatgttccattg

SEQ ID NO: 3735396 - DNA, 25 bp, Homo sapien
tcttgtatcaattcactcttttgtt

SEQ ID NO: 3735397 - DNA, 25 bp, Homo sapien
taattcttgtatcaattcactcttt

SEQ ID NO: 3735398 - DNA, 25 bp, Homo sapien
ttaagcattctgtatcattttgagg

SEQ ID NO: 3735399 - DNA, 25 bp, Homo sapien
ctagatatttggtagtacaaatgga

SEQ ID NO: 3735400 - DNA, 25 bp, Homo sapien
cttaagcattctgtatcattttgag

SEQ ID NO: 3735401 - DNA, 25 bp, Homo sapien
gcctctagatatttggtagtacaaa

SEQ ID NO: 3735402 - DNA, 25 bp, Homo sapien
ggacttccctcactcactgaactaa

SEQ ID NO: 3735403 - DNA, 25 bp, Homo sapien
gcagctagccaaagcaatataatgg

SEQ ID NO: 3735404 - DNA, 25 bp, Homo sapien
tggtaagtagatctcatgcttcagt

SEQ ID NO: 3735405 - DNA, 25 bp, Homo sapien
tgcatagactgattgcctacaggag

SEQ ID NO: 3735406 - DNA, 25 bp, Homo sapien
tcattactttatcatgagaacattc

SEQ ID NO: 3735407 - DNA, 25 bp, Homo sapien
cattactttatcatgagaacattca

SEQ ID NO: 3735408 - DNA, 25 bp, Homo sapien
gcatacaatgtgcaacagtcaaatc

SEQ ID NO: 3735409 - DNA, 25 bp, Homo sapien
atcttccttataaagttctaattct

SEQ ID NO: 3735410 - DNA, 25 bp, Homo sapien
catcttccttataaagttctaattc

SEQ ID NO: 3735411 - DNA, 25 bp, Homo sapien
tcatcttccttataaagttctaatt

SEQ ID NO: 3735412 - DNA, 25 bp, Homo sapien
gtcatcttccttataaagttctaat

SEQ ID NO: 3735413 - DNA, 25 bp, Homo sapien
caactccaaaaattctatttctgtt

SEQ ID NO: 3735414 - DNA, 25 bp, Homo sapien
attctatttctgtttggagagcttc

SEQ ID NO: 3735415 - DNA, 25 bp, Homo sapien
aaaaattctatttctgtttggagag

SEQ ID NO: 3735416 - DNA, 25 bp, Homo sapien
tctatttctgtttggagagcttcat

SEQ ID NO: 3735417 - DNA, 25 bp, Homo sapien
atttgctttcctgaagatctttctg

SEQ ID NO: 3735418 - DNA, 25 bp, Homo sapien
cctgaagatctttctgtgccaatgt

SEQ ID NO: 3735419 - DNA, 25 bp, Homo sapien
ttcctgaagatctttctgtgccaat

SEQ ID NO: 3735420 - DNA, 25 bp, Homo sapien
gctttcctgaagatctttctgtgcc

SEQ ID NO: 3735421 - DNA, 25 bp, Homo sapien
ccgttgtaacgggtaccattcatat

SEQ ID NO: 3735422 - DNA, 25 bp, Homo sapien
caagtttaattgtcccacggttctg

SEQ ID NO: 3735423 - DNA, 25 bp, Homo sapien
gagacatctcatacggtggcagcag

SEQ ID NO: 3735424 - DNA, 25 bp, Homo sapien
taaagggctaacacatcatttctag

SEQ ID NO: 3735425 - DNA, 25 bp, Homo sapien
attcgtaaagtgatcaaatccctgc

SEQ ID NO: 3735426 - DNA, 25 bp, Homo sapien
caaatccctgcaatatccctttgac

SEQ ID NO: 3735427 - DNA, 25 bp, Homo sapien
agattcgtaaagtgatcaaatccct

SEQ ID NO: 3735428 - DNA, 25 bp, Homo sapien
gatcaaatccctgcaatatcccttt

SEQ ID NO: 3735429 - DNA, 25 bp, Homo sapien
ttttgttctgttgatcactagttgc

SEQ ID NO: 3735430 - DNA, 25 bp, Homo sapien
tttgttctgttgatcactagttgcc

SEQ ID NO: 3735431 - DNA, 25 bp, Homo sapien
gagaacgtccaagttcagggatata

SEQ ID NO: 3735432 - DNA, 25 bp, Homo sapien
tgagggatccagaagagaacgtcca

SEQ ID NO: 3735433 - DNA, 25 bp, Homo sapien
ttcagggatatatcccttagtggcc

SEQ ID NO: 3735434 - DNA, 25 bp, Homo sapien
gggatatatcccttagtggcctgga

SEQ ID NO: 3735435 - DNA, 25 bp, Homo sapien
gtggtccattgcaatgatcaacacc

SEQ ID NO: 3735436 - DNA, 25 bp, Homo sapien
tgatcaacaccatagctgatattgt

SEQ ID NO: 3735437 - DNA, 25 bp, Homo sapien
ttgcaatgatcaacaccatagctga

SEQ ID NO: 3735438 - DNA, 25 bp, Homo sapien
tagctgatattgttagaaatgctgt

SEQ ID NO: 3735439 - DNA, 25 bp, Homo sapien
tagtcaacagtgaacacttcctcac

SEQ ID NO: 3735440 - DNA, 25 bp, Homo sapien
ttagtcaacagtgaacacttcctca

SEQ ID NO: 3735441 - DNA, 25 bp, Homo sapien
gtccacactcagaacttcctctttt

SEQ ID NO: 3735442 - DNA, 25 bp, Homo sapien
ccttcacccatgttgctcctgtcca

SEQ ID NO: 3735443 - DNA, 25 bp, Homo sapien
ctgagtgttgggcgtgctgtttctt

SEQ ID NO: 3735444 - DNA, 25 bp, Homo sapien
tcttctactttgacggtccttcctc

SEQ ID NO: 3735445 - DNA, 25 bp, Homo sapien
tcacccatgttgctcctgtccacct

SEQ ID NO: 3735446 - DNA, 25 bp, Homo sapien
caagaatcaatgttttcagccatac

SEQ ID NO: 3735447 - DNA, 25 bp, Homo sapien
tcaagaatcaatgttttcagccata

SEQ ID NO: 3735448 - DNA, 25 bp, Homo sapien
tgcaactcaatgtttaaactctacg

SEQ ID NO: 3735449 - DNA, 25 bp, Homo sapien
cacctcactataaaatactaagtgg

SEQ ID NO: 3735450 - DNA, 25 bp, Homo sapien
gatgcaactcaatgtttaaactcta

SEQ ID NO: 3735451 - DNA, 25 bp, Homo sapien
tctttacttgtaaagtcacctcact

SEQ ID NO: 3735452 - DNA, 25 bp, Homo sapien
tgatgtgccaaagaacaagaatgca

SEQ ID NO: 3735453 - DNA, 25 bp, Homo sapien
taagcaactgccacataggtttatg

SEQ ID NO: 3735454 - DNA, 25 bp, Homo sapien
tagcactggaattcagcattggaga

SEQ ID NO: 3735455 - DNA, 25 bp, Homo sapien
acagtgacaggtgctaggaggaacc

SEQ ID NO: 3735456 - DNA, 25 bp, Homo sapien
ggagaaaacaattctagccctcatg

SEQ ID NO: 3735457 - DNA, 25 bp, Homo sapien
tgactcccagtttcctaagaggaag

SEQ ID NO: 3735458 - DNA, 25 bp, Homo sapien
gattttagaggtactgactctccct

SEQ ID NO: 3735459 - DNA, 25 bp, Homo sapien
tggcttcaatcaactcgcatgctat

SEQ ID NO: 3735460 - DNA, 25 bp, Homo sapien
tccagcttccaaggtctgtcagctt

SEQ ID NO: 3735461 - DNA, 25 bp, Homo sapien
tctggagaccagggtaaacctacca

SEQ ID NO: 3735462 - DNA, 25 bp, Homo sapien
tggtccatggtaaaccatctttgaa

SEQ ID NO: 3735463 - DNA, 25 bp, Homo sapien
tagagcaggaaacgagtgtttatct

SEQ ID NO: 3735464 - DNA, 25 bp, Homo sapien
tgtgtatagtgtagagcaggaaacg

SEQ ID NO: 3735465 - DNA, 25 bp, Homo sapien
ctgataggcattgggattgtgtata

SEQ ID NO: 3735466 - DNA, 25 bp, Homo sapien
gcattgggattgtgtatagtgtaga

SEQ ID NO: 3735467 - DNA, 25 bp, Homo sapien
aaggttctcagttggtacattgact

SEQ ID NO: 3735468 - DNA, 25 bp, Homo sapien
attcaattcaatagacaataggcat

SEQ ID NO: 3735469 - DNA, 25 bp, Homo sapien
cagtcttacagatggaaggttctca

SEQ ID NO: 3735470 - DNA, 25 bp, Homo sapien
cagatcataatttgtgttgcaagaa

SEQ ID NO: 3735471 - DNA, 25 bp, Homo sapien
gttaggtgcttaaccactgggctct

SEQ ID NO: 3735472 - DNA, 25 bp, Homo sapien
gttctgattatagtgttctctgctg

SEQ ID NO: 3735473 - DNA, 25 bp, Homo sapien
cacatggcctttgaagttaggtgct

SEQ ID NO: 3735474 - DNA, 25 bp, Homo sapien
gggctctcaagcgatgttctgatta

SEQ ID NO: 3735475 - DNA, 25 bp, Homo sapien
tacgggtgatcttgtctgttccaaa

SEQ ID NO: 3735476 - DNA, 25 bp, Homo sapien
aatatgaggcttggatagttgaaga

SEQ ID NO: 3735477 - DNA, 25 bp, Homo sapien
tgtctgttccaaaatatgaggcttg

SEQ ID NO: 3735478 - DNA, 25 bp, Homo sapien
gttgaagaattaaccgcactgatct

SEQ ID NO: 3735479 - DNA, 25 bp, Homo sapien
aatggataactaatttgaggcccca

SEQ ID NO: 3735480 - DNA, 25 bp, Homo sapien
aatttgcttcccttgtaatctgtgc

SEQ ID NO: 3735481 - DNA, 25 bp, Homo sapien
taaacataaagctcgcatgctagtg

SEQ ID NO: 3735482 - DNA, 25 bp, Homo sapien
tgaggccccagaacacggataattg

SEQ ID NO: 3735483 - DNA, 25 bp, Homo sapien
cacggagattgtttacagcatggat

SEQ ID NO: 3735484 - DNA, 25 bp, Homo sapien
cccgtgaaccgttgatccaatctaa

SEQ ID NO: 3735485 - DNA, 25 bp, Homo sapien
cagcatggatgtattcccgtgaacc

SEQ ID NO: 3735486 - DNA, 25 bp, Homo sapien
caatttatatcttccagctgtagca

SEQ ID NO: 3735487 - DNA, 25 bp, Homo sapien
cagcgtcgcactctggcccaagctg

SEQ ID NO: 3735488 - DNA, 25 bp, Homo sapien
gcagcgtcgcactctggcccaagct

SEQ ID NO: 3735489 - DNA, 25 bp, Homo sapien
tgagacgcagcgtcgcactctggcc

SEQ ID NO: 3735490 - DNA, 25 bp, Homo sapien
ttttgagacgcagcgtcgcactctg

SEQ ID NO: 3735491 - DNA, 25 bp, Homo sapien
ttctataggagctctcctccttgtg

SEQ ID NO: 3735492 - DNA, 25 bp, Homo sapien
aacaggagaacagccctaacaacta

SEQ ID NO: 3735493 - DNA, 25 bp, Homo sapien
tatccaactgaaggagaacagatga

SEQ ID NO: 3735494 - DNA, 25 bp, Homo sapien
aactatattcgtggcttctagctcc

SEQ ID NO: 3735495 - DNA, 25 bp, Homo sapien
caagctgtggccaatcaagtgcact

SEQ ID NO: 3735496 - DNA, 25 bp, Homo sapien
ggccaatcaagtgcactttagaagg

SEQ ID NO: 3735497 - DNA, 25 bp, Homo sapien
gccaatcaagtgcactttagaaggg

SEQ ID NO: 3735498 - DNA, 25 bp, Homo sapien
ctgtggccaatcaagtgcactttag

SEQ ID NO: 3735499 - DNA, 25 bp, Homo sapien
gccccgcctgttggtaaaggagctg

SEQ ID NO: 3735500 - DNA, 25 bp, Homo sapien
cagccccgcctgttggtaaaggagc

SEQ ID NO: 3735501 - DNA, 25 bp, Homo sapien
ccccgcctgttggtaaaggagctgt

SEQ ID NO: 3735502 - DNA, 25 bp, Homo sapien
gccagccccgcctgttggtaaagga

SEQ ID NO: 3735503 - DNA, 25 bp, Homo sapien
caagctcaaagaggatgcgagctgc

SEQ ID NO: 3735504 - DNA, 25 bp, Homo sapien
gatgcgagctgcatttgtatgaata

SEQ ID NO: 3735505 - DNA, 25 bp, Homo sapien
gacttcctttggagtgttgtggaaa

SEQ ID NO: 3735506 - DNA, 25 bp, Homo sapien
cgtcaacaaagttggcatccgaggg

SEQ ID NO: 3735507 - DNA, 25 bp, Homo sapien
aaaggtgtaattaagtcttcacatc

SEQ ID NO: 3735508 - DNA, 25 bp, Homo sapien
acatcctggcatgtgcttccctcca

SEQ ID NO: 3735509 - DNA, 25 bp, Homo sapien
gggtaaaagtcaagatgaccacaag

SEQ ID NO: 3735510 - DNA, 25 bp, Homo sapien
ccacaagcatcaatggttccaacac

SEQ ID NO: 3735511 - DNA, 25 bp, Homo sapien
tcagcataaaattgataacttcggg

SEQ ID NO: 3735512 - DNA, 25 bp, Homo sapien
gattaagaatgctttcagcataaaa

SEQ ID NO: 3735513 - DNA, 25 bp, Homo sapien
taaaattgataacttcgggcatggt

SEQ ID NO: 3735514 - DNA, 25 bp, Homo sapien
gataacttcgggcatggttacagtc

SEQ ID NO: 3735515 - DNA, 25 bp, Homo sapien
aacttcagctgaacagcccacattt

SEQ ID NO: 3735516 - DNA, 25 bp, Homo sapien
aaacttcagctgaacagcccacatt

SEQ ID NO: 3735517 - DNA, 25 bp, Homo sapien
acttcagctgaacagcccacatttt

SEQ ID NO: 3735518 - DNA, 25 bp, Homo sapien
taaacttcagctgaacagcccacat

SEQ ID NO: 3735519 - DNA, 25 bp, Homo sapien
tgacccattgttgggcaaccttctt

SEQ ID NO: 3735520 - DNA, 25 bp, Homo sapien
atgacccattgttgggcaaccttct

SEQ ID NO: 3735521 - DNA, 25 bp, Homo sapien
cttccactgagtttaacagacaatt

SEQ ID NO: 3735522 - DNA, 25 bp, Homo sapien
tccttgagtgacttcgcttccactg

SEQ ID NO: 3735523 - DNA, 25 bp, Homo sapien
caatggcaaactccccagttttcct

SEQ ID NO: 3735524 - DNA, 25 bp, Homo sapien
gcctacacgaagaaagacagttcct

SEQ ID NO: 3735525 - DNA, 25 bp, Homo sapien
catctgcatcgattaattttgtgta

SEQ ID NO: 3735526 - DNA, 25 bp, Homo sapien
tgctcccaacttattctgagaatct

SEQ ID NO: 3735527 - DNA, 25 bp, Homo sapien
gtatttatcaccatttctgctccca

SEQ ID NO: 3735528 - DNA, 25 bp, Homo sapien
gtaatgtttccaacgttaacatctg

SEQ ID NO: 3735529 - DNA, 25 bp, Homo sapien
aatattaggtcccataatgtcttgg

SEQ ID NO: 3735530 - DNA, 25 bp, Homo sapien
taggtcccataatgtcttggctaca

SEQ ID NO: 3735531 - DNA, 25 bp, Homo sapien
gttctggagaatattaggtcccata

SEQ ID NO: 3735532 - DNA, 25 bp, Homo sapien
ggagaatattaggtcccataatgtc

SEQ ID NO: 3735533 - DNA, 25 bp, Homo sapien
aattatcttttgtcccagggttcag

SEQ ID NO: 3735534 - DNA, 25 bp, Homo sapien
gcaaacccgtacttgactctgagta

SEQ ID NO: 3735535 - DNA, 25 bp, Homo sapien
gactaagtcatttacaagggtcaaa

SEQ ID NO: 3735536 - DNA, 25 bp, Homo sapien
ctgagtaagacccttgtaaatgact

SEQ ID NO: 3735537 - DNA, 25 bp, Homo sapien
caaatgaaatgctgccttgaggcta

SEQ ID NO: 3735538 - DNA, 25 bp, Homo sapien
ttcaccatagagcattcaagaccca

SEQ ID NO: 3735539 - DNA, 25 bp, Homo sapien
gataagctccaaaatctctcttgtg

SEQ ID NO: 3735540 - DNA, 25 bp, Homo sapien
tgtgcacaccctgaacaccaaggaa

SEQ ID NO: 3735541 - DNA, 25 bp, Homo sapien
tccaccaccagcttgctaatgaatg

SEQ ID NO: 3735542 - DNA, 25 bp, Homo sapien
ggctcgggacagctgctctcaggaa

SEQ ID NO: 3735543 - DNA, 25 bp, Homo sapien
tgcctaaggccacggccggatgcat

SEQ ID NO: 3735544 - DNA, 25 bp, Homo sapien
ctctaccttgggacctgtgcaggct

SEQ ID NO: 3735545 - DNA, 25 bp, Homo sapien
gattccaagccattcgatactctat

SEQ ID NO: 3735546 - DNA, 25 bp, Homo sapien
ttagcctgccattgagcaaccagat

SEQ ID NO: 3735547 - DNA, 25 bp, Homo sapien
cctacaatttgaattggtatagcct

SEQ ID NO: 3735548 - DNA, 25 bp, Homo sapien
aatgtgtaaaatgctattacataca

SEQ ID NO: 3735549 - DNA, 25 bp, Homo sapien
taaatagccatgcaactcaacccgg

SEQ ID NO: 3735550 - DNA, 25 bp, Homo sapien
cagtcctggagcacaaacccttgta

SEQ ID NO: 3735551 - DNA, 25 bp, Homo sapien
cactgccatcaatgatgagcctggg

SEQ ID NO: 3735552 - DNA, 25 bp, Homo sapien
tagccctaggcatagtacagaggtc

SEQ ID NO: 3735553 - DNA, 25 bp, Homo sapien
gaattatgaccacacatgaaaatcc

SEQ ID NO: 3735554 - DNA, 25 bp, Homo sapien
gaatcagaactagatcccagatcct

SEQ ID NO: 3735555 - DNA, 25 bp, Homo sapien
cctcgaaaattcatgggcctttgta

SEQ ID NO: 3735556 - DNA, 25 bp, Homo sapien
gatggatacactgaagattaaaggg

SEQ ID NO: 3735557 - DNA, 25 bp, Homo sapien
ctaaacagtcggtgaggctagagtt

SEQ ID NO: 3735558 - DNA, 25 bp, Homo sapien
tgaggctagagtttctccatcctgg

SEQ ID NO: 3735559 - DNA, 25 bp, Homo sapien
tcttctgcgttccacgggtactgtc

SEQ ID NO: 3735560 - DNA, 25 bp, Homo sapien
ctcttctgcgttccacgggtactgt

SEQ ID NO: 3735561 - DNA, 25 bp, Homo sapien
tgcttaggtccccatcagtcacagg

SEQ ID NO: 3735562 - DNA, 25 bp, Homo sapien
gatagctcaactatggtcacccttg

SEQ ID NO: 3735563 - DNA, 25 bp, Homo sapien
gactccacggatcttgttaatgcct

SEQ ID NO: 3735564 - DNA, 25 bp, Homo sapien
tgttctttctgactccacggatctt

SEQ ID NO: 3735565 - DNA, 25 bp, Homo sapien
tatctatttccagcaacgtaagcct

SEQ ID NO: 3735566 - DNA, 25 bp, Homo sapien
tatttccagcaacgtaagccttctc

SEQ ID NO: 3735567 - DNA, 25 bp, Homo sapien
tctcttctccaatctcacgggaaag

SEQ ID NO: 3735568 - DNA, 25 bp, Homo sapien
tcatatctatttccagcaacgtaag

SEQ ID NO: 3735569 - DNA, 25 bp, Homo sapien
ctaggaacgaatcttacagtgtcct

SEQ ID NO: 3735570 - DNA, 25 bp, Homo sapien
gaacgaatcttacagtgtcctctct

SEQ ID NO: 3735571 - DNA, 25 bp, Homo sapien
acgaatcttacagtgtcctctctca

SEQ ID NO: 3735572 - DNA, 25 bp, Homo sapien
ggaacgaatcttacagtgtcctctc

SEQ ID NO: 3735573 - DNA, 25 bp, Homo sapien
cacttaaggttcccgtcgtgaccag

SEQ ID NO: 3735574 - DNA, 25 bp, Homo sapien
tgagcacttaaggttcccgtcgtga

SEQ ID NO: 3735575 - DNA, 25 bp, Homo sapien
gagcacttaaggttcccgtcgtgac

SEQ ID NO: 3735576 - DNA, 25 bp, Homo sapien
cttgagcacttaaggttcccgtcgt

SEQ ID NO: 3735577 - DNA, 25 bp, Homo sapien
aatactgcaggtaggatggccattt

SEQ ID NO: 3735578 - DNA, 25 bp, Homo sapien
gtaatactgcaggtaggatggccat

SEQ ID NO: 3735579 - DNA, 25 bp, Homo sapien
tgcaggtaggatggccattttcttc

SEQ ID NO: 3735580 - DNA, 25 bp, Homo sapien
tgttatgtggaactgtgttcctaca

SEQ ID NO: 3735581 - DNA, 25 bp, Homo sapien
ctggcaaacactcacaagaaatgcc

SEQ ID NO: 3735582 - DNA, 25 bp, Homo sapien
tcccaccactctttgctccagccca

SEQ ID NO: 3735583 - DNA, 25 bp, Homo sapien
ctcacaagaaatgcctcattgcctc

SEQ ID NO: 3735584 - DNA, 25 bp, Homo sapien
ttgctccagcccacacacgtgttca

SEQ ID NO: 3735585 - DNA, 25 bp, Homo sapien
catgtgatttgtatctacgaagttg

SEQ ID NO: 3735586 - DNA, 25 bp, Homo sapien
tgttagccagagtagcagataacag

SEQ ID NO: 3735587 - DNA, 25 bp, Homo sapien
gattatgggagttgcatccatgtga

SEQ ID NO: 3735588 - DNA, 25 bp, Homo sapien
tatctacgaagttgacattgttagc

SEQ ID NO: 3735589 - DNA, 25 bp, Homo sapien
gggtcttcgagccagacacactcgt

SEQ ID NO: 3735590 - DNA, 25 bp, Homo sapien
tatggtctttggtgtccttacttgg

SEQ ID NO: 3735591 - DNA, 25 bp, Homo sapien
aatagcatagatgtgaatgcctagg

SEQ ID NO: 3735592 - DNA, 25 bp, Homo sapien
acttggattgggtagctgggtcttc

SEQ ID NO: 3735593 - DNA, 25 bp, Homo sapien
ccaaccagtgccttgtgtgttgagt

SEQ ID NO: 3735594 - DNA, 25 bp, Homo sapien
tagaagatgcagtaggctctgattt

SEQ ID NO: 3735595 - DNA, 25 bp, Homo sapien
tgagtaaagcattgatccaaccagt

SEQ ID NO: 3735596 - DNA, 25 bp, Homo sapien
gcattgatccaaccagtgccttgtg

SEQ ID NO: 3735597 - DNA, 25 bp, Homo sapien
gcttcttcaagctgggaagatccaa

SEQ ID NO: 3735598 - DNA, 25 bp, Homo sapien
ggttatggtaccaccctctacatag

SEQ ID NO: 3735599 - DNA, 25 bp, Homo sapien
cctctacatagtttgcatctacaga

SEQ ID NO: 3735600 - DNA, 25 bp, Homo sapien
ctacagatagagcatcagcggcatc

SEQ ID NO: 3735601 - DNA, 25 bp, Homo sapien
tagtatatgtgctgtctaaacaaga

SEQ ID NO: 3735602 - DNA, 25 bp, Homo sapien
agtatatgtgctgtctaaacaagaa

SEQ ID NO: 3735603 - DNA, 25 bp, Homo sapien
gtatatgtgctgtctaaacaagaac

SEQ ID NO: 3735604 - DNA, 25 bp, Homo sapien
tatatgtgctgtctaaacaagaact

SEQ ID NO: 3735605 - DNA, 25 bp, Homo sapien
gcagcagtgaaagagtccaaagtgg

SEQ ID NO: 3735606 - DNA, 25 bp, Homo sapien
gtgaaagagtccaaagtggcagcat

SEQ ID NO: 3735607 - DNA, 25 bp, Homo sapien
tgctactgctcccagcagcagtgaa

SEQ ID NO: 3735608 - DNA, 25 bp, Homo sapien
cagtgaaagagtccaaagtggcagc

SEQ ID NO: 3735609 - DNA, 25 bp, Homo sapien
caatcccccagaaggatattagttt

SEQ ID NO: 3735610 - DNA, 25 bp, Homo sapien
tgcaatcccccagaaggatattagt

SEQ ID NO: 3735611 - DNA, 25 bp, Homo sapien
ctgcaatcccccagaaggatattag

SEQ ID NO: 3735612 - DNA, 25 bp, Homo sapien
gcaatcccccagaaggatattagtt

SEQ ID NO: 3735613 - DNA, 25 bp, Homo sapien
atcactgaagcagccgagtctttcg

SEQ ID NO: 3735614 - DNA, 25 bp, Homo sapien
gccgagtctttcgtagcaaacttct

SEQ ID NO: 3735615 - DNA, 25 bp, Homo sapien
tctttccgtaattcctgaccatggg

SEQ ID NO: 3735616 - DNA, 25 bp, Homo sapien
cattagtatataggaggaagcgggt

SEQ ID NO: 3735617 - DNA, 25 bp, Homo sapien
tcttctcccttgtctatgaatccat

SEQ ID NO: 3735618 - DNA, 25 bp, Homo sapien
catgaataataaagcgagtttttct

SEQ ID NO: 3735619 - DNA, 25 bp, Homo sapien
tttcttctcccttgtctatgaatcc

SEQ ID NO: 3735620 - DNA, 25 bp, Homo sapien
tccatgaataataaagcgagttttt

SEQ ID NO: 3735621 - DNA, 25 bp, Homo sapien
ggtctgaatatcctccaagacctcc

SEQ ID NO: 3735622 - DNA, 25 bp, Homo sapien
attggtcggggccagtgccttaccg

SEQ ID NO: 3735623 - DNA, 25 bp, Homo sapien
ggggtctgaatatcctccaagacct

SEQ ID NO: 3735624 - DNA, 25 bp, Homo sapien
gcaggggtctgaatatcctccaaga

SEQ ID NO: 3735625 - DNA, 25 bp, Homo sapien
gatacagttcacactttccaccttg

SEQ ID NO: 3735626 - DNA, 25 bp, Homo sapien
tctgcgaggcttgtgtgtatccagt

SEQ ID NO: 3735627 - DNA, 25 bp, Homo sapien
ctcccacgatcctgatgttctgcga

SEQ ID NO: 3735628 - DNA, 25 bp, Homo sapien
tcacactttccaccttgaacagatt

SEQ ID NO: 3735629 - DNA, 25 bp, Homo sapien
agagaaacatcatatctgagtagag

SEQ ID NO: 3735630 - DNA, 25 bp, Homo sapien
ggaaaaccatgtgtacaggctttta

SEQ ID NO: 3735631 - DNA, 25 bp, Homo sapien
gggttattgatgaaacccaaagcta

SEQ ID NO: 3735632 - DNA, 25 bp, Homo sapien
caggcttttatgcaatccgggagta

SEQ ID NO: 3735633 - DNA, 25 bp, Homo sapien
tcattgacctacacgtccttgtgtg

SEQ ID NO: 3735634 - DNA, 25 bp, Homo sapien
catgatagctataggtcacaaggca

SEQ ID NO: 3735635 - DNA, 25 bp, Homo sapien
caaatccatgagtaatatgttgtgc

SEQ ID NO: 3735636 - DNA, 25 bp, Homo sapien
tataccagcatgaccacaaatccat

SEQ ID NO: 3735637 - DNA, 25 bp, Homo sapien
tggaaggtgagtaaccgaacgccga

SEQ ID NO: 3735638 - DNA, 25 bp, Homo sapien
tgcacattggaaggtgagtaaccga

SEQ ID NO: 3735639 - DNA, 25 bp, Homo sapien
tgtgatgcgtccaatggtcccattg

SEQ ID NO: 3735640 - DNA, 25 bp, Homo sapien
ctgtgatgcgtccaatggtcccatt

SEQ ID NO: 3735641 - DNA, 25 bp, Homo sapien
gggtccaatcggactaattcaggtg

SEQ ID NO: 3735642 - DNA, 25 bp, Homo sapien
ggcaccatccgtgtgaattacatcc

SEQ ID NO: 3735643 - DNA, 25 bp, Homo sapien
acaaatttggcatcgctggggtcca

SEQ ID NO: 3735644 - DNA, 25 bp, Homo sapien
tcaggtgtgccctgaaagcaaggtt

SEQ ID NO: 3735645 - DNA, 25 bp, Homo sapien
ggcccacgacttggctcattccaaa

SEQ ID NO: 3735646 - DNA, 25 bp, Homo sapien
tcccagattccgtctatgtccacaa

SEQ ID NO: 3735647 - DNA, 25 bp, Homo sapien
gagagagaatgttctttttacatcc

SEQ ID NO: 3735648 - DNA, 25 bp, Homo sapien
tggaaagaaatctaggtggcccacg

SEQ ID NO: 3735649 - DNA, 25 bp, Homo sapien
ttacaggccgcaaagtctcgagtcc

SEQ ID NO: 3735650 - DNA, 25 bp, Homo sapien
tagcttcttaagtgattacaggccg

SEQ ID NO: 3735651 - DNA, 25 bp, Homo sapien
cagtgaagacgttgtaagaggcaca

SEQ ID NO: 3735652 - DNA, 25 bp, Homo sapien
ccatcagggttgacgatgctatcag

SEQ ID NO: 3735653 - DNA, 25 bp, Homo sapien
agaaaatgccccagctagcctaagg

SEQ ID NO: 3735654 - DNA, 25 bp, Homo sapien
cagggctactctacagtgaaggcaa

SEQ ID NO: 3735655 - DNA, 25 bp, Homo sapien
aaccaagttggcaggacaagtgtcc

SEQ ID NO: 3735656 - DNA, 25 bp, Homo sapien
aaatccaggtgttgcctaagccagc

SEQ ID NO: 3735657 - DNA, 25 bp, Homo sapien
gccgaggctgcactattgcacttaa

SEQ ID NO: 3735658 - DNA, 25 bp, Homo sapien
cacttaagccttgggcaagagagca

SEQ ID NO: 3735659 - DNA, 25 bp, Homo sapien
aaaaatctacaacgagccgggcgtg

SEQ ID NO: 3735660 - DNA, 25 bp, Homo sapien
gggactttaatagtgtctcagcagc

SEQ ID NO: 3735661 - DNA, 25 bp, Homo sapien
tccacttggacaagggaaacacttg

SEQ ID NO: 3735662 - DNA, 25 bp, Homo sapien
ctggcatcaccagtgtctagataaa

SEQ ID NO: 3735663 - DNA, 25 bp, Homo sapien
tttcccaggatatctatcagcatag

SEQ ID NO: 3735664 - DNA, 25 bp, Homo sapien
agcatagtgacccatctgtgggcag

SEQ ID NO: 3735665 - DNA, 25 bp, Homo sapien
tggtgctagccaatagtttgccatt

SEQ ID NO: 3735666 - DNA, 25 bp, Homo sapien
tcaagccaagggactaaggaataca

SEQ ID NO: 3735667 - DNA, 25 bp, Homo sapien
ttagagataggcagagcaaattggg

SEQ ID NO: 3735668 - DNA, 25 bp, Homo sapien
tttcatagatcaccaaattttaggg

SEQ ID NO: 3735669 - DNA, 25 bp, Homo sapien
atttccgaacaaagaaactagtatg

SEQ ID NO: 3735670 - DNA, 25 bp, Homo sapien
aacaaagaaactagtatgtgtcctg

SEQ ID NO: 3735671 - DNA, 25 bp, Homo sapien
ttgaaaatttcatactgcttagagt

SEQ ID NO: 3735672 - DNA, 25 bp, Homo sapien
catactgcttagagtttcctttatt

SEQ ID NO: 3735673 - DNA, 25 bp, Homo sapien
caaattcattggaatgagtactatc

SEQ ID NO: 3735674 - DNA, 25 bp, Homo sapien
tcattggaatgagtactatctggtt

SEQ ID NO: 3735675 - DNA, 25 bp, Homo sapien
ctgagtcaaattcattggaatgagt

SEQ ID NO: 3735676 - DNA, 25 bp, Homo sapien
tgagtactatctggtttgagagtgc

SEQ ID NO: 3735677 - DNA, 25 bp, Homo sapien
agttgggttgatcacattgttatac

SEQ ID NO: 3735678 - DNA, 25 bp, Homo sapien
ttaaccatctgcaagtccccaacat

SEQ ID NO: 3735679 - DNA, 25 bp, Homo sapien
acatttgtctccactataatcttgg

SEQ ID NO: 3735680 - DNA, 25 bp, Homo sapien
gatgctcccactctaggtaaagttg

SEQ ID NO: 3735681 - DNA, 25 bp, Homo sapien
atctatcatgaattgatcaaagctg

SEQ ID NO: 3735682 - DNA, 25 bp, Homo sapien
aatttttgatgctcaactggtacat

SEQ ID NO: 3735683 - DNA, 25 bp, Homo sapien
tcaaaatctgaatcacttcggatct

SEQ ID NO: 3735684 - DNA, 25 bp, Homo sapien
taatggaactattcctaaagtctaa

SEQ ID NO: 3735685 - DNA, 25 bp, Homo sapien
tctgaatcacttcggatctcaagca

SEQ ID NO: 3735686 - DNA, 25 bp, Homo sapien
tactctaagatgttgtttcactgcc

SEQ ID NO: 3735687 - DNA, 25 bp, Homo sapien
ggtataagaaccttccaatagtata

SEQ ID NO: 3735688 - DNA, 25 bp, Homo sapien
ttagtgttaacctgctggtgaggaa

SEQ ID NO: 3735689 - DNA, 25 bp, Homo sapien
taacttatcacaccttcaagggaaa

SEQ ID NO: 3735690 - DNA, 25 bp, Homo sapien
ctcctagtctgagggaagggcgcac

SEQ ID NO: 3735691 - DNA, 25 bp, Homo sapien
gctgtcagtagacgccccaaagaaa

SEQ ID NO: 3735692 - DNA, 25 bp, Homo sapien
gaaatcagcccagtgtataaagtct

SEQ ID NO: 3735693 - DNA, 25 bp, Homo sapien
tgacagtgaggacaatctatgcccc

SEQ ID NO: 3735694 - DNA, 25 bp, Homo sapien
ggtttctggactacagaagttgaac

SEQ ID NO: 3735695 - DNA, 25 bp, Homo sapien
cggtgtgagggtgagcagaacttcc

SEQ ID NO: 3735696 - DNA, 25 bp, Homo sapien
tgtgagggtgagcagaacttcctcc

SEQ ID NO: 3735697 - DNA, 25 bp, Homo sapien
agggtgagcagaacttcctccctga

SEQ ID NO: 3735698 - DNA, 25 bp, Homo sapien
tgagggtgagcagaacttcctccct

SEQ ID NO: 3735699 - DNA, 25 bp, Homo sapien
tttattagaagtcaattcattggtc

SEQ ID NO: 3735700 - DNA, 25 bp, Homo sapien
aattcattggtcaaataacagtagt

SEQ ID NO: 3735701 - DNA, 25 bp, Homo sapien
tcattggtcaaataacagtagtctc

SEQ ID NO: 3735702 - DNA, 25 bp, Homo sapien
ttttattagaagtcaattcattggt

SEQ ID NO: 3735703 - DNA, 25 bp, Homo sapien
cactgaaagagtccagagtagcagc

SEQ ID NO: 3735704 - DNA, 25 bp, Homo sapien
ctgaaagagtccagagtagcagcat

SEQ ID NO: 3735705 - DNA, 25 bp, Homo sapien
gcactgaaagagtccagagtagcag

SEQ ID NO: 3735706 - DNA, 25 bp, Homo sapien
cagcactgaaagagtccagagtagc

SEQ ID NO: 3735707 - DNA, 25 bp, Homo sapien
aagcacctgtgctgttagccatgca

SEQ ID NO: 3735708 - DNA, 25 bp, Homo sapien
catccacgtcatgccttgaattcgg

SEQ ID NO: 3735709 - DNA, 25 bp, Homo sapien
gccctcttgactattgaacagtgaa

SEQ ID NO: 3735710 - DNA, 25 bp, Homo sapien
gaattcggctgccatagccctcttg

SEQ ID NO: 3735711 - DNA, 25 bp, Homo sapien
cggagagcttaagtttcatggaaag

SEQ ID NO: 3735712 - DNA, 25 bp, Homo sapien
tccatccttgctgtactgaaggtca

SEQ ID NO: 3735713 - DNA, 25 bp, Homo sapien
aaaacccatgtatctccatccttgc

SEQ ID NO: 3735714 - DNA, 25 bp, Homo sapien
ggctttgggccaatataactctggg

SEQ ID NO: 3735715 - DNA, 25 bp, Homo sapien
gatgaccgctggtagatctcaccga

SEQ ID NO: 3735716 - DNA, 25 bp, Homo sapien
cagacaaaccctggtgccagttgga

SEQ ID NO: 3735717 - DNA, 25 bp, Homo sapien
ctgtctgtgggaagtgaactcagct

SEQ ID NO: 3735718 - DNA, 25 bp, Homo sapien
cattaggtccaaaagtctgcgctcc

SEQ ID NO: 3735719 - DNA, 25 bp, Homo sapien
atgtgtagatgaagcccaaatatct

SEQ ID NO: 3735720 - DNA, 25 bp, Homo sapien
gaaatctctgattaagaaaacttct

SEQ ID NO: 3735721 - DNA, 25 bp, Homo sapien
tgggcatctgagctttggagaaaaa

SEQ ID NO: 3735722 - DNA, 25 bp, Homo sapien
ctgcaattagttgaaagtaaagaga

SEQ ID NO: 3735723 - DNA, 25 bp, Homo sapien
ctctttcgaagactaggaatactgg

SEQ ID NO: 3735724 - DNA, 25 bp, Homo sapien
tatattccagccttatcatttggac

SEQ ID NO: 3735725 - DNA, 25 bp, Homo sapien
gatcgagtgtccagccctttctaaa

SEQ ID NO: 3735726 - DNA, 25 bp, Homo sapien
atgttccctcccaccggatcgagtg

SEQ ID NO: 3735727 - DNA, 25 bp, Homo sapien
tttggacactacttcaagaaaacag

SEQ ID NO: 3735728 - DNA, 25 bp, Homo sapien
ggaaaggagttgcaaaggtggctta

SEQ ID NO: 3735729 - DNA, 25 bp, Homo sapien
gaaaggagttgcaaaggtggcttac

SEQ ID NO: 3735730 - DNA, 25 bp, Homo sapien
tacaataaatttaaacataattcag

SEQ ID NO: 3735731 - DNA, 25 bp, Homo sapien
caataaatttaaacataattcagtc

SEQ ID NO: 3735732 - DNA, 25 bp, Homo sapien
ataaatttaaacataattcagtctc

SEQ ID NO: 3735733 - DNA, 25 bp, Homo sapien
aataaatttaaacataattcagtct

SEQ ID NO: 3735734 - DNA, 25 bp, Homo sapien
gaaaagtgtgattgtccagaagatc

SEQ ID NO: 3735735 - DNA, 25 bp, Homo sapien
gctcccagcaggaaaagtgtgattg

SEQ ID NO: 3735736 - DNA, 25 bp, Homo sapien
tttggctgctcccagcaggaaaagt

SEQ ID NO: 3735737 - DNA, 25 bp, Homo sapien
ccagcaggaaaagtgtgattgtcca

SEQ ID NO: 3735738 - DNA, 25 bp, Homo sapien
aaagcacccgaggtcctcatagcaa

SEQ ID NO: 3735739 - DNA, 25 bp, Homo sapien
gtgtcagaaaagcacccgaggtcct

SEQ ID NO: 3735740 - DNA, 25 bp, Homo sapien
cccgaggtcctcatagcaaacttct

SEQ ID NO: 3735741 - DNA, 25 bp, Homo sapien
agaaaagcacccgaggtcctcatag

SEQ ID NO: 3735742 - DNA, 25 bp, Homo sapien
caggaagcgggtgccgatcttctca

SEQ ID NO: 3735743 - DNA, 25 bp, Homo sapien
ttcattggtgtacagcaggaagcgg

SEQ ID NO: 3735744 - DNA, 25 bp, Homo sapien
gtgccgatcttctcagggctccagg

SEQ ID NO: 3735745 - DNA, 25 bp, Homo sapien
gtttgggttttcattggtgtacagc

SEQ ID NO: 3735746 - DNA, 25 bp, Homo sapien
aatttgatgcctcaattgttgatgg

SEQ ID NO: 3735747 - DNA, 25 bp, Homo sapien
cctttgtctatgaagccatggatga

SEQ ID NO: 3735748 - DNA, 25 bp, Homo sapien
tctcatctcctttgtctatgaagcc

SEQ ID NO: 3735749 - DNA, 25 bp, Homo sapien
tgaaaatttgatgcctcaattgttg

SEQ ID NO: 3735750 - DNA, 25 bp, Homo sapien
tcagtgtgcagatgtagtgcggaaa

SEQ ID NO: 3735751 - DNA, 25 bp, Homo sapien
gtaggagtacttttctaacagcaaa

SEQ ID NO: 3735752 - DNA, 25 bp, Homo sapien
tagcagaagtgttggcctcagctgg

SEQ ID NO: 3735753 - DNA, 25 bp, Homo sapien
gcataaagttacctaatatgtaaag

SEQ ID NO: 3735754 - DNA, 25 bp, Homo sapien
tcaattaagtggtcacagcaacaca

SEQ ID NO: 3735755 - DNA, 25 bp, Homo sapien
agtccctcgcttataggatacaaag

SEQ ID NO: 3735756 - DNA, 25 bp, Homo sapien
cagcaacacatgtcagcctctcagg

SEQ ID NO: 3735757 - DNA, 25 bp, Homo sapien
tacaaagtaccctcactacaaatgg

SEQ ID NO: 3735758 - DNA, 25 bp, Homo sapien
caagagcctgccaccacaacaggct

SEQ ID NO: 3735759 - DNA, 25 bp, Homo sapien
aagagcctgccaccacaacaggctg

SEQ ID NO: 3735760 - DNA, 25 bp, Homo sapien
actacaagagcctgccaccacaaca

SEQ ID NO: 3735761 - DNA, 25 bp, Homo sapien
tacaagagcctgccaccacaacagg

SEQ ID NO: 3735762 - DNA, 25 bp, Homo sapien
ggtgccaagagtgaaatgcctgtta

SEQ ID NO: 3735763 - DNA, 25 bp, Homo sapien
gaaaaatcgattgaactagtctcca

SEQ ID NO: 3735764 - DNA, 25 bp, Homo sapien
cctgttaaaccaagggcaagtgcag

SEQ ID NO: 3735765 - DNA, 25 bp, Homo sapien
taatgataggacaggaaaggtgcca

SEQ ID NO: 3735766 - DNA, 25 bp, Homo sapien
cacagtacttcatggagtagacaca

SEQ ID NO: 3735767 - DNA, 25 bp, Homo sapien
tcttcctggatgtcaaaggagctga

SEQ ID NO: 3735768 - DNA, 25 bp, Homo sapien
tgatcacatgcacagagatagtggg

SEQ ID NO: 3735769 - DNA, 25 bp, Homo sapien
tgccaggcagtacatattaccagct

SEQ ID NO: 3735770 - DNA, 25 bp, Homo sapien
gaaaagtcttaggtgcaatctccgg

SEQ ID NO: 3735771 - DNA, 25 bp, Homo sapien
taaactagactctgttagggaatcc

SEQ ID NO: 3735772 - DNA, 25 bp, Homo sapien
tcctttcaggctcttggcgatgccc

SEQ ID NO: 3735773 - DNA, 25 bp, Homo sapien
gattaattggaagctggctactctc

SEQ ID NO: 3735774 - DNA, 25 bp, Homo sapien
gggagataatgggagcaggggaaac

SEQ ID NO: 3735775 - DNA, 25 bp, Homo sapien
ggggttggggagataatgggagcag

SEQ ID NO: 3735776 - DNA, 25 bp, Homo sapien
gtggggttggggagataatgggagc

SEQ ID NO: 3735777 - DNA, 25 bp, Homo sapien
gagatagtggggttggggagataat

SEQ ID NO: 3735778 - DNA, 25 bp, Homo sapien
gcccttcttccagtccacgcagatg

SEQ ID NO: 3735779 - DNA, 25 bp, Homo sapien
cacgttgttggcagcctgtgtgtag

SEQ ID NO: 3735780 - DNA, 25 bp, Homo sapien
gggcgcccaccactcgcacgttgtt

SEQ ID NO: 3735781 - DNA, 25 bp, Homo sapien
caagaggatgtcgagcatctgggcc

SEQ ID NO: 3735782 - DNA, 25 bp, Homo sapien
tccactggcgtgtcattatgaaggc

SEQ ID NO: 3735783 - DNA, 25 bp, Homo sapien
gatctcagagacgttcacccaaagg

SEQ ID NO: 3735784 - DNA, 25 bp, Homo sapien
gatcgcactctactggcattgcaag

SEQ ID NO: 3735785 - DNA, 25 bp, Homo sapien
catgccaattgcacgtactgtccgt

SEQ ID NO: 3735786 - DNA, 25 bp, Homo sapien
ccaggctgtggccaatgaggtgaac

SEQ ID NO: 3735787 - DNA, 25 bp, Homo sapien
ttggaaggggggtagctatactctg

SEQ ID NO: 3735788 - DNA, 25 bp, Homo sapien
gtggccaatgaggtgaactttggaa

SEQ ID NO: 3735789 - DNA, 25 bp, Homo sapien
gcctggagtcttgcttcctgcctct

SEQ ID NO: 3735790 - DNA, 25 bp, Homo sapien
gaggcgaacaccaccagaaaaccag

SEQ ID NO: 3735791 - DNA, 25 bp, Homo sapien
ctgttgagaggcgaacaccaccaga

SEQ ID NO: 3735792 - DNA, 25 bp, Homo sapien
gtgcccagtcctgttgagaggcgaa

SEQ ID NO: 3735793 - DNA, 25 bp, Homo sapien
tgccgtgaaggtggcgcatgagctt

SEQ ID NO: 3735794 - DNA, 25 bp, Homo sapien
ggagctgcatccgtgtgaatcacat

SEQ ID NO: 3735795 - DNA, 25 bp, Homo sapien
ttcaggagtactctcgaaacttgct

SEQ ID NO: 3735796 - DNA, 25 bp, Homo sapien
ggatcaagtcgcacctcttcaggag

SEQ ID NO: 3735797 - DNA, 25 bp, Homo sapien
gtgtgaatcacatcaacaaagtcag

SEQ ID NO: 3735798 - DNA, 25 bp, Homo sapien
ttgtgcgtgctcacagctggagcat

SEQ ID NO: 3735799 - DNA, 25 bp, Homo sapien
ttcatggttaaaacacagttgtgcg

SEQ ID NO: 3735800 - DNA, 25 bp, Homo sapien
aaacacagttgtgcgtgctcacagc

SEQ ID NO: 3735801 - DNA, 25 bp, Homo sapien
gctttttgtcatgcaggactttcat

SEQ ID NO: 3735802 - DNA, 25 bp, Homo sapien
gacccatctgttggttcgttccaaa

SEQ ID NO: 3735803 - DNA, 25 bp, Homo sapien
gcccagatgccatctagatccacga

SEQ ID NO: 3735804 - DNA, 25 bp, Homo sapien
tagatccacgatctgagacagggca

SEQ ID NO: 3735805 - DNA, 25 bp, Homo sapien
ggcattcttcttgcatcccggcatg

SEQ ID NO: 3735806 - DNA, 25 bp, Homo sapien
cagagtgtagcctcagatttacagc

SEQ ID NO: 3735807 - DNA, 25 bp, Homo sapien
tcagtcttcctaggaggtgggtacc

SEQ ID NO: 3735808 - DNA, 25 bp, Homo sapien
caattaacatatagagggtgctttc

SEQ ID NO: 3735809 - DNA, 25 bp, Homo sapien
aagctggtaattaaacccatgccca

SEQ ID NO: 3735810 - DNA, 25 bp, Homo sapien
tcttaggtgattgcaagccacaaag

SEQ ID NO: 3735811 - DNA, 25 bp, Homo sapien
gtgattgcaagccacaaagtcccgg

SEQ ID NO: 3735812 - DNA, 25 bp, Homo sapien
ttgcaagccacaaagtcccgggttc

SEQ ID NO: 3735813 - DNA, 25 bp, Homo sapien
taggtgattgcaagccacaaagtcc

SEQ ID NO: 3735814 - DNA, 25 bp, Homo sapien
atgcagcaaacccatcgggattgag

SEQ ID NO: 3735815 - DNA, 25 bp, Homo sapien
ggattgaggatgctttccaagtaat

SEQ ID NO: 3735816 - DNA, 25 bp, Homo sapien
tcaaaggacttgtaggaagtgcagg

SEQ ID NO: 3735817 - DNA, 25 bp, Homo sapien
gactcaaaggacttgtaggaagtgc

SEQ ID NO: 3735818 - DNA, 25 bp, Homo sapien
ctctgagggtcaatgcaaaacgtgt

SEQ ID NO: 3735819 - DNA, 25 bp, Homo sapien
tagtgagaaggcattgcaaatccca

SEQ ID NO: 3735820 - DNA, 25 bp, Homo sapien
gatgcttgttgctcgaggcaggaca

SEQ ID NO: 3735821 - DNA, 25 bp, Homo sapien
ttaagctagattcagaggttgcctc

SEQ ID NO: 3735822 - DNA, 25 bp, Homo sapien
ttgtcctgccagcaaatttatcagc

SEQ ID NO: 3735823 - DNA, 25 bp, Homo sapien
ttgatctggacacgggaagcacttg

SEQ ID NO: 3735824 - DNA, 25 bp, Homo sapien
agcatagtgacccatctgtgggcat

SEQ ID NO: 3735825 - DNA, 25 bp, Homo sapien
ggcatccttgatctggacacgggaa

SEQ ID NO: 3735826 - DNA, 25 bp, Homo sapien
atactgtactggtgagtgtttccct

SEQ ID NO: 3735827 - DNA, 25 bp, Homo sapien
tactggtgagtgtttcccttatttc

SEQ ID NO: 3735828 - DNA, 25 bp, Homo sapien
aactttgatctgaccagtggctgtt

SEQ ID NO: 3735829 - DNA, 25 bp, Homo sapien
tttgatctgaccagtggctgttctt

SEQ ID NO: 3735830 - DNA, 25 bp, Homo sapien
cacattgttattccaaagaaacttg

SEQ ID NO: 3735831 - DNA, 25 bp, Homo sapien
gggagggttggatttatcacattgt

SEQ ID NO: 3735832 - DNA, 25 bp, Homo sapien
ttttgcacagtgatcttggtggcac

SEQ ID NO: 3735833 - DNA, 25 bp, Homo sapien
ggttgagcctggtttgagaatcccc

SEQ ID NO: 3735834 - DNA, 25 bp, Homo sapien
cagggcgtgagggtgagcagcgtgt

SEQ ID NO: 3735835 - DNA, 25 bp, Homo sapien
ccgcactgtgtcttcgctacagaag

SEQ ID NO: 3735836 - DNA, 25 bp, Homo sapien
tgtgtcttcgctacagaagttgtac

SEQ ID NO: 3735837 - DNA, 25 bp, Homo sapien
cgtgagggtgagcagcgtgtcttcc

SEQ ID NO: 3735838 - DNA, 25 bp, Homo sapien
ttagtgtgaacgcagcagcctcgtc

SEQ ID NO: 3735839 - DNA, 25 bp, Homo sapien
tattagtgtgaacgcagcagcctcg

SEQ ID NO: 3735840 - DNA, 25 bp, Homo sapien
gcaccagtggattttattagtgtga

SEQ ID NO: 3735841 - DNA, 25 bp, Homo sapien
ttttattagtgtgaacgcagcagcc

SEQ ID NO: 3735842 - DNA, 25 bp, Homo sapien
tcatcaccgcggtttaccgagcact

SEQ ID NO: 3735843 - DNA, 25 bp, Homo sapien
aaggtcgctcctttgatcctcgcca

SEQ ID NO: 3735844 - DNA, 25 bp, Homo sapien
ctgaaactgacagagaaccagaggg

SEQ ID NO: 3735845 - DNA, 25 bp, Homo sapien
ggtttaccgagcactcgccttgcac

SEQ ID NO: 3735846 - DNA, 25 bp, Homo sapien
tagatggccttgctcgccttatagc

SEQ ID NO: 3735847 - DNA, 25 bp, Homo sapien
gctcgccttatagcacactgactta

SEQ ID NO: 3735848 - DNA, 25 bp, Homo sapien
gcacactgacttaaggctagagcct

SEQ ID NO: 3735849 - DNA, 25 bp, Homo sapien
cacactccttagatggccttgctcg

SEQ ID NO: 3735850 - DNA, 25 bp, Homo sapien
cagaagaacctaggtgaataaccag

SEQ ID NO: 3735851 - DNA, 25 bp, Homo sapien
gaacctaggtgaataaccaggtgcc

SEQ ID NO: 3735852 - DNA, 25 bp, Homo sapien
aacctaggtgaataaccaggtgcca

SEQ ID NO: 3735853 - DNA, 25 bp, Homo sapien
aagaacctaggtgaataaccaggtg

SEQ ID NO: 3735854 - DNA, 25 bp, Homo sapien
cggggcaggatagataaggcactgc

SEQ ID NO: 3735855 - DNA, 25 bp, Homo sapien
gccggggcaggatagataaggcact

SEQ ID NO: 3735856 - DNA, 25 bp, Homo sapien
ccggggcaggatagataaggcactg

SEQ ID NO: 3735857 - DNA, 25 bp, Homo sapien
ggggcaggatagataaggcactgca

SEQ ID NO: 3735858 - DNA, 25 bp, Homo sapien
tataaccaggctttatcctttggac

SEQ ID NO: 3735859 - DNA, 25 bp, Homo sapien
taaccaggctttatcctttggactc

SEQ ID NO: 3735860 - DNA, 25 bp, Homo sapien
ttataaccaggctttatcctttgga

SEQ ID NO: 3735861 - DNA, 25 bp, Homo sapien
tggccttttataaccaggctttatc

SEQ ID NO: 3735862 - DNA, 25 bp, Homo sapien
acagacccatgcgcacagtgaggct

SEQ ID NO: 3735863 - DNA, 25 bp, Homo sapien
gacccatgcgcacagtgaggctggc

SEQ ID NO: 3735864 - DNA, 25 bp, Homo sapien
cagacccatgcgcacagtgaggctg

SEQ ID NO: 3735865 - DNA, 25 bp, Homo sapien
agacccatgcgcacagtgaggctgg

SEQ ID NO: 3735866 - DNA, 25 bp, Homo sapien
ctctgactgtggccagcaggagaag

SEQ ID NO: 3735867 - DNA, 25 bp, Homo sapien
caggagaaggccgagggtccaaggg

SEQ ID NO: 3735868 - DNA, 25 bp, Homo sapien
ggccagcaggagaaggccgagggtc

SEQ ID NO: 3735869 - DNA, 25 bp, Homo sapien
tctgactgtggccagcaggagaagg

SEQ ID NO: 3735870 - DNA, 25 bp, Homo sapien
tctccctaaaggaatggtgacagca

SEQ ID NO: 3735871 - DNA, 25 bp, Homo sapien
tgtcactttctccctaaaggaatgg

SEQ ID NO: 3735872 - DNA, 25 bp, Homo sapien
ctttctccctaaaggaatggtgaca

SEQ ID NO: 3735873 - DNA, 25 bp, Homo sapien
tccctaaaggaatggtgacagcatc

SEQ ID NO: 3735874 - DNA, 25 bp, Homo sapien
ctcttaagtggagagcaggaaagtg

SEQ ID NO: 3735875 - DNA, 25 bp, Homo sapien
tctcttaagtggagagcaggaaagt

SEQ ID NO: 3735876 - DNA, 25 bp, Homo sapien
cctgtgtttttgggactcgagtaca

SEQ ID NO: 3735877 - DNA, 25 bp, Homo sapien
actcgagtacagggggctgaaaagc

SEQ ID NO: 3735878 - DNA, 25 bp, Homo sapien
aagaagcaacgtcatatccatacag

SEQ ID NO: 3735879 - DNA, 25 bp, Homo sapien
gaaagaagcaacgtcatatccatac

SEQ ID NO: 3735880 - DNA, 25 bp, Homo sapien
ctggaaagaagcaacgtcatatcca

SEQ ID NO: 3735881 - DNA, 25 bp, Homo sapien
gaagcaacgtcatatccatacagga

SEQ ID NO: 3735882 - DNA, 25 bp, Homo sapien
gagccacaaacaggacatgtgtgaa

SEQ ID NO: 3735883 - DNA, 25 bp, Homo sapien
aaaagcagccaagttgtccgtagca

SEQ ID NO: 3735884 - DNA, 25 bp, Homo sapien
ctgcccatggtttttcatcagaaaa

SEQ ID NO: 3735885 - DNA, 25 bp, Homo sapien
ctgaagggttcctgcccatggtttt

SEQ ID NO: 3735886 - DNA, 25 bp, Homo sapien
aaagcagccaagttgtccgtagcag

SEQ ID NO: 3735887 - DNA, 25 bp, Homo sapien
gaagaaagcgggtgtcaatgtcctc

SEQ ID NO: 3735888 - DNA, 25 bp, Homo sapien
ccctttccaagccacgagtctatta

SEQ ID NO: 3735889 - DNA, 25 bp, Homo sapien
gaattgatatcacagcttcaatgcc

SEQ ID NO: 3735890 - DNA, 25 bp, Homo sapien
caagccacgagtctattagagccag

SEQ ID NO: 3735891 - DNA, 25 bp, Homo sapien
tattagagccagtttcagaattgat

SEQ ID NO: 3735892 - DNA, 25 bp, Homo sapien
ttgcacatgtccgatggccagctgt

SEQ ID NO: 3735893 - DNA, 25 bp, Homo sapien
gtcctccgccttgtctaagaagcca

SEQ ID NO: 3735894 - DNA, 25 bp, Homo sapien
tggaagtttgaagcctcaatggtgt

SEQ ID NO: 3735895 - DNA, 25 bp, Homo sapien
taagaagccatggatgatgaagcgt

SEQ ID NO: 3735896 - DNA, 25 bp, Homo sapien
gcttgggtgtacattgcccgggacc

SEQ ID NO: 3735897 - DNA, 25 bp, Homo sapien
tgtattaagaaagctgtctccgccc

SEQ ID NO: 3735898 - DNA, 25 bp, Homo sapien
tattaagaaagctgtctccgcccca

SEQ ID NO: 3735899 - DNA, 25 bp, Homo sapien
caacaacccgaatgttttgcacggc

SEQ ID NO: 3735900 - DNA, 25 bp, Homo sapien
acaggacagggcccaggcagggttt

SEQ ID NO: 3735901 - DNA, 25 bp, Homo sapien
cacaggacagggcccaggcagggtt

SEQ ID NO: 3735902 - DNA, 25 bp, Homo sapien
ccacaggacagggcccaggcagggt

SEQ ID NO: 3735903 - DNA, 25 bp, Homo sapien
caggacagggcccaggcagggtttt

SEQ ID NO: 3735904 - DNA, 25 bp, Homo sapien
ctccctgcccctctctgacccctac

SEQ ID NO: 3735905 - DNA, 25 bp, Homo sapien
gctgcctctccatgccacgtggtac

SEQ ID NO: 3735906 - DNA, 25 bp, Homo sapien
ccatgcccacgggtccccaggctgc

SEQ ID NO: 3735907 - DNA, 25 bp, Homo sapien
gcccacgggtccccaggctgcctct

SEQ ID NO: 3735908 - DNA, 25 bp, Homo sapien
aggctgcctctccatgccacgtggt

SEQ ID NO: 3735909 - DNA, 25 bp, Homo sapien
gcacgggtagagtgggccctatctc

SEQ ID NO: 3735910 - DNA, 25 bp, Homo sapien
gggtatggcctgtctgggcaagcac

SEQ ID NO: 3735911 - DNA, 25 bp, Homo sapien
cctcccgatagatcctgcagaaagg

SEQ ID NO: 3735912 - DNA, 25 bp, Homo sapien
tccctcgtgggctggcgaaggatga

SEQ ID NO: 3735913 - DNA, 25 bp, Homo sapien
atagcgtgtcaggtcccacagcacc

SEQ ID NO: 3735914 - DNA, 25 bp, Homo sapien
agggcgaccccgcttcctatttgca

SEQ ID NO: 3735915 - DNA, 25 bp, Homo sapien
ctgcggagggatagcgtgtcaggtc

SEQ ID NO: 3735916 - DNA, 25 bp, Homo sapien
gggcgaccccgcttcctatttgcag

SEQ ID NO: 3735917 - DNA, 25 bp, Homo sapien
gacatgcacgtcctcaaggctgtac

SEQ ID NO: 3735918 - DNA, 25 bp, Homo sapien
ggccgatgacatgcacgtcctcaag

SEQ ID NO: 3735919 - DNA, 25 bp, Homo sapien
ggctgtggccgatgacatgcacgtc

SEQ ID NO: 3735920 - DNA, 25 bp, Homo sapien
gatgacatgcacgtcctcaaggctg

SEQ ID NO: 3735921 - DNA, 25 bp, Homo sapien
taaggccggtcatcacaaaaaatcg

SEQ ID NO: 3735922 - DNA, 25 bp, Homo sapien
catcacaaaaaatcgggtccccagg

SEQ ID NO: 3735923 - DNA, 25 bp, Homo sapien
tgagatacagtctccctttattacc

SEQ ID NO: 3735924 - DNA, 25 bp, Homo sapien
tttaaatttaaggccggtcatcaca

SEQ ID NO: 3735925 - DNA, 25 bp, Homo sapien
ccaggtcaaatgtctgccctctctg

SEQ ID NO: 3735926 - DNA, 25 bp, Homo sapien
gagtcgttgtgaaaccctcatgaag

SEQ ID NO: 3735927 - DNA, 25 bp, Homo sapien
tgccctagttctactccaggtcaaa

SEQ ID NO: 3735928 - DNA, 25 bp, Homo sapien
tctgtatccttatcgggaaagcagg

SEQ ID NO: 3735929 - DNA, 25 bp, Homo sapien
ctttgtattatgctgtccccaggtc

SEQ ID NO: 3735930 - DNA, 25 bp, Homo sapien
cctcatggttaaatggaaaatctaa

SEQ ID NO: 3735931 - DNA, 25 bp, Homo sapien
cacctcctcatggttaaatggaaaa

SEQ ID NO: 3735932 - DNA, 25 bp, Homo sapien
tccactttgtattatgctgtcccca

SEQ ID NO: 3735933 - DNA, 25 bp, Homo sapien
atggatccaaccgaacctcctcagg

SEQ ID NO: 3735934 - DNA, 25 bp, Homo sapien
cacatccacaaacacggcgtcagat

SEQ ID NO: 3735935 - DNA, 25 bp, Homo sapien
gaagaatctgtgtgaatcacatcca

SEQ ID NO: 3735936 - DNA, 25 bp, Homo sapien
ggaaggaactatgggagaagaatct

SEQ ID NO: 3735937 - DNA, 25 bp, Homo sapien
catcaatatcagtaatggttgaaag

SEQ ID NO: 3735938 - DNA, 25 bp, Homo sapien
catttttcttacatccgggcatttc

SEQ ID NO: 3735939 - DNA, 25 bp, Homo sapien
caatatcagtaatggttgaaaggac

SEQ ID NO: 3735940 - DNA, 25 bp, Homo sapien
gacatttttcttacatccgggcatt

SEQ ID NO: 3735941 - DNA, 25 bp, Homo sapien
tctccccgaacagagcaattgctgt

SEQ ID NO: 3735942 - DNA, 25 bp, Homo sapien
tcagcattatgaaggccagaccatg

SEQ ID NO: 3735943 - DNA, 25 bp, Homo sapien
tttggatctgcaaactggaactaat

SEQ ID NO: 3735944 - DNA, 25 bp, Homo sapien
tccataaacggtggcaaatgtcagc

SEQ ID NO: 3735945 - DNA, 25 bp, Homo sapien
tatgaggtcgcctaatggcagggca

SEQ ID NO: 3735946 - DNA, 25 bp, Homo sapien
caaatcttggcctatgtcctgcagt

SEQ ID NO: 3735947 - DNA, 25 bp, Homo sapien
catgggccgtgctctctcagatgaa

SEQ ID NO: 3735948 - DNA, 25 bp, Homo sapien
cagcaaccagcaagcaagtcaaggc

SEQ ID NO: 3735949 - DNA, 25 bp, Homo sapien
ttcctctttgctatgcagggcacaa

SEQ ID NO: 3735950 - DNA, 25 bp, Homo sapien
cagggcacaaggtaaaagcggtgat

SEQ ID NO: 3735951 - DNA, 25 bp, Homo sapien
taaaagcggtgatggcaaggtggcc

SEQ ID NO: 3735952 - DNA, 25 bp, Homo sapien
gcaggccttccccatcaaccaggct

SEQ ID NO: 3735953 - DNA, 25 bp, Homo sapien
taaaaacagttaccatgccggccca

SEQ ID NO: 3735954 - DNA, 25 bp, Homo sapien
tttttcataagaagccaggatctcc

SEQ ID NO: 3735955 - DNA, 25 bp, Homo sapien
gaaaaccttcgcatgcgtgagtgaa

SEQ ID NO: 3735956 - DNA, 25 bp, Homo sapien
tgttcaaagccccaaatcgcctggt

SEQ ID NO: 3735957 - DNA, 25 bp, Homo sapien
ctactcagggctaggtgactgtgga

SEQ ID NO: 3735958 - DNA, 25 bp, Homo sapien
gaacaactcattctgactaaggaag

SEQ ID NO: 3735959 - DNA, 25 bp, Homo sapien
gatgggtgtcggctcctgaatatct

SEQ ID NO: 3735960 - DNA, 25 bp, Homo sapien
gagtgacatgtcctgacaagcacct

SEQ ID NO: 3735961 - DNA, 25 bp, Homo sapien
ctcctgaaactcatcgtaggaggca

SEQ ID NO: 3735962 - DNA, 25 bp, Homo sapien
tcctgaaactcatcgtaggaggcac

SEQ ID NO: 3735963 - DNA, 25 bp, Homo sapien
tgagtaatactcgaagcttcttagg

SEQ ID NO: 3735964 - DNA, 25 bp, Homo sapien
ctgcttgagtaatactcgaagcttc

SEQ ID NO: 3735965 - DNA, 25 bp, Homo sapien
gttaccactctctcctgtgttcagg

SEQ ID NO: 3735966 - DNA, 25 bp, Homo sapien
cacagcacttgttttccccttaaat

SEQ ID NO: 3735967 - DNA, 25 bp, Homo sapien
tcaggaaaaaggtttgttccacagc

SEQ ID NO: 3735968 - DNA, 25 bp, Homo sapien
tcagctggacaagggaaacacttac

SEQ ID NO: 3735969 - DNA, 25 bp, Homo sapien
cacttttgaaaattattcgcaagaa

SEQ ID NO: 3735970 - DNA, 25 bp, Homo sapien
acttttgaaaattattcgcaagaat

SEQ ID NO: 3735971 - DNA, 25 bp, Homo sapien
ttgaattcctggggcccaggaatta

SEQ ID NO: 3735972 - DNA, 25 bp, Homo sapien
aattgaattcctggggcccaggaat

SEQ ID NO: 3735973 - DNA, 25 bp, Homo sapien
tgaattcctggggcccaggaattaa

SEQ ID NO: 3735974 - DNA, 25 bp, Homo sapien
ttaattgaattcctggggcccagga

SEQ ID NO: 3735975 - DNA, 25 bp, Homo sapien
atacaaagcaatcctgatgtaccca

SEQ ID NO: 3735976 - DNA, 25 bp, Homo sapien
catacaaagcaatcctgatgtaccc

SEQ ID NO: 3735977 - DNA, 25 bp, Homo sapien
cattacttccatacaaagcaatcct

SEQ ID NO: 3735978 - DNA, 25 bp, Homo sapien
ctgaaaatatagacataaaatgtta

SEQ ID NO: 3735979 - DNA, 25 bp, Homo sapien
atatagacataaaatgttatatcag

SEQ ID NO: 3735980 - DNA, 25 bp, Homo sapien
aaatatagacataaaatgttatatc

SEQ ID NO: 3735981 - DNA, 25 bp, Homo sapien
gaaaatatagacataaaatgttata

SEQ ID NO: 3735982 - DNA, 25 bp, Homo sapien
gctcagatagatttatcccacgttt

SEQ ID NO: 3735983 - DNA, 25 bp, Homo sapien
atagcacacgtgtgacttgcatctg

SEQ ID NO: 3735984 - DNA, 25 bp, Homo sapien
aaaatccacatcaatagcacacgtg

SEQ ID NO: 3735985 - DNA, 25 bp, Homo sapien
tatcccacgtttgttccagaggaat

SEQ ID NO: 3735986 - DNA, 25 bp, Homo sapien
ctggattcggctccccttgaccgaa

SEQ ID NO: 3735987 - DNA, 25 bp, Homo sapien
ttctgctttaccaggcagagtccaa

SEQ ID NO: 3735988 - DNA, 25 bp, Homo sapien
tactaacaaaacctgctcaaagagc

SEQ ID NO: 3735989 - DNA, 25 bp, Homo sapien
gaggaaaagattgtcagcatgaggc

SEQ ID NO: 3735990 - DNA, 25 bp, Homo sapien
aagagattgcaagacgttttcttcc

SEQ ID NO: 3735991 - DNA, 25 bp, Homo sapien
ttcttccacagtgtcgctgctacaa

SEQ ID NO: 3735992 - DNA, 25 bp, Homo sapien
agtgtcgctgctacaaaaattatac

SEQ ID NO: 3735993 - DNA, 25 bp, Homo sapien
ttaacaagggtaaagagattgcaag

SEQ ID NO: 3735994 - DNA, 25 bp, Homo sapien
agcagctttgttgaggaggtccttg

SEQ ID NO: 3735995 - DNA, 25 bp, Homo sapien
ctggtggccagtatcaggctcagga

SEQ ID NO: 3735996 - DNA, 25 bp, Homo sapien
cagacaggtacaggccctgtgagca

SEQ ID NO: 3735997 - DNA, 25 bp, Homo sapien
ttaagtatgagctgcgcacagggca

SEQ ID NO: 3735998 - DNA, 25 bp, Homo sapien
ggtccttatcagtagtgccatttgg

SEQ ID NO: 3735999 - DNA, 25 bp, Homo sapien
tggctcccgcaggatgctgcccggg

SEQ ID NO: 3736000 - DNA, 25 bp, Homo sapien
caaatgtagtcttggctggctcccg

SEQ ID NO: 3736001 - DNA, 25 bp, Homo sapien
gctgcccgggtcctggctttggtcc

SEQ ID NO: 3736002 - DNA, 25 bp, Homo sapien
gggaaggtgtcttattgcagaaaca

SEQ ID NO: 3736003 - DNA, 25 bp, Homo sapien
gaaggtgtcttattgcagaaacagc

SEQ ID NO: 3736004 - DNA, 25 bp, Homo sapien
gatgtttcagtggagccccctgaag

SEQ ID NO: 3736005 - DNA, 25 bp, Homo sapien
agagggaaggtgtcttattgcagaa

SEQ ID NO: 3736006 - DNA, 25 bp, Homo sapien
gcctttgtgctccaccgggtgagcg

SEQ ID NO: 3736007 - DNA, 25 bp, Homo sapien
ggaaggcagggatcctgggcggccg

SEQ ID NO: 3736008 - DNA, 25 bp, Homo sapien
gcagaggccaagtgggcaccggata

SEQ ID NO: 3736009 - DNA, 25 bp, Homo sapien
agtgggcaccggatagcgccagccc

SEQ ID NO: 3736010 - DNA, 25 bp, Homo sapien
cgcagatgcccgactttacaccggg

SEQ ID NO: 3736011 - DNA, 25 bp, Homo sapien
gcagtgtctacacccgcaaaaacgc

SEQ ID NO: 3736012 - DNA, 25 bp, Homo sapien
gctccgaggccagatgtttactgcg

SEQ ID NO: 3736013 - DNA, 25 bp, Homo sapien
cgctttgacttagagccctccgcat

SEQ ID NO: 3736014 - DNA, 25 bp, Homo sapien
tgtcccggccacctgaaaatctgcc

SEQ ID NO: 3736015 - DNA, 25 bp, Homo sapien
tcccggccacctgaaaatctgcccc

SEQ ID NO: 3736016 - DNA, 25 bp, Homo sapien
gtcccggccacctgaaaatctgccc

SEQ ID NO: 3736017 - DNA, 25 bp, Homo sapien
agttcaccaccagacgggactgtgt

SEQ ID NO: 3736018 - DNA, 25 bp, Homo sapien
gaatcgcatgcaccaatgtaaacag

SEQ ID NO: 3736019 - DNA, 25 bp, Homo sapien
tataaaagttgttggccataatgcc

SEQ ID NO: 3736020 - DNA, 25 bp, Homo sapien
caagtttagcttttagagtccaggt

SEQ ID NO: 3736021 - DNA, 25 bp, Homo sapien
ttgtaactgccctttccgtacacag

SEQ ID NO: 3736022 - DNA, 25 bp, Homo sapien
ctttccgtacacagcaggcatgaat

SEQ ID NO: 3736023 - DNA, 25 bp, Homo sapien
tgacccattactcaattgtccctgg

SEQ ID NO: 3736024 - DNA, 25 bp, Homo sapien
cctggcatattatctgatcttcacg

SEQ ID NO: 3736025 - DNA, 25 bp, Homo sapien
ccccagttgtcagagtccttaaatg

SEQ ID NO: 3736026 - DNA, 25 bp, Homo sapien
gcattaatgctatctccctgtgtac

SEQ ID NO: 3736027 - DNA, 25 bp, Homo sapien
cagatagaaatctgcagtgttggca

SEQ ID NO: 3736028 - DNA, 25 bp, Homo sapien
aaccaagtggtacataagcccagct

SEQ ID NO: 3736029 - DNA, 25 bp, Homo sapien
tggaagccatgtgactgcgcagaac

SEQ ID NO: 3736030 - DNA, 25 bp, Homo sapien
tgcgcagaacaacctaagaaaccct

SEQ ID NO: 3736031 - DNA, 25 bp, Homo sapien
tgaacgttctggttctggaagccat

SEQ ID NO: 3736032 - DNA, 25 bp, Homo sapien
tctgtgcagactttaagagctgaac

SEQ ID NO: 3736033 - DNA, 25 bp, Homo sapien
gaccgagcaatagacagaggtgcct

SEQ ID NO: 3736034 - DNA, 25 bp, Homo sapien
tcacagattccattgaaaggagcag

SEQ ID NO: 3736035 - DNA, 25 bp, Homo sapien
tatggactatgtacgcaagaccgag

SEQ ID NO: 3736036 - DNA, 25 bp, Homo sapien
ggtgcctagggtccaaacacactga

SEQ ID NO: 3736037 - DNA, 25 bp, Homo sapien
aaaaattgcaagaaagcgacaccaa

SEQ ID NO: 3736038 - DNA, 25 bp, Homo sapien
gaaccaactggagggtcttcactct

SEQ ID NO: 3736039 - DNA, 25 bp, Homo sapien
ctgaggaaccaactggagggtcttc

SEQ ID NO: 3736040 - DNA, 25 bp, Homo sapien
agcgacaccaagaacggagctgact

SEQ ID NO: 3736041 - DNA, 25 bp, Homo sapien
ggccacggagaagggaatcagtaca

SEQ ID NO: 3736042 - DNA, 25 bp, Homo sapien
aataattagtgacttttgagggcac

SEQ ID NO: 3736043 - DNA, 25 bp, Homo sapien
cagtggttgcgctgctttgaacaga

SEQ ID NO: 3736044 - DNA, 25 bp, Homo sapien
caaaagtggtgaaatggccacggag

SEQ ID NO: 3736045 - DNA, 25 bp, Homo sapien
gaatcaatttcctagtatccgccaa

SEQ ID NO: 3736046 - DNA, 25 bp, Homo sapien
tctgccttacgggtggtggttcctc

SEQ ID NO: 3736047 - DNA, 25 bp, Homo sapien
caaatgagggctctacatagcagct

SEQ ID NO: 3736048 - DNA, 25 bp, Homo sapien
tgggctttgctcatctcacgtccgt

SEQ ID NO: 3736049 - DNA, 25 bp, Homo sapien
tgtgggggcctcactgccacaagtc

SEQ ID NO: 3736050 - DNA, 25 bp, Homo sapien
tgggacatggtaaccgtaatgtagc

SEQ ID NO: 3736051 - DNA, 25 bp, Homo sapien
ccgtaatgtagcgtctgggtctttg

SEQ ID NO: 3736052 - DNA, 25 bp, Homo sapien
tggtaaccgtaatgtagcgtctggg

SEQ ID NO: 3736053 - DNA, 25 bp, Homo sapien
ggcggagcttatgccaccctttctc

SEQ ID NO: 3736054 - DNA, 25 bp, Homo sapien
aggggacaaggggcggagcttatgc

SEQ ID NO: 3736055 - DNA, 25 bp, Homo sapien
ctctaaaaagctactacgatgtcgc

SEQ ID NO: 3736056 - DNA, 25 bp, Homo sapien
gctactacgatgtcgctcctgctgc

SEQ ID NO: 3736057 - DNA, 25 bp, Homo sapien
tgctgccccgaattcttggaggagg

SEQ ID NO: 3736058 - DNA, 25 bp, Homo sapien
cgtgatcacagaggaaggctctaaa

SEQ ID NO: 3736059 - DNA, 25 bp, Homo sapien
gagatgatgttgtgaggagcaggtc

SEQ ID NO: 3736060 - DNA, 25 bp, Homo sapien
ggcaggctatggctcactgcccgta

SEQ ID NO: 3736061 - DNA, 25 bp, Homo sapien
caggctatggctcactgcccgtaaa

SEQ ID NO: 3736062 - DNA, 25 bp, Homo sapien
ggctatggctcactgcccgtaaagg

SEQ ID NO: 3736063 - DNA, 25 bp, Homo sapien
atgaggtagagtggctactccagta

SEQ ID NO: 3736064 - DNA, 25 bp, Homo sapien
gagtggctactccagtaggacagtt

SEQ ID NO: 3736065 - DNA, 25 bp, Homo sapien
cctgagcacaggtttctgggcagtg

SEQ ID NO: 3736066 - DNA, 25 bp, Homo sapien
tggagaactggtcacgtctactctg

SEQ ID NO: 3736067 - DNA, 25 bp, Homo sapien
cagtggagggcaccaaatccctggg

SEQ ID NO: 3736068 - DNA, 25 bp, Homo sapien
gacatgctgtttcctcgatgctggc

SEQ ID NO: 3736069 - DNA, 25 bp, Homo sapien
gaatcaaataggtaccccagagaga

SEQ ID NO: 3736070 - DNA, 25 bp, Homo sapien
ttgctttcggaagtccagagacatg

SEQ ID NO: 3736071 - DNA, 25 bp, Homo sapien
gccaacaccagattttctgggcaat

SEQ ID NO: 3736072 - DNA, 25 bp, Homo sapien
caggaccgtctgtgcaaatgtggac

SEQ ID NO: 3736073 - DNA, 25 bp, Homo sapien
ctattttgcaaatcagtgagaagac

SEQ ID NO: 3736074 - DNA, 25 bp, Homo sapien
gcttgtttgctaattgccaacacca

SEQ ID NO: 3736075 - DNA, 25 bp, Homo sapien
gggacccaagacatgtgttccatgt

SEQ ID NO: 3736076 - DNA, 25 bp, Homo sapien
ggggacccaagacatgtgttccatg

SEQ ID NO: 3736077 - DNA, 25 bp, Homo sapien
ggacccaagacatgtgttccatgtg

SEQ ID NO: 3736078 - DNA, 25 bp, Homo sapien
tggggacccaagacatgtgttccat

SEQ ID NO: 3736079 - DNA, 25 bp, Homo sapien
cagctggtggctggacatctgtttt

SEQ ID NO: 3736080 - DNA, 25 bp, Homo sapien
tgagatctggctggcgcccatccca

SEQ ID NO: 3736081 - DNA, 25 bp, Homo sapien
ctggctggcgcccatcccagagtgg

SEQ ID NO: 3736082 - DNA, 25 bp, Homo sapien
ggtggctggacatctgttttgtcat

SEQ ID NO: 3736083 - DNA, 25 bp, Homo sapien
gccaaggctgttacatcttgcccct

SEQ ID NO: 3736084 - DNA, 25 bp, Homo sapien
atgccaaggctgttacatcttgccc

SEQ ID NO: 3736085 - DNA, 25 bp, Homo sapien
caaggctgttacatcttgcccctcc

SEQ ID NO: 3736086 - DNA, 25 bp, Homo sapien
aaggctgttacatcttgcccctccc

SEQ ID NO: 3736087 - DNA, 25 bp, Homo sapien
tcatcctcctcaggagctgttttgt

SEQ ID NO: 3736088 - DNA, 25 bp, Homo sapien
cagccgaagagccaactctggcttt

SEQ ID NO: 3736089 - DNA, 25 bp, Homo sapien
tgctcctattccaaagccgtcctga

SEQ ID NO: 3736090 - DNA, 25 bp, Homo sapien
ttcttctgttcctctaagagcagca

SEQ ID NO: 3736091 - DNA, 25 bp, Homo sapien
ggtgaggcagtgtccccaggctcac

SEQ ID NO: 3736092 - DNA, 25 bp, Homo sapien
agggaggtgaggcagtgtccccagg

SEQ ID NO: 3736093 - DNA, 25 bp, Homo sapien
tcacttcatggagggagaagggggc

SEQ ID NO: 3736094 - DNA, 25 bp, Homo sapien
ggaggtgaggcagtgtccccaggct

SEQ ID NO: 3736095 - DNA, 25 bp, Homo sapien
cctggatcttcggatttgagagaga

SEQ ID NO: 3736096 - DNA, 25 bp, Homo sapien
tgtgcctctcctacctggatcttcg

SEQ ID NO: 3736097 - DNA, 25 bp, Homo sapien
gctttgcagaccaaagaatacgcca

SEQ ID NO: 3736098 - DNA, 25 bp, Homo sapien
tatggttttcgaaatagagctttgc

SEQ ID NO: 3736099 - DNA, 25 bp, Homo sapien
tacagatatagatgcccacccagtg

SEQ ID NO: 3736100 - DNA, 25 bp, Homo sapien
tccataatgtatcgggtgcttgcca

SEQ ID NO: 3736101 - DNA, 25 bp, Homo sapien
cacacggtcgttttttcagcagcag

SEQ ID NO: 3736102 - DNA, 25 bp, Homo sapien
cagtggcatgcatctaggacgtggt

SEQ ID NO: 3736103 - DNA, 25 bp, Homo sapien
ccaagttcctgtctggtgggaattt

SEQ ID NO: 3736104 - DNA, 25 bp, Homo sapien
gttccctttgccaagttcctgtctg

SEQ ID NO: 3736105 - DNA, 25 bp, Homo sapien
tttcctatcactaaattttcctgaa

SEQ ID NO: 3736106 - DNA, 25 bp, Homo sapien
tcctatcactaaattttcctgaagg

SEQ ID NO: 3736107 - DNA, 25 bp, Homo sapien
tcaaaggtcttaaaaagtctctgga

SEQ ID NO: 3736108 - DNA, 25 bp, Homo sapien
tcttctgacatggaagtctgctgtc

SEQ ID NO: 3736109 - DNA, 25 bp, Homo sapien
gctgtctgtgctgcggctgcctgtt

SEQ ID NO: 3736110 - DNA, 25 bp, Homo sapien
gttctgagcagaacatttagcctct

SEQ ID NO: 3736111 - DNA, 25 bp, Homo sapien
agacagagtcccgtctgtgacagag

SEQ ID NO: 3736112 - DNA, 25 bp, Homo sapien
gagacagagtcccgtctgtgacaga

SEQ ID NO: 3736113 - DNA, 25 bp, Homo sapien
tgagacagagtcccgtctgtgacag

SEQ ID NO: 3736114 - DNA, 25 bp, Homo sapien
tgtgagagagacagttgttagcctg

SEQ ID NO: 3736115 - DNA, 25 bp, Homo sapien
tggtacgtacttgtggaaactgaga

SEQ ID NO: 3736116 - DNA, 25 bp, Homo sapien
tgttagcctggtacgtacttgtgga

SEQ ID NO: 3736117 - DNA, 25 bp, Homo sapien
agacagttgttagcctggtacgtac

SEQ ID NO: 3736118 - DNA, 25 bp, Homo sapien
tccttatgggtcaccccttgtggtc

SEQ ID NO: 3736119 - DNA, 25 bp, Homo sapien
cagctcggtgctggagtttccttat

SEQ ID NO: 3736120 - DNA, 25 bp, Homo sapien
gctggagtttccttatgggtcaccc

SEQ ID NO: 3736121 - DNA, 25 bp, Homo sapien
tatgggtcaccccttgtggtctcca

SEQ ID NO: 3736122 - DNA, 25 bp, Homo sapien
ctggccaggcatattgagacaaagc

SEQ ID NO: 3736123 - DNA, 25 bp, Homo sapien
ccaggcatattgagacaaagctcac

SEQ ID NO: 3736124 - DNA, 25 bp, Homo sapien
ggccaggcatattgagacaaagctc

SEQ ID NO: 3736125 - DNA, 25 bp, Homo sapien
tggccaggcatattgagacaaagct

SEQ ID NO: 3736126 - DNA, 25 bp, Homo sapien
gtgtttactataggaaatattatcc

SEQ ID NO: 3736127 - DNA, 25 bp, Homo sapien
cctaagcacaaggaccaactccggg

SEQ ID NO: 3736128 - DNA, 25 bp, Homo sapien
actgagtccacaagggcccatgcag

SEQ ID NO: 3736129 - DNA, 25 bp, Homo sapien
tcaggggcccgttctgcctaagcac

SEQ ID NO: 3736130 - DNA, 25 bp, Homo sapien
ggccaactggccagccatggaggat

SEQ ID NO: 3736131 - DNA, 25 bp, Homo sapien
gaccgtggtcatccggtctggcagt

SEQ ID NO: 3736132 - DNA, 25 bp, Homo sapien
cacatggccgctggccccatttgaa

SEQ ID NO: 3736133 - DNA, 25 bp, Homo sapien
gccgctggccccatttgaagggacc

SEQ ID NO: 3736134 - DNA, 25 bp, Homo sapien
ctggccccatttgaagggaccgtgg

SEQ ID NO: 3736135 - DNA, 25 bp, Homo sapien
tgggtcccttgcatgacaataatgc

SEQ ID NO: 3736136 - DNA, 25 bp, Homo sapien
gggtcccttgcatgacaataatgca

SEQ ID NO: 3736137 - DNA, 25 bp, Homo sapien
actgggtcccttgcatgacaataat

SEQ ID NO: 3736138 - DNA, 25 bp, Homo sapien
gtcccttgcatgacaataatgcaca

SEQ ID NO: 3736139 - DNA, 25 bp, Homo sapien
accgtgcctggcaacaatagtcatt

SEQ ID NO: 3736140 - DNA, 25 bp, Homo sapien
cgtgcctggcaacaatagtcatttt

SEQ ID NO: 3736141 - DNA, 25 bp, Homo sapien
ccgtgcctggcaacaatagtcattt

SEQ ID NO: 3736142 - DNA, 25 bp, Homo sapien
gtgcctggcaacaatagtcatttta

SEQ ID NO: 3736143 - DNA, 25 bp, Homo sapien
gctctctgcccattccgtcatccat

SEQ ID NO: 3736144 - DNA, 25 bp, Homo sapien
tttacattgcagtcctgagtgatgg

SEQ ID NO: 3736145 - DNA, 25 bp, Homo sapien
gagtgatggtgatatttggagcaat

SEQ ID NO: 3736146 - DNA, 25 bp, Homo sapien
tctaaagtttacattgcagtcctga

SEQ ID NO: 3736147 - DNA, 25 bp, Homo sapien
tggagcaataatttcctctggccct

SEQ ID NO: 3736148 - DNA, 25 bp, Homo sapien
aagccatttaaagtcattcggcact

SEQ ID NO: 3736149 - DNA, 25 bp, Homo sapien
gccatttaaagtcattcggcactgg

SEQ ID NO: 3736150 - DNA, 25 bp, Homo sapien
atttaaagtcattcggcactgggct

SEQ ID NO: 3736151 - DNA, 25 bp, Homo sapien
aaagtcattcggcactgggctatgg

SEQ ID NO: 3736152 - DNA, 25 bp, Homo sapien
tcgctagacatagagcccacaactt

SEQ ID NO: 3736153 - DNA, 25 bp, Homo sapien
agacatagagcccacaacttttaaa

SEQ ID NO: 3736154 - DNA, 25 bp, Homo sapien
tgcatccttcgctagacatagagcc

SEQ ID NO: 3736155 - DNA, 25 bp, Homo sapien
agagacctgcatccttcgctagaca

SEQ ID NO: 3736156 - DNA, 25 bp, Homo sapien
tgccaagcatttccaagcacagtaa

SEQ ID NO: 3736157 - DNA, 25 bp, Homo sapien
cagtaatccattttaccctcttgtc

SEQ ID NO: 3736158 - DNA, 25 bp, Homo sapien
gcatttccaagcacagtaatccatt

SEQ ID NO: 3736159 - DNA, 25 bp, Homo sapien
caagcacagtaatccattttaccct

SEQ ID NO: 3736160 - DNA, 25 bp, Homo sapien
aaggtacacacattatcatatcccc

SEQ ID NO: 3736161 - DNA, 25 bp, Homo sapien
caggcataagcaatgtgacaaacac

SEQ ID NO: 3736162 - DNA, 25 bp, Homo sapien
caccatgttttggtagctcatgagc

SEQ ID NO: 3736163 - DNA, 25 bp, Homo sapien
tatgtgagcgatcatcctgtatttg

SEQ ID NO: 3736164 - DNA, 25 bp, Homo sapien
aggctgaccataagtgctttctaca

SEQ ID NO: 3736165 - DNA, 25 bp, Homo sapien
caggctgaccataagtgctttctac

SEQ ID NO: 3736166 - DNA, 25 bp, Homo sapien
tgctcccttcaaggccccccaagac

SEQ ID NO: 3736167 - DNA, 25 bp, Homo sapien
tctgtgctcccttcaaggcccccca

SEQ ID NO: 3736168 - DNA, 25 bp, Homo sapien
ctgtgctcccttcaaggccccccaa

SEQ ID NO: 3736169 - DNA, 25 bp, Homo sapien
gggtttcttcccatagactgtattc

SEQ ID NO: 3736170 - DNA, 25 bp, Homo sapien
cacgacattctgactgatgatgtgc

SEQ ID NO: 3736171 - DNA, 25 bp, Homo sapien
tctgttgcatagcagcgttactctc

SEQ ID NO: 3736172 - DNA, 25 bp, Homo sapien
ttaggaaatgcgtataatccacgac

SEQ ID NO: 3736173 - DNA, 25 bp, Homo sapien
caacacatggtaggaccaagagcag

SEQ ID NO: 3736174 - DNA, 25 bp, Homo sapien
agaagtgtaaatggctcacggtgct

SEQ ID NO: 3736175 - DNA, 25 bp, Homo sapien
ggcaaatgggaagcgggcacaacac

SEQ ID NO: 3736176 - DNA, 25 bp, Homo sapien
tgtaaatggctcacggtgctgcagg

SEQ ID NO: 3736177 - DNA, 25 bp, Homo sapien
gcttacagtaactaagatcacaaac

SEQ ID NO: 3736178 - DNA, 25 bp, Homo sapien
gggtttgccctacaggatcatggaa

SEQ ID NO: 3736179 - DNA, 25 bp, Homo sapien
gaggtgggtgccataattattccca

SEQ ID NO: 3736180 - DNA, 25 bp, Homo sapien
acaaactaagaagcagcaaagttgg

SEQ ID NO: 3736181 - DNA, 25 bp, Homo sapien
gggctgatgaggagccattctggaa

SEQ ID NO: 3736182 - DNA, 25 bp, Homo sapien
ttcatctgaggaggtgcccacaggg

SEQ ID NO: 3736183 - DNA, 25 bp, Homo sapien
gggaagtgacaaggtcttcatctga

SEQ ID NO: 3736184 - DNA, 25 bp, Homo sapien
agtcatccaggtgggaagtgacaag

SEQ ID NO: 3736185 - DNA, 25 bp, Homo sapien
ccagtctgtttgcagcaggaatgtg

SEQ ID NO: 3736186 - DNA, 25 bp, Homo sapien
cacccagtctgtttgcagcaggaat

SEQ ID NO: 3736187 - DNA, 25 bp, Homo sapien
cccacccagtctgtttgcagcagga

SEQ ID NO: 3736188 - DNA, 25 bp, Homo sapien
tgtgccccacccagtctgtttgcag

SEQ ID NO: 3736189 - DNA, 25 bp, Homo sapien
tgtctgattgctaagagggggctct

SEQ ID NO: 3736190 - DNA, 25 bp, Homo sapien
gagtccaagtgacctcacaggaagg

SEQ ID NO: 3736191 - DNA, 25 bp, Homo sapien
agcatagagtccaagtgacctcaca

SEQ ID NO: 3736192 - DNA, 25 bp, Homo sapien
agtgacctcacaggaaggtttgtgg

SEQ ID NO: 3736193 - DNA, 25 bp, Homo sapien
ttggagctctgtggcgtcatcgctt

SEQ ID NO: 3736194 - DNA, 25 bp, Homo sapien
gctgactctcaagcgagcataccca

SEQ ID NO: 3736195 - DNA, 25 bp, Homo sapien
ggcgtcatcgcttcttgcagccttc

SEQ ID NO: 3736196 - DNA, 25 bp, Homo sapien
aatggcccaaatgaccttggagctc

SEQ ID NO: 3736197 - DNA, 25 bp, Homo sapien
aacccacgtgatccagccttatctg

SEQ ID NO: 3736198 - DNA, 25 bp, Homo sapien
agcactgatgatccctgaacccacg

SEQ ID NO: 3736199 - DNA, 25 bp, Homo sapien
ctgtacacaggatccaagatcagct

SEQ ID NO: 3736200 - DNA, 25 bp, Homo sapien
tacacaggatccaagatcagctcct

SEQ ID NO: 3736201 - DNA, 25 bp, Homo sapien
agggcctcatcccaggccagttcat

SEQ ID NO: 3736202 - DNA, 25 bp, Homo sapien
ccatgtactgctcagtggactgaag

SEQ ID NO: 3736203 - DNA, 25 bp, Homo sapien
gaagcctttgctcattagcagggcc

SEQ ID NO: 3736204 - DNA, 25 bp, Homo sapien
tcttgcctccctgggaccttgcctg

SEQ ID NO: 3736205 - DNA, 25 bp, Homo sapien
tatgccatggcagtatagccaacac

SEQ ID NO: 3736206 - DNA, 25 bp, Homo sapien
catggcagtatagccaacacgaggg

SEQ ID NO: 3736207 - DNA, 25 bp, Homo sapien
tgccatggcagtatagccaacacga

SEQ ID NO: 3736208 - DNA, 25 bp, Homo sapien
ctatgccatggcagtatagccaaca

SEQ ID NO: 3736209 - DNA, 25 bp, Homo sapien
agagtctcttctgcagaacccgctc

SEQ ID NO: 3736210 - DNA, 25 bp, Homo sapien
tccatctcctgcgtaattacccgag

SEQ ID NO: 3736211 - DNA, 25 bp, Homo sapien
gcttctctggcgctaacctcatagg

SEQ ID NO: 3736212 - DNA, 25 bp, Homo sapien
cgtaattacccgagaggctccacgt

SEQ ID NO: 3736213 - DNA, 25 bp, Homo sapien
cagtttggaggcttcactcgcaccc

SEQ ID NO: 3736214 - DNA, 25 bp, Homo sapien
tcttagtccttgtgccaagcggctg

SEQ ID NO: 3736215 - DNA, 25 bp, Homo sapien
tgattccaggggatttagggtgccc

SEQ ID NO: 3736216 - DNA, 25 bp, Homo sapien
gcccccacgctgaagccagtttgga

SEQ ID NO: 3736217 - DNA, 25 bp, Homo sapien
agtagagacaggatgtacgcgcgtt

SEQ ID NO: 3736218 - DNA, 25 bp, Homo sapien
ggatgttgtgcgcacggccgcctcc

SEQ ID NO: 3736219 - DNA, 25 bp, Homo sapien
atgtgctttggtcggctcggccaga

SEQ ID NO: 3736220 - DNA, 25 bp, Homo sapien
ggtctagaattttgcaggatgtgct

SEQ ID NO: 3736221 - DNA, 25 bp, Homo sapien
ctgacccgtagtctggagagagctt

SEQ ID NO: 3736222 - DNA, 25 bp, Homo sapien
acgtctgggcatccggtgaacctga

SEQ ID NO: 3736223 - DNA, 25 bp, Homo sapien
gagagagcttccagggatatgaagc

SEQ ID NO: 3736224 - DNA, 25 bp, Homo sapien
gaagcatggccagagataatgccct

SEQ ID NO: 3736225 - DNA, 25 bp, Homo sapien
ttcatcctcttaccaagtaatttta

SEQ ID NO: 3736226 - DNA, 25 bp, Homo sapien
tcatcctcttaccaagtaattttat

SEQ ID NO: 3736227 - DNA, 25 bp, Homo sapien
catcctcttaccaagtaattttatt

SEQ ID NO: 3736228 - DNA, 25 bp, Homo sapien
gagctgcaaagacccgaagacccgt

SEQ ID NO: 3736229 - DNA, 25 bp, Homo sapien
gctgcaaagacccgaagacccgttg

SEQ ID NO: 3736230 - DNA, 25 bp, Homo sapien
ctgcaaagacccgaagacccgttgt

SEQ ID NO: 3736231 - DNA, 25 bp, Homo sapien
tgcaaagacccgaagacccgttgtc

SEQ ID NO: 3736232 - DNA, 25 bp, Homo sapien
ggtcaccttccaccctgttgagggc

SEQ ID NO: 3736233 - DNA, 25 bp, Homo sapien
cctctggtcaccttccaccctgttg

SEQ ID NO: 3736234 - DNA, 25 bp, Homo sapien
tggtcaccttccaccctgttgaggg

SEQ ID NO: 3736235 - DNA, 25 bp, Homo sapien
tctggtcaccttccaccctgttgag

SEQ ID NO: 3736236 - DNA, 25 bp, Homo sapien
tggtgtgttcatgtgttcatccctg

SEQ ID NO: 3736237 - DNA, 25 bp, Homo sapien
gttcctgttgcactgccaaatgcaa

SEQ ID NO: 3736238 - DNA, 25 bp, Homo sapien
gagccacgtacacagctctcagcag

SEQ ID NO: 3736239 - DNA, 25 bp, Homo sapien
tcctcagtgcttccgttttgtggcc

SEQ ID NO: 3736240 - DNA, 25 bp, Homo sapien
aaggagagatggaatgagtgttgga

SEQ ID NO: 3736241 - DNA, 25 bp, Homo sapien
gagagatggaatgagtgttggagga

SEQ ID NO: 3736242 - DNA, 25 bp, Homo sapien
aggagagatggaatgagtgttggag

SEQ ID NO: 3736243 - DNA, 25 bp, Homo sapien
agagatggaatgagtgttggaggaa

SEQ ID NO: 3736244 - DNA, 25 bp, Homo sapien
gagaagcgggtttctagttcatcct

SEQ ID NO: 3736245 - DNA, 25 bp, Homo sapien
gggagaagcgggtttctagttcatc

SEQ ID NO: 3736246 - DNA, 25 bp, Homo sapien
ctgggagaagcgggtttctagttca

SEQ ID NO: 3736247 - DNA, 25 bp, Homo sapien
ggagaagcgggtttctagttcatcc

SEQ ID NO: 3736248 - DNA, 25 bp, Homo sapien
tggtaccgaagctagagccatccat

SEQ ID NO: 3736249 - DNA, 25 bp, Homo sapien
tggctggtaccgaagctagagccat

SEQ ID NO: 3736250 - DNA, 25 bp, Homo sapien
gaacttggctggtaccgaagctaga

SEQ ID NO: 3736251 - DNA, 25 bp, Homo sapien
aatgaacttggctggtaccgaagct

SEQ ID NO: 3736252 - DNA, 25 bp, Homo sapien
agccaagaatccatcgcggagatgg

SEQ ID NO: 3736253 - DNA, 25 bp, Homo sapien
caagcactctgtaaaggaccccatt

SEQ ID NO: 3736254 - DNA, 25 bp, Homo sapien
cgtggtatctactggcatctgaatg

SEQ ID NO: 3736255 - DNA, 25 bp, Homo sapien
tgtgggacaaggtaccaagcactct

SEQ ID NO: 3736256 - DNA, 25 bp, Homo sapien
aaggagtcggcaggcatcttcccga

SEQ ID NO: 3736257 - DNA, 25 bp, Homo sapien
gtgtacgcatgttggctccccaagg

SEQ ID NO: 3736258 - DNA, 25 bp, Homo sapien
tacgtgtatatctgcgtgtacgcat

SEQ ID NO: 3736259 - DNA, 25 bp, Homo sapien
gccagcgtgtttgggtacgtgtata

SEQ ID NO: 3736260 - DNA, 25 bp, Homo sapien
tttgttgcgtaggaacacgcaggaa

SEQ ID NO: 3736261 - DNA, 25 bp, Homo sapien
gatgcctcagcggagggatctcgct

SEQ ID NO: 3736262 - DNA, 25 bp, Homo sapien
tcctgatgcctcagcggagggatct

SEQ ID NO: 3736263 - DNA, 25 bp, Homo sapien
atgcacttgattttgttgcgtagga

SEQ ID NO: 3736264 - DNA, 25 bp, Homo sapien
agctgtcattgaaacattacttctg

SEQ ID NO: 3736265 - DNA, 25 bp, Homo sapien
gctgtcattgaaacattacttctgt

SEQ ID NO: 3736266 - DNA, 25 bp, Homo sapien
gagctgtcattgaaacattacttct

SEQ ID NO: 3736267 - DNA, 25 bp, Homo sapien
cacaggacgtgcaaggctcgcctat

SEQ ID NO: 3736268 - DNA, 25 bp, Homo sapien
ctccatccccactatccgtgccttc

SEQ ID NO: 3736269 - DNA, 25 bp, Homo sapien
gacgtgcaaggctcgcctatctttt

SEQ ID NO: 3736270 - DNA, 25 bp, Homo sapien
gcaaggctcgcctatcttttttgaa

SEQ ID NO: 3736271 - DNA, 25 bp, Homo sapien
aaaccacactgcaaaacagtcgtgg

SEQ ID NO: 3736272 - DNA, 25 bp, Homo sapien
tgcaaaacagtcgtggtcatgtgga

SEQ ID NO: 3736273 - DNA, 25 bp, Homo sapien
ggtcatgtggatttttactgaggat

SEQ ID NO: 3736274 - DNA, 25 bp, Homo sapien
atccacagacgcacaaaccacactg

SEQ ID NO: 3736275 - DNA, 25 bp, Homo sapien
cataattacgccagaccattgtggg

SEQ ID NO: 3736276 - DNA, 25 bp, Homo sapien
tcagatgtgcaaaagtcggagacca

SEQ ID NO: 3736277 - DNA, 25 bp, Homo sapien
ggaacaggatgcacgctgggcatta

SEQ ID NO: 3736278 - DNA, 25 bp, Homo sapien
caaaggagggactcttcaactgtga

SEQ ID NO: 3736279 - DNA, 25 bp, Homo sapien
gagtccccacttaagccctttgatg

SEQ ID NO: 3736280 - DNA, 25 bp, Homo sapien
caggtgccgggaagtggctcccctg

SEQ ID NO: 3736281 - DNA, 25 bp, Homo sapien
tgcaagtaactgtgcctcatcaaca

SEQ ID NO: 3736282 - DNA, 25 bp, Homo sapien
gtaactgtgcctcatcaacatgtaa

SEQ ID NO: 3736283 - DNA, 25 bp, Homo sapien
cagagttcacattcttcagttctcc

SEQ ID NO: 3736284 - DNA, 25 bp, Homo sapien
tgttttatttgttaagcgctgctca

SEQ ID NO: 3736285 - DNA, 25 bp, Homo sapien
tcagttctccttcggtgggcttcgg

SEQ ID NO: 3736286 - DNA, 25 bp, Homo sapien
gtccacatagccttgcataaaccaa

SEQ ID NO: 3736287 - DNA, 25 bp, Homo sapien
caccccccatggcttggagcgctgc

SEQ ID NO: 3736288 - DNA, 25 bp, Homo sapien
ccatggcttggagcgctgccttcac

SEQ ID NO: 3736289 - DNA, 25 bp, Homo sapien
agcaccccccatggcttggagcgct

SEQ ID NO: 3736290 - DNA, 25 bp, Homo sapien
ccccatggcttggagcgctgccttc

SEQ ID NO: 3736291 - DNA, 25 bp, Homo sapien
acaggaggcttttgaatttggtctc

SEQ ID NO: 3736292 - DNA, 25 bp, Homo sapien
ttgtccttgtgggtcctggtcatct

SEQ ID NO: 3736293 - DNA, 25 bp, Homo sapien
caggaggcttttgaatttggtctct

SEQ ID NO: 3736294 - DNA, 25 bp, Homo sapien
ttccactaggacacagctggatgag

SEQ ID NO: 3736295 - DNA, 25 bp, Homo sapien
ctctgagctgtctagtctggcccaa

SEQ ID NO: 3736296 - DNA, 25 bp, Homo sapien
gcctttccactaggacacagctgga

SEQ ID NO: 3736297 - DNA, 25 bp, Homo sapien
gagctgtctagtctggcccaagtcc

SEQ ID NO: 3736298 - DNA, 25 bp, Homo sapien
caacaagctttctgtttttgagcct

SEQ ID NO: 3736299 - DNA, 25 bp, Homo sapien
acaacaagctttctgtttttgagcc

SEQ ID NO: 3736300 - DNA, 25 bp, Homo sapien
gagccttgtcaacagcacatgccga

SEQ ID NO: 3736301 - DNA, 25 bp, Homo sapien
ccttgtcaacagcacatgccgagca

SEQ ID NO: 3736302 - DNA, 25 bp, Homo sapien
agaaactggcgagggctccaggcaa

SEQ ID NO: 3736303 - DNA, 25 bp, Homo sapien
ctggtatttctcattaggaagactt

SEQ ID NO: 3736304 - DNA, 25 bp, Homo sapien
taaccctctggtatttctcattagg

SEQ ID NO: 3736305 - DNA, 25 bp, Homo sapien
ggctccaggcaattttaaccctctg

SEQ ID NO: 3736306 - DNA, 25 bp, Homo sapien
agattatcttgactgacccacattc

SEQ ID NO: 3736307 - DNA, 25 bp, Homo sapien
gattatcttgactgacccacattct

SEQ ID NO: 3736308 - DNA, 25 bp, Homo sapien
ccttccatacgtcactgccattaca

SEQ ID NO: 3736309 - DNA, 25 bp, Homo sapien
gacagcacatggagatgtaactgtg

SEQ ID NO: 3736310 - DNA, 25 bp, Homo sapien
tgccattacagtttgcatcaagcag

SEQ ID NO: 3736311 - DNA, 25 bp, Homo sapien
atgtaactgtgtcccccttccatac

SEQ ID NO: 3736312 - DNA, 25 bp, Homo sapien
actggcggtgtctgtaccagcagga

SEQ ID NO: 3736313 - DNA, 25 bp, Homo sapien
gggcgagctctctggacaactccat

SEQ ID NO: 3736314 - DNA, 25 bp, Homo sapien
caccgacacctccaaagtggatgca

SEQ ID NO: 3736315 - DNA, 25 bp, Homo sapien
gccaatcggctgtagtaggtgtgga

SEQ ID NO: 3736316 - DNA, 25 bp, Homo sapien
tgggacttgagcaaacaacacccag

SEQ ID NO: 3736317 - DNA, 25 bp, Homo sapien
catccccaaatagtccagaatgaag

SEQ ID NO: 3736318 - DNA, 25 bp, Homo sapien
ttgtgagttggtggctccagtgaca

SEQ ID NO: 3736319 - DNA, 25 bp, Homo sapien
ggcagttcggagcacttcatgacgt

SEQ ID NO: 3736320 - DNA, 25 bp, Homo sapien
gacagcagctcgcaacttggcttcc

SEQ ID NO: 3736321 - DNA, 25 bp, Homo sapien
gtcatatctatatgcagcaggagaa

SEQ ID NO: 3736322 - DNA, 25 bp, Homo sapien
aagcttcccagtcgcagaacaaagg

SEQ ID NO: 3736323 - DNA, 25 bp, Homo sapien
cacgaggtcttactgaatttaaaat

SEQ ID NO: 3736324 - DNA, 25 bp, Homo sapien
cctttaagaaaggagtctgggctga

SEQ ID NO: 3736325 - DNA, 25 bp, Homo sapien
ggtcctgaatgccagctttgccagg

SEQ ID NO: 3736326 - DNA, 25 bp, Homo sapien
caggccaggaggtgaacagtcattc

SEQ ID NO: 3736327 - DNA, 25 bp, Homo sapien
tgtttttcacctggaactgccaagt

SEQ ID NO: 3736328 - DNA, 25 bp, Homo sapien
cctctctctgcgccttggctcccct

SEQ ID NO: 3736329 - DNA, 25 bp, Homo sapien
tctctctgcgccttggctccccttc

SEQ ID NO: 3736330 - DNA, 25 bp, Homo sapien
ctctctctgcgccttggctcccctt

SEQ ID NO: 3736331 - DNA, 25 bp, Homo sapien
cgactcggagtcctgacctgcacag

SEQ ID NO: 3736332 - DNA, 25 bp, Homo sapien
cacagctgcgattgcggtttgcaca

SEQ ID NO: 3736333 - DNA, 25 bp, Homo sapien
tctgacgcctatcttgtctatgcct

SEQ ID NO: 3736334 - DNA, 25 bp, Homo sapien
tttctggttctgacgcctatcttgt

SEQ ID NO: 3736335 - DNA, 25 bp, Homo sapien
gctcctgtacactgttgtttactca

SEQ ID NO: 3736336 - DNA, 25 bp, Homo sapien
gctgctcctgtacactgttgtttac

SEQ ID NO: 3736337 - DNA, 25 bp, Homo sapien
cttgctgctcctgtacactgttgtt

SEQ ID NO: 3736338 - DNA, 25 bp, Homo sapien
tcttgctgctcctgtacactgttgt

SEQ ID NO: 3736339 - DNA, 25 bp, Homo sapien
ccgtccccttgagaccgtatcacac

SEQ ID NO: 3736340 - DNA, 25 bp, Homo sapien
tgcatttttgtcctatcctgttttc

SEQ ID NO: 3736341 - DNA, 25 bp, Homo sapien
ctatcctgttttccgtccccttgag

SEQ ID NO: 3736342 - DNA, 25 bp, Homo sapien
ttgcatttttgtcctatcctgtttt

SEQ ID NO: 3736343 - DNA, 25 bp, Homo sapien
tgtgtctgaattggacgcaccagca

SEQ ID NO: 3736344 - DNA, 25 bp, Homo sapien
gacggtactccctagttgtgtctga

SEQ ID NO: 3736345 - DNA, 25 bp, Homo sapien
caaagaagcagtcctatggcaatga

SEQ ID NO: 3736346 - DNA, 25 bp, Homo sapien
aggatttggatttgacgaactggca

SEQ ID NO: 3736347 - DNA, 25 bp, Homo sapien
gaagactcctttggctacttagtgc

SEQ ID NO: 3736348 - DNA, 25 bp, Homo sapien
gactttgcagcacgtaattctaaga

SEQ ID NO: 3736349 - DNA, 25 bp, Homo sapien
taggcatctacgaagtcctttggaa

SEQ ID NO: 3736350 - DNA, 25 bp, Homo sapien
tgtctgacttgatcctaaacactgc

SEQ ID NO: 3736351 - DNA, 25 bp, Homo sapien
gctttcaaattgagactttaagatt

SEQ ID NO: 3736352 - DNA, 25 bp, Homo sapien
tgagactttaagattatacacgtca

SEQ ID NO: 3736353 - DNA, 25 bp, Homo sapien
gagactttaagattatacacgtcat

SEQ ID NO: 3736354 - DNA, 25 bp, Homo sapien
cttgctttcaaattgagactttaag

SEQ ID NO: 3736355 - DNA, 25 bp, Homo sapien
ctaaaggattttcggactctaacat

SEQ ID NO: 3736356 - DNA, 25 bp, Homo sapien
aaataggatcagtgcgtcatctggt

SEQ ID NO: 3736357 - DNA, 25 bp, Homo sapien
ttagatgtgtagagcttgagtagca

SEQ ID NO: 3736358 - DNA, 25 bp, Homo sapien
tctgtgatagttaacggaaatagga

SEQ ID NO: 3736359 - DNA, 25 bp, Homo sapien
cctgatagacaacatccacatagag

SEQ ID NO: 3736360 - DNA, 25 bp, Homo sapien
aagtagtttgaggtgagattatgaa

SEQ ID NO: 3736361 - DNA, 25 bp, Homo sapien
gtgagattatgaagaagctggaatc

SEQ ID NO: 3736362 - DNA, 25 bp, Homo sapien
tagtttgaggtgagattatgaagaa

SEQ ID NO: 3736363 - DNA, 25 bp, Homo sapien
ttgaggtgagattatgaagaagctg

SEQ ID NO: 3736364 - DNA, 25 bp, Homo sapien
tctccttgctagatggaaatcccct

SEQ ID NO: 3736365 - DNA, 25 bp, Homo sapien
ggaacgtctcactgtctgtgtgtaa

SEQ ID NO: 3736366 - DNA, 25 bp, Homo sapien
ccctgacggtagaatctgagtctgt

SEQ ID NO: 3736367 - DNA, 25 bp, Homo sapien
tgtaatggaccatcatgaacctgcc

SEQ ID NO: 3736368 - DNA, 25 bp, Homo sapien
cagaatgctgcctatgtccttgccc

SEQ ID NO: 3736369 - DNA, 25 bp, Homo sapien
tacctgccaggtatcatgcgattac

SEQ ID NO: 3736370 - DNA, 25 bp, Homo sapien
ttcaatccgaagtgccttcctggct

SEQ ID NO: 3736371 - DNA, 25 bp, Homo sapien
cgattacagaacttagtgtgcgtcc

SEQ ID NO: 3736372 - DNA, 25 bp, Homo sapien
gggaaatctttaacgacctcatcaa

SEQ ID NO: 3736373 - DNA, 25 bp, Homo sapien
gccttagctccgaattccggctggg

SEQ ID NO: 3736374 - DNA, 25 bp, Homo sapien
tcatcaagcgcgttttgccggagcg

SEQ ID NO: 3736375 - DNA, 25 bp, Homo sapien
cttttccctggcgattttccagagg

SEQ ID NO: 3736376 - DNA, 25 bp, Homo sapien
tcgttcccttttattggagctagga

SEQ ID NO: 3736377 - DNA, 25 bp, Homo sapien
atctcgcgtggcttccaggcctagg

SEQ ID NO: 3736378 - DNA, 25 bp, Homo sapien
caggcctaggttcttcctgcggtaa

SEQ ID NO: 3736379 - DNA, 25 bp, Homo sapien
ctaggcaacgcaacgtgatcccgac

SEQ ID NO: 3736380 - DNA, 25 bp, Homo sapien
tggggtcccacgagcgtccctgctg

SEQ ID NO: 3736381 - DNA, 25 bp, Homo sapien
ggtaggagatttaaggctacagcgg

SEQ ID NO: 3736382 - DNA, 25 bp, Homo sapien
taaggctacagcggggtttagcctg

SEQ ID NO: 3736383 - DNA, 25 bp, Homo sapien
ggtcccacgagcgtccctgctgtcg

SEQ ID NO: 3736384 - DNA, 25 bp, Homo sapien
ttctgcagctccctagtggtcccac

SEQ ID NO: 3736385 - DNA, 25 bp, Homo sapien
tgcgcggaacgtcgttctcccggta

SEQ ID NO: 3736386 - DNA, 25 bp, Homo sapien
gaaggtggagttgagcagctcttcc

SEQ ID NO: 3736387 - DNA, 25 bp, Homo sapien
tagacgtcggcaggctggaggtaga

SEQ ID NO: 3736388 - DNA, 25 bp, Homo sapien
aggcgcaaggcgttgccgcagcgcg

SEQ ID NO: 3736389 - DNA, 25 bp, Homo sapien
gcccgggcggctggcatgcgagatt

SEQ ID NO: 3736390 - DNA, 25 bp, Homo sapien
tgcgagattctgaggcgcaggcgca

SEQ ID NO: 3736391 - DNA, 25 bp, Homo sapien
gaggagagcgcttgtcccaggtccc

SEQ ID NO: 3736392 - DNA, 25 bp, Homo sapien
catcatttttacctcgtcgcagtgg

SEQ ID NO: 3736393 - DNA, 25 bp, Homo sapien
gacgtggttttgcaccctgacagca

SEQ ID NO: 3736394 - DNA, 25 bp, Homo sapien
tatcaactgcctcaatacgacgtgg

SEQ ID NO: 3736395 - DNA, 25 bp, Homo sapien
gaaaaagtcattcgcggaacatcct

SEQ ID NO: 3736396 - DNA, 25 bp, Homo sapien
tttcattatctactgctttggtttt

SEQ ID NO: 3736397 - DNA, 25 bp, Homo sapien
atgggcagacagttccacaaaaatt

SEQ ID NO: 3736398 - DNA, 25 bp, Homo sapien
ttcattatctactgctttggttttt

SEQ ID NO: 3736399 - DNA, 25 bp, Homo sapien
ttttcattatctactgctttggttt

SEQ ID NO: 3736400 - DNA, 25 bp, Homo sapien
cttcaacacacacaaaagaacaaaa

SEQ ID NO: 3736401 - DNA, 25 bp, Homo sapien
tcaacacacacaaaagaacaaaaat

SEQ ID NO: 3736402 - DNA, 25 bp, Homo sapien
caacacacacaaaagaacaaaaatc

SEQ ID NO: 3736403 - DNA, 25 bp, Homo sapien
acacacacaaaagaacaaaaatcat

SEQ ID NO: 3736404 - DNA, 25 bp, Homo sapien
ttgaatggtgcagaatatgtccact

SEQ ID NO: 3736405 - DNA, 25 bp, Homo sapien
tgggaggctttgcaagtttagaaaa

SEQ ID NO: 3736406 - DNA, 25 bp, Homo sapien
ctattttgcatatggtgggaggctt

SEQ ID NO: 3736407 - DNA, 25 bp, Homo sapien
cacttgcagggttggaagccccagt

SEQ ID NO: 3736408 - DNA, 25 bp, Homo sapien
tggtgctgttgacccactgcacggc

SEQ ID NO: 3736409 - DNA, 25 bp, Homo sapien
tggccagctcgggcagagcattctc

SEQ ID NO: 3736410 - DNA, 25 bp, Homo sapien
tcgagatcaccacagaacatacgtt

SEQ ID NO: 3736411 - DNA, 25 bp, Homo sapien
tgccatcccctggagctcgtgcgtg

SEQ ID NO: 3736412 - DNA, 25 bp, Homo sapien
ttggccaaagggttgtggcattgga

SEQ ID NO: 3736413 - DNA, 25 bp, Homo sapien
tggccaaagggttgtggcattggac

SEQ ID NO: 3736414 - DNA, 25 bp, Homo sapien
attggccaaagggttgtggcattgg

SEQ ID NO: 3736415 - DNA, 25 bp, Homo sapien
tattggccaaagggttgtggcattg

SEQ ID NO: 3736416 - DNA, 25 bp, Homo sapien
ctattcaaaaaagtttcttggctgg

SEQ ID NO: 3736417 - DNA, 25 bp, Homo sapien
tagaggaatagcattcagaaactcc

SEQ ID NO: 3736418 - DNA, 25 bp, Homo sapien
aggaatagcattcagaaactccaag

SEQ ID NO: 3736419 - DNA, 25 bp, Homo sapien
actattcaaaaaagtttcttggctg

SEQ ID NO: 3736420 - DNA, 25 bp, Homo sapien
gcactgttgagtattccaggctctt

SEQ ID NO: 3736421 - DNA, 25 bp, Homo sapien
ttgtactttacttgcgaagaatatc

SEQ ID NO: 3736422 - DNA, 25 bp, Homo sapien
tgttgagtattccaggctcttttcc

SEQ ID NO: 3736423 - DNA, 25 bp, Homo sapien
tcttgtactttacttgcgaagaata

SEQ ID NO: 3736424 - DNA, 25 bp, Homo sapien
tggtggtggtactggaggtagaggt

SEQ ID NO: 3736425 - DNA, 25 bp, Homo sapien
ggtggtggtactggaggtagaggtg

SEQ ID NO: 3736426 - DNA, 25 bp, Homo sapien
ggtggtggtggtactggaggtagag

SEQ ID NO: 3736427 - DNA, 25 bp, Homo sapien
gtggtggtggtggtactggaggtag

SEQ ID NO: 3736428 - DNA, 25 bp, Homo sapien
tggagggagaaatattgagagtaag

SEQ ID NO: 3736429 - DNA, 25 bp, Homo sapien
ggagggagaaatattgagagtaaga

SEQ ID NO: 3736430 - DNA, 25 bp, Homo sapien
ctggagggagaaatattgagagtaa

SEQ ID NO: 3736431 - DNA, 25 bp, Homo sapien
tatggccatactgccactgagtaca

SEQ ID NO: 3736432 - DNA, 25 bp, Homo sapien
gaggtttattaagcagcatggcaca

SEQ ID NO: 3736433 - DNA, 25 bp, Homo sapien
tttggcaacagctagtgacacggcc

SEQ ID NO: 3736434 - DNA, 25 bp, Homo sapien
gctctgcaggcgcaataggtttctc

SEQ ID NO: 3736435 - DNA, 25 bp, Homo sapien
caaaggcatagatagcgttgttggc

SEQ ID NO: 3736436 - DNA, 25 bp, Homo sapien
aaggcatagatagcgttgttggctg

SEQ ID NO: 3736437 - DNA, 25 bp, Homo sapien
gcatagatagcgttgttggctgttc

SEQ ID NO: 3736438 - DNA, 25 bp, Homo sapien
tcagcaaaggcatagatagcgttgt

SEQ ID NO: 3736439 - DNA, 25 bp, Homo sapien
tctttcattaaatttagcttcccag

SEQ ID NO: 3736440 - DNA, 25 bp, Homo sapien
tttcattaaatttagcttcccagat

SEQ ID NO: 3736441 - DNA, 25 bp, Homo sapien
cccagatgatgacttcccacagctg

SEQ ID NO: 3736442 - DNA, 25 bp, Homo sapien
cagatgatgacttcccacagctgac

SEQ ID NO: 3736443 - DNA, 25 bp, Homo sapien
tggttgttaattcaggatggggtat

SEQ ID NO: 3736444 - DNA, 25 bp, Homo sapien
attcaggatggggtatacaaatcac

SEQ ID NO: 3736445 - DNA, 25 bp, Homo sapien
gttaattcaggatggggtatacaaa

SEQ ID NO: 3736446 - DNA, 25 bp, Homo sapien
ttgtttggttgttaattcaggatgg

SEQ ID NO: 3736447 - DNA, 25 bp, Homo sapien
tcagtagcctctcttcgacctttca

SEQ ID NO: 3736448 - DNA, 25 bp, Homo sapien
ctcttcgacctttcagaactgactg

SEQ ID NO: 3736449 - DNA, 25 bp, Homo sapien
tttatggtctctggaccaacctgga

SEQ ID NO: 3736450 - DNA, 25 bp, Homo sapien
cagttgcttggatcaagttagcttc

SEQ ID NO: 3736451 - DNA, 25 bp, Homo sapien
gcatttccataagcatctcgacacc

SEQ ID NO: 3736452 - DNA, 25 bp, Homo sapien
ctgtggggcagaagataaaaatgta

SEQ ID NO: 3736453 - DNA, 25 bp, Homo sapien
gtggggcagaagataaaaatgtatc

SEQ ID NO: 3736454 - DNA, 25 bp, Homo sapien
ggggcagaagataaaaatgtatcac

SEQ ID NO: 3736455 - DNA, 25 bp, Homo sapien
tgtggggcagaagataaaaatgtat

SEQ ID NO: 3736456 - DNA, 25 bp, Homo sapien
ttgcttccatcgtgccctttttttg

SEQ ID NO: 3736457 - DNA, 25 bp, Homo sapien
ctcttttgcttccatcgtgcccttt

SEQ ID NO: 3736458 - DNA, 25 bp, Homo sapien
gagcaatatcactatatggtttcca

SEQ ID NO: 3736459 - DNA, 25 bp, Homo sapien
gctgctgccagcgatggtcgggcag

SEQ ID NO: 3736460 - DNA, 25 bp, Homo sapien
tctggagcaatatcactatatggtt

SEQ ID NO: 3736461 - DNA, 25 bp, Homo sapien
gccagcgatggtcgggcagcctgtt

SEQ ID NO: 3736462 - DNA, 25 bp, Homo sapien
agcacattaaggttcttggcgcttc

SEQ ID NO: 3736463 - DNA, 25 bp, Homo sapien
aatacagcacattaaggttcttggc

SEQ ID NO: 3736464 - DNA, 25 bp, Homo sapien
gtcaatacagcacattaaggttctt

SEQ ID NO: 3736465 - DNA, 25 bp, Homo sapien
tacagcacattaaggttcttggcgc

SEQ ID NO: 3736466 - DNA, 25 bp, Homo sapien
ctgcaagatcaagagacaatgatcc

SEQ ID NO: 3736467 - DNA, 25 bp, Homo sapien
gcaagatcaagagacaatgatccat

SEQ ID NO: 3736468 - DNA, 25 bp, Homo sapien
tgcaagatcaagagacaatgatcca

SEQ ID NO: 3736469 - DNA, 25 bp, Homo sapien
tcatgtccagcacagttgatagcta

SEQ ID NO: 3736470 - DNA, 25 bp, Homo sapien
tttcctgtattagaagcagtggctg

SEQ ID NO: 3736471 - DNA, 25 bp, Homo sapien
tgatagctagatgcagatttgttcc

SEQ ID NO: 3736472 - DNA, 25 bp, Homo sapien
ttcccagttctagccccaggttggc

SEQ ID NO: 3736473 - DNA, 25 bp, Homo sapien
tacggttcagattcgttttcgttca

SEQ ID NO: 3736474 - DNA, 25 bp, Homo sapien
ttgtaaacaggttcttttcagggca

SEQ ID NO: 3736475 - DNA, 25 bp, Homo sapien
tcatcaaatcccaaagatacggttc

SEQ ID NO: 3736476 - DNA, 25 bp, Homo sapien
tcagggcacgttgacctgagaaatc

SEQ ID NO: 3736477 - DNA, 25 bp, Homo sapien
accatctccgctgcatttttgtatg

SEQ ID NO: 3736478 - DNA, 25 bp, Homo sapien
tacaggtcaaccatctccgctgcat

SEQ ID NO: 3736479 - DNA, 25 bp, Homo sapien
aattgaagggtacttgttgatcaga

SEQ ID NO: 3736480 - DNA, 25 bp, Homo sapien
tgttgatcagatccacatacaggtc

SEQ ID NO: 3736481 - DNA, 25 bp, Homo sapien
ggtgagtcctgcctatcttatggca

SEQ ID NO: 3736482 - DNA, 25 bp, Homo sapien
aaaatataaaaggtgagtcctgcct

SEQ ID NO: 3736483 - DNA, 25 bp, Homo sapien
tataaaaggtgagtcctgcctatct

SEQ ID NO: 3736484 - DNA, 25 bp, Homo sapien
gtcctgcctatcttatggcatataa

SEQ ID NO: 3736485 - DNA, 25 bp, Homo sapien
gaagcagttcctgcaattatgtaac

SEQ ID NO: 3736486 - DNA, 25 bp, Homo sapien
cacctggaaccaagtgcgtgataga

SEQ ID NO: 3736487 - DNA, 25 bp, Homo sapien
gtgttttatgatcagcccattggat

SEQ ID NO: 3736488 - DNA, 25 bp, Homo sapien
gattggttatttccaccaagtcaga

SEQ ID NO: 3736489 - DNA, 25 bp, Homo sapien
catcagatgattctccttctgtact

SEQ ID NO: 3736490 - DNA, 25 bp, Homo sapien
aaatcgacaaggctgtcatcagatg

SEQ ID NO: 3736491 - DNA, 25 bp, Homo sapien
ccaaagacagtgatgtgcttcttac

SEQ ID NO: 3736492 - DNA, 25 bp, Homo sapien
tgtacttccaaagacagtgatgtgc

SEQ ID NO: 3736493 - DNA, 25 bp, Homo sapien
gaaggcggttgtatttagtcactcg

SEQ ID NO: 3736494 - DNA, 25 bp, Homo sapien
aagttcttcctctatagtgagaagg

SEQ ID NO: 3736495 - DNA, 25 bp, Homo sapien
tcactcgttcaccacgggaaagacc

SEQ ID NO: 3736496 - DNA, 25 bp, Homo sapien
caacttgatgaaccggacaccaagc

SEQ ID NO: 3736497 - DNA, 25 bp, Homo sapien
aacaaagcaagaaagcagcgcatac

SEQ ID NO: 3736498 - DNA, 25 bp, Homo sapien
tggaaacaaagcaagaaagcagcgc

SEQ ID NO: 3736499 - DNA, 25 bp, Homo sapien
gaaacaaagcaagaaagcagcgcat

SEQ ID NO: 3736500 - DNA, 25 bp, Homo sapien
ctaagtggaaacaaagcaagaaagc

SEQ ID NO: 3736501 - DNA, 25 bp, Homo sapien
cttatgtatggtctttggattcccc

SEQ ID NO: 3736502 - DNA, 25 bp, Homo sapien
gtggcaagtgccatcctagttttgt

SEQ ID NO: 3736503 - DNA, 25 bp, Homo sapien
gccatcctagttttgtcagcactta

SEQ ID NO: 3736504 - DNA, 25 bp, Homo sapien
gatgatccattaagacaacaatata

SEQ ID NO: 3736505 - DNA, 25 bp, Homo sapien
gctgattcctctacaccttgtgtgg

SEQ ID NO: 3736506 - DNA, 25 bp, Homo sapien
cagcagcctcaagtgcctccgcagc

SEQ ID NO: 3736507 - DNA, 25 bp, Homo sapien
aagtgcctccgcagccttttcagct

SEQ ID NO: 3736508 - DNA, 25 bp, Homo sapien
agcggctccctagccgcagcagcct

SEQ ID NO: 3736509 - DNA, 25 bp, Homo sapien
tgtgtacagccctatccagaggatg

SEQ ID NO: 3736510 - DNA, 25 bp, Homo sapien
tacaaaagagcaattcaggcaatgg

SEQ ID NO: 3736511 - DNA, 25 bp, Homo sapien
tgtggtggctgcaaaacgaagttca

SEQ ID NO: 3736512 - DNA, 25 bp, Homo sapien
cacttctacgtgaggttggttacaa

SEQ ID NO: 3736513 - DNA, 25 bp, Homo sapien
gacctggttattgtaataaatcacc

SEQ ID NO: 3736514 - DNA, 25 bp, Homo sapien
gctgacctggttattgtaataaatc

SEQ ID NO: 3736515 - DNA, 25 bp, Homo sapien
cctggttattgtaataaatcacctc

SEQ ID NO: 3736516 - DNA, 25 bp, Homo sapien
actgctgacctggttattgtaataa

SEQ ID NO: 3736517 - DNA, 25 bp, Homo sapien
cagttacactcgttgtggaacaaca

SEQ ID NO: 3736518 - DNA, 25 bp, Homo sapien
tgaccttcaaagactcatcaagcag

SEQ ID NO: 3736519 - DNA, 25 bp, Homo sapien
aagttgtcgagaatggataaccatc

SEQ ID NO: 3736520 - DNA, 25 bp, Homo sapien
aagcagtccctgcataaggattgga

SEQ ID NO: 3736521 - DNA, 25 bp, Homo sapien
acagtcccatggaagttctgactgg

SEQ ID NO: 3736522 - DNA, 25 bp, Homo sapien
ctgactggcaggcatcaacagggct

SEQ ID NO: 3736523 - DNA, 25 bp, Homo sapien
ctattagcacccagcatagtttgcc

SEQ ID NO: 3736524 - DNA, 25 bp, Homo sapien
gcaggcatcaacagggctattagca

SEQ ID NO: 3736525 - DNA, 25 bp, Homo sapien
gcacttgcacccttttgtatgtgag

SEQ ID NO: 3736526 - DNA, 25 bp, Homo sapien
acttgcacccttttgtatgtgagct

SEQ ID NO: 3736527 - DNA, 25 bp, Homo sapien
cttgcacccttttgtatgtgagctg

SEQ ID NO: 3736528 - DNA, 25 bp, Homo sapien
cacttgcacccttttgtatgtgagc

SEQ ID NO: 3736529 - DNA, 25 bp, Homo sapien
cagactgcattaattcacgaaacga

SEQ ID NO: 3736530 - DNA, 25 bp, Homo sapien
tatgatatgcttactacagactgca

SEQ ID NO: 3736531 - DNA, 25 bp, Homo sapien
tgtttcaggctaccacagtgaataa

SEQ ID NO: 3736532 - DNA, 25 bp, Homo sapien
tttgcacgtgtggtaagcataggct

SEQ ID NO: 3736533 - DNA, 25 bp, Homo sapien
taggcctcccagtagcattggatgc

SEQ ID NO: 3736534 - DNA, 25 bp, Homo sapien
gaaaaagatccaactcaacacaagg

SEQ ID NO: 3736535 - DNA, 25 bp, Homo sapien
tacattgacggtgaaaaacaagccg

SEQ ID NO: 3736536 - DNA, 25 bp, Homo sapien
ggctggcatctcaaagactactata

SEQ ID NO: 3736537 - DNA, 25 bp, Homo sapien
ttgcagtaggggcacaatagctgct

SEQ ID NO: 3736538 - DNA, 25 bp, Homo sapien
ttcatctcttgtaacacagtctgag

SEQ ID NO: 3736539 - DNA, 25 bp, Homo sapien
tttactagtaagttgccccacctgc

SEQ ID NO: 3736540 - DNA, 25 bp, Homo sapien
taaagttcagcgttggcatggccat

SEQ ID NO: 3736541 - DNA, 25 bp, Homo sapien
cttctataggaggtaatgattctgc

SEQ ID NO: 3736542 - DNA, 25 bp, Homo sapien
ctcagtgaggtaaacaacttgccca

SEQ ID NO: 3736543 - DNA, 25 bp, Homo sapien
tagaccctgcatactcataggtagt

SEQ ID NO: 3736544 - DNA, 25 bp, Homo sapien
gatggaggctatcggtaatggaacc

SEQ ID NO: 3736545 - DNA, 25 bp, Homo sapien
aggaaaagataatcagggcttggga

SEQ ID NO: 3736546 - DNA, 25 bp, Homo sapien
cagggcttgggaaagcctaatttat

SEQ ID NO: 3736547 - DNA, 25 bp, Homo sapien
aaggaaaagataatcagggcttggg

SEQ ID NO: 3736548 - DNA, 25 bp, Homo sapien
tcagggcttgggaaagcctaattta

SEQ ID NO: 3736549 - DNA, 25 bp, Homo sapien
aacaattcctgccttatggtaggct

SEQ ID NO: 3736550 - DNA, 25 bp, Homo sapien
aattgagtaactcctctctggtaaa

SEQ ID NO: 3736551 - DNA, 25 bp, Homo sapien
tcctagggacttataagaaagcaag

SEQ ID NO: 3736552 - DNA, 25 bp, Homo sapien
gcgtaagatcttcacttaaccagaa

SEQ ID NO: 3736553 - DNA, 25 bp, Homo sapien
tttgatcgtgcttacagactgctcc

SEQ ID NO: 3736554 - DNA, 25 bp, Homo sapien
tcccatttacaattagcctcatctt

SEQ ID NO: 3736555 - DNA, 25 bp, Homo sapien
gagtggttacactttcaccaaagtc

SEQ ID NO: 3736556 - DNA, 25 bp, Homo sapien
agactgctccatcacatatgttaat

SEQ ID NO: 3736557 - DNA, 25 bp, Homo sapien
tgtctattttctcaaggtgtacagt

SEQ ID NO: 3736558 - DNA, 25 bp, Homo sapien
ctattttctcaaggtgtacagttac

SEQ ID NO: 3736559 - DNA, 25 bp, Homo sapien
gaatagagatagctttacgtcctcc

SEQ ID NO: 3736560 - DNA, 25 bp, Homo sapien
tttttatggtgaaacgatgctgact

SEQ ID NO: 3736561 - DNA, 25 bp, Homo sapien
gtctaattgaacttgcagcacactg

SEQ ID NO: 3736562 - DNA, 25 bp, Homo sapien
tcttgtctcgttcctaatttcaggg

SEQ ID NO: 3736563 - DNA, 25 bp, Homo sapien
acccagcccactgggtacataacca

SEQ ID NO: 3736564 - DNA, 25 bp, Homo sapien
taatacagagtatacctagaattct

SEQ ID NO: 3736565 - DNA, 25 bp, Homo sapien
tctacttctagtttgctgttagttt

SEQ ID NO: 3736566 - DNA, 25 bp, Homo sapien
tcttgtatactcttcacccagccca

SEQ ID NO: 3736567 - DNA, 25 bp, Homo sapien
gatgcttgacattagttcagttttt

SEQ ID NO: 3736568 - DNA, 25 bp, Homo sapien
ctgtcccataggtttttgtatgttc

SEQ ID NO: 3736569 - DNA, 25 bp, Homo sapien
gaagatgcttgacattagttcagtt

SEQ ID NO: 3736570 - DNA, 25 bp, Homo sapien
gagaagatgcttgacattagttcag

SEQ ID NO: 3736571 - DNA, 25 bp, Homo sapien
gccccatagtataattagaagtcag

SEQ ID NO: 3736572 - DNA, 25 bp, Homo sapien
tatttcaccagtgtttatggtttat

SEQ ID NO: 3736573 - DNA, 25 bp, Homo sapien
tactatagccccatagtataattag

SEQ ID NO: 3736574 - DNA, 25 bp, Homo sapien
ctctatcctgtaccaatggtctatt

SEQ ID NO: 3736575 - DNA, 25 bp, Homo sapien
tgcccaattggtagccacagcaaac

SEQ ID NO: 3736576 - DNA, 25 bp, Homo sapien
gaggcaagatacagccaatgtgtct

SEQ ID NO: 3736577 - DNA, 25 bp, Homo sapien
aatgtagcccaaggatagtctcaat

SEQ ID NO: 3736578 - DNA, 25 bp, Homo sapien
tttctagtgagaggcaagatacagc

SEQ ID NO: 3736579 - DNA, 25 bp, Homo sapien
tgctaatgggtttctgaattccaat

SEQ ID NO: 3736580 - DNA, 25 bp, Homo sapien
ccttgctaatgggtttctgaattcc

SEQ ID NO: 3736581 - DNA, 25 bp, Homo sapien
gttccttgctaatgggtttctgaat

SEQ ID NO: 3736582 - DNA, 25 bp, Homo sapien
cttgctaatgggtttctgaattcca

SEQ ID NO: 3736583 - DNA, 25 bp, Homo sapien
ttgaaagtactactttttctatcat

SEQ ID NO: 3736584 - DNA, 25 bp, Homo sapien
cttgaaagtactactttttctatca

SEQ ID NO: 3736585 - DNA, 25 bp, Homo sapien
ctaggtgaatgaactgagagccaag

SEQ ID NO: 3736586 - DNA, 25 bp, Homo sapien
tgatctcttgcatccactcagggtg

SEQ ID NO: 3736587 - DNA, 25 bp, Homo sapien
tgcaactgctacagggccctctgtt

SEQ ID NO: 3736588 - DNA, 25 bp, Homo sapien
gagccaagaggaagatttaccgcca

SEQ ID NO: 3736589 - DNA, 25 bp, Homo sapien
ggaccatgacaagatgcaaaagcca

SEQ ID NO: 3736590 - DNA, 25 bp, Homo sapien
gcagaggggcaaagtggatctccag

SEQ ID NO: 3736591 - DNA, 25 bp, Homo sapien
ggctgcctcaaggaccatgacaaga

SEQ ID NO: 3736592 - DNA, 25 bp, Homo sapien
cctgatggctgcctcaaggaccatg

SEQ ID NO: 3736593 - DNA, 25 bp, Homo sapien
gagaggctagtgtcattacccaaac

SEQ ID NO: 3736594 - DNA, 25 bp, Homo sapien
tgtcgcaaattctggataaaggatg

SEQ ID NO: 3736595 - DNA, 25 bp, Homo sapien
cataggctttcatatgcagcagcaa

SEQ ID NO: 3736596 - DNA, 25 bp, Homo sapien
gcagcaagagagtttctgagaggct

SEQ ID NO: 3736597 - DNA, 25 bp, Homo sapien
tgaataagtccaagcttctccagaa

SEQ ID NO: 3736598 - DNA, 25 bp, Homo sapien
aataagtccaagcttctccagaaaa

SEQ ID NO: 3736599 - DNA, 25 bp, Homo sapien
cctgaataagtccaagcttctccag

SEQ ID NO: 3736600 - DNA, 25 bp, Homo sapien
gaataagtccaagcttctccagaaa

SEQ ID NO: 3736601 - DNA, 25 bp, Homo sapien
tgtctaattgtctccgatgtcagcg

SEQ ID NO: 3736602 - DNA, 25 bp, Homo sapien
cgccaagagattgacggtttacaca

SEQ ID NO: 3736603 - DNA, 25 bp, Homo sapien
cacggctttgatattcgccaagaga

SEQ ID NO: 3736604 - DNA, 25 bp, Homo sapien
tgtggaaacaatgagccttcttgct

SEQ ID NO: 3736605 - DNA, 25 bp, Homo sapien
ttattaaagctttgtaagatttctc

SEQ ID NO: 3736606 - DNA, 25 bp, Homo sapien
ttgtaagatttctctaggatctcca

SEQ ID NO: 3736607 - DNA, 25 bp, Homo sapien
tcactgttattaaagctttgtaaga

SEQ ID NO: 3736608 - DNA, 25 bp, Homo sapien
tgtaagatttctctaggatctccat

SEQ ID NO: 3736609 - DNA, 25 bp, Homo sapien
tatccactccacttcacgtgaagca

SEQ ID NO: 3736610 - DNA, 25 bp, Homo sapien
agcagagtccctctgacttttgcca

SEQ ID NO: 3736611 - DNA, 25 bp, Homo sapien
cagaaaatcttcactactggaaaaa

SEQ ID NO: 3736612 - DNA, 25 bp, Homo sapien
gcctcttcagttgttctggggacta

SEQ ID NO: 3736613 - DNA, 25 bp, Homo sapien
cacgcccttgacccccggcttcttg

SEQ ID NO: 3736614 - DNA, 25 bp, Homo sapien
ttcttgcactgagggaagcagcggc

SEQ ID NO: 3736615 - DNA, 25 bp, Homo sapien
gcgctccgccctccagacccacgcc

SEQ ID NO: 3736616 - DNA, 25 bp, Homo sapien
ccccggcttcttgcactgagggaag

SEQ ID NO: 3736617 - DNA, 25 bp, Homo sapien
cctgctttgacggttttagcggcag

SEQ ID NO: 3736618 - DNA, 25 bp, Homo sapien
caggaaagtggtaagttaggcctgc

SEQ ID NO: 3736619 - DNA, 25 bp, Homo sapien
gccagcacgggcagaaatagggact

SEQ ID NO: 3736620 - DNA, 25 bp, Homo sapien
tgagtccggctcccgtgctctcttg

SEQ ID NO: 3736621 - DNA, 25 bp, Homo sapien
ctggaaggagcaaggccaccaggtc

SEQ ID NO: 3736622 - DNA, 25 bp, Homo sapien
agcaaggccaccaggtccagagaac

SEQ ID NO: 3736623 - DNA, 25 bp, Homo sapien
aggagcaaggccaccaggtccagag

SEQ ID NO: 3736624 - DNA, 25 bp, Homo sapien
tggaaggagcaaggccaccaggtcc

SEQ ID NO: 3736625 - DNA, 25 bp, Homo sapien
gaggagagcccttcaggtttgctga

SEQ ID NO: 3736626 - DNA, 25 bp, Homo sapien
aaaagcattcagatgcacacccttc

SEQ ID NO: 3736627 - DNA, 25 bp, Homo sapien
gttggaactgaaagcttctgtttga

SEQ ID NO: 3736628 - DNA, 25 bp, Homo sapien
cagatgcacacccttcttggttgga

SEQ ID NO: 3736629 - DNA, 25 bp, Homo sapien
ggtaccctctatgccaatagctggg

SEQ ID NO: 3736630 - DNA, 25 bp, Homo sapien
gcaggtaccctctatgccaatagct

SEQ ID NO: 3736631 - DNA, 25 bp, Homo sapien
cctctatgccaatagctgggcctgc

SEQ ID NO: 3736632 - DNA, 25 bp, Homo sapien
gaggcaggtaccctctatgccaata

SEQ ID NO: 3736633 - DNA, 25 bp, Homo sapien
tctctctctctcttttggttttctg

SEQ ID NO: 3736634 - DNA, 25 bp, Homo sapien
ctctctctcttttggttttctggtt

SEQ ID NO: 3736635 - DNA, 25 bp, Homo sapien
tacttcttccttccaggtctctctc

SEQ ID NO: 3736636 - DNA, 25 bp, Homo sapien
acttcttccttccaggtctctctct

SEQ ID NO: 3736637 - DNA, 25 bp, Homo sapien
tcctgtcccgtaaacgcctgcgctt

SEQ ID NO: 3736638 - DNA, 25 bp, Homo sapien
cgtaaacgcctgcgcttcctttaag

SEQ ID NO: 3736639 - DNA, 25 bp, Homo sapien
aacgcctgcgcttcctttaaggagt

SEQ ID NO: 3736640 - DNA, 25 bp, Homo sapien
cgctcctgtcccgtaaacgcctgcg

SEQ ID NO: 3736641 - DNA, 25 bp, Homo sapien
ctgaagttggaggcatccaaaataa

SEQ ID NO: 3736642 - DNA, 25 bp, Homo sapien
catccaaaataaggcggggcacagt

SEQ ID NO: 3736643 - DNA, 25 bp, Homo sapien
tgggcggcggagtccctgagccttg

SEQ ID NO: 3736644 - DNA, 25 bp, Homo sapien
gggcggcggagtccctgagccttga

SEQ ID NO: 3736645 - DNA, 25 bp, Homo sapien
aggccttactgcccctactcgtgta

SEQ ID NO: 3736646 - DNA, 25 bp, Homo sapien
ccctactcgtgtactgtgcctgaag

SEQ ID NO: 3736647 - DNA, 25 bp, Homo sapien
tactgcccctactcgtgtactgtgc

SEQ ID NO: 3736648 - DNA, 25 bp, Homo sapien
accggccctagccaggccttactgc

SEQ ID NO: 3736649 - DNA, 25 bp, Homo sapien
caaacaaatcttgggaagcgaggag

SEQ ID NO: 3736650 - DNA, 25 bp, Homo sapien
tcttctaaagcgtgtgcagcacggg

SEQ ID NO: 3736651 - DNA, 25 bp, Homo sapien
tgacgggtgtagacgttgcaaacaa

SEQ ID NO: 3736652 - DNA, 25 bp, Homo sapien
cacttccggacacgctcttctaaag

SEQ ID NO: 3736653 - DNA, 25 bp, Homo sapien
ctgaaatcgatattaattcctgcaa

SEQ ID NO: 3736654 - DNA, 25 bp, Homo sapien
caggagactgaaatcgatattaatt

SEQ ID NO: 3736655 - DNA, 25 bp, Homo sapien
atcgatattaattcctgcaaagaga

SEQ ID NO: 3736656 - DNA, 25 bp, Homo sapien
ggagactgaaatcgatattaattcc

SEQ ID NO: 3736657 - DNA, 25 bp, Homo sapien
aggcgcgtagcttcgggcacaattg

SEQ ID NO: 3736658 - DNA, 25 bp, Homo sapien
gggcggtggccgacagcttcccact

SEQ ID NO: 3736659 - DNA, 25 bp, Homo sapien
aaagcggctgccggcggtagcctgc

SEQ ID NO: 3736660 - DNA, 25 bp, Homo sapien
tcaccctacggcctcccaggcgcgt

SEQ ID NO: 3736661 - DNA, 25 bp, Homo sapien
tcggtggtgtcggagaccgcggcca

SEQ ID NO: 3736662 - DNA, 25 bp, Homo sapien
agaaccggcgcaccaagcagaagaa

SEQ ID NO: 3736663 - DNA, 25 bp, Homo sapien
caaggactcggagctacgctcggtg

SEQ ID NO: 3736664 - DNA, 25 bp, Homo sapien
cacgtgcagcgtgctacggctgctg

SEQ ID NO: 3736665 - DNA, 25 bp, Homo sapien
agcatttcggagttgcgctgttcgc

SEQ ID NO: 3736666 - DNA, 25 bp, Homo sapien
ggtgtcggacaactacaactcgccg

SEQ ID NO: 3736667 - DNA, 25 bp, Homo sapien
aattgcaacagcgagtgtgcgtccc

SEQ ID NO: 3736668 - DNA, 25 bp, Homo sapien
cgctgttcgctacctgatcgccagg

SEQ ID NO: 3736669 - DNA, 25 bp, Homo sapien
cttcaccgacagaaggaggccgtac

SEQ ID NO: 3736670 - DNA, 25 bp, Homo sapien
tctgcagggaagtgaatgccccatc

SEQ ID NO: 3736671 - DNA, 25 bp, Homo sapien
ggaaggcctagaatcctcctgcgca

SEQ ID NO: 3736672 - DNA, 25 bp, Homo sapien
gcaggtgtccgcatgggtttcccag

SEQ ID NO: 3736673 - DNA, 25 bp, Homo sapien
agggtaaacaccagtccactgtgtc

SEQ ID NO: 3736674 - DNA, 25 bp, Homo sapien
tcagggtaaacaccagtccactgtg

SEQ ID NO: 3736675 - DNA, 25 bp, Homo sapien
gtcagggtaaacaccagtccactgt

SEQ ID NO: 3736676 - DNA, 25 bp, Homo sapien
ctggtcagggtaaacaccagtccac

SEQ ID NO: 3736677 - DNA, 25 bp, Homo sapien
cagggctggaattttcctctccggg

SEQ ID NO: 3736678 - DNA, 25 bp, Homo sapien
tcttctcctggagctaaagaactca

SEQ ID NO: 3736679 - DNA, 25 bp, Homo sapien
gacacatgcccgtgttctctcactg

SEQ ID NO: 3736680 - DNA, 25 bp, Homo sapien
tgtgctatacagtcccagttctgct

SEQ ID NO: 3736681 - DNA, 25 bp, Homo sapien
tcttgcggcgagttccgggagttta

SEQ ID NO: 3736682 - DNA, 25 bp, Homo sapien
tgttttcaacgctcctcttgcggcg

SEQ ID NO: 3736683 - DNA, 25 bp, Homo sapien
cgcaggaagttgaggcggccaacat

SEQ ID NO: 3736684 - DNA, 25 bp, Homo sapien
cccgagcgtcgaggaaagacaggac

SEQ ID NO: 3736685 - DNA, 25 bp, Homo sapien
ggtgaaaccgtctagaggcccagcc

SEQ ID NO: 3736686 - DNA, 25 bp, Homo sapien
ctttgggtgcaggcgcggcctttct

SEQ ID NO: 3736687 - DNA, 25 bp, Homo sapien
caggcgcggcctttctccgaaggga

SEQ ID NO: 3736688 - DNA, 25 bp, Homo sapien
gagaaatgataagcagcggtgaaac

SEQ ID NO: 3736689 - DNA, 25 bp, Homo sapien
gacatagaacggtccaaatagaaat

SEQ ID NO: 3736690 - DNA, 25 bp, Homo sapien
actttatgtggacggtactgggaca

SEQ ID NO: 3736691 - DNA, 25 bp, Homo sapien
cttctttgacatagaacggtccaaa

SEQ ID NO: 3736692 - DNA, 25 bp, Homo sapien
gcaacgggtccttggaagaagatac

SEQ ID NO: 3736693 - DNA, 25 bp, Homo sapien
atcatgggtaagcctggcgctgctg

SEQ ID NO: 3736694 - DNA, 25 bp, Homo sapien
tcatgggtaagcctggcgctgctgc

SEQ ID NO: 3736695 - DNA, 25 bp, Homo sapien
gatcgccttccgagtttacgtagaa

SEQ ID NO: 3736696 - DNA, 25 bp, Homo sapien
aaaaagcgctggaggttggccgcct

SEQ ID NO: 3736697 - DNA, 25 bp, Homo sapien
taacatgcgaaagagggcacggtcc

SEQ ID NO: 3736698 - DNA, 25 bp, Homo sapien
ccgaagaaaggtccgatagaaggcg

SEQ ID NO: 3736699 - DNA, 25 bp, Homo sapien
tgctgcgcagcgaatctgccgggct

SEQ ID NO: 3736700 - DNA, 25 bp, Homo sapien
ctcgggatagcttctctgttaggcg

SEQ ID NO: 3736701 - DNA, 25 bp, Homo sapien
gagaaaaaatctgtcccgcgcagcc

SEQ ID NO: 3736702 - DNA, 25 bp, Homo sapien
gcactttcggcgctggataccaggg

SEQ ID NO: 3736703 - DNA, 25 bp, Homo sapien
aaggtgccaacgaaagatgccctgg

SEQ ID NO: 3736704 - DNA, 25 bp, Homo sapien
tctctctgaacgcaagcctcttcct

SEQ ID NO: 3736705 - DNA, 25 bp, Homo sapien
ccttccgttcgcctgggcctgtagt

SEQ ID NO: 3736706 - DNA, 25 bp, Homo sapien
ctgtagtcgaagtctccttgggtcc

SEQ ID NO: 3736707 - DNA, 25 bp, Homo sapien
ttctcggcacccgtagaagccagtg

SEQ ID NO: 3736708 - DNA, 25 bp, Homo sapien
agcctgggacaaaccatccggttgg

SEQ ID NO: 3736709 - DNA, 25 bp, Homo sapien
tatcaagctcagtctcaaagcctgg

SEQ ID NO: 3736710 - DNA, 25 bp, Homo sapien
tgtgcccacgacagcagtcttctcg

SEQ ID NO: 3736711 - DNA, 25 bp, Homo sapien
gatactttctctaccggcgctgtgt

SEQ ID NO: 3736712 - DNA, 25 bp, Homo sapien
taccgccggattagcaggcaaaaat

SEQ ID NO: 3736713 - DNA, 25 bp, Homo sapien
gatgtaattgacttcctaccgccgg

SEQ ID NO: 3736714 - DNA, 25 bp, Homo sapien
tacgtggtaataacccctcagagag

SEQ ID NO: 3736715 - DNA, 25 bp, Homo sapien
gaaaaagactccaatctgtcccgca

SEQ ID NO: 3736716 - DNA, 25 bp, Homo sapien
aaaagactccaatctgtcccgcagg

SEQ ID NO: 3736717 - DNA, 25 bp, Homo sapien
aaaaagactccaatctgtcccgcag

SEQ ID NO: 3736718 - DNA, 25 bp, Homo sapien
aagaaaaagactccaatctgtcccg

SEQ ID NO: 3736719 - DNA, 25 bp, Homo sapien
ggctggatcgttttcggaaactgcc

SEQ ID NO: 3736720 - DNA, 25 bp, Homo sapien
gatcgttttcggaaactgccaccag

SEQ ID NO: 3736721 - DNA, 25 bp, Homo sapien
tccaacaatagagctggattttgct

SEQ ID NO: 3736722 - DNA, 25 bp, Homo sapien
caatagagctggattttgcttcctc

SEQ ID NO: 3736723 - DNA, 25 bp, Homo sapien
ccccatctctgaaagggccaaggat

SEQ ID NO: 3736724 - DNA, 25 bp, Homo sapien
gcggatttccaagtcgtctgcacag

SEQ ID NO: 3736725 - DNA, 25 bp, Homo sapien
tgcacagatcattgaccccgcagga

SEQ ID NO: 3736726 - DNA, 25 bp, Homo sapien
cattgcttcctactgaatgcccagg

SEQ ID NO: 3736727 - DNA, 25 bp, Homo sapien
tccagtccctgccagatgctagcgg

SEQ ID NO: 3736728 - DNA, 25 bp, Homo sapien
cggaagctgccaatctgcttgcggg

SEQ ID NO: 3736729 - DNA, 25 bp, Homo sapien
accccggaagctgccaatctgcttg

SEQ ID NO: 3736730 - DNA, 25 bp, Homo sapien
cctgccagatgctagcgggaaggca

SEQ ID NO: 3736731 - DNA, 25 bp, Homo sapien
caggcgggcaggagaagtggcggac

SEQ ID NO: 3736732 - DNA, 25 bp, Homo sapien
tatgaggacgcacacagcacgggca

SEQ ID NO: 3736733 - DNA, 25 bp, Homo sapien
cagcatcagctccggaggcgcgctg

SEQ ID NO: 3736734 - DNA, 25 bp, Homo sapien
aagtggcggacgcagtcggccaccc

SEQ ID NO: 3736735 - DNA, 25 bp, Homo sapien
agctggcgatccgagagcagtgact

SEQ ID NO: 3736736 - DNA, 25 bp, Homo sapien
ggctgacgaactgtcaaagccgcca

SEQ ID NO: 3736737 - DNA, 25 bp, Homo sapien
tgttgttcctacagcacagttcccg

SEQ ID NO: 3736738 - DNA, 25 bp, Homo sapien
gctgcgccacgtctctcaagcagag

SEQ ID NO: 3736739 - DNA, 25 bp, Homo sapien
caatgaatccgctctggagtaggag

SEQ ID NO: 3736740 - DNA, 25 bp, Homo sapien
tagagggtgcctgtaaataactgtc

SEQ ID NO: 3736741 - DNA, 25 bp, Homo sapien
gaaagcggtagcaattatccccagt

SEQ ID NO: 3736742 - DNA, 25 bp, Homo sapien
aaatttagatgagttgccgcaaggg

SEQ ID NO: 3736743 - DNA, 25 bp, Homo sapien
tagggcccctcttcaacatgtgtgt

SEQ ID NO: 3736744 - DNA, 25 bp, Homo sapien
gtctatttcccaattggtgtggaac

SEQ ID NO: 3736745 - DNA, 25 bp, Homo sapien
aagctgatgtagggcccctcttcaa

SEQ ID NO: 3736746 - DNA, 25 bp, Homo sapien
ctcttcaacatgtgtgtctatttcc

SEQ ID NO: 3736747 - DNA, 25 bp, Homo sapien
ccatacagcctaagtttgaccccaa

SEQ ID NO: 3736748 - DNA, 25 bp, Homo sapien
gattaaagtctgagatgcaccggga

SEQ ID NO: 3736749 - DNA, 25 bp, Homo sapien
ttgaccccaacgagattaaagtctg

SEQ ID NO: 3736750 - DNA, 25 bp, Homo sapien
gtctgagatgcaccgggaatgatgt

SEQ ID NO: 3736751 - DNA, 25 bp, Homo sapien
cctgggggtgccccgagacctccat

SEQ ID NO: 3736752 - DNA, 25 bp, Homo sapien
gcctgggggtgccccgagacctcca

SEQ ID NO: 3736753 - DNA, 25 bp, Homo sapien
acagcacccaccagggcgtaggtca

SEQ ID NO: 3736754 - DNA, 25 bp, Homo sapien
ggccgtcctcaatggcagagaagac

SEQ ID NO: 3736755 - DNA, 25 bp, Homo sapien
gcagttcaagattctgcagagctcc

SEQ ID NO: 3736756 - DNA, 25 bp, Homo sapien
cagggcgtaggtcaccagaaagcag

SEQ ID NO: 3736757 - DNA, 25 bp, Homo sapien
caaagctttgcctccacggattgca

SEQ ID NO: 3736758 - DNA, 25 bp, Homo sapien
gggtccccttctctcccgcagactg

SEQ ID NO: 3736759 - DNA, 25 bp, Homo sapien
caccaagtctgagattgggggtccc

SEQ ID NO: 3736760 - DNA, 25 bp, Homo sapien
tctctcccgcagactgagacccaga

SEQ ID NO: 3736761 - DNA, 25 bp, Homo sapien
caccttctgcagatgcccctggaga

SEQ ID NO: 3736762 - DNA, 25 bp, Homo sapien
cttctgcagatgcccctggagatcc

SEQ ID NO: 3736763 - DNA, 25 bp, Homo sapien
tgaggcttcaccttctgcagatgcc

SEQ ID NO: 3736764 - DNA, 25 bp, Homo sapien
ccctggagatcctgttttctgtctt

SEQ ID NO: 3736765 - DNA, 25 bp, Homo sapien
gctgaacaccgtgcagcagaaaaag

SEQ ID NO: 3736766 - DNA, 25 bp, Homo sapien
aagagcgagctcaggaaggaccagt

SEQ ID NO: 3736767 - DNA, 25 bp, Homo sapien
aaagagcgagctcaggaaggaccag

SEQ ID NO: 3736768 - DNA, 25 bp, Homo sapien
acggtgctgaacaccgtgcagcaga

SEQ ID NO: 3736769 - DNA, 25 bp, Homo sapien
ctgagtgatgggccacgctcctggt

SEQ ID NO: 3736770 - DNA, 25 bp, Homo sapien
cccaagagctctggccctgtggctg

SEQ ID NO: 3736771 - DNA, 25 bp, Homo sapien
tgggccacgctcctggtgagggctc

SEQ ID NO: 3736772 - DNA, 25 bp, Homo sapien
cctggtgagggctctgacccaagag

SEQ ID NO: 3736773 - DNA, 25 bp, Homo sapien
tttgggtcccagtacaaggctcaga

SEQ ID NO: 3736774 - DNA, 25 bp, Homo sapien
tcccttgctggagattccacagctc

SEQ ID NO: 3736775 - DNA, 25 bp, Homo sapien
gctcagaggggccacgtcccttgct

SEQ ID NO: 3736776 - DNA, 25 bp, Homo sapien
gatgggcacttgctctctcgaagga

SEQ ID NO: 3736777 - DNA, 25 bp, Homo sapien
caccagttcgggacacgagttactc

SEQ ID NO: 3736778 - DNA, 25 bp, Homo sapien
cagctgcacaggaaatgtaggcaaa

SEQ ID NO: 3736779 - DNA, 25 bp, Homo sapien
tccgtgagaacgaggaacatcaggg

SEQ ID NO: 3736780 - DNA, 25 bp, Homo sapien
gggataccaaagagagcatagagca

SEQ ID NO: 3736781 - DNA, 25 bp, Homo sapien
aacttcccttttgcaaagaatagca

SEQ ID NO: 3736782 - DNA, 25 bp, Homo sapien
gtatatgtcaatcagcctgttttgc

SEQ ID NO: 3736783 - DNA, 25 bp, Homo sapien
cccttttgcaaagaatagcataaca

SEQ ID NO: 3736784 - DNA, 25 bp, Homo sapien
catttttgtatatgtcaatcagcct

SEQ ID NO: 3736785 - DNA, 25 bp, Homo sapien
gggaaagcttctggactggccattg

SEQ ID NO: 3736786 - DNA, 25 bp, Homo sapien
tacccatggtggaaactagggcatg

SEQ ID NO: 3736787 - DNA, 25 bp, Homo sapien
acttccgtgtcagtcaagaaacctg

SEQ ID NO: 3736788 - DNA, 25 bp, Homo sapien
tacctacgctgtggacacctctgga

SEQ ID NO: 3736789 - DNA, 25 bp, Homo sapien
atgagctgagtgctggagaaagctg

SEQ ID NO: 3736790 - DNA, 25 bp, Homo sapien
caaaggcaatgagctgagtgctgga

SEQ ID NO: 3736791 - DNA, 25 bp, Homo sapien
caatgagctgagtgctggagaaagc

SEQ ID NO: 3736792 - DNA, 25 bp, Homo sapien
tgagtgctggagaaagctgagccat

SEQ ID NO: 3736793 - DNA, 25 bp, Homo sapien
tctggcactagtcgctgaacaaagg

SEQ ID NO: 3736794 - DNA, 25 bp, Homo sapien
tagagataacactcccgtgtctggc

SEQ ID NO: 3736795 - DNA, 25 bp, Homo sapien
caagcatgcattagtagccaccagg

SEQ ID NO: 3736796 - DNA, 25 bp, Homo sapien
tgtgcatcgggtcactccttagaga

SEQ ID NO: 3736797 - DNA, 25 bp, Homo sapien
agccaggtggggcagagaacacagg

SEQ ID NO: 3736798 - DNA, 25 bp, Homo sapien
gagaacacaggggctgccgctcaac

SEQ ID NO: 3736799 - DNA, 25 bp, Homo sapien
agagaacacaggggctgccgctcaa

SEQ ID NO: 3736800 - DNA, 25 bp, Homo sapien
cagagagccaggtggggcagagaac

SEQ ID NO: 3736801 - DNA, 25 bp, Homo sapien
gggcatcccggaaaagggcatcgtc

SEQ ID NO: 3736802 - DNA, 25 bp, Homo sapien
cccaggtaggatccggagtgtgaga

SEQ ID NO: 3736803 - DNA, 25 bp, Homo sapien
aaaagggcatcgtccctgaaggctg

SEQ ID NO: 3736804 - DNA, 25 bp, Homo sapien
tcacagagtgggtgcatcaagagca

SEQ ID NO: 3736805 - DNA, 25 bp, Homo sapien
attttccccaccgtcagttactgag

SEQ ID NO: 3736806 - DNA, 25 bp, Homo sapien
atttatgatgcaacaagggactgct

SEQ ID NO: 3736807 - DNA, 25 bp, Homo sapien
gttactgagtgaccatgaaacccac

SEQ ID NO: 3736808 - DNA, 25 bp, Homo sapien
cccaatttatgatgcaacaagggac

SEQ ID NO: 3736809 - DNA, 25 bp, Homo sapien
tgtctccttgtgggtccagtgatct

SEQ ID NO: 3736810 - DNA, 25 bp, Homo sapien
ctgtctccttgtgggtccagtgatc

SEQ ID NO: 3736811 - DNA, 25 bp, Homo sapien
tagaggaaacccagctaaatcaaga

SEQ ID NO: 3736812 - DNA, 25 bp, Homo sapien
gggctataatgaagccagatgtcca

SEQ ID NO: 3736813 - DNA, 25 bp, Homo sapien
gatggaatcctagcacaaccactgt

SEQ ID NO: 3736814 - DNA, 25 bp, Homo sapien
tgtccatactttatgtgaagggcct

SEQ ID NO: 3736815 - DNA, 25 bp, Homo sapien
agggacaatgccagcccggcgttcc

SEQ ID NO: 3736816 - DNA, 25 bp, Homo sapien
gccagctggatgtagatggctccag

SEQ ID NO: 3736817 - DNA, 25 bp, Homo sapien
ggcgttcccgcctccggatcactgt

SEQ ID NO: 3736818 - DNA, 25 bp, Homo sapien
tggctccagggacaatgccagcccg

SEQ ID NO: 3736819 - DNA, 25 bp, Homo sapien
gggtgagaggtggttcctagagcca

SEQ ID NO: 3736820 - DNA, 25 bp, Homo sapien
gcgtctgggtgagaggtggttccta

SEQ ID NO: 3736821 - DNA, 25 bp, Homo sapien
actgctaagggctaagagcctgcct

SEQ ID NO: 3736822 - DNA, 25 bp, Homo sapien
tcatcctcactgctaagggctaaga

SEQ ID NO: 3736823 - DNA, 25 bp, Homo sapien
aggtgagggtcccaggtctcagaaa

SEQ ID NO: 3736824 - DNA, 25 bp, Homo sapien
tgagggtcccaggtctcagaaagtg

SEQ ID NO: 3736825 - DNA, 25 bp, Homo sapien
ggggaggtgagggtcccaggtctca

SEQ ID NO: 3736826 - DNA, 25 bp, Homo sapien
gtcccaggtctcagaaagtgggagc

SEQ ID NO: 3736827 - DNA, 25 bp, Homo sapien
gggtgccactcggaggagcctttga

SEQ ID NO: 3736828 - DNA, 25 bp, Homo sapien
tctgcagcccgatgcggggtgccac

SEQ ID NO: 3736829 - DNA, 25 bp, Homo sapien
ccactcggaggagcctttgagcctt

SEQ ID NO: 3736830 - DNA, 25 bp, Homo sapien
gaaggggacacttttcagtgtcgcc

SEQ ID NO: 3736831 - DNA, 25 bp, Homo sapien
ccgtgaggacgggaatgatggccgc

SEQ ID NO: 3736832 - DNA, 25 bp, Homo sapien
tcagtgtccctgaaatgggccgtga

SEQ ID NO: 3736833 - DNA, 25 bp, Homo sapien
aataaatcacgtggctctttgagcc

SEQ ID NO: 3736834 - DNA, 25 bp, Homo sapien
accagggctttcttgtggctccaag

SEQ ID NO: 3736835 - DNA, 25 bp, Homo sapien
tcggggtcgcttgcgatgcctgccc

SEQ ID NO: 3736836 - DNA, 25 bp, Homo sapien
gtgggctccgtcagtccgggcggct

SEQ ID NO: 3736837 - DNA, 25 bp, Homo sapien
cgggtcctccgtgcccgcgccaacg

SEQ ID NO: 3736838 - DNA, 25 bp, Homo sapien
gccaacgcccgcaccgcagtgggct

SEQ ID NO: 3736839 - DNA, 25 bp, Homo sapien
gcaccgcgccctgcgagcagggaac

SEQ ID NO: 3736840 - DNA, 25 bp, Homo sapien
ggcccgctcccctccggcaccgcgc

SEQ ID NO: 3736841 - DNA, 25 bp, Homo sapien
tcccctccggcaccgcgccctgcga

SEQ ID NO: 3736842 - DNA, 25 bp, Homo sapien
ctgcgagcagggaaccggggccgtg

SEQ ID NO: 3736843 - DNA, 25 bp, Homo sapien
gcgagcgccgtcggggacccaatct

SEQ ID NO: 3736844 - DNA, 25 bp, Homo sapien
tccctggaaagagcgcccgcgagcg

SEQ ID NO: 3736845 - DNA, 25 bp, Homo sapien
gtgaggacccaaggcggccgtggac

SEQ ID NO: 3736846 - DNA, 25 bp, Homo sapien
tgcctcgagcgcgtccccacgagag

SEQ ID NO: 3736847 - DNA, 25 bp, Homo sapien
tgcagccagcggaccagcgccagct

SEQ ID NO: 3736848 - DNA, 25 bp, Homo sapien
agcagcgccaggaacacgatgaaca

SEQ ID NO: 3736849 - DNA, 25 bp, Homo sapien
ccagcgccagctcgctcagggccat

SEQ ID NO: 3736850 - DNA, 25 bp, Homo sapien
gagcttccgcgagcggcggctctcc

SEQ ID NO: 3736851 - DNA, 25 bp, Homo sapien
aacttgcacgttttcattcaggagg

SEQ ID NO: 3736852 - DNA, 25 bp, Homo sapien
aggtctctggtagcattcccggtga

SEQ ID NO: 3736853 - DNA, 25 bp, Homo sapien
cactgggacagtcggaaggaacagc

SEQ ID NO: 3736854 - DNA, 25 bp, Homo sapien
tggacggtggctttcgaggcaaaca

SEQ ID NO: 3736855 - DNA, 25 bp, Homo sapien
ctgctcagtggtaagcgctgggcat

SEQ ID NO: 3736856 - DNA, 25 bp, Homo sapien
ctgtgcctgcactttcaacacaggc

SEQ ID NO: 3736857 - DNA, 25 bp, Homo sapien
tgtgcctgcactttcaacacaggcc

SEQ ID NO: 3736858 - DNA, 25 bp, Homo sapien
gtggtaagcgctgggcatcattttt

SEQ ID NO: 3736859 - DNA, 25 bp, Homo sapien
accgggggctcacacggcactgcag

SEQ ID NO: 3736860 - DNA, 25 bp, Homo sapien
tcatgtggacaaaagaaacccaaca

SEQ ID NO: 3736861 - DNA, 25 bp, Homo sapien
tgcagttcagatggccatcgggtga

SEQ ID NO: 3736862 - DNA, 25 bp, Homo sapien
tgattctctgtaccccttattcatg

SEQ ID NO: 3736863 - DNA, 25 bp, Homo sapien
taattgttgagacaaacatgatgca

SEQ ID NO: 3736864 - DNA, 25 bp, Homo sapien
atgatgcagaatcccgcaaatatgg

SEQ ID NO: 3736865 - DNA, 25 bp, Homo sapien
ttgagacaaacatgatgcagaatcc

SEQ ID NO: 3736866 - DNA, 25 bp, Homo sapien
tgcagaatcccgcaaatatgggaat

SEQ ID NO: 3736867 - DNA, 25 bp, Homo sapien
ggtccaagaccgcacatcagtgctg

SEQ ID NO: 3736868 - DNA, 25 bp, Homo sapien
agagggggtccaagaccgcacatca

SEQ ID NO: 3736869 - DNA, 25 bp, Homo sapien
gggggtccaagaccgcacatcagtg

SEQ ID NO: 3736870 - DNA, 25 bp, Homo sapien
gggtccaagaccgcacatcagtgct

SEQ ID NO: 3736871 - DNA, 25 bp, Homo sapien
cctgcagcgacctggcaatcagcag

SEQ ID NO: 3736872 - DNA, 25 bp, Homo sapien
ggacgagccgatgccctgcagcgac

SEQ ID NO: 3736873 - DNA, 25 bp, Homo sapien
gcaggacgagccgatgccctgcagc

SEQ ID NO: 3736874 - DNA, 25 bp, Homo sapien
ctgcagcgacctggcaatcagcagg

SEQ ID NO: 3736875 - DNA, 25 bp, Homo sapien
caagaggaaagtgggtgccttctcc

SEQ ID NO: 3736876 - DNA, 25 bp, Homo sapien
cctcacgaactcactcaggcattcc

SEQ ID NO: 3736877 - DNA, 25 bp, Homo sapien
gggcccctcacgaactcactcaggc

SEQ ID NO: 3736878 - DNA, 25 bp, Homo sapien
ccagctcactctgcaaggggcccct

SEQ ID NO: 3736879 - DNA, 25 bp, Homo sapien
gaataatgcgtgactcgccttccct

SEQ ID NO: 3736880 - DNA, 25 bp, Homo sapien
gccagctccggggaacagcaaaaga

SEQ ID NO: 3736881 - DNA, 25 bp, Homo sapien
cagcaaaagaataatgcgtgactcg

SEQ ID NO: 3736882 - DNA, 25 bp, Homo sapien
caaaagaataatgcgtgactcgcct

SEQ ID NO: 3736883 - DNA, 25 bp, Homo sapien
ctcccaaggcgattcccatgacgtt

SEQ ID NO: 3736884 - DNA, 25 bp, Homo sapien
gattcccatgacgttgcctctctct

SEQ ID NO: 3736885 - DNA, 25 bp, Homo sapien
ggcgattcccatgacgttgcctctc

SEQ ID NO: 3736886 - DNA, 25 bp, Homo sapien
caaggcgattcccatgacgttgcct

SEQ ID NO: 3736887 - DNA, 25 bp, Homo sapien
caaaggcccgagagaaacaagatcc

SEQ ID NO: 3736888 - DNA, 25 bp, Homo sapien
tgtcagtgcaaactgcgccagggtc

SEQ ID NO: 3736889 - DNA, 25 bp, Homo sapien
agagacttcgctccttgtacaccag

SEQ ID NO: 3736890 - DNA, 25 bp, Homo sapien
tcactgaatgttcccgaggaaaggg

SEQ ID NO: 3736891 - DNA, 25 bp, Homo sapien
ctccatccaagagtaccagggcggc

SEQ ID NO: 3736892 - DNA, 25 bp, Homo sapien
atccaagagtaccagggcggccagc

SEQ ID NO: 3736893 - DNA, 25 bp, Homo sapien
gcaccaggaacggagccgtcttccc

SEQ ID NO: 3736894 - DNA, 25 bp, Homo sapien
actcatagagcacactcccgaaggg

SEQ ID NO: 3736895 - DNA, 25 bp, Homo sapien
tggcccaagcgcgtgccagcacgat

SEQ ID NO: 3736896 - DNA, 25 bp, Homo sapien
atggcgcccacgtggactcactcac

SEQ ID NO: 3736897 - DNA, 25 bp, Homo sapien
taaaaaagacaagcccctcttcaga

SEQ ID NO: 3736898 - DNA, 25 bp, Homo sapien
tgccaaggtcatggcatggcgccca

SEQ ID NO: 3736899 - DNA, 25 bp, Homo sapien
gctgcacccgggacggctggagcac

SEQ ID NO: 3736900 - DNA, 25 bp, Homo sapien
acccgggacggctggagcacaaaga

SEQ ID NO: 3736901 - DNA, 25 bp, Homo sapien
ctctggctgcacccgggacggctgg

SEQ ID NO: 3736902 - DNA, 25 bp, Homo sapien
gacggctggagcacaaagagctgaa

SEQ ID NO: 3736903 - DNA, 25 bp, Homo sapien
gaaaaaaacacgggtcagaagcagc

SEQ ID NO: 3736904 - DNA, 25 bp, Homo sapien
aaaacacgggtcagaagcagcacca

SEQ ID NO: 3736905 - DNA, 25 bp, Homo sapien
aaaaaacacgggtcagaagcagcac

SEQ ID NO: 3736906 - DNA, 25 bp, Homo sapien
aaacacgggtcagaagcagcaccat

SEQ ID NO: 3736907 - DNA, 25 bp, Homo sapien
cagcaatgaggatgtacgggtcctt

SEQ ID NO: 3736908 - DNA, 25 bp, Homo sapien
caatgaggatgtacgggtccttcag

SEQ ID NO: 3736909 - DNA, 25 bp, Homo sapien
tgcagcaatgaggatgtacgggtcc

SEQ ID NO: 3736910 - DNA, 25 bp, Homo sapien
tcagcagcgtggttaggggtgtccc

SEQ ID NO: 3736911 - DNA, 25 bp, Homo sapien
agggtgtttgaacggcctccctgct

SEQ ID NO: 3736912 - DNA, 25 bp, Homo sapien
ggaacagtcccttggatagatgcag

SEQ ID NO: 3736913 - DNA, 25 bp, Homo sapien
tagatgcagaccattatccttccca

SEQ ID NO: 3736914 - DNA, 25 bp, Homo sapien
tctaggccaaagcatgtcctttagc

SEQ ID NO: 3736915 - DNA, 25 bp, Homo sapien
ctggctccagcatggcgatgcccat

SEQ ID NO: 3736916 - DNA, 25 bp, Homo sapien
ctttcgggaacacatggtctccatc

SEQ ID NO: 3736917 - DNA, 25 bp, Homo sapien
cactttcgggaacacatggtctcca

SEQ ID NO: 3736918 - DNA, 25 bp, Homo sapien
gcgatgcccatgtttgcaaagcaga

SEQ ID NO: 3736919 - DNA, 25 bp, Homo sapien
tgttaacaatgaatatcacaggaga

SEQ ID NO: 3736920 - DNA, 25 bp, Homo sapien
catttcatgcaatagggtggtaaac

SEQ ID NO: 3736921 - DNA, 25 bp, Homo sapien
aattttatggctgtccagttagtcc

SEQ ID NO: 3736922 - DNA, 25 bp, Homo sapien
aaaatgttttacgtcctcaatcagc

SEQ ID NO: 3736923 - DNA, 25 bp, Homo sapien
tcagcagcgggtatgagcaacaagg

SEQ ID NO: 3736924 - DNA, 25 bp, Homo sapien
gctgactcggtgtcagatccaagtc

SEQ ID NO: 3736925 - DNA, 25 bp, Homo sapien
tctgctgtttgctgactcggtgtca

SEQ ID NO: 3736926 - DNA, 25 bp, Homo sapien
cagcagcgggtatgagcaacaaggc

SEQ ID NO: 3736927 - DNA, 25 bp, Homo sapien
atccagccccggaagcaaaggtgga

SEQ ID NO: 3736928 - DNA, 25 bp, Homo sapien
ctccggtcatcacgaagcctgcggg

SEQ ID NO: 3736929 - DNA, 25 bp, Homo sapien
ttcctccaagctcaagatgacccct

SEQ ID NO: 3736930 - DNA, 25 bp, Homo sapien
agaggggctccggtcatcacgaagc

SEQ ID NO: 3736931 - DNA, 25 bp, Homo sapien
atccaagttttattgctgtccccat

SEQ ID NO: 3736932 - DNA, 25 bp, Homo sapien
accacgtccggcctcctatccaagt

SEQ ID NO: 3736933 - DNA, 25 bp, Homo sapien
ccaagttttattgctgtccccatag

SEQ ID NO: 3736934 - DNA, 25 bp, Homo sapien
cacgtccggcctcctatccaagttt

SEQ ID NO: 3736935 - DNA, 25 bp, Homo sapien
gaaatgaaagtcctttctctatcaa

SEQ ID NO: 3736936 - DNA, 25 bp, Homo sapien
aatatccggcgcctgccggatccgg

SEQ ID NO: 3736937 - DNA, 25 bp, Homo sapien
cggatccggtctggacccacgtggc

SEQ ID NO: 3736938 - DNA, 25 bp, Homo sapien
cccagcagctaatatccggcgcctg

SEQ ID NO: 3736939 - DNA, 25 bp, Homo sapien
tgtgtgcaagtatcccaaaaatatt

SEQ ID NO: 3736940 - DNA, 25 bp, Homo sapien
tttgtgtgcaagtatcccaaaaata

SEQ ID NO: 3736941 - DNA, 25 bp, Homo sapien
gataagagatactagctggcaagaa

SEQ ID NO: 3736942 - DNA, 25 bp, Homo sapien
aagagatactagctggcaagaaggc

SEQ ID NO: 3736943 - DNA, 25 bp, Homo sapien
ttatcattcccagaagagcacaaag

SEQ ID NO: 3736944 - DNA, 25 bp, Homo sapien
acataaaatgctgactccaacaatt

SEQ ID NO: 3736945 - DNA, 25 bp, Homo sapien
gactccaacaattatcattcccaga

SEQ ID NO: 3736946 - DNA, 25 bp, Homo sapien
tgctgactccaacaattatcattcc

SEQ ID NO: 3736947 - DNA, 25 bp, Homo sapien
gaaaaacttgtcaccggcatatgtg

SEQ ID NO: 3736948 - DNA, 25 bp, Homo sapien
tctgagcgtggtatgcctgttccct

SEQ ID NO: 3736949 - DNA, 25 bp, Homo sapien
cctcatgagggatggatattggcca

SEQ ID NO: 3736950 - DNA, 25 bp, Homo sapien
catatgtgaaagatcagcctagtcc

SEQ ID NO: 3736951 - DNA, 25 bp, Homo sapien
attgcaaaaccaactccaaagttcg

SEQ ID NO: 3736952 - DNA, 25 bp, Homo sapien
caaagttcggagctatgagtccata

SEQ ID NO: 3736953 - DNA, 25 bp, Homo sapien
caactccaaagttcggagctatgag

SEQ ID NO: 3736954 - DNA, 25 bp, Homo sapien
gttcggagctatgagtccataaatg

SEQ ID NO: 3736955 - DNA, 25 bp, Homo sapien
aatacatatgtgaagcctttgcccc

SEQ ID NO: 3736956 - DNA, 25 bp, Homo sapien
ccaaccagacagtggaggacaaggg

SEQ ID NO: 3736957 - DNA, 25 bp, Homo sapien
tctgtcctcagtgaaagccatgctg

SEQ ID NO: 3736958 - DNA, 25 bp, Homo sapien
tgtgccactgtaccactcaaaggtt

SEQ ID NO: 3736959 - DNA, 25 bp, Homo sapien
catagtctaagcgtgtggcccaggt

SEQ ID NO: 3736960 - DNA, 25 bp, Homo sapien
gggacaagtgaaccagaaaacagca

SEQ ID NO: 3736961 - DNA, 25 bp, Homo sapien
gccaggggccgtacagttagcaacc

SEQ ID NO: 3736962 - DNA, 25 bp, Homo sapien
gaagcaccaaaaggatgcaggccag

SEQ ID NO: 3736963 - DNA, 25 bp, Homo sapien
gccgcaggtctacgaggtagcccat

SEQ ID NO: 3736964 - DNA, 25 bp, Homo sapien
caaaatgccacatccgcaatggcgt

SEQ ID NO: 3736965 - DNA, 25 bp, Homo sapien
tggcgtacacactcccatagacgga

SEQ ID NO: 3736966 - DNA, 25 bp, Homo sapien
gataggcatcattgacgaatccacc

SEQ ID NO: 3736967 - DNA, 25 bp, Homo sapien
tatcccaataattgtcatgagccat

SEQ ID NO: 3736968 - DNA, 25 bp, Homo sapien
cttctttggcaggtggacttcgaag

SEQ ID NO: 3736969 - DNA, 25 bp, Homo sapien
catggaaatccaattgcctttgcaa

SEQ ID NO: 3736970 - DNA, 25 bp, Homo sapien
ggtggacttcgaagaaaaaagcaga

SEQ ID NO: 3736971 - DNA, 25 bp, Homo sapien
ggaaaccaagactcataagcctcta

SEQ ID NO: 3736972 - DNA, 25 bp, Homo sapien
aattcaggtattgctggactgacgg

SEQ ID NO: 3736973 - DNA, 25 bp, Homo sapien
cagggccagtcactctgttgggatt

SEQ ID NO: 3736974 - DNA, 25 bp, Homo sapien
gaaataggaacacactttttgagcc

SEQ ID NO: 3736975 - DNA, 25 bp, Homo sapien
cccaaggccacagataagccatcag

SEQ ID NO: 3736976 - DNA, 25 bp, Homo sapien
ccactgatgtttgccggcttggcaa

SEQ ID NO: 3736977 - DNA, 25 bp, Homo sapien
catcaggctgccgttcacaaacgga

SEQ ID NO: 3736978 - DNA, 25 bp, Homo sapien
caaggggagcccattcaggagttct

SEQ ID NO: 3736979 - DNA, 25 bp, Homo sapien
cagagcaaagccctcttactgagag

SEQ ID NO: 3736980 - DNA, 25 bp, Homo sapien
ctatttaaatacctgcaaagggaca

SEQ ID NO: 3736981 - DNA, 25 bp, Homo sapien
gaaggtgtgtttgactctcaaccaa

SEQ ID NO: 3736982 - DNA, 25 bp, Homo sapien
gcccctttcatgagttaggatctcc

SEQ ID NO: 3736983 - DNA, 25 bp, Homo sapien
tcatcttcacctatcggatatgact

SEQ ID NO: 3736984 - DNA, 25 bp, Homo sapien
cacctatcggatatgactggatatt

SEQ ID NO: 3736985 - DNA, 25 bp, Homo sapien
ggatatgactggatattattctgag

SEQ ID NO: 3736986 - DNA, 25 bp, Homo sapien
tatcggatatgactggatattattc

SEQ ID NO: 3736987 - DNA, 25 bp, Homo sapien
tattagagacattccacactgcaca

SEQ ID NO: 3736988 - DNA, 25 bp, Homo sapien
cagaaagacacagagccgtaaaggc

SEQ ID NO: 3736989 - DNA, 25 bp, Homo sapien
tgttggcaatcgaccataaccatgg

SEQ ID NO: 3736990 - DNA, 25 bp, Homo sapien
tgtagaagtaagaaactagcctgcc

SEQ ID NO: 3736991 - DNA, 25 bp, Homo sapien
aaaagtatggtcaagctaacctggg

SEQ ID NO: 3736992 - DNA, 25 bp, Homo sapien
gaatgtggctagttacatatctcaa

SEQ ID NO: 3736993 - DNA, 25 bp, Homo sapien
gggtggcttttacctgatgcctaca

SEQ ID NO: 3736994 - DNA, 25 bp, Homo sapien
tgacaaccatcaggacaacaatgtt

SEQ ID NO: 3736995 - DNA, 25 bp, Homo sapien
catgatacccaagcatgttgctgaa

SEQ ID NO: 3736996 - DNA, 25 bp, Homo sapien
tactgatgtaatcttgctgccatgc

SEQ ID NO: 3736997 - DNA, 25 bp, Homo sapien
ccattgataacctggaaggtggact

SEQ ID NO: 3736998 - DNA, 25 bp, Homo sapien
tacacttgaggcaatctgctcagtg

SEQ ID NO: 3736999 - DNA, 25 bp, Homo sapien
tgctttggcgtcttacagttgtaaa

SEQ ID NO: 3737000 - DNA, 25 bp, Homo sapien
gttataacaaatttgctgcatgccc

SEQ ID NO: 3737001 - DNA, 25 bp, Homo sapien
tacataggaattgggaccagttctc

SEQ ID NO: 3737002 - DNA, 25 bp, Homo sapien
tgcttgctttcgatgcttctgtgaa

SEQ ID NO: 3737003 - DNA, 25 bp, Homo sapien
tctgctgccttagctaaatcaggtg

SEQ ID NO: 3737004 - DNA, 25 bp, Homo sapien
aaatcaggtgaaaggctacaagctc

SEQ ID NO: 3737005 - DNA, 25 bp, Homo sapien
gaaattggtcgtgatctgtacaggg

SEQ ID NO: 3737006 - DNA, 25 bp, Homo sapien
gaaattgatcaggagttggaacaca

SEQ ID NO: 3737007 - DNA, 25 bp, Homo sapien
tgcagtgctgcaagataactttggc

SEQ ID NO: 3737008 - DNA, 25 bp, Homo sapien
ttttgtcaagctcatgccaatcggg

SEQ ID NO: 3737009 - DNA, 25 bp, Homo sapien
ccaatcgggttatgaagaggaagct

SEQ ID NO: 3737010 - DNA, 25 bp, Homo sapien
cattaagtcatagtcccaaacgtgt

SEQ ID NO: 3737011 - DNA, 25 bp, Homo sapien
gcctcagacaccaaatagattatta

SEQ ID NO: 3737012 - DNA, 25 bp, Homo sapien
ggcctcagacaccaaatagattatt

SEQ ID NO: 3737013 - DNA, 25 bp, Homo sapien
tggcctcagacaccaaatagattat

SEQ ID NO: 3737014 - DNA, 25 bp, Homo sapien
cctcatgagaatcctataagccaag

SEQ ID NO: 3737015 - DNA, 25 bp, Homo sapien
tcctcatgagaatcctataagccaa

SEQ ID NO: 3737016 - DNA, 25 bp, Homo sapien
catgagaatcctataagccaagata

SEQ ID NO: 3737017 - DNA, 25 bp, Homo sapien
agattcctcatgagaatcctataag

SEQ ID NO: 3737018 - DNA, 25 bp, Homo sapien
tcagggaactcagggcaaaagaaag

SEQ ID NO: 3737019 - DNA, 25 bp, Homo sapien
gaggcctctcttacctgagtgtaca

SEQ ID NO: 3737020 - DNA, 25 bp, Homo sapien
ttctgaaaactagagttcgtgcccc

SEQ ID NO: 3737021 - DNA, 25 bp, Homo sapien
tctctgtgaaccagacacctgaggc

SEQ ID NO: 3737022 - DNA, 25 bp, Homo sapien
tctagcacgcaggtctggatgatag

SEQ ID NO: 3737023 - DNA, 25 bp, Homo sapien
ctctagcacgcaggtctggatgata

SEQ ID NO: 3737024 - DNA, 25 bp, Homo sapien
tagcacgcaggtctggatgatagac

SEQ ID NO: 3737025 - DNA, 25 bp, Homo sapien
ctagcacgcaggtctggatgataga

SEQ ID NO: 3737026 - DNA, 25 bp, Homo sapien
tgtatcattatgttagaaagcctgg

SEQ ID NO: 3737027 - DNA, 25 bp, Homo sapien
gaatgtgtgaagtacctgtaaccaa

SEQ ID NO: 3737028 - DNA, 25 bp, Homo sapien
gcagtactgctcacttaaagccttg

SEQ ID NO: 3737029 - DNA, 25 bp, Homo sapien
caaagactgcatgtaaggcattgag

SEQ ID NO: 3737030 - DNA, 25 bp, Homo sapien
tgagtcagaagctttagacagtgac

SEQ ID NO: 3737031 - DNA, 25 bp, Homo sapien
gacagtgactattaattggcttcag

SEQ ID NO: 3737032 - DNA, 25 bp, Homo sapien
actaataatagtggtgttacctctg

SEQ ID NO: 3737033 - DNA, 25 bp, Homo sapien
tcatatagctatccttgagtcagaa

SEQ ID NO: 3737034 - DNA, 25 bp, Homo sapien
acttgaatgcattcttttcttatct

SEQ ID NO: 3737035 - DNA, 25 bp, Homo sapien
taaatagcagtttaacataagcatt

SEQ ID NO: 3737036 - DNA, 25 bp, Homo sapien
cgtgcccagacctgattttctaaat

SEQ ID NO: 3737037 - DNA, 25 bp, Homo sapien
gtaaattaatttagacttgaatgca

SEQ ID NO: 3737038 - DNA, 25 bp, Homo sapien
atagcagtgatcatgctctgttcaa

SEQ ID NO: 3737039 - DNA, 25 bp, Homo sapien
tggcccctgtaggcttttttaatca

SEQ ID NO: 3737040 - DNA, 25 bp, Homo sapien
gatggccggcatccggaacgcgtca

SEQ ID NO: 3737041 - DNA, 25 bp, Homo sapien
agatcccgaccgcagctccagaagt

SEQ ID NO: 3737042 - DNA, 25 bp, Homo sapien
ctccagaagtgacggccacgtgggt

SEQ ID NO: 3737043 - DNA, 25 bp, Homo sapien
agaagcacaccgcaggatgagcgac

SEQ ID NO: 3737044 - DNA, 25 bp, Homo sapien
ttaaccagagactgacagcgggtcg

SEQ ID NO: 3737045 - DNA, 25 bp, Homo sapien
taactgcctcatagatggactaccg

SEQ ID NO: 3737046 - DNA, 25 bp, Homo sapien
cagcgggtcgcatattaatcttcca

SEQ ID NO: 3737047 - DNA, 25 bp, Homo sapien
gaaatttcgaagatccacctcggtg

SEQ ID NO: 3737048 - DNA, 25 bp, Homo sapien
ggaatgcaatgactctgactctgta

SEQ ID NO: 3737049 - DNA, 25 bp, Homo sapien
gaagaatattttgcaactcgggatg

SEQ ID NO: 3737050 - DNA, 25 bp, Homo sapien
gttggtcatgtttcacacaagggag

SEQ ID NO: 3737051 - DNA, 25 bp, Homo sapien
gattctcacaggtattctgaggagc

SEQ ID NO: 3737052 - DNA, 25 bp, Homo sapien
aaataaagggcatgctaacaccaat

SEQ ID NO: 3737053 - DNA, 25 bp, Homo sapien
tatcaaacacagtcaagtgtggctt

SEQ ID NO: 3737054 - DNA, 25 bp, Homo sapien
cagaaatggcatagtaaaaatacgg

SEQ ID NO: 3737055 - DNA, 25 bp, Homo sapien
gatgggaaaccctactacatacctg

SEQ ID NO: 3737056 - DNA, 25 bp, Homo sapien
ctgtccacttctgtcattgtgaatg

SEQ ID NO: 3737057 - DNA, 25 bp, Homo sapien
catcagcccagactgctcgggccat

SEQ ID NO: 3737058 - DNA, 25 bp, Homo sapien
tctgtccacttctgtcattgtgaat

SEQ ID NO: 3737059 - DNA, 25 bp, Homo sapien
ctccgaaactctccattccaaattt

SEQ ID NO: 3737060 - DNA, 25 bp, Homo sapien
gagaaaacttgattggcccacattg

SEQ ID NO: 3737061 - DNA, 25 bp, Homo sapien
tgagtgctcatccacccctggatct

SEQ ID NO: 3737062 - DNA, 25 bp, Homo sapien
gatttagttccaatgacgcccagcc

SEQ ID NO: 3737063 - DNA, 25 bp, Homo sapien
tctgtttgaacatcacagtcagggt

SEQ ID NO: 3737064 - DNA, 25 bp, Homo sapien
gattgccgcagtgataggtccctgg

SEQ ID NO: 3737065 - DNA, 25 bp, Homo sapien
gaacatcacagtcagggtctctggg

SEQ ID NO: 3737066 - DNA, 25 bp, Homo sapien
ctgagaatgtgattgccgcagtgat

SEQ ID NO: 3737067 - DNA, 25 bp, Homo sapien
gcactgagacacattcgatggatgg

SEQ ID NO: 3737068 - DNA, 25 bp, Homo sapien
gacacattcgatggatggagccaag

SEQ ID NO: 3737069 - DNA, 25 bp, Homo sapien
acattcgatggatggagccaagggc

SEQ ID NO: 3737070 - DNA, 25 bp, Homo sapien
tgagacacattcgatggatggagcc

SEQ ID NO: 3737071 - DNA, 25 bp, Homo sapien
ggctgacctggttgcaatgaaatcc

SEQ ID NO: 3737072 - DNA, 25 bp, Homo sapien
tctgagaggtaggattagagcccag

SEQ ID NO: 3737073 - DNA, 25 bp, Homo sapien
ctttaatcacatctggctgacctgg

SEQ ID NO: 3737074 - DNA, 25 bp, Homo sapien
gtatgtccacgttttactttaatca

SEQ ID NO: 3737075 - DNA, 25 bp, Homo sapien
agctttcccagatggtgattcaggg

SEQ ID NO: 3737076 - DNA, 25 bp, Homo sapien
tcccagatggtgattcagggccttg

SEQ ID NO: 3737077 - DNA, 25 bp, Homo sapien
cattttcagagtcgcttctttttag

SEQ ID NO: 3737078 - DNA, 25 bp, Homo sapien
ttctttttagccccatgagccagct

SEQ ID NO: 3737079 - DNA, 25 bp, Homo sapien
acaacacagacgtttcagatctggc

SEQ ID NO: 3737080 - DNA, 25 bp, Homo sapien
cacaacacagacgtttcagatctgg

SEQ ID NO: 3737081 - DNA, 25 bp, Homo sapien
cccacaacacagacgtttcagatct

SEQ ID NO: 3737082 - DNA, 25 bp, Homo sapien
caacacagacgtttcagatctggca

SEQ ID NO: 3737083 - DNA, 25 bp, Homo sapien
gaaccgagggtgacattgcagcacc

SEQ ID NO: 3737084 - DNA, 25 bp, Homo sapien
tagccatcagagtgagggaaccgag

SEQ ID NO: 3737085 - DNA, 25 bp, Homo sapien
ccatcggtgagggaggaaccagaat

SEQ ID NO: 3737086 - DNA, 25 bp, Homo sapien
ccgtgaccaggaccgccatcggtga

SEQ ID NO: 3737087 - DNA, 25 bp, Homo sapien
ccagggaagaaagggccgtgaccag

SEQ ID NO: 3737088 - DNA, 25 bp, Homo sapien
gacgatgtcatatcaggctgccctg

SEQ ID NO: 3737089 - DNA, 25 bp, Homo sapien
ctggatcagggggaatcttatgatt

SEQ ID NO: 3737090 - DNA, 25 bp, Homo sapien
ctcctggatcagggggaatcttatg

SEQ ID NO: 3737091 - DNA, 25 bp, Homo sapien
gatcagggggaatcttatgattcca

SEQ ID NO: 3737092 - DNA, 25 bp, Homo sapien
tcagggggaatcttatgattccaac

SEQ ID NO: 3737093 - DNA, 25 bp, Homo sapien
ccaagatcagtgtgacctgatgaat

SEQ ID NO: 3737094 - DNA, 25 bp, Homo sapien
tgacctgatgaatttcgctcaaaca

SEQ ID NO: 3737095 - DNA, 25 bp, Homo sapien
acctgatgaatttcgctcaaacatt

SEQ ID NO: 3737096 - DNA, 25 bp, Homo sapien
taggaagaggggccaagatcagtgt

SEQ ID NO: 3737097 - DNA, 25 bp, Homo sapien
caccaatgctggctactctggagtg

SEQ ID NO: 3737098 - DNA, 25 bp, Homo sapien
ctgctgtgtcgcacccaccaatgct

SEQ ID NO: 3737099 - DNA, 25 bp, Homo sapien
tcatggcatttaccctcactgcctc

SEQ ID NO: 3737100 - DNA, 25 bp, Homo sapien
caatgctggctactctggagtggtg

SEQ ID NO: 3737101 - DNA, 25 bp, Homo sapien
cagtacaatgatggtcactaggtcc

SEQ ID NO: 3737102 - DNA, 25 bp, Homo sapien
cagccagagctacacagcgccttgt

SEQ ID NO: 3737103 - DNA, 25 bp, Homo sapien
ccggcacctggtgctctgtagcagc

SEQ ID NO: 3737104 - DNA, 25 bp, Homo sapien
caactgatatgtgggaggtttctgt

SEQ ID NO: 3737105 - DNA, 25 bp, Homo sapien
gcattcctcttgccacggacacagg

SEQ ID NO: 3737106 - DNA, 25 bp, Homo sapien
ctctggctcgcgcattcctcttgcc

SEQ ID NO: 3737107 - DNA, 25 bp, Homo sapien
tcgcgcattcctcttgccacggaca

SEQ ID NO: 3737108 - DNA, 25 bp, Homo sapien
ttcctcttgccacggacacaggcag

SEQ ID NO: 3737109 - DNA, 25 bp, Homo sapien
taaggcatgactgagtggcatgaaa

SEQ ID NO: 3737110 - DNA, 25 bp, Homo sapien
ggcatgactgagtggcatgaaagca

SEQ ID NO: 3737111 - DNA, 25 bp, Homo sapien
aggcatgactgagtggcatgaaagc

SEQ ID NO: 3737112 - DNA, 25 bp, Homo sapien
aaggcatgactgagtggcatgaaag

SEQ ID NO: 3737113 - DNA, 25 bp, Homo sapien
cccccaggtctgggttacacactgg

SEQ ID NO: 3737114 - DNA, 25 bp, Homo sapien
tcccccaggtctgggttacacactg

SEQ ID NO: 3737115 - DNA, 25 bp, Homo sapien
ccccaggtctgggttacacactggc

SEQ ID NO: 3737116 - DNA, 25 bp, Homo sapien
aagccaggaaagtcaaagccctgcc

SEQ ID NO: 3737117 - DNA, 25 bp, Homo sapien
tgctgcagatcctccgtgagtggca

SEQ ID NO: 3737118 - DNA, 25 bp, Homo sapien
ccctgccctgcaatgttgctgcaga

SEQ ID NO: 3737119 - DNA, 25 bp, Homo sapien
ccaggaaagtcaaagccctgccctg

SEQ ID NO: 3737120 - DNA, 25 bp, Homo sapien
gcagttttttgaaagcggctttgct

SEQ ID NO: 3737121 - DNA, 25 bp, Homo sapien
agcagttttttgaaagcggctttgc

SEQ ID NO: 3737122 - DNA, 25 bp, Homo sapien
cagttttttgaaagcggctttgctg

SEQ ID NO: 3737123 - DNA, 25 bp, Homo sapien
ctgcagcttagtgctggccccaaag

SEQ ID NO: 3737124 - DNA, 25 bp, Homo sapien
tgcagcttagtgctggccccaaagc

SEQ ID NO: 3737125 - DNA, 25 bp, Homo sapien
gtgtcctctgcagcttagtgctggc

SEQ ID NO: 3737126 - DNA, 25 bp, Homo sapien
agtgtcctctgcagcttagtgctgg

SEQ ID NO: 3737127 - DNA, 25 bp, Homo sapien
aacaggtccacctgatgcaaatccc

SEQ ID NO: 3737128 - DNA, 25 bp, Homo sapien
aagacactgtggttggatgcagctg

SEQ ID NO: 3737129 - DNA, 25 bp, Homo sapien
ctgcaacaggtccacctgatgcaaa

SEQ ID NO: 3737130 - DNA, 25 bp, Homo sapien
ctgtgagctggaaagaacctccctg

SEQ ID NO: 3737131 - DNA, 25 bp, Homo sapien
ctgagaatgtgtctctcttgacttt

SEQ ID NO: 3737132 - DNA, 25 bp, Homo sapien
ttttgctgagaatgtgtctctcttg

SEQ ID NO: 3737133 - DNA, 25 bp, Homo sapien
agaatgtgtctctcttgactttgaa

SEQ ID NO: 3737134 - DNA, 25 bp, Homo sapien
attttgctgagaatgtgtctctctt

SEQ ID NO: 3737135 - DNA, 25 bp, Homo sapien
tgattctgcaggccaatgtcacatt

SEQ ID NO: 3737136 - DNA, 25 bp, Homo sapien
accccactctatgctgtccacagcc

SEQ ID NO: 3737137 - DNA, 25 bp, Homo sapien
gattctgcaggccaatgtcacattc

SEQ ID NO: 3737138 - DNA, 25 bp, Homo sapien
tgccttgcaccaacccttttccgcc

SEQ ID NO: 3737139 - DNA, 25 bp, Homo sapien
ctggggggcaggtcagctcaggcat

SEQ ID NO: 3737140 - DNA, 25 bp, Homo sapien
gcagacacatgattacagctgctgg

SEQ ID NO: 3737141 - DNA, 25 bp, Homo sapien
gacgcagacacatgattacagctgc

SEQ ID NO: 3737142 - DNA, 25 bp, Homo sapien
ctggaagacgcagacacatgattac

SEQ ID NO: 3737143 - DNA, 25 bp, Homo sapien
gaagacgcagacacatgattacagc

SEQ ID NO: 3737144 - DNA, 25 bp, Homo sapien
gggagtgctctaggccctgtcctct

SEQ ID NO: 3737145 - DNA, 25 bp, Homo sapien
ccagggaccctaactccttagctgt

SEQ ID NO: 3737146 - DNA, 25 bp, Homo sapien
ttgagtctgggagtgctctaggccc

SEQ ID NO: 3737147 - DNA, 25 bp, Homo sapien
actccttagctgtatccaactctgg

SEQ ID NO: 3737148 - DNA, 25 bp, Homo sapien
ttccacgtggaaagccaagggacac

SEQ ID NO: 3737149 - DNA, 25 bp, Homo sapien
taatgagcaaatgggctgtcctgga

SEQ ID NO: 3737150 - DNA, 25 bp, Homo sapien
tgtaatgagcaaatgggctgtcctg

SEQ ID NO: 3737151 - DNA, 25 bp, Homo sapien
ctgtaatgagcaaatgggctgtcct

SEQ ID NO: 3737152 - DNA, 25 bp, Homo sapien
tgagcaaatgggctgtcctggagcc

SEQ ID NO: 3737153 - DNA, 25 bp, Homo sapien
ctggaaaatcctggtatggcgtggt

SEQ ID NO: 3737154 - DNA, 25 bp, Homo sapien
tcctggtatggcgtggtctcctcgg

SEQ ID NO: 3737155 - DNA, 25 bp, Homo sapien
aaaatcctggtatggcgtggtctcc

SEQ ID NO: 3737156 - DNA, 25 bp, Homo sapien
gtatggcgtggtctcctcggccgac

SEQ ID NO: 3737157 - DNA, 25 bp, Homo sapien
caaacgcgatgagtctccaagctcc

SEQ ID NO: 3737158 - DNA, 25 bp, Homo sapien
tgtctctggcgtgcgtcggctgcca

SEQ ID NO: 3737159 - DNA, 25 bp, Homo sapien
caagtctgcgtcaggagtaagccaa

SEQ ID NO: 3737160 - DNA, 25 bp, Homo sapien
tgagttcaaagtgtaggcgcccagc

SEQ ID NO: 3737161 - DNA, 25 bp, Homo sapien
acttccaccacatcaaggacaaaat

SEQ ID NO: 3737162 - DNA, 25 bp, Homo sapien
aaatggacgtgaatatttgcagaga

SEQ ID NO: 3737163 - DNA, 25 bp, Homo sapien
gctgtgcagttgttaagaacacttc

SEQ ID NO: 3737164 - DNA, 25 bp, Homo sapien
gcagttgttaagaacacttccacca

SEQ ID NO: 3737165 - DNA, 25 bp, Homo sapien
tttgtcactctccatgagccccagt

SEQ ID NO: 3737166 - DNA, 25 bp, Homo sapien
ggagaacccaagcagacgctggctc

SEQ ID NO: 3737167 - DNA, 25 bp, Homo sapien
ccaagcagacgctggctcccatctc

SEQ ID NO: 3737168 - DNA, 25 bp, Homo sapien
tcaggagaacccaagcagacgctgg

SEQ ID NO: 3737169 - DNA, 25 bp, Homo sapien
ctgctgggagcctgctccagaccct

SEQ ID NO: 3737170 - DNA, 25 bp, Homo sapien
gcctgactcaggttggcagaggcat

SEQ ID NO: 3737171 - DNA, 25 bp, Homo sapien
gaagtggccacgaggcctgactcag

SEQ ID NO: 3737172 - DNA, 25 bp, Homo sapien
agaggcatcacagggccgttcccta

SEQ ID NO: 3737173 - DNA, 25 bp, Homo sapien
cccgagggcactcgccattcccaaa

SEQ ID NO: 3737174 - DNA, 25 bp, Homo sapien
agtggagggcccatgtcctccagag

SEQ ID NO: 3737175 - DNA, 25 bp, Homo sapien
gtgcagagccgggaaagcccaaacc

SEQ ID NO: 3737176 - DNA, 25 bp, Homo sapien
caaacccgagggcactcgccattcc

SEQ ID NO: 3737177 - DNA, 25 bp, Homo sapien
cagctcccaagagcagagtcagtgc

SEQ ID NO: 3737178 - DNA, 25 bp, Homo sapien
agctcccaagagcagagtcagtgct

SEQ ID NO: 3737179 - DNA, 25 bp, Homo sapien
gctcccaagagcagagtcagtgctg

SEQ ID NO: 3737180 - DNA, 25 bp, Homo sapien
tcccaagagcagagtcagtgctgac

SEQ ID NO: 3737181 - DNA, 25 bp, Homo sapien
gcaaccggctatggccctgcaggca

SEQ ID NO: 3737182 - DNA, 25 bp, Homo sapien
agaggcaaccggctatggccctgca

SEQ ID NO: 3737183 - DNA, 25 bp, Homo sapien
tgtaggtcagaggcaaccggctatg

SEQ ID NO: 3737184 - DNA, 25 bp, Homo sapien
ggtcagaggcaaccggctatggccc

SEQ ID NO: 3737185 - DNA, 25 bp, Homo sapien
tgctttcaggaacccatccaactat

SEQ ID NO: 3737186 - DNA, 25 bp, Homo sapien
gaatggctgcccagctttgtgtcca

SEQ ID NO: 3737187 - DNA, 25 bp, Homo sapien
tgctgcaaagaacttgagctcctgg

SEQ ID NO: 3737188 - DNA, 25 bp, Homo sapien
taaagtgcgaatcaatttctgctgc

SEQ ID NO: 3737189 - DNA, 25 bp, Homo sapien
tcacactcctcgtggcttctggcat

SEQ ID NO: 3737190 - DNA, 25 bp, Homo sapien
tgtgagagtgtagatccctcatagc

SEQ ID NO: 3737191 - DNA, 25 bp, Homo sapien
ccctcatagcttggactgtcacact

SEQ ID NO: 3737192 - DNA, 25 bp, Homo sapien
gcttggactgtcacactcctcgtgg

SEQ ID NO: 3737193 - DNA, 25 bp, Homo sapien
cttctctcagcagcacgatgggaca

SEQ ID NO: 3737194 - DNA, 25 bp, Homo sapien
tcagcagcacgatgggacactgtca

SEQ ID NO: 3737195 - DNA, 25 bp, Homo sapien
tctcagcagcacgatgggacactgt

SEQ ID NO: 3737196 - DNA, 25 bp, Homo sapien
accctctgatactgctgctttcatc

SEQ ID NO: 3737197 - DNA, 25 bp, Homo sapien
tggggcgtcgcagcaggaggccagg

SEQ ID NO: 3737198 - DNA, 25 bp, Homo sapien
ctggggcgtcgcagcaggaggccag

SEQ ID NO: 3737199 - DNA, 25 bp, Homo sapien
cagagagggagagtccctgcgagct

SEQ ID NO: 3737200 - DNA, 25 bp, Homo sapien
tgtgatacagagagggagagtccct

SEQ ID NO: 3737201 - DNA, 25 bp, Homo sapien
atacagagagggagagtccctgcga

SEQ ID NO: 3737202 - DNA, 25 bp, Homo sapien
ctgtgatacagagagggagagtccc

SEQ ID NO: 3737203 - DNA, 25 bp, Homo sapien
gactaaggaggtggctatatttgct

SEQ ID NO: 3737204 - DNA, 25 bp, Homo sapien
actaaggaggtggctatatttgctg

SEQ ID NO: 3737205 - DNA, 25 bp, Homo sapien
ttaacctgcccttgatctgtgctgg

SEQ ID NO: 3737206 - DNA, 25 bp, Homo sapien
tgtatgcttaattagttcccgaaca

SEQ ID NO: 3737207 - DNA, 25 bp, Homo sapien
tagattgaacgatgttaaagggaca

SEQ ID NO: 3737208 - DNA, 25 bp, Homo sapien
ataaaaacagggtaatgactcgagg

SEQ ID NO: 3737209 - DNA, 25 bp, Homo sapien
aagttgagagaagccagggaaagct

SEQ ID NO: 3737210 - DNA, 25 bp, Homo sapien
gaagttgagagaagccagggaaagc

SEQ ID NO: 3737211 - DNA, 25 bp, Homo sapien
gggggaagaagttgagagaagccag

SEQ ID NO: 3737212 - DNA, 25 bp, Homo sapien
ggggggaagaagttgagagaagcca

SEQ ID NO: 3737213 - DNA, 25 bp, Homo sapien
acagatctcgtccttcatgaactcg

SEQ ID NO: 3737214 - DNA, 25 bp, Homo sapien
tctcattagggttcgacagatctcg

SEQ ID NO: 3737215 - DNA, 25 bp, Homo sapien
tgtaacattagaataaccatgaggt

SEQ ID NO: 3737216 - DNA, 25 bp, Homo sapien
ttgatctgacgggagtgaatctctc

SEQ ID NO: 3737217 - DNA, 25 bp, Homo sapien
cagagagtcagacatctgtacttaa

SEQ ID NO: 3737218 - DNA, 25 bp, Homo sapien
ctggcagagagtcagacatctgtac

SEQ ID NO: 3737219 - DNA, 25 bp, Homo sapien
tacccaaaccactgtagcattttta

SEQ ID NO: 3737220 - DNA, 25 bp, Homo sapien
caaactggcagagagtcagacatct

SEQ ID NO: 3737221 - DNA, 25 bp, Homo sapien
gagcaagataaaggagcaagcctgg

SEQ ID NO: 3737222 - DNA, 25 bp, Homo sapien
aagcctgggaaagcatgcaaggagt

SEQ ID NO: 3737223 - DNA, 25 bp, Homo sapien
acaacccgggaccaacggacagcag

SEQ ID NO: 3737224 - DNA, 25 bp, Homo sapien
caggcccatgtgattaggctttgga

SEQ ID NO: 3737225 - DNA, 25 bp, Homo sapien
agatataagattggggtggagacga

SEQ ID NO: 3737226 - DNA, 25 bp, Homo sapien
tagaggtagatgagatataagattg

SEQ ID NO: 3737227 - DNA, 25 bp, Homo sapien
aaggctgccaccaggtagaggtaga

SEQ ID NO: 3737228 - DNA, 25 bp, Homo sapien
gggaaaggctgccaccaggtagagg

SEQ ID NO: 3737229 - DNA, 25 bp, Homo sapien
atgcattcatttacatgcacctgct

SEQ ID NO: 3737230 - DNA, 25 bp, Homo sapien
ccatgcattcatttacatgcacctg

SEQ ID NO: 3737231 - DNA, 25 bp, Homo sapien
ctcctctacgctgggcccgaagtgt

SEQ ID NO: 3737232 - DNA, 25 bp, Homo sapien
cggcgtgcgcaacaaagggtggcat

SEQ ID NO: 3737233 - DNA, 25 bp, Homo sapien
cgtctggaggagacaccgcgagtga

SEQ ID NO: 3737234 - DNA, 25 bp, Homo sapien
tgtttgcatcccctcggcgtctggg

SEQ ID NO: 3737235 - DNA, 25 bp, Homo sapien
attctggggcccctcgatcctggag

SEQ ID NO: 3737236 - DNA, 25 bp, Homo sapien
ctggggcccctcgatcctggaggtt

SEQ ID NO: 3737237 - DNA, 25 bp, Homo sapien
gcccctcgatcctggaggttggcca

SEQ ID NO: 3737238 - DNA, 25 bp, Homo sapien
gggcccctcgatcctggaggttggc

SEQ ID NO: 3737239 - DNA, 25 bp, Homo sapien
agccgcagctttgccggaccaggag

SEQ ID NO: 3737240 - DNA, 25 bp, Homo sapien
gcgaaggaatactctagttctggcc

SEQ ID NO: 3737241 - DNA, 25 bp, Homo sapien
gggagagcgaaggaatactctagtt

SEQ ID NO: 3737242 - DNA, 25 bp, Homo sapien
cctaattacagacgggctctgctgc

SEQ ID NO: 3737243 - DNA, 25 bp, Homo sapien
gaaaacgggtgcttccaaccgcagc

SEQ ID NO: 3737244 - DNA, 25 bp, Homo sapien
cccaagacccctcgtccagcgtctt

SEQ ID NO: 3737245 - DNA, 25 bp, Homo sapien
tcgtccagcgtcttcttccccggct

SEQ ID NO: 3737246 - DNA, 25 bp, Homo sapien
agcggccgggaaacctctgctggtg

SEQ ID NO: 3737247 - DNA, 25 bp, Homo sapien
ggtttagctcctgcggtctccagcc

SEQ ID NO: 3737248 - DNA, 25 bp, Homo sapien
cctgcggtctccagccccgagttta

SEQ ID NO: 3737249 - DNA, 25 bp, Homo sapien
ctgcggtctccagccccgagtttag

SEQ ID NO: 3737250 - DNA, 25 bp, Homo sapien
cctggtttagctcctgcggtctcca

SEQ ID NO: 3737251 - DNA, 25 bp, Homo sapien
actctggctcttgcctcgtatgcac

SEQ ID NO: 3737252 - DNA, 25 bp, Homo sapien
ggcttaatcgtctcttcctttaata

SEQ ID NO: 3737253 - DNA, 25 bp, Homo sapien
cactctcaggggcttaatcgtctct

SEQ ID NO: 3737254 - DNA, 25 bp, Homo sapien
gcttaatcgtctcttcctttaatac

SEQ ID NO: 3737255 - DNA, 25 bp, Homo sapien
tctcaggggcttaatcgtctcttcc

SEQ ID NO: 3737256 - DNA, 25 bp, Homo sapien
gttgaaactcgtcactccctcacca

SEQ ID NO: 3737257 - DNA, 25 bp, Homo sapien
cacgctgtctcgattcattattgaa

SEQ ID NO: 3737258 - DNA, 25 bp, Homo sapien
cacacacgctgtctcgattcattat

SEQ ID NO: 3737259 - DNA, 25 bp, Homo sapien
cacgttgaaactcgtcactccctca

SEQ ID NO: 3737260 - DNA, 25 bp, Homo sapien
ccgtggaatccgcttgggcttcact

SEQ ID NO: 3737261 - DNA, 25 bp, Homo sapien
caatgtttcagtgacgcatggagcc

SEQ ID NO: 3737262 - DNA, 25 bp, Homo sapien
tggaaacccgtgtcatagcaaggcg

SEQ ID NO: 3737263 - DNA, 25 bp, Homo sapien
gatctatccgttttgagacccaatg

SEQ ID NO: 3737264 - DNA, 25 bp, Homo sapien
gcccattcctctcggagcgcgcgga

SEQ ID NO: 3737265 - DNA, 25 bp, Homo sapien
tagcccattcctctcggagcgcgcg

SEQ ID NO: 3737266 - DNA, 25 bp, Homo sapien
tgactagcccattcctctcggagcg

SEQ ID NO: 3737267 - DNA, 25 bp, Homo sapien
attgactagcccattcctctcggag

SEQ ID NO: 3737268 - DNA, 25 bp, Homo sapien
aacaggccttggacggcctgcgcgg

SEQ ID NO: 3737269 - DNA, 25 bp, Homo sapien
tgaggtcccatatttcgcggcccaa

SEQ ID NO: 3737270 - DNA, 25 bp, Homo sapien
tgcctgaggtcccatatttcgcggc

SEQ ID NO: 3737271 - DNA, 25 bp, Homo sapien
atatttcgcggcccaacccaggtgg

SEQ ID NO: 3737272 - DNA, 25 bp, Homo sapien
cgagaatggtgtcccgagttggaaa

SEQ ID NO: 3737273 - DNA, 25 bp, Homo sapien
gatcgccgaggttctggtcctcacg

SEQ ID NO: 3737274 - DNA, 25 bp, Homo sapien
taagaattcctccaacccactgaga

SEQ ID NO: 3737275 - DNA, 25 bp, Homo sapien
ggtcctcacgttgaaccagaatgct

SEQ ID NO: 3737276 - DNA, 25 bp, Homo sapien
tgtttggttaagtagccctgcgtgg

SEQ ID NO: 3737277 - DNA, 25 bp, Homo sapien
gccttgcagaatacagccacctttg

SEQ ID NO: 3737278 - DNA, 25 bp, Homo sapien
ctgaggctccagcttagagcaaggg

SEQ ID NO: 3737279 - DNA, 25 bp, Homo sapien
gtggatttaggccttgcagaataca

SEQ ID NO: 3737280 - DNA, 25 bp, Homo sapien
tctagctagccaacacgtaggcagg

SEQ ID NO: 3737281 - DNA, 25 bp, Homo sapien
gaaggaaccaggatatgctagttcc

SEQ ID NO: 3737282 - DNA, 25 bp, Homo sapien
ccaggatatgctagttcctctgctc

SEQ ID NO: 3737283 - DNA, 25 bp, Homo sapien
aagtgctgctagacccgagctgcac

SEQ ID NO: 3737284 - DNA, 25 bp, Homo sapien
ttctcctctgcaaaaggcgggcagg

SEQ ID NO: 3737285 - DNA, 25 bp, Homo sapien
tagttcatgagcctaattagtgcgg

SEQ ID NO: 3737286 - DNA, 25 bp, Homo sapien
gaggatcccgagaatcttgcaccaa

SEQ ID NO: 3737287 - DNA, 25 bp, Homo sapien
gattggtcgctattactcgccctga

SEQ ID NO: 3737288 - DNA, 25 bp, Homo sapien
ccgcggcgaggacggacgagaattg

SEQ ID NO: 3737289 - DNA, 25 bp, Homo sapien
ggcgaggacggacgagaattgggga

SEQ ID NO: 3737290 - DNA, 25 bp, Homo sapien
cgcggcgaggacggacgagaattgg

SEQ ID NO: 3737291 - DNA, 25 bp, Homo sapien
gcggcgaggacggacgagaattggg

SEQ ID NO: 3737292 - DNA, 25 bp, Homo sapien
agcgactcgatggtgaagcagcgct

SEQ ID NO: 3737293 - DNA, 25 bp, Homo sapien
cagcgactcgatggtgaagcagcgc

SEQ ID NO: 3737294 - DNA, 25 bp, Homo sapien
gcgactcgatggtgaagcagcgctt

SEQ ID NO: 3737295 - DNA, 25 bp, Homo sapien
agttagcgtagctgagtgccgcggg

SEQ ID NO: 3737296 - DNA, 25 bp, Homo sapien
ctcggcgaacaccaagtccgggttg

SEQ ID NO: 3737297 - DNA, 25 bp, Homo sapien
ggttgggcgggtgcgagaccgcctc

SEQ ID NO: 3737298 - DNA, 25 bp, Homo sapien
gaagccgttgaggaacggatttatg

SEQ ID NO: 3737299 - DNA, 25 bp, Homo sapien
tggcgagtgcgaggagggtaggggg

SEQ ID NO: 3737300 - DNA, 25 bp, Homo sapien
gcgagtgcgaggagggtagggggtg

SEQ ID NO: 3737301 - DNA, 25 bp, Homo sapien
ggtagaaggtggacggatcccgctg

SEQ ID NO: 3737302 - DNA, 25 bp, Homo sapien
gatgacccagatatcggtagcggtg

SEQ ID NO: 3737303 - DNA, 25 bp, Homo sapien
cccagatatcggtagcggtggatga

SEQ ID NO: 3737304 - DNA, 25 bp, Homo sapien
cttggaagcgatgacccagatatcg

SEQ ID NO: 3737305 - DNA, 25 bp, Homo sapien
tgcagttccgcgacgtggcacgtac

SEQ ID NO: 3737306 - DNA, 25 bp, Homo sapien
ggcagtgaaggatgcggcgggagcg

SEQ ID NO: 3737307 - DNA, 25 bp, Homo sapien
cgcgctgcagttccgcgacgtggca

SEQ ID NO: 3737308 - DNA, 25 bp, Homo sapien
gggagcggcgcgctgcagttccgcg

SEQ ID NO: 3737309 - DNA, 25 bp, Homo sapien
actccaaaccagtcgtagcttcgga

SEQ ID NO: 3737310 - DNA, 25 bp, Homo sapien
tccaaaccagtcgtagcttcggaga

SEQ ID NO: 3737311 - DNA, 25 bp, Homo sapien
ctccaaaccagtcgtagcttcggag

SEQ ID NO: 3737312 - DNA, 25 bp, Homo sapien
ggatcctctcgcctccagaagaggg

SEQ ID NO: 3737313 - DNA, 25 bp, Homo sapien
gcattgccgagggtaccaggagcct

SEQ ID NO: 3737314 - DNA, 25 bp, Homo sapien
cctgctctgattcgagcgcactggg

SEQ ID NO: 3737315 - DNA, 25 bp, Homo sapien
tgaacagggtcgaacgcagtcgaaa

SEQ ID NO: 3737316 - DNA, 25 bp, Homo sapien
cgaacctgccttcccgctgtggctg

SEQ ID NO: 3737317 - DNA, 25 bp, Homo sapien
caattaagcaggtcgcggcgagagc

SEQ ID NO: 3737318 - DNA, 25 bp, Homo sapien
cgagagcgccaagccctggagcttt

SEQ ID NO: 3737319 - DNA, 25 bp, Homo sapien
cccaggcctccgaaaagcaggaaag

SEQ ID NO: 3737320 - DNA, 25 bp, Homo sapien
cggcacccaaccagccgctgtcgca

SEQ ID NO: 3737321 - DNA, 25 bp, Homo sapien
aggctcctgacctcggccggctccg

SEQ ID NO: 3737322 - DNA, 25 bp, Homo sapien
acgccgggtctccaccggtgcggca

SEQ ID NO: 3737323 - DNA, 25 bp, Homo sapien
tgtcgcagaggagccagtccccagg

SEQ ID NO: 3737324 - DNA, 25 bp, Homo sapien
gccggtggtcctcccaagggctcac

SEQ ID NO: 3737325 - DNA, 25 bp, Homo sapien
ggccggtggtcctcccaagggctca

SEQ ID NO: 3737326 - DNA, 25 bp, Homo sapien
ggccttcgcatagccgcgccgctcg

SEQ ID NO: 3737327 - DNA, 25 bp, Homo sapien
agggccttcgcatagccgcgccgct

SEQ ID NO: 3737328 - DNA, 25 bp, Homo sapien
ccttcgcatagccgcgccgctcgac

SEQ ID NO: 3737329 - DNA, 25 bp, Homo sapien
ctcagggccttcgcatagccgcgcc

SEQ ID NO: 3737330 - DNA, 25 bp, Homo sapien
gattcttctcaaaggcgtgttccag

SEQ ID NO: 3737331 - DNA, 25 bp, Homo sapien
caaaaggaaactctcggggctagtg

SEQ ID NO: 3737332 - DNA, 25 bp, Homo sapien
gctttcgggccagcgcgttgtgcaa

SEQ ID NO: 3737333 - DNA, 25 bp, Homo sapien
tgttccagccttagaagctgggacg

SEQ ID NO: 3737334 - DNA, 25 bp, Homo sapien
ctccaaacacccagaaaccccactg

SEQ ID NO: 3737335 - DNA, 25 bp, Homo sapien
cagaaatgcagggatgtcttagcca

SEQ ID NO: 3737336 - DNA, 25 bp, Homo sapien
cagctccaaacacccagaaacccca

SEQ ID NO: 3737337 - DNA, 25 bp, Homo sapien
ccagaaatgcagggatgtcttagcc

SEQ ID NO: 3737338 - DNA, 25 bp, Homo sapien
cttcccatcgcccatctccttcagg

SEQ ID NO: 3737339 - DNA, 25 bp, Homo sapien
agcttctgaaagaccgtgggttaca

SEQ ID NO: 3737340 - DNA, 25 bp, Homo sapien
tctgaaagaccgtgggttacacgga

SEQ ID NO: 3737341 - DNA, 25 bp, Homo sapien
aatgagttcaaaactgaaagcttct

SEQ ID NO: 3737342 - DNA, 25 bp, Homo sapien
atgagttcaaaactgaaagcttctg

SEQ ID NO: 3737343 - DNA, 25 bp, Homo sapien
tgcgttagttctttcagagcaccct

SEQ ID NO: 3737344 - DNA, 25 bp, Homo sapien
gagggcatctatatcccgctgagag

SEQ ID NO: 3737345 - DNA, 25 bp, Homo sapien
ccccgagatgcaagtcctaaggtcc

SEQ ID NO: 3737346 - DNA, 25 bp, Homo sapien
gagcacccttctatcaagtgcctga

SEQ ID NO: 3737347 - DNA, 25 bp, Homo sapien
gaggtcacgtctatttcctccggac

SEQ ID NO: 3737348 - DNA, 25 bp, Homo sapien
ttttgttgcgaatctgagccttctt

SEQ ID NO: 3737349 - DNA, 25 bp, Homo sapien
ggcgattctccaccggttaatatgg

SEQ ID NO: 3737350 - DNA, 25 bp, Homo sapien
ctccggactcgcctgcttggtggcg

SEQ ID NO: 3737351 - DNA, 25 bp, Homo sapien
tccccttgtcagagtgcacgttcag

SEQ ID NO: 3737352 - DNA, 25 bp, Homo sapien
gactgtgataaacggaatacctgcc

SEQ ID NO: 3737353 - DNA, 25 bp, Homo sapien
caaaaaagtcctgtgcctggttggg

SEQ ID NO: 3737354 - DNA, 25 bp, Homo sapien
tcactcagctgcctctttagacgag

SEQ ID NO: 3737355 - DNA, 25 bp, Homo sapien
tgcttgaaaacttgccgccgtgcgc

SEQ ID NO: 3737356 - DNA, 25 bp, Homo sapien
gaatggttgaactcggccaatttct

SEQ ID NO: 3737357 - DNA, 25 bp, Homo sapien
tgcgcttggccacacttaacatcat

SEQ ID NO: 3737358 - DNA, 25 bp, Homo sapien
tgtaagaggaccactatcgctgagc

SEQ ID NO: 3737359 - DNA, 25 bp, Homo sapien
tatagtgtgttagaattctaacaaa

SEQ ID NO: 3737360 - DNA, 25 bp, Homo sapien
aaatattgacattgacatacttctt

SEQ ID NO: 3737361 - DNA, 25 bp, Homo sapien
gtatatagtgtgttagaattctaac

SEQ ID NO: 3737362 - DNA, 25 bp, Homo sapien
tattgacattgacatacttcttgga

SEQ ID NO: 3737363 - DNA, 25 bp, Homo sapien
caaaagctcgcaggacgctttgtag

SEQ ID NO: 3737364 - DNA, 25 bp, Homo sapien
tcatattcctggtatgataattgct

SEQ ID NO: 3737365 - DNA, 25 bp, Homo sapien
ttcatattcctggtatgataattgc

SEQ ID NO: 3737366 - DNA, 25 bp, Homo sapien
ctttcacaaaagctcgcaggacgct

SEQ ID NO: 3737367 - DNA, 25 bp, Homo sapien
ctgagatacaaagggcattaacctc

SEQ ID NO: 3737368 - DNA, 25 bp, Homo sapien
cagccggagatagcgcgtaatgaag

SEQ ID NO: 3737369 - DNA, 25 bp, Homo sapien
tatcaaatccttctttgggccggga

SEQ ID NO: 3737370 - DNA, 25 bp, Homo sapien
attgtgggaccctttcagccgccta

SEQ ID NO: 3737371 - DNA, 25 bp, Homo sapien
gggatggcatctcgcaaatatttat

SEQ ID NO: 3737372 - DNA, 25 bp, Homo sapien
atttatattcctcagcgccacggca

SEQ ID NO: 3737373 - DNA, 25 bp, Homo sapien
cacattagacactctaatcctgcca

SEQ ID NO: 3737374 - DNA, 25 bp, Homo sapien
acggcagcccgcgtccacattagac

SEQ ID NO: 3737375 - DNA, 25 bp, Homo sapien
ccaggcaggacccaatggcaacgtg

SEQ ID NO: 3737376 - DNA, 25 bp, Homo sapien
gagcgcagaatctgacccacgatgc

SEQ ID NO: 3737377 - DNA, 25 bp, Homo sapien
cgtgtcccagaaggagcgcagaatc

SEQ ID NO: 3737378 - DNA, 25 bp, Homo sapien
tggcaacgtgcatacagttctccgt

SEQ ID NO: 3737379 - DNA, 25 bp, Homo sapien
cattatgcgagctaattggaaggtg

SEQ ID NO: 3737380 - DNA, 25 bp, Homo sapien
caggagcgaagcaggcaagatcaag

SEQ ID NO: 3737381 - DNA, 25 bp, Homo sapien
gatcaagttctttctgacgtcaggg

SEQ ID NO: 3737382 - DNA, 25 bp, Homo sapien
tatcgctgtaccttatgtcaaggcc

SEQ ID NO: 3737383 - DNA, 25 bp, Homo sapien
gacccaggatgaggccactgccaga

SEQ ID NO: 3737384 - DNA, 25 bp, Homo sapien
gatgaggccactgccagagtggccc

SEQ ID NO: 3737385 - DNA, 25 bp, Homo sapien
ctgacccaggatgaggccactgcca

SEQ ID NO: 3737386 - DNA, 25 bp, Homo sapien
ccaggatgaggccactgccagagtg

SEQ ID NO: 3737387 - DNA, 25 bp, Homo sapien
actgatcaggggctttaagggtcca

SEQ ID NO: 3737388 - DNA, 25 bp, Homo sapien
acatactgatcaggggctttaaggg

SEQ ID NO: 3737389 - DNA, 25 bp, Homo sapien
tcaggggctttaagggtccaagatg

SEQ ID NO: 3737390 - DNA, 25 bp, Homo sapien
tgatcaggggctttaagggtccaag

SEQ ID NO: 3737391 - DNA, 25 bp, Homo sapien
tgattgctgtactagtgaggaaggc

SEQ ID NO: 3737392 - DNA, 25 bp, Homo sapien
ttagcacaggcagggtcgtagaaac

SEQ ID NO: 3737393 - DNA, 25 bp, Homo sapien
tcaaacagaacttggcttcgagatc

SEQ ID NO: 3737394 - DNA, 25 bp, Homo sapien
tcgtagaaacaaaatgggcctccaa

SEQ ID NO: 3737395 - DNA, 25 bp, Homo sapien
cacccaaggatatccatttctccct

SEQ ID NO: 3737396 - DNA, 25 bp, Homo sapien
gcacaggtaatgacaacgcacttga

SEQ ID NO: 3737397 - DNA, 25 bp, Homo sapien
tgacaacgcacttgaggaaactcga

SEQ ID NO: 3737398 - DNA, 25 bp, Homo sapien
tgaggaaactcgataggttggctac

SEQ ID NO: 3737399 - DNA, 25 bp, Homo sapien
tgtgccaatgtccaccatgcgtcga

SEQ ID NO: 3737400 - DNA, 25 bp, Homo sapien
tctctgctgtgccaatgtccaccat

SEQ ID NO: 3737401 - DNA, 25 bp, Homo sapien
atgcgtcgacctcgccctggttgta

SEQ ID NO: 3737402 - DNA, 25 bp, Homo sapien
ttgtactttagacaaagttcttgca

SEQ ID NO: 3737403 - DNA, 25 bp, Homo sapien
ggaaaaaggcagggaggagaaagca

SEQ ID NO: 3737404 - DNA, 25 bp, Homo sapien
cagggaggagaaagcagatggtggc

SEQ ID NO: 3737405 - DNA, 25 bp, Homo sapien
cagtgcattctgggacaaaaggaaa

SEQ ID NO: 3737406 - DNA, 25 bp, Homo sapien
agtgcattctgggacaaaaggaaaa

SEQ ID NO: 3737407 - DNA, 25 bp, Homo sapien
gtgcctttatatcatggcgcacact

SEQ ID NO: 3737408 - DNA, 25 bp, Homo sapien
acacttttgcatttgattacggcta

SEQ ID NO: 3737409 - DNA, 25 bp, Homo sapien
ttggagctcacaaatttaagtgcct

SEQ ID NO: 3737410 - DNA, 25 bp, Homo sapien
gattacggctatcggaataaaacac

SEQ ID NO: 3737411 - DNA, 25 bp, Homo sapien
gatttgcaggcccactttggtacgt

SEQ ID NO: 3737412 - DNA, 25 bp, Homo sapien
ccactttggtacgtgtcggagaaca

SEQ ID NO: 3737413 - DNA, 25 bp, Homo sapien
gaacacagatttgcaggcccacttt

SEQ ID NO: 3737414 - DNA, 25 bp, Homo sapien
tgtcggagaacatggagagccagtc

SEQ ID NO: 3737415 - DNA, 25 bp, Homo sapien
gatttacaacagttaatgcctcaga

SEQ ID NO: 3737416 - DNA, 25 bp, Homo sapien
tacaacagttaatgcctcagattcc

SEQ ID NO: 3737417 - DNA, 25 bp, Homo sapien
aacagttaatgcctcagattccaaa

SEQ ID NO: 3737418 - DNA, 25 bp, Homo sapien
ctgatttacaacagttaatgcctca

SEQ ID NO: 3737419 - DNA, 25 bp, Homo sapien
gccttgaaatcgttacccttatgcc

SEQ ID NO: 3737420 - DNA, 25 bp, Homo sapien
ggccttgaaatcgttacccttatgc

SEQ ID NO: 3737421 - DNA, 25 bp, Homo sapien
tggccttgaaatcgttacccttatg

SEQ ID NO: 3737422 - DNA, 25 bp, Homo sapien
cttgaaatcgttacccttatgccac

SEQ ID NO: 3737423 - DNA, 25 bp, Homo sapien
tgtgcagctttagcgaatccgacac

SEQ ID NO: 3737424 - DNA, 25 bp, Homo sapien
gagttgtctggaggcggcttctttc

SEQ ID NO: 3737425 - DNA, 25 bp, Homo sapien
gcagggtggtttgtcactgacagcc

SEQ ID NO: 3737426 - DNA, 25 bp, Homo sapien
tgacagcccacaagccgctttcaat

SEQ ID NO: 3737427 - DNA, 25 bp, Homo sapien
agccccaaaagtgcaatgccaagga

SEQ ID NO: 3737428 - DNA, 25 bp, Homo sapien
tcagaactgtcaacattgggaaggt

SEQ ID NO: 3737429 - DNA, 25 bp, Homo sapien
ccttgggagcaggtctgaagctttc

SEQ ID NO: 3737430 - DNA, 25 bp, Homo sapien
gtgtcagcttcagggaagcccctag

SEQ ID NO: 3737431 - DNA, 25 bp, Homo sapien
ttcaggccttccttcctggcagtgc

SEQ ID NO: 3737432 - DNA, 25 bp, Homo sapien
tcaggccttccttcctggcagtgct

SEQ ID NO: 3737433 - DNA, 25 bp, Homo sapien
aggccttccttcctggcagtgcttc

SEQ ID NO: 3737434 - DNA, 25 bp, Homo sapien
caggccttccttcctggcagtgctt

SEQ ID NO: 3737435 - DNA, 25 bp, Homo sapien
ttgactggggatgagtgaaaactgc

SEQ ID NO: 3737436 - DNA, 25 bp, Homo sapien
tgactggggatgagtgaaaactgct

SEQ ID NO: 3737437 - DNA, 25 bp, Homo sapien
cattgactggggatgagtgaaaact

SEQ ID NO: 3737438 - DNA, 25 bp, Homo sapien
gactggggatgagtgaaaactgctg

SEQ ID NO: 3737439 - DNA, 25 bp, Homo sapien
cacttgttcatctggagaatccagc

SEQ ID NO: 3737440 - DNA, 25 bp, Homo sapien
ccaaacatggtcatggcagccactt

SEQ ID NO: 3737441 - DNA, 25 bp, Homo sapien
gccccagattcccaaacatggtcat

SEQ ID NO: 3737442 - DNA, 25 bp, Homo sapien
agccacttgttcatctggagaatcc

SEQ ID NO: 3737443 - DNA, 25 bp, Homo sapien
agcctgctggatggaacctttgtgc

SEQ ID NO: 3737444 - DNA, 25 bp, Homo sapien
ggatggaacctttgtgccagccaat

SEQ ID NO: 3737445 - DNA, 25 bp, Homo sapien
gaacctttgtgccagccaatccttg

SEQ ID NO: 3737446 - DNA, 25 bp, Homo sapien
tttgtgccagccaatccttgggttc

SEQ ID NO: 3737447 - DNA, 25 bp, Homo sapien
tctttggcgacaagctgtggataac

SEQ ID NO: 3737448 - DNA, 25 bp, Homo sapien
tgtggataactgtgtttgcacgctt

SEQ ID NO: 3737449 - DNA, 25 bp, Homo sapien
gaaaaagcgtcccatttaggtgcat

SEQ ID NO: 3737450 - DNA, 25 bp, Homo sapien
taggaactgtgcacagcgctaagaa

SEQ ID NO: 3737451 - DNA, 25 bp, Homo sapien
actgtcctgggcttctcttacatgc

SEQ ID NO: 3737452 - DNA, 25 bp, Homo sapien
gccctcagaaggcttgtaataaaag

SEQ ID NO: 3737453 - DNA, 25 bp, Homo sapien
gcttctcttacatgccctcagaagg

SEQ ID NO: 3737454 - DNA, 25 bp, Homo sapien
cctcagaaggcttgtaataaaagaa

SEQ ID NO: 3737455 - DNA, 25 bp, Homo sapien
ctggttgatcccggcagttcctgtt

SEQ ID NO: 3737456 - DNA, 25 bp, Homo sapien
gggctggttgatcccggcagttcct

SEQ ID NO: 3737457 - DNA, 25 bp, Homo sapien
catgggctggttgatcccggcagtt

SEQ ID NO: 3737458 - DNA, 25 bp, Homo sapien
tggttgatcccggcagttcctgttc

SEQ ID NO: 3737459 - DNA, 25 bp, Homo sapien
agtgaagaactgtgtgcgtgcctcg

SEQ ID NO: 3737460 - DNA, 25 bp, Homo sapien
aactgtgtgcgtgcctcgagcctgg

SEQ ID NO: 3737461 - DNA, 25 bp, Homo sapien
ctgagtgaagaactgtgtgcgtgcc

SEQ ID NO: 3737462 - DNA, 25 bp, Homo sapien
tgaagaactgtgtgcgtgcctcgag

SEQ ID NO: 3737463 - DNA, 25 bp, Homo sapien
actttgcagacgctgtgttagaacc

SEQ ID NO: 3737464 - DNA, 25 bp, Homo sapien
ttgcagacgctgtgttagaacccat

SEQ ID NO: 3737465 - DNA, 25 bp, Homo sapien
cttgtcgttacgccactttgcagac

SEQ ID NO: 3737466 - DNA, 25 bp, Homo sapien
gccactttgcagacgctgtgttaga

SEQ ID NO: 3737467 - DNA, 25 bp, Homo sapien
tgccacacgactcggcctctgtgag

SEQ ID NO: 3737468 - DNA, 25 bp, Homo sapien
aggcttgccacacgactcggcctct

SEQ ID NO: 3737469 - DNA, 25 bp, Homo sapien
cagacttctccacgaggcttgccac

SEQ ID NO: 3737470 - DNA, 25 bp, Homo sapien
agacttctccacgaggcttgccaca

SEQ ID NO: 3737471 - DNA, 25 bp, Homo sapien
attgtataccgccttgagctgctcc

SEQ ID NO: 3737472 - DNA, 25 bp, Homo sapien
gggctttattgtataccgccttgag

SEQ ID NO: 3737473 - DNA, 25 bp, Homo sapien
aaatcttccaactgtattgtgagtc

SEQ ID NO: 3737474 - DNA, 25 bp, Homo sapien
caactgtattgtgagtcccttcacc

SEQ ID NO: 3737475 - DNA, 25 bp, Homo sapien
agtcgccgtcctgaaacctgccttt

SEQ ID NO: 3737476 - DNA, 25 bp, Homo sapien
ccacttctgtgcccgcctggaatgc

SEQ ID NO: 3737477 - DNA, 25 bp, Homo sapien
caaacttcaaggccccattctggtt

SEQ ID NO: 3737478 - DNA, 25 bp, Homo sapien
tgcctttgaccagcccacttctgtg

SEQ ID NO: 3737479 - DNA, 25 bp, Homo sapien
tatgggaggtcactatccaaggaca

SEQ ID NO: 3737480 - DNA, 25 bp, Homo sapien
caaccagtcgtaagagaccacatag

SEQ ID NO: 3737481 - DNA, 25 bp, Homo sapien
cacagtgtgaagctgtcaggcctga

SEQ ID NO: 3737482 - DNA, 25 bp, Homo sapien
caacatctgttgtggcaaccagtcg

SEQ ID NO: 3737483 - DNA, 25 bp, Homo sapien
tattaagtggctagcggccagttct

SEQ ID NO: 3737484 - DNA, 25 bp, Homo sapien
tggacttgtgtgcagggccagggtc

SEQ ID NO: 3737485 - DNA, 25 bp, Homo sapien
gaattggtaattgcctcacagagat

SEQ ID NO: 3737486 - DNA, 25 bp, Homo sapien
agagccctgggtgacatctgagacc

SEQ ID NO: 3737487 - DNA, 25 bp, Homo sapien
tttcgatttcttcagaattatgagc

SEQ ID NO: 3737488 - DNA, 25 bp, Homo sapien
ctggattttcgatttcttcagaatt

SEQ ID NO: 3737489 - DNA, 25 bp, Homo sapien
ttcttcagaattatgagctttcctc

SEQ ID NO: 3737490 - DNA, 25 bp, Homo sapien
tatgagctttcctcttgattcggca

SEQ ID NO: 3737491 - DNA, 25 bp, Homo sapien
agcctgtaatcgcagagctcttgaa

SEQ ID NO: 3737492 - DNA, 25 bp, Homo sapien
cctgtaatcgcagagctcttgaaag

SEQ ID NO: 3737493 - DNA, 25 bp, Homo sapien
gccatttgttttgcataaaacgagc

SEQ ID NO: 3737494 - DNA, 25 bp, Homo sapien
tgcataaaacgagcctgtaatcgca

SEQ ID NO: 3737495 - DNA, 25 bp, Homo sapien
tctcccggagccctccgatggctct

SEQ ID NO: 3737496 - DNA, 25 bp, Homo sapien
ctccgatggctctctcgcggagcga

SEQ ID NO: 3737497 - DNA, 25 bp, Homo sapien
cggagcgaatgttggccggattaac

SEQ ID NO: 3737498 - DNA, 25 bp, Homo sapien
gcgcccagagggtgctcgcagaggg

SEQ ID NO: 3737499 - DNA, 25 bp, Homo sapien
atataatttccatgtcagtgatttc

SEQ ID NO: 3737500 - DNA, 25 bp, Homo sapien
gatttcacttacagccttgtaaaac

SEQ ID NO: 3737501 - DNA, 25 bp, Homo sapien
tttgaatgcctactacaaagcaggc

SEQ ID NO: 3737502 - DNA, 25 bp, Homo sapien
gaaaggaggcagttcaaccacgttg

SEQ ID NO: 3737503 - DNA, 25 bp, Homo sapien
gggtattatgtgggtggtagatgcc

SEQ ID NO: 3737504 - DNA, 25 bp, Homo sapien
ggtggacaggttgtggaattggccg

SEQ ID NO: 3737505 - DNA, 25 bp, Homo sapien
ccagacactcaacaggggtattatg

SEQ ID NO: 3737506 - DNA, 25 bp, Homo sapien
ggttgtggaattggccgccagacac

SEQ ID NO: 3737507 - DNA, 25 bp, Homo sapien
cttgctcaagtccagggtgttgacc

SEQ ID NO: 3737508 - DNA, 25 bp, Homo sapien
ctcaagtccagggtgttgaccacaa

SEQ ID NO: 3737509 - DNA, 25 bp, Homo sapien
tgctcaagtccagggtgttgaccac

SEQ ID NO: 3737510 - DNA, 25 bp, Homo sapien
caagtccagggtgttgaccacaagc

SEQ ID NO: 3737511 - DNA, 25 bp, Homo sapien
ggacggagcgtgttcccttgccttg

SEQ ID NO: 3737512 - DNA, 25 bp, Homo sapien
acggagcgtgttcccttgccttgca

SEQ ID NO: 3737513 - DNA, 25 bp, Homo sapien
ctgggacggagcgtgttcccttgcc

SEQ ID NO: 3737514 - DNA, 25 bp, Homo sapien
tgggacggagcgtgttcccttgcct

SEQ ID NO: 3737515 - DNA, 25 bp, Homo sapien
atcatacagcctaaatcggcctcct

SEQ ID NO: 3737516 - DNA, 25 bp, Homo sapien
ttcgtcgtcctcatgccccatcata

SEQ ID NO: 3737517 - DNA, 25 bp, Homo sapien
tacagcctaaatcggcctccttgga

SEQ ID NO: 3737518 - DNA, 25 bp, Homo sapien
tcctcatgccccatcatacagccta

SEQ ID NO: 3737519 - DNA, 25 bp, Homo sapien
gctgctctcaggaattgtctcacta

SEQ ID NO: 3737520 - DNA, 25 bp, Homo sapien
caagcactttggcaactgcggcaca

SEQ ID NO: 3737521 - DNA, 25 bp, Homo sapien
gaacctctctgttgcagggagaccc

SEQ ID NO: 3737522 - DNA, 25 bp, Homo sapien
cctttgtaggagacctgtgccctga

SEQ ID NO: 3737523 - DNA, 25 bp, Homo sapien
ttataggattgagggggtggtaaca

SEQ ID NO: 3737524 - DNA, 25 bp, Homo sapien
tataggattgagggggtggtaacaa

SEQ ID NO: 3737525 - DNA, 25 bp, Homo sapien
tgggacagtcgagcatcctgcacat

SEQ ID NO: 3737526 - DNA, 25 bp, Homo sapien
ggcactgacttatttgggctggaaa

SEQ ID NO: 3737527 - DNA, 25 bp, Homo sapien
ctttccatggcactgacttatttgg

SEQ ID NO: 3737528 - DNA, 25 bp, Homo sapien
cagtcgagcatcctgcacattgtca

SEQ ID NO: 3737529 - DNA, 25 bp, Homo sapien
tctttcttggcccaaagctaccatt

SEQ ID NO: 3737530 - DNA, 25 bp, Homo sapien
gacatcatgcccagaaggactgcat

SEQ ID NO: 3737531 - DNA, 25 bp, Homo sapien
ggcccaaagctaccattgatgacat

SEQ ID NO: 3737532 - DNA, 25 bp, Homo sapien
tgacatcatgcccagaaggactgca

SEQ ID NO: 3737533 - DNA, 25 bp, Homo sapien
cctgaggataccaggtgtcctgagt

SEQ ID NO: 3737534 - DNA, 25 bp, Homo sapien
aaatggaagctggtcccctatttct

SEQ ID NO: 3737535 - DNA, 25 bp, Homo sapien
taggactaaatggaagctggtcccc

SEQ ID NO: 3737536 - DNA, 25 bp, Homo sapien
tcaccctgaggataccaggtgtcct

SEQ ID NO: 3737537 - DNA, 25 bp, Homo sapien
cttttttccacgctgctcctagggc

SEQ ID NO: 3737538 - DNA, 25 bp, Homo sapien
gaaggcttttggattcgccaatgaa

SEQ ID NO: 3737539 - DNA, 25 bp, Homo sapien
ttcgccaatgaatctgatgcccatg

SEQ ID NO: 3737540 - DNA, 25 bp, Homo sapien
cagaacaacaattgacactcgaagg

SEQ ID NO: 3737541 - DNA, 25 bp, Homo sapien
ctaccttgagtaccatgatttccag

SEQ ID NO: 3737542 - DNA, 25 bp, Homo sapien
cctaggccggcaggcaatgtggatc

SEQ ID NO: 3737543 - DNA, 25 bp, Homo sapien
cttgcagatcttggtcctaggccgg

SEQ ID NO: 3737544 - DNA, 25 bp, Homo sapien
agctggtgtttcgttctgacttgca

SEQ ID NO: 3737545 - DNA, 25 bp, Homo sapien
atccacagcatccaactggcactgt

SEQ ID NO: 3737546 - DNA, 25 bp, Homo sapien
cagcatccaactggcactgtgccat

SEQ ID NO: 3737547 - DNA, 25 bp, Homo sapien
tggcgcagtagtgccacaattggca

SEQ ID NO: 3737548 - DNA, 25 bp, Homo sapien
tagtgccacaattggcactccatcc

SEQ ID NO: 3737549 - DNA, 25 bp, Homo sapien
cagtcacactttgggtgcctaatgt

SEQ ID NO: 3737550 - DNA, 25 bp, Homo sapien
gcccagtcacactttgggtgcctaa

SEQ ID NO: 3737551 - DNA, 25 bp, Homo sapien
cacactttgggtgcctaatgtgtac

SEQ ID NO: 3737552 - DNA, 25 bp, Homo sapien
ctgtggcccagtcacactttgggtg

SEQ ID NO: 3737553 - DNA, 25 bp, Homo sapien
aatgtcatatagttgtttacaaaac

SEQ ID NO: 3737554 - DNA, 25 bp, Homo sapien
aaagatgaacatgcagtgctctcag

SEQ ID NO: 3737555 - DNA, 25 bp, Homo sapien
tgaacatgcagtgctctcagggaag

SEQ ID NO: 3737556 - DNA, 25 bp, Homo sapien
tcaaatgtcatatagttgtttacaa

SEQ ID NO: 3737557 - DNA, 25 bp, Homo sapien
tagactctattatctatcgctaatg

SEQ ID NO: 3737558 - DNA, 25 bp, Homo sapien
tgatttccatgacctacaacacggc

SEQ ID NO: 3737559 - DNA, 25 bp, Homo sapien
aatgtgctatcctgcgttccgatcg

SEQ ID NO: 3737560 - DNA, 25 bp, Homo sapien
tcgtaatgatgcagggcacacgcac

SEQ ID NO: 3737561 - DNA, 25 bp, Homo sapien
ttgatgcctcgttcttattttcatt

SEQ ID NO: 3737562 - DNA, 25 bp, Homo sapien
tttcattctctgcacccagaagccc

SEQ ID NO: 3737563 - DNA, 25 bp, Homo sapien
tcattctctgcacccagaagcccac

SEQ ID NO: 3737564 - DNA, 25 bp, Homo sapien
tgatgcctcgttcttattttcattc

SEQ ID NO: 3737565 - DNA, 25 bp, Homo sapien
agaacgatctagctcaagaaactgg

SEQ ID NO: 3737566 - DNA, 25 bp, Homo sapien
ccacagaaacagaacgatctagctc

SEQ ID NO: 3737567 - DNA, 25 bp, Homo sapien
catgtgagtccttccccctgagaat

SEQ ID NO: 3737568 - DNA, 25 bp, Homo sapien
tgagcacatgtgagtccttccccct

SEQ ID NO: 3737569 - DNA, 25 bp, Homo sapien
tggaccctatgtcccgagggcaccc

SEQ ID NO: 3737570 - DNA, 25 bp, Homo sapien
ttggaccctatgtcccgagggcacc

SEQ ID NO: 3737571 - DNA, 25 bp, Homo sapien
gaccctatgtcccgagggcacccat

SEQ ID NO: 3737572 - DNA, 25 bp, Homo sapien
ccttggaccctatgtcccgagggca

SEQ ID NO: 3737573 - DNA, 25 bp, Homo sapien
aacagtaaagcgtcacccatggaca

SEQ ID NO: 3737574 - DNA, 25 bp, Homo sapien
gttctcttgcgtagtgatggaccca

SEQ ID NO: 3737575 - DNA, 25 bp, Homo sapien
acaaaggatgagtttccagctctgc

SEQ ID NO: 3737576 - DNA, 25 bp, Homo sapien
tctgctgtagttctcttgcgtagtg

SEQ ID NO: 3737577 - DNA, 25 bp, Homo sapien
ggcgatgatcgtcttcagagcccat

SEQ ID NO: 3737578 - DNA, 25 bp, Homo sapien
taagaggcggagatctttcctgggc

SEQ ID NO: 3737579 - DNA, 25 bp, Homo sapien
taccagccgagaatgtgccttacga

SEQ ID NO: 3737580 - DNA, 25 bp, Homo sapien
caaagtgcacccgactgaattctgg

SEQ ID NO: 3737581 - DNA, 25 bp, Homo sapien
tgcaagtccagataaggctcacgct

SEQ ID NO: 3737582 - DNA, 25 bp, Homo sapien
gatctgggtttaggatgccgccttc

SEQ ID NO: 3737583 - DNA, 25 bp, Homo sapien
gaaaacgtccctggcgaagagagct

SEQ ID NO: 3737584 - DNA, 25 bp, Homo sapien
gcaaatcccctggtaaactggcatt

SEQ ID NO: 3737585 - DNA, 25 bp, Homo sapien
gctttgaagagctctctttgatgtg

SEQ ID NO: 3737586 - DNA, 25 bp, Homo sapien
cccggctgtgcccagattaagcaca

SEQ ID NO: 3737587 - DNA, 25 bp, Homo sapien
ccggctgtgcccagattaagcacat

SEQ ID NO: 3737588 - DNA, 25 bp, Homo sapien
gctctctttgatgtgatgcaattct

SEQ ID NO: 3737589 - DNA, 25 bp, Homo sapien
cacctctatgcacaagcaaggttct

SEQ ID NO: 3737590 - DNA, 25 bp, Homo sapien
aactgagtcatggtgatgtgattca

SEQ ID NO: 3737591 - DNA, 25 bp, Homo sapien
gtgatgtgattcagagcacctctat

SEQ ID NO: 3737592 - DNA, 25 bp, Homo sapien
ccctcagctcaggtaactggggaaa

SEQ ID NO: 3737593 - DNA, 25 bp, Homo sapien
ccaagagtaaattctgggctgacat

SEQ ID NO: 3737594 - DNA, 25 bp, Homo sapien
caagagtaaattctgggctgacatt

SEQ ID NO: 3737595 - DNA, 25 bp, Homo sapien
aagagtaaattctgggctgacattt

SEQ ID NO: 3737596 - DNA, 25 bp, Homo sapien
cccaagagtaaattctgggctgaca

SEQ ID NO: 3737597 - DNA, 25 bp, Homo sapien
agactaggttcatcaaataaatcac

SEQ ID NO: 3737598 - DNA, 25 bp, Homo sapien
ctcggttaagactaggttcatcaaa

SEQ ID NO: 3737599 - DNA, 25 bp, Homo sapien
cggttaagactaggttcatcaaata

SEQ ID NO: 3737600 - DNA, 25 bp, Homo sapien
tcaaataaatcactcaggaatttct

SEQ ID NO: 3737601 - DNA, 25 bp, Homo sapien
tgaagagtaaccagtctcctgtccc

SEQ ID NO: 3737602 - DNA, 25 bp, Homo sapien
aggacatcaccttctcgatctgttc

SEQ ID NO: 3737603 - DNA, 25 bp, Homo sapien
tagaaatcatttcatcagccagggc

SEQ ID NO: 3737604 - DNA, 25 bp, Homo sapien
cttgggaaggattgtccctggacct

SEQ ID NO: 3737605 - DNA, 25 bp, Homo sapien
ccactgagatgattcctaaaatgca

SEQ ID NO: 3737606 - DNA, 25 bp, Homo sapien
gggccattaggtcggcttgcattaa

SEQ ID NO: 3737607 - DNA, 25 bp, Homo sapien
taggtcggcttgcattaaaagagag

SEQ ID NO: 3737608 - DNA, 25 bp, Homo sapien
cactgagatgattcctaaaatgcag

SEQ ID NO: 3737609 - DNA, 25 bp, Homo sapien
caggaagttgttggcgataattgac

SEQ ID NO: 3737610 - DNA, 25 bp, Homo sapien
cagcagcagacacgccggattaaag

SEQ ID NO: 3737611 - DNA, 25 bp, Homo sapien
tcgggtgtgaaaaggctctcaaacg

SEQ ID NO: 3737612 - DNA, 25 bp, Homo sapien
tcaaacgctttgattccccgctgct

SEQ ID NO: 3737613 - DNA, 25 bp, Homo sapien
ccagagaacttatgtggaagcctcc

SEQ ID NO: 3737614 - DNA, 25 bp, Homo sapien
tccaagagtgtccttgcggcagtca

SEQ ID NO: 3737615 - DNA, 25 bp, Homo sapien
ggaatgatccagacaccttctgagg

SEQ ID NO: 3737616 - DNA, 25 bp, Homo sapien
ggaagcctccctgctaactattgct

SEQ ID NO: 3737617 - DNA, 25 bp, Homo sapien
acagcttctccctcatctttacacc

SEQ ID NO: 3737618 - DNA, 25 bp, Homo sapien
gcttctccctcatctttacaccacc

SEQ ID NO: 3737619 - DNA, 25 bp, Homo sapien
ccttctctttatggtgccaggtatt

SEQ ID NO: 3737620 - DNA, 25 bp, Homo sapien
gggctcctctaagagaaaatgcaat

SEQ ID NO: 3737621 - DNA, 25 bp, Homo sapien
cttgctgctcataagatgacccgtc

SEQ ID NO: 3737622 - DNA, 25 bp, Homo sapien
gctcataagatgacccgtcaacatt

SEQ ID NO: 3737623 - DNA, 25 bp, Homo sapien
taagatgacccgtcaacattccttt

SEQ ID NO: 3737624 - DNA, 25 bp, Homo sapien
gctgctcataagatgacccgtcaac

SEQ ID NO: 3737625 - DNA, 25 bp, Homo sapien
caacctctaatccaaatgaacactg

SEQ ID NO: 3737626 - DNA, 25 bp, Homo sapien
cctaaaggccattgatttggaagaa

SEQ ID NO: 3737627 - DNA, 25 bp, Homo sapien
ctgaataaagaagcggtctgtaaag

SEQ ID NO: 3737628 - DNA, 25 bp, Homo sapien
taaaatttcatcttgtccgtctgtc

SEQ ID NO: 3737629 - DNA, 25 bp, Homo sapien
caaatggaaatgatggctgatggca

SEQ ID NO: 3737630 - DNA, 25 bp, Homo sapien
tcccatctcgataagatgtccttga

SEQ ID NO: 3737631 - DNA, 25 bp, Homo sapien
gatcacatccccgaggtcatgtggg

SEQ ID NO: 3737632 - DNA, 25 bp, Homo sapien
tagcaggtgggtgacatattcctcc

SEQ ID NO: 3737633 - DNA, 25 bp, Homo sapien
ctcaaaggggtttgccgatgacagt

SEQ ID NO: 3737634 - DNA, 25 bp, Homo sapien
ttgcaagtaggaagagaatgctgga

SEQ ID NO: 3737635 - DNA, 25 bp, Homo sapien
cttaaacacctttgcaagtaggaag

SEQ ID NO: 3737636 - DNA, 25 bp, Homo sapien
ggtttgccgatgacagtgactgaat

SEQ ID NO: 3737637 - DNA, 25 bp, Homo sapien
tctgctaagagtatttcgtcctgtg

SEQ ID NO: 3737638 - DNA, 25 bp, Homo sapien
agagagcccaagcaactagcctagg

SEQ ID NO: 3737639 - DNA, 25 bp, Homo sapien
tttggagacaagtatggcagcatca

SEQ ID NO: 3737640 - DNA, 25 bp, Homo sapien
cattttagtggtaattgaagcccag

SEQ ID NO: 3737641 - DNA, 25 bp, Homo sapien
tctaagatccgaaggagaagtttct

SEQ ID NO: 3737642 - DNA, 25 bp, Homo sapien
tggcttacgaagagattgagaggct

SEQ ID NO: 3737643 - DNA, 25 bp, Homo sapien
gcacacagctggaatctaagatccg

SEQ ID NO: 3737644 - DNA, 25 bp, Homo sapien
gctggagacaggtacgtagttgcaa

SEQ ID NO: 3737645 - DNA, 25 bp, Homo sapien
gaagtcatctcaagaatctggacac

SEQ ID NO: 3737646 - DNA, 25 bp, Homo sapien
tggaatcgtgacagctccatggcca

SEQ ID NO: 3737647 - DNA, 25 bp, Homo sapien
tgaaggcaagtgaccacaataatgc

SEQ ID NO: 3737648 - DNA, 25 bp, Homo sapien
ggaccatctctgcacttaggagaga

SEQ ID NO: 3737649 - DNA, 25 bp, Homo sapien
caagacaggttgagagccagtgaac

SEQ ID NO: 3737650 - DNA, 25 bp, Homo sapien
tcggcctctgccgtggctctggact

SEQ ID NO: 3737651 - DNA, 25 bp, Homo sapien
ccaggcagcgctcggcctctgccgt

SEQ ID NO: 3737652 - DNA, 25 bp, Homo sapien
ctctggacttagagcaacaacctgg

SEQ ID NO: 3737653 - DNA, 25 bp, Homo sapien
attggatgagcggttgactaagagc

SEQ ID NO: 3737654 - DNA, 25 bp, Homo sapien
gggactagctgtgtccgtcctgctc

SEQ ID NO: 3737655 - DNA, 25 bp, Homo sapien
tctgctgcccgcacaagactaggga

SEQ ID NO: 3737656 - DNA, 25 bp, Homo sapien
aagtcccacgacaactcatctgctg

SEQ ID NO: 3737657 - DNA, 25 bp, Homo sapien
aaacaggcgccgtgtctctctgagt

SEQ ID NO: 3737658 - DNA, 25 bp, Homo sapien
gtggtccgtaagagataaacgggca

SEQ ID NO: 3737659 - DNA, 25 bp, Homo sapien
gcattttaaaacaggtcttgagatg

SEQ ID NO: 3737660 - DNA, 25 bp, Homo sapien
ggccaaattggttaaatatgaaagc

SEQ ID NO: 3737661 - DNA, 25 bp, Homo sapien
taactcaacttgatgggcccattta

SEQ ID NO: 3737662 - DNA, 25 bp, Homo sapien
tctggcaagggaaccaatcacacaa

SEQ ID NO: 3737663 - DNA, 25 bp, Homo sapien
cagggtcaccctgatatcctaaagt

SEQ ID NO: 3737664 - DNA, 25 bp, Homo sapien
ttgcattaatgagaaagtctaactc

SEQ ID NO: 3737665 - DNA, 25 bp, Homo sapien
tttcctatttgagaagcccagttcc

SEQ ID NO: 3737666 - DNA, 25 bp, Homo sapien
cccacagtgcccttgttgattaggg

SEQ ID NO: 3737667 - DNA, 25 bp, Homo sapien
cctatttgagaagcccagttcccac

SEQ ID NO: 3737668 - DNA, 25 bp, Homo sapien
agttcccacagtgcccttgttgatt

SEQ ID NO: 3737669 - DNA, 25 bp, Homo sapien
tgccagaaactcagaacggatggtc

SEQ ID NO: 3737670 - DNA, 25 bp, Homo sapien
tcattgaagcaacatgccagaaact

SEQ ID NO: 3737671 - DNA, 25 bp, Homo sapien
cagaacggatggtccagatttaggg

SEQ ID NO: 3737672 - DNA, 25 bp, Homo sapien
ttctcattgaagcaacatgccagaa

SEQ ID NO: 3737673 - DNA, 25 bp, Homo sapien
tgaggctgagctctatgtcagctgg

SEQ ID NO: 3737674 - DNA, 25 bp, Homo sapien
agttgagctctgtatggcagctgcc

SEQ ID NO: 3737675 - DNA, 25 bp, Homo sapien
agctgcctcgtgatgggacccatga

SEQ ID NO: 3737676 - DNA, 25 bp, Homo sapien
tccgttgtccaggtggatgagttga

SEQ ID NO: 3737677 - DNA, 25 bp, Homo sapien
ttgcactttgttcaaaatgggcctc

SEQ ID NO: 3737678 - DNA, 25 bp, Homo sapien
tgtctggctatatgggacccctgct

SEQ ID NO: 3737679 - DNA, 25 bp, Homo sapien
ggacccctgctgtgattgcactttg

SEQ ID NO: 3737680 - DNA, 25 bp, Homo sapien
gggcctctgcaaatatcaaggagaa

SEQ ID NO: 3737681 - DNA, 25 bp, Homo sapien
gggctcgttaccatgagcccagggt

SEQ ID NO: 3737682 - DNA, 25 bp, Homo sapien
cgtagtgcgttgcatgtggcctccg

SEQ ID NO: 3737683 - DNA, 25 bp, Homo sapien
gtggcctccgggagactccttggca

SEQ ID NO: 3737684 - DNA, 25 bp, Homo sapien
ctttctccgtagtgcgttgcatgtg

SEQ ID NO: 3737685 - DNA, 25 bp, Homo sapien
atccgtttcacgactgggacctaga

SEQ ID NO: 3737686 - DNA, 25 bp, Homo sapien
taagtagcggtaagatccagggaaa

SEQ ID NO: 3737687 - DNA, 25 bp, Homo sapien
gggatcccaggaagacgtaatagca

SEQ ID NO: 3737688 - DNA, 25 bp, Homo sapien
taaatatcttcatccgtttcacgac

SEQ ID NO: 3737689 - DNA, 25 bp, Homo sapien
agaatccatacaagccagtggccag

SEQ ID NO: 3737690 - DNA, 25 bp, Homo sapien
gaagtttaaacccattgagagtcga

SEQ ID NO: 3737691 - DNA, 25 bp, Homo sapien
gctcacaggttagccaaggagacag

SEQ ID NO: 3737692 - DNA, 25 bp, Homo sapien
gaattagacaaagtttcttgcctct

SEQ ID NO: 3737693 - DNA, 25 bp, Homo sapien
caacttgtctttagaacagtcctaa

SEQ ID NO: 3737694 - DNA, 25 bp, Homo sapien
tatctctacatagtcctgcttataa

SEQ ID NO: 3737695 - DNA, 25 bp, Homo sapien
cagtcctaagtgagttgactatctc

SEQ ID NO: 3737696 - DNA, 25 bp, Homo sapien
tgattaaaaccagacctacaacttg

SEQ ID NO: 3737697 - DNA, 25 bp, Homo sapien
caggatcagagatgctgaataagcc

SEQ ID NO: 3737698 - DNA, 25 bp, Homo sapien
aggatcagagatgctgaataagcca

SEQ ID NO: 3737699 - DNA, 25 bp, Homo sapien
gtggcaatactcacgggtttttcat

SEQ ID NO: 3737700 - DNA, 25 bp, Homo sapien
tactcacgggtttttcatcaccaat

SEQ ID NO: 3737701 - DNA, 25 bp, Homo sapien
ctgtggcaatactcacgggtttttc

SEQ ID NO: 3737702 - DNA, 25 bp, Homo sapien
actcacgggtttttcatcaccaatg

SEQ ID NO: 3737703 - DNA, 25 bp, Homo sapien
gccaccttttcactagcagcatgga

SEQ ID NO: 3737704 - DNA, 25 bp, Homo sapien
agcatggacatgcagagcatcttgc

SEQ ID NO: 3737705 - DNA, 25 bp, Homo sapien
ggacatgcagagcatcttgcctcag

SEQ ID NO: 3737706 - DNA, 25 bp, Homo sapien
ctgccaccttttcactagcagcatg

SEQ ID NO: 3737707 - DNA, 25 bp, Homo sapien
tgttgaatacaaccagcgtaccctg

SEQ ID NO: 3737708 - DNA, 25 bp, Homo sapien
cctttcattggtgttggttgaaaag

SEQ ID NO: 3737709 - DNA, 25 bp, Homo sapien
cagttcctttcattggtgttggttg

SEQ ID NO: 3737710 - DNA, 25 bp, Homo sapien
aaagatgttgaatacaaccagcgta

SEQ ID NO: 3737711 - DNA, 25 bp, Homo sapien
tgttgaccataataagcccagtgcg

SEQ ID NO: 3737712 - DNA, 25 bp, Homo sapien
taataagcccagtgcgatgggcagg

SEQ ID NO: 3737713 - DNA, 25 bp, Homo sapien
tgtgcagctgttgaccataataagc

SEQ ID NO: 3737714 - DNA, 25 bp, Homo sapien
tgaccataataagcccagtgcgatg

SEQ ID NO: 3737715 - DNA, 25 bp, Homo sapien
aaggtgatgggctacaagagcccat

SEQ ID NO: 3737716 - DNA, 25 bp, Homo sapien
gggagaaggtgatgggctacaagag

SEQ ID NO: 3737717 - DNA, 25 bp, Homo sapien
ggagaaggtgatgggctacaagagc

SEQ ID NO: 3737718 - DNA, 25 bp, Homo sapien
agaaggtgatgggctacaagagccc

SEQ ID NO: 3737719 - DNA, 25 bp, Homo sapien
agccaataacagagcgcagcttttt

SEQ ID NO: 3737720 - DNA, 25 bp, Homo sapien
caataacagagcgcagcttttttcc

SEQ ID NO: 3737721 - DNA, 25 bp, Homo sapien
ataacagagcgcagcttttttcctc

SEQ ID NO: 3737722 - DNA, 25 bp, Homo sapien
gccaataacagagcgcagctttttt

SEQ ID NO: 3737723 - DNA, 25 bp, Homo sapien
tgaggagcaactatgtacagcgcgg

SEQ ID NO: 3737724 - DNA, 25 bp, Homo sapien
ctctgaggagcaactatgtacagcg

SEQ ID NO: 3737725 - DNA, 25 bp, Homo sapien
gagcaactatgtacagcgcggccat

SEQ ID NO: 3737726 - DNA, 25 bp, Homo sapien
ctaggggacatgcacgggctctgag

SEQ ID NO: 3737727 - DNA, 25 bp, Homo sapien
gaggtctggggatttctggtggccc

SEQ ID NO: 3737728 - DNA, 25 bp, Homo sapien
aggtctggggatttctggtggccca

SEQ ID NO: 3737729 - DNA, 25 bp, Homo sapien
ggtctggggatttctggtggcccag

SEQ ID NO: 3737730 - DNA, 25 bp, Homo sapien
tattttggacttgggatacagatgg

SEQ ID NO: 3737731 - DNA, 25 bp, Homo sapien
tgggagttcgtctttgtgccaaaaa

SEQ ID NO: 3737732 - DNA, 25 bp, Homo sapien
cacacattgctgttcgtggaaggag

SEQ ID NO: 3737733 - DNA, 25 bp, Homo sapien
tccattgaacaacaccagctgtggg

SEQ ID NO: 3737734 - DNA, 25 bp, Homo sapien
catgctcatctctgtctgctcagga

SEQ ID NO: 3737735 - DNA, 25 bp, Homo sapien
tttcattttctcgagctgtgttcct

SEQ ID NO: 3737736 - DNA, 25 bp, Homo sapien
cattttctcgagctgtgttcctaaa

SEQ ID NO: 3737737 - DNA, 25 bp, Homo sapien
tctttcattttctcgagctgtgttc

SEQ ID NO: 3737738 - DNA, 25 bp, Homo sapien
aagttatttgttcccattctcttgg

SEQ ID NO: 3737739 - DNA, 25 bp, Homo sapien
agttatttgttcccattctcttggg

SEQ ID NO: 3737740 - DNA, 25 bp, Homo sapien
aaagttatttgttcccattctcttg

SEQ ID NO: 3737741 - DNA, 25 bp, Homo sapien
ctggcctgttcagggtgagctcctc

SEQ ID NO: 3737742 - DNA, 25 bp, Homo sapien
ttcaaagctatgtcctgcccgctgc

SEQ ID NO: 3737743 - DNA, 25 bp, Homo sapien
ccgctgcacagcattacccaaaggg

SEQ ID NO: 3737744 - DNA, 25 bp, Homo sapien
gactgtgaaagcgtccacagtttca

SEQ ID NO: 3737745 - DNA, 25 bp, Homo sapien
gaagttcaaggcaattgtgtgttcc

SEQ ID NO: 3737746 - DNA, 25 bp, Homo sapien
tattcccgtgaaatggagctgggcc

SEQ ID NO: 3737747 - DNA, 25 bp, Homo sapien
gatgcatgatcagaagcccgcagac

SEQ ID NO: 3737748 - DNA, 25 bp, Homo sapien
ggatccccacacctgaacttctgag

SEQ ID NO: 3737749 - DNA, 25 bp, Homo sapien
gacatcttcatccttggtgacaaac

SEQ ID NO: 3737750 - DNA, 25 bp, Homo sapien
caggcacattccctgagttgcggga

SEQ ID NO: 3737751 - DNA, 25 bp, Homo sapien
agttgcgggatgtgatatctcttta

SEQ ID NO: 3737752 - DNA, 25 bp, Homo sapien
catttcctgagttgtgcagtatgac

SEQ ID NO: 3737753 - DNA, 25 bp, Homo sapien
tttgactttctagtgcccagggaag

SEQ ID NO: 3737754 - DNA, 25 bp, Homo sapien
tgttctatttgactttctagtgccc

SEQ ID NO: 3737755 - DNA, 25 bp, Homo sapien
caaggctgatgtggtgttctatttg

SEQ ID NO: 3737756 - DNA, 25 bp, Homo sapien
ggctgatgtggtgttctatttgact

SEQ ID NO: 3737757 - DNA, 25 bp, Homo sapien
gactgagagtatgctaccagggccc

SEQ ID NO: 3737758 - DNA, 25 bp, Homo sapien
gacagaaatagggtgtccttggact

SEQ ID NO: 3737759 - DNA, 25 bp, Homo sapien
tgggaatcagcaagtcccagggcct

SEQ ID NO: 3737760 - DNA, 25 bp, Homo sapien
gggactggccaatctaaccgctttc

SEQ ID NO: 3737761 - DNA, 25 bp, Homo sapien
tcctggagggacttcaacttgcatg

SEQ ID NO: 3737762 - DNA, 25 bp, Homo sapien
tatgaagctgcctaaggagagaagc

SEQ ID NO: 3737763 - DNA, 25 bp, Homo sapien
ccagagtgtgcagaaccataggcca

SEQ ID NO: 3737764 - DNA, 25 bp, Homo sapien
catagcaggtgggtcagactaacac

SEQ ID NO: 3737765 - DNA, 25 bp, Homo sapien
cactgaattgccgagcccagtatac

SEQ ID NO: 3737766 - DNA, 25 bp, Homo sapien
cccagtatacccaaagaaagtgcca

SEQ ID NO: 3737767 - DNA, 25 bp, Homo sapien
gaaggctacctggaactcacatcca

SEQ ID NO: 3737768 - DNA, 25 bp, Homo sapien
tacatgtgatgaaacgaaggctacc

SEQ ID NO: 3737769 - DNA, 25 bp, Homo sapien
gcaaatccatctctagaccccagaa

SEQ ID NO: 3737770 - DNA, 25 bp, Homo sapien
tcagcaaatccatctctagacccca

SEQ ID NO: 3737771 - DNA, 25 bp, Homo sapien
gggtttcagcaaatccatctctaga

SEQ ID NO: 3737772 - DNA, 25 bp, Homo sapien
cttagctagacctgtgtgggtttca

SEQ ID NO: 3737773 - DNA, 25 bp, Homo sapien
gccccatccctaaagagcctgaagt

SEQ ID NO: 3737774 - DNA, 25 bp, Homo sapien
gctggtcaccatagtccttatcctt

SEQ ID NO: 3737775 - DNA, 25 bp, Homo sapien
gaagatccaacaagcttgggctgaa

SEQ ID NO: 3737776 - DNA, 25 bp, Homo sapien
ctactctaagaagatccaacaagct

SEQ ID NO: 3737777 - DNA, 25 bp, Homo sapien
cacaggatgcttgcatcctgggatg

SEQ ID NO: 3737778 - DNA, 25 bp, Homo sapien
gcacaggatgcttgcatcctgggat

SEQ ID NO: 3737779 - DNA, 25 bp, Homo sapien
tgcacaggatgcttgcatcctggga

SEQ ID NO: 3737780 - DNA, 25 bp, Homo sapien
aaggccccgttaagactgccccatg

SEQ ID NO: 3737781 - DNA, 25 bp, Homo sapien
ccccgttaagactgccccatgcctt

SEQ ID NO: 3737782 - DNA, 25 bp, Homo sapien
gccccgttaagactgccccatgcct

SEQ ID NO: 3737783 - DNA, 25 bp, Homo sapien
aggccccgttaagactgccccatgc

SEQ ID NO: 3737784 - DNA, 25 bp, Homo sapien
ttagatgtcatgtgaattgctgatg

SEQ ID NO: 3737785 - DNA, 25 bp, Homo sapien
cttagatgtcatgtgaattgctgat

SEQ ID NO: 3737786 - DNA, 25 bp, Homo sapien
tcttagatgtcatgtgaattgctga

SEQ ID NO: 3737787 - DNA, 25 bp, Homo sapien
tcttcttaagtaaatgctctcataa

SEQ ID NO: 3737788 - DNA, 25 bp, Homo sapien
taactgaagagtataacacttatct

SEQ ID NO: 3737789 - DNA, 25 bp, Homo sapien
tatgtaatctgatgcatgaatcaga

SEQ ID NO: 3737790 - DNA, 25 bp, Homo sapien
cataacttgtatacatttttgcagg

SEQ ID NO: 3737791 - DNA, 25 bp, Homo sapien
caaaaaatgcactctcacagtggag

SEQ ID NO: 3737792 - DNA, 25 bp, Homo sapien
aatatgcaattggtagcaccttagc

SEQ ID NO: 3737793 - DNA, 25 bp, Homo sapien
ttaataatccagatgcaatcattgg

SEQ ID NO: 3737794 - DNA, 25 bp, Homo sapien
cacagtggagttgaagtctaataca

SEQ ID NO: 3737795 - DNA, 25 bp, Homo sapien
cctagttttgccattgtcccctgaa

SEQ ID NO: 3737796 - DNA, 25 bp, Homo sapien
tttcagaagaagcaatttaccttgg

SEQ ID NO: 3737797 - DNA, 25 bp, Homo sapien
tcatgaatggaaacctaagtaaaac

SEQ ID NO: 3737798 - DNA, 25 bp, Homo sapien
ccatccccggaagggtgcttattct

SEQ ID NO: 3737799 - DNA, 25 bp, Homo sapien
tttataaccaattctaaaattcagc

SEQ ID NO: 3737800 - DNA, 25 bp, Homo sapien
taaccaattctaaaattcagcttta

SEQ ID NO: 3737801 - DNA, 25 bp, Homo sapien
ctaaaattcagctttaaaaatattg

SEQ ID NO: 3737802 - DNA, 25 bp, Homo sapien
taaaattcagctttaaaaatattga

SEQ ID NO: 3737803 - DNA, 25 bp, Homo sapien
ttatagagtgaaccaagatgtcagt

SEQ ID NO: 3737804 - DNA, 25 bp, Homo sapien
taaaagtatggttcaagtactgctc

SEQ ID NO: 3737805 - DNA, 25 bp, Homo sapien
cagtattatgacagtatctgcagat

SEQ ID NO: 3737806 - DNA, 25 bp, Homo sapien
gaggcttagctttattcatacatga

SEQ ID NO: 3737807 - DNA, 25 bp, Homo sapien
tgtcctgcagcgacactactgtctg

SEQ ID NO: 3737808 - DNA, 25 bp, Homo sapien
gacactactgtctgacagccccagg

SEQ ID NO: 3737809 - DNA, 25 bp, Homo sapien
gggcctgaggaatgcgtcatcagaa

SEQ ID NO: 3737810 - DNA, 25 bp, Homo sapien
tcagaacctttatgggctcctgccg

SEQ ID NO: 3737811 - DNA, 25 bp, Homo sapien
taagtgtcacattcttgtgtactca

SEQ ID NO: 3737812 - DNA, 25 bp, Homo sapien
cagttccagaaagtggtaagtgtca

SEQ ID NO: 3737813 - DNA, 25 bp, Homo sapien
tactcattggtctgaactacccttt

SEQ ID NO: 3737814 - DNA, 25 bp, Homo sapien
acattcttgtgtactcattggtctg

SEQ ID NO: 3737815 - DNA, 25 bp, Homo sapien
cgactctcgtcagcgcattcaatgt

SEQ ID NO: 3737816 - DNA, 25 bp, Homo sapien
actgaaggctggcaccataggtcaa

SEQ ID NO: 3737817 - DNA, 25 bp, Homo sapien
cataggtcaaacacatcttctcgga

SEQ ID NO: 3737818 - DNA, 25 bp, Homo sapien
tcaatgtctgatttatctgggtccc

SEQ ID NO: 3737819 - DNA, 25 bp, Homo sapien
gcctgggaagagaacttctgtatct

SEQ ID NO: 3737820 - DNA, 25 bp, Homo sapien
tatctcctcctttagaggatgtctg

SEQ ID NO: 3737821 - DNA, 25 bp, Homo sapien
gaatggggaaaaagggtctgagcca

SEQ ID NO: 3737822 - DNA, 25 bp, Homo sapien
tgtatctcctcctttagaggatgtc

SEQ ID NO: 3737823 - DNA, 25 bp, Homo sapien
tgaggactggatcacagtattgacc

SEQ ID NO: 3737824 - DNA, 25 bp, Homo sapien
tctgaagtaaaagtagcactcgtga

SEQ ID NO: 3737825 - DNA, 25 bp, Homo sapien
cagtgtgccttgatgggagtctata

SEQ ID NO: 3737826 - DNA, 25 bp, Homo sapien
caatgtaatgttgatgtgtcgcact

SEQ ID NO: 3737827 - DNA, 25 bp, Homo sapien
gagcctgcggacgaacgccgggcgg

SEQ ID NO: 3737828 - DNA, 25 bp, Homo sapien
ggagaggtttgcgagagggagcgag

SEQ ID NO: 3737829 - DNA, 25 bp, Homo sapien
cgaggccgcgttagccgccggcggt

SEQ ID NO: 3737830 - DNA, 25 bp, Homo sapien
ctcccgcccgagaggaggagctgag

SEQ ID NO: 3737831 - DNA, 25 bp, Homo sapien
cttcacgttcccgagaccaacatgg

SEQ ID NO: 3737832 - DNA, 25 bp, Homo sapien
accaacatggagaaggccaacccgg

SEQ ID NO: 3737833 - DNA, 25 bp, Homo sapien
cgggccaggccgaaccaagcgcccg

SEQ ID NO: 3737834 - DNA, 25 bp, Homo sapien
atggagaaggccaacccggaagtgc

SEQ ID NO: 3737835 - DNA, 25 bp, Homo sapien
cccacgtccctaggacccgccactg

SEQ ID NO: 3737836 - DNA, 25 bp, Homo sapien
gtccctaggacccgccactgggcca

SEQ ID NO: 3737837 - DNA, 25 bp, Homo sapien
aagcagcatcaagccccgggtcccc

SEQ ID NO: 3737838 - DNA, 25 bp, Homo sapien
caagcagcatcaagccccgggtccc

SEQ ID NO: 3737839 - DNA, 25 bp, Homo sapien
cttgttgtccttatgtttctgaatc

SEQ ID NO: 3737840 - DNA, 25 bp, Homo sapien
ttcttgttgtccttatgtttctgaa

SEQ ID NO: 3737841 - DNA, 25 bp, Homo sapien
tgtccttatgtttctgaatctccat

SEQ ID NO: 3737842 - DNA, 25 bp, Homo sapien
gttgtccttatgtttctgaatctcc

SEQ ID NO: 3737843 - DNA, 25 bp, Homo sapien
tgtctgaagtctaaagactataatg

SEQ ID NO: 3737844 - DNA, 25 bp, Homo sapien
tgtgtgtctgaagtctaaagactat

SEQ ID NO: 3737845 - DNA, 25 bp, Homo sapien
tgaagtctaaagactataatgatac

SEQ ID NO: 3737846 - DNA, 25 bp, Homo sapien
tgtggtgtgtgtctgaagtctaaag

SEQ ID NO: 3737847 - DNA, 25 bp, Homo sapien
cttagaaattcatgcaacacacttc

SEQ ID NO: 3737848 - DNA, 25 bp, Homo sapien
tgtaagtcctgatctcccgaatgaa

SEQ ID NO: 3737849 - DNA, 25 bp, Homo sapien
ttaacgctggactgaaattgaggcc

SEQ ID NO: 3737850 - DNA, 25 bp, Homo sapien
tctcaggtacctctcggatggaagg

SEQ ID NO: 3737851 - DNA, 25 bp, Homo sapien
catcgagtatgtcatgcggcacaaa

SEQ ID NO: 3737852 - DNA, 25 bp, Homo sapien
tatcgacgtatttaccagggacgac

SEQ ID NO: 3737853 - DNA, 25 bp, Homo sapien
agggacgacacactgactactagtg

SEQ ID NO: 3737854 - DNA, 25 bp, Homo sapien
ttcgagtctgaaatgtgtatatccc

SEQ ID NO: 3737855 - DNA, 25 bp, Homo sapien
catagaacagatggcttttcgagtc

SEQ ID NO: 3737856 - DNA, 25 bp, Homo sapien
gaacctgcttcgctttgaggaccct

SEQ ID NO: 3737857 - DNA, 25 bp, Homo sapien
taacattagttcttggcacccagag

SEQ ID NO: 3737858 - DNA, 25 bp, Homo sapien
tattatgaaccataccctgggcttc

SEQ ID NO: 3737859 - DNA, 25 bp, Homo sapien
agcagcaacccttgtcaaagagaca

SEQ ID NO: 3737860 - DNA, 25 bp, Homo sapien
cacagactgccttcccaatttatga

SEQ ID NO: 3737861 - DNA, 25 bp, Homo sapien
cagtattcacttttccacctaggta

SEQ ID NO: 3737862 - DNA, 25 bp, Homo sapien
tggaatccacgagcacaggaagcat

SEQ ID NO: 3737863 - DNA, 25 bp, Homo sapien
gcttctcagaatcttcagcctcttc

SEQ ID NO: 3737864 - DNA, 25 bp, Homo sapien
gataaaggccatcacttgacctcct

SEQ ID NO: 3737865 - DNA, 25 bp, Homo sapien
tagccagctttagaaatgtccagtg

SEQ ID NO: 3737866 - DNA, 25 bp, Homo sapien
agtggctccctaaaatggcaaggaa

SEQ ID NO: 3737867 - DNA, 25 bp, Homo sapien
aaaatgccgatttctgggcctcaca

SEQ ID NO: 3737868 - DNA, 25 bp, Homo sapien
gcttgtgctttgtacctggttccta

SEQ ID NO: 3737869 - DNA, 25 bp, Homo sapien
ttgtacctggttcctaaggctgctg

SEQ ID NO: 3737870 - DNA, 25 bp, Homo sapien
ccagcagtgcttgtgctttgtacct

SEQ ID NO: 3737871 - DNA, 25 bp, Homo sapien
catgcggaccagcagtgcttgtgct

SEQ ID NO: 3737872 - DNA, 25 bp, Homo sapien
gactgcgtttatcaagtccaaaggg

SEQ ID NO: 3737873 - DNA, 25 bp, Homo sapien
gagattaaatgaatgggactgcgtt

SEQ ID NO: 3737874 - DNA, 25 bp, Homo sapien
cacattctccggatttctaagttgg

SEQ ID NO: 3737875 - DNA, 25 bp, Homo sapien
agcccatgggaaggcccagtctgga

SEQ ID NO: 3737876 - DNA, 25 bp, Homo sapien
tagggttgttcaccaaagggttgca

SEQ ID NO: 3737877 - DNA, 25 bp, Homo sapien
taagtggccaaggttatcgacgagg

SEQ ID NO: 3737878 - DNA, 25 bp, Homo sapien
caggctgcagcaacctaagtggcca

SEQ ID NO: 3737879 - DNA, 25 bp, Homo sapien
gcatggactcccgaacaataggttc

SEQ ID NO: 3737880 - DNA, 25 bp, Homo sapien
gaaaatgagagctgaaataggcctg

SEQ ID NO: 3737881 - DNA, 25 bp, Homo sapien
tatcgagtgtaaaggcaaagctggg

SEQ ID NO: 3737882 - DNA, 25 bp, Homo sapien
ggaataacttctccatgcactagga

SEQ ID NO: 3737883 - DNA, 25 bp, Homo sapien
tgattagctattccctgtactgcag

SEQ ID NO: 3737884 - DNA, 25 bp, Homo sapien
gaagcaggacaagatatacgagaca

SEQ ID NO: 3737885 - DNA, 25 bp, Homo sapien
caaatctgagatcttggaacaactg

SEQ ID NO: 3737886 - DNA, 25 bp, Homo sapien
tcactctgagttcctaatgtaaacg

SEQ ID NO: 3737887 - DNA, 25 bp, Homo sapien
aaagtattaatagggctggctgaga

SEQ ID NO: 3737888 - DNA, 25 bp, Homo sapien
tagaagggatatgtgcaggctcccc

SEQ ID NO: 3737889 - DNA, 25 bp, Homo sapien
gccaaagggaactctggaagccaat

SEQ ID NO: 3737890 - DNA, 25 bp, Homo sapien
tagacagagtggattctgcccacca

SEQ ID NO: 3737891 - DNA, 25 bp, Homo sapien
tgtgctcagcattacggccctgacg

SEQ ID NO: 3737892 - DNA, 25 bp, Homo sapien
gggcccaaacaaacagagcgatgga

SEQ ID NO: 3737893 - DNA, 25 bp, Homo sapien
aaacagagcgatggagctgccgcct

SEQ ID NO: 3737894 - DNA, 25 bp, Homo sapien
caaacaaacagagcgatggagctgc

SEQ ID NO: 3737895 - DNA, 25 bp, Homo sapien
aacagagcgatggagctgccgcctc

SEQ ID NO: 3737896 - DNA, 25 bp, Homo sapien
agagatgagtagtgaccgccccatg

SEQ ID NO: 3737897 - DNA, 25 bp, Homo sapien
caccgttagggtgctcttcaaagtc

SEQ ID NO: 3737898 - DNA, 25 bp, Homo sapien
cttcttcccgtagcggccgagagag

SEQ ID NO: 3737899 - DNA, 25 bp, Homo sapien
tgtccagcaaatatacagccgccgg

SEQ ID NO: 3737900 - DNA, 25 bp, Homo sapien
tcagtacggggcaatttatactcac

SEQ ID NO: 3737901 - DNA, 25 bp, Homo sapien
ttacttgcccacagacaagcggcta

SEQ ID NO: 3737902 - DNA, 25 bp, Homo sapien
gtgaactgtattgtatttctcctca

SEQ ID NO: 3737903 - DNA, 25 bp, Homo sapien
caagcggctacatcttgcagccaag

SEQ ID NO: 3737904 - DNA, 25 bp, Homo sapien
aaggaactttcctggcgaaccactg

SEQ ID NO: 3737905 - DNA, 25 bp, Homo sapien
caggaactgccaatcccatgggaag

SEQ ID NO: 3737906 - DNA, 25 bp, Homo sapien
tattcactgctcaacgctggagagt

SEQ ID NO: 3737907 - DNA, 25 bp, Homo sapien
catccttttgcgttaggtagcacga

SEQ ID NO: 3737908 - DNA, 25 bp, Homo sapien
gaataatcataaagacagggtacca

SEQ ID NO: 3737909 - DNA, 25 bp, Homo sapien
gatttctaatttggcaatgatctcc

SEQ ID NO: 3737910 - DNA, 25 bp, Homo sapien
aaaggctgcccggttcagtgaaagt

SEQ ID NO: 3737911 - DNA, 25 bp, Homo sapien
aaacaggactgctccgcaaaggctg

SEQ ID NO: 3737912 - DNA, 25 bp, Homo sapien
ttaaagtcataagggcattccatga

SEQ ID NO: 3737913 - DNA, 25 bp, Homo sapien
tcatagctttggagtcacgagaatt

SEQ ID NO: 3737914 - DNA, 25 bp, Homo sapien
tttggagtcacgagaatttggttgg

SEQ ID NO: 3737915 - DNA, 25 bp, Homo sapien
tcataagggcattccatgaaaccat

SEQ ID NO: 3737916 - DNA, 25 bp, Homo sapien
tgaagaagcagtcagcgcaggtagc

SEQ ID NO: 3737917 - DNA, 25 bp, Homo sapien
agggagcagccgtccaaagaggcat

SEQ ID NO: 3737918 - DNA, 25 bp, Homo sapien
ccctgccttggaattgggtcaggga

SEQ ID NO: 3737919 - DNA, 25 bp, Homo sapien
catctggccacaagatgctctctgg

SEQ ID NO: 3737920 - DNA, 25 bp, Homo sapien
tggctgtaaatccatcctattcaag

SEQ ID NO: 3737921 - DNA, 25 bp, Homo sapien
atttcagtagcactagtaccagctc

SEQ ID NO: 3737922 - DNA, 25 bp, Homo sapien
tgtttcttcttagtccaatcctggg

SEQ ID NO: 3737923 - DNA, 25 bp, Homo sapien
caatcctgggagatggtgtatttcc

SEQ ID NO: 3737924 - DNA, 25 bp, Homo sapien
gagaattttagctgacttaggccaa

SEQ ID NO: 3737925 - DNA, 25 bp, Homo sapien
acaaatggtatctctgcacgggaga

SEQ ID NO: 3737926 - DNA, 25 bp, Homo sapien
tgtttggtaactccacacagcggaa

SEQ ID NO: 3737927 - DNA, 25 bp, Homo sapien
taacactctgactgcgagggtgcaa

SEQ ID NO: 3737928 - DNA, 25 bp, Homo sapien
gagtagccccatgccatattttaaa

SEQ ID NO: 3737929 - DNA, 25 bp, Homo sapien
aacctagatccctgggatgcgcgtt

SEQ ID NO: 3737930 - DNA, 25 bp, Homo sapien
ggatgcgcgtttcacaatagggttc

SEQ ID NO: 3737931 - DNA, 25 bp, Homo sapien
aaaccgttccacctcggatcaggca

SEQ ID NO: 3737932 - DNA, 25 bp, Homo sapien
gagaaaggctcaggtccagtatgga

SEQ ID NO: 3737933 - DNA, 25 bp, Homo sapien
cacatgggcgatttgagggtgtcac

SEQ ID NO: 3737934 - DNA, 25 bp, Homo sapien
tttgaaatccacagagtgtccaggc

SEQ ID NO: 3737935 - DNA, 25 bp, Homo sapien
gccaatcatggagtcagcagcttta

SEQ ID NO: 3737936 - DNA, 25 bp, Homo sapien
ccctgtctgtccttcacactgggac

SEQ ID NO: 3737937 - DNA, 25 bp, Homo sapien
tgtatgaacagactcgcttttgttg

SEQ ID NO: 3737938 - DNA, 25 bp, Homo sapien
gaccaggggcacctctgttttgtat

SEQ ID NO: 3737939 - DNA, 25 bp, Homo sapien
tctgttttgtatgaacagactcgct

SEQ ID NO: 3737940 - DNA, 25 bp, Homo sapien
ttagagtccaggtaacgtatccacc

SEQ ID NO: 3737941 - DNA, 25 bp, Homo sapien
gtccaggtaacgtatccaccagcag

SEQ ID NO: 3737942 - DNA, 25 bp, Homo sapien
gagtccaggtaacgtatccaccagc

SEQ ID NO: 3737943 - DNA, 25 bp, Homo sapien
caggtaacgtatccaccagcagctc

SEQ ID NO: 3737944 - DNA, 25 bp, Homo sapien
tgtaggactaaacaaacgcctgtgc

SEQ ID NO: 3737945 - DNA, 25 bp, Homo sapien
tcccgggttgactctgttgaagcct

SEQ ID NO: 3737946 - DNA, 25 bp, Homo sapien
taaccataatgcatgcaggtggccc

SEQ ID NO: 3737947 - DNA, 25 bp, Homo sapien
catcgattgtgcatggttaacagca

SEQ ID NO: 3737948 - DNA, 25 bp, Homo sapien
cagatgagggtacatcttctcctgt

SEQ ID NO: 3737949 - DNA, 25 bp, Homo sapien
acagatgagggtacatcttctcctg

SEQ ID NO: 3737950 - DNA, 25 bp, Homo sapien
actgaacagatgagggtacatcttc

SEQ ID NO: 3737951 - DNA, 25 bp, Homo sapien
gaacagatgagggtacatcttctcc

SEQ ID NO: 3737952 - DNA, 25 bp, Homo sapien
atatgtatatatataatccacacac

SEQ ID NO: 3737953 - DNA, 25 bp, Homo sapien
tgctcgcctgaaaagccacacatgg

SEQ ID NO: 3737954 - DNA, 25 bp, Homo sapien
tccttgccctaaaactgacagtcca

SEQ ID NO: 3737955 - DNA, 25 bp, Homo sapien
tcccctggtttgcatggtataaaga

SEQ ID NO: 3737956 - DNA, 25 bp, Homo sapien
gaaatgagtccctaagcaatcctaa

SEQ ID NO: 3737957 - DNA, 25 bp, Homo sapien
agaattgtgatgtgcggatggctcc

SEQ ID NO: 3737958 - DNA, 25 bp, Homo sapien
tgtccagatggaaagtctgcctcag

SEQ ID NO: 3737959 - DNA, 25 bp, Homo sapien
tcagtcttaaagcagatccgaaatg

SEQ ID NO: 3737960 - DNA, 25 bp, Homo sapien
cacatggatggtcggctgtgtccag

SEQ ID NO: 3737961 - DNA, 25 bp, Homo sapien
cctcgtgtgggatggcagcttgccc

SEQ ID NO: 3737962 - DNA, 25 bp, Homo sapien
tattgataatccctcatggaaccaa

SEQ ID NO: 3737963 - DNA, 25 bp, Homo sapien
aaccgacaccttcggcctcgtgtgg

SEQ ID NO: 3737964 - DNA, 25 bp, Homo sapien
ccagcagtatattgataatccctca

SEQ ID NO: 3737965 - DNA, 25 bp, Homo sapien
tatttacaaaggcaagtagcagatg

SEQ ID NO: 3737966 - DNA, 25 bp, Homo sapien
ctttatttacaaaggcaagtagcag

SEQ ID NO: 3737967 - DNA, 25 bp, Homo sapien
tttatttacaaaggcaagtagcaga

SEQ ID NO: 3737968 - DNA, 25 bp, Homo sapien
actttatttacaaaggcaagtagca

SEQ ID NO: 3737969 - DNA, 25 bp, Homo sapien
taaaactcttcaatccctctgggac

SEQ ID NO: 3737970 - DNA, 25 bp, Homo sapien
tataaagccaattcaccgagccatt

SEQ ID NO: 3737971 - DNA, 25 bp, Homo sapien
tgtatgcttcataggagggactcag

SEQ ID NO: 3737972 - DNA, 25 bp, Homo sapien
caaacattagctccagtactgggct

SEQ ID NO: 3737973 - DNA, 25 bp, Homo sapien
tgactgtcctgtaagcacagctgac

SEQ ID NO: 3737974 - DNA, 25 bp, Homo sapien
tcagagcacagcgtcacagaaacag

SEQ ID NO: 3737975 - DNA, 25 bp, Homo sapien
ttcatgttcacacggaaacaccgtc

SEQ ID NO: 3737976 - DNA, 25 bp, Homo sapien
tccaatgtgctctgatcagcagctg

SEQ ID NO: 3737977 - DNA, 25 bp, Homo sapien
tgtctccctctcacttacatgaagg

SEQ ID NO: 3737978 - DNA, 25 bp, Homo sapien
taatcaagctaaatcctaggcctcc

SEQ ID NO: 3737979 - DNA, 25 bp, Homo sapien
tgtggcacagagctaattagccagg

SEQ ID NO: 3737980 - DNA, 25 bp, Homo sapien
catctagcttaggaatgtggcacag

SEQ ID NO: 3737981 - DNA, 25 bp, Homo sapien
tttactgaatctaaattgaggaagt

SEQ ID NO: 3737982 - DNA, 25 bp, Homo sapien
caatttactgaatctaaattgagga

SEQ ID NO: 3737983 - DNA, 25 bp, Homo sapien
ctatgacaatttactgaatctaaat

SEQ ID NO: 3737984 - DNA, 25 bp, Homo sapien
tactgaatctaaattgaggaagttg

SEQ ID NO: 3737985 - DNA, 25 bp, Homo sapien
aatgcggtaagctgccaaaaatcaa

SEQ ID NO: 3737986 - DNA, 25 bp, Homo sapien
cctggaccaatctgagggagctcaa

SEQ ID NO: 3737987 - DNA, 25 bp, Homo sapien
tctttgatatttgacagggacacag

SEQ ID NO: 3737988 - DNA, 25 bp, Homo sapien
agggctaacacctgctggctggaca

SEQ ID NO: 3737989 - DNA, 25 bp, Homo sapien
ccagaaccagtgagatgtgaatcgg

SEQ ID NO: 3737990 - DNA, 25 bp, Homo sapien
ctgttttatacagagtggtcgctct

SEQ ID NO: 3737991 - DNA, 25 bp, Homo sapien
ccagtgagatgtgaatcggaggtat

SEQ ID NO: 3737992 - DNA, 25 bp, Homo sapien
agtggtcgctctgcttccccagaac

SEQ ID NO: 3737993 - DNA, 25 bp, Homo sapien
tggcagcaatatggactggcctgag

SEQ ID NO: 3737994 - DNA, 25 bp, Homo sapien
ggactgggtactttcgatgataact

SEQ ID NO: 3737995 - DNA, 25 bp, Homo sapien
gatgataactttcatcaactctcag

SEQ ID NO: 3737996 - DNA, 25 bp, Homo sapien
gatgacctatcgatctctttctcag

SEQ ID NO: 3737997 - DNA, 25 bp, Homo sapien
atatgtgactctgtgtctggtcccc

SEQ ID NO: 3737998 - DNA, 25 bp, Homo sapien
ttatctatatccagggttatatatg

SEQ ID NO: 3737999 - DNA, 25 bp, Homo sapien
tatccagggttatatatgtgactct

SEQ ID NO: 3738000 - DNA, 25 bp, Homo sapien
agggttatatatgtgactctgtgtc

SEQ ID NO: 3738001 - DNA, 25 bp, Homo sapien
tgttcctcctcctgtctggtggttt

SEQ ID NO: 3738002 - DNA, 25 bp, Homo sapien
gctgttcctcctcctgtctggtggt

SEQ ID NO: 3738003 - DNA, 25 bp, Homo sapien
cctcctcctgtctggtggttttcaa

SEQ ID NO: 3738004 - DNA, 25 bp, Homo sapien
ctcctgtctggtggttttcaacctg

SEQ ID NO: 3738005 - DNA, 25 bp, Homo sapien
aagtgatcgtgtcctctgcccaagt

SEQ ID NO: 3738006 - DNA, 25 bp, Homo sapien
gacatcagggtgaagaggctaaccc

SEQ ID NO: 3738007 - DNA, 25 bp, Homo sapien
ttggcaatggctctcccaggaagag

SEQ ID NO: 3738008 - DNA, 25 bp, Homo sapien
ggctaacccaattggcacaagtgat

SEQ ID NO: 3738009 - DNA, 25 bp, Homo sapien
aaatggcatcttctttgaatttcag

SEQ ID NO: 3738010 - DNA, 25 bp, Homo sapien
gcatcttctttgaatttcagattcc

SEQ ID NO: 3738011 - DNA, 25 bp, Homo sapien
ctggagaaatggcatcttctttgaa

SEQ ID NO: 3738012 - DNA, 25 bp, Homo sapien
ggagaaatggcatcttctttgaatt

SEQ ID NO: 3738013 - DNA, 25 bp, Homo sapien
gatgggaatttacggcttctccacc

SEQ ID NO: 3738014 - DNA, 25 bp, Homo sapien
gctatcatgtttctaggttccaacc

SEQ ID NO: 3738015 - DNA, 25 bp, Homo sapien
tatattctgaatcctcatctggacc

SEQ ID NO: 3738016 - DNA, 25 bp, Homo sapien
ggttccaaccatgagaatactagtt

SEQ ID NO: 3738017 - DNA, 25 bp, Homo sapien
ggcttggcatgcggatatcctgtcc

SEQ ID NO: 3738018 - DNA, 25 bp, Homo sapien
ccacgggcttggcatgcggatatcc

SEQ ID NO: 3738019 - DNA, 25 bp, Homo sapien
cacgggcttggcatgcggatatcct

SEQ ID NO: 3738020 - DNA, 25 bp, Homo sapien
cgggcttggcatgcggatatcctgt

SEQ ID NO: 3738021 - DNA, 25 bp, Homo sapien
aagtcattccgttcagcgaaatctc

SEQ ID NO: 3738022 - DNA, 25 bp, Homo sapien
tgcaaaggctctgttgccaacagtg

SEQ ID NO: 3738023 - DNA, 25 bp, Homo sapien
gggagtccgtagagtaacctgctaa

SEQ ID NO: 3738024 - DNA, 25 bp, Homo sapien
ggccaaatctaattcccagtcgcat

SEQ ID NO: 3738025 - DNA, 25 bp, Homo sapien
ttcctgcacgcatcctttaaggacc

SEQ ID NO: 3738026 - DNA, 25 bp, Homo sapien
taattccgtctgaaatcctttcctg

SEQ ID NO: 3738027 - DNA, 25 bp, Homo sapien
caccattaaaactccctgggagcca

SEQ ID NO: 3738028 - DNA, 25 bp, Homo sapien
cacacccagcggatgcttttgtgag

SEQ ID NO: 3738029 - DNA, 25 bp, Homo sapien
ccactgggggccctgtacttcttca

SEQ ID NO: 3738030 - DNA, 25 bp, Homo sapien
ggccctgtacttcttcaggactggg

SEQ ID NO: 3738031 - DNA, 25 bp, Homo sapien
cctgtacttcttcaggactgggtgc

SEQ ID NO: 3738032 - DNA, 25 bp, Homo sapien
gggccctgtacttcttcaggactgg

SEQ ID NO: 3738033 - DNA, 25 bp, Homo sapien
ctttatcacaactaggaccatttac

SEQ ID NO: 3738034 - DNA, 25 bp, Homo sapien
gcacaaggtatgaggacgagaagca

SEQ ID NO: 3738035 - DNA, 25 bp, Homo sapien
gagaagctatctttgatgatgaggg

SEQ ID NO: 3738036 - DNA, 25 bp, Homo sapien
caaggtatgaggacgagaagcacag

SEQ ID NO: 3738037 - DNA, 25 bp, Homo sapien
aggatttgcagcgtggcacaaggta

SEQ ID NO: 3738038 - DNA, 25 bp, Homo sapien
tgccaagtcagctgatgggggtctt

SEQ ID NO: 3738039 - DNA, 25 bp, Homo sapien
tatgttgggcatgtaaaggtttgcc

SEQ ID NO: 3738040 - DNA, 25 bp, Homo sapien
ctggcatgctatgttgggcatgtaa

SEQ ID NO: 3738041 - DNA, 25 bp, Homo sapien
ggcatgtaaaggtttgccaagtcag

SEQ ID NO: 3738042 - DNA, 25 bp, Homo sapien
aagcaaagctgatcaaggcgttatg

SEQ ID NO: 3738043 - DNA, 25 bp, Homo sapien
aaagctgatcaaggcgttatgagga

SEQ ID NO: 3738044 - DNA, 25 bp, Homo sapien
gctgatcaaggcgttatgaggagat

SEQ ID NO: 3738045 - DNA, 25 bp, Homo sapien
gatcaaggcgttatgaggagataag

SEQ ID NO: 3738046 - DNA, 25 bp, Homo sapien
tgtgtatcttctttgtcttagatgt

SEQ ID NO: 3738047 - DNA, 25 bp, Homo sapien
ccactagatggcgtgtgacaaccat

SEQ ID NO: 3738048 - DNA, 25 bp, Homo sapien
cataaaggtatcaaaggcgtcctcc

SEQ ID NO: 3738049 - DNA, 25 bp, Homo sapien
ggacattttcagtggacgagcctaa

SEQ ID NO: 3738050 - DNA, 25 bp, Homo sapien
tgtgtcagccacacgcaaaggcttc

SEQ ID NO: 3738051 - DNA, 25 bp, Homo sapien
gattttgggaaagactgtggcatgc

SEQ ID NO: 3738052 - DNA, 25 bp, Homo sapien
ttgggaaagactgtggcatgctttc

SEQ ID NO: 3738053 - DNA, 25 bp, Homo sapien
ttttgggaaagactgtggcatgctt

SEQ ID NO: 3738054 - DNA, 25 bp, Homo sapien
cacagggattttgggaaagactgtg

SEQ ID NO: 3738055 - DNA, 25 bp, Homo sapien
tgaccagttaacttcttggttgttc

SEQ ID NO: 3738056 - DNA, 25 bp, Homo sapien
caaaagaaatcttttccctgaccag

SEQ ID NO: 3738057 - DNA, 25 bp, Homo sapien
ccctgaccagttaacttcttggttg

SEQ ID NO: 3738058 - DNA, 25 bp, Homo sapien
cctgaccagttaacttcttggttgt

SEQ ID NO: 3738059 - DNA, 25 bp, Homo sapien
taccacaaccgttgcaggcaagggt

SEQ ID NO: 3738060 - DNA, 25 bp, Homo sapien
cttgctttataccacaaccgttgca

SEQ ID NO: 3738061 - DNA, 25 bp, Homo sapien
aggcaagggtgtctccgatggcgtc

SEQ ID NO: 3738062 - DNA, 25 bp, Homo sapien
ccgatggcgtcttggttttgcttac

SEQ ID NO: 3738063 - DNA, 25 bp, Homo sapien
gtcctccgggttgtagaagtcatgg

SEQ ID NO: 3738064 - DNA, 25 bp, Homo sapien
taatgccaggcaagtcctccgggtt

SEQ ID NO: 3738065 - DNA, 25 bp, Homo sapien
ggatttccgcacacagcgatggctt

SEQ ID NO: 3738066 - DNA, 25 bp, Homo sapien
ccctgtgcttttcggtaatgccagg

SEQ ID NO: 3738067 - DNA, 25 bp, Homo sapien
tcttaggaactagcacggagtgagc

SEQ ID NO: 3738068 - DNA, 25 bp, Homo sapien
tcatggcaaaatatcacgattatgc

SEQ ID NO: 3738069 - DNA, 25 bp, Homo sapien
attaagatgtcttaggaactagcac

SEQ ID NO: 3738070 - DNA, 25 bp, Homo sapien
ctagcacggagtgagctggatgaaa

SEQ ID NO: 3738071 - DNA, 25 bp, Homo sapien
gacagagacccaagaccgtaaatcc

SEQ ID NO: 3738072 - DNA, 25 bp, Homo sapien
tctgtcttgctttcagacaatgagt

SEQ ID NO: 3738073 - DNA, 25 bp, Homo sapien
tttgtagtaaggcacaatactgcca

SEQ ID NO: 3738074 - DNA, 25 bp, Homo sapien
tagacatctagatatataggcaacg

SEQ ID NO: 3738075 - DNA, 25 bp, Homo sapien
gaggtatggatcacaactcccatca

SEQ ID NO: 3738076 - DNA, 25 bp, Homo sapien
ggtacaaccattatgcacacggagg

SEQ ID NO: 3738077 - DNA, 25 bp, Homo sapien
ttcctggagcaggtacaaccattat

SEQ ID NO: 3738078 - DNA, 25 bp, Homo sapien
gttgggaggatccagcgccttcctg

SEQ ID NO: 3738079 - DNA, 25 bp, Homo sapien
agctatggaccaaggcatgttgaca

SEQ ID NO: 3738080 - DNA, 25 bp, Homo sapien
ggtgtgtgccttccagagctatgga

SEQ ID NO: 3738081 - DNA, 25 bp, Homo sapien
catgttgacacggtggctggaacag

SEQ ID NO: 3738082 - DNA, 25 bp, Homo sapien
cttccagagctatggaccaaggcat

SEQ ID NO: 3738083 - DNA, 25 bp, Homo sapien
cctgtggtcaccttctgtctgttgt

SEQ ID NO: 3738084 - DNA, 25 bp, Homo sapien
tcctgtggtcaccttctgtctgttg

SEQ ID NO: 3738085 - DNA, 25 bp, Homo sapien
ctcctgtggtcaccttctgtctgtt

SEQ ID NO: 3738086 - DNA, 25 bp, Homo sapien
aggctgagtataatagcatgatctt

SEQ ID NO: 3738087 - DNA, 25 bp, Homo sapien
cttctctgccggcagtctggctgca

SEQ ID NO: 3738088 - DNA, 25 bp, Homo sapien
gctcaggcctaagccagaatgccag

SEQ ID NO: 3738089 - DNA, 25 bp, Homo sapien
ctgtgcgggccatggtcaggaacct

SEQ ID NO: 3738090 - DNA, 25 bp, Homo sapien
tggctgcatgtgctcgagactggct

SEQ ID NO: 3738091 - DNA, 25 bp, Homo sapien
cgggcgaggttactttcagagacgc

SEQ ID NO: 3738092 - DNA, 25 bp, Homo sapien
ttcagagacgcctgtcttgaggcag

SEQ ID NO: 3738093 - DNA, 25 bp, Homo sapien
gcagcaacgggcgaggttactttca

SEQ ID NO: 3738094 - DNA, 25 bp, Homo sapien
gaggttactttcagagacgcctgtc

SEQ ID NO: 3738095 - DNA, 25 bp, Homo sapien
ctaaggagtagtgcagtgatggcca

SEQ ID NO: 3738096 - DNA, 25 bp, Homo sapien
tatttggcacatgcggacatcccct

SEQ ID NO: 3738097 - DNA, 25 bp, Homo sapien
catccccttggcatgggaagccaca

SEQ ID NO: 3738098 - DNA, 25 bp, Homo sapien
ttctggatgatgcacaaggcctggg

SEQ ID NO: 3738099 - DNA, 25 bp, Homo sapien
ggaaggcaaatcctaaagcactgaa

SEQ ID NO: 3738100 - DNA, 25 bp, Homo sapien
ctgtactagtggtctttgccttttg

SEQ ID NO: 3738101 - DNA, 25 bp, Homo sapien
cttttggaaggcaaatcctaaagca

SEQ ID NO: 3738102 - DNA, 25 bp, Homo sapien
ggcaaatcctaaagcactgaaaatc

SEQ ID NO: 3738103 - DNA, 25 bp, Homo sapien
cctcccagagctgctccagctcctt

SEQ ID NO: 3738104 - DNA, 25 bp, Homo sapien
gaggaatgactgcttgatgcgtaca

SEQ ID NO: 3738105 - DNA, 25 bp, Homo sapien
tgtgtaaagtgtacatgttacaaca

SEQ ID NO: 3738106 - DNA, 25 bp, Homo sapien
tcatatgaaatgtctagtacaggca

SEQ ID NO: 3738107 - DNA, 25 bp, Homo sapien
tgaaaacattagactaagtaaaaca

SEQ ID NO: 3738108 - DNA, 25 bp, Homo sapien
cctcctccaccaagtgtgtgcggtg

SEQ ID NO: 3738109 - DNA, 25 bp, Homo sapien
tccaccaagtgtgtgcggtgttcct

SEQ ID NO: 3738110 - DNA, 25 bp, Homo sapien
agaggggtggcaaatgtgtttctct

SEQ ID NO: 3738111 - DNA, 25 bp, Homo sapien
caagtgtgtgcggtgttccttctac

SEQ ID NO: 3738112 - DNA, 25 bp, Homo sapien
ctccagatggtgctgaacttcgtac

SEQ ID NO: 3738113 - DNA, 25 bp, Homo sapien
gagacttcggccattgctgtactcc

SEQ ID NO: 3738114 - DNA, 25 bp, Homo sapien
ggagacttcggccattgctgtactc

SEQ ID NO: 3738115 - DNA, 25 bp, Homo sapien
gctgaacttcgtaccccagtgctct

SEQ ID NO: 3738116 - DNA, 25 bp, Homo sapien
aataacgatggctggctggcgttgt

SEQ ID NO: 3738117 - DNA, 25 bp, Homo sapien
agcttctctagcaaataacgatggc

SEQ ID NO: 3738118 - DNA, 25 bp, Homo sapien
tctagcaaataacgatggctggctg

SEQ ID NO: 3738119 - DNA, 25 bp, Homo sapien
gcaaataacgatggctggctggcgt

SEQ ID NO: 3738120 - DNA, 25 bp, Homo sapien
gtctcgggcagggaactcattacca

SEQ ID NO: 3738121 - DNA, 25 bp, Homo sapien
ggccggcgcacaaactggatgcaga

SEQ ID NO: 3738122 - DNA, 25 bp, Homo sapien
aatggagacgctcggcatcggatgc

SEQ ID NO: 3738123 - DNA, 25 bp, Homo sapien
cattaccagaggtttgtatggctac

SEQ ID NO: 3738124 - DNA, 25 bp, Homo sapien
atcccacatttccagagtaattata

SEQ ID NO: 3738125 - DNA, 25 bp, Homo sapien
taactggtcccctacatcttgactc

SEQ ID NO: 3738126 - DNA, 25 bp, Homo sapien
gagtaattataagcccctgctgtcc

SEQ ID NO: 3738127 - DNA, 25 bp, Homo sapien
atagcccccggccacgtgtgatggg

SEQ ID NO: 3738128 - DNA, 25 bp, Homo sapien
tctggtaagccaatgagtgtagaca

SEQ ID NO: 3738129 - DNA, 25 bp, Homo sapien
acaagcacgcgggttctggtaagcc

SEQ ID NO: 3738130 - DNA, 25 bp, Homo sapien
cacgcgggttctggtaagccaatga

SEQ ID NO: 3738131 - DNA, 25 bp, Homo sapien
acagtgtgtacaagcacgcgggttc

SEQ ID NO: 3738132 - DNA, 25 bp, Homo sapien
ggagaggacagtgagtgggagagct

SEQ ID NO: 3738133 - DNA, 25 bp, Homo sapien
aaatgggcttgtcacaaagaaatac

SEQ ID NO: 3738134 - DNA, 25 bp, Homo sapien
caaatgggcttgtcacaaagaaata

SEQ ID NO: 3738135 - DNA, 25 bp, Homo sapien
ttttggtgtctcagaagatgctgca

SEQ ID NO: 3738136 - DNA, 25 bp, Homo sapien
tggtgtctcagaagatgctgcatta

SEQ ID NO: 3738137 - DNA, 25 bp, Homo sapien
tgtctcagaagatgctgcattacca

SEQ ID NO: 3738138 - DNA, 25 bp, Homo sapien
tctcagaagatgctgcattaccaac

SEQ ID NO: 3738139 - DNA, 25 bp, Homo sapien
ctacaaggtcaggccacctcttcct

SEQ ID NO: 3738140 - DNA, 25 bp, Homo sapien
aggtcaggccacctcttcctgggac

SEQ ID NO: 3738141 - DNA, 25 bp, Homo sapien
acaaggtcaggccacctcttcctgg

SEQ ID NO: 3738142 - DNA, 25 bp, Homo sapien
aaggtcaggccacctcttcctggga

SEQ ID NO: 3738143 - DNA, 25 bp, Homo sapien
tattgttccagtccaacacttggaa

SEQ ID NO: 3738144 - DNA, 25 bp, Homo sapien
tctcacatggctgtttagatgaagc

SEQ ID NO: 3738145 - DNA, 25 bp, Homo sapien
ctcacatggctgtttagatgaagct

SEQ ID NO: 3738146 - DNA, 25 bp, Homo sapien
ttattgttccagtccaacacttgga

SEQ ID NO: 3738147 - DNA, 25 bp, Homo sapien
acttagagcttttacgtctgctatg

SEQ ID NO: 3738148 - DNA, 25 bp, Homo sapien
ttctacttagagcttttacgtctgc

SEQ ID NO: 3738149 - DNA, 25 bp, Homo sapien
agcttttacgtctgctatgatcccc

SEQ ID NO: 3738150 - DNA, 25 bp, Homo sapien
tgttgaagagcttctacttagagct

SEQ ID NO: 3738151 - DNA, 25 bp, Homo sapien
gaagcaagtttctctatcggcaaag

SEQ ID NO: 3738152 - DNA, 25 bp, Homo sapien
aaatggagttctagccctggtcagc

SEQ ID NO: 3738153 - DNA, 25 bp, Homo sapien
taactggtaggagagaataagcgtc

SEQ ID NO: 3738154 - DNA, 25 bp, Homo sapien
caaggaacgctttctgacacataaa

SEQ ID NO: 3738155 - DNA, 25 bp, Homo sapien
gatcactcttgggtggatgccgaag

SEQ ID NO: 3738156 - DNA, 25 bp, Homo sapien
gatgccgaagatagtgacagttgac

SEQ ID NO: 3738157 - DNA, 25 bp, Homo sapien
tgaggttcccgaatcagtgaaggct

SEQ ID NO: 3738158 - DNA, 25 bp, Homo sapien
ggctttgcaaaggttagatcactct

SEQ ID NO: 3738159 - DNA, 25 bp, Homo sapien
acagagaattaacggtgcaacctaa

SEQ ID NO: 3738160 - DNA, 25 bp, Homo sapien
caacagagaattaacggtgcaacct

SEQ ID NO: 3738161 - DNA, 25 bp, Homo sapien
tgcaacagagaattaacggtgcaac

SEQ ID NO: 3738162 - DNA, 25 bp, Homo sapien
taatgcaacagagaattaacggtgc

SEQ ID NO: 3738163 - DNA, 25 bp, Homo sapien
tctggaagaaatggatccctcttcc

SEQ ID NO: 3738164 - DNA, 25 bp, Homo sapien
gaatctggaagaaatggatccctct

SEQ ID NO: 3738165 - DNA, 25 bp, Homo sapien
atctggaagaaatggatccctcttc

SEQ ID NO: 3738166 - DNA, 25 bp, Homo sapien
aatctggaagaaatggatccctctt

SEQ ID NO: 3738167 - DNA, 25 bp, Homo sapien
ctgctcaagggccttaactgccagg

SEQ ID NO: 3738168 - DNA, 25 bp, Homo sapien
tgctcaagggccttaactgccagga

SEQ ID NO: 3738169 - DNA, 25 bp, Homo sapien
gctcaagggccttaactgccaggat

SEQ ID NO: 3738170 - DNA, 25 bp, Homo sapien
ccattcccgatggtggagggcttaa

SEQ ID NO: 3738171 - DNA, 25 bp, Homo sapien
gaactcaattggaatcctcgcttgg

SEQ ID NO: 3738172 - DNA, 25 bp, Homo sapien
tgccagcagtgctcaaaaagagaaa

SEQ ID NO: 3738173 - DNA, 25 bp, Homo sapien
ttcatatattaccagaagtggctcc

SEQ ID NO: 3738174 - DNA, 25 bp, Homo sapien
gtcagtcagtcactgcaggccagca

SEQ ID NO: 3738175 - DNA, 25 bp, Homo sapien
tttacatgggatgaaaggagggatg

SEQ ID NO: 3738176 - DNA, 25 bp, Homo sapien
gagctggcttttaaacccggtatca

SEQ ID NO: 3738177 - DNA, 25 bp, Homo sapien
ttaaacccggtatcagtctcagtca

SEQ ID NO: 3738178 - DNA, 25 bp, Homo sapien
tgttgggactttaccaggtaggcga

SEQ ID NO: 3738179 - DNA, 25 bp, Homo sapien
gctgttgggactttaccaggtaggc

SEQ ID NO: 3738180 - DNA, 25 bp, Homo sapien
ccaggtaggcgagtagaagcgagtg

SEQ ID NO: 3738181 - DNA, 25 bp, Homo sapien
gtaggcgagtagaagcgagtgcatc

SEQ ID NO: 3738182 - DNA, 25 bp, Homo sapien
ttaccgtgtagtgggtgtggtgtca

SEQ ID NO: 3738183 - DNA, 25 bp, Homo sapien
tactccttagagcatttagtgaccc

SEQ ID NO: 3738184 - DNA, 25 bp, Homo sapien
tgtccagccaaggaagcccttcttc

SEQ ID NO: 3738185 - DNA, 25 bp, Homo sapien
tggcctcctgtagggtctgacttgg

SEQ ID NO: 3738186 - DNA, 25 bp, Homo sapien
ttagtgacccctgcaggcatgttgc

SEQ ID NO: 3738187 - DNA, 25 bp, Homo sapien
tatctgtacccagtgtaactacacg

SEQ ID NO: 3738188 - DNA, 25 bp, Homo sapien
tggaggcagacttgatatttcagag

SEQ ID NO: 3738189 - DNA, 25 bp, Homo sapien
taactacacgtttactggaactgtg

SEQ ID NO: 3738190 - DNA, 25 bp, Homo sapien
ttataatggattagtcgtaagtacc

SEQ ID NO: 3738191 - DNA, 25 bp, Homo sapien
caacatgggatacatgtaacttgcc

SEQ ID NO: 3738192 - DNA, 25 bp, Homo sapien
taacttgccagagtgcttcaagaca

SEQ ID NO: 3738193 - DNA, 25 bp, Homo sapien
ataaaatcacttttggcgctttcca

SEQ ID NO: 3738194 - DNA, 25 bp, Homo sapien
ggatggacccttggtataaaatcac

SEQ ID NO: 3738195 - DNA, 25 bp, Homo sapien
tggatgttctatatggaaaatgctg

SEQ ID NO: 3738196 - DNA, 25 bp, Homo sapien
gttctttgtgataatgtttagacac

SEQ ID NO: 3738197 - DNA, 25 bp, Homo sapien
gataatgtttagacaccttaattaa

SEQ ID NO: 3738198 - DNA, 25 bp, Homo sapien
ggatgttctatatggaaaatgctga

SEQ ID NO: 3738199 - DNA, 25 bp, Homo sapien
tggctgtaaagatgaatgcctcaag

SEQ ID NO: 3738200 - DNA, 25 bp, Homo sapien
tttccaaccagctaaagcccttatc

SEQ ID NO: 3738201 - DNA, 25 bp, Homo sapien
ccaagtggctgtaaagatgaatgcc

SEQ ID NO: 3738202 - DNA, 25 bp, Homo sapien
gctaaagcccttatcttaaatccaa

SEQ ID NO: 3738203 - DNA, 25 bp, Homo sapien
tgcagttttagaaatgggaattgta

SEQ ID NO: 3738204 - DNA, 25 bp, Homo sapien
gaaatgggaattgtatgatactgac

SEQ ID NO: 3738205 - DNA, 25 bp, Homo sapien
attttcagcccttgtaagaatagta

SEQ ID NO: 3738206 - DNA, 25 bp, Homo sapien
ttcagcccttgtaagaatagtaaat

SEQ ID NO: 3738207 - DNA, 25 bp, Homo sapien
taaccagagattagcacgatgcctg

SEQ ID NO: 3738208 - DNA, 25 bp, Homo sapien
ttggaccccatcaccagacggtagg

SEQ ID NO: 3738209 - DNA, 25 bp, Homo sapien
agtaggcgcccaataaataggtgaa

SEQ ID NO: 3738210 - DNA, 25 bp, Homo sapien
cggtaaacttttggtccagtcagtg

SEQ ID NO: 3738211 - DNA, 25 bp, Homo sapien
gggcccaagctgagtcattcccact

SEQ ID NO: 3738212 - DNA, 25 bp, Homo sapien
tggatgtagtatgatcagggcccaa

SEQ ID NO: 3738213 - DNA, 25 bp, Homo sapien
cttaattcattatcacacctggatg

SEQ ID NO: 3738214 - DNA, 25 bp, Homo sapien
caggattccctgcttaaaagtcaaa

SEQ ID NO: 3738215 - DNA, 25 bp, Homo sapien
gtctgttcgtcttccacttaactca

SEQ ID NO: 3738216 - DNA, 25 bp, Homo sapien
catttgtctgttcgtcttccactta

SEQ ID NO: 3738217 - DNA, 25 bp, Homo sapien
tttgtctgttcgtcttccacttaac

SEQ ID NO: 3738218 - DNA, 25 bp, Homo sapien
ctcatttgtctgttcgtcttccact

SEQ ID NO: 3738219 - DNA, 25 bp, Homo sapien
tgtccttagcacaacagaccccaag

SEQ ID NO: 3738220 - DNA, 25 bp, Homo sapien
catcaacgatggctgatgagccaga

SEQ ID NO: 3738221 - DNA, 25 bp, Homo sapien
gagaattcatcgctgatgggcaggt

SEQ ID NO: 3738222 - DNA, 25 bp, Homo sapien
taacagaactgcctaatgagaattg

SEQ ID NO: 3738223 - DNA, 25 bp, Homo sapien
tagtccctaatactgtacacgctgt

SEQ ID NO: 3738224 - DNA, 25 bp, Homo sapien
cctatattcttggacactttgtgta

SEQ ID NO: 3738225 - DNA, 25 bp, Homo sapien
gccaggtagggcatagctccattat

SEQ ID NO: 3738226 - DNA, 25 bp, Homo sapien
aaaaatttcatagtccctaatactg

SEQ ID NO: 3738227 - DNA, 25 bp, Homo sapien
taacaataaacagctagaattcagc

SEQ ID NO: 3738228 - DNA, 25 bp, Homo sapien
tccttgggaactgttgtccaacttc

SEQ ID NO: 3738229 - DNA, 25 bp, Homo sapien
gaaagagctcaatgaattatgaatc

SEQ ID NO: 3738230 - DNA, 25 bp, Homo sapien
caacttcagcacacaaaagagtggc

SEQ ID NO: 3738231 - DNA, 25 bp, Homo sapien
cattgataagcaaaacagtcaggga

SEQ ID NO: 3738232 - DNA, 25 bp, Homo sapien
tacaaggcagtaatgtcccaacttc

SEQ ID NO: 3738233 - DNA, 25 bp, Homo sapien
gaaataggccgtgaatcctgaagga

SEQ ID NO: 3738234 - DNA, 25 bp, Homo sapien
gatcggcagccttttattcaattca

SEQ ID NO: 3738235 - DNA, 25 bp, Homo sapien
aaacctttacacatcgtcttgctgg

SEQ ID NO: 3738236 - DNA, 25 bp, Homo sapien
ctggattctgtaagaaaatatcacc

SEQ ID NO: 3738237 - DNA, 25 bp, Homo sapien
cctttgacatcgatggaagacttac

SEQ ID NO: 3738238 - DNA, 25 bp, Homo sapien
aatatcaccttctcggtatcctgaa

SEQ ID NO: 3738239 - DNA, 25 bp, Homo sapien
tcagatgctacttctgcacatctat

SEQ ID NO: 3738240 - DNA, 25 bp, Homo sapien
ttctgcacatctattgctggaagag

SEQ ID NO: 3738241 - DNA, 25 bp, Homo sapien
tctgcacatctattgctggaagaga

SEQ ID NO: 3738242 - DNA, 25 bp, Homo sapien
gctacttctgcacatctattgctgg

SEQ ID NO: 3738243 - DNA, 25 bp, Homo sapien
tattggctgatcttctttcattctc

SEQ ID NO: 3738244 - DNA, 25 bp, Homo sapien
tgaactagttttactgatcttaaaa

SEQ ID NO: 3738245 - DNA, 25 bp, Homo sapien
gatcttctttcattctccagttcag

SEQ ID NO: 3738246 - DNA, 25 bp, Homo sapien
tgatcttctttcattctccagttca

SEQ ID NO: 3738247 - DNA, 25 bp, Homo sapien
ctgggacgccagatgtttgcagact

SEQ ID NO: 3738248 - DNA, 25 bp, Homo sapien
gagttgttattgctcccatctggga

SEQ ID NO: 3738249 - DNA, 25 bp, Homo sapien
gaccatgcaatcgagtaagaacaga

SEQ ID NO: 3738250 - DNA, 25 bp, Homo sapien
gagttgcagcacgtttctgacccca

SEQ ID NO: 3738251 - DNA, 25 bp, Homo sapien
tggagagttcctgcgcaagcttagc

SEQ ID NO: 3738252 - DNA, 25 bp, Homo sapien
ttggagagttcctgcgcaagcttag

SEQ ID NO: 3738253 - DNA, 25 bp, Homo sapien
agcccacatcgtggctcctagcatg

SEQ ID NO: 3738254 - DNA, 25 bp, Homo sapien
gctcctagcatgtcctttggtcaag

SEQ ID NO: 3738255 - DNA, 25 bp, Homo sapien
taaatgacagcagtgtaatgagggt

SEQ ID NO: 3738256 - DNA, 25 bp, Homo sapien
gagcttacctgaaccttttcccagc

SEQ ID NO: 3738257 - DNA, 25 bp, Homo sapien
cattttctaacagcattaactggca

SEQ ID NO: 3738258 - DNA, 25 bp, Homo sapien
cagcatggattcaacttacaggagc

SEQ ID NO: 3738259 - DNA, 25 bp, Homo sapien
ttcccatgaatgttaaacagccgcc

SEQ ID NO: 3738260 - DNA, 25 bp, Homo sapien
tgaagttcctcagccatcaacagag

SEQ ID NO: 3738261 - DNA, 25 bp, Homo sapien
atcaacagagctgtgataacgctgt

SEQ ID NO: 3738262 - DNA, 25 bp, Homo sapien
cctctatcacagctctagacagcag

SEQ ID NO: 3738263 - DNA, 25 bp, Homo sapien
ggtgctgcagatgcgaggcctgctg

SEQ ID NO: 3738264 - DNA, 25 bp, Homo sapien
ttcctcggcagccatctgtcagcga

SEQ ID NO: 3738265 - DNA, 25 bp, Homo sapien
gctcctccaggcaacaggcgtgttg

SEQ ID NO: 3738266 - DNA, 25 bp, Homo sapien
gattctaatgattgagcccaaacag

SEQ ID NO: 3738267 - DNA, 25 bp, Homo sapien
tttgccaagttccacttgagattca

SEQ ID NO: 3738268 - DNA, 25 bp, Homo sapien
tgccaagttccacttgagattcaca

SEQ ID NO: 3738269 - DNA, 25 bp, Homo sapien
ttgccaagttccacttgagattcac

SEQ ID NO: 3738270 - DNA, 25 bp, Homo sapien
gccagcttggactcgggaaagacca

SEQ ID NO: 3738271 - DNA, 25 bp, Homo sapien
tcgggaaagaccaagcatgaaacct

SEQ ID NO: 3738272 - DNA, 25 bp, Homo sapien
tctccgatgccagcttggactcggg

SEQ ID NO: 3738273 - DNA, 25 bp, Homo sapien
tgttcttctccgatgccagcttgga

SEQ ID NO: 3738274 - DNA, 25 bp, Homo sapien
cctgctttgatatgctacacagtac

SEQ ID NO: 3738275 - DNA, 25 bp, Homo sapien
ttcatgggtattggtgttatccgcc

SEQ ID NO: 3738276 - DNA, 25 bp, Homo sapien
tctgttccagagcagtacgttcctc

SEQ ID NO: 3738277 - DNA, 25 bp, Homo sapien
cacatggatagggaataagcctgag

SEQ ID NO: 3738278 - DNA, 25 bp, Homo sapien
atgcttgttaagaaccagtaatttg

SEQ ID NO: 3738279 - DNA, 25 bp, Homo sapien
gcttgttaagaaccagtaatttgga

SEQ ID NO: 3738280 - DNA, 25 bp, Homo sapien
tctgcctggtaaaatagctttgtct

SEQ ID NO: 3738281 - DNA, 25 bp, Homo sapien
gtctccttgcgtattactttgtata

SEQ ID NO: 3738282 - DNA, 25 bp, Homo sapien
tcacactggtgtcattaaagctaac

SEQ ID NO: 3738283 - DNA, 25 bp, Homo sapien
tatgggctcctttgcataacataat

SEQ ID NO: 3738284 - DNA, 25 bp, Homo sapien
cataatgagcaaaaccgcttttaag

SEQ ID NO: 3738285 - DNA, 25 bp, Homo sapien
ttgaggtgaggtggcatttacattc

SEQ ID NO: 3738286 - DNA, 25 bp, Homo sapien
tccgccttgagaatgggaacccgtg

SEQ ID NO: 3738287 - DNA, 25 bp, Homo sapien
cgccttgagaatgggaacccgtggc

SEQ ID NO: 3738288 - DNA, 25 bp, Homo sapien
ccgccttgagaatgggaacccgtgg

SEQ ID NO: 3738289 - DNA, 25 bp, Homo sapien
actccgccttgagaatgggaacccg

SEQ ID NO: 3738290 - DNA, 25 bp, Homo sapien
gaacaaatacggagaaacagtcata

SEQ ID NO: 3738291 - DNA, 25 bp, Homo sapien
tactcgggcagttcttcgtgtgctg

SEQ ID NO: 3738292 - DNA, 25 bp, Homo sapien
tgtaaacattcagccgctgaacaaa

SEQ ID NO: 3738293 - DNA, 25 bp, Homo sapien
gaaacagtcatactcgggcagttct

SEQ ID NO: 3738294 - DNA, 25 bp, Homo sapien
catggccattgaggacagttcccgc

SEQ ID NO: 3738295 - DNA, 25 bp, Homo sapien
cccacatgaaggtgggaagccaatc

SEQ ID NO: 3738296 - DNA, 25 bp, Homo sapien
gccaatctctcctatattaatggac

SEQ ID NO: 3738297 - DNA, 25 bp, Homo sapien
tacatgtgagtcctatgaagccctc

SEQ ID NO: 3738298 - DNA, 25 bp, Homo sapien
ctacttctgctcagcccctccaatt

SEQ ID NO: 3738299 - DNA, 25 bp, Homo sapien
cctgatgggtgatttccatctccca

SEQ ID NO: 3738300 - DNA, 25 bp, Homo sapien
tccaattctgatgcctgatgggtga

SEQ ID NO: 3738301 - DNA, 25 bp, Homo sapien
agcccctccaattctgatgcctgat

SEQ ID NO: 3738302 - DNA, 25 bp, Homo sapien
agtcttcctgttcgatgccaccctg

SEQ ID NO: 3738303 - DNA, 25 bp, Homo sapien
cttgcaggagtcaattatgttttta

SEQ ID NO: 3738304 - DNA, 25 bp, Homo sapien
tttatcgagcgtagcagatctgcag

SEQ ID NO: 3738305 - DNA, 25 bp, Homo sapien
aaaagcggataacttcttgcaggag

SEQ ID NO: 3738306 - DNA, 25 bp, Homo sapien
cttggataacaagataaagggcaaa

SEQ ID NO: 3738307 - DNA, 25 bp, Homo sapien
catgggcattcaggctcttggataa

SEQ ID NO: 3738308 - DNA, 25 bp, Homo sapien
tgaattttcttgtgccaagaggagg

SEQ ID NO: 3738309 - DNA, 25 bp, Homo sapien
gccgagagtggctaaatggtaccca

SEQ ID NO: 3738310 - DNA, 25 bp, Homo sapien
tgggcacatggcataactcaccagt

SEQ ID NO: 3738311 - DNA, 25 bp, Homo sapien
gtaaccatctcggtgtaacccagca

SEQ ID NO: 3738312 - DNA, 25 bp, Homo sapien
ccagcaggctgctttgatgcgagga

SEQ ID NO: 3738313 - DNA, 25 bp, Homo sapien
ctgagaacagacagcacgggtccca

SEQ ID NO: 3738314 - DNA, 25 bp, Homo sapien
aactcagtgcgggtacgttattgat

SEQ ID NO: 3738315 - DNA, 25 bp, Homo sapien
gtgagagagtctgatgagttaccat

SEQ ID NO: 3738316 - DNA, 25 bp, Homo sapien
gaaccaagggtgtcaagttgagtga

SEQ ID NO: 3738317 - DNA, 25 bp, Homo sapien
cagtgcgggtacgttattgatgacc

SEQ ID NO: 3738318 - DNA, 25 bp, Homo sapien
gccaacagtgcattagagagtcttt

SEQ ID NO: 3738319 - DNA, 25 bp, Homo sapien
tgagcacctttcatccacagggaca

SEQ ID NO: 3738320 - DNA, 25 bp, Homo sapien
tccaccaactgtcccgcaaatgaat

SEQ ID NO: 3738321 - DNA, 25 bp, Homo sapien
caaatgaatttcaggaacaatggcc

SEQ ID NO: 3738322 - DNA, 25 bp, Homo sapien
caggaaaggactctgaacatgatgc

SEQ ID NO: 3738323 - DNA, 25 bp, Homo sapien
gacggagaaaggtttgtagacaaca

SEQ ID NO: 3738324 - DNA, 25 bp, Homo sapien
gtagacaacaggtgccagtttggca

SEQ ID NO: 3738325 - DNA, 25 bp, Homo sapien
ttaagaaatctacgggcatctgctg

SEQ ID NO: 3738326 - DNA, 25 bp, Homo sapien
caaagtggctctaaacagtcgtgat

SEQ ID NO: 3738327 - DNA, 25 bp, Homo sapien
gaaggctctctgttgtcgttgcaaa

SEQ ID NO: 3738328 - DNA, 25 bp, Homo sapien
ttaatgacaccgaaagagaaggctc

SEQ ID NO: 3738329 - DNA, 25 bp, Homo sapien
tgcaaaagcacctcgagacagaaat

SEQ ID NO: 3738330 - DNA, 25 bp, Homo sapien
cagattcatcggctgcaatgtggtg

SEQ ID NO: 3738331 - DNA, 25 bp, Homo sapien
tagccggcttttctgtcctcgataa

SEQ ID NO: 3738332 - DNA, 25 bp, Homo sapien
tcctcgataatggagggttgtaatg

SEQ ID NO: 3738333 - DNA, 25 bp, Homo sapien
ttataatacagccagcgataggtac

SEQ ID NO: 3738334 - DNA, 25 bp, Homo sapien
ctcggagcaatgtgcattggagtga

SEQ ID NO: 3738335 - DNA, 25 bp, Homo sapien
gccaaatcctttgcttcctgtgtga

SEQ ID NO: 3738336 - DNA, 25 bp, Homo sapien
tgtgtgattcggcagaagtcccagg

SEQ ID NO: 3738337 - DNA, 25 bp, Homo sapien
taatgaacagacagcgtggactgcc

SEQ ID NO: 3738338 - DNA, 25 bp, Homo sapien
gtagatggggcctgcaagctccaca

SEQ ID NO: 3738339 - DNA, 25 bp, Homo sapien
ttaggcactataggcaaagtagatg

SEQ ID NO: 3738340 - DNA, 25 bp, Homo sapien
tgcaagctccacaatgacatgagga

SEQ ID NO: 3738341 - DNA, 25 bp, Homo sapien
aggcactataggcaaagtagatggg

SEQ ID NO: 3738342 - DNA, 25 bp, Homo sapien
tctgccttagggtgaggcttttccc

SEQ ID NO: 3738343 - DNA, 25 bp, Homo sapien
gacacttgtcagacagggctctact

SEQ ID NO: 3738344 - DNA, 25 bp, Homo sapien
tttgaactcggcaggagtgcctagt

SEQ ID NO: 3738345 - DNA, 25 bp, Homo sapien
catttgctgtctgactgaagcgccc

SEQ ID NO: 3738346 - DNA, 25 bp, Homo sapien
gctgtggagactttgactaggaaat

SEQ ID NO: 3738347 - DNA, 25 bp, Homo sapien
taatcagggccctgcttaaccgcaa

SEQ ID NO: 3738348 - DNA, 25 bp, Homo sapien
tgcttaaccgcaacaactttacact

SEQ ID NO: 3738349 - DNA, 25 bp, Homo sapien
ctttacacttgtttcggctgtggag

SEQ ID NO: 3738350 - DNA, 25 bp, Homo sapien
cagcaaaccctgagtggtctcatga

SEQ ID NO: 3738351 - DNA, 25 bp, Homo sapien
ccagcaaaccctgagtggtctcatg

SEQ ID NO: 3738352 - DNA, 25 bp, Homo sapien
caaaccctgagtggtctcatgaaca

SEQ ID NO: 3738353 - DNA, 25 bp, Homo sapien
ccctgagtggtctcatgaacatttc

SEQ ID NO: 3738354 - DNA, 25 bp, Homo sapien
gaaagttgctgtcagtgctacttgg

SEQ ID NO: 3738355 - DNA, 25 bp, Homo sapien
aagttgctgtcagtgctacttggac

SEQ ID NO: 3738356 - DNA, 25 bp, Homo sapien
ttgctgtcagtgctacttggacttt

SEQ ID NO: 3738357 - DNA, 25 bp, Homo sapien
agttgctgtcagtgctacttggact

SEQ ID NO: 3738358 - DNA, 25 bp, Homo sapien
gagaaaagggatgtcatggaacccc

SEQ ID NO: 3738359 - DNA, 25 bp, Homo sapien
cccagagggattaggctactagtct

SEQ ID NO: 3738360 - DNA, 25 bp, Homo sapien
tagagagccagataggcaccaggca

SEQ ID NO: 3738361 - DNA, 25 bp, Homo sapien
tgacaggagcattgaccagcctctg

SEQ ID NO: 3738362 - DNA, 25 bp, Homo sapien
tctggccttaggcaagaaggaggat

SEQ ID NO: 3738363 - DNA, 25 bp, Homo sapien
ctggccttaggcaagaaggaggatt

SEQ ID NO: 3738364 - DNA, 25 bp, Homo sapien
atgcaggtcacaggtgtgaagagtt

SEQ ID NO: 3738365 - DNA, 25 bp, Homo sapien
ggtcacaggtgtgaagagttccaga

SEQ ID NO: 3738366 - DNA, 25 bp, Homo sapien
caggtcacaggtgtgaagagttcca

SEQ ID NO: 3738367 - DNA, 25 bp, Homo sapien
tcacaggtgtgaagagttccagaac

SEQ ID NO: 3738368 - DNA, 25 bp, Homo sapien
gtccggcactttggtttatgctggt

SEQ ID NO: 3738369 - DNA, 25 bp, Homo sapien
gccttggtgcttgctggtgacgttt

SEQ ID NO: 3738370 - DNA, 25 bp, Homo sapien
tctgattcccatgtccggcactttg

SEQ ID NO: 3738371 - DNA, 25 bp, Homo sapien
cggcactttggtttatgctggtgta

SEQ ID NO: 3738372 - DNA, 25 bp, Homo sapien
cagagcttccaagagcacctggtgt

SEQ ID NO: 3738373 - DNA, 25 bp, Homo sapien
aagtgacacctgcttgcctaggaag

SEQ ID NO: 3738374 - DNA, 25 bp, Homo sapien
aagccacccctactctctggaagga

SEQ ID NO: 3738375 - DNA, 25 bp, Homo sapien
gactgcaatttgatccaggtcagag

SEQ ID NO: 3738376 - DNA, 25 bp, Homo sapien
cagcatcaggcaagggtcatcccat

SEQ ID NO: 3738377 - DNA, 25 bp, Homo sapien
cacatacaaggtggcagagtttgct

SEQ ID NO: 3738378 - DNA, 25 bp, Homo sapien
aacttgcctgctcccttactaaaga

SEQ ID NO: 3738379 - DNA, 25 bp, Homo sapien
agacattagtccactgatgagggca

SEQ ID NO: 3738380 - DNA, 25 bp, Homo sapien
ctttggtccgccatttgatttagga

SEQ ID NO: 3738381 - DNA, 25 bp, Homo sapien
ctaggcactgtgtatctggctgacc

SEQ ID NO: 3738382 - DNA, 25 bp, Homo sapien
gagatgccaacacacaaatccactg

SEQ ID NO: 3738383 - DNA, 25 bp, Homo sapien
ggtaatgtggctccatagagatgcc

SEQ ID NO: 3738384 - DNA, 25 bp, Homo sapien
cagagaccttcatacagtttgacaa

SEQ ID NO: 3738385 - DNA, 25 bp, Homo sapien
tctgtctgcactgcatgtttgtccc

SEQ ID NO: 3738386 - DNA, 25 bp, Homo sapien
ctgggtgactatggtttctgtctgc

SEQ ID NO: 3738387 - DNA, 25 bp, Homo sapien
catacagtttgacaacacccaggga

SEQ ID NO: 3738388 - DNA, 25 bp, Homo sapien
tatgggtacatcacttggcagaagg

SEQ ID NO: 3738389 - DNA, 25 bp, Homo sapien
gctgctgtggagagactactaaacc

SEQ ID NO: 3738390 - DNA, 25 bp, Homo sapien
tgcagtccacaagggctgtacacat

SEQ ID NO: 3738391 - DNA, 25 bp, Homo sapien
tgctagaaggtgagcttgagctccc

SEQ ID NO: 3738392 - DNA, 25 bp, Homo sapien
gtcatttgactaaatgcaccgcttc

SEQ ID NO: 3738393 - DNA, 25 bp, Homo sapien
gccactctccttgtcatttgactaa

SEQ ID NO: 3738394 - DNA, 25 bp, Homo sapien
cactttccgtaggaggaagaccctg

SEQ ID NO: 3738395 - DNA, 25 bp, Homo sapien
cgtaggaggaagaccctgcctgccc

SEQ ID NO: 3738396 - DNA, 25 bp, Homo sapien
ccttggaggaccagaaaagctacat

SEQ ID NO: 3738397 - DNA, 25 bp, Homo sapien
gcatggtgaagcccttggaggacca

SEQ ID NO: 3738398 - DNA, 25 bp, Homo sapien
tgttcctgctgcacaaaagtgattt

SEQ ID NO: 3738399 - DNA, 25 bp, Homo sapien
tgtgttctgaattccaacgttcagg

SEQ ID NO: 3738400 - DNA, 25 bp, Homo sapien
gaattccaacgttcagggcctgact

SEQ ID NO: 3738401 - DNA, 25 bp, Homo sapien
gactcccaaacaatggctatctggg

SEQ ID NO: 3738402 - DNA, 25 bp, Homo sapien
ccaaggatattgacttctattggta

SEQ ID NO: 3738403 - DNA, 25 bp, Homo sapien
gacttctattggtaactggataaca

SEQ ID NO: 3738404 - DNA, 25 bp, Homo sapien
aaatctccaaggatattgacttcta

SEQ ID NO: 3738405 - DNA, 25 bp, Homo sapien
acttctattggtaactggataacag

SEQ ID NO: 3738406 - DNA, 25 bp, Homo sapien
ggtgaacaggctaactcctggatgc

SEQ ID NO: 3738407 - DNA, 25 bp, Homo sapien
gaacaggctaactcctggatgctcg

SEQ ID NO: 3738408 - DNA, 25 bp, Homo sapien
ggatgctcgtagctgatggaacaga

SEQ ID NO: 3738409 - DNA, 25 bp, Homo sapien
ctaactcctggatgctcgtagctga

SEQ ID NO: 3738410 - DNA, 25 bp, Homo sapien
ggccattgggttatctggcccacag

SEQ ID NO: 3738411 - DNA, 25 bp, Homo sapien
caaatgagagggaacaaacatgtgt

SEQ ID NO: 3738412 - DNA, 25 bp, Homo sapien
gaatatgggcctgagtaaccactgc

SEQ ID NO: 3738413 - DNA, 25 bp, Homo sapien
ttgttccatattcaagagcccttgt

SEQ ID NO: 3738414 - DNA, 25 bp, Homo sapien
tccttgctagtggaaatggtcggga

SEQ ID NO: 3738415 - DNA, 25 bp, Homo sapien
cacctccaagttcgaagtagtacaa

SEQ ID NO: 3738416 - DNA, 25 bp, Homo sapien
tcattgttttttgcgcatcacctcc

SEQ ID NO: 3738417 - DNA, 25 bp, Homo sapien
caaaccacctatttcgcgtgatggg

SEQ ID NO: 3738418 - DNA, 25 bp, Homo sapien
agccaacttggtacttggcagcagc

SEQ ID NO: 3738419 - DNA, 25 bp, Homo sapien
catctaagatgtatacacagtcctc

SEQ ID NO: 3738420 - DNA, 25 bp, Homo sapien
tcttcctgcaaggagtaatacaggc

SEQ ID NO: 3738421 - DNA, 25 bp, Homo sapien
gagtgtttcaatgcatgctccaaca

SEQ ID NO: 3738422 - DNA, 25 bp, Homo sapien
tcctgcagtagagattcgtcctctt

SEQ ID NO: 3738423 - DNA, 25 bp, Homo sapien
aggggccgtgcaagctcctgcagta

SEQ ID NO: 3738424 - DNA, 25 bp, Homo sapien
tccactgtgcgctcctccggaccct

SEQ ID NO: 3738425 - DNA, 25 bp, Homo sapien
ggctcctcccgatagcctgacgctt

SEQ ID NO: 3738426 - DNA, 25 bp, Homo sapien
cccgctccttccctcctaagactgc

SEQ ID NO: 3738427 - DNA, 25 bp, Homo sapien
ccccgctccttccctcctaagactg

SEQ ID NO: 3738428 - DNA, 25 bp, Homo sapien
ccgctccttccctcctaagactgca

SEQ ID NO: 3738429 - DNA, 25 bp, Homo sapien
cgctccttccctcctaagactgcac

SEQ ID NO: 3738430 - DNA, 25 bp, Homo sapien
tctcagtccaggaactactctgtgc

SEQ ID NO: 3738431 - DNA, 25 bp, Homo sapien
gaaagcgagagaaagggtgagccgg

SEQ ID NO: 3738432 - DNA, 25 bp, Homo sapien
tcgcggtagccgagaaagaaagcga

SEQ ID NO: 3738433 - DNA, 25 bp, Homo sapien
gccagatacggcacaggtcgcggta

SEQ ID NO: 3738434 - DNA, 25 bp, Homo sapien
tcttccctcagtgaattgtgaatcc

SEQ ID NO: 3738435 - DNA, 25 bp, Homo sapien
tcttagatatgtaggaaggccagac

SEQ ID NO: 3738436 - DNA, 25 bp, Homo sapien
ctgggagtacgcgtgaacgaaatga

SEQ ID NO: 3738437 - DNA, 25 bp, Homo sapien
ggcttaaagttctttcttagatatg

SEQ ID NO: 3738438 - DNA, 25 bp, Homo sapien
atgaacttgttcccaagtacacagg

SEQ ID NO: 3738439 - DNA, 25 bp, Homo sapien
aagtacacagggtctccttagtcat

SEQ ID NO: 3738440 - DNA, 25 bp, Homo sapien
tgaacttgttcccaagtacacaggg

SEQ ID NO: 3738441 - DNA, 25 bp, Homo sapien
taccatttggtgtccacccagttcc

SEQ ID NO: 3738442 - DNA, 25 bp, Homo sapien
gaaccttcttcgtagctaccatttg

SEQ ID NO: 3738443 - DNA, 25 bp, Homo sapien
tcttcgtagctaccatttggtgtcc

SEQ ID NO: 3738444 - DNA, 25 bp, Homo sapien
gtccatggaaccttcttcgtagcta

SEQ ID NO: 3738445 - DNA, 25 bp, Homo sapien
tctggttacaagcacatcagctggg

SEQ ID NO: 3738446 - DNA, 25 bp, Homo sapien
tcatttgagcaagtggctgacgcac

SEQ ID NO: 3738447 - DNA, 25 bp, Homo sapien
taggaggaggaactatgcacggatt

SEQ ID NO: 3738448 - DNA, 25 bp, Homo sapien
catttaggatctttgagtcaggcat

SEQ ID NO: 3738449 - DNA, 25 bp, Homo sapien
cttgtctacataactttcccctggc

SEQ ID NO: 3738450 - DNA, 25 bp, Homo sapien
ctcaggttggaactggccacccctt

SEQ ID NO: 3738451 - DNA, 25 bp, Homo sapien
ccaagcacaacctgacccatcccct

SEQ ID NO: 3738452 - DNA, 25 bp, Homo sapien
ctgacccatcccctcaggttggaac

SEQ ID NO: 3738453 - DNA, 25 bp, Homo sapien
acccatcccctcaggttggaactgg

SEQ ID NO: 3738454 - DNA, 25 bp, Homo sapien
ccttcgggaaggtatgatggccatg

SEQ ID NO: 3738455 - DNA, 25 bp, Homo sapien
tgctgcgtggaagccccttggtttc

SEQ ID NO: 3738456 - DNA, 25 bp, Homo sapien
ggtctgttgaaatgcatgtgcccac

SEQ ID NO: 3738457 - DNA, 25 bp, Homo sapien
ggccatgtccacaagttgctgcgtg

SEQ ID NO: 3738458 - DNA, 25 bp, Homo sapien
ccactgcccatctgcatggcagctc

SEQ ID NO: 3738459 - DNA, 25 bp, Homo sapien
gcccatctgcatggcagctctaagt

SEQ ID NO: 3738460 - DNA, 25 bp, Homo sapien
tgcccatctgcatggcagctctaag

SEQ ID NO: 3738461 - DNA, 25 bp, Homo sapien
actgcccatctgcatggcagctcta

SEQ ID NO: 3738462 - DNA, 25 bp, Homo sapien
cgagagcaacctgcacgttgaggga

SEQ ID NO: 3738463 - DNA, 25 bp, Homo sapien
gcctagaaaacttccgatggcagca

SEQ ID NO: 3738464 - DNA, 25 bp, Homo sapien
ctgcttgtgtctcagaggctacatt

SEQ ID NO: 3738465 - DNA, 25 bp, Homo sapien
cgatggcagcaactccgagagcaac

SEQ ID NO: 3738466 - DNA, 25 bp, Homo sapien
tctagtgattggagctgtgcctttc

SEQ ID NO: 3738467 - DNA, 25 bp, Homo sapien
ctttctcgtcctctaactggaagtg

SEQ ID NO: 3738468 - DNA, 25 bp, Homo sapien
tcaacagctctagtgattggagctg

SEQ ID NO: 3738469 - DNA, 25 bp, Homo sapien
cagcatgtggctgatttttgtcaac

SEQ ID NO: 3738470 - DNA, 25 bp, Homo sapien
tgtgaaagcacatggtctgaacagc

SEQ ID NO: 3738471 - DNA, 25 bp, Homo sapien
gactgtgaaagcacatggtctgaac

SEQ ID NO: 3738472 - DNA, 25 bp, Homo sapien
caccaggactgtgaaagcacatggt

SEQ ID NO: 3738473 - DNA, 25 bp, Homo sapien
aagcacatggtctgaacagctcagc

SEQ ID NO: 3738474 - DNA, 25 bp, Homo sapien
catgcactcctgtaaggctggactg

SEQ ID NO: 3738475 - DNA, 25 bp, Homo sapien
tcctgtaaggctggactgtccctac

SEQ ID NO: 3738476 - DNA, 25 bp, Homo sapien
ctggaggacaagcatgcactcctgt

SEQ ID NO: 3738477 - DNA, 25 bp, Homo sapien
gacaagcatgcactcctgtaaggct

SEQ ID NO: 3738478 - DNA, 25 bp, Homo sapien
tgaatgaccattgtgttggaaccaa

SEQ ID NO: 3738479 - DNA, 25 bp, Homo sapien
gtggccatgaatgaccattgtgttg

SEQ ID NO: 3738480 - DNA, 25 bp, Homo sapien
tgttggaaccaaggtagcagcaaca

SEQ ID NO: 3738481 - DNA, 25 bp, Homo sapien
cagcagctgagaataccaggtatga

SEQ ID NO: 3738482 - DNA, 25 bp, Homo sapien
tggtgggattgcccagctgacagcc

SEQ ID NO: 3738483 - DNA, 25 bp, Homo sapien
ggtgggattgcccagctgacagccc

SEQ ID NO: 3738484 - DNA, 25 bp, Homo sapien
agtcttcacggctttgccttttggg

SEQ ID NO: 3738485 - DNA, 25 bp, Homo sapien
tcctcctcagtcttcacggctttgc

SEQ ID NO: 3738486 - DNA, 25 bp, Homo sapien
gggagcaattcatccggggacgtct

SEQ ID NO: 3738487 - DNA, 25 bp, Homo sapien
tcctcagtcttcacggctttgcctt

SEQ ID NO: 3738488 - DNA, 25 bp, Homo sapien
tccgtcaggccccatagtctctctg

SEQ ID NO: 3738489 - DNA, 25 bp, Homo sapien
tctccggaaacatctccgtcaggcc

SEQ ID NO: 3738490 - DNA, 25 bp, Homo sapien
cctctccggaaacatctccgtcagg

SEQ ID NO: 3738491 - DNA, 25 bp, Homo sapien
caggccccatagtctctctgacagg

SEQ ID NO: 3738492 - DNA, 25 bp, Homo sapien
aggatcataaaggaagtggtcccag

SEQ ID NO: 3738493 - DNA, 25 bp, Homo sapien
gaggaagagatcagaagtggctcca

SEQ ID NO: 3738494 - DNA, 25 bp, Homo sapien
gaagagatcagaagtggctccagcc

SEQ ID NO: 3738495 - DNA, 25 bp, Homo sapien
agtggtcccagtccacaaggctgcc

SEQ ID NO: 3738496 - DNA, 25 bp, Homo sapien
ttctcagtctcaaagacaaggggaa

SEQ ID NO: 3738497 - DNA, 25 bp, Homo sapien
cagtctcaaagacaaggggaagaac

SEQ ID NO: 3738498 - DNA, 25 bp, Homo sapien
tcagtctcaaagacaaggggaagaa

SEQ ID NO: 3738499 - DNA, 25 bp, Homo sapien
tctcagtctcaaagacaaggggaag

SEQ ID NO: 3738500 - DNA, 25 bp, Homo sapien
tgaaaggagcggctagagctggaat

SEQ ID NO: 3738501 - DNA, 25 bp, Homo sapien
gagcggctagagctggaataactgt

SEQ ID NO: 3738502 - DNA, 25 bp, Homo sapien
atttggtgaaaggagcggctagagc

SEQ ID NO: 3738503 - DNA, 25 bp, Homo sapien
aaaggagcggctagagctggaataa

SEQ ID NO: 3738504 - DNA, 25 bp, Homo sapien
ggcaagaagagggcatccctgaaca

SEQ ID NO: 3738505 - DNA, 25 bp, Homo sapien
gcaagaagagggcatccctgaacat

SEQ ID NO: 3738506 - DNA, 25 bp, Homo sapien
gtcttgctgcagaagtccagagcct

SEQ ID NO: 3738507 - DNA, 25 bp, Homo sapien
gctaaaagagctgcttgctggaagc

SEQ ID NO: 3738508 - DNA, 25 bp, Homo sapien
gagtgcatctactgtgctggctaaa

SEQ ID NO: 3738509 - DNA, 25 bp, Homo sapien
ggttccctgatgtccgtcttgctgc

SEQ ID NO: 3738510 - DNA, 25 bp, Homo sapien
gctgttgggacagcaccatggcatc

SEQ ID NO: 3738511 - DNA, 25 bp, Homo sapien
tgccttcttggagggctgccgcctc

SEQ ID NO: 3738512 - DNA, 25 bp, Homo sapien
gacactgccagcagctgttgggaca

SEQ ID NO: 3738513 - DNA, 25 bp, Homo sapien
gtcctcagggccgtcccctctgaca

SEQ ID NO: 3738514 - DNA, 25 bp, Homo sapien
gctccaaagtgagctgcatgagcag

SEQ ID NO: 3738515 - DNA, 25 bp, Homo sapien
gaaacccaggtgtcctcttacactg

SEQ ID NO: 3738516 - DNA, 25 bp, Homo sapien
tgtaaattgctttcgccctgatgcc

SEQ ID NO: 3738517 - DNA, 25 bp, Homo sapien
atttcccatatccagactgcagcag

SEQ ID NO: 3738518 - DNA, 25 bp, Homo sapien
cccttcctcataagtgaagtcttcg

SEQ ID NO: 3738519 - DNA, 25 bp, Homo sapien
cagtcagtgtttgccgcttgcagcc

SEQ ID NO: 3738520 - DNA, 25 bp, Homo sapien
gaagtcttcgttagctgctttgagc

SEQ ID NO: 3738521 - DNA, 25 bp, Homo sapien
tcttgctttgcatgtaatcccttcc

SEQ ID NO: 3738522 - DNA, 25 bp, Homo sapien
gcagacagagcccagtctagtgccc

SEQ ID NO: 3738523 - DNA, 25 bp, Homo sapien
cagacttttgggacacattgtgggg

SEQ ID NO: 3738524 - DNA, 25 bp, Homo sapien
cattgtggggaaagggacccaacag

SEQ ID NO: 3738525 - DNA, 25 bp, Homo sapien
cccagcatttgggaagtgcaaggcc

SEQ ID NO: 3738526 - DNA, 25 bp, Homo sapien
tgttggatagggctccctaagctct

SEQ ID NO: 3738527 - DNA, 25 bp, Homo sapien
tagggctccctaagctctgggtagc

SEQ ID NO: 3738528 - DNA, 25 bp, Homo sapien
caaacagtgtcattctcagcagagc

SEQ ID NO: 3738529 - DNA, 25 bp, Homo sapien
gctgttagcagcgttctctgttgga

SEQ ID NO: 3738530 - DNA, 25 bp, Homo sapien
gtgagtccactacgtaggtctgtga

SEQ ID NO: 3738531 - DNA, 25 bp, Homo sapien
caggacggtgaaaggctgctagtga

SEQ ID NO: 3738532 - DNA, 25 bp, Homo sapien
caagcccacattgggttaaggaggt

SEQ ID NO: 3738533 - DNA, 25 bp, Homo sapien
gactcttggttacgtgagtccacta

SEQ ID NO: 3738534 - DNA, 25 bp, Homo sapien
tgaagggtcagtttaaatctgtcca

SEQ ID NO: 3738535 - DNA, 25 bp, Homo sapien
gctatgagataaccggcaaatttga

SEQ ID NO: 3738536 - DNA, 25 bp, Homo sapien
acttgtcaccacaggaaagattggc

SEQ ID NO: 3738537 - DNA, 25 bp, Homo sapien
tattctggaagagagtggtgccgct

SEQ ID NO: 3738538 - DNA, 25 bp, Homo sapien
ttcaccaagagaaattccagattgt

SEQ ID NO: 3738539 - DNA, 25 bp, Homo sapien
ctgattcctatcataccattcacca

SEQ ID NO: 3738540 - DNA, 25 bp, Homo sapien
tgattcctatcataccattcaccaa

SEQ ID NO: 3738541 - DNA, 25 bp, Homo sapien
tcaccaagagaaattccagattgtg

SEQ ID NO: 3738542 - DNA, 25 bp, Homo sapien
gtggtgcttgtatgtcagaagccat

SEQ ID NO: 3738543 - DNA, 25 bp, Homo sapien
gaagcaatgaagtcttgttcctagt

SEQ ID NO: 3738544 - DNA, 25 bp, Homo sapien
ttgttcctagtggtgcttgtatgtc

SEQ ID NO: 3738545 - DNA, 25 bp, Homo sapien
tcctagtggtgcttgtatgtcagaa

SEQ ID NO: 3738546 - DNA, 25 bp, Homo sapien
tggtctgtacgcatactagcaaagg

SEQ ID NO: 3738547 - DNA, 25 bp, Homo sapien
gaagcattgcccttgagttaaactg

SEQ ID NO: 3738548 - DNA, 25 bp, Homo sapien
caagaatatgagaaaggaaccctgt

SEQ ID NO: 3738549 - DNA, 25 bp, Homo sapien
tatattgcatccctgctggttggaa

SEQ ID NO: 3738550 - DNA, 25 bp, Homo sapien
gatacaaaaccgtacatgcaggctg

SEQ ID NO: 3738551 - DNA, 25 bp, Homo sapien
atgtccatggctgtgaacactgcac

SEQ ID NO: 3738552 - DNA, 25 bp, Homo sapien
tatgtatgtgcagcctgaaactggc

SEQ ID NO: 3738553 - DNA, 25 bp, Homo sapien
gaaagccgggtcagtcatcttgaaa

SEQ ID NO: 3738554 - DNA, 25 bp, Homo sapien
aataattgaagtccttgatttgtaa

SEQ ID NO: 3738555 - DNA, 25 bp, Homo sapien
gcaagtaagtcacccaataattgaa

SEQ ID NO: 3738556 - DNA, 25 bp, Homo sapien
ggatgctgtcgcatgtctgctctgc

SEQ ID NO: 3738557 - DNA, 25 bp, Homo sapien
tgggatattgggagcaagtaagtca

SEQ ID NO: 3738558 - DNA, 25 bp, Homo sapien
cattatatttgagtgtgatagggaa

SEQ ID NO: 3738559 - DNA, 25 bp, Homo sapien
tagcactgctgtcctaaggctccct

SEQ ID NO: 3738560 - DNA, 25 bp, Homo sapien
gaagcagatacagttattaagtcca

SEQ ID NO: 3738561 - DNA, 25 bp, Homo sapien
tttctgaagcttattctagctgttg

SEQ ID NO: 3738562 - DNA, 25 bp, Homo sapien
tcaccagctgctatagtattggcag

SEQ ID NO: 3738563 - DNA, 25 bp, Homo sapien
tattgagagctacttcctgcgatgc

SEQ ID NO: 3738564 - DNA, 25 bp, Homo sapien
tagcacggaagcttcccttagtatt

SEQ ID NO: 3738565 - DNA, 25 bp, Homo sapien
tgggcggtactttagcacggaagct

SEQ ID NO: 3738566 - DNA, 25 bp, Homo sapien
ttccctgtgccacttaacacgatgt

SEQ ID NO: 3738567 - DNA, 25 bp, Homo sapien
acactcaggagctctgtcacaaagc

SEQ ID NO: 3738568 - DNA, 25 bp, Homo sapien
gctgcagagactgtattcagagcac

SEQ ID NO: 3738569 - DNA, 25 bp, Homo sapien
tgcagagactgtattcagagcacag

SEQ ID NO: 3738570 - DNA, 25 bp, Homo sapien
caaagctgttcatggaagaggatgt

SEQ ID NO: 3738571 - DNA, 25 bp, Homo sapien
tccagggggtacagatagtgaatgt

SEQ ID NO: 3738572 - DNA, 25 bp, Homo sapien
tcgtcagcatgtgcaagttccaggg

SEQ ID NO: 3738573 - DNA, 25 bp, Homo sapien
tgttttttcagatagctcgtcagca

SEQ ID NO: 3738574 - DNA, 25 bp, Homo sapien
cagatagtgaatgtattgaatatgc

SEQ ID NO: 3738575 - DNA, 25 bp, Homo sapien
tgtaatcaaggtcaggatgctttgc

SEQ ID NO: 3738576 - DNA, 25 bp, Homo sapien
tagcgatggttctcagggcattgga

SEQ ID NO: 3738577 - DNA, 25 bp, Homo sapien
catgttgttctcataaggcactgct

SEQ ID NO: 3738578 - DNA, 25 bp, Homo sapien
gcattggaaagaggccaccaggttc

SEQ ID NO: 3738579 - DNA, 25 bp, Homo sapien
catattgagtttgccttccagagca

SEQ ID NO: 3738580 - DNA, 25 bp, Homo sapien
tgcacagagtaagtccgccaaagtg

SEQ ID NO: 3738581 - DNA, 25 bp, Homo sapien
gcatggaattgcttaaacgtgccca

SEQ ID NO: 3738582 - DNA, 25 bp, Homo sapien
tgagcttactcatactggccaggaa

SEQ ID NO: 3738583 - DNA, 25 bp, Homo sapien
cactcagaattgtttggtaatcaca

SEQ ID NO: 3738584 - DNA, 25 bp, Homo sapien
caaagtactaaccagttacctccag

SEQ ID NO: 3738585 - DNA, 25 bp, Homo sapien
gctgatatttacaccaagtcccctc

SEQ ID NO: 3738586 - DNA, 25 bp, Homo sapien
ttcactaaattctgttaaatcagta

SEQ ID NO: 3738587 - DNA, 25 bp, Homo sapien
gatctagggtttgagctttactttc

SEQ ID NO: 3738588 - DNA, 25 bp, Homo sapien
tcccaagtaggcagcttataagcac

SEQ ID NO: 3738589 - DNA, 25 bp, Homo sapien
tttctcagaattttacagcagtgtg

SEQ ID NO: 3738590 - DNA, 25 bp, Homo sapien
gaagatggctcctgaaatagtgtgt

SEQ ID NO: 3738591 - DNA, 25 bp, Homo sapien
accttgggagtaagcaagtttcctg

SEQ ID NO: 3738592 - DNA, 25 bp, Homo sapien
tcagcagcagtatatttttgcttca

SEQ ID NO: 3738593 - DNA, 25 bp, Homo sapien
aagtttcctgtgcttccatcagcag

SEQ ID NO: 3738594 - DNA, 25 bp, Homo sapien
ccatcagcagcagtatatttttgct

SEQ ID NO: 3738595 - DNA, 25 bp, Homo sapien
tgctttggaactcacactgtacgtt

SEQ ID NO: 3738596 - DNA, 25 bp, Homo sapien
cattcaagtgggaagattagcgccg

SEQ ID NO: 3738597 - DNA, 25 bp, Homo sapien
tcctaggtcaggacagtaacattca

SEQ ID NO: 3738598 - DNA, 25 bp, Homo sapien
cgttagccccagtaaacagtgttga

SEQ ID NO: 3738599 - DNA, 25 bp, Homo sapien
gaagttgcagtggtgccactgtact

SEQ ID NO: 3738600 - DNA, 25 bp, Homo sapien
ggcggaagttgcagtggtgccactg

SEQ ID NO: 3738601 - DNA, 25 bp, Homo sapien
cggaagttgcagtggtgccactgta

SEQ ID NO: 3738602 - DNA, 25 bp, Homo sapien
aggcggaagttgcagtggtgccact

SEQ ID NO: 3738603 - DNA, 25 bp, Homo sapien
ccaacagtgtgttacagagtcctga

SEQ ID NO: 3738604 - DNA, 25 bp, Homo sapien
taaactgaaatggtaaagatctccc

SEQ ID NO: 3738605 - DNA, 25 bp, Homo sapien
gaagctctgcatccagatacgctga

SEQ ID NO: 3738606 - DNA, 25 bp, Homo sapien
gagtcctgatccatagagttagtcc

SEQ ID NO: 3738607 - DNA, 25 bp, Homo sapien
ttggagaaagctccgcttcctttgt

SEQ ID NO: 3738608 - DNA, 25 bp, Homo sapien
tcatttggtgtctgcggccagcgcc

SEQ ID NO: 3738609 - DNA, 25 bp, Homo sapien
ttgtttcaggcctcggtctttcctc

SEQ ID NO: 3738610 - DNA, 25 bp, Homo sapien
ggccctggcttcttgtattacctgg

SEQ ID NO: 3738611 - DNA, 25 bp, Homo sapien
tggccagccatcttcgtttctccag

SEQ ID NO: 3738612 - DNA, 25 bp, Homo sapien
cagccatcttcgtttctccagggca

SEQ ID NO: 3738613 - DNA, 25 bp, Homo sapien
gccagccatcttcgtttctccaggg

SEQ ID NO: 3738614 - DNA, 25 bp, Homo sapien
gccatcttcgtttctccagggcatg

SEQ ID NO: 3738615 - DNA, 25 bp, Homo sapien
tccacacccagcatacagaggcaga

SEQ ID NO: 3738616 - DNA, 25 bp, Homo sapien
ctccacacccagcatacagaggcag

SEQ ID NO: 3738617 - DNA, 25 bp, Homo sapien
acctccacacccagcatacagaggc

SEQ ID NO: 3738618 - DNA, 25 bp, Homo sapien
cacacccagcatacagaggcagagt

SEQ ID NO: 3738619 - DNA, 25 bp, Homo sapien
caaccctgagaagactgcaatgtga

SEQ ID NO: 3738620 - DNA, 25 bp, Homo sapien
tgcaatgtgacagctacactaggag

SEQ ID NO: 3738621 - DNA, 25 bp, Homo sapien
gaagactgcaatgtgacagctacac

SEQ ID NO: 3738622 - DNA, 25 bp, Homo sapien
gctcccagctcctactgctaagaag

SEQ ID NO: 3738623 - DNA, 25 bp, Homo sapien
cctctggaagctgcccccagtaagg

SEQ ID NO: 3738624 - DNA, 25 bp, Homo sapien
cagcctctggaagctgcccccagta

SEQ ID NO: 3738625 - DNA, 25 bp, Homo sapien
gaagctgcccccagtaagggttaga

SEQ ID NO: 3738626 - DNA, 25 bp, Homo sapien
tggaagctgcccccagtaagggtta

SEQ ID NO: 3738627 - DNA, 25 bp, Homo sapien
aggcctgccttggatctaggtgaac

SEQ ID NO: 3738628 - DNA, 25 bp, Homo sapien
tcatgttagggaatcaggcaatgga

SEQ ID NO: 3738629 - DNA, 25 bp, Homo sapien
aaggcctgccttggatctaggtgaa

SEQ ID NO: 3738630 - DNA, 25 bp, Homo sapien
gaatcaggcaatggaaggcctgcct

SEQ ID NO: 3738631 - DNA, 25 bp, Homo sapien
atccatcttcagatggacagaagca

SEQ ID NO: 3738632 - DNA, 25 bp, Homo sapien
cgtagggtctacgcacagggtgcat

SEQ ID NO: 3738633 - DNA, 25 bp, Homo sapien
aagcagcacagattggattggctgc

SEQ ID NO: 3738634 - DNA, 25 bp, Homo sapien
attggattggctgcgtagggtctac

SEQ ID NO: 3738635 - DNA, 25 bp, Homo sapien
gccatacctttgcctgaacttgcct

SEQ ID NO: 3738636 - DNA, 25 bp, Homo sapien
gaacttgcctttggcctgaatacct

SEQ ID NO: 3738637 - DNA, 25 bp, Homo sapien
gagtgtgtctttctcatgccatacc

SEQ ID NO: 3738638 - DNA, 25 bp, Homo sapien
tgtctttctcatgccatacctttgc

SEQ ID NO: 3738639 - DNA, 25 bp, Homo sapien
ttgttcagcaagcagagtactggct

SEQ ID NO: 3738640 - DNA, 25 bp, Homo sapien
cttgttcagcaagcagagtactggc

SEQ ID NO: 3738641 - DNA, 25 bp, Homo sapien
ccacgccctgcctatcagcgcagtg

SEQ ID NO: 3738642 - DNA, 25 bp, Homo sapien
cacagggcctcatgcgaggagtcac

SEQ ID NO: 3738643 - DNA, 25 bp, Homo sapien
ctatcagcgcagtgcccagtgcaca

SEQ ID NO: 3738644 - DNA, 25 bp, Homo sapien
cttccccgccatagggtgtcagcgc

SEQ ID NO: 3738645 - DNA, 25 bp, Homo sapien
tgagccaagtcatctagaaccgtaa

SEQ ID NO: 3738646 - DNA, 25 bp, Homo sapien
gcagctgagccaagtcatctagaac

SEQ ID NO: 3738647 - DNA, 25 bp, Homo sapien
agctgagccaagtcatctagaaccg

SEQ ID NO: 3738648 - DNA, 25 bp, Homo sapien
gctgagccaagtcatctagaaccgt

SEQ ID NO: 3738649 - DNA, 25 bp, Homo sapien
ttaccagcatcggaggaggaggagc

SEQ ID NO: 3738650 - DNA, 25 bp, Homo sapien
tggaggggcagggacatcccctccc

SEQ ID NO: 3738651 - DNA, 25 bp, Homo sapien
ctgttaccagcatcggaggaggagg

SEQ ID NO: 3738652 - DNA, 25 bp, Homo sapien
gaggggcagggacatcccctcccat

SEQ ID NO: 3738653 - DNA, 25 bp, Homo sapien
agcgccatgcgcagctcctctgatc

SEQ ID NO: 3738654 - DNA, 25 bp, Homo sapien
ttcccgctgtggatgcaaggcgagg

SEQ ID NO: 3738655 - DNA, 25 bp, Homo sapien
gcgaggccgcccagtcttacaataa

SEQ ID NO: 3738656 - DNA, 25 bp, Homo sapien
gatgcaaggcgaggccgcccagtct

SEQ ID NO: 3738657 - DNA, 25 bp, Homo sapien
cattattcctgatcccatggctctg

SEQ ID NO: 3738658 - DNA, 25 bp, Homo sapien
gctcgggcctgctgtgaattcacac

SEQ ID NO: 3738659 - DNA, 25 bp, Homo sapien
tctccagcgggcacttagagtcctg

SEQ ID NO: 3738660 - DNA, 25 bp, Homo sapien
tgcaaagccactggcgagagaggaa

SEQ ID NO: 3738661 - DNA, 25 bp, Homo sapien
tggcaaggccaaccaaatgacctgc

SEQ ID NO: 3738662 - DNA, 25 bp, Homo sapien
aggctccaacagatgtggcaagctc

SEQ ID NO: 3738663 - DNA, 25 bp, Homo sapien
atgtggcaagctccgggcagtctac

SEQ ID NO: 3738664 - DNA, 25 bp, Homo sapien
cctggcaaggccaaccaaatgacct

SEQ ID NO: 3738665 - DNA, 25 bp, Homo sapien
cagtaactgcttgtggaacgggtat

SEQ ID NO: 3738666 - DNA, 25 bp, Homo sapien
gacagtgttttctaggcttgctgac

SEQ ID NO: 3738667 - DNA, 25 bp, Homo sapien
gaattcccagagaggttggtcccga

SEQ ID NO: 3738668 - DNA, 25 bp, Homo sapien
cgaccggagtctatttgggtgtgaa

SEQ ID NO: 3738669 - DNA, 25 bp, Homo sapien
tctctggagtgaacgaccggggatg

SEQ ID NO: 3738670 - DNA, 25 bp, Homo sapien
caggtccacgaactcttcggcccat

SEQ ID NO: 3738671 - DNA, 25 bp, Homo sapien
aactcttcggcccatcctgtaccct

SEQ ID NO: 3738672 - DNA, 25 bp, Homo sapien
ggatgatgtcacaggtccacgaact

SEQ ID NO: 3738673 - DNA, 25 bp, Homo sapien
ccacctttgtgccacagatcaatgg

SEQ ID NO: 3738674 - DNA, 25 bp, Homo sapien
acaaggtgcaaacgctcagatccca

SEQ ID NO: 3738675 - DNA, 25 bp, Homo sapien
gatcaatgggcactgttctggtaaa

SEQ ID NO: 3738676 - DNA, 25 bp, Homo sapien
tctggatcattgcctctctctgcct

SEQ ID NO: 3738677 - DNA, 25 bp, Homo sapien
catcaagccttccaagggcagccta

SEQ ID NO: 3738678 - DNA, 25 bp, Homo sapien
gaatgaatacacgtcgtcagttacc

SEQ ID NO: 3738679 - DNA, 25 bp, Homo sapien
tcagttaccaagtccctacgcagtg

SEQ ID NO: 3738680 - DNA, 25 bp, Homo sapien
gccttatcccatgcatgcatctgtg

SEQ ID NO: 3738681 - DNA, 25 bp, Homo sapien
cactttctgggagtccttccagagc

SEQ ID NO: 3738682 - DNA, 25 bp, Homo sapien
ccactttctgggagtccttccagag

SEQ ID NO: 3738683 - DNA, 25 bp, Homo sapien
cacatgtcctctcaactctaaggaa

SEQ ID NO: 3738684 - DNA, 25 bp, Homo sapien
ctgccttttaacctggaactggtga

SEQ ID NO: 3738685 - DNA, 25 bp, Homo sapien
aaaacctcttctagagttactgcct

SEQ ID NO: 3738686 - DNA, 25 bp, Homo sapien
actggtgaagcagataaatggtccc

SEQ ID NO: 3738687 - DNA, 25 bp, Homo sapien
cactgctgatagtgaggatggccat

SEQ ID NO: 3738688 - DNA, 25 bp, Homo sapien
tggcaagctttgagaggaccaagcc

SEQ ID NO: 3738689 - DNA, 25 bp, Homo sapien
cagggccagtgtgtctagagtgtgt

SEQ ID NO: 3738690 - DNA, 25 bp, Homo sapien
gctagaatgttctgatacaacagga

SEQ ID NO: 3738691 - DNA, 25 bp, Homo sapien
ctccaagaccatggtgatagagggt

SEQ ID NO: 3738692 - DNA, 25 bp, Homo sapien
gagagggagactggctgttttcctg

SEQ ID NO: 3738693 - DNA, 25 bp, Homo sapien
tcctccaagaccatggtgatagagg

SEQ ID NO: 3738694 - DNA, 25 bp, Homo sapien
gggagactggctgttttcctggtcc

SEQ ID NO: 3738695 - DNA, 25 bp, Homo sapien
tatcttgcattctgtctccggtcat

SEQ ID NO: 3738696 - DNA, 25 bp, Homo sapien
tttctgctggggcaagctgtcactg

SEQ ID NO: 3738697 - DNA, 25 bp, Homo sapien
gctgtcactgacttgtcgctgatgg

SEQ ID NO: 3738698 - DNA, 25 bp, Homo sapien
gtctccggtcatgctatttctgctg

SEQ ID NO: 3738699 - DNA, 25 bp, Homo sapien
gggcgggactgccaagctgatggtg

SEQ ID NO: 3738700 - DNA, 25 bp, Homo sapien
gattccttgtcagtagggcgggact

SEQ ID NO: 3738701 - DNA, 25 bp, Homo sapien
cctctggattccttgtcagtagggc

SEQ ID NO: 3738702 - DNA, 25 bp, Homo sapien
tccttgtcagtagggcgggactgcc

SEQ ID NO: 3738703 - DNA, 25 bp, Homo sapien
ctttcttcccgagacctcatggccc

SEQ ID NO: 3738704 - DNA, 25 bp, Homo sapien
gagacacaggggttgattactcctc

SEQ ID NO: 3738705 - DNA, 25 bp, Homo sapien
catggccccacgtttcttctcctgt

SEQ ID NO: 3738706 - DNA, 25 bp, Homo sapien
cagtgagctcagtttgtcctgtggc

SEQ ID NO: 3738707 - DNA, 25 bp, Homo sapien
ccttggagagtgctctgaaaacacc

SEQ ID NO: 3738708 - DNA, 25 bp, Homo sapien
gaggtggtacttctgctgtgccagt

SEQ ID NO: 3738709 - DNA, 25 bp, Homo sapien
cttggctgatgagcgtggaggtggt

SEQ ID NO: 3738710 - DNA, 25 bp, Homo sapien
agtgcacagatgcacctgaggctgg

SEQ ID NO: 3738711 - DNA, 25 bp, Homo sapien
gattcagagtggtatcttcagggac

SEQ ID NO: 3738712 - DNA, 25 bp, Homo sapien
tccaggattcagagtggtatcttca

SEQ ID NO: 3738713 - DNA, 25 bp, Homo sapien
tgctgtttgcggtgctcagaatctg

SEQ ID NO: 3738714 - DNA, 25 bp, Homo sapien
tcctcctgctgtttgcggtgctcag

SEQ ID NO: 3738715 - DNA, 25 bp, Homo sapien
tgagcaatcgcataaagtgcttctg

SEQ ID NO: 3738716 - DNA, 25 bp, Homo sapien
gtataagcggatcttttttgagcaa

SEQ ID NO: 3738717 - DNA, 25 bp, Homo sapien
ttttttgagcaatcgcataaagtgc

SEQ ID NO: 3738718 - DNA, 25 bp, Homo sapien
tcatgaagcattgtataagcggatc

SEQ ID NO: 3738719 - DNA, 25 bp, Homo sapien
ttatggtgtgtgatagaaaatgtct

SEQ ID NO: 3738720 - DNA, 25 bp, Homo sapien
gatcttcccaccaaggtgttagtaa

SEQ ID NO: 3738721 - DNA, 25 bp, Homo sapien
tgtctttccgatcttcccaccaagg

SEQ ID NO: 3738722 - DNA, 25 bp, Homo sapien
gaaaatgtctttccgatcttcccac

SEQ ID NO: 3738723 - DNA, 25 bp, Homo sapien
cagcaaagataatggccatgcaatt

SEQ ID NO: 3738724 - DNA, 25 bp, Homo sapien
aagcagaccctgctcatctctcgtc

SEQ ID NO: 3738725 - DNA, 25 bp, Homo sapien
gctgagctctccatgcaattcatta

SEQ ID NO: 3738726 - DNA, 25 bp, Homo sapien
agatcttggaggcagcccatagacc

SEQ ID NO: 3738727 - DNA, 25 bp, Homo sapien
ggtctctgtgccttggcccttccat

SEQ ID NO: 3738728 - DNA, 25 bp, Homo sapien
tgctgcccaagtggctctgggttcc

SEQ ID NO: 3738729 - DNA, 25 bp, Homo sapien
tgggcctctgctcggcacttcagct

SEQ ID NO: 3738730 - DNA, 25 bp, Homo sapien
tcctcctcacagttttctggtccat

SEQ ID NO: 3738731 - DNA, 25 bp, Homo sapien
ctctcaatgcacaggtaaatatctg

SEQ ID NO: 3738732 - DNA, 25 bp, Homo sapien
tataagccagtttttcagggaagct

SEQ ID NO: 3738733 - DNA, 25 bp, Homo sapien
tttgtctccatgaacaacaaattca

SEQ ID NO: 3738734 - DNA, 25 bp, Homo sapien
gggaagctagggctatctccaatga

SEQ ID NO: 3738735 - DNA, 25 bp, Homo sapien
tcacatttgtctgggtggagagccc

SEQ ID NO: 3738736 - DNA, 25 bp, Homo sapien
ccgataaacggacaccgggatggtg

SEQ ID NO: 3738737 - DNA, 25 bp, Homo sapien
ggtggccctgtcatcaagttctgtc

SEQ ID NO: 3738738 - DNA, 25 bp, Homo sapien
caaagacaggagtctagaagcggct

SEQ ID NO: 3738739 - DNA, 25 bp, Homo sapien
cagctcttgtgtttcaggacctcca

SEQ ID NO: 3738740 - DNA, 25 bp, Homo sapien
caattagacaagtcctgaggccaca

SEQ ID NO: 3738741 - DNA, 25 bp, Homo sapien
gacttgggaggaccagtgagggacc

SEQ ID NO: 3738742 - DNA, 25 bp, Homo sapien
ggatgggaaagctccaattagacaa

SEQ ID NO: 3738743 - DNA, 25 bp, Homo sapien
acagacttttatacaggcagctggg

SEQ ID NO: 3738744 - DNA, 25 bp, Homo sapien
agtgacagacttttatacaggcagc

SEQ ID NO: 3738745 - DNA, 25 bp, Homo sapien
gcagaggcgggctgtagggcatgtt

SEQ ID NO: 3738746 - DNA, 25 bp, Homo sapien
cagctgggctacagaggagcagcat

SEQ ID NO: 3738747 - DNA, 25 bp, Homo sapien
tttcaccgtcagtgtatgggtgggt

SEQ ID NO: 3738748 - DNA, 25 bp, Homo sapien
ccgtcagtgtatgggtgggtccctc

SEQ ID NO: 3738749 - DNA, 25 bp, Homo sapien
atgggtgggtccctccttcattgaa

SEQ ID NO: 3738750 - DNA, 25 bp, Homo sapien
cagtgtatgggtgggtccctccttc

SEQ ID NO: 3738751 - DNA, 25 bp, Homo sapien
gtctctggttggcacattctctcca

SEQ ID NO: 3738752 - DNA, 25 bp, Homo sapien
ggacagactcgccagtgttcttcta

SEQ ID NO: 3738753 - DNA, 25 bp, Homo sapien
gtggccatggacagactcgccagtg

SEQ ID NO: 3738754 - DNA, 25 bp, Homo sapien
ccagtgttcttctagcaccaggttc

SEQ ID NO: 3738755 - DNA, 25 bp, Homo sapien
taggcccactattctacacatgatg

SEQ ID NO: 3738756 - DNA, 25 bp, Homo sapien
aaatgagctgtggactgctgactcc

SEQ ID NO: 3738757 - DNA, 25 bp, Homo sapien
tcataaagcctttgtccatcttcca

SEQ ID NO: 3738758 - DNA, 25 bp, Homo sapien
gatgccatcgtaggtatttctgtaa

SEQ ID NO: 3738759 - DNA, 25 bp, Homo sapien
taaatgtggttgaaggaataagcaa

SEQ ID NO: 3738760 - DNA, 25 bp, Homo sapien
ttgtcctattcagggttgcattcct

SEQ ID NO: 3738761 - DNA, 25 bp, Homo sapien
taccagtcggcgaagtcctgatatg

SEQ ID NO: 3738762 - DNA, 25 bp, Homo sapien
cattagtgctcaaaagtaccagtcg

SEQ ID NO: 3738763 - DNA, 25 bp, Homo sapien
ctgggcacattgagagatgacatct

SEQ ID NO: 3738764 - DNA, 25 bp, Homo sapien
tttccattgtacgcaggtgagtcct

SEQ ID NO: 3738765 - DNA, 25 bp, Homo sapien
ctttccattgtacgcaggtgagtcc

SEQ ID NO: 3738766 - DNA, 25 bp, Homo sapien
ttttcttggaagcacctgctgctct

SEQ ID NO: 3738767 - DNA, 25 bp, Homo sapien
cgcaggtgagtccttttcttggaag

SEQ ID NO: 3738768 - DNA, 25 bp, Homo sapien
cttgatacggtccacagatgtcgca

SEQ ID NO: 3738769 - DNA, 25 bp, Homo sapien
agaggaagtcaccatgctgctgtca

SEQ ID NO: 3738770 - DNA, 25 bp, Homo sapien
gtccacagggcatggtcccaagtga

SEQ ID NO: 3738771 - DNA, 25 bp, Homo sapien
tccccagaggctagagaaccaagca

SEQ ID NO: 3738772 - DNA, 25 bp, Homo sapien
atgagaaatgatgtccccacggcgg

SEQ ID NO: 3738773 - DNA, 25 bp, Homo sapien
gagaggacgccccttatcacagctc

SEQ ID NO: 3738774 - DNA, 25 bp, Homo sapien
gaggcaggcagggtacttttccaaa

SEQ ID NO: 3738775 - DNA, 25 bp, Homo sapien
tgccaactcccaatgagaaatgatg

SEQ ID NO: 3738776 - DNA, 25 bp, Homo sapien
gggatctgccaggatgctttttatg

SEQ ID NO: 3738777 - DNA, 25 bp, Homo sapien
ccaggatgctttttatgggtggaat

SEQ ID NO: 3738778 - DNA, 25 bp, Homo sapien
catgaatctacatgaggaggcctca

SEQ ID NO: 3738779 - DNA, 25 bp, Homo sapien
aggcctcatgagaaatgctgcagat

SEQ ID NO: 3738780 - DNA, 25 bp, Homo sapien
gggggttcggtgggagcagagagga

SEQ ID NO: 3738781 - DNA, 25 bp, Homo sapien
agaggacctgccctaagcacaccga

SEQ ID NO: 3738782 - DNA, 25 bp, Homo sapien
ctggggaacaagctcagaagctgtg

SEQ ID NO: 3738783 - DNA, 25 bp, Homo sapien
agcttctgggggttcggtgggagca

SEQ ID NO: 3738784 - DNA, 25 bp, Homo sapien
actccctcctggctgaagggtggaa

SEQ ID NO: 3738785 - DNA, 25 bp, Homo sapien
gggtggaaatgaatccttgtacgga

SEQ ID NO: 3738786 - DNA, 25 bp, Homo sapien
tgtacggaataagcctctccggccc

SEQ ID NO: 3738787 - DNA, 25 bp, Homo sapien
ggcctgatcctcatgtccccacctg

SEQ ID NO: 3738788 - DNA, 25 bp, Homo sapien
ccgagggtgaattggccccgtcagt

SEQ ID NO: 3738789 - DNA, 25 bp, Homo sapien
ccccattgagtaacataatggccca

SEQ ID NO: 3738790 - DNA, 25 bp, Homo sapien
aaaatgccaagaaccgagggtgaat

SEQ ID NO: 3738791 - DNA, 25 bp, Homo sapien
ttgagtaacataatggcccacatct

SEQ ID NO: 3738792 - DNA, 25 bp, Homo sapien
acccctgaggtcacccacaaacagt

SEQ ID NO: 3738793 - DNA, 25 bp, Homo sapien
ccagcatacagtgcggctcagagag

SEQ ID NO: 3738794 - DNA, 25 bp, Homo sapien
agcactgagggtgcacctggcaacg

SEQ ID NO: 3738795 - DNA, 25 bp, Homo sapien
tgcagctcggtgctcacaacagcct

SEQ ID NO: 3738796 - DNA, 25 bp, Homo sapien
aagctccgagccacattgtgcacag

SEQ ID NO: 3738797 - DNA, 25 bp, Homo sapien
gtatggccgtgacccagaataacag

SEQ ID NO: 3738798 - DNA, 25 bp, Homo sapien
ttaaatgccgcctcccctggaagtc

SEQ ID NO: 3738799 - DNA, 25 bp, Homo sapien
tctgggacctccaagctccgagcca

SEQ ID NO: 3738800 - DNA, 25 bp, Homo sapien
tccgaggttgcctctgaggtccctt

SEQ ID NO: 3738801 - DNA, 25 bp, Homo sapien
gaggtcccttccagagcaatagcgt

SEQ ID NO: 3738802 - DNA, 25 bp, Homo sapien
gtgcccccctccgaggttgcctctg

SEQ ID NO: 3738803 - DNA, 25 bp, Homo sapien
tggggagccgcctcaccgctgtggg

SEQ ID NO: 3738804 - DNA, 25 bp, Homo sapien
aattggatggcagaaccgggcagct

SEQ ID NO: 3738805 - DNA, 25 bp, Homo sapien
cagaaccgggcagctggtcctttaa

SEQ ID NO: 3738806 - DNA, 25 bp, Homo sapien
gctggtcctttaagaactggcaccc

SEQ ID NO: 3738807 - DNA, 25 bp, Homo sapien
ttgagagaattggatggcagaaccg

SEQ ID NO: 3738808 - DNA, 25 bp, Homo sapien
ctagatgaaaatctccggtagctca

SEQ ID NO: 3738809 - DNA, 25 bp, Homo sapien
tagatgaaaatctccggtagctcat

SEQ ID NO: 3738810 - DNA, 25 bp, Homo sapien
gatgtccattggatgacccactgcg

SEQ ID NO: 3738811 - DNA, 25 bp, Homo sapien
cactgcgtctcattggtgcttgcct

SEQ ID NO: 3738812 - DNA, 25 bp, Homo sapien
gctggctctggttggcttgccactg

SEQ ID NO: 3738813 - DNA, 25 bp, Homo sapien
ggaggttctctcctaggatgtccat

SEQ ID NO: 3738814 - DNA, 25 bp, Homo sapien
ccagacttttccattggctggccct

SEQ ID NO: 3738815 - DNA, 25 bp, Homo sapien
ggccagacttttccattggctggcc

SEQ ID NO: 3738816 - DNA, 25 bp, Homo sapien
gccagacttttccattggctggccc

SEQ ID NO: 3738817 - DNA, 25 bp, Homo sapien
gcctcctggtagctcaaagtgggat

SEQ ID NO: 3738818 - DNA, 25 bp, Homo sapien
tgggatcaaagtgccccagggcggg

SEQ ID NO: 3738819 - DNA, 25 bp, Homo sapien
cctggtagctcaaagtgggatcaaa

SEQ ID NO: 3738820 - DNA, 25 bp, Homo sapien
gcttccgaagagcctcctggtagct

SEQ ID NO: 3738821 - DNA, 25 bp, Homo sapien
tgacatggccctgcaaagagacagc

SEQ ID NO: 3738822 - DNA, 25 bp, Homo sapien
gccaaatgggcactgtgacatggcc

SEQ ID NO: 3738823 - DNA, 25 bp, Homo sapien
cacaaggacctgagacatcctcata

SEQ ID NO: 3738824 - DNA, 25 bp, Homo sapien
tgcctgagacttgggcgtttctggg

SEQ ID NO: 3738825 - DNA, 25 bp, Homo sapien
cgattcctctccgatccaaggctgt

SEQ ID NO: 3738826 - DNA, 25 bp, Homo sapien
ggttatgacggtctcaccctgcaca

SEQ ID NO: 3738827 - DNA, 25 bp, Homo sapien
tcctggtggaactcgtctaccacgg

SEQ ID NO: 3738828 - DNA, 25 bp, Homo sapien
gcacaggcaccgtatcgtgacagct

SEQ ID NO: 3738829 - DNA, 25 bp, Homo sapien
tgtggctccgttaagctctaaaaga

SEQ ID NO: 3738830 - DNA, 25 bp, Homo sapien
ttgtcattgtcaaacctgagagccc

SEQ ID NO: 3738831 - DNA, 25 bp, Homo sapien
tgtaggcagaagctgcttccggtct

SEQ ID NO: 3738832 - DNA, 25 bp, Homo sapien
gctttgtccgtagttgttggttgcc

SEQ ID NO: 3738833 - DNA, 25 bp, Homo sapien
cagaaagaaagcagtgaaagcccct

SEQ ID NO: 3738834 - DNA, 25 bp, Homo sapien
gagcagaaagaaagcagtgaaagcc

SEQ ID NO: 3738835 - DNA, 25 bp, Homo sapien
ctgggagcagaaagaaagcagtgaa

SEQ ID NO: 3738836 - DNA, 25 bp, Homo sapien
aagaaagcagtgaaagcccctggcc

SEQ ID NO: 3738837 - DNA, 25 bp, Homo sapien
aatgaatgaatttcgatgagactgg

SEQ ID NO: 3738838 - DNA, 25 bp, Homo sapien
cactcggggttcgttaggtgaatga

SEQ ID NO: 3738839 - DNA, 25 bp, Homo sapien
tggccccattttgtctgggagagag

SEQ ID NO: 3738840 - DNA, 25 bp, Homo sapien
tgagactggccccattttgtctggg

SEQ ID NO: 3738841 - DNA, 25 bp, Homo sapien
ttccagctgtggttttcatggtcta

SEQ ID NO: 3738842 - DNA, 25 bp, Homo sapien
ctgaatgatgatgatttgcttagag

SEQ ID NO: 3738843 - DNA, 25 bp, Homo sapien
gcagaggttgctaccttccagctgt

SEQ ID NO: 3738844 - DNA, 25 bp, Homo sapien
gttttcatggtctagggagcaacca

SEQ ID NO: 3738845 - DNA, 25 bp, Homo sapien
ttcgggcccacagctctgatgccat

SEQ ID NO: 3738846 - DNA, 25 bp, Homo sapien
ttcctcagcaggactccctgcccct

SEQ ID NO: 3738847 - DNA, 25 bp, Homo sapien
cctcttcgggcccacagctctgatg

SEQ ID NO: 3738848 - DNA, 25 bp, Homo sapien
gcaggactccctgcccctcttcggg

SEQ ID NO: 3738849 - DNA, 25 bp, Homo sapien
ccccccatgttgaagaagtgtcacc

SEQ ID NO: 3738850 - DNA, 25 bp, Homo sapien
ccccatgttgaagaagtgtcacctt

SEQ ID NO: 3738851 - DNA, 25 bp, Homo sapien
cccatgttgaagaagtgtcaccttc

SEQ ID NO: 3738852 - DNA, 25 bp, Homo sapien
catgttgaagaagtgtcaccttcaa

SEQ ID NO: 3738853 - DNA, 25 bp, Homo sapien
tcctggagccaaagagcattcattg

SEQ ID NO: 3738854 - DNA, 25 bp, Homo sapien
tcccctgacgacctgaagatgaatc

SEQ ID NO: 3738855 - DNA, 25 bp, Homo sapien
catctctctgtgtagtaactggacc

SEQ ID NO: 3738856 - DNA, 25 bp, Homo sapien
tcaggatgcctttcatcgtcagggc

SEQ ID NO: 3738857 - DNA, 25 bp, Homo sapien
gctctgctcaggatgtgtctcatca

SEQ ID NO: 3738858 - DNA, 25 bp, Homo sapien
tcaaggggccacgcctagctggctc

SEQ ID NO: 3738859 - DNA, 25 bp, Homo sapien
tcatcctcaaagtggtctttacagg

SEQ ID NO: 3738860 - DNA, 25 bp, Homo sapien
ggggccacgcctagctggctctgct

SEQ ID NO: 3738861 - DNA, 25 bp, Homo sapien
acggaagggacacgccgagcctgcc

SEQ ID NO: 3738862 - DNA, 25 bp, Homo sapien
gccggacggaagggacacgccgagc

SEQ ID NO: 3738863 - DNA, 25 bp, Homo sapien
ggaagggacacgccgagcctgcccg

SEQ ID NO: 3738864 - DNA, 25 bp, Homo sapien
ggacggaagggacacgccgagcctg

SEQ ID NO: 3738865 - DNA, 25 bp, Homo sapien
gcgagcggggcgcccaggggaaagc

SEQ ID NO: 3738866 - DNA, 25 bp, Homo sapien
gcgcggccgcggcggggcgagcggg

SEQ ID NO: 3738867 - DNA, 25 bp, Homo sapien
ggggcgcggccgcggcggggcgagc

SEQ ID NO: 3738868 - DNA, 25 bp, Homo sapien
gcggcggggcgagcggggcgcccag

SEQ ID NO: 3738869 - DNA, 25 bp, Homo sapien
gggcgctcacgtagcgggcgctggg

SEQ ID NO: 3738870 - DNA, 25 bp, Homo sapien
gagctgaagggctgcgggtgcgccg

SEQ ID NO: 3738871 - DNA, 25 bp, Homo sapien
agccccaggtagtcgttccaggagc

SEQ ID NO: 3738872 - DNA, 25 bp, Homo sapien
ggctcgccgtccaccgctttggtga

SEQ ID NO: 3738873 - DNA, 25 bp, Homo sapien
aacgggctcagctcggcgaagcgct

SEQ ID NO: 3738874 - DNA, 25 bp, Homo sapien
ggaccccggctcgtcgctgtcgtcg

SEQ ID NO: 3738875 - DNA, 25 bp, Homo sapien
tcgtcctcgtcgtagtcgggcggcc

SEQ ID NO: 3738876 - DNA, 25 bp, Homo sapien
attccagcgcgctccccaggtagcg

SEQ ID NO: 3738877 - DNA, 25 bp, Homo sapien
agctcgggcttcagcagccgggcgg

SEQ ID NO: 3738878 - DNA, 25 bp, Homo sapien
gcagctcgggcttcagcagccgggc

SEQ ID NO: 3738879 - DNA, 25 bp, Homo sapien
gcctccttgttgttccggcagaaca

SEQ ID NO: 3738880 - DNA, 25 bp, Homo sapien
ctccttgttgttccggcagaacacg

SEQ ID NO: 3738881 - DNA, 25 bp, Homo sapien
gatggtgtgcgcgttgtcgccgctg

SEQ ID NO: 3738882 - DNA, 25 bp, Homo sapien
gtgtagcggcgcagcacgggacaca

SEQ ID NO: 3738883 - DNA, 25 bp, Homo sapien
gggacacgtgtagcggcgcagcacg

SEQ ID NO: 3738884 - DNA, 25 bp, Homo sapien
gaggatatgggtggtgtagagcgcc

SEQ ID NO: 3738885 - DNA, 25 bp, Homo sapien
cgcagcttcttgccaggcgggccgt

SEQ ID NO: 3738886 - DNA, 25 bp, Homo sapien
gcagcttcttgccaggcgggccgtc

SEQ ID NO: 3738887 - DNA, 25 bp, Homo sapien
cagcttcttgccaggcgggccgtcc

SEQ ID NO: 3738888 - DNA, 25 bp, Homo sapien
ctagcggtgcgaggggcggcggcga

SEQ ID NO: 3738889 - DNA, 25 bp, Homo sapien
tgcgaggggcggcggcgaccctggg

SEQ ID NO: 3738890 - DNA, 25 bp, Homo sapien
gcggcgaccctgggcggccgggagc

SEQ ID NO: 3738891 - DNA, 25 bp, Homo sapien
cggtgcgaggggcggcggcgaccct

SEQ ID NO: 3738892 - DNA, 25 bp, Homo sapien
gtcccatgtcgagccgaccgctgag

SEQ ID NO: 3738893 - DNA, 25 bp, Homo sapien
caccaggacgacgtcccatgtcgag

SEQ ID NO: 3738894 - DNA, 25 bp, Homo sapien
ggcgggggcgagatggtgcgcagac

SEQ ID NO: 3738895 - DNA, 25 bp, Homo sapien
atgtcgagccgaccgctgagccgca

SEQ ID NO: 3738896 - DNA, 25 bp, Homo sapien
ctggatgtgcaaactagaaactgaa

SEQ ID NO: 3738897 - DNA, 25 bp, Homo sapien
tagtcccaatcgttcagcacggaag

SEQ ID NO: 3738898 - DNA, 25 bp, Homo sapien
agcacggaagtactccacacggtcg

SEQ ID NO: 3738899 - DNA, 25 bp, Homo sapien
cagccttcgccgttctggatgtgca

SEQ ID NO: 3738900 - DNA, 25 bp, Homo sapien
tgtattaaagtcagacgcagcccac

SEQ ID NO: 3738901 - DNA, 25 bp, Homo sapien
tcataagggtgatgctaccagcggc

SEQ ID NO: 3738902 - DNA, 25 bp, Homo sapien
tactgggagccttatacacgtagac

SEQ ID NO: 3738903 - DNA, 25 bp, Homo sapien
tggaatgggctttcctccactagga

SEQ ID NO: 3738904 - DNA, 25 bp, Homo sapien
gaggattcatgttgaccttagaaac

SEQ ID NO: 3738905 - DNA, 25 bp, Homo sapien
cttagaaacttcacccagaaggtga

SEQ ID NO: 3738906 - DNA, 25 bp, Homo sapien
tgcgctgatctgttcatagtggtcc

SEQ ID NO: 3738907 - DNA, 25 bp, Homo sapien
gcccttttggcctagagaatgcgct

SEQ ID NO: 3738908 - DNA, 25 bp, Homo sapien
gtacctctacagttggagaagccct

SEQ ID NO: 3738909 - DNA, 25 bp, Homo sapien
cacagtgactcccatatattgaggc

SEQ ID NO: 3738910 - DNA, 25 bp, Homo sapien
tactaggcaagtatgcagcatgttc

SEQ ID NO: 3738911 - DNA, 25 bp, Homo sapien
taacattaggcacatctcatcacag

SEQ ID NO: 3738912 - DNA, 25 bp, Homo sapien
gattagaaaatcaggactaacaaac

SEQ ID NO: 3738913 - DNA, 25 bp, Homo sapien
tgttccttgagtggctacgattaga

SEQ ID NO: 3738914 - DNA, 25 bp, Homo sapien
caaagacactgaccatagattgact

SEQ ID NO: 3738915 - DNA, 25 bp, Homo sapien
ggtactatgaaaggactgttccttg

SEQ ID NO: 3738916 - DNA, 25 bp, Homo sapien
tacagatagatccagtagtagagac

SEQ ID NO: 3738917 - DNA, 25 bp, Homo sapien
catcatcggtccaaaagactttgca

SEQ ID NO: 3738918 - DNA, 25 bp, Homo sapien
gagagtaacattgctgttaatacag

SEQ ID NO: 3738919 - DNA, 25 bp, Homo sapien
ccatagtgactaccaggaggtggct

SEQ ID NO: 3738920 - DNA, 25 bp, Homo sapien
ccaacaggtgttaaaggaaagctga

SEQ ID NO: 3738921 - DNA, 25 bp, Homo sapien
tgttactttgcgatcctgctcttgg

SEQ ID NO: 3738922 - DNA, 25 bp, Homo sapien
tccaggccatacaactctgtctact

SEQ ID NO: 3738923 - DNA, 25 bp, Homo sapien
tcttggtttccactgtccaggccat

SEQ ID NO: 3738924 - DNA, 25 bp, Homo sapien
cgagtcagcaaacccatcctttctg

SEQ ID NO: 3738925 - DNA, 25 bp, Homo sapien
tctgctcagtctcccgtactgttct

SEQ ID NO: 3738926 - DNA, 25 bp, Homo sapien
tcaaggcgagtcagcaaacccatcc

SEQ ID NO: 3738927 - DNA, 25 bp, Homo sapien
aggcgagtcagcaaacccatccttt

SEQ ID NO: 3738928 - DNA, 25 bp, Homo sapien
ggagagtagatctgtatgtgtgaca

SEQ ID NO: 3738929 - DNA, 25 bp, Homo sapien
tcagacgagttactgctgcctacgt

SEQ ID NO: 3738930 - DNA, 25 bp, Homo sapien
gtgacatcacaggtaagccccaaga

SEQ ID NO: 3738931 - DNA, 25 bp, Homo sapien
gctaagagtttgcttcctggagagt

SEQ ID NO: 3738932 - DNA, 25 bp, Homo sapien
aagcatatgtggctaggatgtcccc

SEQ ID NO: 3738933 - DNA, 25 bp, Homo sapien
gtttccttgtaacgctgtcctctga

SEQ ID NO: 3738934 - DNA, 25 bp, Homo sapien
tgtgcatgtgcgtgtttgaagtacc

SEQ ID NO: 3738935 - DNA, 25 bp, Homo sapien
cctattggtacagctgtagggccag

SEQ ID NO: 3738936 - DNA, 25 bp, Homo sapien
gacaagattactgcgcaagtgtgaa

SEQ ID NO: 3738937 - DNA, 25 bp, Homo sapien
gcaatttgcagttgttgtaatgaca

SEQ ID NO: 3738938 - DNA, 25 bp, Homo sapien
gaaggtgagtacaaagcaatttgca

SEQ ID NO: 3738939 - DNA, 25 bp, Homo sapien
caagtgtgaatccaaacagtatagc

SEQ ID NO: 3738940 - DNA, 25 bp, Homo sapien
tgtgcttcaaccaatctaaattgga

SEQ ID NO: 3738941 - DNA, 25 bp, Homo sapien
cacaggaggttggaaaaaccatgcc

SEQ ID NO: 3738942 - DNA, 25 bp, Homo sapien
ccatgccattttctggaatttaagg

SEQ ID NO: 3738943 - DNA, 25 bp, Homo sapien
tagattgatcatgcaccatatccac

SEQ ID NO: 3738944 - DNA, 25 bp, Homo sapien
tctcttagaccagacgatgatcggg

SEQ ID NO: 3738945 - DNA, 25 bp, Homo sapien
catagaagagatgaagagcggcccc

SEQ ID NO: 3738946 - DNA, 25 bp, Homo sapien
gcctcccagacgaattgccgatgaa

SEQ ID NO: 3738947 - DNA, 25 bp, Homo sapien
gatgatgacagaccacctagacgag

SEQ ID NO: 3738948 - DNA, 25 bp, Homo sapien
agtttcgccgttgttgcccaagctg

SEQ ID NO: 3738949 - DNA, 25 bp, Homo sapien
actgcagcctccgcctcccagttca

SEQ ID NO: 3738950 - DNA, 25 bp, Homo sapien
agttcaagtgattctcgtgcctcag

SEQ ID NO: 3738951 - DNA, 25 bp, Homo sapien
gagtgcaatggcgcaatctcagccc

SEQ ID NO: 3738952 - DNA, 25 bp, Homo sapien
atagaaatgagccccgaaggcatag

SEQ ID NO: 3738953 - DNA, 25 bp, Homo sapien
aactatagaaatgagccccgaaggc

SEQ ID NO: 3738954 - DNA, 25 bp, Homo sapien
ctatagaaatgagccccgaaggcat

SEQ ID NO: 3738955 - DNA, 25 bp, Homo sapien
actatagaaatgagccccgaaggca

SEQ ID NO: 3738956 - DNA, 25 bp, Homo sapien
agagacttggtttctccattttggt

SEQ ID NO: 3738957 - DNA, 25 bp, Homo sapien
tgcctcagcctccgcaggcatgcac

SEQ ID NO: 3738958 - DNA, 25 bp, Homo sapien
ctgcctcagcctccgcaggcatgca

SEQ ID NO: 3738959 - DNA, 25 bp, Homo sapien
ttagtagagacttggtttctccatt

SEQ ID NO: 3738960 - DNA, 25 bp, Homo sapien
caagatgccggcctattttcagagg

SEQ ID NO: 3738961 - DNA, 25 bp, Homo sapien
tttcagaggccggaaaatgccctca

SEQ ID NO: 3738962 - DNA, 25 bp, Homo sapien
cccgggccactagagagttcgctga

SEQ ID NO: 3738963 - DNA, 25 bp, Homo sapien
tcaaacgcgccaacggtgagtagct

SEQ ID NO: 3738964 - DNA, 25 bp, Homo sapien
caagtctcttgatcctgcccataaa

SEQ ID NO: 3738965 - DNA, 25 bp, Homo sapien
gagtaagctcagacacatagaatgg

SEQ ID NO: 3738966 - DNA, 25 bp, Homo sapien
aatggtctaagcgttctggaggatg

SEQ ID NO: 3738967 - DNA, 25 bp, Homo sapien
aacagttcctatagcttctcagtac

SEQ ID NO: 3738968 - DNA, 25 bp, Homo sapien
gccgcggcgcgcagctctggctgcc

SEQ ID NO: 3738969 - DNA, 25 bp, Homo sapien
gcggcgcgcagctctggctgccgcc

SEQ ID NO: 3738970 - DNA, 25 bp, Homo sapien
cggcgcgcagctctggctgccgcct

SEQ ID NO: 3738971 - DNA, 25 bp, Homo sapien
ccgccgcggcgcgcagctctggctg

SEQ ID NO: 3738972 - DNA, 25 bp, Homo sapien
cgactccaagcatcagctgagtgtc

SEQ ID NO: 3738973 - DNA, 25 bp, Homo sapien
agcccgactccaagcatcagctgag

SEQ ID NO: 3738974 - DNA, 25 bp, Homo sapien
gcccgactccaagcatcagctgagt

SEQ ID NO: 3738975 - DNA, 25 bp, Homo sapien
cgatcagcccgactccaagcatcag

SEQ ID NO: 3738976 - DNA, 25 bp, Homo sapien
tgtccgtgcacaatgacggcctggg

SEQ ID NO: 3738977 - DNA, 25 bp, Homo sapien
gctctgggatacactgcgagggtcc

SEQ ID NO: 3738978 - DNA, 25 bp, Homo sapien
tcgatcacatgatgcaggagctctc

SEQ ID NO: 3738979 - DNA, 25 bp, Homo sapien
tcctccgtgaagtgggcgtcagacg

SEQ ID NO: 3738980 - DNA, 25 bp, Homo sapien
agctaaccgagattccaccacacag

SEQ ID NO: 3738981 - DNA, 25 bp, Homo sapien
attcctcagagctaaccgagattcc

SEQ ID NO: 3738982 - DNA, 25 bp, Homo sapien
taaccgagattccaccacacaggat

SEQ ID NO: 3738983 - DNA, 25 bp, Homo sapien
tcagagctaaccgagattccaccac

SEQ ID NO: 3738984 - DNA, 25 bp, Homo sapien
ggtgtgcaaaaatctcgggaaaata

SEQ ID NO: 3738985 - DNA, 25 bp, Homo sapien
cctaaatactgcacgaggctgccca

SEQ ID NO: 3738986 - DNA, 25 bp, Homo sapien
taaaaacagtaagcgattcccacat

SEQ ID NO: 3738987 - DNA, 25 bp, Homo sapien
taaacgcactgctttgaggcactga

SEQ ID NO: 3738988 - DNA, 25 bp, Homo sapien
gacaacatgtcggtatcccatctcc

SEQ ID NO: 3738989 - DNA, 25 bp, Homo sapien
acaacatgtcggtatcccatctcca

SEQ ID NO: 3738990 - DNA, 25 bp, Homo sapien
tggacaacatgtcggtatcccatct

SEQ ID NO: 3738991 - DNA, 25 bp, Homo sapien
ctgcagagagcgatgattgcgctac

SEQ ID NO: 3738992 - DNA, 25 bp, Homo sapien
attagtagataaagacagtttaact

SEQ ID NO: 3738993 - DNA, 25 bp, Homo sapien
tgctattagtagataaagacagttt

SEQ ID NO: 3738994 - DNA, 25 bp, Homo sapien
tattagtagataaagacagtttaac

SEQ ID NO: 3738995 - DNA, 25 bp, Homo sapien
gctattagtagataaagacagttta

SEQ ID NO: 3738996 - DNA, 25 bp, Homo sapien
gctgggcggaataattctttaaatg

SEQ ID NO: 3738997 - DNA, 25 bp, Homo sapien
tgggcggaataattctttaaatgga

SEQ ID NO: 3738998 - DNA, 25 bp, Homo sapien
agtgctgggcggaataattctttaa

SEQ ID NO: 3738999 - DNA, 25 bp, Homo sapien
aaagtgctgggcggaataattcttt

SEQ ID NO: 3739000 - DNA, 25 bp, Homo sapien
gataacaccacacccacagaacttc

SEQ ID NO: 3739001 - DNA, 25 bp, Homo sapien
tataaaaccatgttcttctgtactg

SEQ ID NO: 3739002 - DNA, 25 bp, Homo sapien
tccttaatgtggctgtcgtggaagg

SEQ ID NO: 3739003 - DNA, 25 bp, Homo sapien
ttaatgtggctgtcgtggaaggata

SEQ ID NO: 3739004 - DNA, 25 bp, Homo sapien
catggtagtgcacacatgtgctccc

SEQ ID NO: 3739005 - DNA, 25 bp, Homo sapien
tttcattacatattgaaacctatct

SEQ ID NO: 3739006 - DNA, 25 bp, Homo sapien
ccagaactttaggagaaaagacagg

SEQ ID NO: 3739007 - DNA, 25 bp, Homo sapien
gagcaataaaccaaagatttcatta

SEQ ID NO: 3739008 - DNA, 25 bp, Homo sapien
aatgaagagtaggtggtggtgcatg

SEQ ID NO: 3739009 - DNA, 25 bp, Homo sapien
aaaatgaagagtaggtggtggtgca

SEQ ID NO: 3739010 - DNA, 25 bp, Homo sapien
atttaaaatgaagagtaggtggtgg

SEQ ID NO: 3739011 - DNA, 25 bp, Homo sapien
ttaaaatgaagagtaggtggtggtg

SEQ ID NO: 3739012 - DNA, 25 bp, Homo sapien
cagggtgccataagctaaaaagtac

SEQ ID NO: 3739013 - DNA, 25 bp, Homo sapien
cagctctgtcgaatagcaattgttc

SEQ ID NO: 3739014 - DNA, 25 bp, Homo sapien
tacagctcctgaactaactctctgc

SEQ ID NO: 3739015 - DNA, 25 bp, Homo sapien
taatcatagtcacactacagctctg

SEQ ID NO: 3739016 - DNA, 25 bp, Homo sapien
tggcggtcaggacaatagaaaaatg

SEQ ID NO: 3739017 - DNA, 25 bp, Homo sapien
gttaaaatctttggcggtcaggaca

SEQ ID NO: 3739018 - DNA, 25 bp, Homo sapien
aaatctttggcggtcaggacaatag

SEQ ID NO: 3739019 - DNA, 25 bp, Homo sapien
tcaggacaatagaaaaatgagtcac

SEQ ID NO: 3739020 - DNA, 25 bp, Homo sapien
tacacaatatcctagtgaaggcagc

SEQ ID NO: 3739021 - DNA, 25 bp, Homo sapien
ctacacaatatcctagtgaaggcag

SEQ ID NO: 3739022 - DNA, 25 bp, Homo sapien
cacaatatcctagtgaaggcagcat

SEQ ID NO: 3739023 - DNA, 25 bp, Homo sapien
caatatcctagtgaaggcagcatac

SEQ ID NO: 3739024 - DNA, 25 bp, Homo sapien
gaagtgattcaaaacacccaggagc

SEQ ID NO: 3739025 - DNA, 25 bp, Homo sapien
ggaaaagcctgacggtaacatgaca

SEQ ID NO: 3739026 - DNA, 25 bp, Homo sapien
gaccttgacacatacgaaccagttt

SEQ ID NO: 3739027 - DNA, 25 bp, Homo sapien
aaatcacgactaaaaccctgcaagg

SEQ ID NO: 3739028 - DNA, 25 bp, Homo sapien
tacatgcaagagtgagcatagtgct

SEQ ID NO: 3739029 - DNA, 25 bp, Homo sapien
agaaatccaggatactacaatgcca

SEQ ID NO: 3739030 - DNA, 25 bp, Homo sapien
caaatacttggatgtgcatacatgc

SEQ ID NO: 3739031 - DNA, 25 bp, Homo sapien
gagggaggcaactccatgttaaact

SEQ ID NO: 3739032 - DNA, 25 bp, Homo sapien
cacatcgaggcctgtacagctgact

SEQ ID NO: 3739033 - DNA, 25 bp, Homo sapien
gatagacatccataggctgccacac

SEQ ID NO: 3739034 - DNA, 25 bp, Homo sapien
tgaacctgcagccacatagggaatg

SEQ ID NO: 3739035 - DNA, 25 bp, Homo sapien
caagtgtgcatgaaaccccggttct

SEQ ID NO: 3739036 - DNA, 25 bp, Homo sapien
gaatgttgtgcacttatcctgtgtc

SEQ ID NO: 3739037 - DNA, 25 bp, Homo sapien
gaagtacgaacttcctgaggtccca

SEQ ID NO: 3739038 - DNA, 25 bp, Homo sapien
cctgtgtcttacattcacaactggg

SEQ ID NO: 3739039 - DNA, 25 bp, Homo sapien
ggagccccttgttgtactaaggcag

SEQ ID NO: 3739040 - DNA, 25 bp, Homo sapien
ggcctttcgggcatcaaaatcctta

SEQ ID NO: 3739041 - DNA, 25 bp, Homo sapien
gaaagagccgttttcttcactctgg

SEQ ID NO: 3739042 - DNA, 25 bp, Homo sapien
taactctccatcattttaactgggc

SEQ ID NO: 3739043 - DNA, 25 bp, Homo sapien
ctctggcatatcccctttgtgagaa

SEQ ID NO: 3739044 - DNA, 25 bp, Homo sapien
caactgatgtgaagggaaccagcat

SEQ ID NO: 3739045 - DNA, 25 bp, Homo sapien
tcagcttcccaggacgtgtgctctg

SEQ ID NO: 3739046 - DNA, 25 bp, Homo sapien
tctgccccgcaagggactctatgat

SEQ ID NO: 3739047 - DNA, 25 bp, Homo sapien
agtggcaagatagttgctcaccgca

SEQ ID NO: 3739048 - DNA, 25 bp, Homo sapien
cttcaaaaaagagaaattgtaatgt

SEQ ID NO: 3739049 - DNA, 25 bp, Homo sapien
tcaaaaaagagaaattgtaatgtta

SEQ ID NO: 3739050 - DNA, 25 bp, Homo sapien
gtgatacaccacaattcttttcttt

SEQ ID NO: 3739051 - DNA, 25 bp, Homo sapien
ggtgatacaccacaattcttttctt

SEQ ID NO: 3739052 - DNA, 25 bp, Homo sapien
tgaaggatggtccagtcctgtcggt

SEQ ID NO: 3739053 - DNA, 25 bp, Homo sapien
tcatcggcgttgaggtgcacgtaag

SEQ ID NO: 3739054 - DNA, 25 bp, Homo sapien
aaggatggtccagtcctgtcggtgc

SEQ ID NO: 3739055 - DNA, 25 bp, Homo sapien
gtgcacgtaagagtgaaggatggtc

SEQ ID NO: 3739056 - DNA, 25 bp, Homo sapien
ctgtgcacatctgcagggcttccag

SEQ ID NO: 3739057 - DNA, 25 bp, Homo sapien
tgtgcacatctgcagggcttccagc

SEQ ID NO: 3739058 - DNA, 25 bp, Homo sapien
ctgcatcacaaacatgagcaacctt

SEQ ID NO: 3739059 - DNA, 25 bp, Homo sapien
tgcatcacaaacatgagcaacctta

SEQ ID NO: 3739060 - DNA, 25 bp, Homo sapien
tgttgctcacctccaagtctacaaa

SEQ ID NO: 3739061 - DNA, 25 bp, Homo sapien
acctccaagtctacaaatccagcga

SEQ ID NO: 3739062 - DNA, 25 bp, Homo sapien
gagcaatggtaatctcactctctgc

SEQ ID NO: 3739063 - DNA, 25 bp, Homo sapien
caagtctacaaatccagcgacgtaa

SEQ ID NO: 3739064 - DNA, 25 bp, Homo sapien
tgcagactgaacaattagctgaccc

SEQ ID NO: 3739065 - DNA, 25 bp, Homo sapien
cttctgcagactgaacaattagctg

SEQ ID NO: 3739066 - DNA, 25 bp, Homo sapien
tgaacaattagctgacccatttctt

SEQ ID NO: 3739067 - DNA, 25 bp, Homo sapien
tctttgtgcagtttgcccattgcca

SEQ ID NO: 3739068 - DNA, 25 bp, Homo sapien
ccagcgacaccgggtcaggactttc

SEQ ID NO: 3739069 - DNA, 25 bp, Homo sapien
cagcgacaccgggtcaggactttca

SEQ ID NO: 3739070 - DNA, 25 bp, Homo sapien
ggtcaggactttcagtaagtcagaa

SEQ ID NO: 3739071 - DNA, 25 bp, Homo sapien
gacaatctagttccccatgctcagc

SEQ ID NO: 3739072 - DNA, 25 bp, Homo sapien
tagttacatttctcattgccagcgg

SEQ ID NO: 3739073 - DNA, 25 bp, Homo sapien
gtaactaactagatcaggccagcct

SEQ ID NO: 3739074 - DNA, 25 bp, Homo sapien
tggccgtctgtaaaccctctctaag

SEQ ID NO: 3739075 - DNA, 25 bp, Homo sapien
aacagtcactaagtgggacaggagt

SEQ ID NO: 3739076 - DNA, 25 bp, Homo sapien
gacgctggtcagcatgccaggtaga

SEQ ID NO: 3739077 - DNA, 25 bp, Homo sapien
ctggctctgcggcatgtggcaacag

SEQ ID NO: 3739078 - DNA, 25 bp, Homo sapien
caggtagacaccagcaaggagctgg

SEQ ID NO: 3739079 - DNA, 25 bp, Homo sapien
ataaaacccatttgccatcccagtt

SEQ ID NO: 3739080 - DNA, 25 bp, Homo sapien
aataaaacccatttgccatcccagt

SEQ ID NO: 3739081 - DNA, 25 bp, Homo sapien
gcatctagataaggcaacgctggaa

SEQ ID NO: 3739082 - DNA, 25 bp, Homo sapien
taaattacagactccatgagggcag

SEQ ID NO: 3739083 - DNA, 25 bp, Homo sapien
tcccatggtaggaaagaagcggccc

SEQ ID NO: 3739084 - DNA, 25 bp, Homo sapien
taaagcctgcatatcagaggtgccc

SEQ ID NO: 3739085 - DNA, 25 bp, Homo sapien
cctcttctgcctgggataagtaacc

SEQ ID NO: 3739086 - DNA, 25 bp, Homo sapien
cattgctaaatcatatggtaacttg

SEQ ID NO: 3739087 - DNA, 25 bp, Homo sapien
cggcacctgccacgcaggctttatt

SEQ ID NO: 3739088 - DNA, 25 bp, Homo sapien
gaggactcactaaagcactcattaa

SEQ ID NO: 3739089 - DNA, 25 bp, Homo sapien
catttgcagcgttgcacaaccatca

SEQ ID NO: 3739090 - DNA, 25 bp, Homo sapien
tatttccatacgagtacagtcatgc

SEQ ID NO: 3739091 - DNA, 25 bp, Homo sapien
gaatttgtctgctctagatagctca

SEQ ID NO: 3739092 - DNA, 25 bp, Homo sapien
gggaacctctattctgccgtctaac

SEQ ID NO: 3739093 - DNA, 25 bp, Homo sapien
tctccatcagccgaaacttctgaaa

SEQ ID NO: 3739094 - DNA, 25 bp, Homo sapien
catttgttcggctgctgctagatga

SEQ ID NO: 3739095 - DNA, 25 bp, Homo sapien
gctttagcgcctccaaattaaggac

SEQ ID NO: 3739096 - DNA, 25 bp, Homo sapien
tgttgctggtggaaatcgtttttgc

SEQ ID NO: 3739097 - DNA, 25 bp, Homo sapien
caggacctctagctgttctgtaatg

SEQ ID NO: 3739098 - DNA, 25 bp, Homo sapien
gagggctttctatcagtcatcagtg

SEQ ID NO: 3739099 - DNA, 25 bp, Homo sapien
gttatagcacttcgtccagcactga

SEQ ID NO: 3739100 - DNA, 25 bp, Homo sapien
gctaatcagcgaggagaaaatcgga

SEQ ID NO: 3739101 - DNA, 25 bp, Homo sapien
agcttatgcctacacagcgagacaa

SEQ ID NO: 3739102 - DNA, 25 bp, Homo sapien
aactggaacgtgtaataatgaaggc

SEQ ID NO: 3739103 - DNA, 25 bp, Homo sapien
tacaaagcaacgtttcaggcagctt

SEQ ID NO: 3739104 - DNA, 25 bp, Homo sapien
tgaaaataaaccattagcttatgcc

SEQ ID NO: 3739105 - DNA, 25 bp, Homo sapien
caaacaattggcttgacatgtggcc

SEQ ID NO: 3739106 - DNA, 25 bp, Homo sapien
taaatgagtgctaatggctgaacgt

SEQ ID NO: 3739107 - DNA, 25 bp, Homo sapien
tccaggtaagatttccaaggacatc

SEQ ID NO: 3739108 - DNA, 25 bp, Homo sapien
caactgcagggtctcttgaatgatc

SEQ ID NO: 3739109 - DNA, 25 bp, Homo sapien
taacaactttgatcattagctaata

SEQ ID NO: 3739110 - DNA, 25 bp, Homo sapien
attttaacaactttgatcattagct

SEQ ID NO: 3739111 - DNA, 25 bp, Homo sapien
ttaacaactttgatcattagctaat

SEQ ID NO: 3739112 - DNA, 25 bp, Homo sapien
ttttaacaactttgatcattagcta

SEQ ID NO: 3739113 - DNA, 25 bp, Homo sapien
gcatggaggtgcttagatgagataa

SEQ ID NO: 3739114 - DNA, 25 bp, Homo sapien
tggaggtgcttagatgagataagga

SEQ ID NO: 3739115 - DNA, 25 bp, Homo sapien
gggcatggaggtgcttagatgagat

SEQ ID NO: 3739116 - DNA, 25 bp, Homo sapien
catggaggtgcttagatgagataag

SEQ ID NO: 3739117 - DNA, 25 bp, Homo sapien
cccagaggaccagctttgcaaaact

SEQ ID NO: 3739118 - DNA, 25 bp, Homo sapien
cattgttatatactgcccagaggac

SEQ ID NO: 3739119 - DNA, 25 bp, Homo sapien
gccgataggctcaaacggactgttc

SEQ ID NO: 3739120 - DNA, 25 bp, Homo sapien
tcaagacagcctatggagagctcac

SEQ ID NO: 3739121 - DNA, 25 bp, Homo sapien
tactgagaggttaagggcacagact

SEQ ID NO: 3739122 - DNA, 25 bp, Homo sapien
gagtgaagccttatagcaagcagag

SEQ ID NO: 3739123 - DNA, 25 bp, Homo sapien
tatgaacgtaagaccatttgaaccc

SEQ ID NO: 3739124 - DNA, 25 bp, Homo sapien
gatattctaggccattgcttcgagg

SEQ ID NO: 3739125 - DNA, 25 bp, Homo sapien
ggctggctagctagtttctacagaa

SEQ ID NO: 3739126 - DNA, 25 bp, Homo sapien
gaaagcttctgatcaacggtcctga

SEQ ID NO: 3739127 - DNA, 25 bp, Homo sapien
gagtgacttaactgatcatgcatga

SEQ ID NO: 3739128 - DNA, 25 bp, Homo sapien
aatgattagccgtgtaactcctgca

SEQ ID NO: 3739129 - DNA, 25 bp, Homo sapien
gggagaagcatcttttatcctgagt

SEQ ID NO: 3739130 - DNA, 25 bp, Homo sapien
tcaatggccagagaaagggtactgg

SEQ ID NO: 3739131 - DNA, 25 bp, Homo sapien
acttttgggagtctatgggccctgc

SEQ ID NO: 3739132 - DNA, 25 bp, Homo sapien
ccttttccatgagtgattgatacct

SEQ ID NO: 3739133 - DNA, 25 bp, Homo sapien
acgaatttcacgacgtgaactgtga

SEQ ID NO: 3739134 - DNA, 25 bp, Homo sapien
aacgaatttcacgacgtgaactgtg

SEQ ID NO: 3739135 - DNA, 25 bp, Homo sapien
taacgaatttcacgacgtgaactgt

SEQ ID NO: 3739136 - DNA, 25 bp, Homo sapien
ctaacgaatttcacgacgtgaactg

SEQ ID NO: 3739137 - DNA, 25 bp, Homo sapien
tcaaagacctaagccttgatgactt

SEQ ID NO: 3739138 - DNA, 25 bp, Homo sapien
gagttcaaagacctaagccttgatg

SEQ ID NO: 3739139 - DNA, 25 bp, Homo sapien
tggagagttcaaagacctaagcctt

SEQ ID NO: 3739140 - DNA, 25 bp, Homo sapien
caatggagagttcaaagacctaagc

SEQ ID NO: 3739141 - DNA, 25 bp, Homo sapien
ctgcatgtggaagaacgagcttgac

SEQ ID NO: 3739142 - DNA, 25 bp, Homo sapien
tggaagaacgagcttgacaaattta

SEQ ID NO: 3739143 - DNA, 25 bp, Homo sapien
aacgagcttgacaaatttattgtgt

SEQ ID NO: 3739144 - DNA, 25 bp, Homo sapien
caaatttattgtgttctggttccag

SEQ ID NO: 3739145 - DNA, 25 bp, Homo sapien
tcgcggtctcttccccgagtccctc

SEQ ID NO: 3739146 - DNA, 25 bp, Homo sapien
ctcgcggtctcttccccgagtccct

SEQ ID NO: 3739147 - DNA, 25 bp, Homo sapien
cgggaaggttccatgcgcctgcgca

SEQ ID NO: 3739148 - DNA, 25 bp, Homo sapien
tcagacaggaccccgcgcttctggg

SEQ ID NO: 3739149 - DNA, 25 bp, Homo sapien
cctccgggaaggttccatgcgcctg

SEQ ID NO: 3739150 - DNA, 25 bp, Homo sapien
atgagggccattcgcccttcttgga

SEQ ID NO: 3739151 - DNA, 25 bp, Homo sapien
tccgagcgtcggtgagtggctgtcg

SEQ ID NO: 3739152 - DNA, 25 bp, Homo sapien
acaggcgtggagacactggtggctc

SEQ ID NO: 3739153 - DNA, 25 bp, Homo sapien
ctgtaggacggttgctccgagcgtc

SEQ ID NO: 3739154 - DNA, 25 bp, Homo sapien
cccgagtgcactgaagatggcggct

SEQ ID NO: 3739155 - DNA, 25 bp, Homo sapien
cggggtatttagttaattcataatg

SEQ ID NO: 3739156 - DNA, 25 bp, Homo sapien
tggctttccaaagcgctgcaattac

SEQ ID NO: 3739157 - DNA, 25 bp, Homo sapien
taatgttatacccacctctatctag

SEQ ID NO: 3739158 - DNA, 25 bp, Homo sapien
taattcataatgttatacccacctc

SEQ ID NO: 3739159 - DNA, 25 bp, Homo sapien
gagagaggatgccacctagcatgaa

SEQ ID NO: 3739160 - DNA, 25 bp, Homo sapien
caaccttcgtatgctccaggatacc

SEQ ID NO: 3739161 - DNA, 25 bp, Homo sapien
aggataccaatcagacccctccagt

SEQ ID NO: 3739162 - DNA, 25 bp, Homo sapien
tggcgaaagcaagctgcaagctccg

SEQ ID NO: 3739163 - DNA, 25 bp, Homo sapien
gatgcaaacaacctccatacaatgg

SEQ ID NO: 3739164 - DNA, 25 bp, Homo sapien
tgcaaacaacctccatacaatggaa

SEQ ID NO: 3739165 - DNA, 25 bp, Homo sapien
gcaaacaacctccatacaatggaat

SEQ ID NO: 3739166 - DNA, 25 bp, Homo sapien
cggatgcaaacaacctccatacaat

SEQ ID NO: 3739167 - DNA, 25 bp, Homo sapien
gcccaagagtttccccctctgcaaa

SEQ ID NO: 3739168 - DNA, 25 bp, Homo sapien
ttcctgctctcagcccaagagtttc

SEQ ID NO: 3739169 - DNA, 25 bp, Homo sapien
ttattcctgctctcagcccaagagt

SEQ ID NO: 3739170 - DNA, 25 bp, Homo sapien
ccaagagtttccccctctgcaaaga

SEQ ID NO: 3739171 - DNA, 25 bp, Homo sapien
agccgggggagccagcagcccgcct

SEQ ID NO: 3739172 - DNA, 25 bp, Homo sapien
gggagccagcagcccgccttgccta

SEQ ID NO: 3739173 - DNA, 25 bp, Homo sapien
cgggggagccagcagcccgccttgc

SEQ ID NO: 3739174 - DNA, 25 bp, Homo sapien
ccagcagcccgccttgcctaccgca

SEQ ID NO: 3739175 - DNA, 25 bp, Homo sapien
gtcggcggtcagcaacggagccggc

SEQ ID NO: 3739176 - DNA, 25 bp, Homo sapien
acagtcggcggtcagcaacggagcc

SEQ ID NO: 3739177 - DNA, 25 bp, Homo sapien
ggcggtcagcaacggagccggccgg

SEQ ID NO: 3739178 - DNA, 25 bp, Homo sapien
tgacagtcggcggtcagcaacggag

SEQ ID NO: 3739179 - DNA, 25 bp, Homo sapien
cctggctttcagcaagaccgtgttg

SEQ ID NO: 3739180 - DNA, 25 bp, Homo sapien
gctttcagcaagaccgtgttggcca

SEQ ID NO: 3739181 - DNA, 25 bp, Homo sapien
ctttcagcaagaccgtgttggccac

SEQ ID NO: 3739182 - DNA, 25 bp, Homo sapien
tggctttcagcaagaccgtgttggc

SEQ ID NO: 3739183 - DNA, 25 bp, Homo sapien
gctctccgaagtgtcctgctcgcga

SEQ ID NO: 3739184 - DNA, 25 bp, Homo sapien
ctgctcgcgacccactcgccggcag

SEQ ID NO: 3739185 - DNA, 25 bp, Homo sapien
gcagcgggcatcctgcacgggcgca

SEQ ID NO: 3739186 - DNA, 25 bp, Homo sapien
cactcgccggcagcgggcatcctgc

SEQ ID NO: 3739187 - DNA, 25 bp, Homo sapien
atttcagttatcacactcccagaaa

SEQ ID NO: 3739188 - DNA, 25 bp, Homo sapien
ctgagccaaaatctaacaatttcag

SEQ ID NO: 3739189 - DNA, 25 bp, Homo sapien
actgagccaaaatctaacaatttca

SEQ ID NO: 3739190 - DNA, 25 bp, Homo sapien
aaaatctaacaatttcagttatcac

SEQ ID NO: 3739191 - DNA, 25 bp, Homo sapien
tgttcacgtgtcagtctctccctgc

SEQ ID NO: 3739192 - DNA, 25 bp, Homo sapien
agatgacgaccaaactctcacagca

SEQ ID NO: 3739193 - DNA, 25 bp, Homo sapien
ggcatcatcaagagctattttctca

SEQ ID NO: 3739194 - DNA, 25 bp, Homo sapien
ttttctcaccatgagatgacgacca

SEQ ID NO: 3739195 - DNA, 25 bp, Homo sapien
tatggttatttggagaactactaag

SEQ ID NO: 3739196 - DNA, 25 bp, Homo sapien
attgcttacggtgtattttgttaag

SEQ ID NO: 3739197 - DNA, 25 bp, Homo sapien
ctattgtttgggacaaatgtgactt

SEQ ID NO: 3739198 - DNA, 25 bp, Homo sapien
cagtgttacccaccaacatggacaa

SEQ ID NO: 3739199 - DNA, 25 bp, Homo sapien
ttctcaccactgttcactcagaaga

SEQ ID NO: 3739200 - DNA, 25 bp, Homo sapien
tggcaattgtgacaaatgacaaagt

SEQ ID NO: 3739201 - DNA, 25 bp, Homo sapien
ttgatcagatatggctactgctggc

SEQ ID NO: 3739202 - DNA, 25 bp, Homo sapien
tgacaaagttgttccagtcctaact

SEQ ID NO: 3739203 - DNA, 25 bp, Homo sapien
ctaatgtttggcaattgtgacaaat

SEQ ID NO: 3739204 - DNA, 25 bp, Homo sapien
gaatctgacaagcagcagctaagct

SEQ ID NO: 3739205 - DNA, 25 bp, Homo sapien
tgagcccgctcctgaaattcacttg

SEQ ID NO: 3739206 - DNA, 25 bp, Homo sapien
gatccaaagggtatcatttagcaag

SEQ ID NO: 3739207 - DNA, 25 bp, Homo sapien
gaatttggttaaacattgagcccgc

SEQ ID NO: 3739208 - DNA, 25 bp, Homo sapien
tagttcgctccagaccagtactcct

SEQ ID NO: 3739209 - DNA, 25 bp, Homo sapien
cgagcttactgcagatacccaatag

SEQ ID NO: 3739210 - DNA, 25 bp, Homo sapien
tattgatgccgagcttactgcagat

SEQ ID NO: 3739211 - DNA, 25 bp, Homo sapien
tacccaataggcatagttcgctcca

SEQ ID NO: 3739212 - DNA, 25 bp, Homo sapien
agtttcagatattgggccgggcatg

SEQ ID NO: 3739213 - DNA, 25 bp, Homo sapien
gctattcaagtcgatggtccaatcc

SEQ ID NO: 3739214 - DNA, 25 bp, Homo sapien
gcagtgctaagacccatgccaggat

SEQ ID NO: 3739215 - DNA, 25 bp, Homo sapien
cattaagaccaagcaggacccattt

SEQ ID NO: 3739216 - DNA, 25 bp, Homo sapien
ctaggtctggaaggatcaagctgct

SEQ ID NO: 3739217 - DNA, 25 bp, Homo sapien
caacctcattctagcagttatgtga

SEQ ID NO: 3739218 - DNA, 25 bp, Homo sapien
ggtcatcagccatccctaggtctgg

SEQ ID NO: 3739219 - DNA, 25 bp, Homo sapien
cttcgatttggccaaaaaagggatg

SEQ ID NO: 3739220 - DNA, 25 bp, Homo sapien
tatctaggcctggtgcattccatcc

SEQ ID NO: 3739221 - DNA, 25 bp, Homo sapien
tactgctgaagggaagacatctggg

SEQ ID NO: 3739222 - DNA, 25 bp, Homo sapien
taagaggtgcacctgaagactagcc

SEQ ID NO: 3739223 - DNA, 25 bp, Homo sapien
taccaaggaccatgatatagaacag

SEQ ID NO: 3739224 - DNA, 25 bp, Homo sapien
gggcgctgaggcaagagaaccgctt

SEQ ID NO: 3739225 - DNA, 25 bp, Homo sapien
ggggcgctgaggcaagagaaccgct

SEQ ID NO: 3739226 - DNA, 25 bp, Homo sapien
actcggggcgctgaggcaagagaac

SEQ ID NO: 3739227 - DNA, 25 bp, Homo sapien
tcggggcgctgaggcaagagaaccg

SEQ ID NO: 3739228 - DNA, 25 bp, Homo sapien
ggtctcgaactagatctccataacg

SEQ ID NO: 3739229 - DNA, 25 bp, Homo sapien
gaacaacttcctgcacgtcattggt

SEQ ID NO: 3739230 - DNA, 25 bp, Homo sapien
tcttagacgtggaacttcaaggtca

SEQ ID NO: 3739231 - DNA, 25 bp, Homo sapien
cagatggtcattggaactgtttcca

SEQ ID NO: 3739232 - DNA, 25 bp, Homo sapien
cacaactactccaggctccagaaaa

SEQ ID NO: 3739233 - DNA, 25 bp, Homo sapien
gctgccatcctaaggcgtgactttg

SEQ ID NO: 3739234 - DNA, 25 bp, Homo sapien
tgacactcagagacctccccatatg

SEQ ID NO: 3739235 - DNA, 25 bp, Homo sapien
gagctaccgtacctggccggctatt

SEQ ID NO: 3739236 - DNA, 25 bp, Homo sapien
gatttgcaggccattccctcaagca

SEQ ID NO: 3739237 - DNA, 25 bp, Homo sapien
gacccgcatcaggaaaagctagttg

SEQ ID NO: 3739238 - DNA, 25 bp, Homo sapien
tatgaactccagtgcctaagaatcc

SEQ ID NO: 3739239 - DNA, 25 bp, Homo sapien
ttagcctaagatggtatataagccc

SEQ ID NO: 3739240 - DNA, 25 bp, Homo sapien
gaatccttggatccagaaatccagg

SEQ ID NO: 3739241 - DNA, 25 bp, Homo sapien
gaaatccaggaatactcccagacat

SEQ ID NO: 3739242 - DNA, 25 bp, Homo sapien
gctgtcaaagggtttctaagcacta

SEQ ID NO: 3739243 - DNA, 25 bp, Homo sapien
gacaagcaagctgagagatagggac

SEQ ID NO: 3739244 - DNA, 25 bp, Homo sapien
gagtgcctgcaacagaagccatatg

SEQ ID NO: 3739245 - DNA, 25 bp, Homo sapien
gaagagcatgtctactttgtcccca

SEQ ID NO: 3739246 - DNA, 25 bp, Homo sapien
taggctcctaccactcaggcagaga

SEQ ID NO: 3739247 - DNA, 25 bp, Homo sapien
cataacgtgacagaaaggacacctc

SEQ ID NO: 3739248 - DNA, 25 bp, Homo sapien
ataatatctgtcctaacaggtatga

SEQ ID NO: 3739249 - DNA, 25 bp, Homo sapien
cttacgataatgtcctacaagttca

SEQ ID NO: 3739250 - DNA, 25 bp, Homo sapien
cattcatttacctatagactttgag

SEQ ID NO: 3739251 - DNA, 25 bp, Homo sapien
agaaactttatacccactgagcaac

SEQ ID NO: 3739252 - DNA, 25 bp, Homo sapien
catacatgttgtggctatggcagga

SEQ ID NO: 3739253 - DNA, 25 bp, Homo sapien
ttttaagtgcacagtatgattaact

SEQ ID NO: 3739254 - DNA, 25 bp, Homo sapien
atgattaactataagcacaatgtta

SEQ ID NO: 3739255 - DNA, 25 bp, Homo sapien
agctgaaatgacatcctccgtgccc

SEQ ID NO: 3739256 - DNA, 25 bp, Homo sapien
gagctgaaatgacatcctccgtgcc

SEQ ID NO: 3739257 - DNA, 25 bp, Homo sapien
agagctgaaatgacatcctccgtgc

SEQ ID NO: 3739258 - DNA, 25 bp, Homo sapien
acagagctgaaatgacatcctccgt

SEQ ID NO: 3739259 - DNA, 25 bp, Homo sapien
ggctctggagtctggtgaggctgaa

SEQ ID NO: 3739260 - DNA, 25 bp, Homo sapien
ggcatggcgggaacggccagaggct

SEQ ID NO: 3739261 - DNA, 25 bp, Homo sapien
ccacctttaccctgaccttgcgcag

SEQ ID NO: 3739262 - DNA, 25 bp, Homo sapien
tttaccctgaccttgcgcagccaca

SEQ ID NO: 3739263 - DNA, 25 bp, Homo sapien
gtgccgggattgcagacagagtctg

SEQ ID NO: 3739264 - DNA, 25 bp, Homo sapien
ccgggattgcagacagagtctggtt

SEQ ID NO: 3739265 - DNA, 25 bp, Homo sapien
tcccgaggtgccgggattgcagaca

SEQ ID NO: 3739266 - DNA, 25 bp, Homo sapien
aggtgccgggattgcagacagagtc

SEQ ID NO: 3739267 - DNA, 25 bp, Homo sapien
gggtcatctaaagcagcgccagaca

SEQ ID NO: 3739268 - DNA, 25 bp, Homo sapien
caacaaaacacagctaggcacggtg

SEQ ID NO: 3739269 - DNA, 25 bp, Homo sapien
tgttatgaccccacaagtatgaccc

SEQ ID NO: 3739270 - DNA, 25 bp, Homo sapien
tcattgtttgtgtggctgagccagc

SEQ ID NO: 3739271 - DNA, 25 bp, Homo sapien
tgtaccatgagggaaaccacagtct

SEQ ID NO: 3739272 - DNA, 25 bp, Homo sapien
tgggaccagtctccaatcagatgct

SEQ ID NO: 3739273 - DNA, 25 bp, Homo sapien
agtgttctaatctcggtgctggcca

SEQ ID NO: 3739274 - DNA, 25 bp, Homo sapien
tcagatgctgatggctaaccaagct

SEQ ID NO: 3739275 - DNA, 25 bp, Homo sapien
aacccctgggtgctgacttcccgat

SEQ ID NO: 3739276 - DNA, 25 bp, Homo sapien
tgagaggtggaaccaaggctggaac

SEQ ID NO: 3739277 - DNA, 25 bp, Homo sapien
agagggcgccagctctcttaaagga

SEQ ID NO: 3739278 - DNA, 25 bp, Homo sapien
cagtgttccacccagagggcgccag

SEQ ID NO: 3739279 - DNA, 25 bp, Homo sapien
tagcagtcagctcagaaatgatccc

SEQ ID NO: 3739280 - DNA, 25 bp, Homo sapien
gacattggataagggactcgccaca

SEQ ID NO: 3739281 - DNA, 25 bp, Homo sapien
gagagtcaacgcatctgccatggct

SEQ ID NO: 3739282 - DNA, 25 bp, Homo sapien
tgaggcatcgaagctttcacaagga

SEQ ID NO: 3739283 - DNA, 25 bp, Homo sapien
gaaccacggcacgttttgaaggaca

SEQ ID NO: 3739284 - DNA, 25 bp, Homo sapien
tcggccacaaagtgccagagggctg

SEQ ID NO: 3739285 - DNA, 25 bp, Homo sapien
ccatcaacaggaatgaggagccctt

SEQ ID NO: 3739286 - DNA, 25 bp, Homo sapien
caggcagttactggcacgcacatca

SEQ ID NO: 3739287 - DNA, 25 bp, Homo sapien
agggggccttgatccatctgctcga

SEQ ID NO: 3739288 - DNA, 25 bp, Homo sapien
gggccttgatccatctgctcgatag

SEQ ID NO: 3739289 - DNA, 25 bp, Homo sapien
ttgatccatctgctcgatagtccat

SEQ ID NO: 3739290 - DNA, 25 bp, Homo sapien
ccacagggggccttgatccatctgc

SEQ ID NO: 3739291 - DNA, 25 bp, Homo sapien
tccactccaggtagttctgtgccca

SEQ ID NO: 3739292 - DNA, 25 bp, Homo sapien
ctccactccaggtagttctgtgccc

SEQ ID NO: 3739293 - DNA, 25 bp, Homo sapien
tccatttccacgagaggccccagtg

SEQ ID NO: 3739294 - DNA, 25 bp, Homo sapien
agctcggatgcctgtgctctgcaga

SEQ ID NO: 3739295 - DNA, 25 bp, Homo sapien
ggagtgttgcaacagcccttggcca

SEQ ID NO: 3739296 - DNA, 25 bp, Homo sapien
agatccccacgcagactggcaagtc

SEQ ID NO: 3739297 - DNA, 25 bp, Homo sapien
tgcctccaggcaagggaatgggtga

SEQ ID NO: 3739298 - DNA, 25 bp, Homo sapien
ctccaggcaagggaatgggtgacca

SEQ ID NO: 3739299 - DNA, 25 bp, Homo sapien
gtgaccgcttccaaggggtgcctgc

SEQ ID NO: 3739300 - DNA, 25 bp, Homo sapien
cagccccaaagtgaccgcttccaag

SEQ ID NO: 3739301 - DNA, 25 bp, Homo sapien
gatttgtgatgaattattaataatg

SEQ ID NO: 3739302 - DNA, 25 bp, Homo sapien
tccttgagggcctaatgacatttcc

SEQ ID NO: 3739303 - DNA, 25 bp, Homo sapien
atttgtgatgaattattaataatgg

SEQ ID NO: 3739304 - DNA, 25 bp, Homo sapien
tttccttgagggcctaatgacattt

SEQ ID NO: 3739305 - DNA, 25 bp, Homo sapien
tcctgccgggtactgatgtgtgtcg

SEQ ID NO: 3739306 - DNA, 25 bp, Homo sapien
tactgatgtgtgtcgacggtaagcc

SEQ ID NO: 3739307 - DNA, 25 bp, Homo sapien
gtgtcgacggtaagccacggccttc

SEQ ID NO: 3739308 - DNA, 25 bp, Homo sapien
ctgccgggtactgatgtgtgtcgac

SEQ ID NO: 3739309 - DNA, 25 bp, Homo sapien
ctgaggccgggtgggtgaggaacag

SEQ ID NO: 3739310 - DNA, 25 bp, Homo sapien
tgaggccgggtgggtgaggaacagc

SEQ ID NO: 3739311 - DNA, 25 bp, Homo sapien
gacatgggcatccaggaatggagtg

SEQ ID NO: 3739312 - DNA, 25 bp, Homo sapien
gggacatgggcatccaggaatggag

SEQ ID NO: 3739313 - DNA, 25 bp, Homo sapien
ctgggacatgggcatccaggaatgg

SEQ ID NO: 3739314 - DNA, 25 bp, Homo sapien
acatgggcatccaggaatggagtgg

SEQ ID NO: 3739315 - DNA, 25 bp, Homo sapien
gcattcgcctctggatgaccagcca

SEQ ID NO: 3739316 - DNA, 25 bp, Homo sapien
tccgcattcgcctctggatgaccag

SEQ ID NO: 3739317 - DNA, 25 bp, Homo sapien
cattcgcctctggatgaccagccag

SEQ ID NO: 3739318 - DNA, 25 bp, Homo sapien
tgttccgcattcgcctctggatgac

SEQ ID NO: 3739319 - DNA, 25 bp, Homo sapien
tctctgggaatgtgacctgagtgct

SEQ ID NO: 3739320 - DNA, 25 bp, Homo sapien
ttcaagggcatacccaaggtgggag

SEQ ID NO: 3739321 - DNA, 25 bp, Homo sapien
ctgggaatgtgacctgagtgctgtt

SEQ ID NO: 3739322 - DNA, 25 bp, Homo sapien
agttcaagggcatacccaaggtggg

SEQ ID NO: 3739323 - DNA, 25 bp, Homo sapien
tgtttgacctccctaaccctgatag

SEQ ID NO: 3739324 - DNA, 25 bp, Homo sapien
ccagccgggaacagatagtcttcca

SEQ ID NO: 3739325 - DNA, 25 bp, Homo sapien
taaatagtgtgtgtcaggcgtatcc

SEQ ID NO: 3739326 - DNA, 25 bp, Homo sapien
caagatcagaggtagctcagccggt

SEQ ID NO: 3739327 - DNA, 25 bp, Homo sapien
taccgcaaatccaaaggagccctgc

SEQ ID NO: 3739328 - DNA, 25 bp, Homo sapien
ccgaattggtgataccgcaaatcca

SEQ ID NO: 3739329 - DNA, 25 bp, Homo sapien
tctcctgccgaattggtgataccgc

SEQ ID NO: 3739330 - DNA, 25 bp, Homo sapien
actgcatctcctgccgaattggtga

SEQ ID NO: 3739331 - DNA, 25 bp, Homo sapien
tgtcataacaaacccgctcctgagt

SEQ ID NO: 3739332 - DNA, 25 bp, Homo sapien
gagcatgacttcagcatctggcaag

SEQ ID NO: 3739333 - DNA, 25 bp, Homo sapien
gagagacatctgacctctgtacagt

SEQ ID NO: 3739334 - DNA, 25 bp, Homo sapien
tacttcatagtatcatcgcaatggc

SEQ ID NO: 3739335 - DNA, 25 bp, Homo sapien
aaacctcaaggtcaagatattcata

SEQ ID NO: 3739336 - DNA, 25 bp, Homo sapien
cttctttatgtaaacagtacgactt

SEQ ID NO: 3739337 - DNA, 25 bp, Homo sapien
tatgtaaacagtacgacttgataaa

SEQ ID NO: 3739338 - DNA, 25 bp, Homo sapien
acctcaaggtcaagatattcataga

SEQ ID NO: 3739339 - DNA, 25 bp, Homo sapien
tgactcggtgcaccttctctacaca

SEQ ID NO: 3739340 - DNA, 25 bp, Homo sapien
ggtgcaccttctctacacagccttt

SEQ ID NO: 3739341 - DNA, 25 bp, Homo sapien
gactcggtgcaccttctctacacag

SEQ ID NO: 3739342 - DNA, 25 bp, Homo sapien
tcggtgcaccttctctacacagcct

SEQ ID NO: 3739343 - DNA, 25 bp, Homo sapien
ttccaggtacccgtaatgagtcagg

SEQ ID NO: 3739344 - DNA, 25 bp, Homo sapien
ggagggcattgcttgtccaatccca

SEQ ID NO: 3739345 - DNA, 25 bp, Homo sapien
cagcaagatggcgtgtcccctgatt

SEQ ID NO: 3739346 - DNA, 25 bp, Homo sapien
aacctggagaaaggcggacaacagc

SEQ ID NO: 3739347 - DNA, 25 bp, Homo sapien
tgtcagacttcaggagtgacgcggc

SEQ ID NO: 3739348 - DNA, 25 bp, Homo sapien
tcgttagaactcgacgggtccatcc

SEQ ID NO: 3739349 - DNA, 25 bp, Homo sapien
tacagtgtacctcgctcagatgacg

SEQ ID NO: 3739350 - DNA, 25 bp, Homo sapien
tagggccaccctctcaagaaatcag

SEQ ID NO: 3739351 - DNA, 25 bp, Homo sapien
tcttgctcctcacaaaccccagagt

SEQ ID NO: 3739352 - DNA, 25 bp, Homo sapien
ttcttgctcctcacaaaccccagag

SEQ ID NO: 3739353 - DNA, 25 bp, Homo sapien
ttcttcttgctcctcacaaacccca

SEQ ID NO: 3739354 - DNA, 25 bp, Homo sapien
tcctcacaaaccccagagtctccga

SEQ ID NO: 3739355 - DNA, 25 bp, Homo sapien
taatgtgagggaacttcaggatttc

SEQ ID NO: 3739356 - DNA, 25 bp, Homo sapien
tcggaggtcttcacactggctaatg

SEQ ID NO: 3739357 - DNA, 25 bp, Homo sapien
actggctaatgtgagggaacttcag

SEQ ID NO: 3739358 - DNA, 25 bp, Homo sapien
tatggtccttcggaggtcttcacac

SEQ ID NO: 3739359 - DNA, 25 bp, Homo sapien
gcatccacggcaccgtggtgtctgt

SEQ ID NO: 3739360 - DNA, 25 bp, Homo sapien
ccccagtaagctacagccccaggaa

SEQ ID NO: 3739361 - DNA, 25 bp, Homo sapien
ccgacctcgactgcctccagcagaa

SEQ ID NO: 3739362 - DNA, 25 bp, Homo sapien
agtggtcaaatcctccccagtaagc

SEQ ID NO: 3739363 - DNA, 25 bp, Homo sapien
tccctggggccacagtgaatgggtt

SEQ ID NO: 3739364 - DNA, 25 bp, Homo sapien
tgtgaggtaacatccctcttttggg

SEQ ID NO: 3739365 - DNA, 25 bp, Homo sapien
tggatgagtgcaagacgttccctgg

SEQ ID NO: 3739366 - DNA, 25 bp, Homo sapien
gccctgtggatgagtgcaagacgtt

SEQ ID NO: 3739367 - DNA, 25 bp, Homo sapien
aagaatccatttccacacgccagca

SEQ ID NO: 3739368 - DNA, 25 bp, Homo sapien
agagccttttcaataccctccggca

SEQ ID NO: 3739369 - DNA, 25 bp, Homo sapien
ccagcacgcacgttcctcacaccat

SEQ ID NO: 3739370 - DNA, 25 bp, Homo sapien
aataccctccggcagaacagaagaa

SEQ ID NO: 3739371 - DNA, 25 bp, Homo sapien
tgactccgactacagcttcagagga

SEQ ID NO: 3739372 - DNA, 25 bp, Homo sapien
tcagggagctcgcagagagatcctt

SEQ ID NO: 3739373 - DNA, 25 bp, Homo sapien
caatgggtggtggacaagatgctct

SEQ ID NO: 3739374 - DNA, 25 bp, Homo sapien
cattgaataagcagaggaactcgct

SEQ ID NO: 3739375 - DNA, 25 bp, Homo sapien
tcatggtctgtctgccctgtgccag

SEQ ID NO: 3739376 - DNA, 25 bp, Homo sapien
tcactgagcagacgttagagaaccc

SEQ ID NO: 3739377 - DNA, 25 bp, Homo sapien
tcgtgatgacattccagccttccaa

SEQ ID NO: 3739378 - DNA, 25 bp, Homo sapien
gcctaggaatctgtctcagtgctca

SEQ ID NO: 3739379 - DNA, 25 bp, Homo sapien
tgagattctgatcatcctctcaggg

SEQ ID NO: 3739380 - DNA, 25 bp, Homo sapien
ggcaggcctgaaggggactgggtca

SEQ ID NO: 3739381 - DNA, 25 bp, Homo sapien
gacgtgtgagattctgatcatcctc

SEQ ID NO: 3739382 - DNA, 25 bp, Homo sapien
caagacgtgtgagattctgatcatc

SEQ ID NO: 3739383 - DNA, 25 bp, Homo sapien
tcacagcacggctaggtggcagaac

SEQ ID NO: 3739384 - DNA, 25 bp, Homo sapien
tgttccaaacccgacacatctaaat

SEQ ID NO: 3739385 - DNA, 25 bp, Homo sapien
tgccttatcacagcacggctaggtg

SEQ ID NO: 3739386 - DNA, 25 bp, Homo sapien
atctaaatttatttcgccctccaag

SEQ ID NO: 3739387 - DNA, 25 bp, Homo sapien
agactaacaccgcaaagacagcggg

SEQ ID NO: 3739388 - DNA, 25 bp, Homo sapien
gagagctccagctgcggacaggtca

SEQ ID NO: 3739389 - DNA, 25 bp, Homo sapien
tgtgcctgagctcgtgccttctctt

SEQ ID NO: 3739390 - DNA, 25 bp, Homo sapien
tatcgctgggcatcttgcatgtgcc

SEQ ID NO: 3739391 - DNA, 25 bp, Homo sapien
ggaagttttgcactttgctcactga

SEQ ID NO: 3739392 - DNA, 25 bp, Homo sapien
tgagggtactaggtgagctcccaat

SEQ ID NO: 3739393 - DNA, 25 bp, Homo sapien
catgaaggcgttaactatggctctg

SEQ ID NO: 3739394 - DNA, 25 bp, Homo sapien
agtaagccataggttgggagagacc

SEQ ID NO: 3739395 - DNA, 25 bp, Homo sapien
tggcaaataaattccgtaaacagag

SEQ ID NO: 3739396 - DNA, 25 bp, Homo sapien
ctggcaaataaattccgtaaacaga

SEQ ID NO: 3739397 - DNA, 25 bp, Homo sapien
aatacacccaggcagacgtggaggg

SEQ ID NO: 3739398 - DNA, 25 bp, Homo sapien
ctgcctttcgggtactagctctggg

SEQ ID NO: 3739399 - DNA, 25 bp, Homo sapien
cctgcctttcgggtactagctctgg

SEQ ID NO: 3739400 - DNA, 25 bp, Homo sapien
gtttaatacacccaggcagacgtgg

SEQ ID NO: 3739401 - DNA, 25 bp, Homo sapien
gtcgaactccggcagccagacaggg

SEQ ID NO: 3739402 - DNA, 25 bp, Homo sapien
actctcccacgcctcccattgaggt

SEQ ID NO: 3739403 - DNA, 25 bp, Homo sapien
cctcccattgaggtcggataggggc

SEQ ID NO: 3739404 - DNA, 25 bp, Homo sapien
ctgtgccggtgggatgtactcccca

SEQ ID NO: 3739405 - DNA, 25 bp, Homo sapien
caggcagaaccaagaagcaaagctc

SEQ ID NO: 3739406 - DNA, 25 bp, Homo sapien
cgcacgggacggttgatgacaacca

SEQ ID NO: 3739407 - DNA, 25 bp, Homo sapien
gcaaagctctgcaccgcacgggacg

SEQ ID NO: 3739408 - DNA, 25 bp, Homo sapien
tgcaccgcacgggacggttgatgac

SEQ ID NO: 3739409 - DNA, 25 bp, Homo sapien
acgcacagcacaggcaaagagacag

SEQ ID NO: 3739410 - DNA, 25 bp, Homo sapien
ctggaatatgcctgagctgatctct

SEQ ID NO: 3739411 - DNA, 25 bp, Homo sapien
cagccagtgtgacattcatgcccat

SEQ ID NO: 3739412 - DNA, 25 bp, Homo sapien
tgatctctcgggctagacggcccca

SEQ ID NO: 3739413 - DNA, 25 bp, Homo sapien
agtatatggtgaaggaaccataggc

SEQ ID NO: 3739414 - DNA, 25 bp, Homo sapien
gggaagtatatggtgaaggaaccat

SEQ ID NO: 3739415 - DNA, 25 bp, Homo sapien
gaaggaaccataggcagtggacaga

SEQ ID NO: 3739416 - DNA, 25 bp, Homo sapien
tatggtgaaggaaccataggcagtg

SEQ ID NO: 3739417 - DNA, 25 bp, Homo sapien
ggactccagtccctgtatggtcttc

SEQ ID NO: 3739418 - DNA, 25 bp, Homo sapien
agggaggactccagtccctgtatgg

SEQ ID NO: 3739419 - DNA, 25 bp, Homo sapien
ctgggggacccggtgagcagggagg

SEQ ID NO: 3739420 - DNA, 25 bp, Homo sapien
ggaggactccagtccctgtatggtc

SEQ ID NO: 3739421 - DNA, 25 bp, Homo sapien
agaaaggccagctcaatctgctcag

SEQ ID NO: 3739422 - DNA, 25 bp, Homo sapien
ttccgtcagttcctaggagaaagat

SEQ ID NO: 3739423 - DNA, 25 bp, Homo sapien
tctgatcaactggttcctcccgttg

SEQ ID NO: 3739424 - DNA, 25 bp, Homo sapien
ttctatgcaataccctccacacggg

SEQ ID NO: 3739425 - DNA, 25 bp, Homo sapien
atgggagatccggctttcaccattc

SEQ ID NO: 3739426 - DNA, 25 bp, Homo sapien
gagatccggctttcaccattcagac

SEQ ID NO: 3739427 - DNA, 25 bp, Homo sapien
ctggatgggagatccggctttcacc

SEQ ID NO: 3739428 - DNA, 25 bp, Homo sapien
gggagatccggctttcaccattcag

SEQ ID NO: 3739429 - DNA, 25 bp, Homo sapien
gaaaagcgctttgcaagctgcacag

SEQ ID NO: 3739430 - DNA, 25 bp, Homo sapien
ttctgaggatgataggaggccttcc

SEQ ID NO: 3739431 - DNA, 25 bp, Homo sapien
cctataagtgggtgaccgaggcaat

SEQ ID NO: 3739432 - DNA, 25 bp, Homo sapien
ctcaagcgtaggaagtggtggccac

SEQ ID NO: 3739433 - DNA, 25 bp, Homo sapien
acctctccctcccatggctaaatgc

SEQ ID NO: 3739434 - DNA, 25 bp, Homo sapien
accacctctccctcccatggctaaa

SEQ ID NO: 3739435 - DNA, 25 bp, Homo sapien
ctctccctcccatggctaaatgccg

SEQ ID NO: 3739436 - DNA, 25 bp, Homo sapien
ctccctcccatggctaaatgccgca

SEQ ID NO: 3739437 - DNA, 25 bp, Homo sapien
acagcaggcccagccaaattccatt

SEQ ID NO: 3739438 - DNA, 25 bp, Homo sapien
ccattccagcacattctgagggctg

SEQ ID NO: 3739439 - DNA, 25 bp, Homo sapien
ttctgagggctgtccaaattcttct

SEQ ID NO: 3739440 - DNA, 25 bp, Homo sapien
aaattcttctgctgtgctgcgtgca

SEQ ID NO: 3739441 - DNA, 25 bp, Homo sapien
gctttaccacaggtgcctcagcttc

SEQ ID NO: 3739442 - DNA, 25 bp, Homo sapien
tcccatgaggggctttaccacaggt

SEQ ID NO: 3739443 - DNA, 25 bp, Homo sapien
gaggggctttaccacaggtgcctca

SEQ ID NO: 3739444 - DNA, 25 bp, Homo sapien
ccatgaggggctttaccacaggtgc

SEQ ID NO: 3739445 - DNA, 25 bp, Homo sapien
cgatatccaccagggttacccgcgt

SEQ ID NO: 3739446 - DNA, 25 bp, Homo sapien
gttacccgcgtctcattatcagcca

SEQ ID NO: 3739447 - DNA, 25 bp, Homo sapien
caggatggaacgatatccaccaggg

SEQ ID NO: 3739448 - DNA, 25 bp, Homo sapien
agggttacccgcgtctcattatcag

SEQ ID NO: 3739449 - DNA, 25 bp, Homo sapien
atggaaagaagctcatgcaaagctg

SEQ ID NO: 3739450 - DNA, 25 bp, Homo sapien
tggaaagaagctcatgcaaagctgt

SEQ ID NO: 3739451 - DNA, 25 bp, Homo sapien
gcaaagctgtcaatggtggggccag

SEQ ID NO: 3739452 - DNA, 25 bp, Homo sapien
caaagctgtcaatggtggggccagc

SEQ ID NO: 3739453 - DNA, 25 bp, Homo sapien
tggaaacacaacctgctttgctgca

SEQ ID NO: 3739454 - DNA, 25 bp, Homo sapien
tcttgccataaccatggagagaaag

SEQ ID NO: 3739455 - DNA, 25 bp, Homo sapien
ctgggccacgcaggacccggaggct

SEQ ID NO: 3739456 - DNA, 25 bp, Homo sapien
ggctcccctcttgccataaccatgg

SEQ ID NO: 3739457 - DNA, 25 bp, Homo sapien
ggcttcgtgggtgctcagctcgatt

SEQ ID NO: 3739458 - DNA, 25 bp, Homo sapien
tcgatttctggcctttgttgcctgg

SEQ ID NO: 3739459 - DNA, 25 bp, Homo sapien
gtgggtgctcagctcgatttctggc

SEQ ID NO: 3739460 - DNA, 25 bp, Homo sapien
gatttctggcctttgttgcctggcc

SEQ ID NO: 3739461 - DNA, 25 bp, Homo sapien
aggctcagaacgctcagggcctcgg

SEQ ID NO: 3739462 - DNA, 25 bp, Homo sapien
caggaagggagctgtgttcccaggg

SEQ ID NO: 3739463 - DNA, 25 bp, Homo sapien
ccacaggctcagaacgctcagggcc

SEQ ID NO: 3739464 - DNA, 25 bp, Homo sapien
aggaagggagctgtgttcccagggt

SEQ ID NO: 3739465 - DNA, 25 bp, Homo sapien
ttaaatggaactgagtgttcaccag

SEQ ID NO: 3739466 - DNA, 25 bp, Homo sapien
gcttagtctcatctactaaatctgg

SEQ ID NO: 3739467 - DNA, 25 bp, Homo sapien
gatgagtttcagatgctcctttgcc

SEQ ID NO: 3739468 - DNA, 25 bp, Homo sapien
ccaggaaagagtgtgagcataggct

SEQ ID NO: 3739469 - DNA, 25 bp, Homo sapien
gtgatcgatgccacacaggtgtttc

SEQ ID NO: 3739470 - DNA, 25 bp, Homo sapien
cgatgccacacaggtgtttcatata

SEQ ID NO: 3739471 - DNA, 25 bp, Homo sapien
tagctgcttctgtcagcctgaaggc

SEQ ID NO: 3739472 - DNA, 25 bp, Homo sapien
tgtttcatataaatcttcaagggct

SEQ ID NO: 3739473 - DNA, 25 bp, Homo sapien
tcatttcatggtcttcacagactca

SEQ ID NO: 3739474 - DNA, 25 bp, Homo sapien
tagaagaaggcaccagtgatgaccc

SEQ ID NO: 3739475 - DNA, 25 bp, Homo sapien
tctcagaacgccttcttcatttcat

SEQ ID NO: 3739476 - DNA, 25 bp, Homo sapien
gaaggtgactggcaaactctcagaa

SEQ ID NO: 3739477 - DNA, 25 bp, Homo sapien
cctcccgattggctgcttgtcacat

SEQ ID NO: 3739478 - DNA, 25 bp, Homo sapien
gctgcttgtcacataaactgcagta

SEQ ID NO: 3739479 - DNA, 25 bp, Homo sapien
tttcacaaaactgccggaaaagcag

SEQ ID NO: 3739480 - DNA, 25 bp, Homo sapien
gaactgaatgtaacactccagccca

SEQ ID NO: 3739481 - DNA, 25 bp, Homo sapien
tggacagcccgccgttggtccggca

SEQ ID NO: 3739482 - DNA, 25 bp, Homo sapien
ctagactgctctgcaggacgcaggc

SEQ ID NO: 3739483 - DNA, 25 bp, Homo sapien
ttttccagaatgagaagcacccagg

SEQ ID NO: 3739484 - DNA, 25 bp, Homo sapien
gtccggcaccgtgggaatgtagcta

SEQ ID NO: 3739485 - DNA, 25 bp, Homo sapien
atctgacgcactcgccacatggata

SEQ ID NO: 3739486 - DNA, 25 bp, Homo sapien
gataaagggcctcgagtcaataaaa

SEQ ID NO: 3739487 - DNA, 25 bp, Homo sapien
tcaataaaaagcctgagtaagcggc

SEQ ID NO: 3739488 - DNA, 25 bp, Homo sapien
aagcctgagtaagcggccctttctc

SEQ ID NO: 3739489 - DNA, 25 bp, Homo sapien
ctttggggtgaggtacttggtcata

SEQ ID NO: 3739490 - DNA, 25 bp, Homo sapien
catctggagtaacttcatattctgc

SEQ ID NO: 3739491 - DNA, 25 bp, Homo sapien
ttcatctggagtaacttcatattct

SEQ ID NO: 3739492 - DNA, 25 bp, Homo sapien
tttttcatctggagtaacttcatat

SEQ ID NO: 3739493 - DNA, 25 bp, Homo sapien
ttgaggggactgatggccaagacct

SEQ ID NO: 3739494 - DNA, 25 bp, Homo sapien
gaacgagggctacatttggtgcaag

SEQ ID NO: 3739495 - DNA, 25 bp, Homo sapien
tggagaagaacgagggctacatttg

SEQ ID NO: 3739496 - DNA, 25 bp, Homo sapien
ggccaagaccttccacaggctgtgg

SEQ ID NO: 3739497 - DNA, 25 bp, Homo sapien
aagggcaatggccactaccaactgc

SEQ ID NO: 3739498 - DNA, 25 bp, Homo sapien
caagggcaatggccactaccaactg

SEQ ID NO: 3739499 - DNA, 25 bp, Homo sapien
gggcaatggccactaccaactgctg

SEQ ID NO: 3739500 - DNA, 25 bp, Homo sapien
gcaatggccactaccaactgctgat

SEQ ID NO: 3739501 - DNA, 25 bp, Homo sapien
gagaacgtctcctcgtctgtgtcca

SEQ ID NO: 3739502 - DNA, 25 bp, Homo sapien
ctgcgactgggtgaacagggaccct

SEQ ID NO: 3739503 - DNA, 25 bp, Homo sapien
caaaaatgtatctagccagagcccc

SEQ ID NO: 3739504 - DNA, 25 bp, Homo sapien
ccaatatgacatcggctgcgactgg

SEQ ID NO: 3739505 - DNA, 25 bp, Homo sapien
caatggaacagtgtgctcagagacc

SEQ ID NO: 3739506 - DNA, 25 bp, Homo sapien
caaaggccacaaggtatggacatcc

SEQ ID NO: 3739507 - DNA, 25 bp, Homo sapien
tgtgttggccctactctgaaggtgg

SEQ ID NO: 3739508 - DNA, 25 bp, Homo sapien
caagtgtcctcaatacatgcaggga

SEQ ID NO: 3739509 - DNA, 25 bp, Homo sapien
attgatcgagaaccatgtgtccagc

SEQ ID NO: 3739510 - DNA, 25 bp, Homo sapien
tcgagaaccatgtgtccagcgtcat

SEQ ID NO: 3739511 - DNA, 25 bp, Homo sapien
gatcgagaaccatgtgtccagcgtc

SEQ ID NO: 3739512 - DNA, 25 bp, Homo sapien
tgatcgagaaccatgtgtccagcgt

SEQ ID NO: 3739513 - DNA, 25 bp, Homo sapien
tatttcacacccttggttgccctgg

SEQ ID NO: 3739514 - DNA, 25 bp, Homo sapien
cctggagatcatgaattggttggat

SEQ ID NO: 3739515 - DNA, 25 bp, Homo sapien
ggttggatgatcaggcagactctaa

SEQ ID NO: 3739516 - DNA, 25 bp, Homo sapien
gcagactctaagcaggaccagggcc

SEQ ID NO: 3739517 - DNA, 25 bp, Homo sapien
gattaattgacaacaggatgacctg

SEQ ID NO: 3739518 - DNA, 25 bp, Homo sapien
tcagtagagatgaagagccgggtcc

SEQ ID NO: 3739519 - DNA, 25 bp, Homo sapien
gaccctctgctcaagtgaaggtgga

SEQ ID NO: 3739520 - DNA, 25 bp, Homo sapien
tatctgtttgcacgctgggaatctg

SEQ ID NO: 3739521 - DNA, 25 bp, Homo sapien
ggaattgaaacccagctgccggcca

SEQ ID NO: 3739522 - DNA, 25 bp, Homo sapien
gaattgaaacccagctgccggccat

SEQ ID NO: 3739523 - DNA, 25 bp, Homo sapien
aggaattgaaacccagctgccggcc

SEQ ID NO: 3739524 - DNA, 25 bp, Homo sapien
catgaagatagaatgcactaaagct

SEQ ID NO: 3739525 - DNA, 25 bp, Homo sapien
ggacaatagtgtctactacatagga

SEQ ID NO: 3739526 - DNA, 25 bp, Homo sapien
tttaccattatgagctaaagaactc

SEQ ID NO: 3739527 - DNA, 25 bp, Homo sapien
gactgcctgggtaaaacaaggacaa

SEQ ID NO: 3739528 - DNA, 25 bp, Homo sapien
tgtctgccgccactccaaaagagag

SEQ ID NO: 3739529 - DNA, 25 bp, Homo sapien
agggaccaggatcactgccacccag

SEQ ID NO: 3739530 - DNA, 25 bp, Homo sapien
atgccacttctctgcccaaggtcca

SEQ ID NO: 3739531 - DNA, 25 bp, Homo sapien
tctctgcccaaggtccacggatggg

SEQ ID NO: 3739532 - DNA, 25 bp, Homo sapien
gataatccctggtcgtgacccgcag

SEQ ID NO: 3739533 - DNA, 25 bp, Homo sapien
aatacacagtgaccctgacccagac

SEQ ID NO: 3739534 - DNA, 25 bp, Homo sapien
cgcaggcccaaagtgtgcaacagga

SEQ ID NO: 3739535 - DNA, 25 bp, Homo sapien
gacgcactgtttacacaggccgcgc

SEQ ID NO: 3739536 - DNA, 25 bp, Homo sapien
caatcagaagcggatctgaggccgg

SEQ ID NO: 3739537 - DNA, 25 bp, Homo sapien
agacacaccggaccggcagcctgtg

SEQ ID NO: 3739538 - DNA, 25 bp, Homo sapien
ccttgtgatcgaggctggaaggctc

SEQ ID NO: 3739539 - DNA, 25 bp, Homo sapien
tcaaaggaaggtgatgctcaccgtt

SEQ ID NO: 3739540 - DNA, 25 bp, Homo sapien
gagctgtgcgggctcgtggcctgtc

SEQ ID NO: 3739541 - DNA, 25 bp, Homo sapien
tgtgcgggctcgtggcctgtccctc

SEQ ID NO: 3739542 - DNA, 25 bp, Homo sapien
gtgtcctcgtggtcagcccaggcga

SEQ ID NO: 3739543 - DNA, 25 bp, Homo sapien
tcagcccaggcgatggactgcacgg

SEQ ID NO: 3739544 - DNA, 25 bp, Homo sapien
catgctcatacggtcacaaccagag

SEQ ID NO: 3739545 - DNA, 25 bp, Homo sapien
tggccaggcaggagacgtgatccac

SEQ ID NO: 3739546 - DNA, 25 bp, Homo sapien
aaaaataaatcagtccggccacacg

SEQ ID NO: 3739547 - DNA, 25 bp, Homo sapien
gggttgatttaaggcctggctgaca

SEQ ID NO: 3739548 - DNA, 25 bp, Homo sapien
ctgcgtcagctacgggaagcctggc

SEQ ID NO: 3739549 - DNA, 25 bp, Homo sapien
cctcgaggggatctgcgtcagctac

SEQ ID NO: 3739550 - DNA, 25 bp, Homo sapien
tggccgccccttgaccctcctcgag

SEQ ID NO: 3739551 - DNA, 25 bp, Homo sapien
ttgaccctcctcgaggggatctgcg

SEQ ID NO: 3739552 - DNA, 25 bp, Homo sapien
tcttgagcacccacttatgatatgc

SEQ ID NO: 3739553 - DNA, 25 bp, Homo sapien
cacccacttatgatatgccaggtcc

SEQ ID NO: 3739554 - DNA, 25 bp, Homo sapien
cacttatgatatgccaggtcctagg

SEQ ID NO: 3739555 - DNA, 25 bp, Homo sapien
gagcacccacttatgatatgccagg

SEQ ID NO: 3739556 - DNA, 25 bp, Homo sapien
taagcccttaaccaggtatcctgag

SEQ ID NO: 3739557 - DNA, 25 bp, Homo sapien
tgggaacactcacatctagcaatct

SEQ ID NO: 3739558 - DNA, 25 bp, Homo sapien
cttggccccagtcaaaaccagctgg

SEQ ID NO: 3739559 - DNA, 25 bp, Homo sapien
catggatctgagtggtataagccct

SEQ ID NO: 3739560 - DNA, 25 bp, Homo sapien
gcctctgcaccatgaatgactgacg

SEQ ID NO: 3739561 - DNA, 25 bp, Homo sapien
tcctgcatcagtgcgaaactccaga

SEQ ID NO: 3739562 - DNA, 25 bp, Homo sapien
gttgtacttggctggtgcccttgga

SEQ ID NO: 3739563 - DNA, 25 bp, Homo sapien
tgacgtgaggaagggacatcatttc

SEQ ID NO: 3739564 - DNA, 25 bp, Homo sapien
aatgctgccgtagcttgaggctgac

SEQ ID NO: 3739565 - DNA, 25 bp, Homo sapien
agctatcagtggctgagttatcagc

SEQ ID NO: 3739566 - DNA, 25 bp, Homo sapien
gttatcagccccgaggatggcgtcg

SEQ ID NO: 3739567 - DNA, 25 bp, Homo sapien
gatggcgtcgccaaggcggctgcac

SEQ ID NO: 3739568 - DNA, 25 bp, Homo sapien
ctggggatccgggcagttcctgata

SEQ ID NO: 3739569 - DNA, 25 bp, Homo sapien
ctatggcccagactcgctctctgct

SEQ ID NO: 3739570 - DNA, 25 bp, Homo sapien
acctcttccctatggcccagactcg

SEQ ID NO: 3739571 - DNA, 25 bp, Homo sapien
tggggatccgggcagttcctgatat

SEQ ID NO: 3739572 - DNA, 25 bp, Homo sapien
gcctcaaggcctgtagatacctgca

SEQ ID NO: 3739573 - DNA, 25 bp, Homo sapien
tgctcgttggtaaaattgccccagg

SEQ ID NO: 3739574 - DNA, 25 bp, Homo sapien
gatgccccttgaatgtctaaccata

SEQ ID NO: 3739575 - DNA, 25 bp, Homo sapien
tgatggtcaggggtgccacgcttcc

SEQ ID NO: 3739576 - DNA, 25 bp, Homo sapien
cagcaccgggatccatccactgggt

SEQ ID NO: 3739577 - DNA, 25 bp, Homo sapien
cgctggctgcgtgtcagatcggata

SEQ ID NO: 3739578 - DNA, 25 bp, Homo sapien
ctgagtaacctcagctcagcaccgg

SEQ ID NO: 3739579 - DNA, 25 bp, Homo sapien
tacaccgtgtaagaaacaaggcacc

SEQ ID NO: 3739580 - DNA, 25 bp, Homo sapien
gggtcattgtgagctggggtcatct

SEQ ID NO: 3739581 - DNA, 25 bp, Homo sapien
ggtcatctgggaaaggctttataga

SEQ ID NO: 3739582 - DNA, 25 bp, Homo sapien
tagaagacggaataaggggcaaagc

SEQ ID NO: 3739583 - DNA, 25 bp, Homo sapien
aagcagaatttgaccctcctacctg

SEQ ID NO: 3739584 - DNA, 25 bp, Homo sapien
gacccataaggtctgaccctagccc

SEQ ID NO: 3739585 - DNA, 25 bp, Homo sapien
aggcaagtgatgcagctcgagacaa

SEQ ID NO: 3739586 - DNA, 25 bp, Homo sapien
cagctcgagacaatgagccccacgg

SEQ ID NO: 3739587 - DNA, 25 bp, Homo sapien
ttatcccctcaggacccataaggtc

SEQ ID NO: 3739588 - DNA, 25 bp, Homo sapien
cctaggttgggtgtctaatgagtga

SEQ ID NO: 3739589 - DNA, 25 bp, Homo sapien
atgaaatttatccacagacccaata

SEQ ID NO: 3739590 - DNA, 25 bp, Homo sapien
caatagcttacatatactgaaggct

SEQ ID NO: 3739591 - DNA, 25 bp, Homo sapien
gtcctgggctaaacacattgcttca

SEQ ID NO: 3739592 - DNA, 25 bp, Homo sapien
caacccacagagcacgggtcacaac

SEQ ID NO: 3739593 - DNA, 25 bp, Homo sapien
aacccacagagcacgggtcacaact

SEQ ID NO: 3739594 - DNA, 25 bp, Homo sapien
acccacagagcacgggtcacaactt

SEQ ID NO: 3739595 - DNA, 25 bp, Homo sapien
caccaaacagcagtctcagagcaca

SEQ ID NO: 3739596 - DNA, 25 bp, Homo sapien
caaacagcagtctcagagcacattt

SEQ ID NO: 3739597 - DNA, 25 bp, Homo sapien
gcagtctcagagcacatttcccagt

SEQ ID NO: 3739598 - DNA, 25 bp, Homo sapien
tctcagagcacatttcccagttacc

SEQ ID NO: 3739599 - DNA, 25 bp, Homo sapien
gcacaggcagaaaagagttctttgc

SEQ ID NO: 3739600 - DNA, 25 bp, Homo sapien
gccaacttgggctatgaaaacaggg

SEQ ID NO: 3739601 - DNA, 25 bp, Homo sapien
cacggcttctgtaggagcttctcct

SEQ ID NO: 3739602 - DNA, 25 bp, Homo sapien
ttctcctccgtctgggagaccaggt

SEQ ID NO: 3739603 - DNA, 25 bp, Homo sapien
tcccctcaggtactcgtggacagac

SEQ ID NO: 3739604 - DNA, 25 bp, Homo sapien
ttccactggagaaagcggtcaaaaa

SEQ ID NO: 3739605 - DNA, 25 bp, Homo sapien
aacatgctgtccagatattcgtgga

SEQ ID NO: 3739606 - DNA, 25 bp, Homo sapien
gatattcgtggaatggttctcccct

SEQ ID NO: 3739607 - DNA, 25 bp, Homo sapien
tgagtggggttcagaagggctcctg

SEQ ID NO: 3739608 - DNA, 25 bp, Homo sapien
gttcagaagggctcctggcctgcag

SEQ ID NO: 3739609 - DNA, 25 bp, Homo sapien
ctgtgagtggggttcagaagggctc

SEQ ID NO: 3739610 - DNA, 25 bp, Homo sapien
aagggctgtgagtggggttcagaag

SEQ ID NO: 3739611 - DNA, 25 bp, Homo sapien
tggtcacgctgtcatccccaccagt

SEQ ID NO: 3739612 - DNA, 25 bp, Homo sapien
agaaaccacccatccatggccgcag

SEQ ID NO: 3739613 - DNA, 25 bp, Homo sapien
tgtgcagggtggacagcggccacta

SEQ ID NO: 3739614 - DNA, 25 bp, Homo sapien
taaggagactatctctggtcacgct

SEQ ID NO: 3739615 - DNA, 25 bp, Homo sapien
gcactcgatactgcctgaaagtgtt

SEQ ID NO: 3739616 - DNA, 25 bp, Homo sapien
ccccttttcctagcactcgatactg

SEQ ID NO: 3739617 - DNA, 25 bp, Homo sapien
cttttcctagcactcgatactgcct

SEQ ID NO: 3739618 - DNA, 25 bp, Homo sapien
tcctagcactcgatactgcctgaaa

SEQ ID NO: 3739619 - DNA, 25 bp, Homo sapien
gcatacattttacccgtggcccgaa

SEQ ID NO: 3739620 - DNA, 25 bp, Homo sapien
aaactgactgttgaccttctcgagg

SEQ ID NO: 3739621 - DNA, 25 bp, Homo sapien
ctccaagcgcttgcaggcatacatt

SEQ ID NO: 3739622 - DNA, 25 bp, Homo sapien
tgcttctcattgagggccatggact

SEQ ID NO: 3739623 - DNA, 25 bp, Homo sapien
gaatccaacagaatggcgtctgtgc

SEQ ID NO: 3739624 - DNA, 25 bp, Homo sapien
aatccaacagaatggcgtctgtgct

SEQ ID NO: 3739625 - DNA, 25 bp, Homo sapien
gaagccagggttgcccatgttgtag

SEQ ID NO: 3739626 - DNA, 25 bp, Homo sapien
tctcacggtggaggtcttctaagcc

SEQ ID NO: 3739627 - DNA, 25 bp, Homo sapien
tctctgccgcataaaacaaggcccg

SEQ ID NO: 3739628 - DNA, 25 bp, Homo sapien
gatggtcaggaccaagcacagtgca

SEQ ID NO: 3739629 - DNA, 25 bp, Homo sapien
ctaacaggatgttttcaggtttcag

SEQ ID NO: 3739630 - DNA, 25 bp, Homo sapien
taacaggatgttttcaggtttcaga

SEQ ID NO: 3739631 - DNA, 25 bp, Homo sapien
caggatgttttcaggtttcagatct

SEQ ID NO: 3739632 - DNA, 25 bp, Homo sapien
cataatcatctaacaggatgttttc

SEQ ID NO: 3739633 - DNA, 25 bp, Homo sapien
cccttccctgcctatggacaccagg

SEQ ID NO: 3739634 - DNA, 25 bp, Homo sapien
ccttccctgcctatggacaccaggg

SEQ ID NO: 3739635 - DNA, 25 bp, Homo sapien
tcccttccctgcctatggacaccag

SEQ ID NO: 3739636 - DNA, 25 bp, Homo sapien
cttccctgcctatggacaccagggc

SEQ ID NO: 3739637 - DNA, 25 bp, Homo sapien
acccggccgcggatcaggtctccct

SEQ ID NO: 3739638 - DNA, 25 bp, Homo sapien
tcaggtctccctcggggatcttcac

SEQ ID NO: 3739639 - DNA, 25 bp, Homo sapien
agcccaggtctgagatcctaatgtg

SEQ ID NO: 3739640 - DNA, 25 bp, Homo sapien
cccaggtctgagatcctaatgtggc

SEQ ID NO: 3739641 - DNA, 25 bp, Homo sapien
gactggccctcgatcatctcataga

SEQ ID NO: 3739642 - DNA, 25 bp, Homo sapien
ggctcaggccgtacctctggttgtt

SEQ ID NO: 3739643 - DNA, 25 bp, Homo sapien
gagaacttgtgggagtacacctcct

SEQ ID NO: 3739644 - DNA, 25 bp, Homo sapien
tccttgcggccgcggaacggcgact

SEQ ID NO: 3739645 - DNA, 25 bp, Homo sapien
cagcttgagggtggcatctggccac

SEQ ID NO: 3739646 - DNA, 25 bp, Homo sapien
tttctcctggaagtctccgctgacc

SEQ ID NO: 3739647 - DNA, 25 bp, Homo sapien
agtccacagcaaggagtgccctcaa

SEQ ID NO: 3739648 - DNA, 25 bp, Homo sapien
agtgccctcaactctagcttggtgg

SEQ ID NO: 3739649 - DNA, 25 bp, Homo sapien
tcccttggttcctgggtgtccctgc

SEQ ID NO: 3739650 - DNA, 25 bp, Homo sapien
cgcttgcggcgcagatctcaggtct

SEQ ID NO: 3739651 - DNA, 25 bp, Homo sapien
gggccgcttgcggcgcagatctcag

SEQ ID NO: 3739652 - DNA, 25 bp, Homo sapien
gccagaccctcctggggccgcttgc

SEQ ID NO: 3739653 - DNA, 25 bp, Homo sapien
tctggggtgaggagccgagccagac

SEQ ID NO: 3739654 - DNA, 25 bp, Homo sapien
cagctgtggggttagagtgtgggtc

SEQ ID NO: 3739655 - DNA, 25 bp, Homo sapien
gctgcgatgaccatgtggctttctc

SEQ ID NO: 3739656 - DNA, 25 bp, Homo sapien
tctgctgtacacacaggacttcttc

SEQ ID NO: 3739657 - DNA, 25 bp, Homo sapien
tgggtctgctgtacacacaggactt

SEQ ID NO: 3739658 - DNA, 25 bp, Homo sapien
acgggacaggtcctccgggagcagc

SEQ ID NO: 3739659 - DNA, 25 bp, Homo sapien
cgggacaggtcctccgggagcagca

SEQ ID NO: 3739660 - DNA, 25 bp, Homo sapien
cacgggacaggtcctccgggagcag

SEQ ID NO: 3739661 - DNA, 25 bp, Homo sapien
ccacgggacaggtcctccgggagca

SEQ ID NO: 3739662 - DNA, 25 bp, Homo sapien
tcctcctgtccggacctcctgcctc

SEQ ID NO: 3739663 - DNA, 25 bp, Homo sapien
gagagccccatgaagccacgtcccc

SEQ ID NO: 3739664 - DNA, 25 bp, Homo sapien
agagccccatgaagccacgtcccct

SEQ ID NO: 3739665 - DNA, 25 bp, Homo sapien
ctggaacgaagggagggtccaacat

SEQ ID NO: 3739666 - DNA, 25 bp, Homo sapien
gagggtccaacatcccggcttctaa

SEQ ID NO: 3739667 - DNA, 25 bp, Homo sapien
gcttctaagcgcttgaagttcatgt

SEQ ID NO: 3739668 - DNA, 25 bp, Homo sapien
ctctgcttcgcatctttcgtgagca

SEQ ID NO: 3739669 - DNA, 25 bp, Homo sapien
catgctggtcaagatgaactgaatg

SEQ ID NO: 3739670 - DNA, 25 bp, Homo sapien
gatgcaactccctgcaatgtgagct

SEQ ID NO: 3739671 - DNA, 25 bp, Homo sapien
tagtgctcgatgcatgcatgctggt

SEQ ID NO: 3739672 - DNA, 25 bp, Homo sapien
ggcccagaacctggcgtcaacagta

SEQ ID NO: 3739673 - DNA, 25 bp, Homo sapien
aacctttgctgacctgaggcctcgg

SEQ ID NO: 3739674 - DNA, 25 bp, Homo sapien
agcggcttcgcactccagggcctgc

SEQ ID NO: 3739675 - DNA, 25 bp, Homo sapien
ttgctgacctgaggcctcggatgcc

SEQ ID NO: 3739676 - DNA, 25 bp, Homo sapien
cagggcctgcaacctttgctgacct

SEQ ID NO: 3739677 - DNA, 25 bp, Homo sapien
ggtcacacatatgtcccgcctgcgg

SEQ ID NO: 3739678 - DNA, 25 bp, Homo sapien
tatgtcccgcctgcggctccagtgg

SEQ ID NO: 3739679 - DNA, 25 bp, Homo sapien
gcagaagggagtcttcccaggacac

SEQ ID NO: 3739680 - DNA, 25 bp, Homo sapien
ggcagagggccggtcacacatatgt

SEQ ID NO: 3739681 - DNA, 25 bp, Homo sapien
ttttgccatgggatggacacagagc

SEQ ID NO: 3739682 - DNA, 25 bp, Homo sapien
tgacgcccttcacagtggagaactg

SEQ ID NO: 3739683 - DNA, 25 bp, Homo sapien
tagaagtcgtcgtctgtgtggtcca

SEQ ID NO: 3739684 - DNA, 25 bp, Homo sapien
cagagcccgtggagaacttggagta

SEQ ID NO: 3739685 - DNA, 25 bp, Homo sapien
ccggagggtggtttctgttcagatc

SEQ ID NO: 3739686 - DNA, 25 bp, Homo sapien
tcagatctggcgggagggtaccatt

SEQ ID NO: 3739687 - DNA, 25 bp, Homo sapien
cgttcagctccttaaagcattctgt

SEQ ID NO: 3739688 - DNA, 25 bp, Homo sapien
taccattaggtccaaacacgttcag

SEQ ID NO: 3739689 - DNA, 25 bp, Homo sapien
gctgccagctagagggcacagcatt

SEQ ID NO: 3739690 - DNA, 25 bp, Homo sapien
gggtcagcttctacccccagttctc

SEQ ID NO: 3739691 - DNA, 25 bp, Homo sapien
tctaagtgtcatttcccaagggccc

SEQ ID NO: 3739692 - DNA, 25 bp, Homo sapien
ccaggagccggaaggttctgtgggg

SEQ ID NO: 3739693 - DNA, 25 bp, Homo sapien
cctgtaacacgggagaagagcagct

SEQ ID NO: 3739694 - DNA, 25 bp, Homo sapien
gaagcgtttgcttcacaggtgctgg

SEQ ID NO: 3739695 - DNA, 25 bp, Homo sapien
tatgcaaagggctctagcgagggcc

SEQ ID NO: 3739696 - DNA, 25 bp, Homo sapien
tccaccttggttaagcctgcaggca

SEQ ID NO: 3739697 - DNA, 25 bp, Homo sapien
tgagtttatgtggtggttaaaactg

SEQ ID NO: 3739698 - DNA, 25 bp, Homo sapien
agctgggcgaactcttggaattgtt

SEQ ID NO: 3739699 - DNA, 25 bp, Homo sapien
tggttaaaactggtcttggagctgg

SEQ ID NO: 3739700 - DNA, 25 bp, Homo sapien
tatgtggtggttaaaactggtcttg

SEQ ID NO: 3739701 - DNA, 25 bp, Homo sapien
ccactgtggacttggaggccagagc

SEQ ID NO: 3739702 - DNA, 25 bp, Homo sapien
aagggtctgggctggttccactgtg

SEQ ID NO: 3739703 - DNA, 25 bp, Homo sapien
cacttctaaggagaagggtctgggc

SEQ ID NO: 3739704 - DNA, 25 bp, Homo sapien
agagcaggggctccactacttccac

SEQ ID NO: 3739705 - DNA, 25 bp, Homo sapien
ctcgaggttctacgtcgacgggatg

SEQ ID NO: 3739706 - DNA, 25 bp, Homo sapien
ctacgtcgacgggatggacggcctc

SEQ ID NO: 3739707 - DNA, 25 bp, Homo sapien
tgagaaacctcgaggttctacgtcg

SEQ ID NO: 3739708 - DNA, 25 bp, Homo sapien
gtcgacgggatggacggcctccttc

SEQ ID NO: 3739709 - DNA, 25 bp, Homo sapien
taaaatacgtgcaagttgtcgtatc

SEQ ID NO: 3739710 - DNA, 25 bp, Homo sapien
ttctattgcaatgttcaccaaagac

SEQ ID NO: 3739711 - DNA, 25 bp, Homo sapien
gcaagttgtcgtatccaattggatt

SEQ ID NO: 3739712 - DNA, 25 bp, Homo sapien
caaagacaaatccaatccaccccgg

SEQ ID NO: 3739713 - DNA, 25 bp, Homo sapien
aaattcagttctagttatgacgcta

SEQ ID NO: 3739714 - DNA, 25 bp, Homo sapien
ctccccgctaaaatgccttggaaca

SEQ ID NO: 3739715 - DNA, 25 bp, Homo sapien
ctaaaatgccttggaacacatggct

SEQ ID NO: 3739716 - DNA, 25 bp, Homo sapien
cacatggcttaacagtggctgcaca

SEQ ID NO: 3739717 - DNA, 25 bp, Homo sapien
acacatggcttaacagtggctgcac

SEQ ID NO: 3739718 - DNA, 25 bp, Homo sapien
aggctctggaagtcttgagtcacat

SEQ ID NO: 3739719 - DNA, 25 bp, Homo sapien
gaagtatggatcactttctacattt

SEQ ID NO: 3739720 - DNA, 25 bp, Homo sapien
cactttctacatttaataaagacat

SEQ ID NO: 3739721 - DNA, 25 bp, Homo sapien
cattttctcatttgaggctctggaa

SEQ ID NO: 3739722 - DNA, 25 bp, Homo sapien
gcaaacacctagatccgcgtgccag

SEQ ID NO: 3739723 - DNA, 25 bp, Homo sapien
ggctgcaaacacctagatccgcgtg

SEQ ID NO: 3739724 - DNA, 25 bp, Homo sapien
ttagaaggaaagaggcccatcgccc

SEQ ID NO: 3739725 - DNA, 25 bp, Homo sapien
caggctgcaaacacctagatccgcg

SEQ ID NO: 3739726 - DNA, 25 bp, Homo sapien
gtccacatggtgagagaccctggca

SEQ ID NO: 3739727 - DNA, 25 bp, Homo sapien
gattggcccctggtcacttcttcga

SEQ ID NO: 3739728 - DNA, 25 bp, Homo sapien
aaaatgatcagtcccaaaggccagg

SEQ ID NO: 3739729 - DNA, 25 bp, Homo sapien
tgtgaacgcttcaggaacatgccgg

SEQ ID NO: 3739730 - DNA, 25 bp, Homo sapien
tctctactgcaaacggacagggcat

SEQ ID NO: 3739731 - DNA, 25 bp, Homo sapien
gactgagctgctatgaactgggcaa

SEQ ID NO: 3739732 - DNA, 25 bp, Homo sapien
agttatcatagagtccacgtgcagg

SEQ ID NO: 3739733 - DNA, 25 bp, Homo sapien
tgcaggccttgtggtagtatcgcca

SEQ ID NO: 3739734 - DNA, 25 bp, Homo sapien
tggaactgataacacgagcctttgg

SEQ ID NO: 3739735 - DNA, 25 bp, Homo sapien
aaatgaccgtataggccagggacag

SEQ ID NO: 3739736 - DNA, 25 bp, Homo sapien
gaacacacagagttacagcagcggg

SEQ ID NO: 3739737 - DNA, 25 bp, Homo sapien
tattcaggaggacgtgcatgcacac

SEQ ID NO: 3739738 - DNA, 25 bp, Homo sapien
ccgtttggtgtcatggtgctggcac

SEQ ID NO: 3739739 - DNA, 25 bp, Homo sapien
ggtgggacctgcaaatgcgccgttt

SEQ ID NO: 3739740 - DNA, 25 bp, Homo sapien
tcttctgtataagaccgggcaggtg

SEQ ID NO: 3739741 - DNA, 25 bp, Homo sapien
tggctaccccacgttccagcatgtg

SEQ ID NO: 3739742 - DNA, 25 bp, Homo sapien
gatatggcaggtggatcctaacagc

SEQ ID NO: 3739743 - DNA, 25 bp, Homo sapien
cctgggcaatgtttggcttggcaaa

SEQ ID NO: 3739744 - DNA, 25 bp, Homo sapien
ccagtagttgatgcccctagagtgc

SEQ ID NO: 3739745 - DNA, 25 bp, Homo sapien
agctttaaggactgcctcccacagg

SEQ ID NO: 3739746 - DNA, 25 bp, Homo sapien
tctcaatggcaggagaatggtcgcc

SEQ ID NO: 3739747 - DNA, 25 bp, Homo sapien
acccgcctgacagagatctcaatgg

SEQ ID NO: 3739748 - DNA, 25 bp, Homo sapien
tgcactcacgatgaagagactcggt

SEQ ID NO: 3739749 - DNA, 25 bp, Homo sapien
gtgaagacagaaccgctcgaggact

SEQ ID NO: 3739750 - DNA, 25 bp, Homo sapien
tatgctccccgtgtgggatggaaca

SEQ ID NO: 3739751 - DNA, 25 bp, Homo sapien
ttgtctggaccattaagacaggcat

SEQ ID NO: 3739752 - DNA, 25 bp, Homo sapien
gggaaatatgctccccgtgtgggat

SEQ ID NO: 3739753 - DNA, 25 bp, Homo sapien
gatggaacatgcaattgtctggacc

SEQ ID NO: 3739754 - DNA, 25 bp, Homo sapien
tgagtgacacggatctataggaatc

SEQ ID NO: 3739755 - DNA, 25 bp, Homo sapien
tcctgcagaatagctttgattcaca

SEQ ID NO: 3739756 - DNA, 25 bp, Homo sapien
gccaagcgtgcagcacacaggctgt

SEQ ID NO: 3739757 - DNA, 25 bp, Homo sapien
tctttaaccgttggctggtgtggcc

SEQ ID NO: 3739758 - DNA, 25 bp, Homo sapien
ggctgaagttctgatttctcgtttt

SEQ ID NO: 3739759 - DNA, 25 bp, Homo sapien
tctccacggtgttcacacagagcca

SEQ ID NO: 3739760 - DNA, 25 bp, Homo sapien
tgtggctgaagttctgatttctcgt

SEQ ID NO: 3739761 - DNA, 25 bp, Homo sapien
ctccacggtgttcacacagagccag

SEQ ID NO: 3739762 - DNA, 25 bp, Homo sapien
cgatgaatcgggcaccactgcttgc

SEQ ID NO: 3739763 - DNA, 25 bp, Homo sapien
gaacttggatcagattgaactcgga

SEQ ID NO: 3739764 - DNA, 25 bp, Homo sapien
aagtaactttggcactcgggctgag

SEQ ID NO: 3739765 - DNA, 25 bp, Homo sapien
gaactcggagttggtttggcttcac

SEQ ID NO: 3739766 - DNA, 25 bp, Homo sapien
tacatcaggaacacggtggcatctg

SEQ ID NO: 3739767 - DNA, 25 bp, Homo sapien
ctacatcaggaacacggtggcatct

SEQ ID NO: 3739768 - DNA, 25 bp, Homo sapien
gaatggcactgtccttgtggctgca

SEQ ID NO: 3739769 - DNA, 25 bp, Homo sapien
gaggctcttccttaatgacgacccc

SEQ ID NO: 3739770 - DNA, 25 bp, Homo sapien
tcaacatgcccattaagcagatgga

SEQ ID NO: 3739771 - DNA, 25 bp, Homo sapien
acgactcagaggcatcatgtgacag

SEQ ID NO: 3739772 - DNA, 25 bp, Homo sapien
cttggtgttgggctctccttcagag

SEQ ID NO: 3739773 - DNA, 25 bp, Homo sapien
tggtgttgggctctccttcagagtg

SEQ ID NO: 3739774 - DNA, 25 bp, Homo sapien
ttggtgttgggctctccttcagagt

SEQ ID NO: 3739775 - DNA, 25 bp, Homo sapien
aacttggtgttgggctctccttcag

SEQ ID NO: 3739776 - DNA, 25 bp, Homo sapien
gcagctcccggggttcttgcgggtc

SEQ ID NO: 3739777 - DNA, 25 bp, Homo sapien
agggaggcagctcccggggttcttg

SEQ ID NO: 3739778 - DNA, 25 bp, Homo sapien
gcagcacgggaggaccctccaaggc

SEQ ID NO: 3739779 - DNA, 25 bp, Homo sapien
ggtccctgcagcacgggaggaccct

SEQ ID NO: 3739780 - DNA, 25 bp, Homo sapien
gaggagcctcttggacttcggtgac

SEQ ID NO: 3739781 - DNA, 25 bp, Homo sapien
aagaaccatggtctcctagggcaga

SEQ ID NO: 3739782 - DNA, 25 bp, Homo sapien
gaaattcctggcttgagctcacggg

SEQ ID NO: 3739783 - DNA, 25 bp, Homo sapien
cacatgcttttctgggaggtcccgg

SEQ ID NO: 3739784 - DNA, 25 bp, Homo sapien
gccttctcaattgcagaactcccct

SEQ ID NO: 3739785 - DNA, 25 bp, Homo sapien
tgccccgccttctcaattgcagaac

SEQ ID NO: 3739786 - DNA, 25 bp, Homo sapien
cccgccttctcaattgcagaactcc

SEQ ID NO: 3739787 - DNA, 25 bp, Homo sapien
gtctaaccgtggtcctccactgccc

SEQ ID NO: 3739788 - DNA, 25 bp, Homo sapien
gctttctgagagtaagttgcacacc

SEQ ID NO: 3739789 - DNA, 25 bp, Homo sapien
ctgctggctttctgagagtaagttg

SEQ ID NO: 3739790 - DNA, 25 bp, Homo sapien
ctggctttctgagagtaagttgcac

SEQ ID NO: 3739791 - DNA, 25 bp, Homo sapien
ggctttctgagagtaagttgcacac

SEQ ID NO: 3739792 - DNA, 25 bp, Homo sapien
taaaacacaagcgaaccgaggaaga

SEQ ID NO: 3739793 - DNA, 25 bp, Homo sapien
ccgggactggcagctttaagaagca

SEQ ID NO: 3739794 - DNA, 25 bp, Homo sapien
gatttgcctgatgctcaaactgcag

SEQ ID NO: 3739795 - DNA, 25 bp, Homo sapien
tctcaggaccgtgccgggtttatca

SEQ ID NO: 3739796 - DNA, 25 bp, Homo sapien
ttggtacaagggtctgaatcagtgc

SEQ ID NO: 3739797 - DNA, 25 bp, Homo sapien
tattcggctgtctcaagctcttgga

SEQ ID NO: 3739798 - DNA, 25 bp, Homo sapien
tgcataatgaccaaaaatctccagg

SEQ ID NO: 3739799 - DNA, 25 bp, Homo sapien
tgggagtcttaacaatgctggcatc

SEQ ID NO: 3739800 - DNA, 25 bp, Homo sapien
ttttagttgcagagtgtactgcgag

SEQ ID NO: 3739801 - DNA, 25 bp, Homo sapien
tactgcgagttaagtggaaaggtct

SEQ ID NO: 3739802 - DNA, 25 bp, Homo sapien
tccacttggttgttccgtgtaccag

SEQ ID NO: 3739803 - DNA, 25 bp, Homo sapien
cgtgtaccagggtgaaccatgtgga

SEQ ID NO: 3739804 - DNA, 25 bp, Homo sapien
catcacagtccaaacctggtgaggt

SEQ ID NO: 3739805 - DNA, 25 bp, Homo sapien
tgcccatcacagtccaaacctggtg

SEQ ID NO: 3739806 - DNA, 25 bp, Homo sapien
atcacagtccaaacctggtgaggtc

SEQ ID NO: 3739807 - DNA, 25 bp, Homo sapien
cccatcacagtccaaacctggtgag

SEQ ID NO: 3739808 - DNA, 25 bp, Homo sapien
gggatatcgtccaagcgaggtctct

SEQ ID NO: 3739809 - DNA, 25 bp, Homo sapien
cacacgcgtgaacccgtgagcttgg

SEQ ID NO: 3739810 - DNA, 25 bp, Homo sapien
tctctggctggtctgtcgtgaagct

SEQ ID NO: 3739811 - DNA, 25 bp, Homo sapien
gaggtctctctgatcccgctggtgt

SEQ ID NO: 3739812 - DNA, 25 bp, Homo sapien
cagccatgagcttgatgaagataga

SEQ ID NO: 3739813 - DNA, 25 bp, Homo sapien
tatatacagcgcagcatggtctgga

SEQ ID NO: 3739814 - DNA, 25 bp, Homo sapien
ttggtttaagttctatatacagcgc

SEQ ID NO: 3739815 - DNA, 25 bp, Homo sapien
tagaaaggtccagatcattgcacat

SEQ ID NO: 3739816 - DNA, 25 bp, Homo sapien
tttgtgaatgcaggtcatcccactt

SEQ ID NO: 3739817 - DNA, 25 bp, Homo sapien
catcatggcctgtgttgctctgcca

SEQ ID NO: 3739818 - DNA, 25 bp, Homo sapien
ttgtgaatgcaggtcatcccacttc

SEQ ID NO: 3739819 - DNA, 25 bp, Homo sapien
tctcaaagctcggtgaggcccctgg

SEQ ID NO: 3739820 - DNA, 25 bp, Homo sapien
cagcatggctttcggtgttcaccca

SEQ ID NO: 3739821 - DNA, 25 bp, Homo sapien
ggtttgcagagcttgggatttccca

SEQ ID NO: 3739822 - DNA, 25 bp, Homo sapien
cattgctcctattgacagtgaagac

SEQ ID NO: 3739823 - DNA, 25 bp, Homo sapien
ggcttctcaggatcttttgtcccca

SEQ ID NO: 3739824 - DNA, 25 bp, Homo sapien
ccaggacagcctcagatgctggaca

SEQ ID NO: 3739825 - DNA, 25 bp, Homo sapien
ggacagcctcagatgctggacactt

SEQ ID NO: 3739826 - DNA, 25 bp, Homo sapien
acagcctcagatgctggacacttca

SEQ ID NO: 3739827 - DNA, 25 bp, Homo sapien
gggagaaaggggctctctggtccag

SEQ ID NO: 3739828 - DNA, 25 bp, Homo sapien
tgttcgtctgcatagaggtgcactt

SEQ ID NO: 3739829 - DNA, 25 bp, Homo sapien
gctgttcgtctgcatagaggtgcac

SEQ ID NO: 3739830 - DNA, 25 bp, Homo sapien
ctggtgactttgctgttcgtctgca

SEQ ID NO: 3739831 - DNA, 25 bp, Homo sapien
cccctggtgactttgctgttcgtct

SEQ ID NO: 3739832 - DNA, 25 bp, Homo sapien
cctttgtgttaattcaaggtgtcag

SEQ ID NO: 3739833 - DNA, 25 bp, Homo sapien
gttagtaaagttagtgtcttgatcc

SEQ ID NO: 3739834 - DNA, 25 bp, Homo sapien
tgatcctttcattgtcctaggaatt

SEQ ID NO: 3739835 - DNA, 25 bp, Homo sapien
gctgtgtctccgactgcttctcatt

SEQ ID NO: 3739836 - DNA, 25 bp, Homo sapien
cactgtctccgagggtctagaccca

SEQ ID NO: 3739837 - DNA, 25 bp, Homo sapien
cccactgtctccgagggtctagacc

SEQ ID NO: 3739838 - DNA, 25 bp, Homo sapien
tccccactgtctccgagggtctaga

SEQ ID NO: 3739839 - DNA, 25 bp, Homo sapien
ttccccactgtctccgagggtctag

SEQ ID NO: 3739840 - DNA, 25 bp, Homo sapien
gagtattctaagatggattctcttt

SEQ ID NO: 3739841 - DNA, 25 bp, Homo sapien
caggcccacctcgaaagctgttact

SEQ ID NO: 3739842 - DNA, 25 bp, Homo sapien
tcgaaagctgttactgggcgggacc

SEQ ID NO: 3739843 - DNA, 25 bp, Homo sapien
tctcctctggatgacgttggccgga

SEQ ID NO: 3739844 - DNA, 25 bp, Homo sapien
ttattcaaaggcctttccgggcgca

SEQ ID NO: 3739845 - DNA, 25 bp, Homo sapien
atcctcctggatggcgcagcgcggc

SEQ ID NO: 3739846 - DNA, 25 bp, Homo sapien
ctggatggcgcagcgcggccttttc

SEQ ID NO: 3739847 - DNA, 25 bp, Homo sapien
ttcaaaggcctttccgggcgcagac

SEQ ID NO: 3739848 - DNA, 25 bp, Homo sapien
cagagaaagcctctgattgttctcc

SEQ ID NO: 3739849 - DNA, 25 bp, Homo sapien
tactgagcgtcccatagttggcgag

SEQ ID NO: 3739850 - DNA, 25 bp, Homo sapien
catagttggcgagcatcctgcagag

SEQ ID NO: 3739851 - DNA, 25 bp, Homo sapien
caattattcagtgtatcgtactgag

SEQ ID NO: 3739852 - DNA, 25 bp, Homo sapien
cacttggctttctgtgagtcccgaa

SEQ ID NO: 3739853 - DNA, 25 bp, Homo sapien
tcagcagctagatactggagccgat

SEQ ID NO: 3739854 - DNA, 25 bp, Homo sapien
aaaacgccacgatgccctttctgag

SEQ ID NO: 3739855 - DNA, 25 bp, Homo sapien
tctctctggcaagggaattgcatgc

SEQ ID NO: 3739856 - DNA, 25 bp, Homo sapien
ctgttggctgatttgtatttgatgt

SEQ ID NO: 3739857 - DNA, 25 bp, Homo sapien
gctgatttgtatttgatgtgatgtc

SEQ ID NO: 3739858 - DNA, 25 bp, Homo sapien
tggctgatttgtatttgatgtgatg

SEQ ID NO: 3739859 - DNA, 25 bp, Homo sapien
gttggctgatttgtatttgatgtga

SEQ ID NO: 3739860 - DNA, 25 bp, Homo sapien
acccagccgtgtgaaaagaagaagc

SEQ ID NO: 3739861 - DNA, 25 bp, Homo sapien
taagttcttgcctgactggtcatca

SEQ ID NO: 3739862 - DNA, 25 bp, Homo sapien
tgtagggtctttccccattatggaa

SEQ ID NO: 3739863 - DNA, 25 bp, Homo sapien
ggatgcctccactccaatagcctga

SEQ ID NO: 3739864 - DNA, 25 bp, Homo sapien
tgctatcttgatccaacttaagcct

SEQ ID NO: 3739865 - DNA, 25 bp, Homo sapien
tggccaacttaagccaaagctgtaa

SEQ ID NO: 3739866 - DNA, 25 bp, Homo sapien
taagcctaagaatcgttgctcccca

SEQ ID NO: 3739867 - DNA, 25 bp, Homo sapien
gaattaattaaaagtatggctgttg

SEQ ID NO: 3739868 - DNA, 25 bp, Homo sapien
gctggagtacatgtagtgatgagaa

SEQ ID NO: 3739869 - DNA, 25 bp, Homo sapien
aagcgtgagccacggtgtctggctt

SEQ ID NO: 3739870 - DNA, 25 bp, Homo sapien
gtgatgagaacttggctcaccgcaa

SEQ ID NO: 3739871 - DNA, 25 bp, Homo sapien
caggctggagtacatgtagtgatga

SEQ ID NO: 3739872 - DNA, 25 bp, Homo sapien
tcagagctagggagtgcaaatgttt

SEQ ID NO: 3739873 - DNA, 25 bp, Homo sapien
ttcaggctgtgtgggtaaaatttgc

SEQ ID NO: 3739874 - DNA, 25 bp, Homo sapien
ccttgtgggcagtgtgcatggtata

SEQ ID NO: 3739875 - DNA, 25 bp, Homo sapien
tgcagaagaccgaggtttgctttca

SEQ ID NO: 3739876 - DNA, 25 bp, Homo sapien
cctgggaatcacatataagttcatc

SEQ ID NO: 3739877 - DNA, 25 bp, Homo sapien
ggtggaccacatttgaagtcagcag

SEQ ID NO: 3739878 - DNA, 25 bp, Homo sapien
tacttgagcaaatgttggtggtcca

SEQ ID NO: 3739879 - DNA, 25 bp, Homo sapien
gaagtcagacagtcatacttgtgct

SEQ ID NO: 3739880 - DNA, 25 bp, Homo sapien
taccaaacacagtgagccgggactc

SEQ ID NO: 3739881 - DNA, 25 bp, Homo sapien
gataggcttcgatttcctgtgacac

SEQ ID NO: 3739882 - DNA, 25 bp, Homo sapien
gaaatgtttggaacctttagcacag

SEQ ID NO: 3739883 - DNA, 25 bp, Homo sapien
taaccaagccggatatggtatggca

SEQ ID NO: 3739884 - DNA, 25 bp, Homo sapien
tattttgagggtggctcttacttcc

SEQ ID NO: 3739885 - DNA, 25 bp, Homo sapien
gcacaggctatttgattaggttgca

SEQ ID NO: 3739886 - DNA, 25 bp, Homo sapien
tcagtaaaccttagaggacactagt

SEQ ID NO: 3739887 - DNA, 25 bp, Homo sapien
tacttccctcatttagctgtgcttc

SEQ ID NO: 3739888 - DNA, 25 bp, Homo sapien
cacgtgcatacattgattgggagct

SEQ ID NO: 3739889 - DNA, 25 bp, Homo sapien
gctggcctactattagatagatttg

SEQ ID NO: 3739890 - DNA, 25 bp, Homo sapien
gaaattggtattcacgagtagacta

SEQ ID NO: 3739891 - DNA, 25 bp, Homo sapien
taatatctgacagttgggatgtgac

SEQ ID NO: 3739892 - DNA, 25 bp, Homo sapien
tgaagtatccgtcccgttttgagaa

SEQ ID NO: 3739893 - DNA, 25 bp, Homo sapien
aaatttgtccttcaggccgggcgca

SEQ ID NO: 3739894 - DNA, 25 bp, Homo sapien
gaatctgaggcctactgaagcacat

SEQ ID NO: 3739895 - DNA, 25 bp, Homo sapien
aatgaaacgcctgcttaatagaacg

SEQ ID NO: 3739896 - DNA, 25 bp, Homo sapien
ccgaagccgggactctaggcggctc

SEQ ID NO: 3739897 - DNA, 25 bp, Homo sapien
gaccagggcggcgtggacgcgaagt

SEQ ID NO: 3739898 - DNA, 25 bp, Homo sapien
gagcaggagagactgggccgaagcc

SEQ ID NO: 3739899 - DNA, 25 bp, Homo sapien
cgtggacgcgaagtgcattcctcat

SEQ ID NO: 3739900 - DNA, 25 bp, Homo sapien
catgatggaagacgacgggcagccc

SEQ ID NO: 3739901 - DNA, 25 bp, Homo sapien
tgccaggcgccaagaggcccgggca

SEQ ID NO: 3739902 - DNA, 25 bp, Homo sapien
actctgtgagtacccgagacgaggg

SEQ ID NO: 3739903 - DNA, 25 bp, Homo sapien
cgggcagccccggactctgtgagta

SEQ ID NO: 3739904 - DNA, 25 bp, Homo sapien
ctgagcggtgacctggcgggtcgcg

SEQ ID NO: 3739905 - DNA, 25 bp, Homo sapien
ttgtcccgggatcgctccgtcgcac

SEQ ID NO: 3739906 - DNA, 25 bp, Homo sapien
tcctcctggttggagcgcagtgtcc

SEQ ID NO: 3739907 - DNA, 25 bp, Homo sapien
gggagagagcccgagagcagggttc

SEQ ID NO: 3739908 - DNA, 25 bp, Homo sapien
ggtcgtcgcacgtcctcacgtatga

SEQ ID NO: 3739909 - DNA, 25 bp, Homo sapien
aattcccagagacttcggcttcacg

SEQ ID NO: 3739910 - DNA, 25 bp, Homo sapien
ttttgcccgatctctcccggagctg

SEQ ID NO: 3739911 - DNA, 25 bp, Homo sapien
acgtgatccgtcgtgagcgggtccc

SEQ ID NO: 3739912 - DNA, 25 bp, Homo sapien
agtccgaggacagcccccggcgcga

SEQ ID NO: 3739913 - DNA, 25 bp, Homo sapien
cagtccgaggacagcccccggcgcg

SEQ ID NO: 3739914 - DNA, 25 bp, Homo sapien
aggacagcccccggcgcgaggaact

SEQ ID NO: 3739915 - DNA, 25 bp, Homo sapien
cgaggacagcccccggcgcgaggaa

SEQ ID NO: 3739916 - DNA, 25 bp, Homo sapien
gccacagttgaagaaaccgctctcg

SEQ ID NO: 3739917 - DNA, 25 bp, Homo sapien
gggctggacgaaggcggagcagcag

SEQ ID NO: 3739918 - DNA, 25 bp, Homo sapien
tgaagaaaccgctctcgggctggac

SEQ ID NO: 3739919 - DNA, 25 bp, Homo sapien
agactgggccaacagaagagcctta

SEQ ID NO: 3739920 - DNA, 25 bp, Homo sapien
aagcggcggttgactaacgcgagcc

SEQ ID NO: 3739921 - DNA, 25 bp, Homo sapien
taacgcgagccagccgttctgatga

SEQ ID NO: 3739922 - DNA, 25 bp, Homo sapien
tcttctgactgtcgcgcgaagcggc

SEQ ID NO: 3739923 - DNA, 25 bp, Homo sapien
ctatttgtgggaaatcgagtcccca

SEQ ID NO: 3739924 - DNA, 25 bp, Homo sapien
tcaacaggaaactatcacagcgggc

SEQ ID NO: 3739925 - DNA, 25 bp, Homo sapien
cacagcgggccaggcatgggttaat

SEQ ID NO: 3739926 - DNA, 25 bp, Homo sapien
cttgagataatcttcgcccaaagta

SEQ ID NO: 3739927 - DNA, 25 bp, Homo sapien
gatgtacgtacagaggcagagaaga

SEQ ID NO: 3739928 - DNA, 25 bp, Homo sapien
caggattcagaaagatggttacccc

SEQ ID NO: 3739929 - DNA, 25 bp, Homo sapien
taatggtccaccaaagatttctatg

SEQ ID NO: 3739930 - DNA, 25 bp, Homo sapien
tatgtacatgtggaataaaaccttg

SEQ ID NO: 3739931 - DNA, 25 bp, Homo sapien
ggtgcggtaaactgaataatggtcc

SEQ ID NO: 3739932 - DNA, 25 bp, Homo sapien
gggctataacattttgcagtcctac

SEQ ID NO: 3739933 - DNA, 25 bp, Homo sapien
gcatggatgtaccaccttgtacgac

SEQ ID NO: 3739934 - DNA, 25 bp, Homo sapien
caaagaatgatagttcctgttgctt

SEQ ID NO: 3739935 - DNA, 25 bp, Homo sapien
ttgggtaagtacctaggcattatgt

SEQ ID NO: 3739936 - DNA, 25 bp, Homo sapien
acagggagctgaacgtgggccccat

SEQ ID NO: 3739937 - DNA, 25 bp, Homo sapien
agacatccggtgagactctgagaac

SEQ ID NO: 3739938 - DNA, 25 bp, Homo sapien
gcgcggcagacatccggtgagactc

SEQ ID NO: 3739939 - DNA, 25 bp, Homo sapien
tgagcacctgcagcgcggcagacat

SEQ ID NO: 3739940 - DNA, 25 bp, Homo sapien
tgcagatcgcgaaacacctttgcag

SEQ ID NO: 3739941 - DNA, 25 bp, Homo sapien
cagatcgcgaaacacctttgcaggg

SEQ ID NO: 3739942 - DNA, 25 bp, Homo sapien
gttcctgcagatcgcgaaacacctt

SEQ ID NO: 3739943 - DNA, 25 bp, Homo sapien
cctgcagatcgcgaaacacctttgc

SEQ ID NO: 3739944 - DNA, 25 bp, Homo sapien
cagcacattttcggaaatgaatagc

SEQ ID NO: 3739945 - DNA, 25 bp, Homo sapien
actgtattgatcatgctcgtcttgg

SEQ ID NO: 3739946 - DNA, 25 bp, Homo sapien
cacaagactgtattgatcatgctcg

SEQ ID NO: 3739947 - DNA, 25 bp, Homo sapien
tggccacaagactgtattgatcatg

SEQ ID NO: 3739948 - DNA, 25 bp, Homo sapien
gaataaaagcatttgcttgcacaca

SEQ ID NO: 3739949 - DNA, 25 bp, Homo sapien
tgaataaaagcatttgcttgcacac

SEQ ID NO: 3739950 - DNA, 25 bp, Homo sapien
ctgaataaaagcatttgcttgcaca

SEQ ID NO: 3739951 - DNA, 25 bp, Homo sapien
aataaaagcatttgcttgcacacac

SEQ ID NO: 3739952 - DNA, 25 bp, Homo sapien
cttccaggaacagcatcaaagggta

SEQ ID NO: 3739953 - DNA, 25 bp, Homo sapien
ttgacctgggtctgattataatgct

SEQ ID NO: 3739954 - DNA, 25 bp, Homo sapien
tgacctgggtctgattataatgctt

SEQ ID NO: 3739955 - DNA, 25 bp, Homo sapien
gttgacctgggtctgattataatgc

SEQ ID NO: 3739956 - DNA, 25 bp, Homo sapien
tgtccgagtagatacgtgacaagac

SEQ ID NO: 3739957 - DNA, 25 bp, Homo sapien
tcggttatctgtccgagtagatacg

SEQ ID NO: 3739958 - DNA, 25 bp, Homo sapien
gagtagatacgtgacaagacaggac

SEQ ID NO: 3739959 - DNA, 25 bp, Homo sapien
tatctgtccgagtagatacgtgaca

SEQ ID NO: 3739960 - DNA, 25 bp, Homo sapien
cctggtcttagagtggatccttgga

SEQ ID NO: 3739961 - DNA, 25 bp, Homo sapien
gatgaaccatcaggctctgctttta

SEQ ID NO: 3739962 - DNA, 25 bp, Homo sapien
gcccatgttttggaccatgtgaacc

SEQ ID NO: 3739963 - DNA, 25 bp, Homo sapien
tagcaagactgtcctgaccacagcc

SEQ ID NO: 3739964 - DNA, 25 bp, Homo sapien
ccgcctcagggcaccgtatttattg

SEQ ID NO: 3739965 - DNA, 25 bp, Homo sapien
tcagtgagcacgaagcagttctcca

SEQ ID NO: 3739966 - DNA, 25 bp, Homo sapien
tattgggcgcatcgtagacaacatc

SEQ ID NO: 3739967 - DNA, 25 bp, Homo sapien
tacggaccagcttgctattgggcgc

SEQ ID NO: 3739968 - DNA, 25 bp, Homo sapien
gtcccagccttgaagcgacgcatgc

SEQ ID NO: 3739969 - DNA, 25 bp, Homo sapien
aagcgacgcatgcaagaagcttgcc

SEQ ID NO: 3739970 - DNA, 25 bp, Homo sapien
atagacatgggcttggccacactgt

SEQ ID NO: 3739971 - DNA, 25 bp, Homo sapien
cttgccccctggcacatagacatgg

SEQ ID NO: 3739972 - DNA, 25 bp, Homo sapien
aaaataagcaaacgttagctgggcg

SEQ ID NO: 3739973 - DNA, 25 bp, Homo sapien
tttaggtgagtcctagctgagcagc

SEQ ID NO: 3739974 - DNA, 25 bp, Homo sapien
gaagcacaggcttttattaaaccca

SEQ ID NO: 3739975 - DNA, 25 bp, Homo sapien
ccattgcatggttgaggaaataggc

SEQ ID NO: 3739976 - DNA, 25 bp, Homo sapien
ccaatggaatgattctcacttgtaa

SEQ ID NO: 3739977 - DNA, 25 bp, Homo sapien
ccagtgatgatcaggccccagggac

SEQ ID NO: 3739978 - DNA, 25 bp, Homo sapien
aaaagtatgcttatccgctttggag

SEQ ID NO: 3739979 - DNA, 25 bp, Homo sapien
cgctttggagtccagtaactccagt

SEQ ID NO: 3739980 - DNA, 25 bp, Homo sapien
agataaagggaggtagcaactggcc

SEQ ID NO: 3739981 - DNA, 25 bp, Homo sapien
gaggtagcaactggccggctagaaa

SEQ ID NO: 3739982 - DNA, 25 bp, Homo sapien
cccggggttggatgcggagctccgc

SEQ ID NO: 3739983 - DNA, 25 bp, Homo sapien
tggccggctagaaacttctggtcca

SEQ ID NO: 3739984 - DNA, 25 bp, Homo sapien
tccgccgccgacgtgtccgggaagc

SEQ ID NO: 3739985 - DNA, 25 bp, Homo sapien
tccgggcgccgagtctctggccggg

SEQ ID NO: 3739986 - DNA, 25 bp, Homo sapien
ccggcgccgggcacctttatgaatt

SEQ ID NO: 3739987 - DNA, 25 bp, Homo sapien
gcgccgggcacctttatgaattaaa

SEQ ID NO: 3739988 - DNA, 25 bp, Homo sapien
atgggcgagtgggtggcggcgctca

SEQ ID NO: 3739989 - DNA, 25 bp, Homo sapien
tgggcgagtgggtggcggcgctcat

SEQ ID NO: 3739990 - DNA, 25 bp, Homo sapien
catgggcgagtgggtggcggcgctc

SEQ ID NO: 3739991 - DNA, 25 bp, Homo sapien
caaagggtcgcggtcaccgttgccg

SEQ ID NO: 3739992 - DNA, 25 bp, Homo sapien
gccagccggtctgcgggtcgatctt

SEQ ID NO: 3739993 - DNA, 25 bp, Homo sapien
ggtcgatcttgatctcccatccggg

SEQ ID NO: 3739994 - DNA, 25 bp, Homo sapien
ttccacgtagtggtgcggctgttgt

SEQ ID NO: 3739995 - DNA, 25 bp, Homo sapien
agccgtggacggcaccggagccact

SEQ ID NO: 3739996 - DNA, 25 bp, Homo sapien
agccactgcggggtcgcttcccggg

SEQ ID NO: 3739997 - DNA, 25 bp, Homo sapien
cggccttccgccctggagtcgagcc

SEQ ID NO: 3739998 - DNA, 25 bp, Homo sapien
tccgccctggagtcgagccgtggac

SEQ ID NO: 3739999 - DNA, 25 bp, Homo sapien
tggagaacttgagcggtaaaattcc

SEQ ID NO: 3740000 - DNA, 25 bp, Homo sapien
aaaaccaccatccaagcttgcgagt

SEQ ID NO: 3740001 - DNA, 25 bp, Homo sapien
agagcgcgaggccagcgctggacac

SEQ ID NO: 3740002 - DNA, 25 bp, Homo sapien
cctctcccagccctagagcgcgagg

SEQ ID NO: 3740003 - DNA, 25 bp, Homo sapien
caaaataatagttgtaaaccacact

SEQ ID NO: 3740004 - DNA, 25 bp, Homo sapien
gaaggcttcaaaataatagttgtaa

SEQ ID NO: 3740005 - DNA, 25 bp, Homo sapien
gaagaaggcttcaaaataatagttg

SEQ ID NO: 3740006 - DNA, 25 bp, Homo sapien
tagttgtaaaccacactaaagatca

SEQ ID NO: 3740007 - DNA, 25 bp, Homo sapien
tgttctcggaggtgcagtcggttct

SEQ ID NO: 3740008 - DNA, 25 bp, Homo sapien
ctggaaatacgaaggagagaacggc

SEQ ID NO: 3740009 - DNA, 25 bp, Homo sapien
ttcatgcagtcgcacaggaacttgc

SEQ ID NO: 3740010 - DNA, 25 bp, Homo sapien
gacagcactaagcaagcctcatggg

SEQ ID NO: 3740011 - DNA, 25 bp, Homo sapien
cttcatcgaaatacgtgacgactta

SEQ ID NO: 3740012 - DNA, 25 bp, Homo sapien
tcatcgaaatacgtgacgacttagt

SEQ ID NO: 3740013 - DNA, 25 bp, Homo sapien
atacgtgacgacttagtaacaccag

SEQ ID NO: 3740014 - DNA, 25 bp, Homo sapien
gaaatacgtgacgacttagtaacac

SEQ ID NO: 3740015 - DNA, 25 bp, Homo sapien
ctgcatccttcacgggcagctcttc

SEQ ID NO: 3740016 - DNA, 25 bp, Homo sapien
tgggcaggcccatgttctacccttc

SEQ ID NO: 3740017 - DNA, 25 bp, Homo sapien
tcttctgtatctgccttcgcgctct

SEQ ID NO: 3740018 - DNA, 25 bp, Homo sapien
tgtatctgccttcgcgctctgggca

SEQ ID NO: 3740019 - DNA, 25 bp, Homo sapien
taacatccatgtgtcactaacgtct

SEQ ID NO: 3740020 - DNA, 25 bp, Homo sapien
agccacgctcggctgaggctcagac

SEQ ID NO: 3740021 - DNA, 25 bp, Homo sapien
gtcactaacgtctccaaaaccttca

SEQ ID NO: 3740022 - DNA, 25 bp, Homo sapien
aaaggcttccatttcgcccagccac

SEQ ID NO: 3740023 - DNA, 25 bp, Homo sapien
aggcccacggacagccaggacagtc

SEQ ID NO: 3740024 - DNA, 25 bp, Homo sapien
ctgaaaggcccacggacagccagga

SEQ ID NO: 3740025 - DNA, 25 bp, Homo sapien
caggacagtctgctgtgtggagagg

SEQ ID NO: 3740026 - DNA, 25 bp, Homo sapien
ccacggacagccaggacagtctgct

SEQ ID NO: 3740027 - DNA, 25 bp, Homo sapien
catacaagggggataagaggaggcc

SEQ ID NO: 3740028 - DNA, 25 bp, Homo sapien
cactggtcgggggagtcagctacac

SEQ ID NO: 3740029 - DNA, 25 bp, Homo sapien
tcgggggagtcagctacactccata

SEQ ID NO: 3740030 - DNA, 25 bp, Homo sapien
gagtcagctacactccatacaaggg

SEQ ID NO: 3740031 - DNA, 25 bp, Homo sapien
tcaagcattcggtccacagcagcca

SEQ ID NO: 3740032 - DNA, 25 bp, Homo sapien
catctgcggtgacatttacacccct

SEQ ID NO: 3740033 - DNA, 25 bp, Homo sapien
gtggcttctcaagcattcggtccac

SEQ ID NO: 3740034 - DNA, 25 bp, Homo sapien
cttccatctgcggtgacatttacac

SEQ ID NO: 3740035 - DNA, 25 bp, Homo sapien
cctgggagcagaacatctgctggcg

SEQ ID NO: 3740036 - DNA, 25 bp, Homo sapien
gggcacagaagggtccgcctgggag

SEQ ID NO: 3740037 - DNA, 25 bp, Homo sapien
acacgtcagccgtctccaggccagg

SEQ ID NO: 3740038 - DNA, 25 bp, Homo sapien
tgggggcacctgagtcagcatccag

SEQ ID NO: 3740039 - DNA, 25 bp, Homo sapien
ggcgcccagccgcactgactgtggt

SEQ ID NO: 3740040 - DNA, 25 bp, Homo sapien
tgtggttccttgacacatctccctg

SEQ ID NO: 3740041 - DNA, 25 bp, Homo sapien
gttccttgacacatctccctgaggc

SEQ ID NO: 3740042 - DNA, 25 bp, Homo sapien
tggttccttgacacatctccctgag

SEQ ID NO: 3740043 - DNA, 25 bp, Homo sapien
agctgctctgtgccctaaacaattg

SEQ ID NO: 3740044 - DNA, 25 bp, Homo sapien
ctgctctgtgccctaaacaattggg

SEQ ID NO: 3740045 - DNA, 25 bp, Homo sapien
gctctgtgccctaaacaattgggtt

SEQ ID NO: 3740046 - DNA, 25 bp, Homo sapien
catatttcccaggggtttttgcaag

SEQ ID NO: 3740047 - DNA, 25 bp, Homo sapien
ccagccacgcacaaaagcctcaacc

SEQ ID NO: 3740048 - DNA, 25 bp, Homo sapien
ttcccagccacgcacaaaagcctca

SEQ ID NO: 3740049 - DNA, 25 bp, Homo sapien
agccacgcacaaaagcctcaaccat

SEQ ID NO: 3740050 - DNA, 25 bp, Homo sapien
tcttcccagccacgcacaaaagcct

SEQ ID NO: 3740051 - DNA, 25 bp, Homo sapien
tccagccgaaatcggagcctgcatt

SEQ ID NO: 3740052 - DNA, 25 bp, Homo sapien
agccgaaatcggagcctgcattagt

SEQ ID NO: 3740053 - DNA, 25 bp, Homo sapien
cttccagccgaaatcggagcctgca

SEQ ID NO: 3740054 - DNA, 25 bp, Homo sapien
tccttccagccgaaatcggagcctg

SEQ ID NO: 3740055 - DNA, 25 bp, Homo sapien
tgccggttctcagcgccttcatgga

SEQ ID NO: 3740056 - DNA, 25 bp, Homo sapien
ggaatgggaatgtagcctggtcgga

SEQ ID NO: 3740057 - DNA, 25 bp, Homo sapien
ttccctagcaggcggcagcctagag

SEQ ID NO: 3740058 - DNA, 25 bp, Homo sapien
cagcctagagccctcccgggaaggg

SEQ ID NO: 3740059 - DNA, 25 bp, Homo sapien
ctggggatagacatggaaagggtgc

SEQ ID NO: 3740060 - DNA, 25 bp, Homo sapien
ggggatagacatggaaagggtgcac

SEQ ID NO: 3740061 - DNA, 25 bp, Homo sapien
tggggatagacatggaaagggtgca

SEQ ID NO: 3740062 - DNA, 25 bp, Homo sapien
tcagttcggaatcgctgcatcccag

SEQ ID NO: 3740063 - DNA, 25 bp, Homo sapien
tgctgccgcctcagttcggaatcgc

SEQ ID NO: 3740064 - DNA, 25 bp, Homo sapien
ggctgagtggtttctggcatgcccc

SEQ ID NO: 3740065 - DNA, 25 bp, Homo sapien
acctgtccacactgtttatctggct

SEQ ID NO: 3740066 - DNA, 25 bp, Homo sapien
catgaccccacaaatgactcccctg

SEQ ID NO: 3740067 - DNA, 25 bp, Homo sapien
ctcagggcaatccatattgtaagac

SEQ ID NO: 3740068 - DNA, 25 bp, Homo sapien
tcctgaccacgccttctgctgtgca

SEQ ID NO: 3740069 - DNA, 25 bp, Homo sapien
aatccatattgtaagacctcctatc

SEQ ID NO: 3740070 - DNA, 25 bp, Homo sapien
tatcaccggaatggagatgtacccc

SEQ ID NO: 3740071 - DNA, 25 bp, Homo sapien
ccctgctgcgctgggtagtgcgtct

SEQ ID NO: 3740072 - DNA, 25 bp, Homo sapien
aacgttctgctcgtgtatcaccgga

SEQ ID NO: 3740073 - DNA, 25 bp, Homo sapien
tgtcgaccacggtgtgcacacggat

SEQ ID NO: 3740074 - DNA, 25 bp, Homo sapien
taaccagtctgctgacgactaactt

SEQ ID NO: 3740075 - DNA, 25 bp, Homo sapien
tctgctgacgactaacttcccgtac

SEQ ID NO: 3740076 - DNA, 25 bp, Homo sapien
gacataccaccataaccagtctgct

SEQ ID NO: 3740077 - DNA, 25 bp, Homo sapien
acataccaccataaccagtctgctg

SEQ ID NO: 3740078 - DNA, 25 bp, Homo sapien
tatgtaacccaatcattagtcaggc

SEQ ID NO: 3740079 - DNA, 25 bp, Homo sapien
cattgatcaccccaggctatttgtc

SEQ ID NO: 3740080 - DNA, 25 bp, Homo sapien
tatttgtctattacctctcactgaa

SEQ ID NO: 3740081 - DNA, 25 bp, Homo sapien
cacagaaattgtttgtagctagtac

SEQ ID NO: 3740082 - DNA, 25 bp, Homo sapien
tctgggaaacaggtttagaatccac

SEQ ID NO: 3740083 - DNA, 25 bp, Homo sapien
cacttgaattgggatgtgtccagga

SEQ ID NO: 3740084 - DNA, 25 bp, Homo sapien
aggtgcagtttctcgatgggtcatg

SEQ ID NO: 3740085 - DNA, 25 bp, Homo sapien
tctggtccaactgggcctggcttac

SEQ ID NO: 3740086 - DNA, 25 bp, Homo sapien
gagcagggggaactttcacctctac

SEQ ID NO: 3740087 - DNA, 25 bp, Homo sapien
ttgctgggctggagttcatagacct

SEQ ID NO: 3740088 - DNA, 25 bp, Homo sapien
catagacctggacttgacctgggac

SEQ ID NO: 3740089 - DNA, 25 bp, Homo sapien
ttcaaagttgtctacagcctgctcc

SEQ ID NO: 3740090 - DNA, 25 bp, Homo sapien
ggtcaaatactcttcgatcatcagg

SEQ ID NO: 3740091 - DNA, 25 bp, Homo sapien
aaaattccctaaagcacacatcggt

SEQ ID NO: 3740092 - DNA, 25 bp, Homo sapien
ccgagtctgatttttacagggcaga

SEQ ID NO: 3740093 - DNA, 25 bp, Homo sapien
tccacccaagttactgcataccaag

SEQ ID NO: 3740094 - DNA, 25 bp, Homo sapien
taccaagcagctaataaaaaccaac

SEQ ID NO: 3740095 - DNA, 25 bp, Homo sapien
atttgtacagagtaagaatatagaa

SEQ ID NO: 3740096 - DNA, 25 bp, Homo sapien
tgtacagagtaagaatatagaagaa

SEQ ID NO: 3740097 - DNA, 25 bp, Homo sapien
agcaacttctttatttgtacagagt

SEQ ID NO: 3740098 - DNA, 25 bp, Homo sapien
gcaacttctttatttgtacagagta

SEQ ID NO: 3740099 - DNA, 25 bp, Homo sapien
tagcattaaagtcatccaacataca

SEQ ID NO: 3740100 - DNA, 25 bp, Homo sapien
tccagagctacaaaagacagtgcac

SEQ ID NO: 3740101 - DNA, 25 bp, Homo sapien
tttatgtgatgggtaattgactccc

SEQ ID NO: 3740102 - DNA, 25 bp, Homo sapien
tgcacaaccacagctaacaggtggt

SEQ ID NO: 3740103 - DNA, 25 bp, Homo sapien
ttggctgggtcggtccgaacggatg

SEQ ID NO: 3740104 - DNA, 25 bp, Homo sapien
cggtccgaacggatgcagcaggcat

SEQ ID NO: 3740105 - DNA, 25 bp, Homo sapien
ggtcggtccgaacggatgcagcagg

SEQ ID NO: 3740106 - DNA, 25 bp, Homo sapien
tgggtcggtccgaacggatgcagca

SEQ ID NO: 3740107 - DNA, 25 bp, Homo sapien
tgtgtaagggcaccggaatcaccaa

SEQ ID NO: 3740108 - DNA, 25 bp, Homo sapien
caccggaatcaccaagggtgggtgt

SEQ ID NO: 3740109 - DNA, 25 bp, Homo sapien
aagggcaccggaatcaccaagggtg

SEQ ID NO: 3740110 - DNA, 25 bp, Homo sapien
ggatgtgtaagggcaccggaatcac

SEQ ID NO: 3740111 - DNA, 25 bp, Homo sapien
ggttcttacagctgctcctcagacc

SEQ ID NO: 3740112 - DNA, 25 bp, Homo sapien
cggttcttacagctgctcctcagac

SEQ ID NO: 3740113 - DNA, 25 bp, Homo sapien
gctcgatccggcacttttggatccg

SEQ ID NO: 3740114 - DNA, 25 bp, Homo sapien
gatccggcacttttggatccgtttc

SEQ ID NO: 3740115 - DNA, 25 bp, Homo sapien
agagctccaagctcgatccggcact

SEQ ID NO: 3740116 - DNA, 25 bp, Homo sapien
tccaagctcgatccggcacttttgg

SEQ ID NO: 3740117 - DNA, 25 bp, Homo sapien
ccctgtaggcatagataagtttggc

SEQ ID NO: 3740118 - DNA, 25 bp, Homo sapien
gataagtttggcattcaggagaaag

SEQ ID NO: 3740119 - DNA, 25 bp, Homo sapien
ctgtgtgccctgtaggcatagataa

SEQ ID NO: 3740120 - DNA, 25 bp, Homo sapien
taggcatagataagtttggcattca

SEQ ID NO: 3740121 - DNA, 25 bp, Homo sapien
cctgagagagcaggacaggatttcc

SEQ ID NO: 3740122 - DNA, 25 bp, Homo sapien
tgctccctgagagagcaggacagga

SEQ ID NO: 3740123 - DNA, 25 bp, Homo sapien
cgtcaggaactgctccctgagagag

SEQ ID NO: 3740124 - DNA, 25 bp, Homo sapien
ggaactgctccctgagagagcagga

SEQ ID NO: 3740125 - DNA, 25 bp, Homo sapien
gacatcctgtgctcgtttcctttac

SEQ ID NO: 3740126 - DNA, 25 bp, Homo sapien
agaagtgattcttcaggtgagtcat

SEQ ID NO: 3740127 - DNA, 25 bp, Homo sapien
cagctgagataaacgccgaccagac

SEQ ID NO: 3740128 - DNA, 25 bp, Homo sapien
tgtcactggtattgtgaggaatacg

SEQ ID NO: 3740129 - DNA, 25 bp, Homo sapien
gaaatactgcagtctcatacgagga

SEQ ID NO: 3740130 - DNA, 25 bp, Homo sapien
tgttaacattatttcgatcctggtc

SEQ ID NO: 3740131 - DNA, 25 bp, Homo sapien
atactgcagtctcatacgaggaagc

SEQ ID NO: 3740132 - DNA, 25 bp, Homo sapien
gtgaaatactgcagtctcatacgag

SEQ ID NO: 3740133 - DNA, 25 bp, Homo sapien
ttctgatcattactgccaccaggaa

SEQ ID NO: 3740134 - DNA, 25 bp, Homo sapien
gctctagtcccccaagcatgaaaga

SEQ ID NO: 3740135 - DNA, 25 bp, Homo sapien
catgaaagaagttgggtactcccgg

SEQ ID NO: 3740136 - DNA, 25 bp, Homo sapien
tgggtactcccggttctgatcatta

SEQ ID NO: 3740137 - DNA, 25 bp, Homo sapien
ccttagcatgagactgctgggagct

SEQ ID NO: 3740138 - DNA, 25 bp, Homo sapien
gaagttgaaagctggcggcgactac

SEQ ID NO: 3740139 - DNA, 25 bp, Homo sapien
ccttggcggctcaccttcagatagg

SEQ ID NO: 3740140 - DNA, 25 bp, Homo sapien
tagctgctccggataggaggactga

SEQ ID NO: 3740141 - DNA, 25 bp, Homo sapien
tcttctgtatcctggagtacttctt

SEQ ID NO: 3740142 - DNA, 25 bp, Homo sapien
taatccaggtaggacaggctcctct

SEQ ID NO: 3740143 - DNA, 25 bp, Homo sapien
caggctcctcttctgtatcctggag

SEQ ID NO: 3740144 - DNA, 25 bp, Homo sapien
tgtgtaatccaggtaggacaggctc

SEQ ID NO: 3740145 - DNA, 25 bp, Homo sapien
tacaacagcccctcgtaacctaaca

SEQ ID NO: 3740146 - DNA, 25 bp, Homo sapien
ggcatacaacagcccctcgtaacct

SEQ ID NO: 3740147 - DNA, 25 bp, Homo sapien
cagcccctcgtaacctaacaggcat

SEQ ID NO: 3740148 - DNA, 25 bp, Homo sapien
caacagcccctcgtaacctaacagg

SEQ ID NO: 3740149 - DNA, 25 bp, Homo sapien
agcagatacagaaagtcggaacgga

SEQ ID NO: 3740150 - DNA, 25 bp, Homo sapien
gcaggtgaacgaggccatgtgggag

SEQ ID NO: 3740151 - DNA, 25 bp, Homo sapien
acggattcgtgtagagcaggtgaac

SEQ ID NO: 3740152 - DNA, 25 bp, Homo sapien
caattatccttcagcatcttgggta

SEQ ID NO: 3740153 - DNA, 25 bp, Homo sapien
catggcttaaacctagacctaaggg

SEQ ID NO: 3740154 - DNA, 25 bp, Homo sapien
agctctagtaaaagctggatttgaa

SEQ ID NO: 3740155 - DNA, 25 bp, Homo sapien
tttgaacatggcttaaacctagacc

SEQ ID NO: 3740156 - DNA, 25 bp, Homo sapien
cttgacgcaaagctctagtaaaagc

SEQ ID NO: 3740157 - DNA, 25 bp, Homo sapien
tctttgttcttagaattgtcctttg

SEQ ID NO: 3740158 - DNA, 25 bp, Homo sapien
ttttatcaccttctttgttcttaga

SEQ ID NO: 3740159 - DNA, 25 bp, Homo sapien
ttgttcttagaattgtcctttgccc

SEQ ID NO: 3740160 - DNA, 25 bp, Homo sapien
tttctgctgttctgaattattttta

SEQ ID NO: 3740161 - DNA, 25 bp, Homo sapien
acttgtcctgaaatggagtgttttg

SEQ ID NO: 3740162 - DNA, 25 bp, Homo sapien
ttgtcctgaaatggagtgttttgtt

SEQ ID NO: 3740163 - DNA, 25 bp, Homo sapien
cttgtcctgaaatggagtgttttgt

SEQ ID NO: 3740164 - DNA, 25 bp, Homo sapien
aacttgtcctgaaatggagtgtttt

SEQ ID NO: 3740165 - DNA, 25 bp, Homo sapien
gctgtagtggtagggattgtgggat

SEQ ID NO: 3740166 - DNA, 25 bp, Homo sapien
caaggtagggtttaggagatttcat

SEQ ID NO: 3740167 - DNA, 25 bp, Homo sapien
gagatagaaggcaggttccaacctg

SEQ ID NO: 3740168 - DNA, 25 bp, Homo sapien
actccagagccatcagagctgtagt

SEQ ID NO: 3740169 - DNA, 25 bp, Homo sapien
tcattctcccgtgtccttttagccg

SEQ ID NO: 3740170 - DNA, 25 bp, Homo sapien
cttctacatcccaggaggatctgtg

SEQ ID NO: 3740171 - DNA, 25 bp, Homo sapien
tctgtgcctgttcgttgtcttctct

SEQ ID NO: 3740172 - DNA, 25 bp, Homo sapien
ctctgtgatcattctcccgtgtcct

SEQ ID NO: 3740173 - DNA, 25 bp, Homo sapien
aaagtctgccggctggtctctggac

SEQ ID NO: 3740174 - DNA, 25 bp, Homo sapien
attcaaagtctgccggctggtctct

SEQ ID NO: 3740175 - DNA, 25 bp, Homo sapien
tgccggctggtctctggacttttct

SEQ ID NO: 3740176 - DNA, 25 bp, Homo sapien
tctgccggctggtctctggactttt

SEQ ID NO: 3740177 - DNA, 25 bp, Homo sapien
gaacaaaatgtggcctgtaaacaat

SEQ ID NO: 3740178 - DNA, 25 bp, Homo sapien
tgtggcctgtaaacaatttgatgca

SEQ ID NO: 3740179 - DNA, 25 bp, Homo sapien
ctgtaaacaatttgatgcagggtcc

SEQ ID NO: 3740180 - DNA, 25 bp, Homo sapien
aaacaatttgatgcagggtccgtac

SEQ ID NO: 3740181 - DNA, 25 bp, Homo sapien
aaatctgaccaaaccacttagggct

SEQ ID NO: 3740182 - DNA, 25 bp, Homo sapien
tttgttgtgaaatctgaccaaacca

SEQ ID NO: 3740183 - DNA, 25 bp, Homo sapien
ttagggctatttccctggcaaggcc

SEQ ID NO: 3740184 - DNA, 25 bp, Homo sapien
acttagggctatttccctggcaagg

SEQ ID NO: 3740185 - DNA, 25 bp, Homo sapien
ttatctgaccccaatgcacactgct

SEQ ID NO: 3740186 - DNA, 25 bp, Homo sapien
tagatccatggttccaaccctggct

SEQ ID NO: 3740187 - DNA, 25 bp, Homo sapien
tactatgcagtcaggcttgaacacc

SEQ ID NO: 3740188 - DNA, 25 bp, Homo sapien
tatcaatgcttggaccttagaccaa

SEQ ID NO: 3740189 - DNA, 25 bp, Homo sapien
aaagcaggaaggagttccacatgac

SEQ ID NO: 3740190 - DNA, 25 bp, Homo sapien
ccatagcacagaaagtccaatgata

SEQ ID NO: 3740191 - DNA, 25 bp, Homo sapien
caatgataacaaagcgtcctggaat

SEQ ID NO: 3740192 - DNA, 25 bp, Homo sapien
ttttctaagtaccatgcctctgtgc

SEQ ID NO: 3740193 - DNA, 25 bp, Homo sapien
gcacggggcgtcctagtcggtcgag

SEQ ID NO: 3740194 - DNA, 25 bp, Homo sapien
cgggtaggaaccgcgccgagaagca

SEQ ID NO: 3740195 - DNA, 25 bp, Homo sapien
gtaggaggagaacgcgccccggcag

SEQ ID NO: 3740196 - DNA, 25 bp, Homo sapien
aaccgcgccgagaagcagcggcaga

SEQ ID NO: 3740197 - DNA, 25 bp, Homo sapien
ctggaggccgccgtcgcggcggctg

SEQ ID NO: 3740198 - DNA, 25 bp, Homo sapien
cggctgcaccacagcgcgcgctcgc

SEQ ID NO: 3740199 - DNA, 25 bp, Homo sapien
gctccagatcggaattcgaacccag

SEQ ID NO: 3740200 - DNA, 25 bp, Homo sapien
gaagaggcctttacggccaggtgca

SEQ ID NO: 3740201 - DNA, 25 bp, Homo sapien
ggtgcaccttgctggaactttctgc

SEQ ID NO: 3740202 - DNA, 25 bp, Homo sapien
tggcgaaggccatgtaagaactact

SEQ ID NO: 3740203 - DNA, 25 bp, Homo sapien
gagataatgctacatcagatagaaa

SEQ ID NO: 3740204 - DNA, 25 bp, Homo sapien
aatgagataatgctacatcagatag

SEQ ID NO: 3740205 - DNA, 25 bp, Homo sapien
agtgcaggtgtacctttcctcatat

SEQ ID NO: 3740206 - DNA, 25 bp, Homo sapien
aaatataacacaagtgcaggtgtac

SEQ ID NO: 3740207 - DNA, 25 bp, Homo sapien
ttgctgcttaaactatagaaggtag

SEQ ID NO: 3740208 - DNA, 25 bp, Homo sapien
caggttccccatagaccaagctgtc

SEQ ID NO: 3740209 - DNA, 25 bp, Homo sapien
caattcattcagtacaactttcaca

SEQ ID NO: 3740210 - DNA, 25 bp, Homo sapien
tagaccagggactagaattatttca

SEQ ID NO: 3740211 - DNA, 25 bp, Homo sapien
agctgctgaagcctataggcacttt

SEQ ID NO: 3740212 - DNA, 25 bp, Homo sapien
ctccctcagcccaagaacaagcctg

SEQ ID NO: 3740213 - DNA, 25 bp, Homo sapien
ctgaagcctataggcactttcactg

SEQ ID NO: 3740214 - DNA, 25 bp, Homo sapien
aaggcactccctcagcccaagaaca

SEQ ID NO: 3740215 - DNA, 25 bp, Homo sapien
tgaattttcccaataacaccttcta

SEQ ID NO: 3740216 - DNA, 25 bp, Homo sapien
tagccaatctgacccagggcaagag

SEQ ID NO: 3740217 - DNA, 25 bp, Homo sapien
ctagccaatctgacccagggcaaga

SEQ ID NO: 3740218 - DNA, 25 bp, Homo sapien
acccagggcaagagctttaatcggg

SEQ ID NO: 3740219 - DNA, 25 bp, Homo sapien
aagagctttaatcgggggcagggag

SEQ ID NO: 3740220 - DNA, 25 bp, Homo sapien
gaggctgccgtatttgatgtcaaac

SEQ ID NO: 3740221 - DNA, 25 bp, Homo sapien
gatccaccttagacctctactagct

SEQ ID NO: 3740222 - DNA, 25 bp, Homo sapien
ctcccaagaggctgccgtatttgat

SEQ ID NO: 3740223 - DNA, 25 bp, Homo sapien
ggcaacctggtcgtctcccctccca

SEQ ID NO: 3740224 - DNA, 25 bp, Homo sapien
tttctgccgaattagaataagccac

SEQ ID NO: 3740225 - DNA, 25 bp, Homo sapien
gacctcatggtctcctgggagtttg

SEQ ID NO: 3740226 - DNA, 25 bp, Homo sapien
ggagtttgcccaccaatgctttctg

SEQ ID NO: 3740227 - DNA, 25 bp, Homo sapien
tccatttcagaaagtgagagcacag

SEQ ID NO: 3740228 - DNA, 25 bp, Homo sapien
agcagccctgcctttatgtgtcttc

SEQ ID NO: 3740229 - DNA, 25 bp, Homo sapien
aatgtaagtttctggtctactgaac

SEQ ID NO: 3740230 - DNA, 25 bp, Homo sapien
gacaagagttccactactaagttgg

SEQ ID NO: 3740231 - DNA, 25 bp, Homo sapien
tggaaacagaaggtggcttcccagg

SEQ ID NO: 3740232 - DNA, 25 bp, Homo sapien
taacagctcccctcatgatctaggg

SEQ ID NO: 3740233 - DNA, 25 bp, Homo sapien
tctagggagttccacctgagcacca

SEQ ID NO: 3740234 - DNA, 25 bp, Homo sapien
tcaagtgctaagcatggccccagga

SEQ ID NO: 3740235 - DNA, 25 bp, Homo sapien
cacacaggagatgttctatgcagga

SEQ ID NO: 3740236 - DNA, 25 bp, Homo sapien
ctccagtgccttagcagtagctgcc

SEQ ID NO: 3740237 - DNA, 25 bp, Homo sapien
gcagtagctgccattggagctttca

SEQ ID NO: 3740238 - DNA, 25 bp, Homo sapien
gctgccattggagctttcacgacca

SEQ ID NO: 3740239 - DNA, 25 bp, Homo sapien
tgccttagcagtagctgccattgga

SEQ ID NO: 3740240 - DNA, 25 bp, Homo sapien
tgatcgtttccgtcagcacacaggc

SEQ ID NO: 3740241 - DNA, 25 bp, Homo sapien
aattttcatgtgcaatgggatctcc

SEQ ID NO: 3740242 - DNA, 25 bp, Homo sapien
gctgctcctgccctaccattaaaga

SEQ ID NO: 3740243 - DNA, 25 bp, Homo sapien
caagcttatggacatggcatccctc

SEQ ID NO: 3740244 - DNA, 25 bp, Homo sapien
cggagattagttaaacttgaagaag

SEQ ID NO: 3740245 - DNA, 25 bp, Homo sapien
gagattagttaaacttgaagaagca

SEQ ID NO: 3740246 - DNA, 25 bp, Homo sapien
tccggagattagttaaacttgaaga

SEQ ID NO: 3740247 - DNA, 25 bp, Homo sapien
gattagttaaacttgaagaagcagt

SEQ ID NO: 3740248 - DNA, 25 bp, Homo sapien
aggagcagacacattggatttaata

SEQ ID NO: 3740249 - DNA, 25 bp, Homo sapien
tgttaataccaaaatgatgcttctt

SEQ ID NO: 3740250 - DNA, 25 bp, Homo sapien
cacattggatttaatatgcgtaaag

SEQ ID NO: 3740251 - DNA, 25 bp, Homo sapien
ttaatatgcgtaaaggtcttcagta

SEQ ID NO: 3740252 - DNA, 25 bp, Homo sapien
ggtcataggtcaagctataataaaa

SEQ ID NO: 3740253 - DNA, 25 bp, Homo sapien
tgctctgcctctgcacggaattggt

SEQ ID NO: 3740254 - DNA, 25 bp, Homo sapien
aactcttcaagtaatctcctctcca

SEQ ID NO: 3740255 - DNA, 25 bp, Homo sapien
ggattctgagtccatgaacatcttc

SEQ ID NO: 3740256 - DNA, 25 bp, Homo sapien
cttcccaagtgcaaaccctgctcta

SEQ ID NO: 3740257 - DNA, 25 bp, Homo sapien
ctgctctacgagctgtgagtggtac

SEQ ID NO: 3740258 - DNA, 25 bp, Homo sapien
gtgcaaaccctgctctacgagctgt

SEQ ID NO: 3740259 - DNA, 25 bp, Homo sapien
accctgctctacgagctgtgagtgg

SEQ ID NO: 3740260 - DNA, 25 bp, Homo sapien
aaaaggtgcaggaacaatagttcag

SEQ ID NO: 3740261 - DNA, 25 bp, Homo sapien
ggtgcaggaacaatagttcagaaac

SEQ ID NO: 3740262 - DNA, 25 bp, Homo sapien
gcaggaacaatagttcagaaacaca

SEQ ID NO: 3740263 - DNA, 25 bp, Homo sapien
ggaacaatagttcagaaacacatta

SEQ ID NO: 3740264 - DNA, 25 bp, Homo sapien
tattccaaaaaaatcggtcatcaac

SEQ ID NO: 3740265 - DNA, 25 bp, Homo sapien
ttgaggccaggagtctgagaccagc

SEQ ID NO: 3740266 - DNA, 25 bp, Homo sapien
gaggctgaggtgggctattcacttg

SEQ ID NO: 3740267 - DNA, 25 bp, Homo sapien
ctgaggtgggctattcacttgaggc

SEQ ID NO: 3740268 - DNA, 25 bp, Homo sapien
cacttgaggccaggagtctgagacc

SEQ ID NO: 3740269 - DNA, 25 bp, Homo sapien
cctacttcggcgtgaaatgagagcc

SEQ ID NO: 3740270 - DNA, 25 bp, Homo sapien
cactagaaatcgtgggtgaatatca

SEQ ID NO: 3740271 - DNA, 25 bp, Homo sapien
gggctgcttttctcatcatcagatg

SEQ ID NO: 3740272 - DNA, 25 bp, Homo sapien
gtgaatatcatctacacaggtggac

SEQ ID NO: 3740273 - DNA, 25 bp, Homo sapien
ccaaaatcgtaactgtatgcatcat

SEQ ID NO: 3740274 - DNA, 25 bp, Homo sapien
tgaagctcagttcctctgaactgaa

SEQ ID NO: 3740275 - DNA, 25 bp, Homo sapien
tcgtaactgtatgcatcattgtttt

SEQ ID NO: 3740276 - DNA, 25 bp, Homo sapien
aaatcgtaactgtatgcatcattgt

SEQ ID NO: 3740277 - DNA, 25 bp, Homo sapien
tcagtctccacataattggcaacat

SEQ ID NO: 3740278 - DNA, 25 bp, Homo sapien
gtttgaacaaatgacagggtatgat

SEQ ID NO: 3740279 - DNA, 25 bp, Homo sapien
cagccgcggtcttgggttatatcga

SEQ ID NO: 3740280 - DNA, 25 bp, Homo sapien
tatccactcctcttcgtttatagcg

SEQ ID NO: 3740281 - DNA, 25 bp, Homo sapien
aaagaagtatctggcaaagcaaatc

SEQ ID NO: 3740282 - DNA, 25 bp, Homo sapien
aatgacttagtcaactatttttact

SEQ ID NO: 3740283 - DNA, 25 bp, Homo sapien
caaatacaagttatcgttttgaaag

SEQ ID NO: 3740284 - DNA, 25 bp, Homo sapien
caagttatcgttttgaaagaagtat

SEQ ID NO: 3740285 - DNA, 25 bp, Homo sapien
gaaatgggcacagaaataggcaaca

SEQ ID NO: 3740286 - DNA, 25 bp, Homo sapien
tcagttgttcttcgaaatgggcaca

SEQ ID NO: 3740287 - DNA, 25 bp, Homo sapien
tcgaaatgggcacagaaataggcaa

SEQ ID NO: 3740288 - DNA, 25 bp, Homo sapien
gttcagttgttcttcgaaatgggca

SEQ ID NO: 3740289 - DNA, 25 bp, Homo sapien
tgttcgaaatcaggaagtatctgct

SEQ ID NO: 3740290 - DNA, 25 bp, Homo sapien
cactgttggggtactgttcgaaatc

SEQ ID NO: 3740291 - DNA, 25 bp, Homo sapien
ggaagtatctgctcaatacacacac

SEQ ID NO: 3740292 - DNA, 25 bp, Homo sapien
caggaaaaggtggataaatgaacac

SEQ ID NO: 3740293 - DNA, 25 bp, Homo sapien
gcaacacttgcttcaggtaagcatc

SEQ ID NO: 3740294 - DNA, 25 bp, Homo sapien
tgctcatggaagtcaaacgaaacgt

SEQ ID NO: 3740295 - DNA, 25 bp, Homo sapien
cctgcctggtctaccaagttaataa

SEQ ID NO: 3740296 - DNA, 25 bp, Homo sapien
taagcatcgccaataatcttctctc

SEQ ID NO: 3740297 - DNA, 25 bp, Homo sapien
tcatatcaagaataatgtcataaat

SEQ ID NO: 3740298 - DNA, 25 bp, Homo sapien
agtgtctgaacattctcaaacttca

SEQ ID NO: 3740299 - DNA, 25 bp, Homo sapien
tatcaagaataatgtcataaatggc

SEQ ID NO: 3740300 - DNA, 25 bp, Homo sapien
ataaatggcatctgttagtgtctga

SEQ ID NO: 3740301 - DNA, 25 bp, Homo sapien
ctaagggtcagcaacattctcttga

SEQ ID NO: 3740302 - DNA, 25 bp, Homo sapien
aagggtcagcaacattctcttgaaa

SEQ ID NO: 3740303 - DNA, 25 bp, Homo sapien
taagggtcagcaacattctcttgaa

SEQ ID NO: 3740304 - DNA, 25 bp, Homo sapien
tcattttccgtctctgataattttg

SEQ ID NO: 3740305 - DNA, 25 bp, Homo sapien
gaatcattttccgtctctgataatt

SEQ ID NO: 3740306 - DNA, 25 bp, Homo sapien
ttttccgtctctgataattttgaaa

SEQ ID NO: 3740307 - DNA, 25 bp, Homo sapien
agaatcattttccgtctctgataat

SEQ ID NO: 3740308 - DNA, 25 bp, Homo sapien
gaccactctcgcgatggcagcttgg

SEQ ID NO: 3740309 - DNA, 25 bp, Homo sapien
tgttccatgaccactctcgcgatgg

SEQ ID NO: 3740310 - DNA, 25 bp, Homo sapien
cgttggtgcgatccaggcagtccat

SEQ ID NO: 3740311 - DNA, 25 bp, Homo sapien
atggcagcttggaccacgttggtgc

SEQ ID NO: 3740312 - DNA, 25 bp, Homo sapien
ctgtctgctaatggagtcaccatta

SEQ ID NO: 3740313 - DNA, 25 bp, Homo sapien
cagctgtcccagcatactgtctgct

SEQ ID NO: 3740314 - DNA, 25 bp, Homo sapien
tctggtagatgcgattacatttcac

SEQ ID NO: 3740315 - DNA, 25 bp, Homo sapien
ttattggcccacattatctggtaga

SEQ ID NO: 3740316 - DNA, 25 bp, Homo sapien
aatatctgtttgctgagttcactcc

SEQ ID NO: 3740317 - DNA, 25 bp, Homo sapien
taacagcttgcctataagcatcctt

SEQ ID NO: 3740318 - DNA, 25 bp, Homo sapien
ttcactccatctttcataactcctg

SEQ ID NO: 3740319 - DNA, 25 bp, Homo sapien
aagcatccttaaatcggttgaggta

SEQ ID NO: 3740320 - DNA, 25 bp, Homo sapien
tatggaataaagatcttctgtcact

SEQ ID NO: 3740321 - DNA, 25 bp, Homo sapien
gctaattagttcctggtggcttctc

SEQ ID NO: 3740322 - DNA, 25 bp, Homo sapien
catcatcaggcagtagtaacttcat

SEQ ID NO: 3740323 - DNA, 25 bp, Homo sapien
tcatgtaactttgtaagagctggct

SEQ ID NO: 3740324 - DNA, 25 bp, Homo sapien
cctatgaatccacagtcaacgtttt

SEQ ID NO: 3740325 - DNA, 25 bp, Homo sapien
taatatcatgggatgtttccctatg

SEQ ID NO: 3740326 - DNA, 25 bp, Homo sapien
tatctttaattgtactttcaagcac

SEQ ID NO: 3740327 - DNA, 25 bp, Homo sapien
ttggattgctgccactaaaaataca

SEQ ID NO: 3740328 - DNA, 25 bp, Homo sapien
atctaagaaagaatcagaggaaaaa

SEQ ID NO: 3740329 - DNA, 25 bp, Homo sapien
tctaagaaagaatcagaggaaaaaa

SEQ ID NO: 3740330 - DNA, 25 bp, Homo sapien
catctaagaaagaatcagaggaaaa

SEQ ID NO: 3740331 - DNA, 25 bp, Homo sapien
taagaaagaatcagaggaaaaaaca

SEQ ID NO: 3740332 - DNA, 25 bp, Homo sapien
catcctgtccccaaccttcaaagga

SEQ ID NO: 3740333 - DNA, 25 bp, Homo sapien
tggcttcactagctcctacatccac

SEQ ID NO: 3740334 - DNA, 25 bp, Homo sapien
aagctgttggctccaaagtattggc

SEQ ID NO: 3740335 - DNA, 25 bp, Homo sapien
ttaaccacggggaccaccaacagca

SEQ ID NO: 3740336 - DNA, 25 bp, Homo sapien
taaggtagcccggacagagctgcgc

SEQ ID NO: 3740337 - DNA, 25 bp, Homo sapien
ctggccacgatggagtctgtctaag

SEQ ID NO: 3740338 - DNA, 25 bp, Homo sapien
gagtctgtctaaggtagcccggaca

SEQ ID NO: 3740339 - DNA, 25 bp, Homo sapien
cgatggagtctgtctaaggtagccc

SEQ ID NO: 3740340 - DNA, 25 bp, Homo sapien
ctgcgataacgggcgggaaaggaca

SEQ ID NO: 3740341 - DNA, 25 bp, Homo sapien
tgcgataacgggcgggaaaggacaa

SEQ ID NO: 3740342 - DNA, 25 bp, Homo sapien
ctgagcgcacggaagcaagtcgaag

SEQ ID NO: 3740343 - DNA, 25 bp, Homo sapien
accacttggcttagcggagaggcga

SEQ ID NO: 3740344 - DNA, 25 bp, Homo sapien
caagtcgaagcaagttgggaacacc

SEQ ID NO: 3740345 - DNA, 25 bp, Homo sapien
tctttcccgctgtcgatagagtcgg

SEQ ID NO: 3740346 - DNA, 25 bp, Homo sapien
gcggcagtgccaagtcacgcccagg

SEQ ID NO: 3740347 - DNA, 25 bp, Homo sapien
ttccgtcctcggctggcggccagtg

SEQ ID NO: 3740348 - DNA, 25 bp, Homo sapien
gggacacgtctagcttccggacgcc

SEQ ID NO: 3740349 - DNA, 25 bp, Homo sapien
agcgaatgcggcgaatgcggcaact

SEQ ID NO: 3740350 - DNA, 25 bp, Homo sapien
gtccgtccgtcgatgcctcgaggct

SEQ ID NO: 3740351 - DNA, 25 bp, Homo sapien
gtctgtccgtccgtcgatgcctcga

SEQ ID NO: 3740352 - DNA, 25 bp, Homo sapien
tcgatgcctcgaggctcaaacagct

SEQ ID NO: 3740353 - DNA, 25 bp, Homo sapien
gtccgtcgatgcctcgaggctcaaa

SEQ ID NO: 3740354 - DNA, 25 bp, Homo sapien
caatggtcgcataaaagccgctgtc

SEQ ID NO: 3740355 - DNA, 25 bp, Homo sapien
aggaactttaaccataagccctgca

SEQ ID NO: 3740356 - DNA, 25 bp, Homo sapien
gccctcagacttgggctcggctgct

SEQ ID NO: 3740357 - DNA, 25 bp, Homo sapien
tgaagacgaaaattgccagcaccac

SEQ ID NO: 3740358 - DNA, 25 bp, Homo sapien
tacatcagccaaacatgatccccag

SEQ ID NO: 3740359 - DNA, 25 bp, Homo sapien
aacaggcagtcggaaaatgtcaacc

SEQ ID NO: 3740360 - DNA, 25 bp, Homo sapien
tacagtgttactttcatcctagctc

SEQ ID NO: 3740361 - DNA, 25 bp, Homo sapien
aaagcacttggcacgtaacaggcag

SEQ ID NO: 3740362 - DNA, 25 bp, Homo sapien
cagagacacctcgttgtagcttgag

SEQ ID NO: 3740363 - DNA, 25 bp, Homo sapien
cctcgttgtagcttgagtccaacag

SEQ ID NO: 3740364 - DNA, 25 bp, Homo sapien
agttttttacatcagagacacctcg

SEQ ID NO: 3740365 - DNA, 25 bp, Homo sapien
ttacatcagagacacctcgttgtag

SEQ ID NO: 3740366 - DNA, 25 bp, Homo sapien
taggccacgtagtaggcagagttag

SEQ ID NO: 3740367 - DNA, 25 bp, Homo sapien
gcagtaacagcacatccacgtctct

SEQ ID NO: 3740368 - DNA, 25 bp, Homo sapien
gtaacagcacatccacgtctctgtg

SEQ ID NO: 3740369 - DNA, 25 bp, Homo sapien
ggccacgtagtaggcagagttagaa

SEQ ID NO: 3740370 - DNA, 25 bp, Homo sapien
taatgcaaacaatgatacgtggtca

SEQ ID NO: 3740371 - DNA, 25 bp, Homo sapien
cgtatggaatacatcaaaacctggg

SEQ ID NO: 3740372 - DNA, 25 bp, Homo sapien
tgtaaccaaagaagtgcgcaggcac

SEQ ID NO: 3740373 - DNA, 25 bp, Homo sapien
cacgttattgcataaagacaactgc

SEQ ID NO: 3740374 - DNA, 25 bp, Homo sapien
caggttttctagacttagtcgttga

SEQ ID NO: 3740375 - DNA, 25 bp, Homo sapien
ttctagacttagtcgttgatactgg

SEQ ID NO: 3740376 - DNA, 25 bp, Homo sapien
gacttagtcgttgatactggtttac

SEQ ID NO: 3740377 - DNA, 25 bp, Homo sapien
tgatactggtttactttatcaactt

SEQ ID NO: 3740378 - DNA, 25 bp, Homo sapien
ggaaatagccactcgcttctttgta

SEQ ID NO: 3740379 - DNA, 25 bp, Homo sapien
gcagtcgcatgcaggagaactttgg

SEQ ID NO: 3740380 - DNA, 25 bp, Homo sapien
cattacagctcgcaatgtgtggaaa

SEQ ID NO: 3740381 - DNA, 25 bp, Homo sapien
ttcaggattacgcattacagctcgc

SEQ ID NO: 3740382 - DNA, 25 bp, Homo sapien
taaagattcccttgccccagactaa

SEQ ID NO: 3740383 - DNA, 25 bp, Homo sapien
gatgccaaggcaacagccatgaatg

SEQ ID NO: 3740384 - DNA, 25 bp, Homo sapien
ttccctgggttgctggaaacagagt

SEQ ID NO: 3740385 - DNA, 25 bp, Homo sapien
ttgacacccatacgatcactgatgg

SEQ ID NO: 3740386 - DNA, 25 bp, Homo sapien
tgggtaaatccgatcccatggcttg

SEQ ID NO: 3740387 - DNA, 25 bp, Homo sapien
ttatgggtaaatccgatcccatggc

SEQ ID NO: 3740388 - DNA, 25 bp, Homo sapien
caattatgggtaaatccgatcccat

SEQ ID NO: 3740389 - DNA, 25 bp, Homo sapien
ggtaaatccgatcccatggcttgct

SEQ ID NO: 3740390 - DNA, 25 bp, Homo sapien
gaggcgctgaggcaataataccaca

SEQ ID NO: 3740391 - DNA, 25 bp, Homo sapien
tgctgctaagagactgggaccgact

SEQ ID NO: 3740392 - DNA, 25 bp, Homo sapien
gaatgcgctggctcaactgacaaaa

SEQ ID NO: 3740393 - DNA, 25 bp, Homo sapien
cagtcaatatgtgtacgtcgccagc

SEQ ID NO: 3740394 - DNA, 25 bp, Homo sapien
tcctcagggaacagttaagccatca

SEQ ID NO: 3740395 - DNA, 25 bp, Homo sapien
tagaatttccagtagccaatatggg

SEQ ID NO: 3740396 - DNA, 25 bp, Homo sapien
gaaatctactcaggttccgactccg

SEQ ID NO: 3740397 - DNA, 25 bp, Homo sapien
tatatcccaaagtgacctgttgctg

SEQ ID NO: 3740398 - DNA, 25 bp, Homo sapien
caagtgttcagttatagcaaatctg

SEQ ID NO: 3740399 - DNA, 25 bp, Homo sapien
aatctgttatgcaaggaattctcat

SEQ ID NO: 3740400 - DNA, 25 bp, Homo sapien
tactggcaacagctagaccaagtgt

SEQ ID NO: 3740401 - DNA, 25 bp, Homo sapien
tatagcaaatctgccgtttacaaat

SEQ ID NO: 3740402 - DNA, 25 bp, Homo sapien
ctgtagtagcatggttatggcaacc

SEQ ID NO: 3740403 - DNA, 25 bp, Homo sapien
agtaacagcctcgtacaactgcagg

SEQ ID NO: 3740404 - DNA, 25 bp, Homo sapien
caaattagcagtaccttgggctgtt

SEQ ID NO: 3740405 - DNA, 25 bp, Homo sapien
tggtcttgcagaaaagttcccttga

SEQ ID NO: 3740406 - DNA, 25 bp, Homo sapien
tcataggccagactgttgaaatgct

SEQ ID NO: 3740407 - DNA, 25 bp, Homo sapien
tgaaatcaagcctggtaacacctga

SEQ ID NO: 3740408 - DNA, 25 bp, Homo sapien
gaacggaggcgtacttgccattgat

SEQ ID NO: 3740409 - DNA, 25 bp, Homo sapien
ggtgcattcagtagtccatctttgg

SEQ ID NO: 3740410 - DNA, 25 bp, Homo sapien
tctttgatccttcgcccttgcaaca

SEQ ID NO: 3740411 - DNA, 25 bp, Homo sapien
tgcttctgtgtagtctcattcttcg

SEQ ID NO: 3740412 - DNA, 25 bp, Homo sapien
cattcttcgtgctatttttgtcata

SEQ ID NO: 3740413 - DNA, 25 bp, Homo sapien
tcatccttagattatacagctcaca

SEQ ID NO: 3740414 - DNA, 25 bp, Homo sapien
aaggctgctgtagtcggtcttcgta

SEQ ID NO: 3740415 - DNA, 25 bp, Homo sapien
caaattgcctcagcaaaaggctgct

SEQ ID NO: 3740416 - DNA, 25 bp, Homo sapien
gagcgactcccacagtttcactctt

SEQ ID NO: 3740417 - DNA, 25 bp, Homo sapien
tccttctccagggtatcctagcggc

SEQ ID NO: 3740418 - DNA, 25 bp, Homo sapien
ccacaccactgaccggaaaccgatc

SEQ ID NO: 3740419 - DNA, 25 bp, Homo sapien
accactgaccggaaaccgatcacgc

SEQ ID NO: 3740420 - DNA, 25 bp, Homo sapien
acaccactgaccggaaaccgatcac

SEQ ID NO: 3740421 - DNA, 25 bp, Homo sapien
taccacaccactgaccggaaaccga

SEQ ID NO: 3740422 - DNA, 25 bp, Homo sapien
ggctgcggcccaccgtccgatacac

SEQ ID NO: 3740423 - DNA, 25 bp, Homo sapien
gctgcggcccaccgtccgatacacg

SEQ ID NO: 3740424 - DNA, 25 bp, Homo sapien
ctgcggcccaccgtccgatacacgt

SEQ ID NO: 3740425 - DNA, 25 bp, Homo sapien
tgaagggcacattgaagctgaactc

SEQ ID NO: 3740426 - DNA, 25 bp, Homo sapien
ttgaagctgaactccgtggccgagg

SEQ ID NO: 3740427 - DNA, 25 bp, Homo sapien
aaagtaagttagtgcccgatgagga

SEQ ID NO: 3740428 - DNA, 25 bp, Homo sapien
gccgctgccaccgttaggttttctc

SEQ ID NO: 3740429 - DNA, 25 bp, Homo sapien
cttgacctctgctgagactagggct

SEQ ID NO: 3740430 - DNA, 25 bp, Homo sapien
aagctccgggctccaagcttcttga

SEQ ID NO: 3740431 - DNA, 25 bp, Homo sapien
ttggagacctgccaacaggcagcct

SEQ ID NO: 3740432 - DNA, 25 bp, Homo sapien
aggcagccttattccaagctccggg

SEQ ID NO: 3740433 - DNA, 25 bp, Homo sapien
aaatggaacaggagagcatgtggtt

SEQ ID NO: 3740434 - DNA, 25 bp, Homo sapien
taaggaagggctagcaattatactt

SEQ ID NO: 3740435 - DNA, 25 bp, Homo sapien
taaagggtactctatcactccgcag

SEQ ID NO: 3740436 - DNA, 25 bp, Homo sapien
cactccgcagatacgattctataag

SEQ ID NO: 3740437 - DNA, 25 bp, Homo sapien
gtgactgtccaatattcccaaaagg

SEQ ID NO: 3740438 - DNA, 25 bp, Homo sapien
gaaaatgcattcgagacatcttggg

SEQ ID NO: 3740439 - DNA, 25 bp, Homo sapien
cactgctgcttgatacctgagagaa

SEQ ID NO: 3740440 - DNA, 25 bp, Homo sapien
agcaccaggttgagccttcgaaatg

SEQ ID NO: 3740441 - DNA, 25 bp, Homo sapien
tatgaaggagggagactacttggct

SEQ ID NO: 3740442 - DNA, 25 bp, Homo sapien
gattgtatcctggttggggaattcc

SEQ ID NO: 3740443 - DNA, 25 bp, Homo sapien
gggtatggcgatatggattgtatcc

SEQ ID NO: 3740444 - DNA, 25 bp, Homo sapien
tgcaatgtaaggattagccctgctg

SEQ ID NO: 3740445 - DNA, 25 bp, Homo sapien
cggtggcaaagatcctggaggcatc

SEQ ID NO: 3740446 - DNA, 25 bp, Homo sapien
gtggcaaagatcctggaggcatctg

SEQ ID NO: 3740447 - DNA, 25 bp, Homo sapien
ggtggcaaagatcctggaggcatct

SEQ ID NO: 3740448 - DNA, 25 bp, Homo sapien
cacactaaaaggcatccacagttgt

SEQ ID NO: 3740449 - DNA, 25 bp, Homo sapien
tacctccttgcagtaaaaccagtgg

SEQ ID NO: 3740450 - DNA, 25 bp, Homo sapien
gggctgaacaggctcatattggttt

SEQ ID NO: 3740451 - DNA, 25 bp, Homo sapien
tcaagattcaaagagtcgaacacac

SEQ ID NO: 3740452 - DNA, 25 bp, Homo sapien
gtgccaagaaccacgctctccggat

SEQ ID NO: 3740453 - DNA, 25 bp, Homo sapien
aggtaaacatcgtagcgccctccat

SEQ ID NO: 3740454 - DNA, 25 bp, Homo sapien
gaaccacgctctccggatctggctg

SEQ ID NO: 3740455 - DNA, 25 bp, Homo sapien
gcagccttccttattcggtcataga

SEQ ID NO: 3740456 - DNA, 25 bp, Homo sapien
tacagcgtctcacttcggctggctc

SEQ ID NO: 3740457 - DNA, 25 bp, Homo sapien
actcctcagtatagggaataaatcg

SEQ ID NO: 3740458 - DNA, 25 bp, Homo sapien
aaaccaagtacagcgtctcacttcg

SEQ ID NO: 3740459 - DNA, 25 bp, Homo sapien
gaataaatcgactatctgtgtcccc

SEQ ID NO: 3740460 - DNA, 25 bp, Homo sapien
gtaaagtccgctccactgtgaatga

SEQ ID NO: 3740461 - DNA, 25 bp, Homo sapien
aacaacaaatcccagcggcctaggt

SEQ ID NO: 3740462 - DNA, 25 bp, Homo sapien
tttagacacagatgccacgattagc

SEQ ID NO: 3740463 - DNA, 25 bp, Homo sapien
tagcacctcatgagtgatgacacca

SEQ ID NO: 3740464 - DNA, 25 bp, Homo sapien
gctaatatttctagaggttctcctg

SEQ ID NO: 3740465 - DNA, 25 bp, Homo sapien
ggttctcctgattttccacgtagac

SEQ ID NO: 3740466 - DNA, 25 bp, Homo sapien
ccctaggtagccatgtgttgctgca

SEQ ID NO: 3740467 - DNA, 25 bp, Homo sapien
caaattaaaggtgttctctgtctcc

SEQ ID NO: 3740468 - DNA, 25 bp, Homo sapien
gtctctccacttggaaactctaatc

SEQ ID NO: 3740469 - DNA, 25 bp, Homo sapien
gaaactctaatcttcggtgccactg

SEQ ID NO: 3740470 - DNA, 25 bp, Homo sapien
gattgtgcataacaattgtctctcc

SEQ ID NO: 3740471 - DNA, 25 bp, Homo sapien
gccactgattagtggttacagcttt

SEQ ID NO: 3740472 - DNA, 25 bp, Homo sapien
cttgtctgtccatcttgcgtggtgc

SEQ ID NO: 3740473 - DNA, 25 bp, Homo sapien
tgcgtggtgccccattcatctggca

SEQ ID NO: 3740474 - DNA, 25 bp, Homo sapien
tcaaggttatcatcaattccacgct

SEQ ID NO: 3740475 - DNA, 25 bp, Homo sapien
cacgctttacaaccctgggccttgt

SEQ ID NO: 3740476 - DNA, 25 bp, Homo sapien
agctttatggaaaacggatatgctc

SEQ ID NO: 3740477 - DNA, 25 bp, Homo sapien
tatggaaaacggatatgctcatttg

SEQ ID NO: 3740478 - DNA, 25 bp, Homo sapien
ctttatggaaaacggatatgctcat

SEQ ID NO: 3740479 - DNA, 25 bp, Homo sapien
ttatggaaaacggatatgctcattt

SEQ ID NO: 3740480 - DNA, 25 bp, Homo sapien
caggcaatggcaaacaatggcccac

SEQ ID NO: 3740481 - DNA, 25 bp, Homo sapien
agcaggcaatggcaaacaatggccc

SEQ ID NO: 3740482 - DNA, 25 bp, Homo sapien
gaagtgtatgtaattgtaaaaataa

SEQ ID NO: 3740483 - DNA, 25 bp, Homo sapien
ggcaatggcaaacaatggcccacag

SEQ ID NO: 3740484 - DNA, 25 bp, Homo sapien
taaaagcgaactagaacaagaggtg

SEQ ID NO: 3740485 - DNA, 25 bp, Homo sapien
gaggaacaatttgtccctcttggca

SEQ ID NO: 3740486 - DNA, 25 bp, Homo sapien
gagaataagcctcattacccctatc

SEQ ID NO: 3740487 - DNA, 25 bp, Homo sapien
ggcaatattctagatatccctttcg

SEQ ID NO: 3740488 - DNA, 25 bp, Homo sapien
aatgccatgcaccacaaacaccaaa

SEQ ID NO: 3740489 - DNA, 25 bp, Homo sapien
cacactcaataatgctcctaaagcg

SEQ ID NO: 3740490 - DNA, 25 bp, Homo sapien
taaagcgtaagtcacacacaggtcc

SEQ ID NO: 3740491 - DNA, 25 bp, Homo sapien
catgcaccacaaacaccaaatggtc

SEQ ID NO: 3740492 - DNA, 25 bp, Homo sapien
aaatgtgtccgcagcaatttgagag

SEQ ID NO: 3740493 - DNA, 25 bp, Homo sapien
ttcttgaaatgtgtccgcagcaatt

SEQ ID NO: 3740494 - DNA, 25 bp, Homo sapien
agatttcttgaaatgtgtccgcagc

SEQ ID NO: 3740495 - DNA, 25 bp, Homo sapien
cttgaaatgtgtccgcagcaatttg

SEQ ID NO: 3740496 - DNA, 25 bp, Homo sapien
aggaactccactctgcttactttcc

SEQ ID NO: 3740497 - DNA, 25 bp, Homo sapien
gtccccacccaaagaactatgccaa

SEQ ID NO: 3740498 - DNA, 25 bp, Homo sapien
cccacccaaagaactatgccaatga

SEQ ID NO: 3740499 - DNA, 25 bp, Homo sapien
cacacctgtggcgtccccacccaaa

SEQ ID NO: 3740500 - DNA, 25 bp, Homo sapien
cattggtaaagtgacgaaatcgacc

SEQ ID NO: 3740501 - DNA, 25 bp, Homo sapien
gagtgcatgcagatggtttatctcc

SEQ ID NO: 3740502 - DNA, 25 bp, Homo sapien
tactttttccacaattgtctgacag

SEQ ID NO: 3740503 - DNA, 25 bp, Homo sapien
gaagtctgggttccgactcataaag

SEQ ID NO: 3740504 - DNA, 25 bp, Homo sapien
caaatctttttgattagacaggatg

SEQ ID NO: 3740505 - DNA, 25 bp, Homo sapien
aacagcaagaggtccagggcacttt

SEQ ID NO: 3740506 - DNA, 25 bp, Homo sapien
aaaatgtagctgcttcacaactcca

SEQ ID NO: 3740507 - DNA, 25 bp, Homo sapien
gtccagggcactttgataaattcaa

SEQ ID NO: 3740508 - DNA, 25 bp, Homo sapien
taagtgcttccagagtttcttgcaa

SEQ ID NO: 3740509 - DNA, 25 bp, Homo sapien
tcttgcaaagttaggacttctttat

SEQ ID NO: 3740510 - DNA, 25 bp, Homo sapien
cagggactccatatcaatcttttcc

SEQ ID NO: 3740511 - DNA, 25 bp, Homo sapien
caaggtcatacgactcatccaaagt

SEQ ID NO: 3740512 - DNA, 25 bp, Homo sapien
tctacaaagttagctatcttctttc

SEQ ID NO: 3740513 - DNA, 25 bp, Homo sapien
cagtttggctgctttatgttctaca

SEQ ID NO: 3740514 - DNA, 25 bp, Homo sapien
agtttggctgctttatgttctacaa

SEQ ID NO: 3740515 - DNA, 25 bp, Homo sapien
ctacaaagttagctatcttctttct

SEQ ID NO: 3740516 - DNA, 25 bp, Homo sapien
catttttctgtatggagcacgcagc

SEQ ID NO: 3740517 - DNA, 25 bp, Homo sapien
gatgtatacacggagacaagcattt

SEQ ID NO: 3740518 - DNA, 25 bp, Homo sapien
tactatgtaagattgcagccgcctc

SEQ ID NO: 3740519 - DNA, 25 bp, Homo sapien
catgaaagatacctcttaactgcca

SEQ ID NO: 3740520 - DNA, 25 bp, Homo sapien
aagacacgcaagcaccaactggaag

SEQ ID NO: 3740521 - DNA, 25 bp, Homo sapien
tccttttgtagaagtggccgccact

SEQ ID NO: 3740522 - DNA, 25 bp, Homo sapien
tgtccggcgccaacttcaaaagatt

SEQ ID NO: 3740523 - DNA, 25 bp, Homo sapien
tctttggctcattggattctgaggg

SEQ ID NO: 3740524 - DNA, 25 bp, Homo sapien
ctcctcgaatagtgagaaacatagc

SEQ ID NO: 3740525 - DNA, 25 bp, Homo sapien
tacaggtaggaaggctgtaattctc

SEQ ID NO: 3740526 - DNA, 25 bp, Homo sapien
caaaatctaatgagttgtaagcaac

SEQ ID NO: 3740527 - DNA, 25 bp, Homo sapien
gaaacatagcaattggagaccccaa

SEQ ID NO: 3740528 - DNA, 25 bp, Homo sapien
tggatacatggcaaatcagagattt

SEQ ID NO: 3740529 - DNA, 25 bp, Homo sapien
gagttatatgccttcgctgggtaag

SEQ ID NO: 3740530 - DNA, 25 bp, Homo sapien
caagataggtattaattcccaagaa

SEQ ID NO: 3740531 - DNA, 25 bp, Homo sapien
tattggaaagtgtcagactatacct

SEQ ID NO: 3740532 - DNA, 25 bp, Homo sapien
tctgcctttgtgatgtggaatgaga

SEQ ID NO: 3740533 - DNA, 25 bp, Homo sapien
tctaatctatatgccactggatcaa

SEQ ID NO: 3740534 - DNA, 25 bp, Homo sapien
tgagaacagcttttaggtccaaatc

SEQ ID NO: 3740535 - DNA, 25 bp, Homo sapien
aaatctggaacaatcataggttcta

SEQ ID NO: 3740536 - DNA, 25 bp, Homo sapien
aatgtctgccaagcacttttgagag

SEQ ID NO: 3740537 - DNA, 25 bp, Homo sapien
tgagcacgggcaaactcatttaatg

SEQ ID NO: 3740538 - DNA, 25 bp, Homo sapien
caactgggttgaagacgtatgagca

SEQ ID NO: 3740539 - DNA, 25 bp, Homo sapien
tcagatcccatacgagagagactct

SEQ ID NO: 3740540 - DNA, 25 bp, Homo sapien
tgagaatactgcttgacgcatgtag

SEQ ID NO: 3740541 - DNA, 25 bp, Homo sapien
gccaacaagctgagagaagttgtga

SEQ ID NO: 3740542 - DNA, 25 bp, Homo sapien
tcaactcggatattccactctggcc

SEQ ID NO: 3740543 - DNA, 25 bp, Homo sapien
aacctgaggagctaccaggctcact

SEQ ID NO: 3740544 - DNA, 25 bp, Homo sapien
tggaaaaatctggactttcaacaac

SEQ ID NO: 3740545 - DNA, 25 bp, Homo sapien
ttggaaaaatctggactttcaacaa

SEQ ID NO: 3740546 - DNA, 25 bp, Homo sapien
cttggaaaaatctggactttcaaca

SEQ ID NO: 3740547 - DNA, 25 bp, Homo sapien
tagcataagtgactctgaagagcga

SEQ ID NO: 3740548 - DNA, 25 bp, Homo sapien
caacctttcctaagtagtcctcatc

SEQ ID NO: 3740549 - DNA, 25 bp, Homo sapien
ttcggcggcctccatttaacattcc

SEQ ID NO: 3740550 - DNA, 25 bp, Homo sapien
tcttggagaacgtagtcaattcggc

SEQ ID NO: 3740551 - DNA, 25 bp, Homo sapien
tattcaactctatctaagaagggca

SEQ ID NO: 3740552 - DNA, 25 bp, Homo sapien
taaagcagcgtaatctcagagctgt

SEQ ID NO: 3740553 - DNA, 25 bp, Homo sapien
cagggatacaggaaagaatggcatt

SEQ ID NO: 3740554 - DNA, 25 bp, Homo sapien
taaaattgctgcacgtgctagcacc

SEQ ID NO: 3740555 - DNA, 25 bp, Homo sapien
ctgttctggactaatgttcattgtt

SEQ ID NO: 3740556 - DNA, 25 bp, Homo sapien
gttcattgttcgataaatttcttta

SEQ ID NO: 3740557 - DNA, 25 bp, Homo sapien
aatttctttaagtagtaacagagca

SEQ ID NO: 3740558 - DNA, 25 bp, Homo sapien
ttctttaagtagtaacagagcagta

SEQ ID NO: 3740559 - DNA, 25 bp, Homo sapien
atacattcaataaggataaactcac

SEQ ID NO: 3740560 - DNA, 25 bp, Homo sapien
atttatacattcaataaggataaac

SEQ ID NO: 3740561 - DNA, 25 bp, Homo sapien
gaatttatacattcaataaggataa

SEQ ID NO: 3740562 - DNA, 25 bp, Homo sapien
ttatacattcaataaggataaactc

SEQ ID NO: 3740563 - DNA, 25 bp, Homo sapien
tgtgttaacagatatctggaaggat

SEQ ID NO: 3740564 - DNA, 25 bp, Homo sapien
gtgatgtgttaacagatatctggaa

SEQ ID NO: 3740565 - DNA, 25 bp, Homo sapien
gatgtgttaacagatatctggaagg

SEQ ID NO: 3740566 - DNA, 25 bp, Homo sapien
gtgttaacagatatctggaaggata

SEQ ID NO: 3740567 - DNA, 25 bp, Homo sapien
ccaatgacaaaagggtacattattc

SEQ ID NO: 3740568 - DNA, 25 bp, Homo sapien
ttattcaatatatggcacagacaga

SEQ ID NO: 3740569 - DNA, 25 bp, Homo sapien
taattaatcataaaagactgggcta

SEQ ID NO: 3740570 - DNA, 25 bp, Homo sapien
tcatgcccagcgtagggctacgtat

SEQ ID NO: 3740571 - DNA, 25 bp, Homo sapien
gagttttccatataaggtgatggca

SEQ ID NO: 3740572 - DNA, 25 bp, Homo sapien
gcaaagactatggtatactgagaac

SEQ ID NO: 3740573 - DNA, 25 bp, Homo sapien
tcattcgggataactgcaaagacta

SEQ ID NO: 3740574 - DNA, 25 bp, Homo sapien
gcaaaactgatctaagcttgaatga

SEQ ID NO: 3740575 - DNA, 25 bp, Homo sapien
tactgggactttctgtgcagacaag

SEQ ID NO: 3740576 - DNA, 25 bp, Homo sapien
cctatatccgagaattgtggctgag

SEQ ID NO: 3740577 - DNA, 25 bp, Homo sapien
tcacaggagcgaagtgggaaagtcc

SEQ ID NO: 3740578 - DNA, 25 bp, Homo sapien
cagcaatggaagttgtactgggact

SEQ ID NO: 3740579 - DNA, 25 bp, Homo sapien
tcaggctctcagcaatcgtttgagg

SEQ ID NO: 3740580 - DNA, 25 bp, Homo sapien
ttataaaacctcagattcagttggg

SEQ ID NO: 3740581 - DNA, 25 bp, Homo sapien
atggacgtgctaggagagcgcttcc

SEQ ID NO: 3740582 - DNA, 25 bp, Homo sapien
gagcgcttcccaggacttcttgaaa

SEQ ID NO: 3740583 - DNA, 25 bp, Homo sapien
cattattggaacttcagcaacaagg

SEQ ID NO: 3740584 - DNA, 25 bp, Homo sapien
agcaacaaggcaagtgcacagctac

SEQ ID NO: 3740585 - DNA, 25 bp, Homo sapien
aaagcagtcttgtcatgaagtagcc

SEQ ID NO: 3740586 - DNA, 25 bp, Homo sapien
gaagtagccttatataactcagaag

SEQ ID NO: 3740587 - DNA, 25 bp, Homo sapien
agatctgccactacccagtctggga

SEQ ID NO: 3740588 - DNA, 25 bp, Homo sapien
cattaggagccaatgctaacgttac

SEQ ID NO: 3740589 - DNA, 25 bp, Homo sapien
tgttgtctggagtcaattacagctc

SEQ ID NO: 3740590 - DNA, 25 bp, Homo sapien
gttacatactgaccatataagcagg

SEQ ID NO: 3740591 - DNA, 25 bp, Homo sapien
cctgcaaggtggttacaacagtgaa

SEQ ID NO: 3740592 - DNA, 25 bp, Homo sapien
agctgccacatgcttcttctacgaa

SEQ ID NO: 3740593 - DNA, 25 bp, Homo sapien
gagtatatatatccacaggcagagt

SEQ ID NO: 3740594 - DNA, 25 bp, Homo sapien
tgttcatacataaagactctaccct

SEQ ID NO: 3740595 - DNA, 25 bp, Homo sapien
tgactcaaactaagctggaatgcca

SEQ ID NO: 3740596 - DNA, 25 bp, Homo sapien
catgagaccaaatgctgtgagttac

SEQ ID NO: 3740597 - DNA, 25 bp, Homo sapien
gatgcctcaagtcataaaaacctga

SEQ ID NO: 3740598 - DNA, 25 bp, Homo sapien
catgaagacaggttagctgacagtc

SEQ ID NO: 3740599 - DNA, 25 bp, Homo sapien
gacaaacatggtgggttatcccaac

SEQ ID NO: 3740600 - DNA, 25 bp, Homo sapien
taatttcttcagtcgccccagttgt

SEQ ID NO: 3740601 - DNA, 25 bp, Homo sapien
gaactgcagcacatccactaacgaa

SEQ ID NO: 3740602 - DNA, 25 bp, Homo sapien
acttacaatcatgacgaacctcggg

SEQ ID NO: 3740603 - DNA, 25 bp, Homo sapien
ggatgctattgaaatacaaggccca

SEQ ID NO: 3740604 - DNA, 25 bp, Homo sapien
gatgttgatcccaagggtgcacccc

SEQ ID NO: 3740605 - DNA, 25 bp, Homo sapien
tgggagcagcccacatgctatgact

SEQ ID NO: 3740606 - DNA, 25 bp, Homo sapien
tgccaatggcactcagtcaagtccc

SEQ ID NO: 3740607 - DNA, 25 bp, Homo sapien
gcatctccacgatcacaatgacaca

SEQ ID NO: 3740608 - DNA, 25 bp, Homo sapien
tccaccgtgggtcagtgcttctgag

SEQ ID NO: 3740609 - DNA, 25 bp, Homo sapien
ggcgctgtggcaggagttctcccat

SEQ ID NO: 3740610 - DNA, 25 bp, Homo sapien
tgttccccggctgggaggcgctgtg

SEQ ID NO: 3740611 - DNA, 25 bp, Homo sapien
gctgtgatttggaacgtgacaaggt

SEQ ID NO: 3740612 - DNA, 25 bp, Homo sapien
tggtttttccatcccgcaggcagaa

SEQ ID NO: 3740613 - DNA, 25 bp, Homo sapien
tgggacctcattggtttttccatcc

SEQ ID NO: 3740614 - DNA, 25 bp, Homo sapien
taaccacgacgagagtgagttaggc

SEQ ID NO: 3740615 - DNA, 25 bp, Homo sapien
tggccaggataacagatgcaacagc

SEQ ID NO: 3740616 - DNA, 25 bp, Homo sapien
gaatctgcgtgtaaccaggaacagc

SEQ ID NO: 3740617 - DNA, 25 bp, Homo sapien
tgtgtgtaaccaaggagagccagag

SEQ ID NO: 3740618 - DNA, 25 bp, Homo sapien
ctacgacagtgaaagaagaggcttc

SEQ ID NO: 3740619 - DNA, 25 bp, Homo sapien
tctttagcactaatcagggctgcag

SEQ ID NO: 3740620 - DNA, 25 bp, Homo sapien
gcttctcagagataagagacacgcc

SEQ ID NO: 3740621 - DNA, 25 bp, Homo sapien
tgcacactctttagcactaatcagg

SEQ ID NO: 3740622 - DNA, 25 bp, Homo sapien
gacacgccaattgcacactctttag

SEQ ID NO: 3740623 - DNA, 25 bp, Homo sapien
ttagccacattgaatgagcctgttg

SEQ ID NO: 3740624 - DNA, 25 bp, Homo sapien
agccacattgaatgagcctgttgca

SEQ ID NO: 3740625 - DNA, 25 bp, Homo sapien
tagccacattgaatgagcctgttgc

SEQ ID NO: 3740626 - DNA, 25 bp, Homo sapien
gccacattgaatgagcctgttgcag

SEQ ID NO: 3740627 - DNA, 25 bp, Homo sapien
cataagtggatggttgaggaatgta

SEQ ID NO: 3740628 - DNA, 25 bp, Homo sapien
gaggaatgtagactctcattgaaga

SEQ ID NO: 3740629 - DNA, 25 bp, Homo sapien
tcagagattcacgtctgagatgggt

SEQ ID NO: 3740630 - DNA, 25 bp, Homo sapien
ccttggtcttacagtcaactgggca

SEQ ID NO: 3740631 - DNA, 25 bp, Homo sapien
cattttcccgggttaccactgatgg

SEQ ID NO: 3740632 - DNA, 25 bp, Homo sapien
gcccaggattatctgtgccccacat

SEQ ID NO: 3740633 - DNA, 25 bp, Homo sapien
ccactgatggtatcttcagaaattc

SEQ ID NO: 3740634 - DNA, 25 bp, Homo sapien
agctgccacattatgcccaggatta

SEQ ID NO: 3740635 - DNA, 25 bp, Homo sapien
tggatcaagcagacctagaagacgt

SEQ ID NO: 3740636 - DNA, 25 bp, Homo sapien
ggatcaagcagacctagaagacgtc

SEQ ID NO: 3740637 - DNA, 25 bp, Homo sapien
ctctggatcaagcagacctagaaga

SEQ ID NO: 3740638 - DNA, 25 bp, Homo sapien
ctggatcaagcagacctagaagacg

SEQ ID NO: 3740639 - DNA, 25 bp, Homo sapien
ttaggtcaaaacaaccttgatgcta

SEQ ID NO: 3740640 - DNA, 25 bp, Homo sapien
tacgctcagagcagtcaacagtcca

SEQ ID NO: 3740641 - DNA, 25 bp, Homo sapien
cagtgttccatggagcttctgcgcc

SEQ ID NO: 3740642 - DNA, 25 bp, Homo sapien
ttcacgcaggcaagaaacgtctttg

SEQ ID NO: 3740643 - DNA, 25 bp, Homo sapien
tgcgaaatgccagtctcagtgacca

SEQ ID NO: 3740644 - DNA, 25 bp, Homo sapien
tcagagatttacgttgccacagaat

SEQ ID NO: 3740645 - DNA, 25 bp, Homo sapien
taactgtgtccaataattaagataa

SEQ ID NO: 3740646 - DNA, 25 bp, Homo sapien
tgtgccatatgcataaatacaagcc

SEQ ID NO: 3740647 - DNA, 25 bp, Homo sapien
tacagaacaattagttttgtccaag

SEQ ID NO: 3740648 - DNA, 25 bp, Homo sapien
catgtgacgtgccacttgatcatgt

SEQ ID NO: 3740649 - DNA, 25 bp, Homo sapien
ggaggaaccatgtgacgtgccactt

SEQ ID NO: 3740650 - DNA, 25 bp, Homo sapien
agccttctggccacgggttcttgaa

SEQ ID NO: 3740651 - DNA, 25 bp, Homo sapien
ctgaaggaggaaccatgtgacgtgc

SEQ ID NO: 3740652 - DNA, 25 bp, Homo sapien
tcaaaccatggcgaagactcttcag

SEQ ID NO: 3740653 - DNA, 25 bp, Homo sapien
aggcaacaccgagacacttcctctg

SEQ ID NO: 3740654 - DNA, 25 bp, Homo sapien
gcacttcaatgaacatctcctggca

SEQ ID NO: 3740655 - DNA, 25 bp, Homo sapien
cctgcggtgtggctccgagcagtct

SEQ ID NO: 3740656 - DNA, 25 bp, Homo sapien
ctggactgatgctgcagcctcctca

SEQ ID NO: 3740657 - DNA, 25 bp, Homo sapien
agcctcctcactgatccccctgcct

SEQ ID NO: 3740658 - DNA, 25 bp, Homo sapien
tgcctccagcctcaggcctctataa

SEQ ID NO: 3740659 - DNA, 25 bp, Homo sapien
gcctccagcctcaggcctctataag

SEQ ID NO: 3740660 - DNA, 25 bp, Homo sapien
gcaagccctggagcgaacttggaga

SEQ ID NO: 3740661 - DNA, 25 bp, Homo sapien
cgcaagccctggagcgaacttggag

SEQ ID NO: 3740662 - DNA, 25 bp, Homo sapien
tcgcaagccctggagcgaacttgga

SEQ ID NO: 3740663 - DNA, 25 bp, Homo sapien
caaaagtgctctcaaccttctcggg

SEQ ID NO: 3740664 - DNA, 25 bp, Homo sapien
aaataaggacgcagagatgaagaaa

SEQ ID NO: 3740665 - DNA, 25 bp, Homo sapien
tcggggctttccaattacagcaagt

SEQ ID NO: 3740666 - DNA, 25 bp, Homo sapien
tgttccaagaaataaggacgcagag

SEQ ID NO: 3740667 - DNA, 25 bp, Homo sapien
acttcggcgaccttaacttgctgca

SEQ ID NO: 3740668 - DNA, 25 bp, Homo sapien
gcaattctacttcggcgaccttaac

SEQ ID NO: 3740669 - DNA, 25 bp, Homo sapien
ggcttaatacgcaattctacttcgg

SEQ ID NO: 3740670 - DNA, 25 bp, Homo sapien
ggagacactggcttaatacgcaatt

SEQ ID NO: 3740671 - DNA, 25 bp, Homo sapien
tttccctgcaagtgtaatatattgg

SEQ ID NO: 3740672 - DNA, 25 bp, Homo sapien
tgtgaaaatatcgtgatagatggca

SEQ ID NO: 3740673 - DNA, 25 bp, Homo sapien
taatgaaaaacgctctgaaagcccc

SEQ ID NO: 3740674 - DNA, 25 bp, Homo sapien
taaagagtatgcgactagaaatgtg

SEQ ID NO: 3740675 - DNA, 25 bp, Homo sapien
aggctttactcttcctgcagtaccc

SEQ ID NO: 3740676 - DNA, 25 bp, Homo sapien
cacaggctttactcttcctgcagta

SEQ ID NO: 3740677 - DNA, 25 bp, Homo sapien
gctttactcttcctgcagtacccat

SEQ ID NO: 3740678 - DNA, 25 bp, Homo sapien
acaggctttactcttcctgcagtac

SEQ ID NO: 3740679 - DNA, 25 bp, Homo sapien
agagatacaaggcttctggctccca

SEQ ID NO: 3740680 - DNA, 25 bp, Homo sapien
ggacagctgagcctttacacaggaa

SEQ ID NO: 3740681 - DNA, 25 bp, Homo sapien
tcaaaccagcagtagagatacaagg

SEQ ID NO: 3740682 - DNA, 25 bp, Homo sapien
tcccatacggttgcctgaattctca

SEQ ID NO: 3740683 - DNA, 25 bp, Homo sapien
ccctactgatctctttcaaaaatct

SEQ ID NO: 3740684 - DNA, 25 bp, Homo sapien
gcaaataaaggcctagactaggagt

SEQ ID NO: 3740685 - DNA, 25 bp, Homo sapien
taaaggcctagactaggagtttggc

SEQ ID NO: 3740686 - DNA, 25 bp, Homo sapien
aataaaggcctagactaggagtttg

SEQ ID NO: 3740687 - DNA, 25 bp, Homo sapien
atgcaaataaaggcctagactagga

SEQ ID NO: 3740688 - DNA, 25 bp, Homo sapien
aagtagctggcacagactcaacagc

SEQ ID NO: 3740689 - DNA, 25 bp, Homo sapien
ctcaacagccttgtggccgttgcca

SEQ ID NO: 3740690 - DNA, 25 bp, Homo sapien
tcaacagccttgtggccgttgccac

SEQ ID NO: 3740691 - DNA, 25 bp, Homo sapien
gctggcacagactcaacagccttgt

SEQ ID NO: 3740692 - DNA, 25 bp, Homo sapien
ctactcctccctgtcgttcccacaa

SEQ ID NO: 3740693 - DNA, 25 bp, Homo sapien
tcctccctgtcgttcccacaattcc

SEQ ID NO: 3740694 - DNA, 25 bp, Homo sapien
cctactcctccctgtcgttcccaca

SEQ ID NO: 3740695 - DNA, 25 bp, Homo sapien
caagtaatgtatcgacttggccaaa

SEQ ID NO: 3740696 - DNA, 25 bp, Homo sapien
tcatcaaggcgcttttcaagtaatg

SEQ ID NO: 3740697 - DNA, 25 bp, Homo sapien
gaggcttgggtatacataagcttca

SEQ ID NO: 3740698 - DNA, 25 bp, Homo sapien
cttggccaaaagtcgaactggaagg

SEQ ID NO: 3740699 - DNA, 25 bp, Homo sapien
cctcaatgcctgtatagtaaataga

SEQ ID NO: 3740700 - DNA, 25 bp, Homo sapien
agataaagcaatccatagtgggctt

SEQ ID NO: 3740701 - DNA, 25 bp, Homo sapien
catagtgggcttctcatagcctgag

SEQ ID NO: 3740702 - DNA, 25 bp, Homo sapien
ttagtcctcaatgcctgtatagtaa

SEQ ID NO: 3740703 - DNA, 25 bp, Homo sapien
acatacccagtgagagatagtcaca

SEQ ID NO: 3740704 - DNA, 25 bp, Homo sapien
aggtatttcatgagagagggccaca

SEQ ID NO: 3740705 - DNA, 25 bp, Homo sapien
catacccagtgagagatagtcacac

SEQ ID NO: 3740706 - DNA, 25 bp, Homo sapien
cctgcagcaggtatttcatgagaga

SEQ ID NO: 3740707 - DNA, 25 bp, Homo sapien
cctgtaccgtcacccttgccaccac

SEQ ID NO: 3740708 - DNA, 25 bp, Homo sapien
tgcttcctgtaccgtcacccttgcc

SEQ ID NO: 3740709 - DNA, 25 bp, Homo sapien
gcttcctgtaccgtcacccttgcca

SEQ ID NO: 3740710 - DNA, 25 bp, Homo sapien
ttcctgtaccgtcacccttgccacc

SEQ ID NO: 3740711 - DNA, 25 bp, Homo sapien
tctgaagcctaaaggaattcgaggt

SEQ ID NO: 3740712 - DNA, 25 bp, Homo sapien
gaatcttgggagatggtctgccagt

SEQ ID NO: 3740713 - DNA, 25 bp, Homo sapien
gttgttgatcaacattcgctttgga

SEQ ID NO: 3740714 - DNA, 25 bp, Homo sapien
caacattcgctttggaaagggtttg

SEQ ID NO: 3740715 - DNA, 25 bp, Homo sapien
gatctcccttgggattatcagtaag

SEQ ID NO: 3740716 - DNA, 25 bp, Homo sapien
tagcttatgctgagagagacatcaa

SEQ ID NO: 3740717 - DNA, 25 bp, Homo sapien
tatagatacccacatagccttctgt

SEQ ID NO: 3740718 - DNA, 25 bp, Homo sapien
ggtaatttggccctgacatgccagt

SEQ ID NO: 3740719 - DNA, 25 bp, Homo sapien
catgccagttcctagtttgagttcc

SEQ ID NO: 3740720 - DNA, 25 bp, Homo sapien
tcacaggtctagtttaacaagtact

SEQ ID NO: 3740721 - DNA, 25 bp, Homo sapien
acttggagttgtgagtcctgaacgc

SEQ ID NO: 3740722 - DNA, 25 bp, Homo sapien
tcctgaacgctagacgaggctgtgt

SEQ ID NO: 3740723 - DNA, 25 bp, Homo sapien
caagtactggtaaaaggttcagagg

SEQ ID NO: 3740724 - DNA, 25 bp, Homo sapien
tccatggaagcacaaaatagacagc

SEQ ID NO: 3740725 - DNA, 25 bp, Homo sapien
aatagacagcagaacctctttttca

SEQ ID NO: 3740726 - DNA, 25 bp, Homo sapien
tcaaatgcctctcttacacggaacc

SEQ ID NO: 3740727 - DNA, 25 bp, Homo sapien
tctccagatggtctacatgtttgct

SEQ ID NO: 3740728 - DNA, 25 bp, Homo sapien
tcccctgaaggctgacaaattgctc

SEQ ID NO: 3740729 - DNA, 25 bp, Homo sapien
agtgaaactgctgggtcttagagga

SEQ ID NO: 3740730 - DNA, 25 bp, Homo sapien
tgtacaagtctctgtgcatataaga

SEQ ID NO: 3740731 - DNA, 25 bp, Homo sapien
gccagcacttgatagcatccacaaa

SEQ ID NO: 3740732 - DNA, 25 bp, Homo sapien
ccaaagagcttggagcaatttgcac

SEQ ID NO: 3740733 - DNA, 25 bp, Homo sapien
tcaacttcactagaggatgccaaat

SEQ ID NO: 3740734 - DNA, 25 bp, Homo sapien
gattcattccagtagatgcttgtag

SEQ ID NO: 3740735 - DNA, 25 bp, Homo sapien
cttaagcatatgtgcgggagcatcc

SEQ ID NO: 3740736 - DNA, 25 bp, Homo sapien
tttttaacacctattatgccatgaa

SEQ ID NO: 3740737 - DNA, 25 bp, Homo sapien
gatcattttccttcacacgtttcag

SEQ ID NO: 3740738 - DNA, 25 bp, Homo sapien
tggcgctttagttgaacccaggtac

SEQ ID NO: 3740739 - DNA, 25 bp, Homo sapien
aacacctattatgccatgaattcat

SEQ ID NO: 3740740 - DNA, 25 bp, Homo sapien
ccatgaattcatagggaataggttc

SEQ ID NO: 3740741 - DNA, 25 bp, Homo sapien
taacacctattatgccatgaattca

SEQ ID NO: 3740742 - DNA, 25 bp, Homo sapien
gtacctgggttcaactaaagcgcca

SEQ ID NO: 3740743 - DNA, 25 bp, Homo sapien
tgaattcatggcataataggtgtta

SEQ ID NO: 3740744 - DNA, 25 bp, Homo sapien
atgaattcatggcataataggtgtt

SEQ ID NO: 3740745 - DNA, 25 bp, Homo sapien
ctgaaacgtgtgaaggaaaatgatc

SEQ ID NO: 3740746 - DNA, 25 bp, Homo sapien
ttcatggcataataggtgttaaaaa

SEQ ID NO: 3740747 - DNA, 25 bp, Homo sapien
gaacctattccctatgaattcatgg

SEQ ID NO: 3740748 - DNA, 25 bp, Homo sapien
gctgaggcagacaaaccatttggct

SEQ ID NO: 3740749 - DNA, 25 bp, Homo sapien
gaggcagacaaaccatttggctttc

SEQ ID NO: 3740750 - DNA, 25 bp, Homo sapien
tgaggcagacaaaccatttggcttt

SEQ ID NO: 3740751 - DNA, 25 bp, Homo sapien
ctgaggcagacaaaccatttggctt

SEQ ID NO: 3740752 - DNA, 25 bp, Homo sapien
gccgaaagggaaagttcattcttga

SEQ ID NO: 3740753 - DNA, 25 bp, Homo sapien
gaaagccaaatggtttgtctgcctc

SEQ ID NO: 3740754 - DNA, 25 bp, Homo sapien
aagccaaatggtttgtctgcctcag

SEQ ID NO: 3740755 - DNA, 25 bp, Homo sapien
aaagccaaatggtttgtctgcctca

SEQ ID NO: 3740756 - DNA, 25 bp, Homo sapien
tcaagaatgaactttccctttcggc

SEQ ID NO: 3740757 - DNA, 25 bp, Homo sapien
agccaaatggtttgtctgcctcagc

SEQ ID NO: 3740758 - DNA, 25 bp, Homo sapien
tcttaattgaggaataagacccaca

SEQ ID NO: 3740759 - DNA, 25 bp, Homo sapien
gaactgagcaatcgctggctcttaa

SEQ ID NO: 3740760 - DNA, 25 bp, Homo sapien
gacatggctttcacgcgcagccaca

SEQ ID NO: 3740761 - DNA, 25 bp, Homo sapien
ctttagaaatgaactcggctgccca

SEQ ID NO: 3740762 - DNA, 25 bp, Homo sapien
gactggctctgatgcccattcctgc

SEQ ID NO: 3740763 - DNA, 25 bp, Homo sapien
tgatgcccattcctgccactcctgc

SEQ ID NO: 3740764 - DNA, 25 bp, Homo sapien
atcagaagcttgtgactggctctga

SEQ ID NO: 3740765 - DNA, 25 bp, Homo sapien
tgtgactggctctgatgcccattcc

SEQ ID NO: 3740766 - DNA, 25 bp, Homo sapien
ctttagtttgcaaggttggctctgt

SEQ ID NO: 3740767 - DNA, 25 bp, Homo sapien
cacagctggaagtggactgagccat

SEQ ID NO: 3740768 - DNA, 25 bp, Homo sapien
tcacagctggaagtggactgagcca

SEQ ID NO: 3740769 - DNA, 25 bp, Homo sapien
gatggctgacccaggcccaaatgtg

SEQ ID NO: 3740770 - DNA, 25 bp, Homo sapien
atggctgacccaggcccaaatgtga

SEQ ID NO: 3740771 - DNA, 25 bp, Homo sapien
tttacagacagcacactggctgctt

SEQ ID NO: 3740772 - DNA, 25 bp, Homo sapien
gtttacagacagcacactggctgct

SEQ ID NO: 3740773 - DNA, 25 bp, Homo sapien
agtttacagacagcacactggctgc

SEQ ID NO: 3740774 - DNA, 25 bp, Homo sapien
gtgcccacaaagtcgcctcttgctt

SEQ ID NO: 3740775 - DNA, 25 bp, Homo sapien
gcccacaaagtcgcctcttgctttt

SEQ ID NO: 3740776 - DNA, 25 bp, Homo sapien
agtgcccacaaagtcgcctcttgct

SEQ ID NO: 3740777 - DNA, 25 bp, Homo sapien
ccacaaagtcgcctcttgctttttt

SEQ ID NO: 3740778 - DNA, 25 bp, Homo sapien
tgtgtttactcagtcctactgtgtt

SEQ ID NO: 3740779 - DNA, 25 bp, Homo sapien
tccatgtctccctgacgtaaaatct

SEQ ID NO: 3740780 - DNA, 25 bp, Homo sapien
tccctgacgtaaaatctgaagttta

SEQ ID NO: 3740781 - DNA, 25 bp, Homo sapien
tgtattgtattgaagattgtgaagc

SEQ ID NO: 3740782 - DNA, 25 bp, Homo sapien
ctgaagtttattagatctagagtat

SEQ ID NO: 3740783 - DNA, 25 bp, Homo sapien
cttcagattctttaccacattattg

SEQ ID NO: 3740784 - DNA, 25 bp, Homo sapien
ttatacaccttctccgggcaaaata

SEQ ID NO: 3740785 - DNA, 25 bp, Homo sapien
ccttctccgggcaaaataacttcag

SEQ ID NO: 3740786 - DNA, 25 bp, Homo sapien
attgaagttatcaattaatccagct

SEQ ID NO: 3740787 - DNA, 25 bp, Homo sapien
cccctgttgttgagagctccctgta

SEQ ID NO: 3740788 - DNA, 25 bp, Homo sapien
gactctattgccttcggccccagca

SEQ ID NO: 3740789 - DNA, 25 bp, Homo sapien
agtttcacatagtctgtgtatgcag

SEQ ID NO: 3740790 - DNA, 25 bp, Homo sapien
ccagctctggggaacgttagtttca

SEQ ID NO: 3740791 - DNA, 25 bp, Homo sapien
cattgatggtagcaggttctgtgtt

SEQ ID NO: 3740792 - DNA, 25 bp, Homo sapien
tgccagagcagaatgcaaccagcct

SEQ ID NO: 3740793 - DNA, 25 bp, Homo sapien
tccgcattgatggtagcaggttctg

SEQ ID NO: 3740794 - DNA, 25 bp, Homo sapien
ctttccgcattgatggtagcaggtt

SEQ ID NO: 3740795 - DNA, 25 bp, Homo sapien
caagacaaacatggggtcacaagag

SEQ ID NO: 3740796 - DNA, 25 bp, Homo sapien
ctgggacaagacaaacatggggtca

SEQ ID NO: 3740797 - DNA, 25 bp, Homo sapien
gacaagacaaacatggggtcacaag

SEQ ID NO: 3740798 - DNA, 25 bp, Homo sapien
gggacaagacaaacatggggtcaca

SEQ ID NO: 3740799 - DNA, 25 bp, Homo sapien
aatgtgtcttctccccaaggatctc

SEQ ID NO: 3740800 - DNA, 25 bp, Homo sapien
acaatgtgtcttctccccaaggatc

SEQ ID NO: 3740801 - DNA, 25 bp, Homo sapien
caatgtgtcttctccccaaggatct

SEQ ID NO: 3740802 - DNA, 25 bp, Homo sapien
gacaatgtgtcttctccccaaggat

SEQ ID NO: 3740803 - DNA, 25 bp, Homo sapien
aaaggatcgtttatctcagtgacgg

SEQ ID NO: 3740804 - DNA, 25 bp, Homo sapien
tctcagtgacggctgatccacaggc

SEQ ID NO: 3740805 - DNA, 25 bp, Homo sapien
taatcaaaaggatcgtttatctcag

SEQ ID NO: 3740806 - DNA, 25 bp, Homo sapien
gtttatctcagtgacggctgatcca

SEQ ID NO: 3740807 - DNA, 25 bp, Homo sapien
aggcacttcctgtccgccttcccta

SEQ ID NO: 3740808 - DNA, 25 bp, Homo sapien
cagcccctaaaccaggcttggggca

SEQ ID NO: 3740809 - DNA, 25 bp, Homo sapien
caagcatctgctgtagttcagagca

SEQ ID NO: 3740810 - DNA, 25 bp, Homo sapien
tgtccgccttccctacaagcatctg

SEQ ID NO: 3740811 - DNA, 25 bp, Homo sapien
ctcactattggggtaatctaaatgg

SEQ ID NO: 3740812 - DNA, 25 bp, Homo sapien
aatgggtcctggcaagcaacagtct

SEQ ID NO: 3740813 - DNA, 25 bp, Homo sapien
tgggtcctggcaagcaacagtctca

SEQ ID NO: 3740814 - DNA, 25 bp, Homo sapien
tcactattggggtaatctaaatggg

SEQ ID NO: 3740815 - DNA, 25 bp, Homo sapien
tctgggctcccacattgagaaccga

SEQ ID NO: 3740816 - DNA, 25 bp, Homo sapien
ctctccctaaaggtctctgccattt

SEQ ID NO: 3740817 - DNA, 25 bp, Homo sapien
catggcattagtccactgggcagga

SEQ ID NO: 3740818 - DNA, 25 bp, Homo sapien
caaatgttgaggttggccatggcat

SEQ ID NO: 3740819 - DNA, 25 bp, Homo sapien
tttccacattactcctggcttgtcc

SEQ ID NO: 3740820 - DNA, 25 bp, Homo sapien
tgtccactttccacattactcctgg

SEQ ID NO: 3740821 - DNA, 25 bp, Homo sapien
ggagcccttggcttccagtggagac

SEQ ID NO: 3740822 - DNA, 25 bp, Homo sapien
agtggagacaaccaaccccagtgtc

SEQ ID NO: 3740823 - DNA, 25 bp, Homo sapien
gcagcaactgtgacctgtccaggca

SEQ ID NO: 3740824 - DNA, 25 bp, Homo sapien
ggacagcctcagattgccagaacac

SEQ ID NO: 3740825 - DNA, 25 bp, Homo sapien
cagcctcagattgccagaacaccat

SEQ ID NO: 3740826 - DNA, 25 bp, Homo sapien
gcaatgtctgaatgggctggggtgg

SEQ ID NO: 3740827 - DNA, 25 bp, Homo sapien
gacagcctcagattgccagaacacc

SEQ ID NO: 3740828 - DNA, 25 bp, Homo sapien
cagaagctctaagccagctggactg

SEQ ID NO: 3740829 - DNA, 25 bp, Homo sapien
gaggagggctgaagcccgtactgca

SEQ ID NO: 3740830 - DNA, 25 bp, Homo sapien
tacagaagctctaagccagctggac

SEQ ID NO: 3740831 - DNA, 25 bp, Homo sapien
aagcccgtactgcaggtttctccgg

SEQ ID NO: 3740832 - DNA, 25 bp, Homo sapien
cagtctcttccgcagtttggctttg

SEQ ID NO: 3740833 - DNA, 25 bp, Homo sapien
gtctcttccgcagtttggctttgcc

SEQ ID NO: 3740834 - DNA, 25 bp, Homo sapien
agtctcttccgcagtttggctttgc

SEQ ID NO: 3740835 - DNA, 25 bp, Homo sapien
tttgccctgtagtgatccatgtgca

SEQ ID NO: 3740836 - DNA, 25 bp, Homo sapien
ctctcctttgccctgtagtgatcca

SEQ ID NO: 3740837 - DNA, 25 bp, Homo sapien
cctttgccctgtagtgatccatgtg

SEQ ID NO: 3740838 - DNA, 25 bp, Homo sapien
tcctttgccctgtagtgatccatgt

SEQ ID NO: 3740839 - DNA, 25 bp, Homo sapien
cacttgcacaagttttgccaagcat

SEQ ID NO: 3740840 - DNA, 25 bp, Homo sapien
tcacttgcacaagttttgccaagca

SEQ ID NO: 3740841 - DNA, 25 bp, Homo sapien
gagaaggggcttatgacacgaggga

SEQ ID NO: 3740842 - DNA, 25 bp, Homo sapien
ggcaagaagagtgcatgggctgttg

SEQ ID NO: 3740843 - DNA, 25 bp, Homo sapien
gagtgcatgggctgttgtgttaggg

SEQ ID NO: 3740844 - DNA, 25 bp, Homo sapien
cttatgacacgagggaagggaggac

SEQ ID NO: 3740845 - DNA, 25 bp, Homo sapien
cagcagaaatagaatgcaggaccag

SEQ ID NO: 3740846 - DNA, 25 bp, Homo sapien
gtttcagagcgggaactaaaggaca

SEQ ID NO: 3740847 - DNA, 25 bp, Homo sapien
ccatagcaggttgtgtgctcttccc

SEQ ID NO: 3740848 - DNA, 25 bp, Homo sapien
aaaggacaagtcttcccatagcagg

SEQ ID NO: 3740849 - DNA, 25 bp, Homo sapien
ggcacctggccctcactattcaagt

SEQ ID NO: 3740850 - DNA, 25 bp, Homo sapien
gctgcctggcatgaacttgatgatg

SEQ ID NO: 3740851 - DNA, 25 bp, Homo sapien
ggcagccagcacagcgacccttatc

SEQ ID NO: 3740852 - DNA, 25 bp, Homo sapien
cgacccttatccacaaagatgcaca

SEQ ID NO: 3740853 - DNA, 25 bp, Homo sapien
cccttatccacaaagatgcacatat

SEQ ID NO: 3740854 - DNA, 25 bp, Homo sapien
attcttgtccaaccccacgatcatt

SEQ ID NO: 3740855 - DNA, 25 bp, Homo sapien
agtccctttggcaaccctgtcatct

SEQ ID NO: 3740856 - DNA, 25 bp, Homo sapien
cacgatcattaaccagtaaaaggga

SEQ ID NO: 3740857 - DNA, 25 bp, Homo sapien
taaaagggagttattctgggtgctc

SEQ ID NO: 3740858 - DNA, 25 bp, Homo sapien
ccccgcctcctagtgcggagccggg

SEQ ID NO: 3740859 - DNA, 25 bp, Homo sapien
ggagggctcagcctaaacctcgcgc

SEQ ID NO: 3740860 - DNA, 25 bp, Homo sapien
ccggccgctggcgatactgcggacc

SEQ ID NO: 3740861 - DNA, 25 bp, Homo sapien
gcctcagggactcccggatccctct

SEQ ID NO: 3740862 - DNA, 25 bp, Homo sapien
ctggtgctctccgcggctcccgcag

SEQ ID NO: 3740863 - DNA, 25 bp, Homo sapien
agctggtgctctccgcggctcccgc

SEQ ID NO: 3740864 - DNA, 25 bp, Homo sapien
agctcccgcggcgtcagctggtgct

SEQ ID NO: 3740865 - DNA, 25 bp, Homo sapien
gcagctcccgcggcgtcagctggtg

SEQ ID NO: 3740866 - DNA, 25 bp, Homo sapien
agactccgaagagcagggctcgcac

SEQ ID NO: 3740867 - DNA, 25 bp, Homo sapien
cgaagactccgaagagcagggctcg

SEQ ID NO: 3740868 - DNA, 25 bp, Homo sapien
gcaccccgatctcaatggccagctc

SEQ ID NO: 3740869 - DNA, 25 bp, Homo sapien
aagagcagggctcgcaccccgatct

SEQ ID NO: 3740870 - DNA, 25 bp, Homo sapien
ctggaagtcaatgagcggtgggtcc

SEQ ID NO: 3740871 - DNA, 25 bp, Homo sapien
gctcaggtctgaaagagagatgtga

SEQ ID NO: 3740872 - DNA, 25 bp, Homo sapien
ggctcaggtctgaaagagagatgtg

SEQ ID NO: 3740873 - DNA, 25 bp, Homo sapien
gatggtgtgaataaatactctggat

SEQ ID NO: 3740874 - DNA, 25 bp, Homo sapien
taaatactctggatgaatttaatcc

SEQ ID NO: 3740875 - DNA, 25 bp, Homo sapien
tccttcttcccagtgaataacacca

SEQ ID NO: 3740876 - DNA, 25 bp, Homo sapien
taacaccagtgttcgggcagaaggc

SEQ ID NO: 3740877 - DNA, 25 bp, Homo sapien
cacagcaatcattagttttaacgta

SEQ ID NO: 3740878 - DNA, 25 bp, Homo sapien
acacagcaatcattagttttaacgt

SEQ ID NO: 3740879 - DNA, 25 bp, Homo sapien
acagcaatcattagttttaacgtac

SEQ ID NO: 3740880 - DNA, 25 bp, Homo sapien
cacctggaccaggtaaagcaccaag

SEQ ID NO: 3740881 - DNA, 25 bp, Homo sapien
gtgccctcaagcaagtcacctggac

SEQ ID NO: 3740882 - DNA, 25 bp, Homo sapien
caatcaaagcgtaccaatgaaggga

SEQ ID NO: 3740883 - DNA, 25 bp, Homo sapien
ctctgtcttgctggaattacaccaa

SEQ ID NO: 3740884 - DNA, 25 bp, Homo sapien
tcttttcattgacctgtatctccac

SEQ ID NO: 3740885 - DNA, 25 bp, Homo sapien
ggcatcttttcattgacctgtatct

SEQ ID NO: 3740886 - DNA, 25 bp, Homo sapien
ttttcattgacctgtatctccacct

SEQ ID NO: 3740887 - DNA, 25 bp, Homo sapien
cattgacctgtatctccacctcagt

SEQ ID NO: 3740888 - DNA, 25 bp, Homo sapien
cagctgcctgaaccgctccttattc

SEQ ID NO: 3740889 - DNA, 25 bp, Homo sapien
agctgcctgaaccgctccttattca

SEQ ID NO: 3740890 - DNA, 25 bp, Homo sapien
gctgcctgaaccgctccttattcat

SEQ ID NO: 3740891 - DNA, 25 bp, Homo sapien
acagctgcctgaaccgctccttatt

SEQ ID NO: 3740892 - DNA, 25 bp, Homo sapien
aatgcatgtctattctcagggagcc

SEQ ID NO: 3740893 - DNA, 25 bp, Homo sapien
gactttgctgggtactcattcgcca

SEQ ID NO: 3740894 - DNA, 25 bp, Homo sapien
catggctgctcaaactggctgctag

SEQ ID NO: 3740895 - DNA, 25 bp, Homo sapien
gatggagctatatcagccctgctgc

SEQ ID NO: 3740896 - DNA, 25 bp, Homo sapien
ctgtggcccctgacactggaaccac

SEQ ID NO: 3740897 - DNA, 25 bp, Homo sapien
tctcctgtgccctcaacacaaggag

SEQ ID NO: 3740898 - DNA, 25 bp, Homo sapien
tggcccctgacactggaaccacaga

SEQ ID NO: 3740899 - DNA, 25 bp, Homo sapien
tgacactggaaccacagaccctttc

SEQ ID NO: 3740900 - DNA, 25 bp, Homo sapien
catgaggcgggtaggtatgttatct

SEQ ID NO: 3740901 - DNA, 25 bp, Homo sapien
caaaggatttttatagagccagatc

SEQ ID NO: 3740902 - DNA, 25 bp, Homo sapien
tatgttatctgattgcaccaaagga

SEQ ID NO: 3740903 - DNA, 25 bp, Homo sapien
gatgactctctggaacggatccaaa

SEQ ID NO: 3740904 - DNA, 25 bp, Homo sapien
ttcaccacacaaataacagccaggg

SEQ ID NO: 3740905 - DNA, 25 bp, Homo sapien
cgccggataattttcaccacacaaa

SEQ ID NO: 3740906 - DNA, 25 bp, Homo sapien
cagtcttgtctgttcgccggataat

SEQ ID NO: 3740907 - DNA, 25 bp, Homo sapien
aagaaggcttccttaatttcagtct

SEQ ID NO: 3740908 - DNA, 25 bp, Homo sapien
caacttccctgtctaatccaaacac

SEQ ID NO: 3740909 - DNA, 25 bp, Homo sapien
tggcaacttccctgtctaatccaaa

SEQ ID NO: 3740910 - DNA, 25 bp, Homo sapien
ttaatagtgtttgtgcagactccat

SEQ ID NO: 3740911 - DNA, 25 bp, Homo sapien
tttaatagtgtttgtgcagactcca

SEQ ID NO: 3740912 - DNA, 25 bp, Homo sapien
cattttcaatataaaatgctgccat

SEQ ID NO: 3740913 - DNA, 25 bp, Homo sapien
acaaaagacaccatggacattttca

SEQ ID NO: 3740914 - DNA, 25 bp, Homo sapien
gacattttcaatataaaatgctgcc

SEQ ID NO: 3740915 - DNA, 25 bp, Homo sapien
ctacaaaagacaccatggacatttt

SEQ ID NO: 3740916 - DNA, 25 bp, Homo sapien
tggaaagcagcggtaaaagaaatcg

SEQ ID NO: 3740917 - DNA, 25 bp, Homo sapien
gcagcggtaaaagaaatcggggcga

SEQ ID NO: 3740918 - DNA, 25 bp, Homo sapien
ctggaaagcagcggtaaaagaaatc

SEQ ID NO: 3740919 - DNA, 25 bp, Homo sapien
cagcggtaaaagaaatcggggcgag

SEQ ID NO: 3740920 - DNA, 25 bp, Homo sapien
tcggacaccagatcggggtcacctg

SEQ ID NO: 3740921 - DNA, 25 bp, Homo sapien
gggaagcttttgcggccctcggaca

SEQ ID NO: 3740922 - DNA, 25 bp, Homo sapien
tgcatttccgagttcatcactccat

SEQ ID NO: 3740923 - DNA, 25 bp, Homo sapien
agatcggggtcacctgtgcaatgca

SEQ ID NO: 3740924 - DNA, 25 bp, Homo sapien
gaaataaactggactgaaggatttg

SEQ ID NO: 3740925 - DNA, 25 bp, Homo sapien
agcttcctctagtgttgcattagac

SEQ ID NO: 3740926 - DNA, 25 bp, Homo sapien
gtacctgtcaggacagtcgctggct

SEQ ID NO: 3740927 - DNA, 25 bp, Homo sapien
aaaagtgcattccagtaggtacctg

SEQ ID NO: 3740928 - DNA, 25 bp, Homo sapien
tttctgggggaggcagccagctcgt

SEQ ID NO: 3740929 - DNA, 25 bp, Homo sapien
ttttctgggggaggcagccagctcg

SEQ ID NO: 3740930 - DNA, 25 bp, Homo sapien
cttttctgggggaggcagccagctc

SEQ ID NO: 3740931 - DNA, 25 bp, Homo sapien
gtttacacatgtggggcaaaagtct

SEQ ID NO: 3740932 - DNA, 25 bp, Homo sapien
tacacatgtggggcaaaagtcttct

SEQ ID NO: 3740933 - DNA, 25 bp, Homo sapien
ggtttacacatgtggggcaaaagtc

SEQ ID NO: 3740934 - DNA, 25 bp, Homo sapien
ttacacatgtggggcaaaagtcttc

SEQ ID NO: 3740935 - DNA, 25 bp, Homo sapien
catggtccctatgacacatttcttg

SEQ ID NO: 3740936 - DNA, 25 bp, Homo sapien
cacattaccacgttcttcataatct

SEQ ID NO: 3740937 - DNA, 25 bp, Homo sapien
atgggtgtcaggctacacacattac

SEQ ID NO: 3740938 - DNA, 25 bp, Homo sapien
tgcacatggtccctatgacacattt

SEQ ID NO: 3740939 - DNA, 25 bp, Homo sapien
tatcaggggtaacaggccaaccata

SEQ ID NO: 3740940 - DNA, 25 bp, Homo sapien
accaagggcttcacaagctccagct

SEQ ID NO: 3740941 - DNA, 25 bp, Homo sapien
tctgagcaccaagggcttcacaagc

SEQ ID NO: 3740942 - DNA, 25 bp, Homo sapien
ggggtaacaggccaaccataacagc

SEQ ID NO: 3740943 - DNA, 25 bp, Homo sapien
gatgcttgtagtcgcacatgcggga

SEQ ID NO: 3740944 - DNA, 25 bp, Homo sapien
ttgcccgccaagtagaacgtcgtga

SEQ ID NO: 3740945 - DNA, 25 bp, Homo sapien
gggacagggcaatcatcatggcgca

SEQ ID NO: 3740946 - DNA, 25 bp, Homo sapien
tcatggcgcagtacaagggcaggat

SEQ ID NO: 3740947 - DNA, 25 bp, Homo sapien
ggaaacaattctgcgggaacatatt

SEQ ID NO: 3740948 - DNA, 25 bp, Homo sapien
tctgcgggaacatattcccagttcc

SEQ ID NO: 3740949 - DNA, 25 bp, Homo sapien
caattctgcgggaacatattcccag

SEQ ID NO: 3740950 - DNA, 25 bp, Homo sapien
tgggaaacaattctgcgggaacata

SEQ ID NO: 3740951 - DNA, 25 bp, Homo sapien
gagctgccggaggctttctcattct

SEQ ID NO: 3740952 - DNA, 25 bp, Homo sapien
attccacttcagagctgccggaggc

SEQ ID NO: 3740953 - DNA, 25 bp, Homo sapien
cacttcagagctgccggaggctttc

SEQ ID NO: 3740954 - DNA, 25 bp, Homo sapien
cagagctgccggaggctttctcatt

SEQ ID NO: 3740955 - DNA, 25 bp, Homo sapien
tctattaatatttcagggctcgata

SEQ ID NO: 3740956 - DNA, 25 bp, Homo sapien
cagggctcgatatcatttctagtca

SEQ ID NO: 3740957 - DNA, 25 bp, Homo sapien
tccacatgtgctgttccgatcctgg

SEQ ID NO: 3740958 - DNA, 25 bp, Homo sapien
tcactcctcctaccgaagccatggt

SEQ ID NO: 3740959 - DNA, 25 bp, Homo sapien
gctgctcaatgcttagaaacgtgca

SEQ ID NO: 3740960 - DNA, 25 bp, Homo sapien
tacgctgctctggaactggacttgg

SEQ ID NO: 3740961 - DNA, 25 bp, Homo sapien
ttttagacatgtccgtgatggcagc

SEQ ID NO: 3740962 - DNA, 25 bp, Homo sapien
cagctggtgatgttctctcaagagc

SEQ ID NO: 3740963 - DNA, 25 bp, Homo sapien
tggtccgtgatgctgtgtccacacc

SEQ ID NO: 3740964 - DNA, 25 bp, Homo sapien
acaccctggcgggttcattccaggc

SEQ ID NO: 3740965 - DNA, 25 bp, Homo sapien
gatcctgcagttgcactggtccgtg

SEQ ID NO: 3740966 - DNA, 25 bp, Homo sapien
tccaggcttgataaccacatgactg

SEQ ID NO: 3740967 - DNA, 25 bp, Homo sapien
aagcagctcacataaacaactctcg

SEQ ID NO: 3740968 - DNA, 25 bp, Homo sapien
caatagagacctcataaaagcagct

SEQ ID NO: 3740969 - DNA, 25 bp, Homo sapien
cattcaggtagttctcaatagagac

SEQ ID NO: 3740970 - DNA, 25 bp, Homo sapien
tgcatctgcagggaataccagccct

SEQ ID NO: 3740971 - DNA, 25 bp, Homo sapien
tcctgtagtattgctggtgtgctgc

SEQ ID NO: 3740972 - DNA, 25 bp, Homo sapien
aaactcagcagacctctggcgggaa

SEQ ID NO: 3740973 - DNA, 25 bp, Homo sapien
ttcccagggatgaaatgaaccttct

SEQ ID NO: 3740974 - DNA, 25 bp, Homo sapien
ggcgggaaggactcaattctctaac

SEQ ID NO: 3740975 - DNA, 25 bp, Homo sapien
gactaacgtagggtttatggcaagc

SEQ ID NO: 3740976 - DNA, 25 bp, Homo sapien
gaggctgggactcgcagactaacgt

SEQ ID NO: 3740977 - DNA, 25 bp, Homo sapien
tatgcaaaaatgaggccgatgactc

SEQ ID NO: 3740978 - DNA, 25 bp, Homo sapien
ccgatgactccacccacaaaggaat

SEQ ID NO: 3740979 - DNA, 25 bp, Homo sapien
tattgtgttatgatgtcagggtggc

SEQ ID NO: 3740980 - DNA, 25 bp, Homo sapien
agatagacgaatcggccaagctccc

SEQ ID NO: 3740981 - DNA, 25 bp, Homo sapien
cagatgtgcccagggcttagtgtcc

SEQ ID NO: 3740982 - DNA, 25 bp, Homo sapien
cagagattgttgtccttcacttgca

SEQ ID NO: 3740983 - DNA, 25 bp, Homo sapien
ttattatgttttacaaccatgaaaa

SEQ ID NO: 3740984 - DNA, 25 bp, Homo sapien
tttattatgttttacaaccatgaaa

SEQ ID NO: 3740985 - DNA, 25 bp, Homo sapien
tccaaatgacttgttgcgctgggtg

SEQ ID NO: 3740986 - DNA, 25 bp, Homo sapien
aaatgacttgttgcgctgggtggcc

SEQ ID NO: 3740987 - DNA, 25 bp, Homo sapien
gacttgttgcgctgggtggccaaca

SEQ ID NO: 3740988 - DNA, 25 bp, Homo sapien
tgacttgttgcgctgggtggccaac

SEQ ID NO: 3740989 - DNA, 25 bp, Homo sapien
taaatttacacttgatggtccagaa

SEQ ID NO: 3740990 - DNA, 25 bp, Homo sapien
tgttcattatggctcctgaggatcc

SEQ ID NO: 3740991 - DNA, 25 bp, Homo sapien
tgaggatcctaccaccagcttcatg

SEQ ID NO: 3740992 - DNA, 25 bp, Homo sapien
tacatggccagtattaggattttcc

SEQ ID NO: 3740993 - DNA, 25 bp, Homo sapien
agaaagtacttgctggcctcacccc

SEQ ID NO: 3740994 - DNA, 25 bp, Homo sapien
gaagaaagtacttgctggcctcacc

SEQ ID NO: 3740995 - DNA, 25 bp, Homo sapien
cctggaatctgaggggttctggtcc

SEQ ID NO: 3740996 - DNA, 25 bp, Homo sapien
gggaagaaagtacttgctggcctca

SEQ ID NO: 3740997 - DNA, 25 bp, Homo sapien
ttagggcccacagttgacccctctg

SEQ ID NO: 3740998 - DNA, 25 bp, Homo sapien
gcccacagttgacccctctgggagt

SEQ ID NO: 3740999 - DNA, 25 bp, Homo sapien
tgggagtctgtttggcaactcagag

SEQ ID NO: 3741000 - DNA, 25 bp, Homo sapien
ccctctgggagtctgtttggcaact

SEQ ID NO: 3741001 - DNA, 25 bp, Homo sapien
gccccagtcacagcggcatgcaggt

SEQ ID NO: 3741002 - DNA, 25 bp, Homo sapien
gattttcaggctgatctggacactc

SEQ ID NO: 3741003 - DNA, 25 bp, Homo sapien
ttcaggctgatctggacactcaaga

SEQ ID NO: 3741004 - DNA, 25 bp, Homo sapien
ttttcaggctgatctggacactcaa

SEQ ID NO: 3741005 - DNA, 25 bp, Homo sapien
aggagcagtgacaaggcagatggca

SEQ ID NO: 3741006 - DNA, 25 bp, Homo sapien
ctgaggagcagtgacaaggcagatg

SEQ ID NO: 3741007 - DNA, 25 bp, Homo sapien
gagcagtgacaaggcagatggcacc

SEQ ID NO: 3741008 - DNA, 25 bp, Homo sapien
gcagtgacaaggcagatggcaccac

SEQ ID NO: 3741009 - DNA, 25 bp, Homo sapien
atggaagattttccaccacgatgga

SEQ ID NO: 3741010 - DNA, 25 bp, Homo sapien
cagaaccccagtgtcggaaggtgtc

SEQ ID NO: 3741011 - DNA, 25 bp, Homo sapien
tccagaaccccagtgtcggaaggtg

SEQ ID NO: 3741012 - DNA, 25 bp, Homo sapien
gcatggaagattttccaccacgatg

SEQ ID NO: 3741013 - DNA, 25 bp, Homo sapien
cacatggctccttgtctcgtggcac

SEQ ID NO: 3741014 - DNA, 25 bp, Homo sapien
tcacatggctccttgtctcgtggca

SEQ ID NO: 3741015 - DNA, 25 bp, Homo sapien
aaattccggtcgtctgctcactggc

SEQ ID NO: 3741016 - DNA, 25 bp, Homo sapien
ttttataacacgtgagcctcaggcc

SEQ ID NO: 3741017 - DNA, 25 bp, Homo sapien
gaaatggaatgaacagcgctctgcc

SEQ ID NO: 3741018 - DNA, 25 bp, Homo sapien
taaagttgtagaccacccataagga

SEQ ID NO: 3741019 - DNA, 25 bp, Homo sapien
taatctagtaatgagattccaacag

SEQ ID NO: 3741020 - DNA, 25 bp, Homo sapien
cgtttacgttcccagttccattctg

SEQ ID NO: 3741021 - DNA, 25 bp, Homo sapien
ctggaacaataatctagtaatgaga

SEQ ID NO: 3741022 - DNA, 25 bp, Homo sapien
aaatctccatcccccttgtgacttt

SEQ ID NO: 3741023 - DNA, 25 bp, Homo sapien
aggaatccagcatttgtagctgaaa

SEQ ID NO: 3741024 - DNA, 25 bp, Homo sapien
tcaaaggaatccagcatttgtagct

SEQ ID NO: 3741025 - DNA, 25 bp, Homo sapien
gaaagatcaaaggaatccagcattt

SEQ ID NO: 3741026 - DNA, 25 bp, Homo sapien
agatcaaaggaatccagcatttgta

SEQ ID NO: 3741027 - DNA, 25 bp, Homo sapien
gggctccctgacaactgctgtctgt

SEQ ID NO: 3741028 - DNA, 25 bp, Homo sapien
tgctgtctgtggagttgagtccatt

SEQ ID NO: 3741029 - DNA, 25 bp, Homo sapien
tccctgacaactgctgtctgtggag

SEQ ID NO: 3741030 - DNA, 25 bp, Homo sapien
tgtggagttgagtccatttcttgcc

SEQ ID NO: 3741031 - DNA, 25 bp, Homo sapien
ggctctctagttggacatcttccct

SEQ ID NO: 3741032 - DNA, 25 bp, Homo sapien
gccctcaggttgatctgagcccttg

SEQ ID NO: 3741033 - DNA, 25 bp, Homo sapien
actgccctcaggttgatctgagccc

SEQ ID NO: 3741034 - DNA, 25 bp, Homo sapien
accgctgcctgtgcggctctctagt

SEQ ID NO: 3741035 - DNA, 25 bp, Homo sapien
tctgtcctgactttggggcaaaacc

SEQ ID NO: 3741036 - DNA, 25 bp, Homo sapien
gcaaagagagggacatccaacctaa

SEQ ID NO: 3741037 - DNA, 25 bp, Homo sapien
gggacatccaacctaagccaagcca

SEQ ID NO: 3741038 - DNA, 25 bp, Homo sapien
gagagggacatccaacctaagccaa

SEQ ID NO: 3741039 - DNA, 25 bp, Homo sapien
ctccgggctctccattgggaggacg

SEQ ID NO: 3741040 - DNA, 25 bp, Homo sapien
gggctctccattgggaggacggctt

SEQ ID NO: 3741041 - DNA, 25 bp, Homo sapien
ttcctccgggctctccattgggagg

SEQ ID NO: 3741042 - DNA, 25 bp, Homo sapien
ggctctccattgggaggacggcttc

SEQ ID NO: 3741043 - DNA, 25 bp, Homo sapien
gttttgcacccagggcaataggacc

SEQ ID NO: 3741044 - DNA, 25 bp, Homo sapien
cagggcaataggaccatagctcccc

SEQ ID NO: 3741045 - DNA, 25 bp, Homo sapien
gatctaggttttgcacccagggcaa

SEQ ID NO: 3741046 - DNA, 25 bp, Homo sapien
gcagatctaggttttgcacccaggg

SEQ ID NO: 3741047 - DNA, 25 bp, Homo sapien
gtcattgagaagaacagtaaaccat

SEQ ID NO: 3741048 - DNA, 25 bp, Homo sapien
agtcattgagaagaacagtaaacca

SEQ ID NO: 3741049 - DNA, 25 bp, Homo sapien
tcattgagaagaacagtaaaccatt

SEQ ID NO: 3741050 - DNA, 25 bp, Homo sapien
cattgagaagaacagtaaaccatta

SEQ ID NO: 3741051 - DNA, 25 bp, Homo sapien
aaatttcttctagcgagcacctcat

SEQ ID NO: 3741052 - DNA, 25 bp, Homo sapien
ttccaggtaggctcgaggcatagga

SEQ ID NO: 3741053 - DNA, 25 bp, Homo sapien
gagattgcacaaattccagacagtg

SEQ ID NO: 3741054 - DNA, 25 bp, Homo sapien
ggctcgaggcataggaaatgcagaa

SEQ ID NO: 3741055 - DNA, 25 bp, Homo sapien
caaagagctgggatatatgtatgcg

SEQ ID NO: 3741056 - DNA, 25 bp, Homo sapien
tatgatgctagtggtcttcgataac

SEQ ID NO: 3741057 - DNA, 25 bp, Homo sapien
tatctctagcaagtgggaacccagt

SEQ ID NO: 3741058 - DNA, 25 bp, Homo sapien
cagacctgggatcagccatgatttc

SEQ ID NO: 3741059 - DNA, 25 bp, Homo sapien
ccacacatcggatgtgccttcttca

SEQ ID NO: 3741060 - DNA, 25 bp, Homo sapien
agacaaaatgccaagccagctccag

SEQ ID NO: 3741061 - DNA, 25 bp, Homo sapien
agactgcgcatctgtggagctagga

SEQ ID NO: 3741062 - DNA, 25 bp, Homo sapien
gattcctcccacacatcggatgtgc

SEQ ID NO: 3741063 - DNA, 25 bp, Homo sapien
ttctcttatagacctgagtcctcct

SEQ ID NO: 3741064 - DNA, 25 bp, Homo sapien
ctgtgcctcctgtgaaacccatttc

SEQ ID NO: 3741065 - DNA, 25 bp, Homo sapien
gcctcctgtgaaacccatttctctt

SEQ ID NO: 3741066 - DNA, 25 bp, Homo sapien
ctcttatagacctgagtcctcctct

SEQ ID NO: 3741067 - DNA, 25 bp, Homo sapien
tcctggcctagatgatctgtagcct

SEQ ID NO: 3741068 - DNA, 25 bp, Homo sapien
tggcctagatgatctgtagccttca

SEQ ID NO: 3741069 - DNA, 25 bp, Homo sapien
aatcctggcctagatgatctgtagc

SEQ ID NO: 3741070 - DNA, 25 bp, Homo sapien
ggcctagatgatctgtagccttcag

SEQ ID NO: 3741071 - DNA, 25 bp, Homo sapien
ctttgagaggagcttggtctccagg

SEQ ID NO: 3741072 - DNA, 25 bp, Homo sapien
tcatcctcagtgactccaccaagag

SEQ ID NO: 3741073 - DNA, 25 bp, Homo sapien
gttttctctcctgatcttcatcctc

SEQ ID NO: 3741074 - DNA, 25 bp, Homo sapien
ctccaggagacagtatgtggttttc

SEQ ID NO: 3741075 - DNA, 25 bp, Homo sapien
ggcagatgtgcacaccagaatgacg

SEQ ID NO: 3741076 - DNA, 25 bp, Homo sapien
tgtgcacaccagaatgacggaagct

SEQ ID NO: 3741077 - DNA, 25 bp, Homo sapien
cacaccagaatgacggaagcttcct

SEQ ID NO: 3741078 - DNA, 25 bp, Homo sapien
ccagaatgacggaagcttcctttag

SEQ ID NO: 3741079 - DNA, 25 bp, Homo sapien
tttggaagccggaacacccacgtgc

SEQ ID NO: 3741080 - DNA, 25 bp, Homo sapien
gcccagtatgtttggaagccggaac

SEQ ID NO: 3741081 - DNA, 25 bp, Homo sapien
cagtgggagcccagtatgtttggaa

SEQ ID NO: 3741082 - DNA, 25 bp, Homo sapien
gtatgtttggaagccggaacaccca

SEQ ID NO: 3741083 - DNA, 25 bp, Homo sapien
aaaggtgtgcagcatgcccaaggga

SEQ ID NO: 3741084 - DNA, 25 bp, Homo sapien
ctaagcacgaatatcacgtggggaa

SEQ ID NO: 3741085 - DNA, 25 bp, Homo sapien
ggtgtgcagcatgcccaagggaccc

SEQ ID NO: 3741086 - DNA, 25 bp, Homo sapien
gcacgaatatcacgtggggaaaggt

SEQ ID NO: 3741087 - DNA, 25 bp, Homo sapien
ttatttcaagattcagctgagattc

SEQ ID NO: 3741088 - DNA, 25 bp, Homo sapien
gctgaggtatctctacagtacttca

SEQ ID NO: 3741089 - DNA, 25 bp, Homo sapien
atttcaagattcagctgagattcca

SEQ ID NO: 3741090 - DNA, 25 bp, Homo sapien
cacagctgctgaggtatctctacag

SEQ ID NO: 3741091 - DNA, 25 bp, Homo sapien
ccaacgtcgttcactcatttctgat

SEQ ID NO: 3741092 - DNA, 25 bp, Homo sapien
acaaaaacaggagctcccaacgtcg

SEQ ID NO: 3741093 - DNA, 25 bp, Homo sapien
caaaaacaggagctcccaacgtcgt

SEQ ID NO: 3741094 - DNA, 25 bp, Homo sapien
aggagctcccaacgtcgttcactca

SEQ ID NO: 3741095 - DNA, 25 bp, Homo sapien
ttgactgcaggtctcctggaccacc

SEQ ID NO: 3741096 - DNA, 25 bp, Homo sapien
cctcatcaatcctgagctggtgaag

SEQ ID NO: 3741097 - DNA, 25 bp, Homo sapien
ctcatcaatcctgagctggtgaagg

SEQ ID NO: 3741098 - DNA, 25 bp, Homo sapien
tcatcaatcctgagctggtgaaggc

SEQ ID NO: 3741099 - DNA, 25 bp, Homo sapien
tgagaggcaagatgaggactattcc

SEQ ID NO: 3741100 - DNA, 25 bp, Homo sapien
tcacactatggtggccccttgggag

SEQ ID NO: 3741101 - DNA, 25 bp, Homo sapien
tgtaatgggcccctgatgcaatggg

SEQ ID NO: 3741102 - DNA, 25 bp, Homo sapien
tgacaggccccaacagatgaatttg

SEQ ID NO: 3741103 - DNA, 25 bp, Homo sapien
gactcatgctcttcaatgcctcaga

SEQ ID NO: 3741104 - DNA, 25 bp, Homo sapien
acctgccatttcctgtgagagccca

SEQ ID NO: 3741105 - DNA, 25 bp, Homo sapien
tgtgagagcccattggctgacactg

SEQ ID NO: 3741106 - DNA, 25 bp, Homo sapien
tgcctcagatcggaagtaacacctg

SEQ ID NO: 3741107 - DNA, 25 bp, Homo sapien
cgtgaaataatcagtactcagaata

SEQ ID NO: 3741108 - DNA, 25 bp, Homo sapien
tccttctgaccactagatggcacat

SEQ ID NO: 3741109 - DNA, 25 bp, Homo sapien
tactagagcgactttaataatctga

SEQ ID NO: 3741110 - DNA, 25 bp, Homo sapien
tcagaatattgcaagtgtctctgag

SEQ ID NO: 3741111 - DNA, 25 bp, Homo sapien
tgcagactgcctgtagccatgtccc

SEQ ID NO: 3741112 - DNA, 25 bp, Homo sapien
ctgccatgtgccgggtgtcaggatg

SEQ ID NO: 3741113 - DNA, 25 bp, Homo sapien
gcagtggtgccagactggcctgcag

SEQ ID NO: 3741114 - DNA, 25 bp, Homo sapien
tgccgggtgtcaggatgcagtggtg

SEQ ID NO: 3741115 - DNA, 25 bp, Homo sapien
ccttctgtttgattgttcttaaaat

SEQ ID NO: 3741116 - DNA, 25 bp, Homo sapien
cagaaccttctgtttgattgttctt

SEQ ID NO: 3741117 - DNA, 25 bp, Homo sapien
cagagctctgtgaagtctaggaagt

SEQ ID NO: 3741118 - DNA, 25 bp, Homo sapien
cactttctcttgtattaagttcttt

SEQ ID NO: 3741119 - DNA, 25 bp, Homo sapien
taaaatctgtagagatcatttagat

SEQ ID NO: 3741120 - DNA, 25 bp, Homo sapien
tctgtagagatcatttagattagaa

SEQ ID NO: 3741121 - DNA, 25 bp, Homo sapien
gctgggcagtttgtaatacagaact

SEQ ID NO: 3741122 - DNA, 25 bp, Homo sapien
ttggtaaaatctgtagagatcattt

SEQ ID NO: 3741123 - DNA, 25 bp, Homo sapien
cttagggaaagagtctgaaggtaca

SEQ ID NO: 3741124 - DNA, 25 bp, Homo sapien
ctttgagtctcatttcccttaggga

SEQ ID NO: 3741125 - DNA, 25 bp, Homo sapien
tgcggaagacagagggaaccatagt

SEQ ID NO: 3741126 - DNA, 25 bp, Homo sapien
gctcaaaatgacaggatgatgtgca

SEQ ID NO: 3741127 - DNA, 25 bp, Homo sapien
ttactgctctgaacgaattcttctc

SEQ ID NO: 3741128 - DNA, 25 bp, Homo sapien
ttccatttctaccctgtgcattact

SEQ ID NO: 3741129 - DNA, 25 bp, Homo sapien
tcatttgaataccattattgagacc

SEQ ID NO: 3741130 - DNA, 25 bp, Homo sapien
taccattattgagaccttccatttc

SEQ ID NO: 3741131 - DNA, 25 bp, Homo sapien
ggcttgcaaatactgagcctcaaaa

SEQ ID NO: 3741132 - DNA, 25 bp, Homo sapien
catggctttagatctgtggaccaag

SEQ ID NO: 3741133 - DNA, 25 bp, Homo sapien
atgcaatcgcagcagcacgacaggg

SEQ ID NO: 3741134 - DNA, 25 bp, Homo sapien
tttgttagggtcatccatgcaatcg

SEQ ID NO: 3741135 - DNA, 25 bp, Homo sapien
gggacctcaacctcacctacaggga

SEQ ID NO: 3741136 - DNA, 25 bp, Homo sapien
cctacagggatgtggactgatccca

SEQ ID NO: 3741137 - DNA, 25 bp, Homo sapien
gacagtggggacctcaacctcacct

SEQ ID NO: 3741138 - DNA, 25 bp, Homo sapien
tcccttaaggtgactgacagtgggg

SEQ ID NO: 3741139 - DNA, 25 bp, Homo sapien
tctctaaggacgctactgctctgca

SEQ ID NO: 3741140 - DNA, 25 bp, Homo sapien
aaaacaatgagtaccaggcttaata

SEQ ID NO: 3741141 - DNA, 25 bp, Homo sapien
ttaaggtccaggcattgactccaga

SEQ ID NO: 3741142 - DNA, 25 bp, Homo sapien
actattcataacaacaaagtcatga

SEQ ID NO: 3741143 - DNA, 25 bp, Homo sapien
tgcttccgttccaaacagagtccgg

SEQ ID NO: 3741144 - DNA, 25 bp, Homo sapien
ggcgccgctgtcaggttcctctaga

SEQ ID NO: 3741145 - DNA, 25 bp, Homo sapien
gattcaagttctacaggctccgggt

SEQ ID NO: 3741146 - DNA, 25 bp, Homo sapien
taggatcctaggttccgcactctcc

SEQ ID NO: 3741147 - DNA, 25 bp, Homo sapien
cgacaccttgaagttcactgtgtag

SEQ ID NO: 3741148 - DNA, 25 bp, Homo sapien
agggtgcgcgccgacaccttgaagt

SEQ ID NO: 3741149 - DNA, 25 bp, Homo sapien
caccgccgccttgttgtgggcgttg

SEQ ID NO: 3741150 - DNA, 25 bp, Homo sapien
accgccgccttgttgtgggcgttga

SEQ ID NO: 3741151 - DNA, 25 bp, Homo sapien
taatccttagtatccacaatgtgcc

SEQ ID NO: 3741152 - DNA, 25 bp, Homo sapien
gaatgttctacacaggaggagcccg

SEQ ID NO: 3741153 - DNA, 25 bp, Homo sapien
taaaaaggaacttgtgccctctgac

SEQ ID NO: 3741154 - DNA, 25 bp, Homo sapien
tagagacccgaggacataaaaagga

SEQ ID NO: 3741155 - DNA, 25 bp, Homo sapien
agagtttgggcagtaatggaatcaa

SEQ ID NO: 3741156 - DNA, 25 bp, Homo sapien
ctaccacaagtgaatgacatccata

SEQ ID NO: 3741157 - DNA, 25 bp, Homo sapien
gacatccataagcaattaaaccttg

SEQ ID NO: 3741158 - DNA, 25 bp, Homo sapien
cagtaatggaatcaatcactaccac

SEQ ID NO: 3741159 - DNA, 25 bp, Homo sapien
tgtcctgttccatcctgccttaatc

SEQ ID NO: 3741160 - DNA, 25 bp, Homo sapien
tccaaacatatgacacaaaaaagtc

SEQ ID NO: 3741161 - DNA, 25 bp, Homo sapien
aattcataaattatgcgcttttctg

SEQ ID NO: 3741162 - DNA, 25 bp, Homo sapien
tgcaaatcatgtatcaatccaaaca

SEQ ID NO: 3741163 - DNA, 25 bp, Homo sapien
taaccgtaagcaatatggtgagcca

SEQ ID NO: 3741164 - DNA, 25 bp, Homo sapien
atcccagacgatgatcttcccattg

SEQ ID NO: 3741165 - DNA, 25 bp, Homo sapien
gcatgctcttggatctcacactgag

SEQ ID NO: 3741166 - DNA, 25 bp, Homo sapien
gacatcagcagaagctaaccgtaag

SEQ ID NO: 3741167 - DNA, 25 bp, Homo sapien
tccatagtttggtgccagtgtcggc

SEQ ID NO: 3741168 - DNA, 25 bp, Homo sapien
tggatagcaagcagtaaatcgcggg

SEQ ID NO: 3741169 - DNA, 25 bp, Homo sapien
aaatcgcgggaagcatcttgattcc

SEQ ID NO: 3741170 - DNA, 25 bp, Homo sapien
gaaagaatgttatctgcatagctct

SEQ ID NO: 3741171 - DNA, 25 bp, Homo sapien
ggccacagactgaatgaaacccttg

SEQ ID NO: 3741172 - DNA, 25 bp, Homo sapien
gagctgcagatatatggactagaca

SEQ ID NO: 3741173 - DNA, 25 bp, Homo sapien
gacatgcttctccacttcgctcagt

SEQ ID NO: 3741174 - DNA, 25 bp, Homo sapien
aaagtaactctctgtccctggctag

SEQ ID NO: 3741175 - DNA, 25 bp, Homo sapien
cagttttattccaatacaattttga

SEQ ID NO: 3741176 - DNA, 25 bp, Homo sapien
tgcattcataacataatgggaatgt

SEQ ID NO: 3741177 - DNA, 25 bp, Homo sapien
caattttgagagcaatatagtgata

SEQ ID NO: 3741178 - DNA, 25 bp, Homo sapien
taactggcaatgttatgcattcata

SEQ ID NO: 3741179 - DNA, 25 bp, Homo sapien
atgaaaacaataccctcgctggtaa

SEQ ID NO: 3741180 - DNA, 25 bp, Homo sapien
gatgaaaacaataccctcgctggta

SEQ ID NO: 3741181 - DNA, 25 bp, Homo sapien
agatgaaaacaataccctcgctggt

SEQ ID NO: 3741182 - DNA, 25 bp, Homo sapien
cttgttatgagctgggctagagtgt

SEQ ID NO: 3741183 - DNA, 25 bp, Homo sapien
tggccagcttgttatgagctgggct

SEQ ID NO: 3741184 - DNA, 25 bp, Homo sapien
tgtgggctggatatgtaaacttttt

SEQ ID NO: 3741185 - DNA, 25 bp, Homo sapien
ctagagtgtgggctggatatgtaaa

SEQ ID NO: 3741186 - DNA, 25 bp, Homo sapien
taaaatctctcgaggatagagcaac

SEQ ID NO: 3741187 - DNA, 25 bp, Homo sapien
gatagagcaacaacatgtgattcct

SEQ ID NO: 3741188 - DNA, 25 bp, Homo sapien
cctttttgaaggcaggtatgccaac

SEQ ID NO: 3741189 - DNA, 25 bp, Homo sapien
gtctgattcacctcaaggtcaagga

SEQ ID NO: 3741190 - DNA, 25 bp, Homo sapien
tgtgcgttctattgcaatcacaccc

SEQ ID NO: 3741191 - DNA, 25 bp, Homo sapien
tgcgttctattgcaatcacacccac

SEQ ID NO: 3741192 - DNA, 25 bp, Homo sapien
aatggaactcctgtgcgttctattg

SEQ ID NO: 3741193 - DNA, 25 bp, Homo sapien
actcctgtgcgttctattgcaatca

SEQ ID NO: 3741194 - DNA, 25 bp, Homo sapien
tgttattataagatcttcgaacacg

SEQ ID NO: 3741195 - DNA, 25 bp, Homo sapien
cctcatttgaagtggtaaaaatgtt

SEQ ID NO: 3741196 - DNA, 25 bp, Homo sapien
ctggttcctcatttgaagtggtaaa

SEQ ID NO: 3741197 - DNA, 25 bp, Homo sapien
gttatacaaccattttcatgtagac

SEQ ID NO: 3741198 - DNA, 25 bp, Homo sapien
gagggcggctgcattctcattgaca

SEQ ID NO: 3741199 - DNA, 25 bp, Homo sapien
tgccatcactcactacgagggcggc

SEQ ID NO: 3741200 - DNA, 25 bp, Homo sapien
tcacactggcttcgtaaatcatagg

SEQ ID NO: 3741201 - DNA, 25 bp, Homo sapien
caggacagcacaccatactgaaggg

SEQ ID NO: 3741202 - DNA, 25 bp, Homo sapien
aaggtctgggagtttattctgtagc

SEQ ID NO: 3741203 - DNA, 25 bp, Homo sapien
gcactcctacaggaattccacagaa

SEQ ID NO: 3741204 - DNA, 25 bp, Homo sapien
caatcatgttatctaaggaaaggtc

SEQ ID NO: 3741205 - DNA, 25 bp, Homo sapien
cactggtgaatataaaggtgacaca

SEQ ID NO: 3741206 - DNA, 25 bp, Homo sapien
cctgaaagcagtcccgtcagcagga

SEQ ID NO: 3741207 - DNA, 25 bp, Homo sapien
ggtggacacatacgaatagcaaact

SEQ ID NO: 3741208 - DNA, 25 bp, Homo sapien
tagcaaactgtggtgcgggcagtcc

SEQ ID NO: 3741209 - DNA, 25 bp, Homo sapien
gaacttgaggtgcacttcccgcaga

SEQ ID NO: 3741210 - DNA, 25 bp, Homo sapien
agtggatgcttaactctttgtgtag

SEQ ID NO: 3741211 - DNA, 25 bp, Homo sapien
tttgtgtagcagaccactggtgaga

SEQ ID NO: 3741212 - DNA, 25 bp, Homo sapien
tgagatggtacaccaggacagaacc

SEQ ID NO: 3741213 - DNA, 25 bp, Homo sapien
gacttcacatgagtggatgcttaac

SEQ ID NO: 3741214 - DNA, 25 bp, Homo sapien
ccctcagagttagtatcccaagtaa

SEQ ID NO: 3741215 - DNA, 25 bp, Homo sapien
aaaatggagtatctttgtatgatca

SEQ ID NO: 3741216 - DNA, 25 bp, Homo sapien
tatctgataagtagtatatccctca

SEQ ID NO: 3741217 - DNA, 25 bp, Homo sapien
acaaagcaggattttagtgttctct

SEQ ID NO: 3741218 - DNA, 25 bp, Homo sapien
ccttcaagtgctttagattatgatt

SEQ ID NO: 3741219 - DNA, 25 bp, Homo sapien
aatgttttgagtttactgctaataa

SEQ ID NO: 3741220 - DNA, 25 bp, Homo sapien
catttttataatacatcgtgaaagt

SEQ ID NO: 3741221 - DNA, 25 bp, Homo sapien
tatatacaaccttcaagtgctttag

SEQ ID NO: 3741222 - DNA, 25 bp, Homo sapien
cattgcattataagcttcaaaggct

SEQ ID NO: 3741223 - DNA, 25 bp, Homo sapien
tagtttcagcctaccagacaaagac

SEQ ID NO: 3741224 - DNA, 25 bp, Homo sapien
tggccagggagagagtcatatgaca

SEQ ID NO: 3741225 - DNA, 25 bp, Homo sapien
aagacacaaactaatgacctaagaa

SEQ ID NO: 3741226 - DNA, 25 bp, Homo sapien
tagtcaaacttgtccattcaatacc

SEQ ID NO: 3741227 - DNA, 25 bp, Homo sapien
aagttcatttctcactaatcccata

SEQ ID NO: 3741228 - DNA, 25 bp, Homo sapien
ctgttggaagatcaaccagttgaag

SEQ ID NO: 3741229 - DNA, 25 bp, Homo sapien
ggtgttgaggtagcaaaagaaagaa

SEQ ID NO: 3741230 - DNA, 25 bp, Homo sapien
ttataaatggcaacatgtttattca

SEQ ID NO: 3741231 - DNA, 25 bp, Homo sapien
tttataaatggcaacatgtttattc

SEQ ID NO: 3741232 - DNA, 25 bp, Homo sapien
ttttataaatggcaacatgtttatt

SEQ ID NO: 3741233 - DNA, 25 bp, Homo sapien
tataaatggcaacatgtttattcaa

SEQ ID NO: 3741234 - DNA, 25 bp, Homo sapien
taagtttctctattcattcagccag

SEQ ID NO: 3741235 - DNA, 25 bp, Homo sapien
gtctgttcaggctaatggtcctcca

SEQ ID NO: 3741236 - DNA, 25 bp, Homo sapien
tacacatgctctcattggttaagat

SEQ ID NO: 3741237 - DNA, 25 bp, Homo sapien
ttcactgggtttaggctttcaattc

SEQ ID NO: 3741238 - DNA, 25 bp, Homo sapien
cagcaacactggactaaagacggga

SEQ ID NO: 3741239 - DNA, 25 bp, Homo sapien
cgggaatgattcctggaagttcagc

SEQ ID NO: 3741240 - DNA, 25 bp, Homo sapien
gagtcagtggacaggtcacttccaa

SEQ ID NO: 3741241 - DNA, 25 bp, Homo sapien
ttccaatgagactagagcagcaaca

SEQ ID NO: 3741242 - DNA, 25 bp, Homo sapien
tgctgtgaaagaatgagttacccgc

SEQ ID NO: 3741243 - DNA, 25 bp, Homo sapien
caattgtctggtgcgaaaactactt

SEQ ID NO: 3741244 - DNA, 25 bp, Homo sapien
gttacccgcaaaggaagttacatga

SEQ ID NO: 3741245 - DNA, 25 bp, Homo sapien
tcaaggacaactgaaggcctaaacg

SEQ ID NO: 3741246 - DNA, 25 bp, Homo sapien
ttaatcatttcgatggcagattcat

SEQ ID NO: 3741247 - DNA, 25 bp, Homo sapien
ctttcaccacgaaaagcaatgctcc

SEQ ID NO: 3741248 - DNA, 25 bp, Homo sapien
taatcatttcgatggcagattcatc

SEQ ID NO: 3741249 - DNA, 25 bp, Homo sapien
tgcctctttcaccacgaaaagcaat

SEQ ID NO: 3741250 - DNA, 25 bp, Homo sapien
cacgagatttcattgtgataacacc

SEQ ID NO: 3741251 - DNA, 25 bp, Homo sapien
tccgaaagtaaataacgattcatgc

SEQ ID NO: 3741252 - DNA, 25 bp, Homo sapien
aaaagattccatatgcattccagca

SEQ ID NO: 3741253 - DNA, 25 bp, Homo sapien
tgggctgcatatcaccatttgctat

SEQ ID NO: 3741254 - DNA, 25 bp, Homo sapien
caacttatgttaaccctcctgaggc

SEQ ID NO: 3741255 - DNA, 25 bp, Homo sapien
gagtggcatagattcaaaccctgat

SEQ ID NO: 3741256 - DNA, 25 bp, Homo sapien
tacagtctcacacaattaggcaagg

SEQ ID NO: 3741257 - DNA, 25 bp, Homo sapien
ggaccatgtgtgaccccaacagaaa

SEQ ID NO: 3741258 - DNA, 25 bp, Homo sapien
tctctaagaagggtacaagtcctaa

SEQ ID NO: 3741259 - DNA, 25 bp, Homo sapien
tcccatagctccaggggtttatctc

SEQ ID NO: 3741260 - DNA, 25 bp, Homo sapien
tctgaatacgactgccaaatactgc

SEQ ID NO: 3741261 - DNA, 25 bp, Homo sapien
caaagcagttattgtagggaagttt

SEQ ID NO: 3741262 - DNA, 25 bp, Homo sapien
aaggatgacttagctatttaggacc

SEQ ID NO: 3741263 - DNA, 25 bp, Homo sapien
tacacagtctgtccatcctctttga

SEQ ID NO: 3741264 - DNA, 25 bp, Homo sapien
ttaggtctttagtcctgtgacactc

SEQ ID NO: 3741265 - DNA, 25 bp, Homo sapien
gtactaatatcaggtaggaagggcc

SEQ ID NO: 3741266 - DNA, 25 bp, Homo sapien
tagtattgcctattcctcgtctcct

SEQ ID NO: 3741267 - DNA, 25 bp, Homo sapien
caatcacagttctcgaaccagggtc

SEQ ID NO: 3741268 - DNA, 25 bp, Homo sapien
tgtcaaagaatcgtccagaagagct

SEQ ID NO: 3741269 - DNA, 25 bp, Homo sapien
tatgtgcacacgataagacaatcac

SEQ ID NO: 3741270 - DNA, 25 bp, Homo sapien
tctgagactacggtctggcgggcca

SEQ ID NO: 3741271 - DNA, 25 bp, Homo sapien
gcgggccatggcctctcgagttgca

SEQ ID NO: 3741272 - DNA, 25 bp, Homo sapien
cttcaagttgtgagatggtgaccac

SEQ ID NO: 3741273 - DNA, 25 bp, Homo sapien
gatcacagatgattcaacaatactc

SEQ ID NO: 3741274 - DNA, 25 bp, Homo sapien
caaatgacagtgtcaagaaacactg

SEQ ID NO: 3741275 - DNA, 25 bp, Homo sapien
cagtgtcaagaaacactgtactgta

SEQ ID NO: 3741276 - DNA, 25 bp, Homo sapien
taatggcacaaatgacagtgtcaag

SEQ ID NO: 3741277 - DNA, 25 bp, Homo sapien
catgatgctaatggcacaaatgaca

SEQ ID NO: 3741278 - DNA, 25 bp, Homo sapien
gcactgtcttttactgagtttcctt

SEQ ID NO: 3741279 - DNA, 25 bp, Homo sapien
atctggtggaatccgagcactgtct

SEQ ID NO: 3741280 - DNA, 25 bp, Homo sapien
cacttggccatcaatatcggtaaat

SEQ ID NO: 3741281 - DNA, 25 bp, Homo sapien
aaatacaaaatgttcccgggcagag

SEQ ID NO: 3741282 - DNA, 25 bp, Homo sapien
caacttaactatgccttcactggat

SEQ ID NO: 3741283 - DNA, 25 bp, Homo sapien
ttccaacttaactatgccttcactg

SEQ ID NO: 3741284 - DNA, 25 bp, Homo sapien
cttaactatgccttcactggatatg

SEQ ID NO: 3741285 - DNA, 25 bp, Homo sapien
ccaacttaactatgccttcactgga

SEQ ID NO: 3741286 - DNA, 25 bp, Homo sapien
gaagagacttctgaaaccaggtcat

SEQ ID NO: 3741287 - DNA, 25 bp, Homo sapien
tttatgagaccccaaagccacctat

SEQ ID NO: 3741288 - DNA, 25 bp, Homo sapien
gaagaactaaggtccctcgtcaaca

SEQ ID NO: 3741289 - DNA, 25 bp, Homo sapien
cgtcaacagccagcattaatgtgca

SEQ ID NO: 3741290 - DNA, 25 bp, Homo sapien
cagactttagacactaacaaagagc

SEQ ID NO: 3741291 - DNA, 25 bp, Homo sapien
gggctgtgctttagtatgcttttag

SEQ ID NO: 3741292 - DNA, 25 bp, Homo sapien
gagctacattgcctatcaatttcaa

SEQ ID NO: 3741293 - DNA, 25 bp, Homo sapien
tagtatgcttttagtcatcaaatcc

SEQ ID NO: 3741294 - DNA, 25 bp, Homo sapien
tgcaggtaatactacccatacttcc

SEQ ID NO: 3741295 - DNA, 25 bp, Homo sapien
tgtatcacctttccaagcgatgcag

SEQ ID NO: 3741296 - DNA, 25 bp, Homo sapien
gatactctgcctttcaagtcccaga

SEQ ID NO: 3741297 - DNA, 25 bp, Homo sapien
ccatatctccaagcactaatgtatc

SEQ ID NO: 3741298 - DNA, 25 bp, Homo sapien
ggtccaagctacacctccacgagtt

SEQ ID NO: 3741299 - DNA, 25 bp, Homo sapien
ggcccatcctcccaagtttaggtga

SEQ ID NO: 3741300 - DNA, 25 bp, Homo sapien
gaatgcttggctcaaggcccatcct

SEQ ID NO: 3741301 - DNA, 25 bp, Homo sapien
gccacatctgacagaaagggcctgc

SEQ ID NO: 3741302 - DNA, 25 bp, Homo sapien
ccaacttcggtgtgtgggtattcct

SEQ ID NO: 3741303 - DNA, 25 bp, Homo sapien
gagcaaaacgaatcttcctcaccca

SEQ ID NO: 3741304 - DNA, 25 bp, Homo sapien
tttttgatttcctttaccaggagca

SEQ ID NO: 3741305 - DNA, 25 bp, Homo sapien
gctccatcattgtacattgctatta

SEQ ID NO: 3741306 - DNA, 25 bp, Homo sapien
taggactctgatgcacccatcatct

SEQ ID NO: 3741307 - DNA, 25 bp, Homo sapien
gatcactttatctgacgtacaccag

SEQ ID NO: 3741308 - DNA, 25 bp, Homo sapien
gcagacttcatagacatctctagga

SEQ ID NO: 3741309 - DNA, 25 bp, Homo sapien
tcatccattctaaagcacgcagact

SEQ ID NO: 3741310 - DNA, 25 bp, Homo sapien
aaagccagcagccttatcactagat

SEQ ID NO: 3741311 - DNA, 25 bp, Homo sapien
ggtcattttactagtcacagattgg

SEQ ID NO: 3741312 - DNA, 25 bp, Homo sapien
gtttgcctaaattctgagtaagcca

SEQ ID NO: 3741313 - DNA, 25 bp, Homo sapien
tatggttgcaaaagacataaggcca

SEQ ID NO: 3741314 - DNA, 25 bp, Homo sapien
cattgctgtttgtcacggattctgc

SEQ ID NO: 3741315 - DNA, 25 bp, Homo sapien
gctaaagttatgtgaggtatgaatc

SEQ ID NO: 3741316 - DNA, 25 bp, Homo sapien
gaggtatgaatcataacacccaggt

SEQ ID NO: 3741317 - DNA, 25 bp, Homo sapien
acggattctgctccatctgggctaa

SEQ ID NO: 3741318 - DNA, 25 bp, Homo sapien
aaggcaagagaggcccttggaacaa

SEQ ID NO: 3741319 - DNA, 25 bp, Homo sapien
catgagaaatgtccaaagaatactg

SEQ ID NO: 3741320 - DNA, 25 bp, Homo sapien
tgagaaatgtccaaagaatactgtc

SEQ ID NO: 3741321 - DNA, 25 bp, Homo sapien
aggagataggggcaccacacaggct

SEQ ID NO: 3741322 - DNA, 25 bp, Homo sapien
tccctttaaatgctggagtacaggc

SEQ ID NO: 3741323 - DNA, 25 bp, Homo sapien
aggcccgagaacccagaggcagcct

SEQ ID NO: 3741324 - DNA, 25 bp, Homo sapien
tctcggctttaaaggctccattccc

SEQ ID NO: 3741325 - DNA, 25 bp, Homo sapien
caattctgtagtgtctctgccttct

SEQ ID NO: 3741326 - DNA, 25 bp, Homo sapien
tagacaatgaattcaactgttcttg

SEQ ID NO: 3741327 - DNA, 25 bp, Homo sapien
gacaatgaattcaactgttcttgga

SEQ ID NO: 3741328 - DNA, 25 bp, Homo sapien
tatcttctaatgaaacatggagtgc

SEQ ID NO: 3741329 - DNA, 25 bp, Homo sapien
gcaagctgagctacaaggatgctcc

SEQ ID NO: 3741330 - DNA, 25 bp, Homo sapien
tcgtctcccgctgtgaggcttcatg

SEQ ID NO: 3741331 - DNA, 25 bp, Homo sapien
gactctaacgggaagcaaacctcta

SEQ ID NO: 3741332 - DNA, 25 bp, Homo sapien
aatgcccttggctctagggagcaca

SEQ ID NO: 3741333 - DNA, 25 bp, Homo sapien
taatttcttagccagacctgtgcac

SEQ ID NO: 3741334 - DNA, 25 bp, Homo sapien
tcccagtacattctgttaaatgccc

SEQ ID NO: 3741335 - DNA, 25 bp, Homo sapien
gcaaaaatgtgttacgctttcccca

SEQ ID NO: 3741336 - DNA, 25 bp, Homo sapien
ctggaacaagaatgccattgttgaa

SEQ ID NO: 3741337 - DNA, 25 bp, Homo sapien
tgaaagtattagctgcctaactact

SEQ ID NO: 3741338 - DNA, 25 bp, Homo sapien
tataggcttacaacagtttttgaaa

SEQ ID NO: 3741339 - DNA, 25 bp, Homo sapien
tttctggtttataggcttacaacag

SEQ ID NO: 3741340 - DNA, 25 bp, Homo sapien
agaatttacacaagacaaggtactt

SEQ ID NO: 3741341 - DNA, 25 bp, Homo sapien
gacaaggtactttaccatgaccctg

SEQ ID NO: 3741342 - DNA, 25 bp, Homo sapien
tacacaagacaaggtactttaccat

SEQ ID NO: 3741343 - DNA, 25 bp, Homo sapien
ttaccatgaccctgaaattataaaa

SEQ ID NO: 3741344 - DNA, 25 bp, Homo sapien
ctgtggaagaaatccggacaaaagt

SEQ ID NO: 3741345 - DNA, 25 bp, Homo sapien
gaagaaatccggacaaaagtgagac

SEQ ID NO: 3741346 - DNA, 25 bp, Homo sapien
aatccggacaaaagtgagacaaaag

SEQ ID NO: 3741347 - DNA, 25 bp, Homo sapien
aacaataaagcatgggggttgatca

SEQ ID NO: 3741348 - DNA, 25 bp, Homo sapien
gatcaagcaacagtttctttatgtc

SEQ ID NO: 3741349 - DNA, 25 bp, Homo sapien
acctctgcaagagagtgaattctgg

SEQ ID NO: 3741350 - DNA, 25 bp, Homo sapien
ttctggatcaagcaacagtttcttt

SEQ ID NO: 3741351 - DNA, 25 bp, Homo sapien
tggatcaagcaacagtttctttatg

SEQ ID NO: 3741352 - DNA, 25 bp, Homo sapien
tcatagcatatatccagtgggttgc

SEQ ID NO: 3741353 - DNA, 25 bp, Homo sapien
ggcattttcacagagcacgtcatag

SEQ ID NO: 3741354 - DNA, 25 bp, Homo sapien
tagtgggcagcgacagtccagaagt

SEQ ID NO: 3741355 - DNA, 25 bp, Homo sapien
cagaagtgcagctccgattcatcac

SEQ ID NO: 3741356 - DNA, 25 bp, Homo sapien
tttctattactgaacagtaacttag

SEQ ID NO: 3741357 - DNA, 25 bp, Homo sapien
gacaaagatataagtaatcaagatg

SEQ ID NO: 3741358 - DNA, 25 bp, Homo sapien
tactgaacagtaacttagtttgaaa

SEQ ID NO: 3741359 - DNA, 25 bp, Homo sapien
gtaatcaagatgacagctctaaagg

SEQ ID NO: 3741360 - DNA, 25 bp, Homo sapien
caacgcagtaactgtctatgagctt

SEQ ID NO: 3741361 - DNA, 25 bp, Homo sapien
aacaacgcagtaactgtctatgagc

SEQ ID NO: 3741362 - DNA, 25 bp, Homo sapien
taaacaacgcagtaactgtctatga

SEQ ID NO: 3741363 - DNA, 25 bp, Homo sapien
cgcagtaactgtctatgagcttttc

SEQ ID NO: 3741364 - DNA, 25 bp, Homo sapien
tgatagatattatcacttggatgca

SEQ ID NO: 3741365 - DNA, 25 bp, Homo sapien
agaaaaattaagcctggattataag

SEQ ID NO: 3741366 - DNA, 25 bp, Homo sapien
gaaaaattaagcctggattataaga

SEQ ID NO: 3741367 - DNA, 25 bp, Homo sapien
ccaagagcagtagctggtctgtaca

SEQ ID NO: 3741368 - DNA, 25 bp, Homo sapien
tgatcataagttgaccgtttcactt

SEQ ID NO: 3741369 - DNA, 25 bp, Homo sapien
gcagattaaccctttctagctgaaa

SEQ ID NO: 3741370 - DNA, 25 bp, Homo sapien
tcacttcctgcagattaaccctttc

SEQ ID NO: 3741371 - DNA, 25 bp, Homo sapien
tgccaccaacttaatggtgctctga

SEQ ID NO: 3741372 - DNA, 25 bp, Homo sapien
gcaatcatattcgttgccaccaact

SEQ ID NO: 3741373 - DNA, 25 bp, Homo sapien
aatgctggttatctgcacttgtttc

SEQ ID NO: 3741374 - DNA, 25 bp, Homo sapien
cagtagtgactaaacaggctttcag

SEQ ID NO: 3741375 - DNA, 25 bp, Homo sapien
tgtctgcaggtagcggcaggcgtct

SEQ ID NO: 3741376 - DNA, 25 bp, Homo sapien
attccactcgccgtatgtctgcagg

SEQ ID NO: 3741377 - DNA, 25 bp, Homo sapien
atgcagcccgattccactcgccgta

SEQ ID NO: 3741378 - DNA, 25 bp, Homo sapien
cgccgtatgtctgcaggtagcggca

SEQ ID NO: 3741379 - DNA, 25 bp, Homo sapien
tctgccacgctaaaaaagcagccca

SEQ ID NO: 3741380 - DNA, 25 bp, Homo sapien
tgtggagaacaaaggtggtcaaccc

SEQ ID NO: 3741381 - DNA, 25 bp, Homo sapien
gagagcctttgatttctgattgact

SEQ ID NO: 3741382 - DNA, 25 bp, Homo sapien
ttaaaacatcggcacactcctcagg

SEQ ID NO: 3741383 - DNA, 25 bp, Homo sapien
gcagcccatgtgaactctcggttta

SEQ ID NO: 3741384 - DNA, 25 bp, Homo sapien
atgaagtgactgctcacgggcaggc

SEQ ID NO: 3741385 - DNA, 25 bp, Homo sapien
ctagaaccgcgagagaacatgaagt

SEQ ID NO: 3741386 - DNA, 25 bp, Homo sapien
gagcagcccatgtgaactctcggtt

SEQ ID NO: 3741387 - DNA, 25 bp, Homo sapien
cctagaccgaatgaagatgtaatga

SEQ ID NO: 3741388 - DNA, 25 bp, Homo sapien
gaatacggacagttccattctcctt

SEQ ID NO: 3741389 - DNA, 25 bp, Homo sapien
agtaggaaactagcatagctcctag

SEQ ID NO: 3741390 - DNA, 25 bp, Homo sapien
gatgtaatgaatacggacagttcca

SEQ ID NO: 3741391 - DNA, 25 bp, Homo sapien
agcagcatcgaagggtataaagaca

SEQ ID NO: 3741392 - DNA, 25 bp, Homo sapien
gatatgacaagtgcccatgtacccc

SEQ ID NO: 3741393 - DNA, 25 bp, Homo sapien
tctagtcaaagctgaatggacccca

SEQ ID NO: 3741394 - DNA, 25 bp, Homo sapien
tgtacccctgtccagagttgacaag

SEQ ID NO: 3741395 - DNA, 25 bp, Homo sapien
acaaataaggctgctctatcaaagt

SEQ ID NO: 3741396 - DNA, 25 bp, Homo sapien
aaggctgctctatcaaagtatctca

SEQ ID NO: 3741397 - DNA, 25 bp, Homo sapien
ttcaaatgctccatacttgaggcaa

SEQ ID NO: 3741398 - DNA, 25 bp, Homo sapien
caaatgctccatacttgaggcaagc

SEQ ID NO: 3741399 - DNA, 25 bp, Homo sapien
tttcttcctcgtcactacaaacaac

SEQ ID NO: 3741400 - DNA, 25 bp, Homo sapien
ggaaattccaaaacccatgcatgtc

SEQ ID NO: 3741401 - DNA, 25 bp, Homo sapien
agggaaattccaaaacccatgcatg

SEQ ID NO: 3741402 - DNA, 25 bp, Homo sapien
taagggaaattccaaaacccatgca

SEQ ID NO: 3741403 - DNA, 25 bp, Homo sapien
gaaattccaaaacccatgcatgtca

SEQ ID NO: 3741404 - DNA, 25 bp, Homo sapien
taggctcagccttcagtttaatttt

SEQ ID NO: 3741405 - DNA, 25 bp, Homo sapien
actgaaccagtcaccttcccagtga

SEQ ID NO: 3741406 - DNA, 25 bp, Homo sapien
tttaaacagcctattgggtactctg

SEQ ID NO: 3741407 - DNA, 25 bp, Homo sapien
ctgtgctgatgctttgatcctcaaa

SEQ ID NO: 3741408 - DNA, 25 bp, Homo sapien
catagtaggccatgtctcagtctgt

SEQ ID NO: 3741409 - DNA, 25 bp, Homo sapien
tacctttcgtaccagctgagtccaa

SEQ ID NO: 3741410 - DNA, 25 bp, Homo sapien
cagagggtgattcccggccatagta

SEQ ID NO: 3741411 - DNA, 25 bp, Homo sapien
cacaggagacttttcgcgggcagag

SEQ ID NO: 3741412 - DNA, 25 bp, Homo sapien
ggtgagtcgcgtctgctctgctggc

SEQ ID NO: 3741413 - DNA, 25 bp, Homo sapien
aagaagagtaaaaagggctgtgatg

SEQ ID NO: 3741414 - DNA, 25 bp, Homo sapien
agaagagtaaaaagggctgtgatga

SEQ ID NO: 3741415 - DNA, 25 bp, Homo sapien
caggaagggtgagtcgcgtctgctc

SEQ ID NO: 3741416 - DNA, 25 bp, Homo sapien
gctccggcttttgaagcaaagagaa

SEQ ID NO: 3741417 - DNA, 25 bp, Homo sapien
tcactcttcaatgggttcttccttg

SEQ ID NO: 3741418 - DNA, 25 bp, Homo sapien
ctgcatatatagcagtgatgagttt

SEQ ID NO: 3741419 - DNA, 25 bp, Homo sapien
tcaaactccgggcataatctgcata

SEQ ID NO: 3741420 - DNA, 25 bp, Homo sapien
gcttttgggcacacatagtcttaga

SEQ ID NO: 3741421 - DNA, 25 bp, Homo sapien
tcttagaacagtggtcaaacagctc

SEQ ID NO: 3741422 - DNA, 25 bp, Homo sapien
tgagaccaacgcaggatacaaactt

SEQ ID NO: 3741423 - DNA, 25 bp, Homo sapien
tcatcctggactgtgacggtggcca

SEQ ID NO: 3741424 - DNA, 25 bp, Homo sapien
tctccaaaagctgtgcactaagcca

SEQ ID NO: 3741425 - DNA, 25 bp, Homo sapien
actaagccacattcccactcgggaa

SEQ ID NO: 3741426 - DNA, 25 bp, Homo sapien
ttcccactcgggaactcagaggtag

SEQ ID NO: 3741427 - DNA, 25 bp, Homo sapien
ggaactcagaggtagacttgcccgg

SEQ ID NO: 3741428 - DNA, 25 bp, Homo sapien
gaatatcaccagagatcacctgttc

SEQ ID NO: 3741429 - DNA, 25 bp, Homo sapien
tgtttataccgagctgccgtgcctg

SEQ ID NO: 3741430 - DNA, 25 bp, Homo sapien
tgtccccgtgggagtcctaactgct

SEQ ID NO: 3741431 - DNA, 25 bp, Homo sapien
gattttcagtggtgtctcgaccagg

SEQ ID NO: 3741432 - DNA, 25 bp, Homo sapien
agtaattctcagtcttattcccaat

SEQ ID NO: 3741433 - DNA, 25 bp, Homo sapien
cagctgcttgtttcagctcgtgaag

SEQ ID NO: 3741434 - DNA, 25 bp, Homo sapien
gtaattctcagtcttattcccaatt

SEQ ID NO: 3741435 - DNA, 25 bp, Homo sapien
tttcagctgcttgtttcagctcgtg

SEQ ID NO: 3741436 - DNA, 25 bp, Homo sapien
gctactacgtccaaagcaatgatta

SEQ ID NO: 3741437 - DNA, 25 bp, Homo sapien
agggacatgaggcttgtatgaatct

SEQ ID NO: 3741438 - DNA, 25 bp, Homo sapien
ctgtgtgagagggacatgaggcttg

SEQ ID NO: 3741439 - DNA, 25 bp, Homo sapien
agaacaaaatgtcctgctactacgt

SEQ ID NO: 3741440 - DNA, 25 bp, Homo sapien
ggaacaggaacagcagaggccgcat

SEQ ID NO: 3741441 - DNA, 25 bp, Homo sapien
acaggaacaggaacagcagaggccg

SEQ ID NO: 3741442 - DNA, 25 bp, Homo sapien
caggaacaggaacaggaacagcaga

SEQ ID NO: 3741443 - DNA, 25 bp, Homo sapien
aggaacaggaacaggaacagcagag

SEQ ID NO: 3741444 - DNA, 25 bp, Homo sapien
ctttgtttcccaggcaggaggagac

SEQ ID NO: 3741445 - DNA, 25 bp, Homo sapien
gactttgtttcccaggcaggaggag

SEQ ID NO: 3741446 - DNA, 25 bp, Homo sapien
ctggagagactttgtttcccaggca

SEQ ID NO: 3741447 - DNA, 25 bp, Homo sapien
ggagagactttgtttcccaggcagg

SEQ ID NO: 3741448 - DNA, 25 bp, Homo sapien
ggatcaggggcataaggcagcaaaa

SEQ ID NO: 3741449 - DNA, 25 bp, Homo sapien
caataagtacttggagcttggtggt

SEQ ID NO: 3741450 - DNA, 25 bp, Homo sapien
tcaggggcataaggcagcaaaagga

SEQ ID NO: 3741451 - DNA, 25 bp, Homo sapien
gccccaactctggtattcccaatga

SEQ ID NO: 3741452 - DNA, 25 bp, Homo sapien
caaccgtgctgattgccgacagagc

SEQ ID NO: 3741453 - DNA, 25 bp, Homo sapien
cctgcaatctggaaacggtgctgca

SEQ ID NO: 3741454 - DNA, 25 bp, Homo sapien
tgagacggttctaaacgagccctgc

SEQ ID NO: 3741455 - DNA, 25 bp, Homo sapien
ccaaggcagctcagtgtcatcacag

SEQ ID NO: 3741456 - DNA, 25 bp, Homo sapien
tcccagtgtcctggtcgttccctgg

SEQ ID NO: 3741457 - DNA, 25 bp, Homo sapien
ccagtgtcctggtcgttccctggcc

SEQ ID NO: 3741458 - DNA, 25 bp, Homo sapien
agtgtcctggtcgttccctggcctt

SEQ ID NO: 3741459 - DNA, 25 bp, Homo sapien
cagtgtcctggtcgttccctggcct

SEQ ID NO: 3741460 - DNA, 25 bp, Homo sapien
gactgggggatgaagcatctctggg

SEQ ID NO: 3741461 - DNA, 25 bp, Homo sapien
ctggggagttccacctgggacactg

SEQ ID NO: 3741462 - DNA, 25 bp, Homo sapien
tctctggggactaggagtgcctcca

SEQ ID NO: 3741463 - DNA, 25 bp, Homo sapien
tgtggactgggggatgaagcatctc

SEQ ID NO: 3741464 - DNA, 25 bp, Homo sapien
ggagcgagcactgtcatttgctggc

SEQ ID NO: 3741465 - DNA, 25 bp, Homo sapien
caggagcgagcactgtcatttgctg

SEQ ID NO: 3741466 - DNA, 25 bp, Homo sapien
ccattgtcaggagcgagcactgtca

SEQ ID NO: 3741467 - DNA, 25 bp, Homo sapien
ggtgccattgtcaggagcgagcact

SEQ ID NO: 3741468 - DNA, 25 bp, Homo sapien
ctgagaccagcgttggaatgagtag

SEQ ID NO: 3741469 - DNA, 25 bp, Homo sapien
cagcgttggaatgagtagtggccac

SEQ ID NO: 3741470 - DNA, 25 bp, Homo sapien
agtagatcaaacagtggaaggtggc

SEQ ID NO: 3741471 - DNA, 25 bp, Homo sapien
caggattcctgagtagatcaaacag

SEQ ID NO: 3741472 - DNA, 25 bp, Homo sapien
cgtcagtaacaagggccaaggtctc

SEQ ID NO: 3741473 - DNA, 25 bp, Homo sapien
tcatggccgactcgcctctctgaag

SEQ ID NO: 3741474 - DNA, 25 bp, Homo sapien
tccacagttggagccgataagcatg

SEQ ID NO: 3741475 - DNA, 25 bp, Homo sapien
ggaagccacgttccagccctgtgtc

SEQ ID NO: 3741476 - DNA, 25 bp, Homo sapien
tcggaaacagctaccagggactctg

SEQ ID NO: 3741477 - DNA, 25 bp, Homo sapien
tcccaatccgggaagtccaggtcag

SEQ ID NO: 3741478 - DNA, 25 bp, Homo sapien
tctaaaagccccatacagaggtcgg

SEQ ID NO: 3741479 - DNA, 25 bp, Homo sapien
tcgggaaacgcctggatgagaccac

SEQ ID NO: 3741480 - DNA, 25 bp, Homo sapien
aatgtggctacaaggcaatgagaca

SEQ ID NO: 3741481 - DNA, 25 bp, Homo sapien
tcacagtagtcccttagaaggctgt

SEQ ID NO: 3741482 - DNA, 25 bp, Homo sapien
gatggttaccaaagaaaagtgcaat

SEQ ID NO: 3741483 - DNA, 25 bp, Homo sapien
cattgtttgctggagtcggctttca

SEQ ID NO: 3741484 - DNA, 25 bp, Homo sapien
gtgatctgctcaccttggcccccta

SEQ ID NO: 3741485 - DNA, 25 bp, Homo sapien
gtagctgggatgacaagcataaacc

SEQ ID NO: 3741486 - DNA, 25 bp, Homo sapien
agctgggatgacaagcataaaccac

SEQ ID NO: 3741487 - DNA, 25 bp, Homo sapien
gggatgacaagcataaaccaccaag

SEQ ID NO: 3741488 - DNA, 25 bp, Homo sapien
gagacatacagaatgagccctttgc

SEQ ID NO: 3741489 - DNA, 25 bp, Homo sapien
catgggaccaagttccagtcaagga

SEQ ID NO: 3741490 - DNA, 25 bp, Homo sapien
ggtggagcagcaacaacttagaagg

SEQ ID NO: 3741491 - DNA, 25 bp, Homo sapien
taaggtcatagagtggagaccccat

SEQ ID NO: 3741492 - DNA, 25 bp, Homo sapien
tgcagcccgcagccttctgacctgg

SEQ ID NO: 3741493 - DNA, 25 bp, Homo sapien
ctgcagcccgcagccttctgacctg

SEQ ID NO: 3741494 - DNA, 25 bp, Homo sapien
gcagcccgcagccttctgacctggg

SEQ ID NO: 3741495 - DNA, 25 bp, Homo sapien
tcctccttcacctcagtgcagggca

SEQ ID NO: 3741496 - DNA, 25 bp, Homo sapien
ctcctccttcacctcagtgcagggc

SEQ ID NO: 3741497 - DNA, 25 bp, Homo sapien
cctccttcacctcagtgcagggcat

SEQ ID NO: 3741498 - DNA, 25 bp, Homo sapien
gcctgagaacattcggagaccggta

SEQ ID NO: 3741499 - DNA, 25 bp, Homo sapien
actccgagagtgctgaacctgtcca

SEQ ID NO: 3741500 - DNA, 25 bp, Homo sapien
caatgagaagtgaacgagaaagcgt

SEQ ID NO: 3741501 - DNA, 25 bp, Homo sapien
tccacgcggcggaaggagttgcaat

SEQ ID NO: 3741502 - DNA, 25 bp, Homo sapien
caataggtccttttaatacatacca

SEQ ID NO: 3741503 - DNA, 25 bp, Homo sapien
cccaggagactctattaagctccca

SEQ ID NO: 3741504 - DNA, 25 bp, Homo sapien
gggagcccccaggagactctattaa

SEQ ID NO: 3741505 - DNA, 25 bp, Homo sapien
tttaatacataccagggagctgcaa

SEQ ID NO: 3741506 - DNA, 25 bp, Homo sapien
gatgccattgaaaaggaatagtgct

SEQ ID NO: 3741507 - DNA, 25 bp, Homo sapien
ccattgaaaaggaatagtgctacac

SEQ ID NO: 3741508 - DNA, 25 bp, Homo sapien
tgccattgaaaaggaatagtgctac

SEQ ID NO: 3741509 - DNA, 25 bp, Homo sapien
cattgaaaaggaatagtgctacact

SEQ ID NO: 3741510 - DNA, 25 bp, Homo sapien
aaacaatacaggagagggacagccc

SEQ ID NO: 3741511 - DNA, 25 bp, Homo sapien
cagtgccagtactccagaattccca

SEQ ID NO: 3741512 - DNA, 25 bp, Homo sapien
tgcagccacgatgcttcagatttgc

SEQ ID NO: 3741513 - DNA, 25 bp, Homo sapien
cagccaatgtacttcagagccaggg

SEQ ID NO: 3741514 - DNA, 25 bp, Homo sapien
tgcctttgggtgaaagtaggagccc

SEQ ID NO: 3741515 - DNA, 25 bp, Homo sapien
caggccagtcacagattagggtaat

SEQ ID NO: 3741516 - DNA, 25 bp, Homo sapien
gcaattgggatgcagttcagtgcct

SEQ ID NO: 3741517 - DNA, 25 bp, Homo sapien
gctcccatgagagacagctttgtct

SEQ ID NO: 3741518 - DNA, 25 bp, Homo sapien
ctctttcaagggagattccagcagg

SEQ ID NO: 3741519 - DNA, 25 bp, Homo sapien
ggcacctagtggagtttcagcaaga

SEQ ID NO: 3741520 - DNA, 25 bp, Homo sapien
attccagcagggcacctagtggagt

SEQ ID NO: 3741521 - DNA, 25 bp, Homo sapien
cagcagggcacctagtggagtttca

SEQ ID NO: 3741522 - DNA, 25 bp, Homo sapien
tgcaaccaccatccaaattggtgtg

SEQ ID NO: 3741523 - DNA, 25 bp, Homo sapien
ggaacgcattgctgcaaatttccaa

SEQ ID NO: 3741524 - DNA, 25 bp, Homo sapien
tccaagacttcatggtcggaacgca

SEQ ID NO: 3741525 - DNA, 25 bp, Homo sapien
caaattggtgtgtccaagacttcat
